United States Patent Application Publication US 2023/0026259 A1 - sequence listing, part 2

SEQ ID NO: 4132 - protein, 205 aa, Homo sapiens
  Payload ID: 928;
  Gene Symbol: ACER3;
  Gene Name: alkaline ceramidase 3;
  ENSP ID: ENSP00000435733
MIIPPMFGAVQSVRDGLEKRYIASYLALTVVGMGSWCFHMTLKYEMQLLDELPMIYSCCIFVYCMFECFKIKNSVNYHLLFTLVLFSLIVTTVYLKVKEPIFHQVMYGMLVFTLVLRSIYIVTWVYPWLRGLGYTSLGIFLLGFLFWNIDNIFCESLRNFRKKVPPIIGITTQFHAWWHILTGLGSYLHILFSLYTRTLYLRYRP

SEQ ID NO: 4133 - protein, 230 aa, Homo sapiens
  Payload ID: 928;
  Gene Symbol: ACER3;
  Gene Name: alkaline ceramidase 3;
  ENSP ID: ENSP00000436252
MAPAADREGYWGPTTSTLDWCEENYSVTWYIAEFLVGMGSWCFHMTLKYEMQLLDELPMIYSCCIFVYCMFECFKIKNSVNYHLLFTLVLFSLIVTTVYLKVKEPIFHQVMYGMLVFTLVLRSIYIVTWVYPWLRGLGYTSLGIFLLGFLFWNIDNIFCESLRNFRKKVPPIIGITTQFHAWWHILTGLGSYLHILFSLYTRTLYLRYRPKVKFLFGIWPVILFEPLRKH

SEQ ID NO: 4134 - protein, 528 aa, Homo sapiens
  Payload ID: 929;
  Gene Symbol: ALPI;
  Gene Name: alkaline phosphatase, intestinal;
  Uniprot ID:  P09923;
  ENSP ID: ENSP00000295463
MQGPWVLLLLGLRLQLSLGVIPAEEENPAFWNRQAAEALDAAKKLQPIQKVAKNLILFLGDGLGVPTVTATRILKGQKNGKLGPETPLAMDRFPYLALSKTYNVDRQVPDSAATATAYLCGVKANFQTIGLSAAARFNQCNTTRGNEVISVMNRAKQAGKSVGVVTTTRVQHASPAGTYAHTVNRNWYSDADMPASARQEGCQDIATQLISNMDIDVILGGGRKYMFPMGTPDPEYPADASQNGIRLDGKNLVQEWLAKHQGAWYVWNRTELMQASLDQSVTHLMGLFEPGDTKYEIHRDPTLDPSLMEMTEAALRLLSRNPRGFYLFVEGGRIDHGHHEGVAYQALTEAVMFDDAIERAGQLTSEEDTLTLVTADHSHVFSFGGYTLRGSSIFGLAPSKAQDSKAYTSILYGNGPGYVFNSGVRPDVNESESGSPDYQQQAAVPLSSETHGGEDVAVFARGPQAHLVHGVQEQSFVAHVMAFAACLEPYTACDLAPPACTTDAAHPVAASLPLLAGTLLLLGASAAP

SEQ ID NO: 4135 - protein, 50 aa, Homo sapiens
  Payload ID: 929;
  Gene Symbol: ALPI;
  Gene Name: alkaline phosphatase, intestinal;
  ENSP ID: ENSP00000413068
MQGPWVLLLLGLRLQLSLGVIPGNEAPQAVPHTGHPLSQADLISTLPLAS

SEQ ID NO: 4136 - protein, 216 aa, Homo sapiens
  Payload ID: 930;
  Gene Symbol: ALPL;
  Gene Name: alkaline phosphatase, liver/bone/kidney;
  ENSP ID: ENSP00000363963
  MOD_RES (1)..(1): Any amino acid
XHSHFIWNRTELLTLDPHNVDYLLGGRIDHGHHEGKAKQALHEAVEMDRAIGQAGSLTSSEDTLTVVTADHSHVFTFGGYTPRGNSIFGLAPMLSDTDKKPFTAILYGNGPGYKVVGGERENVSMVDYAHNNYQAQSAVPLRHETHGGEDVAVFSKGPMAHLLHGVHEQNYVPHVMAYAACIGANLGHCAPASSAGSLAAGPLLLALALYPLSVLF

SEQ ID NO: 4137 - protein, 524 aa, Homo sapiens
  Payload ID: 930;
  Gene Symbol: ALPL;
  Gene Name: alkaline phosphatase, liver/bone/kidney;
  Uniprot ID:  P05186;
  ENSP ID: ENSP00000363965
MISPFLVLAIGTCLTNSLVPEKEKDPKYWRDQAQETLKYALELQKLNTNVAKNVIMFLGDGMGVSTVTAARILKGQLHHNPGEETRLEMDKFPFVALSKTYNTNAQVPDSAGTATAYLCGVKANEGTVGVSAATERSRCNTTQGNEVTSILRWAKDAGKSVGIVTTTRVNHATPSAAYAHSADRDWYSDNEMPPEALSQGCKDIAYQLMHNIRDIDVIMGGGRKYMYPKNKTDVEYESDEKARGTRLDGLDLVDTWKSFKPRYKHSHFIWNRTELLTLDPHNVDYLLGLFEPGDMQYELNRNNVTDPSLSEMVVVAIQILRKNPKGFFLLVEGGRIDHGHHEGKAKQALHEAVEMDRAIGQAGSLTSSEDTLTVVTADHSHVFTFGGYTPRGNSIFGLAPMLSDTDKKPFTAILYGNGPGYKVVGGERENVSMVDYAHNNYQAQSAVPLRHETHGGEDVAVFSKGPMAHLLHGVHEQNYVPHVMAYAACIGANLGHCAPASSAGSLAAGPLLLALALYPLSVLF

SEQ ID NO: 4138 - protein, 524 aa, Homo sapiens; identical to SEQ ID NO: 4137
  Payload ID: 930;
  Gene Symbol: ALPL;
  Gene Name: alkaline phosphatase, liver/bone/kidney;
  Uniprot ID:  P05186;
  ENSP ID: ENSP00000363973

SEQ ID NO: 4139 - protein, 447 aa, Homo sapiens
  Payload ID: 930;
  Gene Symbol: ALPL;
  Gene Name: alkaline phosphatase, liver/bone/kidney;
  Uniprot ID:  P05186;
  ENSP ID: ENSP00000437674
MPWSFRSSTPTWLRMSSCSWEMTYNTNAQVPDSAGTATAYLCGVKANEGTVGVSAATERSRCNTTQGNEVTSILRWAKDAGKSVGIVTTTRVNHATPSAAYAHSADRDWYSDNEMPPEALSQGCKDIAYQLMHNIRDIDVIMGGGRKYMYPKNKTDVEYESDEKARGTRLDGLDLVDTWKSFKPRYKHSHFIWNRTELLTLDPHNVDYLLGLFEPGDMQYELNRNNVTDPSLSEMVVVAIQILRKNPKGFFLLVEGGRIDHGHHEGKAKQALHEAVEMDRAIGQAGSLTSSEDTLTVVTADHSHVFTFGGYTPRGNSIFGLAPMLSDTDKKPFTAILYGNGPGYKVVGGERENVSMVDYAHNNYQAQSAVPLRHETHGGEDVAVFSKGPMAHLLHGVHEQNYVPHVMAYAACIGANLGHCAPASSAGSLAAGPLLLALALYPLSVLF

SEQ ID NO: 4140 - protein, 469 aa, Homo sapiens
  Payload ID: 930;
  Gene Symbol: ALPL;
  Gene Name: alkaline phosphatase, liver/bone/kidney;
  Uniprot ID:  P05186;
  ENSP ID: ENSP00000442672
MFLGDGMGVSTVTAARILKGQLHHNPGEETRLEMDKFPFVALSKTYNTNAQVPDSAGTATAYLCGVKANEGTVGVSAATERSRCNTTQGNEVTSILRWAKDAGKSVGIVTTTRVNHATPSAAYAHSADRDWYSDNEMPPEALSQGCKDIAYQLMHNIRDIDVIMGGGRKYMYPKNKTDVEYESDEKARGTRLDGLDLVDTWKSFKPRYKHSHFIWNRTELLTLDPHNVDYLLGLFEPGDMQYELNRNNVTDPSLSEMVVVAIQILRKNPKGFFLLVEGGRIDHGHHEGKAKQALHEAVEMDRAIGQAGSLTSSEDTLTVVTADHSHVFTFGGYTPRGNSIFGLAPMLSDTDKKPFTAILYGNGPGYKVVGGERENVSMVDYAHNNYQAQSAVPLRHETHGGEDVAVFSKGPMAHLLHGVHEQNYVPHVMAYAACIGANLGHCAPASSAGSLAAGPLLLALALYPLSVLF

SEQ ID NO: 4141 - protein, 535 aa, Homo sapiens
  Payload ID: 931;
  Gene Symbol: ALPP;
  Gene Name: alkaline phosphatase, placental;
  Uniprot ID:  P05187;
  ENSP ID: ENSP00000375881
MLGPCMLLLLLLLGLRLQLSLGIIPVEEENPDFWNREAAEALGAAKKLQPAQTAAKNLIIFLGDGMGVSTVTAARILKGQKKDKLGPEIPLAMDRFPYVALSKTYNVDKHVPDSGATATAYLCGVKGNFQTIGLSAAARFNQCNTTRGNEVISVMNRAKKAGKSVGVVTTTRVQHASPAGTYAHTVNRNWYSDADVPASARQEGCQDIATQLISNMDIDVILGGGRKYMFRMGTPDPEYPDDYSQGGTRLDGKNLVQEWLAKRQGARYVWNRTELMQASLDPSVTHLMGLFEPGDMKYEIHRDSTLDPSLMEMTEAALRLLSRNPRGFFLFVEGGRIDHGHHESRAYRALTETIMFDDAIERAGQLTSEEDTLSLVTADHSHVFSFGGYPLRGSSIFGLAPGKARDRKAYTVLLYGNGPGYVLKDGARPDVTESESGSPEYRQQSAVPLDEETHAGEDVAVFARGPQAHLVHGVQEQTFIAHVMAFAACLEPYTACDLAPPAGTTDAAHPGRSVVPALLPLLAGTLLLLETATAP

SEQ ID NO: 4142 - protein, 532 aa, Homo sapiens
  Payload ID: 932;
  Gene Symbol: ALPPL2;
  Gene Name: alkaline phosphatase, placental-like 2;
  Uniprot ID:  P10696;
  ENSP ID: ENSP00000295453
MQGPWVLLLLGLRLQLSLGIIPVEEENPDFWNRQAAEALGAAKKLQPAQTAAKNLIIFLGDGMGVSTVTAARILKGQKKDKLGPETFLAMDRFPYVALSKTYSVDKHVPDSGATATAYLCGVKGNFQTIGLSAAARFNQCNTTRGNEVISVMNRAKKAGKSVGVVTTTRVQHASPAGAYAHTVNRNWYSDADVPASARQEGCQDIATQLISNMDIDVILGGGRKYMFPMGTPDPEYPDDYSQGGTRLDGKNLVQEWLAKHQGARYVWNRTELLQASLDPSVTHLMGLFEPGDMKYEIHRDSTLDPSLMEMTEAALLLLSRNPRGFFLFVEGGRIDHGHHESRAYRALTETIMFDDAIERAGQLTSEEDTLSLVTADHSHVFSFGGYPLRGSSIFGLAPGKARDRKAYTVLLYGNGPGYVLKDGARPDVTESESGSPEYRQQSAVPLDGETHAGEDVAVFARGPQAHLVHGVQEQTFIAHVMAFAACLEPYTACDLAPRAGTTDAAHPGPSVVPALLPLLAGTLLLLGTATAP

SEQ ID NO: 4143 - protein, 531 aa, Homo sapiens
  Payload ID: 932;
  Gene Symbol: ALPPL2;
  Gene Name: alkaline phosphatase, placental-like 2;
  ENSP ID: ENSP00000483564
MQGPWVLLLLGLRLQLSLGIIPVEEENPDFWNRQAAEALGAAKKLQPAQTAAKNLIIFLGDGMGVSTVTAARILKGQKKDKLGPETFLAMDRFPYVALSKTYSVDKHVPDSGATATAYLCGVKGNFQTIGLSAAARFNQCNTTRGNEVISVMNRAKKAGKSVGVVTTTRVQHASPAGAYAHTVNRNWYSDADVPASARQEGCQDIATQLISNMDIDVILGGGRKYMFPMGTPDPEYPDDYSQGGTRLDGKNLVQEWLAKHQGARYVWNRTELLQASLDPSVTHLMGLFEPGDMKYEIHRDSTLDPSLMEMTEAALLLLSRNPRGFFLFVEGGRIDHGHHESRAYRALTETIMFDDAIERAGQLTSEEDTLSLVTADHSHVFSFGGYPLRGSSIFGLAPGKARDRKAYTVLLYGNGPGYVLKDGARPDVTESESGSPEYRQQSAVPLTETHAGEDVAVFARGPQAHLVHGVQEQTFIAHVMAFAACLEPYTACDLAPRAGTTDAAHPGPSVVPALLPLLAGTLLLLGTATAP

SEQ ID NO: 4144 - protein, 389 aa, Homo sapiens
  Payload ID: 933;
  Gene Symbol: ALKBH1;
  Gene Name: alkB homolog 1, histone H2A dioxygenase;
  Uniprot ID:  Q13686;
  ENSP ID: ENSP00000216489
MGKMAAAVGSVATLATEPGEDAFRKLFRFYRQSRPGTADLEGVIDFSAAHAARGKGPGAQKVIKSQLNVSSVSEQNAYRAGLQPVSKWQAYGLKGYPGFIFIPNPFLPGYQWHWVKQCLKLYSQKPNVCNLDKHMSKEETQDLWEQSKEFLRYKEATKRRPRSLLEKLRWVTVGYHYNWDSKKYSADHYTPFPSDLGFLSEQVAAACGFEDFRAEAGILNYYRLDSTLGIHVDRSELDHSKPLLSFSFGQSAIFLLGGLQRDEAPTAMFMHSGDIMIMSGFSRLLNHAVPRVLPNPEGEGLPHCLEAPLPAVLPRDSMVEPCSMEDWQVCASYLKTARVNMTVRQVLATDQNFPLEPIEDEKRDISTEGFCHLDDQNSEVKRARINPDS

SEQ ID NO: 4145 - protein, 112 aa, Homo sapiens
  Payload ID: 933;
  Gene Symbol: ALKBH1;
  Gene Name: alkB homolog 1, histone H2A dioxygenase;
  ENSP ID: ENSP00000451386
AAAVGSVATLATEPGEDAFRKLFRFYRQSRPGTADLEGVIDFSAAHAARGKGPGAQKVIKSQLNVSSVSEQNAYRAGLQPVSKWQAYGLKGYPGIKKRLNGDPEVYWRNCVG

SEQ ID NO: 4146 - protein, 116 aa, Homo sapiens
  Payload ID: 933;
  Gene Symbol: ALKBH1;
  Gene Name: alkB homolog 1, histone H2A dioxygenase;
  ENSP ID: ENSP00000451886
MGKMAAAVGSVATLATEPGEDAFRKLFRFYRQSRPGTADLEGVIDFSAAHAARGKGPGAQKVIKSQLNVSSVSEQNAYRAGLQPVSKWQAYGLKGYPGIKKRLNGDPEVYWRNCVG

SEQ ID NO: 4147 - protein, 261 aa, Homo sapiens
  Payload ID: 934;
  Gene Symbol: ALKBH2;
  Gene Name: alkB homolog 2, alpha-ketoglutarate-dependent dioxygenase;
  Uniprot ID:  Q6NS38;
  ENSP ID: ENSP00000343021
MDRFLVKGAQGGLLRKQEEQEPTGEEPAVLGGDKESTRKRPRREAPGNGGHSAGPSWRHIRAEGLDCSYTVLFGKAEADEIFQELEKEVEYFTGALARVQVFGKWHSVPRKQATYGDAGLTYTFSGLTLSPKPWIPVLERIRDHVSGVTGQTFNFVLINRYKDGCDHIGEHRDDERELAPGSPIASVSFGACRDFVFRHKDSRGKSPSRRVAVVRLPLAHGSLLMMNHPTNTHWYHSLPVRKKVLAPRVNLTFRKILLTKK

SEQ ID NO: 4148 - protein, 261 aa, Homo sapiens; identical to SEQ ID NO: 4147
  Payload ID: 934;
  Gene Symbol: ALKBH2;
  Gene Name: alkB homolog 2, alpha-ketoglutarate-dependent dioxygenase;
  Uniprot ID:  Q6NS38;
  ENSP ID: ENSP00000398181

SEQ ID NO: 4149 - protein, 157 aa, Homo sapiens
  Payload ID: 934;
  Gene Symbol: ALKBH2;
  Gene Name: alkB homolog 2, alpha-ketoglutarate-dependent dioxygenase;
  Uniprot ID:  Q6NS38;
  ENSP ID: ENSP00000399820
MDRFLVKGAQGGLLRKQEEQEPTGEEPAVLGGDKESTRKRPRREAPGNGGHSAGPSWRHIRAEGLDCSYTVLFGKAEADEIFQELEKEVEYFTGIKMAVTTSGSTEMMKENWPLGAPLPLSPSVPAETLSSGIRIPVGKAPPGGWRWSGCRWPTGAY

SEQ ID NO: 4150 - protein, 150 aa, Homo sapiens
  Payload ID: 934;
  Gene Symbol: ALKBH2;
  Gene Name: alkB homolog 2, alpha-ketoglutarate-dependent dioxygenase;
  ENSP ID: ENSP00000443042
MDRFLVKGAQGGLLRKQEEQEPTGEEPAVLGGDKESTRKRPRREAPGNGGHSAGPSWRHIRAEGLDCSYTVLFGKAEADEIFQELEKEVEYFTGALARVQVFGKWHSVPRKQATYGDAGLTYTFSGLTLSPKPWIPVLERIRDHVSGVTG

SEQ ID NO: 4151 - protein, 121 aa, Homo sapiens
  Payload ID: 934;
  Gene Symbol: ALKBH2;
  Gene Name: alkB homolog 2, alpha-ketoglutarate-dependent dioxygenase;
  ENSP ID: ENSP00000444103
MDRFLVKGAQGGLLRKQEEQEPTGEEPAVLGGDKESTRKRPRREAPGNGGHSAGPSWRHIRAEGLDCSYTVLFGKAEADEIFQELEKEVEYFTGALARVQVFGKWHSVPRKQATYGDAGLT

SEQ ID NO: 4152 - protein, 149 aa, Homo sapiens
  Payload ID: 934;
  Gene Symbol: ALKBH2;
  Gene Name: alkB homolog 2, alpha-ketoglutarate-dependent dioxygenase;
  ENSP ID: ENSP00000474702
  MOD_RES (1)..(1): Any amino acid
XLLRKQEEQEPTGEEPAVLGGDKESTRKRPRREAPGNGGHSAGPSWRHIRAEGLDCSYTVLFGKAEADEIFQELEKEVEYFTGALARVQVFGKWHSVPRKQATYGDAGLTYTFSGLTLSPKPWIPVLERIRDHVSGVTGQTFNFVLINR

SEQ ID NO: 4153 - protein, 157 aa, Homo sapiens; identical to SEQ ID NO: 4149
  Payload ID: 934;
  Gene Symbol: ALKBH2;
  Gene Name: alkB homolog 2, alpha-ketoglutarate-dependent dioxygenase;
  Uniprot ID:  Q6NS38;
  ENSP ID: ENSP00000478765

SEQ ID NO: 4154 - protein, 286 aa, Homo sapiens
  Payload ID: 935;
  Gene Symbol: ALKBH3;
  Gene Name: alkB homolog 3, alpha-ketoglutarate-dependent dioxygenase;
  Uniprot ID:  Q96Q83;
  ENSP ID: ENSP00000302232
MEEKRRRARVQGAWAAPVKSQAIAQPATTAKSHLHQKPGQTWKNKEHHLSDREFVFKEPQQVVRRAPEPRVIDREGVYEISLSPTGVSRVCLYPGFVDVKEADWILEQLCQDVPWKQRTGIREDITYQQPRLTAWYGELPYTYSRITMEPNPHWHPVLRTLKNRIEENTGHTFNSLLCNLYRNEKDSVDWHSDDEPSLGRCPIIASLSFGATRTFEMRKKPPPEENGDYTYVERVKIPLDHGTLLIMEGATQADWQHRVPKEYHSREPRVNLTFRTVYPDPRGAPW

SEQ ID NO: 4155 - protein, 66 aa, Homo sapiens
  Payload ID: 935;
  Gene Symbol: ALKBH3;
  Gene Name: alkB homolog 3, alpha-ketoglutarate-dependent dioxygenase;
  ENSP ID: ENSP00000432259
MEEKRRRARVQGAWAAPVKSQAIAQPATTAKSHLHQKPGQTWKNKEHHLSDREFVFKEPQQQRGCV

SEQ ID NO: 4156 - protein, 156 aa, Homo sapiens
  Payload ID: 935;
  Gene Symbol: ALKBH3;
  Gene Name: alkB homolog 3, alpha-ketoglutarate-dependent dioxygenase;
  ENSP ID: ENSP00000433614
  MOD_RES (1)..(1): Any amino acid
XLTGYWNSFVKMFPGNRGLASERWHPVLRTLKNRIEENTGHTFNSLLCNLYRNEKDSVDWHSDDEPSLGRCPIIASLSFGATRTFEMRKKPPPEENGDYTYVERVKIPLDHGTLLIMEGATQADWQHRVPKEYHSREPRVNLTFRTVYPDPRGAPW

SEQ ID NO: 4157 - protein, 60 aa, Homo sapiens
  Payload ID: 935;
  Gene Symbol: ALKBH3;
  Gene Name: alkB homolog 3, alpha-ketoglutarate-dependent dioxygenase;
  ENSP ID: ENSP00000434229
MEEKRRRARVQGAWAAPVKSQAIAQPATTAKSHLHQKPGQTWKNKEHHLSDREFVFKEPQ

SEQ ID NO: 4158 - protein, 171 aa, Homo sapiens
  Payload ID: 935;
  Gene Symbol: ALKBH3;
  Gene Name: alkB homolog 3, alpha-ketoglutarate-dependent dioxygenase;
  ENSP ID: ENSP00000434832
MEEKRRRARVQGAWAAPVKSQAIAQPATTAKSHLHQKPGQTWKNKEHHLSDREFVFKEPQQVVRRAPEPRVIDREGVYEISLSPTGVSRVCLYPGFVDVKEADWILEQLCQDVPWKQRTGIREDSILQLTFKKSAPVSGTATAPQSCWYERPSPPHIPGPAILTRTRLWAP

SEQ ID NO: 4159 - protein, 223 aa, Homo sapiens
  Payload ID: 935;
  Gene Symbol: ALKBH3;
  Gene Name: alkB homolog 3, alpha-ketoglutarate-dependent dioxygenase;
  ENSP ID: ENSP00000435848
MEEKRRRARVQGAWAAPVKSQAIAQPATTAKSHLHQKPGQTWKNKEHHLSDREFVFKEPQQVVRRAPEPRVIEEGVYEISLSPTGVSRVCLYPGFVDVKEADWILEQLCQDVPWKQRTGIREDITYQQPRLTAWYGELPYTYSRITMEPNPHWHPVLRTLKNRIEENTGHTFNSLLCNLYRNEKDSVDWHSDDEPSLGRCPIIASLSFGATRTFEMRKKPPPE

SEQ ID NO: 4160 - protein, 170 aa, Homo sapiens
  Payload ID: 935;
  Gene Symbol: ALKBH3;
  Gene Name: alkB homolog 3, alpha-ketoglutarate-dependent dioxygenase;
  Uniprot ID:  Q96Q83;
  ENSP ID: ENSP00000436788
MEEKRRRARVQGAWAAPVKSQAIAQPATTAKSHLHQKPGQTWKNKEHHLSDREFVFKEPQQVVRRAPEPRVIEEGVYEISLSPTGVSRVCLYPGFVDVKEADWILEQLCQDVPWKQRTGIREDSILQLTFKKSAPVSGTATAPQSCWYERPSPPHIPGPAILTRTRLWAP

SEQ ID NO: 4161 - protein, 302 aa, Homo sapiens
  Payload ID: 936;
  Gene Symbol: ALKBH4;
  Gene Name: alkB homolog 4, lysine demthylase;
  Uniprot ID:  Q9NXW9;
  ENSP ID: ENSP00000292566
MAAAAAETPEVLRECGCKGIRTCLICERQRGSDPPWELPPAKTYRFIYCSDTGWAVGTEESDFEGWAFPFPGVMLIEDFVTREEEAELVRLMDRDPWKLSQSGRRKQDYGPKVNFRKQKLKTEGFCGLPSFSREVVRRMGLYPGLEGFRPVEQCNLDYCPERGSAIDPHLDDAWLWGERLVSLNLLSPTVLSMCREAPGSLLLCSAPSAAPEALVDSVIAPSRSVLCQEVEVAIPLPARSLLVLTGAARHQWKHAIHRRHIEARRVCVTFRELSAEFGPGGRQQELGQELLRIALSFQGRPV

SEQ ID NO: 4162 - protein, 42 aa, Homo sapiens
  Payload ID: 936;
  Gene Symbol: ALKBH4;
  Gene Name: alkB homolog 4, lysine demthylase;
  Uniprot ID:  Q9NXW9;
  ENSP ID: ENSP00000420362
MAAAAAETPEVLRECGCKGIRTCLICERQRGSDPPWELPPAE

SEQ ID NO: 4163 - protein, 394 aa, Homo sapiens
  Payload ID: 937;
  Gene Symbol: ALKBH5;
  Gene Name: alkB homolog 5, RNA demethylase;
  Uniprot ID:  Q6P6C2;
  ENSP ID: ENSP00000382091
MAAASGYTDLREKLKSMTSRDNYKAGSREAAAAAAAAVAAAAAAAAAAEPYPVSGAKRKYQEDSDPERSDYEEQQLQKEEEARKVKSGIRQMRLFSQDECAKIEARIDEVVSRAEKGLYNEHTVDRAPLRNKYFFGEGYTYGAQLQKRGPGQERLYPPGDVDEIPEWVHQLVIQKLVEHRVIPEGFVNSAVINDYQPGGCIVSHVDPIHIFERPIVSVSFFSDSALCFGCKFQFKPIRVSEPVLSLPVRRGSVTVLSGYAADEITHCIRPQDIKERRAVIILRKTRLDAPRLETKSLSSSVLPPSYASDRLSGNNRDPALKPKRSHRKADPDAAHRPRILEMDKEENRRSVLLPTHRRRGSFSSENYWRKSYESSEDCSEAAGSPARKVKMRRH

SEQ ID NO: 4164 - protein, 53 aa, Homo sapiens
  Payload ID: 937;
  Gene Symbol: ALKBH5;
  Gene Name: alkB homolog 5, RNA demethylase;
  ENSP ID: ENSP00000468116
MDKEENRRSVLLPTHRRRGSFSSENYWRKSYESSEDCSEAAGSPARKVKMRRH

SEQ ID NO: 4165 - protein, 238 aa, Homo sapiens
  Payload ID: 938;
  Gene Symbol: ALKBH6;
  Gene Name: alkB homolog 6;
  Uniprot ID:  Q3KRA9;
  ENSP ID: ENSP00000252984
MEEQDARVPALEPFRVEQAPPVIYYVPDFISKEEEEYLLRQVFNAPKPKWTQLSGRKLQNWGGLPHPRGMVPERLPPWLQRYVDKVSNLSLFGGLPANHVLVNQYLPGEGIMPHEDGPLYYPTVSTISLGSHTVLDFYEPRRPEDDDPTEQPRPPPRPTTSLLLEPRSLLVLRGPAYTRLLHGIAAARVDALDAASSPPNAAACPSARPGACLVRGTRVSLTIRRVPRVLRAGLLLGK

SEQ ID NO: 4166 - protein, 266 aa, Homo sapiens
  Payload ID: 938;
  Gene Symbol: ALKBH6;
  Gene Name: alkB homolog 6;
  Uniprot ID:  Q3KRA9;
  ENSP ID: ENSP00000368152
MAGRGMGMLNLEIGGDAGGRIGCKELVLMEEQDARVPALEPFRVEQAPPVIYYVPDFISKEEEEYLLRQVFNAPKPKWTQLSGRKLQNWGGLPHPRGMVPERLPPWLQRYVDKVSNLSLFGGLPANHVLVNQYLPGEGIMPHEDGPLYYPTVSTISLGSHTVLDFYEPRRPEDDDPTEQPRPPPRPTTSLLLEPRSLLVLRGPAYTRLLHGIAAARVDALDAASSPPNAAACPSARPGACLVRGTRVSLTIRRVPRVLRAGLLLGK

SEQ ID NO: 4167 - protein, 50 aa, Homo sapiens
  Payload ID: 938;
  Gene Symbol: ALKBH6;
  Gene Name: alkB homolog 6;
  ENSP ID: ENSP00000433085
  MOD_RES (1)..(1): Any amino acid
XEIGGDAGGRIGCKELVLMEEQDARVPALEPFRVEQVVRTQGTTCNLLCP

SEQ ID NO: 4168 - protein, 93 aa, Homo sapiens
  Payload ID: 938;
  Gene Symbol: ALKBH6;
  Gene Name: alkB homolog 6;
  ENSP ID: ENSP00000433156
WWTAPPVIYYVPDFISKEEEEYLLRQVFNAPKPKWTQLSGRKLQNWGPHCLPQVGFLIPEGWFLSGCPHGSSATWTKCQTSASLEASQLTMSS

SEQ ID NO: 4169 - protein, 47 aa, Homo sapiens
  Payload ID: 938;
  Gene Symbol: ALKBH6;
  Gene Name: alkB homolog 6;
  ENSP ID: ENSP00000433885
  MOD_RES (1)..(1): Any amino acid
XIGCKELVLMEEQDARVPALEPFRVEQVVRTQGAEGEGGTTCNLLCP

SEQ ID NO: 4170 - protein, 132 aa, Homo sapiens
  Payload ID: 938;
  Gene Symbol: ALKBH6;
  Gene Name: alkB homolog 6;
  ENSP ID: ENSP00000435496
  MOD_RES (1)..(1): Any amino acid
XNLEIGGDAGGRIGCKELVLMEEQDARVPALEPFRVEQAPPVIYYVPDFISKEEEEYLLRQVFNAPKPKWTQLSGRKLQNWGGPSGPHCLPQVGFLIPEGWFLSGCPHGSSATWTKCQTSASLEASQLTMSS

SEQ ID NO: 4171 - protein, 72 aa, Homo sapiens
  Payload ID: 938;
  Gene Symbol: ALKBH6;
  Gene Name: alkB homolog 6;
  ENSP ID: ENSP00000436156
  MOD_RES (1)..(1): Any amino acid
XDAGGRIGCKELVLMEEQDARVPALEPFRVEQAPPVIYYVPDFISKEEEEYLLRQVTSVPYWWASSSPRDGS

SEQ ID NO: 4172 - protein, 133 aa, Homo sapiens
  Payload ID: 938;
  Gene Symbol: ALKBH6;
  Gene Name: alkB homolog 6;
  ENSP ID: ENSP00000436742
MEEQDARVPALEPFRVEQAPPVIYYVPDFISKEEEEYLLRQVFNAPKPKWTQLSGRKLQNWGGLPHPRGMVPERLPPWLQRYVDKVSNLSLFGGLPANHVLVNQYLPGEGIMHHQPGLPHRAGLLRAAAARGR

SEQ ID NO: 4173 - protein, 110 aa, Homo sapiens
  Payload ID: 938;
  Gene Symbol: ALKBH6;
  Gene Name: alkB homolog 6;
  ENSP ID: ENSP00000474158
MEEQDARVPALEPFRVEQVFNAPKPKWTQLSGRKLQNWGGLPHPRGMVPERLPPWLQRYVDKVSNLSLFGGLPANHVLVNQYLPGEGIMHHQPGLPHRAGLLRAAAARGR

SEQ ID NO: 4174 - protein, 221 aa, Homo sapiens
  Payload ID: 939;
  Gene Symbol: ALKBH7;
  Gene Name: alkB homolog 7;
  Uniprot ID:  Q9BT30;
  ENSP ID: ENSP00000245812
MAGTGLLALRTLPGPSWVRGSGPSVLSRLQDAAVVRPGFLSTAEEETLSRELEPELRRRRYEYDHWDAAIHGFRETEKSRWSEASRAILQRVQAAAFGPGQTLLSSVHVLDLEARGYIKPHVDSIKFCGATIAGLSLLSPSVMRLVHTQEPGEWLELLLEPGSLYILRGSARYDFSHEILRDEESFFGERRIPRGRRISVICRSLPEGMGPGESGQPPPAC

SEQ ID NO: 4175 - protein, 79 aa, Homo sapiens
  Payload ID: 939;
  Gene Symbol: ALKBH7;
  Gene Name: alkB homolog 7;
  ENSP ID: ENSP00000470542
MRLVHTQEPGEWLELLLEPGSLYILRGSARYDFSHEILRDEESFFGERRIPRGRRISVICRSLPEGMGPGESGQPPPAC

SEQ ID NO: 4176 - protein, 160 aa, Homo sapiens
  Payload ID: 939;
  Gene Symbol: ALKBH7;
  Gene Name: alkB homolog 7;
  ENSP ID: ENSP00000470562
MGQGLFGAIHGFRETEKSRWSEASRAILQRVQAAAFGPGQTLLSSVHVLDLEARGYIKPHVDSIKFCGATIAGLSLLSPSVMRLVHTQEPGEWLELLLEPGSLYILRGSARYDFSHEILRDEESFFGERRIPRGRRISVICRSLPEGMGPGESGQPPPAC

SEQ ID NO: 4177 - protein, 238 aa, Homo sapiens
  Payload ID: 940;
  Gene Symbol: ALKBH8;
  Gene Name: alkB homolog 8, tRNA methyltransferase;
  Uniprot ID:  Q96BT7;
  ENSP ID: ENSP00000260318
MDSNHQSNYKLSKTEKKFLRKQIKAKHTLLRHEGIETVSYATQSLVVANGGLGNGVSRNQLLPVLEKCGLVDALLMPPNKPYSFARYRTTEESKRAYVTLNGKEVVDDLGQKITLYLNFVEKVQWKELRPQALPPGLMVVEEIISSEEEKMLLESVDWTEDTDNQNSQKSLKHRRVKHFGYEFHYENNNVDKDKPLSGGLPDICESFLEKWLRKGYIKHKPDQMTINQYEPGQDCHGF

SEQ ID NO: 4178 - protein, 664 aa, Homo sapiens
  Payload ID: 940;
  Gene Symbol: ALKBH8;
  Gene Name: alkB homolog 8, tRNA methyltransferase;
  Uniprot ID:  Q96BT7;
  ENSP ID: ENSP00000374219
MDSNHQSNYKLSKTEKKFLRKQIKAKHTLLRHEGIETVSYATQSLVVANGGLGNGVSRNQLLPVLEKCGLVDALLMPPNKPYSFARYRTTEESKRAYVTLNGKEVVDDLGQKITLYLNFVEKVQWKELRPQALPPGLMVVEEIISSEEEKMLLESVDWTEDTDNQNSQKSLKHRRVKHFGYEFHYENNNVDKDKPLSGGLPDICESFLEKWLRKGYIKHKPDQMTINQYEPGQGIPAHIDTHSAFEDEIVSLSLGSEIVMDFKHPDGIAVPVMLPRRSLLVMTGESRYLWTHGITCRKFDTVQASESLKSGIITSDVGDLTLSKRGLRTSFTFRKVRQTPCNCSYPLVCDSQRKETPPSFPESDKEASRLEQEYVHQVYEEIAGHFSSTRHTPWPHIVEFLKALPSGSIVADIGCGNGKYLGINKELYMIGCDRSQNLVDICRERQFQAFVCDALAVPVRSGSCDACISIAVIHHFATAERRVAALQEIVRLLRPGGKALIYVWAMEQEYNKQKSKYLRGNRNSQGKKEEMNSDTSVQRSLVEQMRDMGSRDSASSVPRINDSQEGGCNSRQVSNSKLPVHVNRTSFYSQDVLVPWHLKGNPDKGKPVEPFGPIGSQDPSPVFHRYYHVFREGELEGACRTVSDVRILQSYYDQGNWCVILQKA

SEQ ID NO: 4179 - protein, 144 aa, Homo sapiens
  Payload ID: 940;
  Gene Symbol: ALKBH8;
  Gene Name: alkB homolog 8, tRNA methyltransferase;
  ENSP ID: ENSP00000376812
MDSNHQSNYKLSKTEKKFLRKQIKAKHTLLRHEGIETVSYATQSLVVANGGLGNGVSRNQLLPVLEKCGLVDALLMPPNKPYSFARYRTTEESKRAYVTLNGKEVVDDLGQKITLYLNFVEKVEGVEASSLTTRTHGSRRNNFF

SEQ ID NO: 4180 - protein, 224 aa, Homo sapiens
  Payload ID: 940;
  Gene Symbol: ALKBH8;
  Gene Name: alkB homolog 8, tRNA methyltransferase;
  Uniprot ID:  Q96BT7;
  ENSP ID: ENSP00000391225
MDSNHQSNYKLSKTEKKFLRKQIKAKHTLLRHEGIETVSYATQSLVVANGGLGNGVSRNQLLPVLEKCGLVDALLMPPNKPYSFARYRTTEESKRAYVTLNGKEVVDDLGQKITLYLNFVEKVQWKELRPQALPPGLMVVEEIISSEEEKMLLESVDWTEDTDNQNSQKSLKHRRVKHFGYEFHYENNNVDKDKPLSGGLPDICESFLEKWLRKAEKNLEVGIH

SEQ ID NO: 4181 - protein, 667 aa, Homo sapiens
  Payload ID: 940;
  Gene Symbol: ALKBH8;
  Gene Name: alkB homolog 8, tRNA methyltransferase;
  Uniprot ID:  Q96BT7;
  ENSP ID: ENSP00000397673
MFAMDSNHQSNYKLSKTEKKFLRKQIKAKHTLLRHEGIETVSYATQSLVVANGGLGNGVSRNQLLPVLEKCGLVDALLMPPNKPYSFARYRTTEESKRAYVTLNGKEVVDDLGQKITLYLNFVEKVQWKELRPQALPPGLMVVEEIISSEEEKMLLESVDWTEDTDNQNSQKSLKHRRVKHFGYEFHYENNNVDKDKPLSGGLPDICESFLEKWLRKGYIKHKPDQMTINQYEPGQGIPAHIDTHSAFEDEIVSLSLGSEIVMDFKHPDGIAVPVMLPRRSLLVMTGESRYLWTHGITCRKFDTVQASESLKSGIITSDVGDLTLSKRGLRTSFTFRKVRQTPCNCSYPLVCDSQRKETPPSFPESDKEASRLEQEYVHQVYEEIAGHFSSTRHTPWPHIVEFLKALPSGSIVADIGCGNGKYLGINKELYMIGCDRSQNLVDICRERQFQAFVCDALAVPVRSGSCDACISIAVIHHFATAERRVAALQEIVRLLRPGGKALIYVWAMEQEYNKQKSKYLRGNRNSQGKKEEMNSDTSVQRSLVEQMRDMGSRDSASSVPRINDSQEGGCNSRQVSNSKLPVHVNRTSFYSQDVLVPWHLKGNPDKGKPVEPFGPIGSQDPSPVFHRYYHVFREGELEGACRTVSDVRILQSYYDQGNWCVILQKA

SEQ ID NO: 4182 - protein, 664 aa, Homo sapiens; identical to SEQ ID NO: 4178
  Payload ID: 940;
  Gene Symbol: ALKBH8;
  Gene Name: alkB homolog 8, tRNA methyltransferase;
  Uniprot ID:  Q96BT7;
  ENSP ID: ENSP00000415885

SEQ ID NO: 4183 - protein, 445 aa, Homo sapiens
  Payload ID: 941;
  Gene Symbol: AGMO;
  Gene Name: alkylglycerol monooxygenase;
  Uniprot ID:  Q6ZNB7;
  ENSP ID: ENSP00000341662
MKNPEAQQDVSVSQGFRMLFYTMKPSETSFQTLEEVPDYVKKATPFFISLMLLELVVSWILKGKPPGRLDDALTSISAGVLSRLPSLFFRSIELTSYIYIWENYRLFNLPWDSPWTWYSAFLGVDFGYYWFHRMAHEVNIMWAGHQTHHSSEDYNLSTALRQSVLQIYTSWIFYSPLALFIPPSVYAVHLQFNLLYQFWIHTEVINNLGPLELILNTPSHHRVHHGRNRYCIDKNYAGVLIIWDKIFGTFEAENEKVVYGLTHPINTFEPIKVQFHHLFSIWTTFWATPGFFNKFSVIFKGPGWGPGKPRLGLSEEIPEVTGKEVPFSSSSSQLLKIYTVVQFALMLAFYEETFADTAALSQVTLLLRVCFIILTLTSIGFLLDQRPKAAIMETLRCLMFLMLYRFGHLKPLVPSLSSAFEIVFSICIAFWGVRSMKQLTSHPWK

SEQ ID NO: 4184 - protein, 87 aa, Homo sapiens
  Payload ID: 941;
  Gene Symbol: AGMO;
  Gene Name: alkylglycerol monooxygenase;
  ENSP ID: ENSP00000385742
  MOD_RES (1)..(1): Any amino acid
XFIILTLTSIGFLLDQRPKAAIMETLRCLMFLMLYRFGHLKPLVPSLSSAFESYSVISEIGLQAKENFGELLSLSDCLTAGNHPKVH

SEQ ID NO: 4185 - protein, 74 aa, Homo sapiens
  Payload ID: 941;
  Gene Symbol: AGMO;
  Gene Name: alkylglycerol monooxygenase;
  ENSP ID: ENSP00000394412
ALSQVTLLLRVCFIILTLTSIGFLLDQRPKAAIMETLRCLMFLMLYRFGHLKPLVPSLSSAFEETPYLSSNSAI

SEQ ID NO: 4186 - protein, 658 aa, Homo sapiens
  Payload ID: 942;
  Gene Symbol: AGPS;
  Gene Name: alkylglycerone phosphate synthase;
  Uniprot ID:  O00116;
  ENSP ID: ENSP00000264167
MAEAAAAAGGTGLGAGASYGSAADRDRDPDPDRAGRRLRVLSGHLLGRPREALSTNECKARRAASAATAAPTATPAAQESGTIPKKRQEVMKWNGWGYNDSKFIFNKKGQIELTGKRYPLSGMGLPTFKEWIQNTLGVNVEHKTTSKASLNPSDTPPSVVNEDFLHDLKETNISYSQEADDRVFRAHGHCLHEIFLLREGMFERIPDIVLWPTCHDDVVKIVNLACKYNLCIIPIGGGTSVSYGLMCPADETRTIISLDTSQMNRILWVDENNLTAHVEAGITGQELERQLKESGYCTGHEPDSLEFSTVGGWVSTRASGMKKNIYGNIEDLVVHIKMVTPRGIIEKSCQGPRMSTGPDIHHFIMGSEGTLGVITEATIKIRPVPEYQKYGSVAFPNFEQGVACLREIAKQRCAPASIRLMDNKQFQFGHALKPQVSSIFTSFLDGLKKFYITKFKGFDPNQLSVATLLFEGDREKVLQHEKQVYDIAAKFGGLAAGEDNGQRGYLLTYVIAYIRDLALEYYVLGESFETSAPWDRVVDLCRNVKERITRECKEKGVQFAPFSTCRVTQTYDAGACIYFYFAFNYRGISDPLTVFEQTEAAAREEILANGGSLSHHHGVGKLRKQWLKESISDVGFGMLKSVKEYVDPNNIFGNRNLL

SEQ ID NO: 4187 - protein, 189 aa, Homo sapiens
  Payload ID: 942;
  Gene Symbol: AGPS;
  Gene Name: alkylglycerone phosphate synthase;
  ENSP ID: ENSP00000386688
MAEAAAAAGGTGLGAGASYGSAADRDRDPDPDRAGRRLRVLSGHLLGRPREALSTNECKARRAASAATAAPTATPAAQESGTIPKKRQEVMKWNGWGYNDSKFIFNKKGQIELTGKRGISDPLTVFEQTEAAAREEILANGGSLSHHHGVGKLRKQWLKESISDVGFGMLKSVKEYVDPNNIFGNRNLL

SEQ ID NO: 4188 - protein, 391 aa, Homo sapiens
  Payload ID: 943;
  Gene Symbol: ALLC;
  Gene Name: allantoicase;
  ENSP ID: ENSP00000252505
MDMASESVGGKILFATDDFFAPAENLIKSDSPCFKEHEYTEFGKWMDGWETRRKRIPGHDWCVLRLGIQGVIRGFDVDVSYFTGDYAPRVSIQAANLEEDKLPEIPERGTRTGAAATPEEFEAIAELKSDDWSYLVPMTELKPGNPASGHNYFLVNSQQRWTHIRLNIFPDGGIARLRVFGTGQKDWTATDPKEPADLVAIAFGGVCVGFSNAKFGHPNNIIGVGGAKSMADGWETARRLDRPPILENDENGILLVPGCEWAVFRLAHPGVITRIEIDTKYFEGNAPDSCKVDGCILTTQEEEAVIRQKWILPAHKWKPLLPVTKLSPNQSHLFDSLTLELQDVITHARLTIVPDGGVSRLRLRGFPSSICLLRPREKPMLKFSVSFKANP

SEQ ID NO: 4189 - protein, 161 aa, Homo sapiens
  Payload ID: 944;
  Gene Symbol: AIF1;
  Gene Name: allograft inflammatory  factor 1;
  ENSP ID: ENSP00000338776
GRKASEKTGGREGEPADRGLQLGGKAFGLLKAQQEERLDEINKQFLDDPKYSSDEDLPSKLEGFKEKYMEFDLNGNGDIDIMSLKRMLEKLGVPKTHLELKKLIGEVSSGSGETFSYPDFLRMMLGKRSAILKMILMYEEKAREKEKPTGPPAKKAISELP

SEQ ID NO: 4190 - protein, 93 aa, Homo sapiens
  Payload ID: 944;
  Gene Symbol: AIF1;
  Gene Name: allograft inflammatory  factor 1;
  Uniprot ID:  P55008;
  ENSP ID: ENSP00000365217
MEFDLNGNGDIDIMSLKRMLEKLGVPKTHLELKKLIGEVSSGSGETFSYPDFLRMMLGKRSAILKMILMYEEKAREKEKPTGPPAKKAISELP

SEQ ID NO: 4191 - protein, 147 aa, Homo sapiens
  Payload ID: 944;
  Gene Symbol: AIF1;
  Gene Name: allograft inflammatory  factor 1;
  Uniprot ID:  P55008;
  ENSP ID: ENSP00000365227
MSQTRDLQGGKAFGLLKAQQEERLDEINKQFLDDPKYSSDEDLPSKLEGFKEKYMEFDLNGNGDIDIMSLKRMLEKLGVPKTHLELKKLIGEVSSGSGETFSYPDFLRMMLGKRSAILKMILMYEEKAREKEKPTGPPAKKAISELP

SEQ ID NO: 4192 - protein, 93 aa, Homo sapiens; identical to SEQ ID NO: 4190
  Payload ID: 944;
  Gene Symbol: AIF1;
  Gene Name: allograft inflammatory  factor 1;
  Uniprot ID:  P55008;
  ENSP ID: ENSP00000372965

SEQ ID NO: 4193 - protein, 147 aa, Homo sapiens; identical to SEQ ID NO: 4191
  Payload ID: 944;
  Gene Symbol: AIF1;
  Gene Name: allograft inflammatory  factor 1;
  Uniprot ID:  P55008;
  ENSP ID: ENSP00000372966

SEQ ID NO: 4194 - protein, 147 aa, Homo sapiens; identical to SEQ ID NO: 4191
  Payload ID: 944;
  Gene Symbol: AIF1;
  Gene Name: allograft inflammatory  factor 1;
  Uniprot ID:  P55008;
  ENSP ID: ENSP00000391720

SEQ ID NO: 4195 - protein, 161 aa, Homo sapiens; identical to SEQ ID NO: 4189
  Payload ID: 944;
  Gene Symbol: AIF1;
  Gene Name: allograft inflammatory  factor 1;
  ENSP ID: ENSP00000393114

SEQ ID NO: 4196 - protein, 161 aa, Homo sapiens; identical to SEQ ID NO: 4189
  Payload ID: 944;
  Gene Symbol: AIF1;
  Gene Name: allograft inflammatory  factor 1;
  ENSP ID: ENSP00000393996

SEQ ID NO: 4197 - protein, 161 aa, Homo sapiens; identical to SEQ ID NO: 4189
  Payload ID: 944;
  Gene Symbol: AIF1;
  Gene Name: allograft inflammatory  factor 1;
  ENSP ID: ENSP00000394278

SEQ ID NO: 4198 - protein, 147 aa, Homo sapiens; identical to SEQ ID NO: 4191
  Payload ID: 944;
  Gene Symbol: AIF1;
  Gene Name: allograft inflammatory  factor 1;
  Uniprot ID:  P55008;
  ENSP ID: ENSP00000397842

SEQ ID NO: 4199 - protein, 147 aa, Homo sapiens; identical to SEQ ID NO: 4191
  Payload ID: 944;
  Gene Symbol: AIF1;
  Gene Name: allograft inflammatory  factor 1;
  Uniprot ID:  P55008;
  ENSP ID: ENSP00000398013

SEQ ID NO: 4200 - protein, 93 aa, Homo sapiens; identical to SEQ ID NO: 4190
  Payload ID: 944;
  Gene Symbol: AIF1;
  Gene Name: allograft inflammatory  factor 1;
  Uniprot ID:  P55008;
  ENSP ID: ENSP00000399621

SEQ ID NO: 4201 - protein, 93 aa, Homo sapiens; identical to SEQ ID NO: 4190
  Payload ID: 944;
  Gene Symbol: AIF1;
  Gene Name: allograft inflammatory  factor 1;
  Uniprot ID:  P55008;
  ENSP ID: ENSP00000399901

SEQ ID NO: 4202 - protein, 161 aa, Homo sapiens; identical to SEQ ID NO: 4189
  Payload ID: 944;
  Gene Symbol: AIF1;
  Gene Name: allograft inflammatory  factor 1;
  ENSP ID: ENSP00000400538

SEQ ID NO: 4203 - protein, 93 aa, Homo sapiens; identical to SEQ ID NO: 4190
  Payload ID: 944;
  Gene Symbol: AIF1;
  Gene Name: allograft inflammatory  factor 1;
  Uniprot ID:  P55008;
  ENSP ID: ENSP00000401433

SEQ ID NO: 4204 - protein, 93 aa, Homo sapiens; identical to SEQ ID NO: 4190
  Payload ID: 944;
  Gene Symbol: AIF1;
  Gene Name: allograft inflammatory  factor 1;
  Uniprot ID:  P55008;
  ENSP ID: ENSP00000413709

SEQ ID NO: 4205 - protein, 161 aa, Homo sapiens; identical to SEQ ID NO: 4189
  Payload ID: 944;
  Gene Symbol: AIF1;
  Gene Name: allograft inflammatory  factor 1;
  ENSP ID: ENSP00000415805

SEQ ID NO: 4206 - protein, 147 aa, Homo sapiens; identical to SEQ ID NO: 4191
  Payload ID: 944;
  Gene Symbol: AIF1;
  Gene Name: allograft inflammatory  factor 1;
  Uniprot ID:  P55008;
  ENSP ID: ENSP00000416061

SEQ ID NO: 4207 - protein, 150 aa, Homo sapiens
  Payload ID: 945;
  Gene Symbol: AIF1L;
  Gene Name: allograft inflammatory  factor 1-like;
  Uniprot ID:  Q9BQI0;
  ENSP ID: ENSP00000247291
MSGELSNRFQGGKAFGLLKARQERRLAEINREFLCDQKYSDEENLPEKLTAFKEKYMEFDLNNEGEIDLMSLKRMMEKLGVPKTHLEMKKMISEVTGGVSDTISYRDFVNMMLGKRSAVLKLVMMFEGKANESSPKPVGPPPERDIASLP

SEQ ID NO: 4208 - protein, 46 aa, Homo sapiens
  Payload ID: 945;
  Gene Symbol: AIF1L;
  Gene Name: allograft inflammatory  factor 1-like;
  ENSP ID: ENSP00000361371
MEFDLNNEGEIDLMSLKRMMEKLGVPKTHLEMKKMISEVTGGSHDV

SEQ ID NO: 4209 - protein, 97 aa, Homo sapiens
  Payload ID: 945;
  Gene Symbol: AIF1L;
  Gene Name: allograft inflammatory  factor 1-like;
  ENSP ID: ENSP00000361372
MSGELSNRFQGGKAFGLLKARQERRLAEINREFLCDQKYSDEENLPEKLTAFKEKYMEFDLNNEGEIDLMSLKRMMEKLGVPKTHLEMKKMISEGGY

SEQ ID NO: 4210 - protein, 102 aa, Homo sapiens
  Payload ID: 945;
  Gene Symbol: AIF1L;
  Gene Name: allograft inflammatory  factor 1-like;
  Uniprot ID:  Q9BQI0;
  ENSP ID: ENSP00000361374
MSGELSNRFQGGKAFGLLKARQERRLAEINREFLCDQKYSDEENLPEKLTAFKEKYMEFDLNNEGEIDLMSLKRMMEKLGVPKTHLEMKKMISEVTGGSHDV

SEQ ID NO: 4211 - protein, 94 aa, Homo sapiens
  Payload ID: 945;
  Gene Symbol: AIF1L;
  Gene Name: allograft inflammatory  factor 1-like;
  ENSP ID: ENSP00000361375
MEFDLNNEGEIDLMSLKRMMEKLGVPKTHLEMKKMISEVTGGVSDTISYRDFVNMMLGKRSAVLKLVMMFEGKANESSPKPVGPPPERDIASLP

SEQ ID NO: 4212 - protein, 142 aa, Homo sapiens
  Payload ID: 945;
  Gene Symbol: AIF1L;
  Gene Name: allograft inflammatory  factor 1-like;
  Uniprot ID:  Q9BQI0;
  ENSP ID: ENSP00000361376
MSGELSNRFQGGKAFGLLKARQERRLAEINREFLCDQKYSDEENLPEKLTAFKEKYMEFDLMSLKRMMEKLGVPKTHLEMKKMISEVTGGVSDTISYRDFVNMMLGKRSAVLKLVMMFEGKANESSPKPVGPPPERDIASLP

SEQ ID NO: 4213 - protein, 176 aa, Homo sapiens
  Payload ID: 945;
  Gene Symbol: AIF1L;
  Gene Name: allograft inflammatory  factor 1-like;
  Uniprot ID:  Q9BQI0;
  ENSP ID: ENSP00000361383
MSGELSNRFQGGKAFGLLKARQERRLAEINRYCAGREPQLQRISCSQHSCLLALLFQEFLCDQKYSDEENLPEKLTAFKEKYMEFDLNNEGEIDLMSLKRMMEKLGVPKTHLEMKKMISEVTGGVSDTISYRDFVNMMLGKRSAVLKLVMMFEGKANESSPKPVGPPPERDIASLP

SEQ ID NO: 4214 - protein, 42 aa, Homo sapiens
  Payload ID: 945;
  Gene Symbol: AIF1L;
  Gene Name: allograft inflammatory  factor 1-like;
  ENSP ID: ENSP00000361388
MSGELSNRFQGRLFVSSRREGVRLAQSPAGEEAGRDQPGVSV

SEQ ID NO: 4215 - protein, 284 aa, Homo sapiens
  Payload ID: 946;
  Gene Symbol: ATRAID;
  Gene Name: all-trans retinoic acid-induced differentiation factor;
  Uniprot ID:  Q6UW56;
  ENSP ID: ENSP00000369518
MKTSAELHEQEKPPSSPRATGPGRLGHARGRGPDALRGGAAGPGRASSGAPRERKMAPHDPGSLTTLVPWAAALLLALGVERALALPEICTQCPGSVQNLSKVAFYCKTTRELMLHARCCLNQKGTILGLDLQNCSLEDPGPNFHQAHTTVIIDLQANPLKGDLANTFRGFTQLQTLILPQHVNCPGGINAWNTITSYIDNQICQGQKNLCNNTGDPEMCPENGSCVPDGPGLLQCVCADGFHGYKCMRQGSFSLLMFFGILGATTLSVSILLWATQRRKAKTS

SEQ ID NO: 4216 - protein, 171 aa, Homo sapiens
  Payload ID: 946;
  Gene Symbol: ATRAID;
  Gene Name: all-trans retinoic acid-induced differentiation factor;
  Uniprot ID:  Q6UW56;
  ENSP ID: ENSP00000384033
MLHARCCLNQKGTILGLDLQNCSLEDPGPNFHQAHTTVIIDLQANPLKGDLANTFRGFTQLQTLILPQHVNCPGGINAWNTITSYIDNQICQGQKNLCNNTGDPEMCPENGSCVPDGPGLLQCVCADGFHGYKCMRQGSFSLLMFFGILGATTLSVSILLWATQRRKAKTS

SEQ ID NO: 4217 - protein, 75 aa, Homo sapiens
  Payload ID: 946;
  Gene Symbol: ATRAID;
  Gene Name: all-trans retinoic acid-induced differentiation factor;
  ENSP ID: ENSP00000397319
MLHARCCLNQKGTILGLDLQNCSLEDPGPNFHQAHTTVIIDLQANPLKGDLANTFRGFTQLQTLILPQHVNCPGG

SEQ ID NO: 4218 - protein, 229 aa, Homo sapiens
  Payload ID: 946;
  Gene Symbol: ATRAID;
  Gene Name: all-trans retinoic acid-induced differentiation factor;
  Uniprot ID:  Q6UW56;
  ENSP ID: ENSP00000476080
MAPHDPGSLTTLVPWAAALLLALGVERALALPEICTQCPGSVQNLSKVAFYCKTTRELMLHARCCLNQKGTILGLDLQNCSLEDPGPNFHQAHTTVIIDLQANPLKGDLANTFRGFTQLQTLILPQHVNCPGGINAWNTITSYIDNQICQGQKNLCNNTGDPEMCPENGSCVPDGPGLLQCVCADGFHGYKCMRQGSFSLLMFFGILGATTLSVSILLWATQRRKAKTS

SEQ ID NO: 4219 - protein, 284 aa, Homo sapiens; identical to SEQ ID NO: 4215
  Payload ID: 946;
  Gene Symbol: ATRAID;
  Gene Name: all-trans retinoic acid-induced differentiation factor;
  Uniprot ID:  Q6UW56;
  ENSP ID: ENSP00000484228

SEQ ID NO: 4220 - protein, 340 aa, Homo sapiens
  Payload ID: 947;
  Gene Symbol: A3GALT2;
  Gene Name: alpha 1,3-galactosyltransferase 2;
  ENSP ID: ENSP00000475261
MALKEGLRAWKRIFWRQILLTLGLLGLFLYGLPKFRHLEALIPMGVCPSATMSQLRDNFTGALRPWARPEVLTCTPWGAPIIWDGSFDPDVAKQEARQQNLTIGLTIFAVGRYLEKYLERFLETAEQHFMAGQSVMYYVFTELPGAVPRVALGPGRRLPVERVARERRWQDVSMARMRTLHAALGGLPGREAHFMFCMDVDQHFSGTFGPEALAESVAQLHSWHYHWPSWLLPFERDAHSAAAMAWGQGDFYNHAAVFGGSVAALRGLTAHCAGGLDWDRARGLEARWHDESHLNKFFWLHKPAKVLSPEFCWSPDIGPRAEIRRPRLLWAPKGYRLLRN

SEQ ID NO: 4221 - protein, 353 aa, Homo sapiens
  Payload ID: 948;
  Gene Symbol: A4GALT;
  Gene Name: alpha 1,4-galactosyltransferase;
  Uniprot ID:  Q9NPC4;
  ENSP ID: ENSP00000249005
MSKPPDLLLRLLRGAPRQRVCTLFIIGFKFTFFVSIMIYWHVVGEPKEKGQLYNLPAEIPCPTLTPPTPPSHGPTPGNIFFLETSDRTNPNFLFMCSVESAARTHPESHVLVLMKGLPGGNASLPRHLGISLLSCFPNVQMLPLDLRELFRDTPLADWYAAVQGRWEPYLLPVLSDASRIALMWKFGGIYLDTDFIVLKNLRNLTNVLGTQSRYVLNGAFLAFERRHEFMALCMRDFVDHYNGWIWGHQGPQLLTRVFKKWCSIRSLAESRACRGVTTLPPEAFYPIPWQDWKKYFEDINPEELPRLLSATYAVHVWNKKSQGTRFEATSRALLAQLHARYCPTTHEAMKMYL

SEQ ID NO: 4222 - protein, 353 aa, Homo sapiens; identical to SEQ ID NO: 4221
  Payload ID: 948;
  Gene Symbol: A4GALT;
  Gene Name: alpha 1,4-galactosyltransferase;
  Uniprot ID:  Q9NPC4;
  ENSP ID: ENSP00000370678

SEQ ID NO: 4223 - protein, 353 aa, Homo sapiens; identical to SEQ ID NO: 4221
  Payload ID: 948;
  Gene Symbol: A4GALT;
  Gene Name: alpha 1,4-galactosyltransferase;
  Uniprot ID:  Q9NPC4;
  ENSP ID: ENSP00000384794

SEQ ID NO: 4224 - protein, 315 aa, Homo sapiens
  Payload ID: 949;
  Gene Symbol: AAGAB;
  Gene Name: alpha- and gamma-adaptin binding prt;
  Uniprot ID:  Q6PD74;
  ENSP ID: ENSP00000261880
MAAGVPCALVTSCSSVFSGDQLVQHILGTEDLIVEVTSNDAVRFYPWTIDNKYYSADINLCVVPNKFLVTAEIAESVQAFVVYFDSTQKSGLDSVSSWLPLAKAWLPEVMILVCDRVSEDGINRQKAQEWCIKHGFELVELSPEELPEEDDDFPESTGVKRIVQALNANVWSNVVMKNDRNQGFSLLNSLTGTNHSIGSADPCHPEQPHLPAADSTESLSDHRGGASNTTDAQVDSIVDPMLDLDIQELASLTTGGGDVENFERLFSKLKEMKDKAATLPHEQRKVHAEKVAKAFWMAIGGDRDEIEGLSSDEEH

SEQ ID NO: 4225 - protein, 206 aa, Homo sapiens
  Payload ID: 949;
  Gene Symbol: AAGAB;
  Gene Name: alpha- and gamma-adaptin binding prt;
  Uniprot ID:  Q6PD74;
  ENSP ID: ENSP00000440735
MILVCDRVSEDGINRQKAQEWCIKHGFELVELSPEELPEEDDDFPESTGVKRIVQALNANVWSNVVMKNDRNQGFSLLNSLTGTNHSIGSADPCHPEQPHLPAADSTESLSDHRGGASNTTDAQVDSIVDPMLDLDIQELASLTTGGGDVENFERLFSKLKEMKDKAATLPHEQRKVHAEKVAKAFWMAIGGDRDEIEGLSSDEEH

SEQ ID NO: 4226 - protein, 58 aa, Homo sapiens
  Payload ID: 949;
  Gene Symbol: AAGAB;
  Gene Name: alpha- and gamma-adaptin binding prt;
  ENSP ID: ENSP00000453059
MILVCDRVSEDGINRQKAQEWCIKHGFELVELSPEELPEEDDDFPESTGVKRIVQALN

SEQ ID NO: 4227 - protein, 206 aa, Homo sapiens; identical to SEQ ID NO: 4225
  Payload ID: 949;
  Gene Symbol: AAGAB;
  Gene Name: alpha- and gamma-adaptin binding prt;
  Uniprot ID:  Q6PD74;
  ENSP ID: ENSP00000453263

SEQ ID NO: 4228 - protein, 102 aa, Homo sapiens
  Payload ID: 950;
  Gene Symbol: AHSP;
  Gene Name: alpha hemoglobin stabilizing prt;
  Uniprot ID:  Q9NZD4;
  ENSP ID: ENSP00000307199
MALLKANKDLISAGLKEFSVLLNQQVFNDPLVSEEDMVTVVEDWMNFYINYYRQQVTGEPQERDKALQELRQELNTLANPFLAKYRDFLKSHELPSHPPPSS

SEQ ID NO: 4229 - protein, 57 aa, Homo sapiens
  Payload ID: 950;
  Gene Symbol: AHSP;
  Gene Name: alpha hemoglobin stabilizing prt;
  ENSP ID: ENSP00000456748
MALLKANKDLISAGLKEFSVLLNQQVFNDPLVSEEDMVTVVEDWMNFYINYYRQQVT

SEQ ID NO: 4230 - protein, 2492 aa, Homo sapiens
  Payload ID: 951;
  Gene Symbol: ATRX;
  Gene Name: alpha thalassemia/mental retardation syndrome X-linked;
  Uniprot ID:  P46100;
  ENSP ID: ENSP00000362441
MTAEPMSESKLNTLVQKLHDFLAHSSEESEETSSPPRLAMNQNTDKISGSGSNSDMMENSKEEGTSSSEKSKSSGSSRSKRKPSIVTKYVESDDEKPLDDETVNEDASNENSENDITMQSLPKGTVIVQPEPVLNEDKDDFKGPEFRSRSKMKTENLKKRGEDGLHGIVSCTACGQQVNHFQKDSIYRHPSLQVLICKNCFKYYMSDDISRDSDGMDEQCRWCAEGGNLICCDFCHNAFCKKCILRNLGRKELSTIMDENNQWYCYICHPEPLLDLVTACNSVFENLEQLLQQNKKKIKVDSEKSNKVYEHTSRFSPKKTSSNCNGEEKKLDDSCSGSVTYSYSALIVPKEMIKKAKKLIETTANMNSSYVKFLKQATDNSEISSATKLRQLKAFKSVLADIKKAHLALEEDLNSEFRAMDAVNKEKNTKEHKVIDAKFETKARKGEKPCALEKKDISKSEAKLSRKQVDSEHMHQNVPTEEQRTNKSTGGEHKKSDRKEEPQYEPANTSEDLDMDIVSVPSSVPEDIFENLETAMEVQSSVDHQGDGSSGTEQEVESSSVKLNISSKDNRGGIKSKTTAKVTKELYVKLTPVSLSNSPIKGADCQEVPQDKDGYKSCGLNPKLEKCGLGQENSDNEHLVENEVSLLLEESDLRRSPRVKTTPLRRPTETNPVTSNSDEECNETVKEKQKLSVPVRKKDKRNSSDSAIDNPKPNKLPKSKQSETVDQNSDSDEMLAILKEVSRMSHSSSSDTDINEIHTNHKTLYDLKTQAGKDDKGKRKRKSSTSGSDFDTKKGKSAKSSIISKKKRQTQSESSNYDSELEKEIKSMSKIGAARTTKKRIPNTKDFDSSEDEKHSKKGMDNQGHKNLKTSQEGSSDDAERKQERETFSSAEGTVDKDTTIMELRDRLPKKQQASASTDGVDKLSGKEESFTSLEVRKVAETKEKSKHLKTKTCKKVQDGLSDIAEKFLKKDQSDETSEDDKKQSKKGTEEKKKPSDFKKKVIKMEQQYESSSDGTEKLPEREEICHFPKGIKQIKNGTTDGEKKSKKIRDKTSKKKDELSDYAEKSTGKGDSCDSSEDKKSKNGAYGREKKRCKLLGKSSRKRQDCSSSDTEKYSMKEDGCNSSDKRLKRIELRERRNLSSKRNTKEIQSGSSSSDAEESSEDNKKKKQRTSSKKKAVIVKEKKRNSLRTSTKRKQADITSSSSSDIEDDDQNSIGEGSSDEQKIKPVTENLVLSSHTGFCQSSGDEALSKSVPVTVDDDDDDNDPENRIAKKMLLEEIKANLSSDEDGSSDDEPEEGKKRTGKQNEENPGDEEAKNQVNSESDSDSEESKKPRYRHRLLRHKLTVSDGESGEEKKTKPKEHKEVKGRNRRKVSSEDSEDSDFQESGVSEEVSESEDEQRPRTRSAKKAELEENQRSYKQKKKRRRIKVQEDSSSENKSNSEEEEEEKEEEEEEEEEEEEEEEDENDDSKSPGKGRKKIRKILKDDKLRTETQNALKEEEERRKRIAEREREREKLREVIEIEDASPTKCPITTKLVLDEDEETKEPLVQVHRNMVIKLKPHQVDGVQFMWDCCCESVKKTKKSPGSGCILAHCMGLGKTLQVVSFLHTVLLCDKLDFSTALVVCPLNTALNWMNEFEKWQEGLKDDEKLEVSELATVKRPQERSYMLQRWQEDGGVMIIGYEMYRNLAQGRNVKSRKLKEIFNKALVDPGPDFVVCDEGHILKNEASAVSKAMNSIRSRRRIILTGTPLQNNLIEYHCMVNFIKENLLGSIKEFRNRFINPIQNGQCADSTMVDVRVMKKRAHILYEMLAGCVQRKDYTALTKFLPPKHEYVLAVRMTSIQCKLYQYYLDHLTGVGNNSEGGRGKAGAKLFQDFQMLSRIWTHPWCLQLDYISKENKGYFDEDSMDEFIASDSDETSMSLSSDDYTKKKKKGKKGKKDSSSSGSGSDNDVEVIKVWNSRSRGGGEGNVDETGNNPSVSLKLEESKATSSSNPSSPAPDWYKDFVTDADAEVLEHSGKMVLLFEILRMAEEIGDKVLVFSQSLISLDLIEDFLELASREKTEDKDKPLIYKGEGKWLRNIDYYRLDGSTTAQSRKKWAEEFNDETNVRGRLFIISTKAGSLGINLVAANRVIIFDASWNPSYDIQSIFRVYRFGQTKPVYVYRFLAQGTMEDKIYDRQVTKQSLSFRVVDQQQVERHFTMNELTELYTFEPDLLDDPNSEKKKKRDTPMLPKDTILAELLQIHKEHIVGYHEHDSLLDHKEEEELTEEERKAAWAEYEAEKKGLTMRFNIPTGTNLPPVSFNSQTPYIPFNLGALSAMSNQQLEDLINQGREKVVEATNSVTAVRIQPLEDIISAVWKENMNLSEAQVQALALSRQASQELDVKRREAIYNDVLTKQQMLISCVQRILMNRRLQQQYNQQQQQQMTYQQATLGHLMMPKPPNLIMNPSNYQQIDMRGMYQPVAGGMQPPPLQRAPPPMRSKNPGPSQGKSM

SEQ ID NO: 4231 - protein, 2454 aa, Homo sapiens
  Payload ID: 951;
  Gene Symbol: ATRX;
  Gene Name: alpha thalassemia/mental retardation syndrome X-linked;
  Uniprot ID:  P46100;
  ENSP ID: ENSP00000378967
MTAEPMSESKLNTLVQKLHDFLAHSSEESEETSSPPRLAMNQNTDKISGSGSNSDMMENSKEEGTSSSEKSKSSGSSRSKRKPSIVTKYVESDDEKPLDDETVNEDASNENSENDITMQSLPKEDGLHGIVSCTACGQQVNHFQKDSIYRHPSLQVLICKNCFKYYMSDDISRDSDGMDEQCRWCAEGGNLICCDFCHNAFCKKCILRNLGRKELSTIMDENNQWYCYICHPEPLLDLVTACNSVFENLEQLLQQNKKKIKVDSEKSNKVYEHTSRFSPKKTSSNCNGEEKKLDDSCSGSVTYSYSALIVPKEMIKKAKKLIETTANMNSSYVKFLKQATDNSEISSATKLRQLKAFKSVLADIKKAHLALEEDLNSEFRAMDAVNKEKNTKEHKVIDAKFETKARKGEKPCALEKKDISKSEAKLSRKQVDSEHMHQNVPTEEQRTNKSTGGEHKKSDRKEEPQYEPANTSEDLDMDIVSVPSSVPEDIFENLETAMEVQSSVDHQGDGSSGTEQEVESSSVKLNISSKDNRGGIKSKTTAKVTKELYVKLTPVSLSNSPIKGADCQEVPQDKDGYKSCGLNPKLEKCGLGQENSDNEHLVENEVSLLLEESDLRRSPRVKTTPLRRPTETNPVTSNSDEECNETVKEKQKLSVPVRKKDKRNSSDSAIDNPKPNKLPKSKQSETVDQNSDSDEMLAILKEVSRMSHSSSSDTDINEIHTNHKTLYDLKTQAGKDDKGKRKRKSSTSGSDFDTKKGKSAKSSIISKKKRQTQSESSNYDSELEKEIKSMSKIGAARTTKKRIPNTKDFDSSEDEKHSKKGMDNQGHKNLKTSQEGSSDDAERKQERETFSSAEGTVDKDTTIMELRDRLPKKQQASASTDGVDKLSGKEESFTSLEVRKVAETKEKSKHLKTKTCKKVQDGLSDIAEKFLKKDQSDETSEDDKKQSKKGTEEKKKPSDFKKKVIKMEQQYESSSDGTEKLPEREEICHFPKGIKQIKNGTTDGEKKSKKIRDKTSKKKDELSDYAEKSTGKGDSCDSSEDKKSKNGAYGREKKRCKLLGKSSRKRQDCSSSDTEKYSMKEDGCNSSDKRLKRIELRERRNLSSKRNTKEIQSGSSSSDAEESSEDNKKKKQRTSSKKKAVIVKEKKRNSLRTSTKRKQADITSSSSSDIEDDDQNSIGEGSSDEQKIKPVTENLVLSSHTGFCQSSGDEALSKSVPVTVDDDDDDNDPENRIAKKMLLEEIKANLSSDEDGSSDDEPEEGKKRTGKQNEENPGDEEAKNQVNSESDSDSEESKKPRYRHRLLRHKLTVSDGESGEEKKTKPKEHKEVKGRNRRKVSSEDSEDSDFQESGVSEEVSESEDEQRPRTRSAKKAELEENQRSYKQKKKRRRIKVQEDSSSENKSNSEEEEEEKEEEEEEEEEEEEEEEDENDDSKSPGKGRKKIRKILKDDKLRTETQNALKEEEERRKRIAEREREREKLREVIEIEDASPTKCPITTKLVLDEDEETKEPLVQVHRNMVIKLKPHQVDGVQFMWDCCCESVKKTKKSPGSGCILAHCMGLGKTLQVVSFLHTVLLCDKLDFSTALVVCPLNTALNWMNEFEKWQEGLKDDEKLEVSELATVKRPQERSYMLQRWQEDGGVMIIGYEMYRNLAQGRNVKSRKLKEIFNKALVDPGPDFVVCDEGHILKNEASAVSKAMNSIRSRRRIILTGTPLQNNLIEYHCMVNFIKENLLGSIKEFRNRFINPIQNGQCADSTMVDVRVMKKRAHILYEMLAGCVQRKDYTALTKFLPPKHEYVLAVRMTSIQCKLYQYYLDHLTGVGNNSEGGRGKAGAKLFQDFQMLSRIWTHPWCLQLDYISKENKGYFDEDSMDEFIASDSDETSMSLSSDDYTKKKKKGKKGKKDSSSSGSGSDNDVEVIKVWNSRSRGGGEGNVDETGNNPSVSLKLEESKATSSSNPSSPAPDWYKDFVTDADAEVLEHSGKMVLLFEILRMAEEIGDKVLVFSQSLISLDLIEDFLELASREKTEDKDKPLIYKGEGKWLRNIDYYRLDGSTTAQSRKKWAEEFNDETNVRGRLFIISTKAGSLGINLVAANRVIIFDASWNPSYDIQSIFRVYRFGQTKPVYVYRFLAQGTMEDKIYDRQVTKQSLSFRVVDQQQVERHFTMNELTELYTFEPDLLDDPNSEKKKKRDTPMLPKDTILAELLQIHKEHIVGYHEHDSLLDHKEEEELTEEERKAAWAEYEAEKKGLTMRFNIPTGTNLPPVSFNSQTPYIPFNLGALSAMSNQQLEDLINQGREKVVEATNSVTAVRIQPLEDIISAVWKENMNLSEAQVQALALSRQASQELDVKRREAIYNDVLTKQQMLISCVQRILMNRRLQQQYNQQQQQQMTYQQATLGHLMMPKPPNLIMNPSNYQQIDMRGMYQPVAGGMQPPPLQRAPPPMRSKNPGPSQGKSM

SEQ ID NO: 4232 - protein, 198 aa, Homo sapiens
  Payload ID: 951;
  Gene Symbol: ATRX;
  Gene Name: alpha thalassemia/mental retardation syndrome X-linked;
  ENSP ID: ENSP00000383663
EDGGVMIIGYEMYRNLAQGRNVKSRKLKEIFNKALVDPGPDFVVCDEGHILKNEASAVSKAMNSIRSRRRIILTGTPLQNNLIEYHCMVNFIKENLLGSIKEFRNRFINPIQNGQCADSTMVDVRVMKKRAHILYEMLAGCVQRKDYTALTKFLPPKHEYVLAVRMTSIQCKLYQYYLDHLTVLHLNKMGMLKSIKYF

SEQ ID NO: 4233 - protein, 164 aa, Homo sapiens
  Payload ID: 951;
  Gene Symbol: ATRX;
  Gene Name: alpha thalassemia/mental retardation syndrome X-linked;
  ENSP ID: ENSP00000480196
MTAEPMSESKLNTLVQKLHDFLAHSSEESEETSSPPRLAMNQNTDKISGSGSNSDMMENSKEEGTSSSEKSKSSGSSRSKRKPSIVTKYVESDDEKPLDDETVNEDASNENSENDITMQSLPKGTVIVQPEPVLNEDKDDFKGPEFRSRSKMKTENLKKRGVLW

SEQ ID NO: 4234 - protein, 198 aa, Homo sapiens
  Payload ID: 951;
  Gene Symbol: ATRX;
  Gene Name: alpha thalassemia/mental retardation syndrome X-linked;
  ENSP ID: ENSP00000485099
  MOD_RES (1)..(1): Any amino acid
XEEGTSSSEKSKSSGSSRSKRKPSIVTKYVESDDEKPLDDETVNEDASNENSENDITMQSLPKGTVIVQPEPVLNEDKDDFKGPEFRSRSKMKTENLKKRGDGLHGIVSCTACGQQVNHFQKDSIYRHPSLQVLICKNCFKYYMSDDISRDSDGMDEQCRWCAEGGNLICCDFCHNAFCKKCILRNLGRKELSTIMDE

SEQ ID NO: 4235 - protein, 108 aa, Homo sapiens
  Payload ID: 951;
  Gene Symbol: ATRX;
  Gene Name: alpha thalassemia/mental retardation syndrome X-linked;
  ENSP ID: ENSP00000485100
MMENSKEEGTSSSEKSKSSGSSRSKRKPSIVTKYVESDDEKPLDDETVNEDASNENSENDITMQSLPKEDGLHGIVSCTACGQQVNHFQKDSIYRHPSLQVLICKNCF

SEQ ID NO: 4236 - protein, 1351 aa, Homo sapiens
  Payload ID: 951;
  Gene Symbol: ATRX;
  Gene Name: alpha thalassemia/mental retardation syndrome X-linked;
  ENSP ID: ENSP00000485103
MTAEPMSESKLNTLVQKLHDFLAHSSEESEETSSPPRLAMNQNTDKISGSGSNSDMMENSKEEGTSSSEKSKSSGSSRSKRKPSIVTKYVESDDEKPLDDETVNEDASNENSENDITMQSLPKDGLHGIVSCTACGQQVNHFQKDSIYRHPSLQVLICKNCFKYYMSDDISRDSDGMDEQCRWCAEGGNLICCDFCHNAFCKKCILRNLGRKELSTIMDENNQWYCYICHPEPLLDLVTACNSVFENLEQLLQQNKKKIKVDSEKSNKVYEHTSRFSPKKTSSNCNGEEKKLDDSCSGSVTYSYSALIVPKEMIKKAKKLIETTANMNSSYVKFLKQATDNSEISSATKLRQLKAFKSVLADIKKAHLALEEDLNSEFRAMDAVNKEKNTKEHKVIDAKFETKARKGEKPCALEKKDISKSEAKLSRKQVDSEHMHQNVPTEEQRTNKSTGGEHKKSDRKEEPQYEPANTSEDLDMDIVSVPSSVPEDIFENLETAMEVQSSVDHQGDGSSGTEQEVESSSVKLNISSKDNRGGADCQEVPQDKDGYKSCGLNPKLEKCGLGQENSDNEHLVENEVSLLLEESDLRRSPRVKTTPLRRPTETNPVTSNSDEECNETVKEKQKLSVPVRKKDKRNSSDSAIDNPKPNKLPKSKQSETVDQNSDSDEMLAILKEVSRMSHSSSSDTDINEIHTNHKTLYDLKTQAGKDDKGKRKRKSSTSGSDFDTKKGKSAKSSIISKKKRQTQSESSNYDSELEKEIKSMSKIGAARTTKKRIPNTKDFDSSEDEKHSKKGMDNQGHKNLKTSQEGSSDDAERKQERETFSSAEGTVDKDTTIMELRDRLPKKQQASASTDGVDKLSGKEESFTSLEVRKVAETKEKSKHLKTKTCKKVQDGLSDIAEKFLKKDQSDETSEDDKKQSKKGTEEKKKPSDFKKKVIKMEQQYESSSDGTEKLPEREEICHFPKGIKQIKNGTTDGEKKSKKIRDKTSKKKDELSDYAEKSTGKGDSCDSSEDKKSKNGAYGREKKRCKLLGKSSRKRQDCSSSDTEKYSMKEDGCNSSDKRLKRIELRERRNLSSKRNTKEIQSGSSSSDAEESSEDNKKKKQRTSSKKKAVIVKEKKRNSLRTSTKRKQADITSSSSSDIEDDDQNSIGEGSSDEQKIKPVTENLVLSSHTGFCQSSGDEALSKSVPVTVDDDDDDNDPENRIAKKMLLEEIKANLSSDEDGSSDDEPEEGKKRTGKQNEENPGDEEAKNQVNSESDSDSEESKKPRYRHRLLRHKLTVSDGESGEEKKTKPKEHKEVKGRNRRKVSSEDSEDSDFQESGVSEEVSESEDEQRPRTRSAKKAELEENQRSY

SEQ ID NO: 4237 - protein, 528 aa, Homo sapiens
  Payload ID: 951;
  Gene Symbol: ATRX;
  Gene Name: alpha thalassemia/mental retardation syndrome X-linked;
  ENSP ID: ENSP00000485127
MMENSKEEGTSSSEKSKSSGSSRSKRKPSIVTKYVESDDEKPLDDETVNEDASNENSENDITMQSLPKGTVIVQPEPVLNEDKDDFKGPEFRSRSKMKTENLKKRGEDGLHGIVSCTACGQQVNHFQKDSIYRHPSLQVLICKNCFKYYMSDDISRDSDGMDEQCRWCAEGGNLICCDFCHNAFCKKCILRNLGRKELSTIMDENNQWYCYICHPEPLLDLVTACNSVFENLEQLLQQNKKKIKVDSEKSNKVYEHTSRFSPKKTSSNCNGEEKKLDDSCSGSVTYSYSALIVPKEMIKKAKKLIETTANMNSSYVKFLKQATDNSEISSATKLRQLKAFKSVLADIKKAHLALEEDLNSEFRAMDAVNKEKNTKEHKVIDAKFETKARKGEKPCALEKKDISKSEAKLSRKQVDSEHMHQNVPTEEQRTNKSTGGEHKKSDRKEEPQYEPANTSEDLDMDIVSVPSSVPEDIFENLETAMEVQSSVDHQGDGSSGTEQEVESSSVKLNISSKDNRGGIKSKTTAKVT

SEQ ID NO: 4238 - protein, 66 aa, Homo sapiens
  Payload ID: 951;
  Gene Symbol: ATRX;
  Gene Name: alpha thalassemia/mental retardation syndrome X-linked;
  ENSP ID: ENSP00000485183
  MOD_RES (1)..(1): Any amino acid
XENDDSKSPGKGRKKIRKILKDDKLRTETQNALKEEEERRKRIAEREREREKLREVTNFFLLLFLL

SEQ ID NO: 4239 - protein, 954 aa, Homo sapiens
  Payload ID: 951;
  Gene Symbol: ATRX;
  Gene Name: alpha thalassemia/mental retardation syndrome X-linked;
  ENSP ID: ENSP00000485253
MTAEPMSESKLNTLVQKLHDFLAHSSEESEETSSPPRLAMNQNTDKISGSGSNSDMMENSKEEGTSSSEKSKSSGSSRSKRKPSIVTKYVESDDEKPLDDETVNEDASNENSENDITMQSLPKGTVIVQPEPVLNEDKDDFKGPEFRSRSKMKTENLKKRGEDGLHGIVSCTACGQQVNHFQKDSIYRHPSLQVLICKNCFKYYMSDDISRDSDGMDEQCRWCAEGGNLICCDFCHNAFCKKCILRNLGRKELSTIMDENNQWYCYICHPEPLLDLVTACNSVFENLEQLLQQNKKKIKVDSEKSNKVYEHTSRFSPKKTSSNCNGEEKKLDDSCSGSVTYSYSALIVPKEMIKKAKKLIETTANMNSSYVKFLKQATDNSEISSATKLRQLKAFKSVLADIKKAHLALEEDLNSEFRAMDAVNKEKNTKEHKVIDAKFETKARKGEKPCALEKKDISKSEAKLSRKQVDSEHMHQNVPTEEQRTNKSTGGEHKKSDRKEEPQYEPANTSEDLDMDIVSVPSSVPEDIFENLETAMEVQSSVDHQGDGSSGTEQEVESSSVKLNISSKDNRGGADCQEVPQDKDGYKSCGLNPKLEKCGLGQENSDNEHLVENEVSLLLEESDLRRSPRVKTTPLRRPTETNPVTSNSDEECNETVKEKQKLSVPVRKKDKRNSSDSAIDNPKPNKLPKSKQSETVDQNSDSDEMLAILKEVSRMSHSSSSDTDINEIHTNHKTLYDLKTQAGKDDKGKRKRKSSTSGSDFDTKKGKSAKSSIISKKKRQTQSESSNYDSELEKEIKSMSKIGAARTTKKRIPNTKDFDSSEDEKHSKKGMDNQGHKNLKTSQEGSSDDAERKQERETFSSAEGTVDKDTTIMELRDRLPKKQQASASTDGVDKLSGKEESFTSLEVRKVAETKEKSKHLKTKTCKKVQDGLSDIAEKFLKKDQSDETSEDDKK

SEQ ID NO: 4240 - protein, 175 aa, Homo sapiens
  Payload ID: 951;
  Gene Symbol: ATRX;
  Gene Name: alpha thalassemia/mental retardation syndrome X-linked;
  ENSP ID: ENSP00000485274
  MOD_RES (1)..(1): Any amino acid
XRGKAGAKLFQDFQMLSRIWTHPWCLQLDYISKENKGYFDEDSMDEFIASDSDETSMSLSSDDYTKKKKKGKKGKKDSSSSGSGSDNDVEVIKVWNSRSRGGGEGNVDETGNNPSVSLKLEENIYKVLTICPDIRRELISLNGKLKKVKLLLLLIQAAQLQTGTKILLQMLMLRF

SEQ ID NO: 4241 - protein, 293 aa, Homo sapiens
  Payload ID: 951;
  Gene Symbol: ATRX;
  Gene Name: alpha thalassemia/mental retardation syndrome X-linked;
  ENSP ID: ENSP00000485408
TTDGEKKSKKIRDKTSKKKDELSDYAEKSTGKGDSCDSSEDKKSKNGAYGREKKRCKLLGKSSRKRQDCSSSDTEKYSMKEDGCNSSDKRLKRIELRERRNLSSKRNTKEIQSGSSSSDAEESSEDNKKKKQRTSSKKKAVIVKEKKRNSLRTSTKRKQADITSSSSSDIEDDDQNSIGEGSSDEQKIKPVTENLVLSSHTGFCQSSGDEALSKSVPVTVDDDDDDNDPENRYDSICKDFKKIITHPRHGHKQQQRNSKQVVKTRSACLRKTRSQSSCKFERKARKWAKTQKP

SEQ ID NO: 4242 - protein, 47 aa, Homo sapiens
  Payload ID: 951;
  Gene Symbol: ATRX;
  Gene Name: alpha thalassemia/mental retardation syndrome X-linked;
  ENSP ID: ENSP00000485587
MNQNTDKISGSGSNSDMMENSKEEGTSSSEKSKSSGSSRSKRKPSIV

SEQ ID NO: 4243 - protein, 300 aa, Homo sapiens
  Payload ID: 952;
  Gene Symbol: ATAT1;
  Gene Name: alpha tubulin acetyltransferase 1;
  Uniprot ID:  Q5SQI0;
  ENSP ID: ENSP00000324222
MEFPFDVDALFPERITVLDQHLRPPARRPGTTTPARVDLQQQIMTIIDELGKASAKAQNLSAPITSASRMQSNRHVVYILKDSSARPAGKGAIIGFIKVGYKKLFVLDDREAHNEVEPLCILDFYIHESVQRHGHGRELFQYMLQKERVEPHQLAIDRPSQKLLKFLNKHYNLETTVPQVNNFVIFEGFFAHQHPPARKLPPKRAEGDIKPYSSSDREFLKVAVEPPWPLNRAPRRATPPAHPPPRSSSLGNSPERGPLRPFVPEQELLRSLRLCPPHPTARLLLAADPGGSPAQRRRTR

SEQ ID NO: 4244 - protein, 310 aa, Homo sapiens
  Payload ID: 952;
  Gene Symbol: ATAT1;
  Gene Name: alpha tubulin acetyltransferase 1;
  Uniprot ID:  Q5SQI0;
  ENSP ID: ENSP00000324459
MEFPFDVDALFPERITVLDQHLRPPARRPGTTTPARVDLQQQIMTIIDELGKASAKAQNLSAPITSASRMQSNRHVVYILKDSSARPAGKGAIIGFIKVGYKKLFVLDDREAHNEVEPLCILDFYIHESVQRHGHGRELFQYMLQKERVEPHQLAIDRPSQKLLKFLNKHYNLETTVPQVNNFVIFEGFFAHQHPPARKLPPKRAEGDIKPYSSSDREFLKVAVEPPWPLNRAPRRATPPAHPPPRSSSLGNSPERGPLRPFVPEQELLRSLRLCPPHPTARLLLAADPGGSPAQRRRTSSLPRSEESRY

SEQ ID NO: 4245 - protein, 409 aa, Homo sapiens
  Payload ID: 952;
  Gene Symbol: ATAT1;
  Gene Name: alpha tubulin acetyltransferase 1;
  Uniprot ID:  Q5SQI0;
  ENSP ID: ENSP00000327832
MWLTWPFCFLTITLREEGVCHLESVDLQQQIMTIIDELGKASAKAQNLSAPITSASRMQSNRHVVYILKDSSARPAGKGAIIGFIKVGYKKLFVLDDREAHNEVEPLCILDFYIHESVQRHGHGRELFQYMLQKERVEPHQLAIDRPSQKLLKFLNKHYNLETTVPQVNNFVIFEGFFAHQHRPPAPSLRATRHSRAAAVDPTPAAPARKLPPKRAEGDIKPYSSSDREFLKVAVEPPWPLNRAPRRATPPAHPPPRSSSLGNSPERGPLRPFVPEQELLRSLRLCPPHPTARLLLAADPGGSPAQRRRTRGTPPGLVAQSCCYSRHGGVNSSSPNTGNQDSKQGEQETKNRSASEEQALSQDGSGEKPMHTAPPQAPAPPAQSWTVGGDILNARFIRNLQERRSTRPW

SEQ ID NO: 4246 - protein, 333 aa, Homo sapiens
  Payload ID: 952;
  Gene Symbol: ATAT1;
  Gene Name: alpha tubulin acetyltransferase 1;
  Uniprot ID:  Q5SQI0;
  ENSP ID: ENSP00000332374
MEFPFDVDALFPERITVLDQHLRPPARRPGTTTPARVDLQQQIMTIIDELGKASAKAQNLSAPITSASRMQSNRHVVYILKDSSARPAGKGAIIGFIKVGYKKLFVLDDREAHNEVEPLCILDFYIHESVQRHGHGRELFQYMLQKERVEPHQLAIDRPSQKLLKFLNKHYNLETTVPQVNNFVIFEGFFAHQHRPPAPSLRATRHSRAAAVDPTPAAPARKLPPKRAEGDIKPYSSSDREFLKVAVEPPWPLNRAPRRATPPAHPPPRSSSLGNSPERGPLRPFVPEQELLRSLRLCPPHPTARLLLAADPGGSPAQRRRTSSLPRSEESRY

SEQ ID NO: 4247 - protein, 323 aa, Homo sapiens
  Payload ID: 952;
  Gene Symbol: ATAT1;
  Gene Name: alpha tubulin acetyltransferase 1;
  Uniprot ID:  Q5SQI0;
  ENSP ID: ENSP00000365666
MEFPFDVDALFPERITVLDQHLRPPARRPGTTTPARVDLQQQIMTIIDELGKASAKAQNLSAPITSASRMQSNRHVVYILKDSSARPAGKGAIIGFIKVGYKKLFVLDDREAHNEVEPLCILDFYIHESVQRHGHGRELFQYMLQKERVEPHQLAIDRPSQKLLKFLNKHYNLETTVPQVNNFVIFEGFFAHQHRPPAPSLRATRHSRAAAVDPTPAAPARKLPPKRAEGDIKPYSSSDREFLKVAVEPPWPLNRAPRRATPPAHPPPRSSSLGNSPERGPLRPFVPEQELLRSLRLCPPHPTARLLLAADPGGSPAQRRRTR

SEQ ID NO: 4248 - protein, 421 aa, Homo sapiens
  Payload ID: 952;
  Gene Symbol: ATAT1;
  Gene Name: alpha tubulin acetyltransferase 1;
  Uniprot ID:  Q5SQI0;
  ENSP ID: ENSP00000365668
MEFPFDVDALFPERITVLDQHLRPPARRPGTTTPARVDLQQQIMTIIDELGKASAKAQNLSAPITSASRMQSNRHVVYILKDSSARPAGKGAIIGFIKVGYKKLFVLDDREAHNEVEPLCILDFYIHESVQRHGHGRELFQYMLQKERVEPHQLAIDRPSQKLLKFLNKHYNLETTVPQVNNFVIFEGFFAHQHRPPAPSLRATRHSRAAAVDPTPAAPARKLPPKRAEGDIKPYSSSDREFLKVAVEPPWPLNRAPRRATPPAHPPPRSSSLGNSPERGPLRPFVPEQELLRSLRLCPPHPTARLLLAADPGGSPAQRRRTRGTPPGLVAQSCCYSRHGGVNSSSPNTGNQDSKQGEQETKNRSASEEQALSQDGSGEKPMHTAPPQAPAPPAQSWTVGGDILNARFIRNLQERRSTRPW

SEQ ID NO: 4249 - protein, 409 aa, Homo sapiens; identical to SEQ ID NO: 4245
  Payload ID: 952;
  Gene Symbol: ATAT1;
  Gene Name: alpha tubulin acetyltransferase 1;
  Uniprot ID:  Q5SQI0;
  ENSP ID: ENSP00000373076

SEQ ID NO: 4250 - protein, 333 aa, Homo sapiens; identical to SEQ ID NO: 4246
  Payload ID: 952;
  Gene Symbol: ATAT1;
  Gene Name: alpha tubulin acetyltransferase 1;
  Uniprot ID:  Q5SQI0;
  ENSP ID: ENSP00000373077

SEQ ID NO: 4251 - protein, 300 aa, Homo sapiens; identical to SEQ ID NO: 4243
  Payload ID: 952;
  Gene Symbol: ATAT1;
  Gene Name: alpha tubulin acetyltransferase 1;
  Uniprot ID:  Q5SQI0;
  ENSP ID: ENSP00000373078

SEQ ID NO: 4252 - protein, 421 aa, Homo sapiens; identical to SEQ ID NO: 4248
  Payload ID: 952;
  Gene Symbol: ATAT1;
  Gene Name: alpha tubulin acetyltransferase 1;
  Uniprot ID:  Q5SQI0;
  ENSP ID: ENSP00000373079

SEQ ID NO: 4253 - protein, 323 aa, Homo sapiens; identical to SEQ ID NO: 4247
  Payload ID: 952;
  Gene Symbol: ATAT1;
  Gene Name: alpha tubulin acetyltransferase 1;
  Uniprot ID:  Q5SQI0;
  ENSP ID: ENSP00000383419

SEQ ID NO: 4254 - protein, 310 aa, Homo sapiens; identical to SEQ ID NO: 4244
  Payload ID: 952;
  Gene Symbol: ATAT1;
  Gene Name: alpha tubulin acetyltransferase 1;
  Uniprot ID:  Q5SQI0;
  ENSP ID: ENSP00000383420

SEQ ID NO: 4255 - protein, 323 aa, Homo sapiens; identical to SEQ ID NO: 4247
  Payload ID: 952;
  Gene Symbol: ATAT1;
  Gene Name: alpha tubulin acetyltransferase 1;
  Uniprot ID:  Q5SQI0;
  ENSP ID: ENSP00000388171

SEQ ID NO: 4256 - protein, 323 aa, Homo sapiens; identical to SEQ ID NO: 4247
  Payload ID: 952;
  Gene Symbol: ATAT1;
  Gene Name: alpha tubulin acetyltransferase 1;
  Uniprot ID:  Q5SQI0;
  ENSP ID: ENSP00000388617

SEQ ID NO: 4257 - protein, 409 aa, Homo sapiens; identical to SEQ ID NO: 4245
  Payload ID: 952;
  Gene Symbol: ATAT1;
  Gene Name: alpha tubulin acetyltransferase 1;
  Uniprot ID:  Q5SQI0;
  ENSP ID: ENSP00000389129

SEQ ID NO: 4258 - protein, 409 aa, Homo sapiens; identical to SEQ ID NO: 4245
  Payload ID: 952;
  Gene Symbol: ATAT1;
  Gene Name: alpha tubulin acetyltransferase 1;
  Uniprot ID:  Q5SQI0;
  ENSP ID: ENSP00000391244

SEQ ID NO: 4259 - protein, 323 aa, Homo sapiens; identical to SEQ ID NO: 4247
  Payload ID: 952;
  Gene Symbol: ATAT1;
  Gene Name: alpha tubulin acetyltransferase 1;
  Uniprot ID:  Q5SQI0;
  ENSP ID: ENSP00000393269

SEQ ID NO: 4260 - protein, 300 aa, Homo sapiens; identical to SEQ ID NO: 4243
  Payload ID: 952;
  Gene Symbol: ATAT1;
  Gene Name: alpha tubulin acetyltransferase 1;
  Uniprot ID:  Q5SQI0;
  ENSP ID: ENSP00000393868

SEQ ID NO: 4261 - protein, 333 aa, Homo sapiens; identical to SEQ ID NO: 4246
  Payload ID: 952;
  Gene Symbol: ATAT1;
  Gene Name: alpha tubulin acetyltransferase 1;
  Uniprot ID:  Q5SQI0;
  ENSP ID: ENSP00000394357

SEQ ID NO: 4262 - protein, 421 aa, Homo sapiens; identical to SEQ ID NO: 4248
  Payload ID: 952;
  Gene Symbol: ATAT1;
  Gene Name: alpha tubulin acetyltransferase 1;
  Uniprot ID:  Q5SQI0;
  ENSP ID: ENSP00000394914

SEQ ID NO: 4263 - protein, 409 aa, Homo sapiens; identical to SEQ ID NO: 4245
  Payload ID: 952;
  Gene Symbol: ATAT1;
  Gene Name: alpha tubulin acetyltransferase 1;
  Uniprot ID:  Q5SQI0;
  ENSP ID: ENSP00000398374

SEQ ID NO: 4264 - protein, 421 aa, Homo sapiens; identical to SEQ ID NO: 4248
  Payload ID: 952;
  Gene Symbol: ATAT1;
  Gene Name: alpha tubulin acetyltransferase 1;
  Uniprot ID:  Q5SQI0;
  ENSP ID: ENSP00000398422

SEQ ID NO: 4265 - protein, 333 aa, Homo sapiens; identical to SEQ ID NO: 4246
  Payload ID: 952;
  Gene Symbol: ATAT1;
  Gene Name: alpha tubulin acetyltransferase 1;
  Uniprot ID:  Q5SQI0;
  ENSP ID: ENSP00000399452

SEQ ID NO: 4266 - protein, 333 aa, Homo sapiens; identical to SEQ ID NO: 4246
  Payload ID: 952;
  Gene Symbol: ATAT1;
  Gene Name: alpha tubulin acetyltransferase 1;
  Uniprot ID:  Q5SQI0;
  ENSP ID: ENSP00000399509

SEQ ID NO: 4267 - protein, 300 aa, Homo sapiens; identical to SEQ ID NO: 4243
  Payload ID: 952;
  Gene Symbol: ATAT1;
  Gene Name: alpha tubulin acetyltransferase 1;
  Uniprot ID:  Q5SQI0;
  ENSP ID: ENSP00000399529

SEQ ID NO: 4268 - protein, 300 aa, Homo sapiens; identical to SEQ ID NO: 4243
  Payload ID: 952;
  Gene Symbol: ATAT1;
  Gene Name: alpha tubulin acetyltransferase 1;
  Uniprot ID:  Q5SQI0;
  ENSP ID: ENSP00000402998

SEQ ID NO: 4269 - protein, 323 aa, Homo sapiens; identical to SEQ ID NO: 4247
  Payload ID: 952;
  Gene Symbol: ATAT1;
  Gene Name: alpha tubulin acetyltransferase 1;
  Uniprot ID:  Q5SQI0;
  ENSP ID: ENSP00000403142

SEQ ID NO: 4270 - protein, 333 aa, Homo sapiens; identical to SEQ ID NO: 4246
  Payload ID: 952;
  Gene Symbol: ATAT1;
  Gene Name: alpha tubulin acetyltransferase 1;
  Uniprot ID:  Q5SQI0;
  ENSP ID: ENSP00000405036

SEQ ID NO: 4271 - protein, 300 aa, Homo sapiens; identical to SEQ ID NO: 4243
  Payload ID: 952;
  Gene Symbol: ATAT1;
  Gene Name: alpha tubulin acetyltransferase 1;
  Uniprot ID:  Q5SQI0;
  ENSP ID: ENSP00000405656

SEQ ID NO: 4272 - protein, 310 aa, Homo sapiens; identical to SEQ ID NO: 4244
  Payload ID: 952;
  Gene Symbol: ATAT1;
  Gene Name: alpha tubulin acetyltransferase 1;
  Uniprot ID:  Q5SQI0;
  ENSP ID: ENSP00000406071

SEQ ID NO: 4273 - protein, 333 aa, Homo sapiens; identical to SEQ ID NO: 4246
  Payload ID: 952;
  Gene Symbol: ATAT1;
  Gene Name: alpha tubulin acetyltransferase 1;
  Uniprot ID:  Q5SQI0;
  ENSP ID: ENSP00000406421

SEQ ID NO: 4274 - protein, 421 aa, Homo sapiens; identical to SEQ ID NO: 4248
  Payload ID: 952;
  Gene Symbol: ATAT1;
  Gene Name: alpha tubulin acetyltransferase 1;
  Uniprot ID:  Q5SQI0;
  ENSP ID: ENSP00000409067

SEQ ID NO: 4275 - protein, 310 aa, Homo sapiens; identical to SEQ ID NO: 4244
  Payload ID: 952;
  Gene Symbol: ATAT1;
  Gene Name: alpha tubulin acetyltransferase 1;
  Uniprot ID:  Q5SQI0;
  ENSP ID: ENSP00000409296

SEQ ID NO: 4276 - protein, 310 aa, Homo sapiens; identical to SEQ ID NO: 4244
  Payload ID: 952;
  Gene Symbol: ATAT1;
  Gene Name: alpha tubulin acetyltransferase 1;
  Uniprot ID:  Q5SQI0;
  ENSP ID: ENSP00000410415

SEQ ID NO: 4277 - protein, 421 aa, Homo sapiens; identical to SEQ ID NO: 4248
  Payload ID: 952;
  Gene Symbol: ATAT1;
  Gene Name: alpha tubulin acetyltransferase 1;
  Uniprot ID:  Q5SQI0;
  ENSP ID: ENSP00000411050

SEQ ID NO: 4278 - protein, 323 aa, Homo sapiens; identical to SEQ ID NO: 4247
  Payload ID: 952;
  Gene Symbol: ATAT1;
  Gene Name: alpha tubulin acetyltransferase 1;
  Uniprot ID:  Q5SQI0;
  ENSP ID: ENSP00000411362

SEQ ID NO: 4279 - protein, 310 aa, Homo sapiens; identical to SEQ ID NO: 4244
  Payload ID: 952;
  Gene Symbol: ATAT1;
  Gene Name: alpha tubulin acetyltransferase 1;
  Uniprot ID:  Q5SQI0;
  ENSP ID: ENSP00000412198

SEQ ID NO: 4280 - protein, 409 aa, Homo sapiens; identical to SEQ ID NO: 4245
  Payload ID: 952;
  Gene Symbol: ATAT1;
  Gene Name: alpha tubulin acetyltransferase 1;
  Uniprot ID:  Q5SQI0;
  ENSP ID: ENSP00000412993

SEQ ID NO: 4281 - protein, 300 aa, Homo sapiens; identical to SEQ ID NO: 4243
  Payload ID: 952;
  Gene Symbol: ATAT1;
  Gene Name: alpha tubulin acetyltransferase 1;
  Uniprot ID:  Q5SQI0;
  ENSP ID: ENSP00000415000

SEQ ID NO: 4282 - protein, 310 aa, Homo sapiens; identical to SEQ ID NO: 4244
  Payload ID: 952;
  Gene Symbol: ATAT1;
  Gene Name: alpha tubulin acetyltransferase 1;
  Uniprot ID:  Q5SQI0;
  ENSP ID: ENSP00000415408

SEQ ID NO: 4283 - protein, 409 aa, Homo sapiens; identical to SEQ ID NO: 4245
  Payload ID: 952;
  Gene Symbol: ATAT1;
  Gene Name: alpha tubulin acetyltransferase 1;
  Uniprot ID:  Q5SQI0;
  ENSP ID: ENSP00000416925

SEQ ID NO: 4284 - protein, 421 aa, Homo sapiens; identical to SEQ ID NO: 4248
  Payload ID: 952;
  Gene Symbol: ATAT1;
  Gene Name: alpha tubulin acetyltransferase 1;
  Uniprot ID:  Q5SQI0;
  ENSP ID: ENSP00000416994

SEQ ID NO: 4285 - protein, 340 aa, Homo sapiens
  Payload ID: 953;
  Gene Symbol: A4GNT;
  Gene Name: alpha-1,4-N-acetylglucosaminyltransferase;
  Uniprot ID:  Q9UNA3;
  ENSP ID: ENSP00000236709
MRKELQLSLSVTLLLVCGFLYQFTLKSSCLFCLPSFKSHQGLEALLSHRRGIVFLETSERMEPPHLVSCSVESAAKIYPEWPVVFFMKGLTDSTPMPSNSTYPAFSFLSAIDNVFLFPLDMKRLLEDTPLFSWYNQINASAERNWLHISSDASRLAIIWKYGGIYMDTDVISIRPIPEENFLAAQASRYSSNGIFGFLPHHPFLWECMENFVEHYNSAIWGNQGPELMTRMLRVWCKLEDFQEVSDLRCLNISFLHPQRFYPISYREWRRYYEVWDTEPSFNVSYALHLWNHMNQEGRAVIRGSNTLVENLYRKHCPRTYRDLIKGPEGSVTGELGPGNK

SEQ ID NO: 4286 - protein, 495 aa, Homo sapiens
  Payload ID: 954;
  Gene Symbol: A1BG;
  Gene Name: alpha-1-B glycoprt;
  Uniprot ID:  P04217;
  ENSP ID: ENSP00000263100
MSMLVVFLLLWGVTWGPVTEAAIFYETQPSLWAESESLLKPLANVTLTCQAHLETPDFQLFKNGVAQEPVHLDSPAIKHQFLLTGDTQGRYRCRSGLSTGWTQLSKLLELTGPKSLPAPWLSMAPVSWITPGLKTTAVCRGVLRGVTFLLRREGDHEFLEVPEAQEDVEATFPVHQPGNYSCSYRTDGEGALSEPSATVTIEELAAPPPPVLMHHGESSQVLHPGNKVTLTCVAPLSGVDFQLRRGEKELLVPRSSTSPDRIFFHLNAVALGDGGHYTCRYRLHDNQNGWSGDSAPVELILSDETLPAPEFSPEPESGRALRLRCLAPLEGARFALVREDRGGRRVHRFQSPAGTEALFELHNISVADSANYSCVYVDLKPPFGGSAPSERLELHVDGPPPRPQLRATWSGAVLAGRDAVLRCEGPIPDVTFELLREGETKAVKTVRTPGAAANLELIFVGPQHAGNYRCRYRSWVPHTFESELSDPVELLVAES

SEQ ID NO: 4287 - protein, 305 aa, Homo sapiens
  Payload ID: 954;
  Gene Symbol: A1BG;
  Gene Name: alpha-1-B glycoprt;
  ENSP ID: ENSP00000470909
LTCQAHLETPDFQLFKNGVAQEPVHLDSPAIKHQFLLTGDTQGRYRCRSGLSTGWTQLSKLLELTGPKSLPAPWLSMAPVSWITPGLKTTAVCRGVLRGVTFLLRREGDHEFLEVPEAQEDVEATFPVHQPGNYSCSYRTDGEGALSEPSATVTIEELGPGPGSWPHGCLGLMVAKEFGQRMPKEWKAAPPPPVLMHHGESSQVLHPGNKVTLTCVAPLSGVDFQLRRGEKELLVPRSSTSPDRIFFHLNAVALGDGGHYTCRYRLHDNQNGWSGDSAPVELILSDETLPAPEFSPEPESGRALR

SEQ ID NO: 4288 - protein, 352 aa, Homo sapiens
  Payload ID: 955;
  Gene Symbol: AMBP;
  Gene Name: alpha-1-microglobulin/bikunin precursor;
  Uniprot ID:  P02760;
  ENSP ID: ENSP00000265132
MRSLGALLLLLSACLAVSAGPVPTPPDNIQVQENFNISRIYGKWYNLAIGSTCPWLKKIMDRMTVSTLVLGEGATEAEISMTSTRWRKGVCEETSGAYEKTDTDGKFLYHKSKWNITMESYVVHTNYDEYAIFLTKKFSRHHGPTITAKLYGRAPQLRETLLQDFRVVAQGVGIPEDSIFTMADRGECVPGEQEPEPILIPRVRRAVLPQEEEGSGGGQLVTEVTKKEDSCQLGYSAGPCMGMTSRYFYNGTSMACETFQYGGCMGNGNNFVTEKECLQTCRTVAACNLPIVRGPCRAFIQLWAFDAVKGKCVLFPYGGCQGNGNKFYSEKECREYCGVPGDGDEELLRFSN

SEQ ID NO: 4289 - protein, 238 aa, Homo sapiens
  Payload ID: 955;
  Gene Symbol: AMBP;
  Gene Name: alpha-1-microglobulin/bikunin precursor;
  ENSP ID: ENSP00000474859
MRSLGALLLLLSACLAVSAGPVPTPPDNIQVQENFNISRIYGKWYNLAIGSTCPWLKKIMDRMTVSTLVLGEGATEAEISMTSTRWRKGVCEETSGAYEKTDTDGKFLYHKSKWNITMESYVVHTNYDEYAIFLTKKFSRHHGPTITAKLYGRAPQLRETLLQDFRVVAQGVGIPEDSIFTMADRVNGLEQATQAGPFMKWTKARQVPSTMLTKDTNPGLGWPLGLVLLFTPLSCSVT

SEQ ID NO: 4290 - protein, 193 aa, Homo sapiens
  Payload ID: 955;
  Gene Symbol: AMBP;
  Gene Name: alpha-1-microglobulin/bikunin precursor;
  ENSP ID: ENSP00000475149
HKSKWNITMESYVVHTNYDEYAIFLTKKFSRHHGPTITAKLYGRAPQLRETLLQDFRVVAQGVGIPEDSIFTMADRGECVPGEQEPEPILIPRVRRAVLPQEEEGSGGGQLVTEVTKKEDSCQLGYSAGPCMGMTSRYFYNGTSMACETFQYGGCMGNGNNFVTVRGPCRAFIQLWAFDAVKGKCVLFPYGGC

SEQ ID NO: 4291 - protein, 298 aa, Homo sapiens
  Payload ID: 956;
  Gene Symbol: AZGP1;
  Gene Name: alpha-2-glycoprt 1, zinc-binding;
  Uniprot ID:  P25311;
  ENSP ID: ENSP00000292401
MVRMVPVLLSLLLLLGPAVPQENQDGRYSLTYIYTGLSKHVEDVPAFQALGSLNDLQFFRYNSKDRKSQPMGLWRQVEGMEDWKQDSQLQKAREDIFMETLKDIVEYYNDSNGSHVLQGRFGCEIENNRSSGAFWKYYYDGKDYIEFNKEIPAWVPFDPAAQITKQKWEAEPVYVQRAKAYLEEECPATLRKYLKYSKNILDRQDPPSVVVTSHQAPGEKKKLKCLAYDFYPGKIDVHWTRAGEVQEPELRGDVLHNGNGTYQSWVVVAVPPQDTAPYSCHVQHSSLAQPLVVPWEAS

SEQ ID NO: 4292 - protein, 85 aa, Homo sapiens
  Payload ID: 956;
  Gene Symbol: AZGP1;
  Gene Name: alpha-2-glycoprt 1, zinc-binding;
  ENSP ID: ENSP00000389942
  MOD_RES (1)..(1): Any amino acid
XTYIYTGLSKHVEDVPAFQALGSLNDLQFFRYNSKDRKSQPMGLWRQQKYPGPARSSLCGGHQPPGPRRKEETEVPGLRLLPREN

SEQ ID NO: 4293 - protein, 227 aa, Homo sapiens
  Payload ID: 956;
  Gene Symbol: AZGP1;
  Gene Name: alpha-2-glycoprt 1, zinc-binding;
  ENSP ID: ENSP00000396093
MVPVLLSLLLLLGPAVPQENQDGRYSLTYIYTGLSKHVEDVPAFQALGSLNDLQFFRYNSKDRKSQPMGLWRQVEGMEDWKQDSQLQKAREDIFMETLKDIVEYYNDSNGSHVLQGRFGCEIENNRSSGAFWKYYYDGKDYIEFNKEIPAWVPFDPAAQITKQKWEAEPVYVQRAKAYLEEECPATLRKYLKYSKNILDRQGTHCFLLPSTEPRIKDDLRLGAQATS

SEQ ID NO: 4294 - protein, 368 aa, Homo sapiens
  Payload ID: 957;
  Gene Symbol: AHSG;
  Gene Name: alpha-2-HS-glycoprt;
  ENSP ID: ENSP00000273784
MKSLVLLLCLAQLWGCHSAPHGPGLIYRQPNCDDPETEEAALVAIDYINQNLPWGYKHTLNQIDEVKVWPQQPSGELFEIEIDTLETTCHVLDPTPVARCSVRQLKEHAVEGDCDFQLLKLDGKFSVVYAKCDSSPADSAEDVRKVCQDCPLLAPLNDTRVVHAAKAALAAFNAQNNGSNFQLEEISRAQLVPLPPSTYVEFTVSGTDCVAKEATEAAKCNLLAEKQYGFCKATLSEKLGGAEVAVTCMVFQTQPVSSQPQPEGANEAVPTPVVDPDAPPSPPLGAPGLPPAGSPPDSHVLLAAPPGHQLHRAHYDLRHTFMGVVSLGSPSGEVSHPRKTRTVVQPSVGAAAGPVVPPCPGRIRHFKV

SEQ ID NO: 4295 - protein, 367 aa, Homo sapiens
  Payload ID: 957;
  Gene Symbol: AHSG;
  Gene Name: alpha-2-HS-glycoprt;
  Uniprot ID:  P02765;
  ENSP ID: ENSP00000393887
MKSLVLLLCLAQLWGCHSAPHGPGLIYRQPNCDDPETEEAALVAIDYINQNLPWGYKHTLNQIDEVKVWPQQPSGELFEIEIDTLETTCHVLDPTPVARCSVRQLKEHAVEGDCDFQLLKLDGKFSVVYAKCDSSPDSAEDVRKVCQDCPLLAPLNDTRVVHAAKAALAAFNAQNNGSNFQLEEISRAQLVPLPPSTYVEFTVSGTDCVAKEATEAAKCNLLAEKQYGFCKATLSEKLGGAEVAVTCMVFQTQPVSSQPQPEGANEAVPTPVVDPDAPPSPPLGAPGLPPAGSPPDSHVLLAAPPGHQLHRAHYDLRHTFMGVVSLGSPSGEVSHPRKTRTVVQPSVGAAAGPVVPPCPGRIRHFKV

SEQ ID NO: 4296 - protein, 1474 aa, Homo sapiens
  Payload ID: 958;
  Gene Symbol: A2M;
  Gene Name: alpha-2-macroglobulin;
  Uniprot ID:  P01023;
  ENSP ID: ENSP00000323929
MGKNKLLHPSLVLLLLVLLPTDASVSGKPQYMVLVPSLLHTETTEKGCVLLSYLNETVTVSASLESVRGNRSLFTDLEAENDVLHCVAFAVPKSSSNEEVMFLTVQVKGPTQEFKKRTTVMVKNEDSLVFVQTDKSIYKPGQTVKFRVVSMDENFHPLNELIPLVYIQDPKGNRIAQWQSFQLEGGLKQFSFPLSSEPFQGSYKVVVQKKSGGRTEHPFTVEEFVLPKFEVQVTVPKIITILEEEMNVSVCGLYTYGKPVPGHVTVSICRKYSDASDCHGEDSQAFCEKFSGQLNSHGCFYQQVKTKVFQLKRKEYEMKLHTEAQIQEEGTVVELTGRQSSEITRTITKLSFVKVDSHFRQGIPFFGQVRLVDGKGVPIPNKVIFIRGNEANYYSNATTDEHGLVQFSINTTNVMGTSLTVRVNYKDRSPCYGYQWVSEEHEEAHHTAYLVFSPSKSFVHLEPMSHELPCGHTQTVQAHYILNGGTLLGLKKLSFYYLIMAKGGIVRTGTHGLLVKQEDMKGHFSISIPVKSDIAPVARLLIYAVLPTGDVIGDSAKYDVENCLANKVDLSFSPSQSLPASHAHLRVTAAPQSVCALRAVDQSVLLMKPDAELSASSVYNLLPEKDLTGFPGPLNDQDNEDCINRHNVYINGITYTPVSSTNEKDMYSFLEDMGLKAFTNSKIRKPKMCPQLQQYEMHGPEGLRVGFYESDVMGRGHARLVHVEEPHTETVRKYFPETWIWDLVVVNSAGVAEVGVTVPDTITEWKAGAFCLSEDAGLGISSTASLRAFQPFFVELTMPYSVIRGEAFTLKATVLNYLPKCIRVSVQLEASPAFLAVPVEKEQAPHCICANGRQTVSWAVTPKSLGNVNFTVSAEALESQELCGTEVPSVPEHGRKDTVIKPLLVEPEGLEKETTFNSLLCPSGGEVSEELSLKLPPNVVEESARASVSVLGDILGSAMQNTQNLLQMPYGCGEQNMVLFAPNIYVLDYLNETQQLTPEIKSKAIGYLNTGYQRQLNYKHYDGSYSTFGERYGRNQGNTWLTAFVLKTFAQARAYIFIDEAHITQALIWLSQRQKDNGCFRSSGSLLNNAIKGGVEDEVTLSAYITIALLEIPLTVTHPVVRNALFCLESAWKTAQEGDHGSHVYTKALLAYAFALAGNQDKRKEVLKSLNEEAVKKDNSVHWERPQKPKAPVGHFYEPQAPSAEVEMTSYVLLAYLTAQPAPTSEDLTSATNIVKWITKQQNAQGGFSSTQDTVVALHALSKYGAATFTRTGKAAQVTIQSSGTFSSKFQVDNNNRLLLQQVSLPELPGEYSMKVTGEGCVYLQTSLKYNILPEKEEFPFALGVQTLPQTCDEPKAHTSFQISLSVSYTGSRSASNMAIVDVKMVSGFIPLKPTVKMLERSNHVSRTEVSSNHVLIYLDKVSNQTLSLFFTVLQDVPVRDLKPAIVKVYDYYETDEFAIAEYNAPCSKDLGNA

SEQ ID NO: 4297 - protein, 168 aa, Homo sapiens
  Payload ID: 958;
  Gene Symbol: A2M;
  Gene Name: alpha-2-macroglobulin;
  ENSP ID: ENSP00000385710
MGKNKLLHPSLVLLLLVLLPTDASVSGKPQYMVLVPSLLHTETTEKGCVLLSYLNETVTVSASLESVRGNRSLFTDLEAENDVLHCVAFAVPKSSSNEEVMFLTVQVKGPTQEFKKRTTVMVKNEDSLVFVQTDKSIYKPGQTVKFRVVSMDENFHPLNELIPLVYIQ

SEQ ID NO: 4298 - protein, 73 aa, Homo sapiens
  Payload ID: 958;
  Gene Symbol: A2M;
  Gene Name: alpha-2-macroglobulin;
  ENSP ID: ENSP00000438599
NGGTLLGLKKLSFYYLIMAKGGIVRTGTHGLLVKQEDMKGHFSISIPVKSDIAPVARFTTCYQKRTSLASLGL

SEQ ID NO: 4299 - protein, 90 aa, Homo sapiens
  Payload ID: 958;
  Gene Symbol: A2M;
  Gene Name: alpha-2-macroglobulin;
  ENSP ID: ENSP00000445717
MGKNKLLHPSLVLLLLVLLPTDASVSGKPQYMVLVPSLLHTETTEKGCVLLSYLNETVTVSASLESVRGNRSLFTDLEAENDVLHCVAFA

SEQ ID NO: 4300 - protein, 1454 aa, Homo sapiens
  Payload ID: 959;
  Gene Symbol: A2ML1;
  Gene Name: alpha-2-macroglobulin-like 1;
  Uniprot ID:  A8K2U0;
  ENSP ID: ENSP00000299698
MWAQLLLGMLALSPAIAEELPNYLVTLPARLNFPSVQKVCLDLSPGYSDVKFTVTLETKDKTQKLLEYSGLKKRHLHCISFLVPPPAGGTEEVATIRVSGVGNNISFEEKKKVLIQRQGNGTFVQTDKPLYTPGQQVYFRIVTMDSNFVPVNDKYSMVELQDPNSNRIAQWLEVVPEQGIVDLSFQLAPEAMLGTYTVAVAEGKTFGTFSVEEYVLPKFKVEVVEPKELSTVQESFLVKICCRYTYGKPMLGAVQVSVCQKANTYWYREVEREQLPDKCRNLSGQTDKTGCFSAPVDMATFDLIGYAYSHQINIVATVVEEGTGVEANATQNIYISPQMGSMTFEDTSNFYHPNFPFSGKIRVRGHDDSFLKNHLVFLVIYGTNGTFNQTLVTDNNGLAPFTLETSGWNGTDVSLEGKFQMEDLVYNPEQVPRYYQNAYLHLRPFYSTTRSFLGIHRLNGPLKCGQPQEVLVDYYIDPADASPDQEISFSYYLIGKGSLVMEGQKHLNSKKKGLKASFSLSLTFTSRLAPDPSLVIYAIFPSGGVVADKIQFSVEMCFDNQVSLGFSPSQQLPGAEVELQLQAAPGSLCALRAVDESVLLLRPDRELSNRSVYGMFPFWYGHYPYQVAEYDQCPVSGPWDFPQPLIDPMPQGHSSQRSIIWRPSFSEGTDLFSFFRDVGLKILSNAKIKKPVDCSHRSPEYSTAMGAGGGHPEAFESSTPLHQAEDSQVRQYFPETWLWDLFPIGNSGKEAVHVTVPDAITEWKAMSFCTSQSRGFGLSPTVGLTAFKPFFVDLTLPYSVVRGESFRLTATIFNYLKDCIRVQTDLAKSHEYQLESWADSQTSSCLCADDAKTHHWNITAVKLGHINFTISTKILDSNEPCGGQKGFVPQKGRSDTLIKPVLVKPEGVLVEKTHSSLLCPKGKVASESVSLELPVDIVPDSTKAYVTVLGDIMGTALQNLDGLVQMPSGCGEQNMVLFAPIIYVLQYLEKAGLLTEEIRSRAVGFLEIGYQKELMYKHSNGSYSAFGERDGNGNTWLTAFVTKCFGQAQKFIFIDPKNIQDALKWMAGNQLPSGCYANVGNLLHTAMKGGVDDEVSLTAYVTAALLEMGKDVDDPMVSQGLRCLKNSATSTTNLYTQALLAYIFSLAGEMDIRNILLKQLDQQAIISGESIYWSQKPTPSSNASPWSEPAAVDVELTAYALLAQLTKPSLTQKEIAKATSIVAWLAKQHNAYGGFSSTQDTVVALQALAKYATTAYMPSEEINLVVKSTENFQRTFNIQSVNRLVFQQDTLPNVPGMYTLEASGQGCVYVQTVLRYNILPPTNMKTFSLSVEIGKARCEQPTSPRSLTLTIHTSYVGSRSSSNMAIVEVKMLSGFSPMEGTNQLLLQQPLVKKVEFGTDTLNIYLDELIKNTQTYTFTISQSVLVTNLKPATIKVYDYYLPDEQATIQYSDPCE

SEQ ID NO: 4301 - protein, 963 aa, Homo sapiens
  Payload ID: 959;
  Gene Symbol: A2ML1;
  Gene Name: alpha-2-macroglobulin-like 1;
  Uniprot ID:  A8K2U0;
  ENSP ID: ENSP00000438292
MLIGKGSLVMEGQKHLNSKKKGLKASFSLSLTFTSRLAPDPSLVIYAIFPSGGVVADKIQFSVEMCFDNQVSLGFSPSQQLPGAEVELQLQAAPGSLCALRAVDESVLLLRPDRELSNRSVYGMFPFWYGHYPYQVAEYDQCPVSGPWDFPQPLIDPMPQGHSSQRSIIWRPSFSEGTDLFSFFRDVGLKILSNAKIKKPVDCSHRSPEYSTAMGAGGGHPEAFESSTPLHQAEDSQVRQYFPETWLWDLFPIGNSGKEAVHVTVPDAITEWKAMSFCTSQSRGFGLSPTVGLTAFKPFFVDLTLPYSVVRGESFRLTATIFNYLKDCIRVQTDLAKSHEYQLESWADSQTSSCLCADDAKTHHWNITAVKLGHINFTISTKILDSNEPCGGQKGFVPQKGRSDTLIKPVLVKPEGVLVEKTHSSLLCPKGKVASESVSLELPVDIVPDSTKAYVTVLGDIMGTALQNLDGLVQMPSGCGEQNMVLFAPIIYVLQYLEKAGLLTEEIRSRAVGFLEIGYQKELMYKHSNGSYSAFGERDGNGNTWLTAFVTKCFGQAQKFIFIDPKNIQDALKWMAGNQLPSGCYANVGNLLHTAMKGGVDDEVSLTAYVTAALLEMGKDVDDPMVSQGLRCLKNSATSTTNLYTQALLAYIFSLAGEMDIRNILLKQLDQQAIISGESIYWSQKPTPSSNASPWSEPAAVDVELTAYALLAQLTKPSLTQKEIAKATSIVAWLAKQHNAYGGFSSTQDTVVALQALAKYATTAYMPSEEINLVVKSTENFQRTFNIQSVNRLVFQQDTLPNVPGMYTLEASGQGCVYVQTVLRYNILPPTNMKTFSLSVEIGKARCEQPTSPRSLTLTIHTSYVGSRSSSNMAIVEVKMLSGFSPMEGTNQLLLQQPLVKKVEFGTDTLNIYLDELIKNTQTYTFTISQSVLVTNLKPATIKVYDYYLPDEQATIQYSDPCE

SEQ ID NO: 4302 - protein, 183 aa, Homo sapiens
  Payload ID: 959;
  Gene Symbol: A2ML1;
  Gene Name: alpha-2-macroglobulin-like 1;
  ENSP ID: ENSP00000440057
MLGELIGKGSLVMEGQKHLNSKKKGLKASFSLSLTFTSRLAPDPSLVIYAIFPSGGVVADKIQFSVEMCFDNQVSLGFSPSQQLPGAEVELQLQAAPGSLCALRAVDESVLLLRPDRELSNRSVYGMFPFWYGHYPYQVAEYDQCPVSGPWDFPQPLIDPMPQGHSSQRSIIWRPSFSEGTDL

SEQ ID NO: 4303 - protein, 81 aa, Homo sapiens
  Payload ID: 959;
  Gene Symbol: A2ML1;
  Gene Name: alpha-2-macroglobulin-like 1;
  ENSP ID: ENSP00000440662
MVRNNFYAVRLLPSTCVVLSQTSNCRRSHQDPLAASCICQASGCWLIGKGSLVMEGQKHLNSKKKGLKASFSLSLTFTSRL

SEQ ID NO: 4304 - protein, 1004 aa, Homo sapiens
  Payload ID: 959;
  Gene Symbol: A2ML1;
  Gene Name: alpha-2-macroglobulin-like 1;
  ENSP ID: ENSP00000443174
SFLGIHRLNGPLKCGQPQEVLVDYYIDPADASPDQEISFSYYLIGKGSLVMEGQKHLNSKKKGLKASFSLSLTFTSRLAPDPSLVIYAIFPSGGVVADKIQFSVEMCFDNQVSLGFSPSQQLPGAEVELQLQAAPGSLCALRAVDESVLLLRPDRELSNRSVYGMFPFWYGHYPYQVAEYDQCPVSGPWDFPQPLIDPMPQGHSSQRSIIWRPSFSEGTDLFSFFRDVGLKILSNAKIKKPVDCSHRSPEYSTAMGAGGGHPEAFESSTPLHQAEDSQVRQYFPETWLWDLFPIGNSGKEAVHVTVPDAITEWKAMSFCTSQSRGFGLSPTVGLTAFKPFFVDLTLPYSVVRGESFRLTATIFNYLKDCIRVQTDLAKSHEYQLESWADSQTSSCLCADDAKTHHWNITAVKLGHINFTISTKILDSNEPCGGQKGFVPQKGRSDTLIKPVLVKPEGVLVEKTHSSLLCPKGKVASESVSLELPVDIVPDSTKAYVTVLGDIMGTALQNLDGLVQMPSGCGEQNMVLFAPIIYVLQYLEKAGLLTEEIRSRAVGFLEIGYQKELMYKHSNGSYSAFGERDGNGNTWLTAFVTKCFGQAQKFIFIDPKNIQDALKWMAGNQLPSGCYANVGNLLHTAMKGGVDDEVSLTAYVTAALLEMGKDVDDPMVSQGLRCLKNSATSTTNLYTQALLAYIFSLAGEMDIRNILLKQLDQQAIISGESIYWSQKPTPSSNASPWSEPAAVDVELTAYALLAQLTKPSLTQKEIAKATSIVAWLAKQHNAYGGFSSTQDTVVALQALAKYATTAYMPSEEINLVVKSTENFQRTFNIQSVNRLVFQQDTLPNVPGMYTLEASGQGCVYVQTVLRYNILPPTNMKTFSLSVEIGKARCEQPTSPRSLTLTIHTSYVGSRSSSNMAIVEVKMLSGFSPMEGTNQLLLQQPLVKKVEFGTDTLNIYLDELIKNTQTYTFTISQSVLVTNLKPATIKVYDYYLPDEQATIQYSDPCE

SEQ ID NO: 4305 - protein, 182 aa, Homo sapiens
  Payload ID: 959;
  Gene Symbol: A2ML1;
  Gene Name: alpha-2-macroglobulin-like 1;
  ENSP ID: ENSP00000445674
  MOD_RES (1)..(1): Any amino acid
XRTFNIQSVNRLVFQQDTLPNVPGMYTLEASGQGCVYVQTVLRYNILPPTNMKTFSLSVEIGKARCEQPTSPRSLTLTIHTSYVGSRSSSNMAIVEVKMLSGFSPMEGTNQLLLQQPLVKKVEFGTDTLNIYLDELIKNTQTYTFTISQSVLVTNLKPATIKVYDYYLPDEQATIQYSDPCE

SEQ ID NO: 4306 - protein, 173 aa, Homo sapiens
  Payload ID: 960;
  Gene Symbol:;
  Gene Name: alpha-crystallin A chain [Source:RefSeq peptide;Acc:NP_001300979];
  ENSP ID: ENSP00000482816
MDVTIQHPWFKRTLGPFYPSRLFDQFFGEGLFEYDLLPFLSSTISPYYRQSLFRTVLDSGISEVRSDRDKFVIFLDVKHFSPEDLTVKVQDDFVEIHGKHNERQDDHGYISREFHRRYRLPSNVDQSALSCSLSADGMLTFCGPKIQTGLDATHAERAIPVSREEKPTSAPSS

SEQ ID NO: 4307 - protein, 136 aa, Homo sapiens
  Payload ID: 960;
  Gene Symbol:;
  Gene Name: alpha-crystallin A chain [Source:RefSeq peptide;Acc:NP_001300979];
  ENSP ID: ENSP00000485302
MPVCPGDSHRPPKALPHLVCGRRGRQVRSDRDKFVIFLDVKHFSPEDLTVKVQDDFVEIHGKHNERQDDHGYISREFHRRYRLPSNVDQSALSCSLSADGMLTFCGPKIQTGLDATHAERAIPVSREEKPTSAPSS

SEQ ID NO: 4308 - protein, 127 aa, Homo sapiens
  Payload ID: 960;
  Gene Symbol:;
  Gene Name: alpha-crystallin A chain [Source:RefSeq peptide;Acc:NP_001300979];
  ENSP ID: ENSP00000485653
MDAPPPHPTTGLLSEPRVRSDRDKFVIFLDVKHFSPEDLTVKVQDDFVEIHGKHNERQDDHGYISREFHRRYRLPSNVDQSALSCSLSADGMLTFCGPKIQTGLDATHAERAIPVSREEKPTSAPSS

SEQ ID NO: 4309 - protein, 622 aa, Homo sapiens
  Payload ID: 961;
  Gene Symbol: AFP;
  Gene Name: alpha-fetoprt;
  ENSP ID: ENSP00000226359
MKWVESIFLIFLLNFTESRTLHRNEYGIASILDSYQCTAEISLADLATIFFAQFVQEATYKEVSKMVKDALTAIEKPTGDEQSSGCLENQLPAFLEELCHEKEILEKYGHSDCCSQSEEGRHNCFLAHKKPTPASIPLFQVPEPVTSCEAYEEDRETFMNKFIYEIARRHPFLYAPTILLWAARYDKIIPSCCKAENAVECFQTKAATVTKELRESSLLNQHACAVMKNFGTRTFQAITVTKLSQKFTKVNFTEIQKLVLDVAHVHEHCCRGDVLDCLQDGEKIMSYICSQQDTLSNKITECCKLTTLERGQCIIHAENDEKPEGLSPNLNRFLGDRDFNQFSSGEKNIFLASFVHEYSRRHPQLAVSVILRVAKGYQELLEKCFQTENPLECQDKGEEELQKYIQESQALAKRSCGLFQKLGEYYLQNAFLVAYTKKAPQLTSSELMAITRKMAATAATCCQLSEDKLLACGEGAADIIIGHLCIRHEMTPVNPGVGQCCTSSYANRRPCFSSLVVDETYVPPAFSDDKFIFHKDLCQAQGVALQTMKQEFLINLVKQKPQITEEQLEAVIADFSGLLEKCCQGQEQEVCFAEEGKRRQNESFIRCELFSLILTDLTLFVN

SEQ ID NO: 4310 - protein, 609 aa, Homo sapiens
  Payload ID: 961;
  Gene Symbol: AFP;
  Gene Name: alpha-fetoprt;
  Uniprot ID:  P02771;
  ENSP ID: ENSP00000379138
MKWVESIFLIFLLNFTESRTLHRNEYGIASILDSYQCTAEISLADLATIFFAQFVQEATYKEVSKMVKDALTAIEKPTGDEQSSGCLENQLPAFLEELCHEKEILEKYGHSDCCSQSEEGRHNCFLAHKKPTPASIPLFQVPEPVTSCEAYEEDRETFMNKFIYEIARRHPFLYAPTILLWAARYDKIIPSCCKAENAVECFQTKAATVTKELRESSLLNQHACAVMKNFGTRTFQAITVTKLSQKFTKVNFTEIQKLVLDVAHVHEHCCRGDVLDCLQDGEKIMSYICSQQDTLSNKITECCKLTTLERGQCIIHAENDEKPEGLSPNLNRFLGDRDFNQFSSGEKNIFLASFVHEYSRRHPQLAVSVILRVAKGYQELLEKCFQTENPLECQDKGEEELQKYIQESQALAKRSCGLFQKLGEYYLQNAFLVAYTKKAPQLTSSELMAITRKMAATAATCCQLSEDKLLACGEGAADIIIGHLCIRHEMTPVNPGVGQCCTSSYANRRPCFSSLVVDETYVPPAFSDDKFIFHKDLCQAQGVALQTMKQEFLINLVKQKPQITEEQLEAVIADFSGLLEKCCQGQEQEVCFAEEGQKLISKTRAALGV

SEQ ID NO: 4311 - protein, 1244 aa, Homo sapiens
  Payload ID: 962;
  Gene Symbol: ALPK1;
  Gene Name: alpha-kinase 1;
  Uniprot ID:  Q96QP1;
  ENSP ID: ENSP00000177648
MNNQKVVAVLLQECKQVLDQLLLEAPDVSEEDKSEDQRCRALLPSELRTLIQEAKEMKWPFVPEKWQYKQAVGPEDKTNLKDVIGAGLQQLLASLRASILARDCAAAAAIVFLVDRFLYGLDVSGKLLQVAKGLHKLQPATPIAPQVVIRQARISVNSGKLLKAEYILSSLISNNGATGTWLYRNESDKVLVQSVCIQIRGQILQKLGMWYEAAELIWASIVGYLALPQPDKKGLSTSLGILADIFVSMSKNDYEKFKNNPQINLSLLKEFDHHLLSAAEACKLAAAFSAYTPLFVLTAVNIRGTCLLSYSSSNDCPPELKNLHLCEAKEAFEIGLLTKRDDEPVTGKQELHSFVKAAFGLTTVHRRLHGETGTVHAASQLCKEAMGKLYNFSTSSRSQDREALSQEVMSVIAQVKEHLQVQSFSNVDDRSYVPESFECRLDKLILHGQGDFQKILDTYSQHHTSVCEVFESDCGNNKNEQKDAKTGVCITALKTEIKNIDTVSTTQEKPHCQRDTGISSSLMGKNVQRELRRGGRRNWTHSDAFRVSLDQDVETETEPSDYSNGEGAVFNKSLSGSQTSSAWSNLSGFSSSASWEEVNYHVDDRSARKEPGKEHLVDTQCSTALSEELENDREGRAMHSLHSQLHDLSLQEPNNDNLEPSQNQPQQQMPLTPFSPHNTPGIFLAPGAGLLEGAPEGIQEVRNMGPRNTSAHSRPSYRSASWSSDSGRPKNMGTHPSVQKEEAFEIIVEFPETNCDVKDRQGKEQGEEISERGAGPTFKASPSWVDPEGETAESTEDAPLDFHRVLHNSLGNISMLPCSSFTPNWPVQNPDSRKSGGPVAEQGIDPDASTVDEEGQLLDSMDVPCTNGHGSHRLCILRQPPGQRAETPNSSVSGNILFPVLSEDCTTTEEGNQPGNMLNCSQNSSSSSVWWLKSPAFSSGSSEGDSPWSYLNSSGSSWVSLPGKMRKEILEARTLQPDDFEKLLAGVRHDWLFQRLENTGVFKPSQLHRAHSALLLKYSKKSELWTAQETIVYLGDYLTVKKKGRQRNAFWVHHLHQEEILGRYVGKDYKEQKGLWHHFTDVERQMTAQHYVTEFNKRLYEQNIPTQIFYIPSTILLILEDKTIKGCISVEPYILGEFVKLSNNTKVVKTEYKATEYGLAYGHFSYEFSNHRDVVVDLQGWVTGNGKGLIYLTDPQIHSVDQKVFTTNFGKRGIFYFFNNQHVECNEICHRLSLTRPSMEKPCT

SEQ ID NO: 4312 - protein, 1244 aa, Homo sapiens; identical to SEQ ID NO: 4311
  Payload ID: 962;
  Gene Symbol: ALPK1;
  Gene Name: alpha-kinase 1;
  Uniprot ID:  Q96QP1;
  ENSP ID: ENSP00000398048

SEQ ID NO: 4313 - protein, 168 aa, Homo sapiens
  Payload ID: 962;
  Gene Symbol: ALPK1;
  Gene Name: alpha-kinase 1;
  ENSP ID: ENSP00000423978
MNNQKVVAVLLQECKQVLDQLLLEAPDVSEEDKSEDQRCRALLPSELRTLIQEAKEMKWPFVPEKWQYKQAVGPEDKTNLKDVIGAGLQQLLASLRASILARDCAAAAAIVFLVDRFLYGLDVSGKLLQVAKGLHKLQPATPIAPQVVIRQARISVNSDTVQLPTLPT

SEQ ID NO: 4314 - protein, 133 aa, Homo sapiens
  Payload ID: 962;
  Gene Symbol: ALPK1;
  Gene Name: alpha-kinase 1;
  ENSP ID: ENSP00000424492
MNNQKVVAVLLQECKQVLDQLLLEAPDVSEEDKSEDQRCRGVPEGLHPRSGLCGCGGYCVLGGPVPVWARRLWKTSAGRQRSPQVAASHANCPAGGYSPSPNLRELRKTFKSRVYSEQSNKQQWSNGYLAVQK

SEQ ID NO: 4315 - protein, 109 aa, Homo sapiens
  Payload ID: 962;
  Gene Symbol: ALPK1;
  Gene Name: alpha-kinase 1;
  ENSP ID: ENSP00000425273
MNNQKVVAVLLQECKQVLDQLLLEAPDVSEEDKSEDQRCRGVPEGLHPRSGLCGCGGYCVLGGPVPVWARRLWKTSAGRQRSPQVAASHANCPAGGYSPSPNLRELRTT

SEQ ID NO: 4316 - protein, 304 aa, Homo sapiens
  Payload ID: 962;
  Gene Symbol: ALPK1;
  Gene Name: alpha-kinase 1;
  ENSP ID: ENSP00000425559
MNNQKVVAVLLQECKQVLDQLLLEAPDVSEEDKSEDQRCRALLPSELRTLIQEAKEMKWPFVPEKWQYKQAVGPEDKTNLKDVIGAGLQQLLASLRASILARDCAAAAAIVFLVDRFLYGLDVSGKLLQVAKGLHKLQPATPIAPQVVIRQARISVNSGKLLKAEYILSSLISNNGATGTWLYRNESDKVLVQSVCIQIRGQILQKLGMWYEAAELIWASIVGYLALPQPDKKGLSTSLGILADIFVSMSKNDYEKFKNNPQINLSLLKEFDHHLLSAAEACKLAAAFSAYTPLFVLTAVVLFC

SEQ ID NO: 4317 - protein, 1166 aa, Homo sapiens
  Payload ID: 962;
  Gene Symbol: ALPK1;
  Gene Name: alpha-kinase 1;
  Uniprot ID:  Q96QP1;
  ENSP ID: ENSP00000426044
MCRKRTRARTSAAEASLRASILARDCAAAAAIVFLVDRFLYGLDVSGKLLQVAKGLHKLQPATPIAPQVVIRQARISVNSGKLLKAEYILSSLISNNGATGTWLYRNESDKVLVQSVCIQIRGQILQKLGMWYEAAELIWASIVGYLALPQPDKKGLSTSLGILADIFVSMSKNDYEKFKNNPQINLSLLKEFDHHLLSAAEACKLAAAFSAYTPLFVLTAVNIRGTCLLSYSSSNDCPPELKNLHLCEAKEAFEIGLLTKRDDEPVTGKQELHSFVKAAFGLTTVHRRLHGETGTVHAASQLCKEAMGKLYNFSTSSRSQDREALSQEVMSVIAQVKEHLQVQSFSNVDDRSYVPESFECRLDKLILHGQGDFQKILDTYSQHHTSVCEVFESDCGNNKNEQKDAKTGVCITALKTEIKNIDTVSTTQEKPHCQRDTGISSSLMGKNVQRELRRGGRRNWTHSDAFRVSLDQDVETETEPSDYSNGEGAVFNKSLSGSQTSSAWSNLSGFSSSASWEEVNYHVDDRSARKEPGKEHLVDTQCSTALSEELENDREGRAMHSLHSQLHDLSLQEPNNDNLEPSQNQPQQQMPLTPFSPHNTPGIFLAPGAGLLEGAPEGIQEVRNMGPRNTSAHSRPSYRSASWSSDSGRPKNMGTHPSVQKEEAFEIIVEFPETNCDVKDRQGKEQGEEISERGAGPTFKASPSWVDPEGETAESTEDAPLDFHRVLHNSLGNISMLPCSSFTPNWPVQNPDSRKSGGPVAEQGIDPDASTVDEEGQLLDSMDVPCTNGHGSHRLCILRQPPGQRAETPNSSVSGNILFPVLSEDCTTTEEGNQPGNMLNCSQNSSSSSVWWLKSPAFSSGSSEGDSPWSYLNSSGSSWVSLPGKMRKEILEARTLQPDDFEKLLAGVRHDWLFQRLENTGVFKPSQLHRAHSALLLKYSKKSELWTAQETIVYLGDYLTVKKKGRQRNAFWVHHLHQEEILGRYVGKDYKEQKGLWHHFTDVERQMTAQHYVTEFNKRLYEQNIPTQIFYIPSTILLILEDKTIKGCISVEPYILGEFVKLSNNTKVVKTEYKATEYGLAYGHFSYEFSNHRDVVVDLQGWVTGNGKGLIYLTDPQIHSVDQKVFTTNFGKRGIFYFFNNQHVECNEICHRLSLTRPSMEKPCT

SEQ ID NO: 4318 - protein, 2170 aa, Homo sapiens
  Payload ID: 963;
  Gene Symbol: ALPK2;
  Gene Name: alpha-kinase 2;
  Uniprot ID:  Q86TB3;
  ENSP ID: ENSP00000354991
MKDSEGPQRPPLCFLSTLLSQKVPEKSDAVLRCIISGQPKPEVTWYKNGQAIDGSGIISNYEFFENQYIHVLHLSCCTKNDAAVYQISAKNSFGMICCSASVEVECSSENPQLSPNLEDDRDRGWKHETGTHEEERANQIDEKEHPYKEEESISPGTPRSADSSPSKSNHSLSLQSLGNLDISVSSSENPLGVKGTRHTGEAYDPSNTEEIANGLLFLNSSHIYEKQDRCCHKTVHSMASKFTDGDLNNDGPHDEGLRSSQQNPKVQKYISFSLPLSEATAHIYPGDSAVANKQPSPQLSSEDSDSDYELCPEITLTYTEEFSDDDLEYLECSDVMTDYSNAVWQRNLLGTEHVFLLESDDEEMEFGEHCLGGCEHFLSGMGCGSRVSGDAGPMVATAGFCGHHSQPQEVGVRSSRVSKHGPSSPQTGMTLILGPHQDGTSSVTEQGRYKLPTAPEAAENDYPGIQGETRDSHQAREEFASDNLLNMDESVRETEMKLLSGESENSGMSQCWETAADKRVGGKDLWSKRGSRKSARVRQPGMKGNPKKPNANLRESTTEGTLHLCSAKESAEPPLTQSDKRETSHTTAAATGRSSHADARECAISTQAEQEAKTLQTSTDSVSKEGNTNCKGEGMQVNTLFETSQVPDWSDPPQVQVQETVRETISCSQMPAFSEPAGEESPFTGTTTISFSNLGGVHKENASLAQHSEVKPCTCGPQHEEKQDRDGNIPDNFREDLKYEQSISEANDETMSPGVFSRHLPKDARADFREPVAVSVASPEPTDTALTLENVCDEPRDREAVCAMECFEAGDQGTCFDTIDSLVGRPVDKYSPQEICSVDTELAEGQNKVSDLCSSNDKTLEVFFQTQVSETSVSTCKSSKDGNSVMSPLFTSTFTLNISHTASEGATGENLAKVENSTYPLASTVHAGQEQPSPSNSGGLDETQLLSSENNPLVQFKEGGDKSPSPSAADTTATPASYSSIVSFPWEKPTTLTANNECFQATRETEDTSTVTIATEVHPAKYLAVSIPEDKHAGGTEERFPRASHEKVSQFPSQVQLDHILSGATIKSTKELLCRAPSVPGVPHHVLQLPEGEGFCSNSPLQVDNLSGDKSQTVDRADFRSYEENFQERGSETKQGVQQQSLSQQGSLSAPDFQQSLPTTSAAQEERNLVPTAHSPASSREGAGQRSGWGTRVSVVAETAGEEDSQALSNVPSLSDILLEESKEYRPGNWEAGNKLKIITLEASASEIWPPRQLTNSESKASDGGLIIPDKVWAVPDSLKADAVVPELAPSEIAALAHSPEDAESALADSRESHKGEEPTISVHWRSLSSRGFSQPRLLESSVDPVDEKELSVTDSLSAASETGGKENVNNVSQDQEEKQLKMDHTAFFKKFLTCPKILESSVDPIDEISVIEYTRAGKPEPSETTPQGAREGGQSNDGNMGHEAEIQPAILQVPCLQGTILSENRISRSQEGSMKQEAEQIQPEEAKTAIWQVLQPSEGGERIPSGCSIGQIQESSDGSLGEAEQSKKDKAELISPTSPLSSCLPIMTHASLGVDTHNSTGQIHDVPENDIVEPRKRQYVFPVSQKRGTIENERGKPLPSSPDLTRFPCTSSPEGNVTDFLISHKMEEPKIEVLQIGETKPPSSSSSSAKTLAFISGERELEKAPKLLQDPCQKGTLGCAKKSREREKSLEARAGKSPGTLTAVTGSEEVKRKPEAPGSGHLAEGVKKKILSRVAALRLKLEEKENIRKNSAFLKKMPKLETSLSHTEEKQDPKKPSCKREGRAPVLLKKIQAEMFPEHSGNVKLSCQFAEIHEDSTICWTKDSKSIAQVQRSAGDNSTVSFAIVQASPKDQGLYYCCIKNSYGKVTAEFNLTAEVLKQLSSRQDTKGCEEIEFSQLIFKEDFLHDSYFGGRLRGQIATEELHFGEGVHRKAFRSTVMHGLMPVFKPGHACVLKVHNAIAYGTRNNDELIQRNYKLAAQECYVQNTARYYAKIYAAEAQPLEGFGEVPEIIPIFLIHRPENNIPYATVEEELIGEFVKYSIRDGKEINFLRRESEAGQKCCTFQHWVYQKTSGCLLVTDMQGVGMKLTDVGIATLAKGYKGFKGNCSMTFIDQFKALHQCNKYCKMLGLKSLQNNNQKQKQPSIGKSKVQTNSMTIKKAGPETPGEKKT

SEQ ID NO: 4319 - protein, 1907 aa, Homo sapiens
  Payload ID: 964;
  Gene Symbol: ALPK3;
  Gene Name: alpha-kinase 3;
  Uniprot ID:  Q96L96;
  ENSP ID: ENSP00000258888
MEVAWLVYVLGQQPLARQGEGQSRLVPGRGLVLWLPGLPRSSPSWPAVDLAPLAPARPRGPLICHTGHEQAGREPGPGSSTKGPVLHDQDTRCAFLPRPPGPLQTRRYCRHQGRQGSGLGAGPGAGTWAPAPPGVSKPRCPGRARPGEGQQQVTTARPPAINRGARQPRAGAAAAGRGPGAGAWRTGEAAASAGPAVGEGGAMGSRRAPSRGWGAGGRSGAGGDGEDDGPVWIPSPASRSYLLSVRPETSLSSNRLSHPSSGRSTFCSIIAQLTEETQPLFETTLKSRSVSEDSDVRFTCIVTGYPEPEVTWYKDDTELDRYCGLPKYEITHQGNRHTLQLYRCREEDAAIYQASAQNSKGIVSCSGVLEVGTMTEYKIHQRWFAKLKRKAAAKLREIEQSWKHEKAVPGEVDTLRKLSPDRFQRKRRLSGAQAPGPSVPTREPEGGTLAAWQEGETETAQHSGLGLINSFASGEVTTNGEAAPENGEDGEHGLLTYICDAMELGPQRALKEESGAKKKKKDEESKQGLRKPELEKAAQSRRSSENCIPSSDEPDSCGTQGPVGVEQVQTQPRGRAARGPGSSGTDSTRKPASAVGTPDKAQKAPGPGPGQEVYFSLKDMYLENTQAVRPLGEEGPQTLSVRAPGESPKGKAPLRARSEGVPGAPGQPTHSLTPQPTRPFNRKRFAPPKPKGEATTDSKPISSLSQAPECGAQSLGKAPPQASVQVPTPPARRRHGTRDSTLQGQAGHRTPGEVLECQTTTAPTMSASSSSDVASIGVSTSGSQGIIEPMDMETQEDGRTSANQRTGSKKNVQADGKIQVDGRTRGDGTQTAQRTRADRKTQVDAGTQESKRPQSDRSAQKGMMTQGRAETQLETTQAGEKIQEDRKAQADKGTQEDRRMQGEKGMQGEKGTQSEGSAPTAMEGQSEQEVATSLGPPSRTPKLPPTAGPRAPLNIECFVQTPEGSCFPKKPGCLPRSEEAVVTASRNHEQTVLGPLSGNLMLPAQPPHEGSVEQVGGERCRGPQSSGPVEAKQEDSPFQCPKEERPGGVPCMDQGGCPLAGLSQEVPTMPSLPGTGLTASPKAGPCSTPTSQHGSTATFLPSEDQVLMSSAPTLHLGLGTPTQSHPPETMATSSEGACAQVPDVEGRTPGPRSCDPGLIDSLKNYLLLLLKLSSTETSGAGGESQVGAATGGLVPSATLTPTVEVAGLSPRTSRRILERVENNHLVQSAQTLLLSPCTSRRLTGLLDREVQAGRQALAAARGSWGPGPSSLTVPAIVVDEEDPGLASEGASEGEGEVSPEGPGLLGASQESSMAGRLGEAGGQAAPGQGPSAESIAQEPSQEEKFPGEALTGLPAATPEELALGARRKRFLPKVRAAGDGEATTPEERESPTVSPRGPRKSLVPGSPGTPGRERRSPTQGRKASMLEVPRAEEELAAGDLGPSPKAGGLDTEVALDEGKQETLAKPRKAKDLLKAPQVIRKIRVEQFPDASGSLKLWCQFFNILSDSVLTWAKDQRPVGEVGRSAGDEGPAALAIVQASPVDCGVYRCTIHNEHGSASTDFCLSPEVLSGFISREEGEVGEEIEMTPMVFAKGLADSGCWGDKLFGRLVSEELRGGGYGCGLRKASQAKVIYGLEPIFESGRTCIIKVSSLLVFGPSSETSLVGRNYDVTIQGCKIQNMSREYCKIFAAEARAAPGFGEVPEIIPLYLIYRPANNIPYATLEEDLGKPLESYCSREWGCAEAPTASGSSEAMQKCQTFQHWLYQWTNGSFLVTDLAGVDWKMTDVQIATKLRGYQGLKESCFPALLDRFASSHQCNAYCELLGLTPLKGPEAAHPQAKAKGSKSPSAGRKGSQLSPQPQKKGLPSPQGTRKSAPSSKATPQASEPVTTQLLGQPPTQEEGSKAQGMR

SEQ ID NO: 4320 - protein, 382 aa, Homo sapiens
  Payload ID: 965;
  Gene Symbol: AMACR;
  Gene Name: alpha-methylacyl-CoA racemase;
  Uniprot ID:  Q9UHK6;
  ENSP ID: ENSP00000334424
MALQGISVVELSGLAPGPFCAMVLADFGARVVRVDRPGSRYDVSRLGRGKRSLVLDLKQPRGAAVLRRLCKRSDVLLEPFRRGVMEKLQLGPEILQRENPRLIYARLSGFGQSGSFCRLAGHDINYLALSGVLSKIGRSGENPYAPLNLLADFAGGGLMCALGIIMALFDRTRTGKGQVIDANMVEGTAYLSSFLWKTQKLSLWEAPRGQNMLDGGAPFYTTYRTADGEFMAVGAIEPQFYELLIKGLGLKSDELPNQMSMDDWPEMKKKFADVFAEKTKAEWCQIFDGTDACVTPVLTFEEVVHHDHNKERGSFITSEEQDVSPRPAPLLLNTPAIPSFKRDPFIGEHTEEILEEFGFSREEIYQLNSDKIIESNKVKASL

SEQ ID NO: 4321 - protein, 198 aa, Homo sapiens
  Payload ID: 965;
  Gene Symbol: AMACR;
  Gene Name: alpha-methylacyl-CoA racemase;
  Uniprot ID:  Q9UHK6;
  ENSP ID: ENSP00000371504
MALQGISVVELSGLAPGPFCAMVLADFGARVVRVDRPGSRYDVSRLGRGKRSLVLDLKQPRGAAVLRRLCKRSDVLLEPFRRGVMEKLQLGPEILQRENPRLIYARLSGFGQSGSFCRLAGHDINYLALSGGRNSIFKFFSVENSEIESVGSTSRTEHVGWWSTFLYDLQDSRWGIHGCWSNRTPVLRAADQRTWTKV

SEQ ID NO: 4322 - protein, 394 aa, Homo sapiens
  Payload ID: 965;
  Gene Symbol: AMACR;
  Gene Name: alpha-methylacyl-CoA racemase;
  Uniprot ID:  Q9UHK6;
  ENSP ID: ENSP00000371517
MALQGISVVELSGLAPGPFCAMVLADFGARVVRVDRPGSRYDVSRLGRGKRSLVLDLKQPRGAAVLRRLCKRSDVLLEPFRRGVMEKLQLGPEILQRENPRLIYARLSGFGQSGSFCRLAGHDINYLALSGVLSKIGRSGENPYAPLNLLADFAGGGLMCALGIIMALFDRTRTGKGQVIDANMVEGTAYLSSFLWKTQKLSLWEAPRGQNMLDGGAPFYTTYRTADGEFMAVGAIEPQFYELLIKGLGLKSDELPNQMSMDDWPEMKKKFADVFAEKTKAEWCQIFDGTDACVTPVLTFEEVVHHDHNKERGSFITSEEQDVSPRPAPLLLNTPAIPSFKRDPFIGEHTEEILEEFGFSREEIYQLNSDKIIESNKAGSKFWILYPTHSNIQK

SEQ ID NO: 4323 - protein, 367 aa, Homo sapiens
  Payload ID: 965;
  Gene Symbol: AMACR;
  Gene Name: alpha-methylacyl-CoA racemase;
  ENSP ID: ENSP00000424351
MALQGISVVELSGLAPGPFCAMVLADFGARVVRVDRPGSRYDVSRLGRGKRSLVLDLKQPRGAAVLRRLCKRSDVLLEPFRRGVMEKLQLGPEILQRENPRLIYARLSGFGQSGSFCRLAGHDINYLALSGVLSKIGRSGENPYAPLNLLADFAGGGLMCALGIIMALFDRTRTGKGQVIDANMKLSLWEAPRGQNMLDGGAPFYTTYRTADGEFMAVGAIEPQFYELLIKGLGLKSDELPNQMSMDDWPEMKKKFADVFAEKTKAEWCQIFDGTDACVTPVLTFEEVVHHDHNKERGSFITSEEQDVSPRPAPLLLNTPAIPSFKRDPFIGEHTEEILEEFGFSREEIYQLNSDKIIESNKVKASL

SEQ ID NO: 4324 - protein, 229 aa, Homo sapiens
  Payload ID: 965;
  Gene Symbol: AMACR;
  Gene Name: alpha-methylacyl-CoA racemase;
  Uniprot ID:  Q9UHK6;
  ENSP ID: ENSP00000427227
MALQGISVVELSGLAPGPFCAMVLADFGARVVRVDRPGSRYDVSRLGRGKRSLVLDLKQPRGAAVLRRLCKRSDVLLEPFRRGVMEKLQLGPEILQRENPRLIYARLSGFGQSGSFCRLAGHDINYLALSGGRNSIFKFFSVENSEIESVGSTSRTEHVGWWSTFLYDLQDSRWGIHGCWSNRTPVLRAADQRSLIPYFNLYLQFLNISMQNLFKVHTLLRPCYFLGQK

SEQ ID NO: 4325 - protein, 288 aa, Homo sapiens
  Payload ID: 965;
  Gene Symbol: AMACR;
  Gene Name: alpha-methylacyl-CoA racemase;
  ENSP ID: ENSP00000476965
MALQGISVVELSGLAPGPFCAMVLADFGARVVRVDRPGSRYDVSRLGRGKRSLVLDLKQPRGAAVLRRLCKRSDVLLEPFRRGVMEKLQLGPEILQRENPRLIYARLSGFGQSGSFCRLAGHDINYLALSGVLSKIGRSGENPYAPLNLLADFAGGGLMCALGIIMALFDRTRTGKGQVIDANMVEGTAYLSSFLWKTQKLSLWEAPRGQNMLDGGAPFYTTYRTADGEFMAVGAIEPQFYELLIKGLGELILLKIQQEAVSCQARQTLVSVKQWPSLQPKSWGFVWQ

SEQ ID NO: 4326 - protein, 281 aa, Homo sapiens
  Payload ID: 965;
  Gene Symbol: AMACR;
  Gene Name: alpha-methylacyl-CoA racemase;
  ENSP ID: ENSP00000477108
MALQGISVVELSGLAPGPFCAMVLADFGARVVRVDRPGSRYDVSRLGRGKRSLVLDLKQPRGAAVLRRLCKRSDVLLEPFRRGVMEKLQLGPEILQRENPRLIYARLSGFGQSGSFCRLAGHDINYLALSGGRNSIFKFFSVENSEIESVGSTSRTEHVGWWSTFLYDLQDSRWGIHGCWSNRTPVLRAADQRSGRTDLAENTTGSSIVPGKANPRQCEAMAIVAAQVMGFCVAVTVGGGNGHFELDVFKPMMIKNLCYTQAAGGCFSFLHRKLNSGNPDQ

SEQ ID NO: 4327 - protein, 260 aa, Homo sapiens
  Payload ID: 965;
  Gene Symbol: AMACR;
  Gene Name: alpha-methylacyl-CoA racemase;
  ENSP ID: ENSP00000477411
MALQGISVVELSGLAPGPFCAMVLADFGARVVRVDRPGSRYDVSRLGRGKRSLVLDLKQPRGAAVLRRLCKRSDVLLEPFRRGVMEKLQLGPEILQRENPRLIYARLSGFGQSGSFCRLAGHDINYLALSGVLSKIGRSGENPYAPLNLLADFAGGGLMCALGIIMALFDRTRTGKGQVIDANMVEGTAYLSSFLWKTQKLSLWEAPRGQNMLDGGAPFYTTYRTADGEFMAVGAIEPQFYELLIKGCWGMLQFPSQKTK

SEQ ID NO: 4328 - protein, 333 aa, Homo sapiens
  Payload ID: 966;
  Gene Symbol: AMMECR1;
  Gene Name: Alport syndrome, mental retardation, midface hypoplasia and elliptocytosis chromosomal region gene 1;
  Uniprot ID:  Q9Y4X0;
  ENSP ID: ENSP00000262844
MAAGCCGVKKQKLSSSPPSGSGGGGGASSSSHCSGESQCRAGELGLGGAGTRLNGLGGLTGGGSGSGCTLSPPQGCGGGGGGIALSPPPSCGVGTLLSTPAAATSSSPSSSSAASSSSPGSRKMVVSAEMCCFCFDVLYCHLYGYQQPRTPRFTNEPYPLFVTWKIGRDKRLRGCIGTFSAMNLHSGLREYTLTSALKDSRFPPMTRDELPRLFCSVSLLTNFEDVCDYLDWEVGVHGIRIEFINEKGSKRTATYLPEVAKEQGWDHIQTIDSLLRKGGYKAPITNEFRKTIKLTRYRSEKMTLSYAEYLAHRQHHHFQNGIGHPLPPYNHYS

SEQ ID NO: 4329 - protein, 210 aa, Homo sapiens
  Payload ID: 966;
  Gene Symbol: AMMECR1;
  Gene Name: Alport syndrome, mental retardation, midface hypoplasia and elliptocytosis chromosomal region gene 1;
  Uniprot ID:  Q9Y4X0;
  ENSP ID: ENSP00000361127
MVVSAEMCCFCFDVLYCHLYGYQQPRTPRFTNEPYPLFVTWKIGRDKRLRGCIGTFSAMNLHSGLREYTLTSALKDSRFPPMTRDELPRLFCSVSLLTNFEDVCDYLDWEVGVHGIRIEFINEKGSKRTATYLPEVAKEQGWDHIQTIDSLLRKGGYKAPITNEFRKTIKLTRYRSEKMTLSYAEYLAHRQHHHFQNGIGHPLPPYNHYS

SEQ ID NO: 4330 - protein, 296 aa, Homo sapiens
  Payload ID: 966;
  Gene Symbol: AMMECR1;
  Gene Name: Alport syndrome, mental retardation, midface hypoplasia and elliptocytosis chromosomal region gene 1;
  Uniprot ID:  Q9Y4X0;
  ENSP ID: ENSP00000361129
MAAGCCGVKKQKLSSSPPSGSGGGGGASSSSHCSGESQCRAGELGLGGAGTRLNGLGGLTGGGSGSGCTLSPPQGCGGGGGGIALSPPPSCGVGTLLSTPAAATSSSPSSSSAASSSSPGSRKMVVSAEMCCFCFDVLYCHLYGYQQPRTPRFTNEPYALKDSRFPPMTRDELPRLFCSVSLLTNFEDVCDYLDWEVGVHGIRIEFINEKGSKRTATYLPEVAKEQGWDHIQTIDSLLRKGGYKAPITNEFRKTIKLTRYRSEKMTLSYAEYLAHRQHHHFQNGIGHPLPPYNHYS

SEQ ID NO: 4331 - protein, 953 aa, Homo sapiens
  Payload ID: 967;
  Gene Symbol: ALS2CL;
  Gene Name: ALS2 C-terminal like;
  Uniprot ID:  Q60I27;
  ENSP ID: ENSP00000313670
MCNPEEAALLRLEEVFSATLAHVNSLVLQPLLPAAPDPSDPWGRECLRLLQQLHKSSQQLWEVTEESLHSLQERLRYPDSTGLESLLLLRGADRVLQAHIEYIESYTSCMVVQAFQKAAKRRSEYWRGQRKALRQLLSGVSSEGSVGASLGQALHQPLAHHVQQYVLLLLSLGDTIGEHHPTRELVVNAVTLFGNLQSFMKQELDQAVATQALWHTLRGRLRDVLCTPAHRLLQDSQDVPVTVAPLRAERVLLFDDALVLLQGHNVHTFDLKLVWVDPGQDGCTFHLLTPEEEFSFCAKDSQGQAVWQWKVTWAVHQALHGKKDFPVLGAGLEPSQPPDCRCAEYTFQAEGRLCQATYEGEWCRGRPHGKGTLKWPDGRNHVGNFCQGLEHGFGIRLLPQASEDKFDCYKCHWREGSMCGYGICEYSTDEVYKGYFQEGLRHGFGVLESGPQAPQPFRYTGHWERGQRSGYGIEEDGDRGERYIGMWQAGQRHGPGVMVTQAGVCYQGTFQADKTVGPGILLSEDDSLYEGTFTRDLTLMGKGKVTFPNGFTLEGSFGSGAGRGLHTQGVLDTAALPPDPSSTCKRQLGVGAFPVESRWQGVYSPFRDFVCAGCPRDLQEALLGFDVQSSRELRRSQDYLSCERTHPEDSVGSMEDILEELLQHREPKALQLYLRKALSNSLHPLGKLLRTLMLTFQATYAGVGANKHLQELAQEEVKQHAQELWAAYRGLLRVALERKGQALEEDEDTETRDLQVHGLVLPLMLPSFYSELFTLYLLLHEREDSFYSQGIANLSLFPDTQLLEFLDVQKHLWPLKDLTLTSNQRYSLVRDKCFLSATECLQKIMTTVDPREKLEVLERTYGEIEGTVSRVLGREYKLPMDDLLPLLIYVVSRARIQHLGAEIHLIRDMMDPNHTGGLYDFLLTALESCYEHIQKEDMRLHRLPGHWHSRELW

SEQ ID NO: 4332 - protein, 300 aa, Homo sapiens
  Payload ID: 967;
  Gene Symbol: ALS2CL;
  Gene Name: ALS2 C-terminal like;
  Uniprot ID:  Q60I27;
  ENSP ID: ENSP00000373248
MEDILEELLQHREPKALQLYLRKALSNSLHPLGKLLRTLMLTFQATYAGVGANKHLQELAQEEVKQHAQELWAAYRGLLRVALERKGQALEEDEDTETRDLQVHGLVLPLMLPSFYSELFTLYLLLHEREDSFYSQGIANLSLFPDTQLLEFLDVQKHLWPLKDLTLTSNQRYSLVRDKCFLSATECLQKIMTTVDPREKLEVLERTYGEIEGTVSRVLGREYKLPMDDLLPLLIYVVSRARIQHLGAEIHLIRDMMDPNHTGGLYDFLLTALESCYEHIQKEDMRLHRLPGHWHSRELW

SEQ ID NO: 4333 - protein, 302 aa, Homo sapiens
  Payload ID: 967;
  Gene Symbol: ALS2CL;
  Gene Name: ALS2 C-terminal like;
  ENSP ID: ENSP00000395749
  MOD_RES (1)..(1): Any amino acid
XLQERLRYPDSTGLESLLLLRGADRVLQAHIEYIESYTSCMVVQAFQKAAKRRSEYWRGQRKALRQLLSGVSSEGSVGASLGQALHQPLAHHVQQYVLLLLSLGDTIGEHHPTRELVVNAVTLFGNLQSFMKQELDQAVATQALWHTLRGRLRDVLCTPAHRLLQDSQDVPVTVAPLRAERVLLFDDALVLLQGHNVHTFDLKLVWVDPGQDGCTFHLLTPEEEFSFCAKDSQGQAVWQWKVTWAVHQALHGKKDFPVLGAGLEPSQPPDCRCAEYTFQAEGRLCQATYEGEWCRGRPHGEP

SEQ ID NO: 4334 - protein, 535 aa, Homo sapiens
  Payload ID: 967;
  Gene Symbol: ALS2CL;
  Gene Name: ALS2 C-terminal like;
  ENSP ID: ENSP00000405335
MCNPEEAALLRLEEVFSATLAHVNSLVLQPLLPAAPDPSDPWGRECLRLLQQLHKSSQQLWEVTEESLHSLQERLRYPDSTGLESLLLLRGADRVLQAHIEYIESYTSCMVVQAFQKAAKRRSEYWRGQRKALRQLLSGVSSEGSVGASLGQALHQPLAHHVQQYVLLLLSLGDTIGEHHPTRELVVNAVTLFGNLQSFMKQELDQAVATQALWHTLRGRLRDVLCTPAHRLLQDSQDVPVTVAPLRAERVLLFDDALVLLQGHNVHTFDLKLVWVDPGQDGCTFHLLTPEEEFSFCAKDSQGQAVWQWKVTWAVHQALHGKKDFPVLGAGLEPSQPPDCRCAEYTFQAEGRLCQATYEGEWCRGRPHGKGTLKWPDGRNHVGNFCQGLEHGFGIRLLPQASEDKFDCYKCHWREGSMCGYGICTAPTRCTRATSRRACGTDLGSLRVVRRPPSPSGTRATGRGARGAAMALRRMVTEVSATLACGRLVSATAQGSWSPRQVSATRAPSRRTRRWARASSSLKTTPCMRAPSPGT

SEQ ID NO: 4335 - protein, 953 aa, Homo sapiens; identical to SEQ ID NO: 4331
  Payload ID: 967;
  Gene Symbol: ALS2CL;
  Gene Name: ALS2 C-terminal like;
  Uniprot ID:  Q60I27;
  ENSP ID: ENSP00000413223

SEQ ID NO: 4336 - protein, 1023 aa, Homo sapiens
  Payload ID: 968;
  Gene Symbol: ALMS1;
  Gene Name: Alstrom syndrome prt 1;
  ENSP ID: ENSP00000399833
QALPDSELTQEALKVSAVPQPADQKTGLSTVTSSFYSHTEKPNISYQQELPDSHLTEEALKVSNVPGPADQKTGVSTVTSTSYSHREKPIVSYQRELPHFTEAGLKILRVPGPADQKTGINILPSNSYPQREHSVISYEQELPDLTEVTLKAIGVPGPADQKTGIQIASSSSYSNREKASIFHQQELPDVTEEALNVFVVPGQGDRKTEIPTVPLSYYSRREKPSVISQQELPDSHLTEEALKVSPVSIPAEQKTGIPIGLSSSYSHSHKEKLKISTVHIPDDQKTEFPAATLSSYSQIEKPKISTVIGPNDQKTPSQTAFHSSYSQTVKPNILFQQQLPDRDQSKGILKISAVPELTDVNTGKPVSLSSSYFHREKSNIFSPQELPGSHVTEDVLKVSTIPGPAGQKTVLPTALPSSFSHREKPDIFYQKDLPDRHLTEDALKISSALGQADQITGLQTVPSGTYSHGENHKLVSEHVQRLIDNLNSSDSSVSSNNVLLNSQADDRVVINKPESAGFRDVGSEEIQDAENSAKTLKEIRTLLMEAENMALKRCNFPAPLARFRDISDISFIQSKKVVCFKEPSSTGVSNGDLLHRQPFTEESPSSRCIQKDIGTQTNLKCRRGIENWEFISSTTVRSPLQEAESKVSMALEETLRQYQAAKSVMRSEPEGCSGTIGNKIIIPMMTVIKSDSSSDASDGNGSCSWDSNLPESLESVSDVLLNFFPYVSPKTSITDSREEEGVSESEDGGGSSVDSLAAHVKNLLQCESSLNHAKEILRNAEEEESRVRAHAWNMKFNLAHDCGYSISELNEDDRRKVEEIKAELFGHGRTTDLSKGLQSPRGMGCKPEAVCSHIIIESHEKGCFRTLTSEHPQLDRHPCAFRSAGPSEMTRGRQNPSSCRAKHVNLSASLDQNNSHFKVWNSLQLKSHSPFQNFIPDEFKISKGLRMPFDEKMDPWLSELVEPAFVPPKEVDFHSSSQMPSPEPMKKFTTSITFSSHRHSKCISNSSVVKITREDEDPTFCFL

SEQ ID NO: 4337 - protein, 4126 aa, Homo sapiens
  Payload ID: 968;
  Gene Symbol: ALMS1;
  Gene Name: Alstrom syndrome prt 1;
  ENSP ID: ENSP00000478155
MEPEDLPWPGELEEEEEEEEEEEEEEEEAAAAAAANVDDVVVVEEVEEEAGRELDSDSHYGPQHLESIDDEEDEEAKAWLQAHPGRILPPLSPPQHRYSEGERTSLEKKTESWHCLPQEMDSSQTLDTSQTRFNVRTEDTEVTDFPSLEEGILTQSENQVKEPNRDLFCSPLLVIQDSFASPDLPLLTCLTQDQEFAPDSLFHQSELSFAPLRGIPDKSEDTEWSSRPSEVSEALFQATAEVASDLASSRFSVSQHPLIGSTAVGSQCPFLPSEQGNNEETISSVDELKIPKDCDRYDDLCSYMSWKTRKDTQWPENNLADKDQVSVATSFDITDENIATKRSDHFDAARSYGQYWTQEDSSKQAETYLTKGLQGKVESDVITLDGLNENAVVCSERVAELQRKPTRESEYHSSDLRMLRMSPDTVPKAPKHLKAGDTSKGGIAKVTQSNLKSGITTTPVDSDIGSHLSLSLEDLSQLAVSSPLETTTGQHTDTLNQKTLADTHLTEETLKVTAIPEPADQKTATPTVLSSSHSHRGKPSIFYQQGLPDSHLTEEALKVSAAPGLADQTTGMSTLTSTSYSHREKPGTFYQQELPESNLTEEPLEVSAAPGPVEQKTGIPTVSSTSHSHVEDLLFFYRQTLPDGHLTDQALKVSAVSGPADQKTGTATVLSTPHSHREKPGIFYQQEFADSHQTEETLTKVSATPGPADQKTEIPAVQSSSYSQREKPSILYPQDLADSHLPEEGLKVSAVAGPADQKTGLPTVPSSAYSHREKLLVFYQQALLDSHLPEEALKVSAVSGPADGKTGTPAVTSTSSASSSLGEKPSAFYQQTLPNSHLTEEALKVSIVPGPGDQKTGIPSAPSSFYSHREKPIIFSQQTLPDFLFPEEALKVSAVSVLAAQKTGTPTVSSNSHSHSEKSSVFYQQELPDSDLPRESLKMSAIPGLTDQKTVPTPTVPSGSFSHREKPSIFYQQEWPDSYATEKALKVSTGPGPADQKTEIPAVQSSSYPQREKPSVLYPQVLSDSHLPEESLKVSAFPGPADQMTDTPAVPSTFYSQREKPGIFYQQTLPESHLPKEALKISVAPGLADQKTGTPTVTSTSYSQHREKPSIFHQQALPGTHIPEEAQKVSAVTGPGNQKTWIPRVLSTFYSQREKPGIFYQQTLPGSHIPEEAQKVSPVLGPADQKTGTPTPTSASYSHTEKPGIFYQQVLPDNHPTEEALKISVASEPVDQTTGTPAVTSTSYSQYREKPSIFYQQSLPSSHLTEEAKNVSAVPGPADQKTVIPILPSTFYSHTEKPGVFYQQVLPHSHPTEEALKISVASEPVDQTTGTPTVTSTSYSQHTEKPSIFYQQSLPGSHLTEEAKNVSAVPGPGDRKTGIPTLPSTFYSHTEKPGSFYQQVLPHSHLPEEALEVSVAPGPVDQTIGTPTVTSPSSSFGEKPIVIYKQAFPEGHLPEESLKVSVAPGPVGQTTGAPTITSPSYSQHRAKSGSFYQLALLGSQIPEEALRVSSAPGPADQTTGIPTITSTSYSFGEKPIVNYKQAFPDGHLPEEALKVSIVSGPTEKKTDIPAGPLGSSALGEKPITFYRQALLDSPLNKEVVKVSAAPGPADQKTETLPVHSTSYSNRGKPVIFYQQTLSDSHLPEEALKVPPVPGPDAQKTETPSVSSSLYSYREKPIVFYQQALPDSELTQEALKVSAVPQPADQKTGLSTVTSSFYSHTEKPNISYQQELPDSHLTEEALKVSNVPGPADQKTGVSTVTSTSYSHREKPIVSYQRELPHFTEAGLKILRVPGPADQKTGINILPSNSYPQREHSVISYEQELPDLTEVTLKAIGVPGPADQKTGIQIASSSSYSNREKASIFHQQELPDVTEEALNVFVVPGQGDRKTEIPTVPLSYYSRREKPSVISQQELPDSHLTEEALKVSPVSIPAEQKTGIPIGLSSSYSHSHKEKLKISTVHIPDDQKTEFPAATLSSYSQIEKPKISTVIGPNDQKTPSQTAFHSSYSQTVKPNILFQQQLPDRDQSKGILKISAVPELTDVNTGKPVSLSSSYFHREKSNIFSPQELPGSHVTEDVLKVSTIPGPAGQKTVLPTALPSSFSHREKPDIFYQKDLPDRHLTEDALKISSALGQADQITGLQTVPSGTYSHGENHKLVSEHVQRLIDNLNSSDSSVSSNNVLLNSQADDRVVINKPESAGFRDVGSEEIQDAENSAKTLKEIRTLLMEAENMALKRCNFPAPLARFRDISDISFIQSKKVVCFKEPSSTGVSNGDLLHRQPFTEESPSSRCIQKDIGTQTNLKCRRGIENWEFISSTTVRSPLQEAESKVSMALEETLRQYQAAKSVMRSEPEGCSGTIGNKIIIPMMTVIKSDSSSDASDGNGSCSWDSNLPESLESVSDVLLNFFPYVSPKTSITDSREEEGVSESEDGGGSSVDSLAAHVKNLLQCESSLNHAKEILRNAEEEESRVRAHAWNMKFNLAHDCGYSISELNEDDRRKVEEIKAELFGHGRTTDLSKGLQSPRGMGCKPEAVCSHIIIESHEKGCFRTLTSEHPQLDRHPCAFRSAGPSEMTRGRQNPSSCRAKHVNLSASLDQNNSHFKVWNSLQLKSHSPFQNFIPDEFKISKGLRMPFDEKMDPWLSELVEPAFVPPKEVDFHSSSQMPSPEPMKKFTTSITFSSHRHSKCISNSSVVKVGVTEGSQCTGASVGVFNSHFTEEQNPPRDLKQKTSSPSSFKMHSNSQDKEVTILAEGRRQSQKLPVDFERSFQEEKPLERSDFTGSHSEPSTRANCSNFKEIQISDNHTLISMGRPSSTLGVNRSSSRLGVKEKNVTITPDLPSCIFLEQRELFEQSKAPRADDHVRKHHSPSPQHQDYVAPDLPSCIFLEQRELFEQCKAPYVDHQMRENHSPLPQGQDSIASDLPSPISLEQCQSKAPGVDDQMNKHHFPLPQGQDCVVEKNNQHKPKSHISNINVEAKFNTVVSQSAPNHCTLAASASTPPSNRKALSCVHITLCPKTSSKLDSGTLDERFHSLDAASKARMNSEFNFDLHTVSSRSLEPTSKLLTSKPVAQDQESLGFLGPKSSLDFQVVQPSLPDSNTITQDLKTIPSQNSQIVTSRQIQVNISDFEGHSNPEGTPVFADRLPEKMKTPLSAFSEKLSSDAVTQITTESPEKTLFSSEIFINAEDRGHEIIEPGNQKLRKAPVKFASSSSVQQVTFSRGTDGQPLLLPYKPSGSTKMYYVPQLRQIPPSPDSKSDTTVESSHSGSNDAIAPDFPAQVLGTRDDDLSATVNIKHKEGIYSKRVVTKASLPVGEKPLQNENADASVQVLITGDENLSDKKQQEIHSTRAVTEAAQAKEKESLQKDTADSSAAAAAEHSAQVGDPEMKNLPDTKAITQKEEIHRKKTVPEEAWPNNKESLQINIEESECHSEFENTTRSVFRSAKFYIHHPVHLPSDQDICHESLGKSVFMRHSWKDFFQHHPDKHREHMCLPLPYQNMDKTKTDYTRIKSLSINVNLGNKEVMDTTKSQVRDYPKHNGQISDPQRDQKVTPEQTTQHTVSLNELWNKYRERQRQQRQPELGDRKELSLVDRLDRLAKILQNPITHSLQVSESTHDDSRGERSVKEWSGRQQQRNKLQKKKRFKSLEKSHKNTGELKKSKVLSHHRAGRSNQIKIEQIKFDKYILSKQPGFNYISNTSSDCRPSEESELLTDTTTNILSGTTSTVESDILTQTDREVALHERSSSVSTIDTARLIQAFGHERVCLSPRRIKLYSSITNQQRRYLEKRSKHSKKVLNTGHPLVTSEHTRRRHIQVANHVISSDSISSSASSFLSSNSTFCNKQNVHMLNKGIQAGNLEIVNGAKKHTRDVGITFPTPSSSEAKLEENSDVTSWSEEKREEKMLFTGYPEDRKLKKNKKNSHEGVSWFVPVENVESRSKKENVPNTCGPGISWFEPITKTRPWREPLREQNCQGQHLDGRGYLAGPGREAGRDLLRPFVRATLQESLQFHRPDFISRSGERIKRLKLIVQERKLQSMLQTERDALFNIDRERQGHQNRMCPLPKRVFLAIQKNKPISKKEMIQRSKRIYEQLPEVQKKREEEKRKSEYKSYRLRAQLYKKRVTNQLLGRKVPWD

SEQ ID NO: 4338 - protein, 3859 aa, Homo sapiens
  Payload ID: 968;
  Gene Symbol: ALMS1;
  Gene Name: Alstrom syndrome prt 1;
  ENSP ID: ENSP00000479094
MEPEDLPWPGELEEEEEEEEEEEEEEEEAAAAAAANVDDVVVVEEVEEEAGRELDSDSHYGPQHLESIDDEEDEEAKAWLQAHPGRILPPLSPPQHRYSEGERTSLEKIVPLTCHVWQQIVYQGNSRTQISDTNVVCLETTAQRGSGDDQKTESWHCLPQEMDSSQTLDTSQTRFNVRTEDTEVTDFPSLEEGILTQSENQVKEPNRDLFCSPLLVIQDSFASPDLPLLTCLTQDQEFAPDSLFHQSELSFAPLRGIPDKSEDTEWSSRPSEVSEALFQATAEVASDLASSRFSVSQHPLIGSTAVGSQCPFLPSEQGNNEETISSVDELKIPKDCDRYDDLCSYMSWKTRKDTQWPENNLADKDQVSVATSFDITDENIATKRSDHFDAARSYGQYWTQEDSSKQAETYLTKGLQGKVESDVITLDGLNENAVVCSERVAELQRKPTRESEYHSSDLRMLRMSPDTVPKAPKHLKAGDTSKGGIAKVTQSNLKSGITTTPVDSDIGSHLSLSLEDLSQLAVSSPLETTTGQHTDTLNQKTLADTHLTEETLKVTAIPEPADQKTATPTVLSSSHSHRGKPSIFYQQGLPDSHLTEEALKVSAAPGLADQTTGMSTLTSTSYSHREKPGTFYQQELPESNLTEEPLEVSAAPGPVEQKTGIPTVSSTSHSHVEDLLFFYRQTLPDGHLTDQALKVSAVSGPADQKTGTATVLSTPHSHREKPGIFYQQEFADSHQTEETLTKVSATPGPADQKTEIPAVQSSSYSQREKPSILYPQDLADSHLPEEGLKVSAVAGPADQKTGLPTVPSSAYSHREKLLVFYQQALLDSHLPEEALKVSAVSGPADGKTGTPAVTSTSSASSSLGEKPSAFYQQTLPNSHLTEEALKVSIVPGPGDQKTGIPSAPSSFYSHREKPIIFSQQTLPDFLFPEEALKVSAVSVLAAQKTGTPTVSSNSHSHSEKSSVFYQQELPDSDLPRESLKMSAIPGLTDQKTVPTPTVPSGSFSHREKPSIFYQQEWPDSYATEKALKVSTGPGPADQKTEIPAVQSSSYPQREKPSVLYPQVLSDSHLPEESLKVSAFPGPADQMTDTPAVPSTFYSQREKPGIFYQQTLPESHLPKEALKISVAPGLADQKTGTPTVTSTSYSQHREKPSIFHQQALPGTHIPEEAQKVSAVTGPGNQKTWIPRVLSTFYSQREKPGIFYQQTLPGSHIPEEAQKVSPVLGPADQKTGTPTPTSASYSHTEKPGIFYQQVLPDNHPTEEALKISVASEPVDQTTGTPAVTSTSYSQYREKPSIFYQQSLPSSHLTEEAKNVSAVPGPADQKTVIPILPSTFYSHTEKPGVFYQQVLPHSHPTEEALKISVASEPVDQTTGTPTVTSTSYSQHTEKPSIFYQQSLPGSHLTEEAKNVSAVPGPGDRKTGIPTLPSTFYSHTEKPGSFYQQVLPHSHLPEEALEVSVAPGPVDQTIGTPTVTSPSSSFGEKPIVIYKQAFPEGHLPEESLKVSVAPGPVGQTTGAPTITSPSYSQHRAKSGSFYQLALLGSQIPEEALRVSSAPGPADQTTGIPTITSTSYSFGEKPIVNYKQAFPDGHLPEEALKVSIVSGPTEKKTDIPAGPLGSSALGEKPITFYRQALLDSPLNKEVVKVSAAPGPADQKTETLPVHSTSYSNRGKPVIFYQQTLSDSHLPEEALKVPPVPGPDAQKTETPSVSSSLYSYREKPIVFYQQALPDSELTQEALKVSAVPQPADQKTGLSTVTSSFYSHTEKPNISYQQELPDSHLTEEALKVSNVPGPADQKTGVSTVTSTSYSHREKPIVSYQRELPHFTEAGLKILRVPGPADQKTGINILPSNSYPQREHSVISYEQELPDLTEVTLKAIGVPGPADQKTGIQIASSSSYSNREKASIFHQQELPDVTEEALNVFVVPGQGDRKTEIPTVPLSYYSRREKPSVISQQELPDSHLTEEALKVSPVSIPAEQKTGIPIGLSSSYSHSHKEKLKISTVHIPDDQKTEFPAATLSSYSQIEKPKISTVIGPNDQKTPSQTAFHSSYSQTVKPNILFQQQLPDRDQSKGILKISAVPELTDVNTGKPVSLSSSYFHREKSNIFSPQELPGSHVTEDVLKVSTIPGPAGQKTVLPTALPSSFSHREKPDIFYQKDLPDRHLTEDALKISSALGQADQITGLQTVPSGTYSHGENHKLVSEHVQRLIDNLNSSDSSVSSNNVLLNSQADDRVVINKPESAGFRDVGSEEIQDAENSAKTLKEIRTLLMEAENMALKRCNFPAPLARFRDISDISFIQSKKVVCFKEPSSTGVSNGDLLHRQPFTEESPSSRCIQKDIGTQTNLKCRRGIENWEFISSTTVRSPLQEAESKVSMALEETLRQYQAAKSVMRSEPEGCSGTIGNKIIIPMMTVIKSDSSSDASDGNGSCSWDSNLPESLESVSDVLLNFFPYVSPKTSITDSREEEGVSESEDGGGSSVDSLAAHVKNLLQCESSLNHAKEILRNAEEEESRVRAHAWNMKFNLAHDCGYSISELNEDDRRKVEEIKAELFGHGRTTDLSKGLQSPRGMGCKPEAVCSHIIIESHEKGCFRTLTSEHPQLDRHPCAFRSAGPSEMTRGRQNPSSCRAKHVNLSASLDQNNSHFKVWNSLQLKSHSPFQNFIPDEFKISKGLRMPFDEKMDPWLSELVEPAFVPPKEVDFHSSSQMPSPEPMKKFTTSITFSSHRHSKCISNSSVVKVGVTEGSQCTGASVGVFNSHFTEEQNPPRDLKQKTSSPSSFKMHSNSQDKEVTILAEGRRQSQKLPVDFERSFQEEKPLERSDFTGSHSEPSTRANCSNFKEIQISDNHTLISMGRPSSTLGVNRSSSRLGVKEKNVTITPDLPSCIFLEQRELFEQSKAPRADDHVRKHHSPSPQHQDYVAPDLPSCIFLEQRELFEQCKAPYVDHQMRENHSPLPQGQDSIASDLPSPISLEQCQSKAPGVDDQMNKHHFPLPQGQDCVVEKNNQHKPKSHISNINVEAKFNTVVSQSAPNHCTLAASASTPPSNRKALSCVHITLCPKTSSKLDSGTLDERFHSLDAASKARMNSEFNFDLHTVSSRSLEPTSKLLTSKPVAQDQESLGFLGPKSSLDFQVVQPSLPDSNTITQDLKTIPSQNSQIVTSRQIQVNISDFEGHSNPEGTPVFADRLPEKMKTPLSAFSEKLSSDAVTQITTESPEKTLFSSEIFINAEDRGHEIIEPGNQKLRKAPVKFASSSSVQQVTFSRGTDGQPLLLPYKPSGSTKMYYVPQLRQIPPSPDSKSDTTVESSHSGSNDAIAPDFPAQVLGTRDDDLSATVNIKHKEGIYSKRVVTKASLPVGEKPLQNENADASVQVLITGDENLSDKKQQEIHSTRAVTEAAQAKEKESLQKDTADSSAAAAAEHSAQVGDPEMKNLPDTKAITQKEEIHRKKTVPEEAWPNNKESLQINIEESECHSEFENTTRSVFRSAKFYIHHPVHLPSDQDICHESLGKSVFMRHSWKDFFQHHPDKHREHMCLPLPYQNMDKTKTDYTRIKSLSINVNLGNKEVMDTTKSQVRDYPKHNGQISDPQRDQKVTPEQTTQHTVSLNELWNKYRERQRQQRQPELGDRKELSLVDRLDRLAKILQNPITHSLQVSESTHDDSRGERSVKEWSGRQQQRNKLQKKKRFKSLEKSHKNTGELKKSKVLSHHRAGRSNQIKIEQIKFDKYILSKQPGFNYISNTSSDCRPSEESELLTDTTTNILSGTTSTVESDILTQTDREVALHERSSSVSTIDTARLIQAFGHERVCLSPRRIKLYSSITNQQRRYLEKRSKHSKKVLNTGHPLVTSEHTRRRHIQVHGYRFHLAM

SEQ ID NO: 4339 - protein, 4168 aa, Homo sapiens
  Payload ID: 968;
  Gene Symbol: ALMS1;
  Gene Name: Alstrom syndrome prt 1;
  ENSP ID: ENSP00000482968
MEPEDLPWPGELEEEEEEEEEEEEEEEEAAAAAAANVDDVVVVEEVEEEAGRELDSDSHYGPQHLESIDDEEDEEAKAWLQAHPGRILPPLSPPQHRYSEGERTSLEKIVPLTCHVWQQIVYQGNSRTQISDTNVVCLETTAQRGSGDDQKTESWHCLPQEMDSSQTLDTSQTRFNVRTEDTEVTDFPSLEEGILTQSENQVKEPNRDLFCSPLLVIQDSFASPDLPLLTCLTQDQEFAPDSLFHQSELSFAPLRGIPDKSEDTEWSSRPSEVSEALFQATAEVASDLASSRFSVSQHPLIGSTAVGSQCPFLPSEQGNNEETISSVDELKIPKDCDRYDDLCSYMSWKTRKDTQWPENNLADKDQVSVATSFDITDENIATKRSDHFDAARSYGQYWTQEDSSKQAETYLTKGLQGKVESDVITLDGLNENAVVCSERVAELQRKPTRESEYHSSDLRMLRMSPDTVPKAPKHLKAGDTSKGGIAKVTQSNLKSGITTTPVDSDIGSHLSLSLEDLSQLAVSSPLETTTGQHTDTLNQKTLADTHLTEETLKVTAIPEPADQKTATPTVLSSSHSHRGKPSIFYQQGLPDSHLTEEALKVSAAPGLADQTTGMSTLTSTSYSHREKPGTFYQQELPESNLTEEPLEVSAAPGPVEQKTGIPTVSSTSHSHVEDLLFFYRQTLPDGHLTDQALKVSAVSGPADQKTGTATVLSTPHSHREKPGIFYQQEFADSHQTEETLTKVSATPGPADQKTEIPAVQSSSYSQREKPSILYPQDLADSHLPEEGLKVSAVAGPADQKTGLPTVPSSAYSHREKLLVFYQQALLDSHLPEEALKVSAVSGPADGKTGTPAVTSTSSASSSLGEKPSAFYQQTLPNSHLTEEALKVSIVPGPGDQKTGIPSAPSSFYSHREKPIIFSQQTLPDFLFPEEALKVSAVSVLAAQKTGTPTVSSNSHSHSEKSSVFYQQELPDSDLPRESLKMSAIPGLTDQKTVPTPTVPSGSFSHREKPSIFYQQEWPDSYATEKALKVSTGPGPADQKTEIPAVQSSSYPQREKPSVLYPQVLSDSHLPEESLKVSAFPGPADQMTDTPAVPSTFYSQREKPGIFYQQTLPESHLPKEALKISVAPGLADQKTGTPTVTSTSYSQHREKPSIFHQQALPGTHIPEEAQKVSAVTGPGNQKTWIPRVLSTFYSQREKPGIFYQQTLPGSHIPEEAQKVSPVLGPADQKTGTPTPTSASYSHTEKPGIFYQQVLPDNHPTEEALKISVASEPVDQTTGTPAVTSTSYSQYREKPSIFYQQSLPSSHLTEEAKNVSAVPGPADQKTVIPILPSTFYSHTEKPGVFYQQVLPHSHPTEEALKISVASEPVDQTTGTPTVTSTSYSQHTEKPSIFYQQSLPGSHLTEEAKNVSAVPGPGDRKTGIPTLPSTFYSHTEKPGSFYQQVLPHSHLPEEALEVSVAPGPVDQTIGTPTVTSPSSSFGEKPIVIYKQAFPEGHLPEESLKVSVAPGPVGQTTGAPTITSPSYSQHRAKSGSFYQLALLGSQIPEEALRVSSAPGPADQTTGIPTITSTSYSFGEKPIVNYKQAFPDGHLPEEALKVSIVSGPTEKKTDIPAGPLGSSALGEKPITFYRQALLDSPLNKEVVKVSAAPGPADQKTETLPVHSTSYSNRGKPVIFYQQTLSDSHLPEEALKVPPVPGPDAQKTETPSVSSSLYSYREKPIVFYQQALPDSELTQEALKVSAVPQPADQKTGLSTVTSSFYSHTEKPNISYQQELPDSHLTEEALKVSNVPGPADQKTGVSTVTSTSYSHREKPIVSYQRELPHFTEAGLKILRVPGPADQKTGINILPSNSYPQREHSVISYEQELPDLTEVTLKAIGVPGPADQKTGIQIASSSSYSNREKASIFHQQELPDVTEEALNVFVVPGQGDRKTEIPTVPLSYYSRREKPSVISQQELPDSHLTEEALKVSPVSIPAEQKTGIPIGLSSSYSHSHKEKLKISTVHIPDDQKTEFPAATLSSYSQIEKPKISTVIGPNDQKTPSQTAFHSSYSQTVKPNILFQQQLPDRDQSKGILKISAVPELTDVNTGKPVSLSSSYFHREKSNIFSPQELPGSHVTEDVLKVSTIPGPAGQKTVLPTALPSSFSHREKPDIFYQKDLPDRHLTEDALKISSALGQADQITGLQTVPSGTYSHGENHKLVSEHVQRLIDNLNSSDSSVSSNNVLLNSQADDRVVINKPESAGFRDVGSEEIQDAENSAKTLKEIRTLLMEAENMALKRCNFPAPLARFRDISDISFIQSKKVVCFKEPSSTGVSNGDLLHRQPFTEESPSSRCIQKDIGTQTNLKCRRGIENWEFISSTTVRSPLQEAESKVSMALEETLRQYQAAKSVMRSEPEGCSGTIGNKIIIPMMTVIKSDSSSDASDGNGSCSWDSNLPESLESVSDVLLNFFPYVSPKTSITDSREEEGVSESEDGGGSSVDSLAAHVKNLLQCESSLNHAKEILRNAEEEESRVRAHAWNMKFNLAHDCGYSISELNEDDRRKVEEIKAELFGHGRTTDLSKGLQSPRGMGCKPEAVCSHIIIESHEKGCFRTLTSEHPQLDRHPCAFRSAGPSEMTRGRQNPSSCRAKHVNLSASLDQNNSHFKVWNSLQLKSHSPFQNFIPDEFKISKGLRMPFDEKMDPWLSELVEPAFVPPKEVDFHSSSQMPSPEPMKKFTTSITFSSHRHSKCISNSSVVKVGVTEGSQCTGASVGVFNSHFTEEQNPPRDLKQKTSSPSSFKMHSNSQDKEVTILAEGRRQSQKLPVDFERSFQEEKPLERSDFTGSHSEPSTRANCSNFKEIQISDNHTLISMGRPSSTLGVNRSSSRLGVKEKNVTITPDLPSCIFLEQRELFEQSKAPRADDHVRKHHSPSPQHQDYVAPDLPSCIFLEQRELFEQCKAPYVDHQMRENHSPLPQGQDSIASDLPSPISLEQCQSKAPGVDDQMNKHHFPLPQGQDCVVEKNNQHKPKSHISNINVEAKFNTVVSQSAPNHCTLAASASTPPSNRKALSCVHITLCPKTSSKLDSGTLDERFHSLDAASKARMNSEFNFDLHTVSSRSLEPTSKLLTSKPVAQDQESLGFLGPKSSLDFQVVQPSLPDSNTITQDLKTIPSQNSQIVTSRQIQVNISDFEGHSNPEGTPVFADRLPEKMKTPLSAFSEKLSSDAVTQITTESPEKTLFSSEIFINAEDRGHEIIEPGNQKLRKAPVKFASSSSVQQVTFSRGTDGQPLLLPYKPSGSTKMYYVPQLRQIPPSPDSKSDTTVESSHSGSNDAIAPDFPAQVLGTRDDDLSATVNIKHKEGIYSKRVVTKASLPVGEKPLQNENADASVQVLITGDENLSDKKQQEIHSTRAVTEAAQAKEKESLQKDTADSSAAAAAEHSAQVGDPEMKNLPDTKAITQKEEIHRKKTVPEEAWPNNKESLQINIEESECHSEFENTTRSVFRSAKFYIHHPVHLPSDQDICHESLGKSVFMRHSWKDFFQHHPDKHREHMCLPLPYQNMDKTKTDYTRIKSLSINVNLGNKEVMDTTKSQVRDYPKHNGQISDPQRDQKVTPEQTTQHTVSLNELWNKYRERQRQQRQPELGDRKELSLVDRLDRLAKILQNPITHSLQVSESTHDDSRGERSVKEWSGRQQQRNKLQKKKRFKSLEKSHKNTGELKKSKVLSHHRAGRSNQIKIEQIKFDKYILSKQPGFNYISNTSSDCRPSEESELLTDTTTNILSGTTSTVESDILTQTDREVALHERSSSVSTIDTARLIQAFGHERVCLSPRRIKLYSSITNQQRRYLEKRSKHSKKVLNTGHPLVTSEHTRRRHIQVANHVISSDSISSSASSFLSSNSTFCNKQNVHMLNKGIQAGNLEIVNGAKKHTRDVGITFPTPSSSEAKLEENSDVTSWSEEKREEKMLFTGYPEDRKLKKNKKNSHEGVSWFVPVENVESRSKKENVPNTCGPGISWFEPITKTRPWREPLREQNCQGQHLDGRGYLAGPGREAGRDLLRPFVRATLQESLQFHRPDFISRSGERIKRLKLIVQERKLQSMLQTERDALFNIDRERQGHQNRMCPLPKRVFLAIQKNKPISKKEMIQRSKRIYEQLPEVQKKREEEKRKSEYKSYRLRAQLYKKRVTNQLLGRKVPWD

SEQ ID NO: 4340 - protein, 553 aa, Homo sapiens
  Payload ID: 969;
  Gene Symbol: ASPSCR1;
  Gene Name: alveolar soft part sarcoma chromosome region, candidate 1;
  Uniprot ID:  Q9BZE9;
  ENSP ID: ENSP00000302176
MAAPAGGGGSAVSVLAPNGRRHTVKVTPSTVLLQVLEDTCRRQDFNPCEYDLKFQRSVLDLSLQWRFANLPNNAKLEMVPASRSREGPENMVRIALQLDDGSRLQDSFCSGQTLWELLSHFPQIRECLQHPGGATPVCVYTRDEVTGEAALRGTTLQSLGLTGGSATIRFVMKCYDPVGKTPGSLGSSASAGQAAASAPLPLESGELSRGDLSRPEDADTSGPCCEHTQEKQSTRAPAAAPFVPFSGGGQRLGGPPGPTRPLTSSSAKLPKSLSSPGGPSKPKKSKSGQDPQQEQEQERERDPQQEQERERPVDREPVDREPVVCHPDLEERLQAWPAELPDEFFELTVDDVRRRLAQLKSERKRLEEAPLVTKAFREAQIKEKLERYPKVALRVLFPDRYVLQGFFRPSETVGDLRDFVRSHLGNPELSFYLFITPPKTVLDDHTQTLFQANLFPAALVHLGAEEPAGVYLEPGLLEHAISPSAADVLVARYMSRAAGSPSPLPAPDPAPKSEPAAEEGALVPPEPIPGTAQPVKRSLGKVPKWLKLPASKR

SEQ ID NO: 4341 - protein, 647 aa, Homo sapiens
  Payload ID: 969;
  Gene Symbol: ASPSCR1;
  Gene Name: alveolar soft part sarcoma chromosome region, candidate 1;
  Uniprot ID:  Q9BZE9;
  ENSP ID: ENSP00000306625
MAAPAGGGGSAVSVLAPNGRRHTVKVTPSTVLLQVLEDTCRRQDFNPCEYDLKFQRSVLDLSLQWRFANLPNNAKLEMVPASRSREGPENMVRIALQLDDGSRLQDSFCSGQTLWELLSHFPQIRECLQHPGGATPVCVYTRDEVTGEAALRGTTLQSLGLTGGSATIRFVMKCYDPVGKTPGSLGSSASAGQAAASAPLPLESGELSRGDLSRPEDADTSGPCCEHTQEKQSTRAPAAAPFVPFSGGGQRLGGPPGPTRPLTSSSAKLPKSLSSPGGPSKPKKSKSGQDPQQEQEQERERDPQQEQERERPVDREPVDREPVVCHPDLEERLQAWPAELPDEFFELTVDDVRRRLAQLKSERKRLEEAPLVTKAFREAQIKEKLERYPKVALRVLFPDRYVLQGFFRPSETVGDLRDFVRSHLGNPELSFYLFITPPKTVLDDHTQTLFQPQLGDRVAPFTLGPSLKRCLGPEQRTRLPVVGDGGDVDSGRLLFWGPSRGRASPSTGQPPCHPVCRPSSPPSPRPSSGDPSRVKAGHKHVGTGRANLFPAALVHLGAEEPAGVYLEPGLLEHAISPSAADVLVARYMSRAAGSPSPLPAPDPAPKSEPAAEEGALVPPEPIPGTAQPVKRSLGKVPKWLKLPASKR

SEQ ID NO: 4342 - protein, 58 aa, Homo sapiens
  Payload ID: 969;
  Gene Symbol: ASPSCR1;
  Gene Name: alveolar soft part sarcoma chromosome region, candidate 1;
  ENSP ID: ENSP00000344020
MAAPAGGGGSAVSVLAPNGRRHTVKVTPSTVLLQVLEDTCRRQDFNPCEYDLKCPWAV

SEQ ID NO: 4343 - protein, 179 aa, Homo sapiens
  Payload ID: 969;
  Gene Symbol: ASPSCR1;
  Gene Name: alveolar soft part sarcoma chromosome region, candidate 1;
  ENSP ID: ENSP00000461980
RVLFPDRYVLQGFFRPSETVGDLRDFVRSHLGNPELSFYLFITPPKTVLDDHTQTLFQANLFPAALVHLGAEEPAGVYLEPGLLEHAISPSAADVLVARYMSRAAGSPSPLPAPDPAPKSEPAAEEGALVPPEPIPGTAQPVKRSLGKPARGESCQPEVPTPPATGPPPLPAGIKTCAS

SEQ ID NO: 4344 - protein, 188 aa, Homo sapiens
  Payload ID: 969;
  Gene Symbol: ASPSCR1;
  Gene Name: alveolar soft part sarcoma chromosome region, candidate 1;
  ENSP ID: ENSP00000461984
  MOD_RES (1)..(1): Any amino acid
XRHTVKVTPSTVLLQVLEDTCRRQDFNPCEYDLKFQRSVLDLSLQWRFANLPNNAKLEMVPASRSREGPENMVRIALQLDDGSRLQDSFCSGQTLWELLSHFPQIRECLQHPGGATPVCVYTRDEPSPGQWRETRALESTTCFMEKEGVAGPRSPGCPETSLGALFVFSASLKAQESQKWFHLINICF

SEQ ID NO: 4345 - protein, 353 aa, Homo sapiens
  Payload ID: 969;
  Gene Symbol: ASPSCR1;
  Gene Name: alveolar soft part sarcoma chromosome region, candidate 1;
  ENSP ID: ENSP00000462218
MKCYDPVGKTPGSLGSSASAGQAAASAPLPLESGELSRGDLSRPEDADTSGPCCEHTQEKQSTRAPAAAPFVPFSGGGQRLGGPPGPTRPLTSSSAKLPKSLSSPGGPSKPKKSKSGQDPQQEQEQERERDPQQEQERERPVDREPVDREPVVCHPDLEERLQAWPAELPDEFFELTVDDVRRRLAQLKSERKRLEEAPLVTKAFREAQIKEKLERYPKVALRVLFPDRYVLQGFFRPSETVGDLRDFVRSHLGNPELSFYLFITPPKTVLDDHTQTLFQANLFPAALVHLGAEEPAGVYLEPGLLEHAISPSAADVLVARYMSRAAGSPSPLPAPDPAPKSEPAAEEGALVP

SEQ ID NO: 4346 - protein, 501 aa, Homo sapiens
  Payload ID: 969;
  Gene Symbol: ASPSCR1;
  Gene Name: alveolar soft part sarcoma chromosome region, candidate 1;
  Uniprot ID:  Q9BZE9;
  ENSP ID: ENSP00000462329
MVPASRSREGPENMVRIALQLDDGSRLQDSFCSGQTLWELLSHFPQIRECLQHPGGATPVCVYTRDEVTGEAALRGTTLQSLGLTGGSATIRFVMKCYDPVGKTPGSLGSSASAGQAAASAPLPLESGELSRGDLSRPEDADTSGPCCEHTQEKQSTRAPAAAPFVPFSGGGQRLGGPPGPTRPLTSSSAKLPKSLSSPGGPSKPKKSKSGQDPQQEQEQERERDPQQEQERERPVDREPVDREPVVCHPDLEERLQAWPAELPDEFFELTVDDVRRRLAQLKSERKRLEEAPLVTKAFREAQIKEKLERYPKVALRVLFPDRYVLQGFFRPSETVGDLRDFVRSHLGNPELSFYLCLSSFGRMDGRGPRCFLTRRCLLSSVITPPKTVLDDHTQTLFQANLFPAALVHLGAEEPAGVYLEPGLLEHAISPSAADVLVARYMSRAAGSPSPLPAPDPAPKSEPAAEEGALVPPEPIPGTAQPVKRSLGKVPKWLKLPASKR

SEQ ID NO: 4347 - protein, 307 aa, Homo sapiens
  Payload ID: 969;
  Gene Symbol: ASPSCR1;
  Gene Name: alveolar soft part sarcoma chromosome region, candidate 1;
  ENSP ID: ENSP00000463316
MGVFPEAATKPLLSMGWCGKSLSACGSAGAPVLEDTCRRQDFNPCEYDLKFQRSVLDLSLQWRFANLPNNAKLEMVPASRSREGPENMVRIALQLDDGSRLQDSFCSGQTLWELLSHFPQIRECLQHPGGATPVCVYTRDEVTGEAALRGTTLQSLGLTGGSATIRFVMKCYDPVGKTPGSLGSSASAGQAAASAPLPLESGELSRGDLSRPEDADTSGPCCEHTQEKQSTRAPAAAPFVPFSGGGQRLGGPPGPTRPLTSSSAKLPKSLSSPGGPSKPKKSKSGQDPQQEQEQERERDPQQEQERE

SEQ ID NO: 4348 - protein, 4 aa, Homo sapiens
  Payload ID: 969;
  Gene Symbol: ASPSCR1;
  Gene Name: alveolar soft part sarcoma chromosome region, candidate 1;
  ENSP ID: ENSP00000463708
MPSW

SEQ ID NO: 4349 - protein, 470 aa, Homo sapiens
  Payload ID: 969;
  Gene Symbol: ASPSCR1;
  Gene Name: alveolar soft part sarcoma chromosome region, candidate 1;
  ENSP ID: ENSP00000463992
MVPASRSREGPENMVRIALQLDDGSRLQDSFCSGQTLWELLSHFPQIRECLQHPGGATPVCVYTRDEVTGEAALRGTTLQSLGLTGGSATIRFVMKCYDPVGKTPGSLGSSASAGQAAASAPLPLESGELSRGDLSRPEDADTSGPCCEHTQEKQSTRAPAAAPFVPFSGGGQRLGGPPGPTRPLTSSSAKLPKSLSSPGGPSKPKKSKSGQDPQQEQEQERERDPQQEQERERPVDREPVDREPVVCHPDLEERLQAWPAELPDEFFELTVDDVRRRLAQLKSERKRLEEAPLVTKAFREAQIKEKLERYPKTESLSVAQAGVSGAISAHCKLRLPGSSGSPASASQVAGISGGSEGPVPRPLRPTGLLPPQRDSGGLARLREEPPGEPRAVILPVHHPSKNSPGRPHADPLSGEPLPGRSGALGSRGAGRCLPGAWPAGACHLPICGRCAGGQVHVQGRRVPFPIASP

SEQ ID NO: 4350 - protein, 160 aa, Homo sapiens
  Payload ID: 969;
  Gene Symbol: ASPSCR1;
  Gene Name: alveolar soft part sarcoma chromosome region, candidate 1;
  ENSP ID: ENSP00000464044
MAAPAGGGGSAVSVLAPNGRRHTVKVTPSTVLLQVLEDTCRRQDFNPCEYDLKFQRSVLDLSLQWRFANLPNNAKLEMVPASRSREGPENMVRIALQLDDGSRLQDSFCSGQTLWELLSHFPQISPWTGSPWTGSRWCATPTWRSGCRPGQRSCLMSSLS

SEQ ID NO: 4351 - protein, 182 aa, Homo sapiens
  Payload ID: 969;
  Gene Symbol: ASPSCR1;
  Gene Name: alveolar soft part sarcoma chromosome region, candidate 1;
  ENSP ID: ENSP00000464408
MAAPAGGGGSAVSVLAPNGRRHTVKVTPSTVLLQVLEDTCRRQDFNPCEYDLKFQRSVLDLSLQWRFANLPNNAKLEMVPASRSREGPENMVRIALQLDDGSRLQDSFCSGQTLWELLSHFPQIRECLQHPGGATPVCVYTRDEVGGLLLLTQSPLTFSPLSNWKICCPAAVSRAVAGDSGS

SEQ ID NO: 4352 - protein, 326 aa, Homo sapiens
  Payload ID: 970;
  Gene Symbol: ALX1;
  Gene Name: ALX homeobox 1;
  Uniprot ID:  Q15699;
  ENSP ID: ENSP00000315417
MEFLSEKFALKSPPSKNSDFYMGAGGPLEHVMETLDNESFYSKASAGKCVQAFGPLPRAEHHVRLERTSPCQDSSVNYGITKVEGQPLHTELNRAMDNCNSLRMSPVKGMQEKGELDELGDKCDSNVSSSKKRRHRTTFTSLQLEELEKVFQKTHYPDVYVREQLALRTELTEARVQVWFQNRRAKWRKRERYGQIQQAKSHFAATYDISVLPRTDSYPQIQNNLWAGNASGGSVVTSCMLPRDTSSCMTPYSHSPRTDSSYTGFSNHQNQFSHVPLNNFFTDSLLTGATNGHAFETKPEFERRSSSIAVLRMKAKEHTANISWAM

SEQ ID NO: 4353 - protein, 343 aa, Homo sapiens
  Payload ID: 971;
  Gene Symbol: ALX3;
  Gene Name: ALX homeobox 3;
  Uniprot ID:  O95076;
  ENSP ID: ENSP00000358807
MDPEHCAPFRVGPAPGPYVASGDEPPGPQGTPAAAPHLHPAPPRGPRLTRFPACGPLEPYLPEPAKPPAKYLQDLGPGPALNGGHFYEGPAEAEEKTSKAASFPQLPLDCRGGPRDGPSNLQGSPGPCLASLHLPLSPGLPDSMELAKNKSKKRRNRTTFSTFQLEELEKVFQKTHYPDVYAREQLALRTDLTEARVQVWFQNRRAKWRKRERYGKIQEGRNPFTAAYDISVLPRTDSHPQLQNSLWASPGSGSPGGPCLVSPEGIPSPCMSPYSHPHGSVAGFMGVPAPSAAHPGIYSIHGFPPTLGGHSFEPSSDGDYKSPSLVSLRVKPKEPPGLLNWTT

SEQ ID NO: 4354 - protein, 411 aa, Homo sapiens
  Payload ID: 972;
  Gene Symbol: ALX4;
  Gene Name: ALX homeobox 4;
  Uniprot ID:  Q9H161;
  ENSP ID: ENSP00000332744
MNAETCVSYCESPAAAMDAYYSPVSQSREGSSPFRAFPGGDKFGTTFLSAAAKAQGFGDAKSRARYGAGQQDLATPLESGAGARGSFNKFQPQPSTPQPQPPPQPQPQQQQPQPQPPAQPHLYLQRGACKTPPDGSLKLQEGSSGHSAALQVPCYAKESSLGEPELPPDSDTVGMDSSYLSVKEAGVKGPQDRASSDLPSPLEKADSESNKGKKRRNRTTFTSYQLEELEKVFQKTHYPDVYAREQLAMRTDLTEARVQVWFQNRRAKWRKRERFGQMQQVRTHFSTAYELPLLTRAENYAQIQNPSWLGNNGAASPVPACVVPCDPVPACMSPHAHPPGSGASSVTDFLSVSGAGSHVGQTHMGSLFGAASLSPGLNGYELNGEPDRKTSSIAALRMKAKEHSAAISWAT

SEQ ID NO: 4355 - protein, 264 aa, Homo sapiens
  Payload ID: 973;
  Gene Symbol: ALYREF;
  Gene Name: Aly/REF export factor;
  ENSP ID: ENSP00000421592
MPDSAPAMADKMDMSLDDIIKLNRSQRGGRGGGRGRGRAGSQGGRGGGAQAAARVNRGGGPIRNRPAIARGAAGGGGRNRPAPYSRPKQLPDKWQHDLFDSGFGGGAGVETGGKLLVSNLDFGVSDADIQELFAEFGTLKKAAVHYDRSGRSLGTADVHFERKADALKAMKQYNGVPLDGRPMNIQLVTSQIDAQRRPAQSVNRGGMTRNRGAGGFGGGGGTRRGTRGGARGRGRGAGRNSKQQLSAEELDAQLDAYNARMDTS

SEQ ID NO: 4356 - protein, 447 aa, Homo sapiens
  Payload ID: 974;
  Gene Symbol: AMBN;
  Gene Name: ameloblastin (enamel matrix prt);
  Uniprot ID:  Q9NP70;
  ENSP ID: ENSP00000313809
MSASKIPLFKMKDLILILCLLEMSFAVPFFPQQSGTPGMASLSLETMRQLGSLQRLNTLSQYSRYGFGKSFNSLWMHGLLPPHSSLPWMRPREHETQQYEYSLPVHPPPLPSQPSLKPQQPGLKPFLQSAAATTNQATALKEALQPPIHLGHLPLQEGELPLVQQQVAPSDKPPKPELPGVDFADPQGPSLPGMDFPDPQGPSLPGLDFADPQGSTIFQIARLISHGPMPQNKQSPLYPGMLYVPFGANQLNAPARLGIMSSEEVAGGREDPMAYGAMFPGFGGMRPGFEGMPHNPAMGGDFTLEFDSPVAATKGPENEEGGAQGSPMPEANPDNLENPAFLTELEPAPHAGLLALPKDDIPGLPRSPSGKMKGLPSVTPAAADPLMTPELADVYRTYDADMTTSVDFQEEATMDTTMAPNSLQTSMPGNKAQEPEMMHDAWHFQEP

SEQ ID NO: 4357 - protein, 432 aa, Homo sapiens
  Payload ID: 974;
  Gene Symbol: AMBN;
  Gene Name: ameloblastin (enamel matrix prt);
  Uniprot ID:  Q9NP70;
  ENSP ID: ENSP00000391234
MSASKIPLFKMKDLILILCLLEMSFAVPFFPQQSGTPGMASLSLETMRQLGSLQRLNTLSQYSRYGFGKSFNSLWMHGLLPPHSSLPWMRPREHETQQPSLKPQQPGLKPFLQSAAATTNQATALKEALQPPIHLGHLPLQEGELPLVQQQVAPSDKPPKPELPGVDFADPQGPSLPGMDFPDPQGPSLPGLDFADPQGSTIFQIARLISHGPMPQNKQSPLYPGMLYVPFGANQLNAPARLGIMSSEEVAGGREDPMAYGAMFPGFGGMRPGFEGMPHNPAMGGDFTLEFDSPVAATKGPENEEGGAQGSPMPEANPDNLENPAFLTELEPAPHAGLLALPKDDIPGLPRSPSGKMKGLPSVTPAAADPLMTPELADVYRTYDADMTTSVDFQEEATMDTTMAPNSLQTSMPGNKAQEPEMMHDAWHFQEP

SEQ ID NO: 4358 - protein, 446 aa, Homo sapiens [sequence omitted]

SEQ ID NO: 4359 - protein, 175 aa, Homo sapiens
  Payload ID: 975;
  Gene Symbol: AMELX;
  Gene Name: amelogenin, X-linked;
  Uniprot ID:  Q99217;
  ENSP ID: ENSP00000335312
MGTWILFACLLGAAFAMPVLTPLKWYQSIRPPYPSYGYEPMGGWLHHQIIPVLSQQHPPTHTLQPHHHIPVVPAQQPVIPQQPMMPVPGQHSMTPIQHHQPNLPPPAQQPYQPQPVQPQPHQPMQPQPPVHPMQPLPPQPPLPPMFPMQPLPPMLPDLTLEAWPSTDKTKREEVD

SEQ ID NO: 4360 - protein, 205 aa, Homo sapiens
  Payload ID: 975;
  Gene Symbol: AMELX;
  Gene Name: amelogenin, X-linked;
  Uniprot ID:  Q99217;
  ENSP ID: ENSP00000370088
MGTWILFACLLGAAFAMPLPPHPGHPGYINFSYENSHSQAINVDRTALVLTPLKWYQSIRPPYPSYGYEPMGGWLHHQIIPVLSQQHPPTHTLQPHHHIPVVPAQQPVIPQQPMMPVPGQHSMTPIQHHQPNLPPPAQQPYQPQPVQPQPHQPMQPQPPVHPMQPLPPQPPLPPMFPMQPLPPMLPDLTLEAWPSTDKTKREEVD

SEQ ID NO: 4361 - protein, 191 aa, Homo sapiens
  Payload ID: 975;
  Gene Symbol: AMELX;
  Gene Name: amelogenin, X-linked;
  Uniprot ID:  Q99217;
  ENSP ID: ENSP00000370090
MGTWILFACLLGAAFAMPLPPHPGHPGYINFSYEVLTPLKWYQSIRPPYPSYGYEPMGGWLHHQIIPVLSQQHPPTHTLQPHHHIPVVPAQQPVIPQQPMMPVPGQHSMTPIQHHQPNLPPPAQQPYQPQPVQPQPHQPMQPQPPVHPMQPLPPQPPLPPMFPMQPLPPMLPDLTLEAWPSTDKTKREEVD

SEQ ID NO: 4362 - protein, 192 aa, Homo sapiens
  Payload ID: 976;
  Gene Symbol: AMELY;
  Gene Name: amelogenin, Y-linked;
  Uniprot ID:  Q99218;
  ENSP ID: ENSP00000215479
MGTWILFACLVGAAFAMPLPPHPGHPGYINFSYEVLTPLKWYQSMIRPPYSSYGYEPMGGWLHHQIIPVVSQQHPLTHTLQSHHHIPVVPAQQPRVRQQALMPVPGQQSMTPTQHHQPNLPLPAQQPFQPQPVQPQPHQPMQPQPPVQPMQPLLPQPPLPPMFPLRPLPPILPDLHLEAWPATDKTKQEEVD

SEQ ID NO: 4363 - protein, 206 aa, Homo sapiens
  Payload ID: 976;
  Gene Symbol: AMELY;
  Gene Name: amelogenin, Y-linked;
  Uniprot ID:  Q99218;
  ENSP ID: ENSP00000372505
MGTWILFACLVGAAFAMPLPPHPGHPGYINFSYENSHSQAINVDRIALVLTPLKWYQSMIRPPYSSYGYEPMGGWLHHQIIPVVSQQHPLTHTLQSHHHIPVVPAQQPRVRQQALMPVPGQQSMTPTQHHQPNLPLPAQQPFQPQPVQPQPHQPMQPQPPVQPMQPLLPQPPLPPMFPLRPLPPILPDLHLEAWPATDKTKQEEVD

SEQ ID NO: 4364 - protein, 209 aa, Homo sapiens
  Payload ID: 977;
  Gene Symbol: AMTN;
  Gene Name: amelotin;
  Uniprot ID:  Q6UX39;
  ENSP ID: ENSP00000341013
MRSTILLFCLLGSTRSLPQLKPALGLPPTKLAPDQGTLPNQQQSNQVFPSLSLIPLTQMLTLGPDLHLLNPAAGMTPGTQTHPLTLGGLNVQQQLHPHVLPIFVTQLGAQGTILSSEELPQIFTSLIIHSLFPGGILPTSQAGANPDVQDGSLPAGGAGVNPATQGTPAGRLPTPSGTDDDFAVTTPAGIQRSTHAIEEATTESANGIQ

SEQ ID NO: 4365 - protein, 208 aa, Homo sapiens
  Payload ID: 977;
  Gene Symbol: AMTN;
  Gene Name: amelotin;
  Uniprot ID:  Q6UX39;
  ENSP ID: ENSP00000422452
MRSTILLFCLLGSTRSLPLKPALGLPPTKLAPDQGTLPNQQQSNQVFPSLSLIPLTQMLTLGPDLHLLNPAAGMTPGTQTHPLTLGGLNVQQQLHPHVLPIFVTQLGAQGTILSSEELPQIFTSLIIHSLFPGGILPTSQAGANPDVQDGSLPAGGAGVNPATQGTPAGRLPTPSGTDDDFAVTTPAGIQRSTHAIEEATTESANGIQ

SEQ ID NO: 4366 - protein, 426 aa, Homo sapiens
  Payload ID: 978;
  Gene Symbol: AMDHD1;
  Gene Name: amidohydrolase domain containing 1;
  Uniprot ID:  Q96NU7;
  ENSP ID: ENSP00000266736
MASGHSLLLENAQQVVLVCARGERFLARDALRSLAVLEGASLVVGKDGFIKAIGPADVIQRQFSGETFEEIIDCSGKCILPGLVDAHTHPVWAGERVHEFAMKLAGATYMEIHQAGGGIHFTVERTRQATEEELFRSLQQRLQCMMRAGTTLVECKSGYGLDLETELKMLRVIERARRELDIGISATYCGAHSVPKGKTATEAADDIINNHLPKLKELGRNGEIHVDNIDVFCEKGVFDLDSTRRILQRGKDIGLQINFHGDELHPMKAAELGAELGAQAISHLEEVSDEGIVAMATARCSAILLPTTAYMLRLKQPRARKMLDEGVIVALGSDFNPNAYCFSMPMVMHLACVNMRMSMPEALAAATINAAYALGKSHTHGSLEVGKQGDLIIINSSRWEHLIYQFGGHHELIEYVIAKGKLIYKT

SEQ ID NO: 4367 - protein, 111 aa, Homo sapiens
  Payload ID: 978;
  Gene Symbol: AMDHD1;
  Gene Name: amidohydrolase domain containing 1;
  ENSP ID: ENSP00000448632
  MOD_RES (1)..(1): Any amino acid
XLVVGKDGFIKAIGPADVIQRQFSGETFEEIIDCSGKCILPVGRSHLHGNSPGRRRDPLYRGAHAPSHRGGAVPLLAATAPVHDEGWHHAGGVQEWIWPRPGDRAQDAARD

SEQ ID NO: 4368 - protein, 6 aa, Homo sapiens
  Payload ID: 978;
  Gene Symbol: AMDHD1;
  Gene Name: amidohydrolase domain containing 1;
  ENSP ID: ENSP00000448918
MKLAGA

SEQ ID NO: 4369 - protein, 409 aa, Homo sapiens
  Payload ID: 979;
  Gene Symbol: AMDHD2;
  Gene Name: amidohydrolase domain containing 2;
  Uniprot ID:  Q9Y303;
  ENSP ID: ENSP00000293971
MRGEQGAAGARVLQFTNCRILRGGKLLREDLWVRGGRILDPEKLFFEERRVADERRDCGGRILAPGFIDVQINGGFGVDFSQATEDVGSGVALVARRILSHGVTSFCPTLVTSPPEVYHKVVPQIPVKSGGPHGAGVLGLHLEGPFISREKRGAHPEAHLRSFEADAFQDLLATYGPLDNVRIVTLAPELGRSHEVIRALTARGICVSLGHSVADLRAAEDAVWSGATFITHLFNAMLPFHHRDPGIVGLLTSDRLPAGRCIFYGMIADGTHTNPAALRIAHRAHPQGLVLVTDAIPALGLGNGRHTLGQQEVEVDGLTAYVAGTKTLSGSIAPMDVCVRHFLQATGCSMESALEAASLHPAQLLGLEKSKGTLDFGADADFVVLDDSLHVQATYISGELVWQADAARQ

SEQ ID NO: 4370 - protein, 439 aa, Homo sapiens
  Payload ID: 979;
  Gene Symbol: AMDHD2;
  Gene Name: amidohydrolase domain containing 2;
  Uniprot ID:  Q9Y303;
  ENSP ID: ENSP00000307481
MRGEQGAAGARVLQFTNCRILRGGKLLREDLWVRGGRILDPEKLFFEERRVADERRDCGGRILAPGFIDVQINGGFGVDFSQATEDVGSGVALVARRILSHGVTSFCPTLVTSPPEVYHKVVPQIPVKSGGPHGAGVLGLHLEGPFISREKRGAHPEAHLRSFEADAFQDLLATYGPLDNVRIVTLAPELGRSHEVIRALTARGICVSLGHSVADLRAAEDAVWSGATFITHLFNAMLPFHHRDPGIVGLLTSDRLPAGRCIFYGMIADGTHTNPAALRIAHRAHPQGLVLVTDAIPALGLGNGRHTLGQQEVEVDGLTAYVAGERPDPLGPRSQPACQVAHDPPRACPLCSQGTKTLSGSIAPMDVCVRHFLQATGCSMESALEAASLHPAQLLGLEKSKGTLDFGADADFVVLDDSLHVQATYISGELVWQADAARQ

SEQ ID NO: 4371 - protein, 594 aa, Homo sapiens
  Payload ID: 979;
  Gene Symbol: AMDHD2;
  Gene Name: amidohydrolase domain containing 2;
  Uniprot ID:  Q9Y303;
  ENSP ID: ENSP00000391596
MRGEQGAAGARVLQFTNCRILRGGKLLREDLWVRGGRILDPEKLFFEERRVADERRDCGGRILAPGFIDVQINGGFGVDFSQATEDVGSGVALVARRILSHGVTSFCPTLVTSPPEVYHKVVPQIPVKSGGPHGAGVLGLHLEGPFISREKRGAHPEAHLRSFEADAFQDLLATYGPLDNVRIVTLAPELGRSHEVIRALTARGICVSLGHSVADLRAAEDAVWSGATFITHLFNAMLPFHHRDPGIVGLLTSDRLPAGRCIFYGMIADGTHTNPAALRIAHRAHPQGLVLVTDAIPALGLGNGRHTLGQQEVEVDGLTAYVAGERPDPLGPRSQPACQVAHDPPRACPLCSQGTKTLSGSIAPMDVCVRHFLQATGCSMESALEAASLHPAQLLGLEKSKGTLDFGADADFVVLDDSLHVQATYISGPVLAGCGDPAWCWRAVWEAPVCPAHPISVILPSSVSPWPWHTPMWQTRAVRLPEQLRGGWASGALLALRTATVGSDVRDWCSPTSGVIVLTFSPFEFWGGWLPSPLLTGAVLGTGGTRLALPLFSSLCCKAQLRKCLQVQRDRMVWAPPVGREQPGKNHLPGQGLA

SEQ ID NO: 4372 - protein, 155 aa, Homo sapiens
  Payload ID: 979;
  Gene Symbol: AMDHD2;
  Gene Name: amidohydrolase domain containing 2;
  ENSP ID: ENSP00000456656
MRGEQGAAGARVLQFTNCRILRGGKLLREDLWVRGGRILDPEKLFFEERRVADERRDCGGRILAPGFIDVQINGGFGVDFSQATEDVGSGVALVARRILSHGVTSFCPTLVTSPPEVYHKIPVKSGGPHGAGVLGLHLEGPFISREKRGAHPEAH

SEQ ID NO: 4373 - protein, 300 aa, Homo sapiens
  Payload ID: 979;
  Gene Symbol: AMDHD2;
  Gene Name: amidohydrolase domain containing 2;
  ENSP ID: ENSP00000456898
MRGEQGAAGARVLQFTNCRILRGGKLLREDLWVRGGRILDPEKLFFEERRVADERRDCGGRILAPGFIDVQINGGFGVDFSQATEDVGSGVALVARRILSHGVTSFCPTLVTSPPEVYHKVVPQIPVKSGGPHGAGVLGHSVADLRAAEDAVWSGATFITHLFNAMLPFHHRDPGIVGLLTSDRLPAGRCIFYGMIADGTHTNPAALRIAHRAHPQGLVLVTDAIPALGLGNGRHTLGQQEVEVDGLTAYVAGCSMESALEAASLHPAQLLGLEKSKGTLDFGADADFVVLDDSLHVQAT

SEQ ID NO: 4374 - protein, 165 aa, Homo sapiens
  Payload ID: 979;
  Gene Symbol: AMDHD2;
  Gene Name: amidohydrolase domain containing 2;
  ENSP ID: ENSP00000457021
MRGEQGAAGARVLQFTNCRILRGGKLLREDLWVRGGRILDPEKLFFEERRVADERRDCGGRILAPGFIDVQINGGFGVDFSQATEDVGSGVALVARRILSHGVTSFCPTLVTSPPEVYHKGCTWRAPSSAGRSGARTPRPTSAPSRPMPSRTCWPPTGPWTMSAS

SEQ ID NO: 4375 - protein, 269 aa, Homo sapiens
  Payload ID: 979;
  Gene Symbol: AMDHD2;
  Gene Name: amidohydrolase domain containing 2;
  ENSP ID: ENSP00000457136
MLPFHHRDPGIVGLLTSDRLPAGRCIFYGMIADGTHTNPAALRIAHRAHPQGLVLVTDAIPALGLGNGRHTLGQQEVEVDGLTAYVAGERPDPLGPRSQPACQVAHDPPRACPLCSQGTKTLSGSIAPMDVCVRHFLQATGCSMESALEAASLHPAQLLGLEKSKGTLDFGADADFVVLDDSLHVQATYISGPVLAGCGDPAWCWRAVWEAPVCPAHPISVILPSSVSPWPWHTPMWQTRAVRLPEQLRGGWASGALLALRTATVGSDV

SEQ ID NO: 4376 - protein, 296 aa, Homo sapiens
  Payload ID: 979;
  Gene Symbol: AMDHD2;
  Gene Name: amidohydrolase domain containing 2;
  ENSP ID: ENSP00000457398
MRGEQGAAGARVLQFTNCRILRGGKLLREDLWVRGGRILDPEKLFFEERRVADERRDCGGRILAPGFIDVQINGGFGVDFSQATEDVGSGVALVARRILSHGVTSFCPTLVTSPPEVYHKVVPQIPVKSGGPHGAGVLGHSVADLRAAEDAVWSGATFITHLFNAMLPFHHRDPGIVGLLTSDRLPAGRCIFYGMIADGTHTNPAALRIAHRAHPQGLVLVTDAIPALGLGNGRHTLGQQEVEVDGLTAYVAGERPDPLGPRSQPACQVAHDPPRACPLCSQGTKTLSGSIAPMDV

SEQ ID NO: 4377 - protein, 751 aa, Homo sapiens
  Payload ID: 980;
  Gene Symbol: AOC1;
  Gene Name: amine oxidase, copper containing 1;
  Uniprot ID:  P19801;
  ENSP ID: ENSP00000354193
MPALGWAVAAILMLQTAMAEPSPGTLPRKAGVFSDLSNQELKAVHSFLWSKKELRLQPSSTTTMAKNTVFLIEMLLPKKYHVLRFLDKGERHPVREARAVIFFGDQEHPNVTEFAVGPLPGPCYMRALSPRPGYQSSWASRPISTAEYALLYHTLQEATKPLHQFFLNTTGFSFQDCHDRCLAFTDVAPRGVASGQRRSWLIIQRYVEGYFLHPTGLELLVDHGSTDAGHWAVEQVWYNGKFYGSPEELARKYADGEVDVVVLEDPLPGGKGHDSTEEPPLFSSHKPRGDFPSPIHVSGPRLVQPHGPRFRLEGNAVLYGGWSFAFRLRSSSGLQVLNVHFGGERIAYEVSVQEAVALYGGHTPAGMQTKYLDVGWGLGSVTHELAPGIDCPETATFLDTFHYYDADDPVHYPRALCLFEMPTGVPLRRHFNSNFKGGFNFYAGLKGQVLVLRTTSTVYNYDYIWDFIFYPNGVMEAKMHATGYVHATFYTPEGLRHGTRLHTHLIGNIHTHLVHYRVDLDVAGTKNSFQTLQMKLENITNPWSPRHRVVQPTLEQTQYSWERQAAFRFKRKLPKYLLFTSPQENPWGHKRTYRLQIHSMADQVLPPGWQEEQAITWARYPLAVTKYRESELCSSSIYHQNDPWHPPVVFEQFLHNNENIENEDLVAWVTVGFLHIPHSEDIPNTATPGNSVGFLLRPFNFFPEDPSLASRDTVIVWPRDNGPNYVQRWIPEDRDCSMPPPFSYNGTYRPV

SEQ ID NO: 4378 - protein, 770 aa, Homo sapiens
  Payload ID: 980;
  Gene Symbol: AOC1;
  Gene Name: amine oxidase, copper containing 1;
  Uniprot ID:  P19801;
  ENSP ID: ENSP00000411613
MPALGWAVAAILMLQTAMAEPSPGTLPRKAGVFSDLSNQELKAVHSFLWSKKELRLQPSSTTTMAKNTVFLIEMLLPKKYHVLRFLDKGERHPVREARAVIFFGDQEHPNVTEFAVGPLPGPCYMRALSPRPGYQSSWASRPISTAEYALLYHTLQEATKPLHQFFLNTTGFSFQDCHDRCLAFTDVAPRGVASGQRRSWLIIQRYVEGYFLHPTGLELLVDHGSTDAGHWAVEQVWYNGKFYGSPEELARKYADGEVDVVVLEDPLPGGKGHDSTEEPPLFSSHKPRGDFPSPIHVSGPRLVQPHGPRFRLEGNAVLYGGWSFAFRLRSSSGLQVLNVHFGGERIAYEVSVQEAVALYGGHTPAGMQTKYLDVGWGLGSVTHELAPGIDCPETATFLDTFHYYDADDPVHYPRALCLFEMPTGVPLRRHFNSNFKGGFNFYAGLKGQVLVLRTTSTVYNYDYIWDFIFYPNGVMEAKMHATGYVHATFYTPEGLRHGTRLHTHLIGNIHTHLVHYRVDLDVAGTKNSFQTLQMKLENITNPWSPRHRVVQPTLEQTQYSWERQAAFRFKRKLPKYLLFTSPQENPWGHKRTYRLQIHSMADQVLPPGWQEEQAITWARTEGGQPRALSQAASPVPGRYPLAVTKYRESELCSSSIYHQNDPWHPPVVFEQFLHNNENIENEDLVAWVTVGFLHIPHSEDIPNTATPGNSVGFLLRPFNFFPEDPSLASRDTVIVWPRDNGPNYVQRWIPEDRDCSMPPPFSYNGTYRPV

SEQ ID NO: 4379 - protein, 337 aa, Homo sapiens
  Payload ID: 980;
  Gene Symbol: AOC1;
  Gene Name: amine oxidase, copper containing 1;
  ENSP ID: ENSP00000417392
MPALGWAVAAILMLQTAMAEPSPGTLPRKAGVFSDLSNQELKAVHSFLWSKKELRLQPSSTTTMAKNTVFLIEMLLPKKYHVLRFLDKGERHPVREARAVIFFGDQEHPNVTEFAVGPLPGPCYMRALSPRPGYQSSWASRPISTAEYALLYHTLQEATKPLHQFFLNTTGFSFQDCHDRCLAFTDVAPRGVASGQRRSWLIIQRYVEGYFLHPTGLELLVDHGSTDAGHWAVEQVWYNGKFYGSPEELARKYADGEVDVVVLEDPLPGGKGHDSTEEPPLFSSHKPRGDFPSPIHVSGPRLVQPHGPRFRLEGNAVLYGGWSFAFRLRSSSGLQVL

SEQ ID NO: 4380 - protein, 751 aa, Homo sapiens; identical to SEQ ID NO: 4377
  Payload ID: 980;
  Gene Symbol: AOC1;
  Gene Name: amine oxidase, copper containing 1;
  Uniprot ID:  P19801;
  ENSP ID: ENSP00000418328

SEQ ID NO: 4381 - protein, 249 aa, Homo sapiens
  Payload ID: 980;
  Gene Symbol: AOC1;
  Gene Name: amine oxidase, copper containing 1;
  ENSP ID: ENSP00000418557
MPALGWAVAAILMLQTAMAEPSPGTLPRKAGVFSDLSNQELKAVHSFLWSKKELRLQPSSTTTMAKNTVFLIEMLLPKKYHVLRFLDKGERHPVREARAVIFFGDQEHPNVTEFAVGPLPGPCYMRALSPRPGYQSSWASRPISTAEYALLYHTLQEATKPLHQFFLNTTGFSFQDCHDRCLAFTDVAPRGVASGQRRSWLIIQRYVEGYFLHPTGLELLVDHGSTDAGHWAVEQVWYNGKFYGSPEEL

SEQ ID NO: 4382 - protein, 751 aa, Homo sapiens; identical to SEQ ID NO: 4377
  Payload ID: 980;
  Gene Symbol: AOC1;
  Gene Name: amine oxidase, copper containing 1;
  Uniprot ID:  P19801;
  ENSP ID: ENSP00000418614

SEQ ID NO: 4383 - protein, 194 aa, Homo sapiens
  Payload ID: 980;
  Gene Symbol: AOC1;
  Gene Name: amine oxidase, copper containing 1;
  ENSP ID: ENSP00000481520
MEAKMHATGYVHATFYTPEGLRHGTRLHTHLIGNIHTHLVHYRVDLDVAGTKNSFQTLQMKLENITNPWSPRHRVVQPTLEQTQYSWERQAAFRFKRKLPKYLLFTSPQENPWGHKRTYRLQIHSMADQVLPPGWQEEQAITWARYPLAVTKYRESELCSSSIYHQNDPWHPPWSLSSFFTTTRTLKMRTWWPG

SEQ ID NO: 4384 - protein, 710 aa, Homo sapiens
  Payload ID: 980;
  Gene Symbol: AOC1;
  Gene Name: amine oxidase, copper containing 1;
  ENSP ID: ENSP00000481717
MPALGWAVAAILMLQTAMAEPSPGTLPRKAGVFSDLSNQELKAVHSFLWSKKELRLQPSSTTTMAKNTVFLIEMLLPKKYHVLRFLDKGERHPVREARAVIFFGDQEHPNVTEFAVGPLPGPCYMRALSPRPGYQSSWASRPISTAEYALLYHTLQEATKPLHQFFLNTTGFSFQDCHDRCLAFTDVAPRGVASGQRRSWLIIQRYVEGYFLHPTGLELLVDHGSTDAGHWAVEQVWYNGKFYGSPEELARKYADGEVDVVVLEDRCLGARGMTAQRSRPSSPPQAPRGLPQPHPCERPPLGPAPRPSLQAGGQRCALRRLELCLPLRSSSGLQVLNVHFGGERIAYEVSVQEAVALYGGHTPAGMQTKYLDVGWGLGSVTHELAPGIDCPETATFLDTFHYYDADDPVHYPRALCLFEMPTGVPLRRHFNSNFKGGFNFYAGLKGQVLVLRTTSTVYNYDYIWDFIFYPNGVMEAKMHATGYVHATFYTPEGCARHSPAHPPDWQHTHSLVHYRVDLDVAGTKNSFQTLQMKLENITNPWSPRHRVVQPTLEQTQYSWERQAAFRFKRKLPKYLLFTSPQENPWGHKRTYRLQIHSMADQVLPPGWQEEQAITWARYPLAVTKYRESELCSSSIYHQNDPWHPPVVFEQFLHNNENIENEDLVAWVTVGFLHIPHSEDIPNTATPGNSVGFLLRPFNFFPEDPWHPETL

SEQ ID NO: 4385 - protein, 756 aa, Homo sapiens
  Payload ID: 981;
  Gene Symbol: AOC2;
  Gene Name: amine oxidase, copper containing 2 (retina-specific);
  Uniprot ID:  O75106;
  ENSP ID: ENSP00000253799
MHLKIVLAFLALSLITIFALAYVLLTSPGGSSQPPHCPSVSHRAQPWPHPGQSQLFADLSREELTAVMRFLTQRLGPGLVDAAQAQPSDNCIFSVELQLPPKAAALAHLDRGSPPPAREALAIVLFGGQPQPNVSELVVGPLPHPSYMRDVTVERHGGPLPYHRRPVLRAEFTQMWRHLKEVELPKAPIFLSSTFNYNGSTLAAVHATPRGLRSGDRATWMALYHNISGVGLFLHPVGLELLLDHRALDPAHWTVQQVFYLGHYYADLGQLEREFKSGRLEVVRVPLPPPNGASSLRSRNSPGPLPPLQFSPQGSQYSVQGNLVVSSLWSFTFGHGVFSGLRIFDVRFQGERIAYEVSVQECVSIYGADSPKTMLTRYLDSSFGLGRNSRGLVRGVDCPYQATMVDIHILVGKGAVQLLPGAVCVFEEAQGLPLRRHHNYLQNHFYGGLASSALVVRSVSSVGNYDYIWDFVLYPNGALEGRVHATGYINTAFLKGGEEGLLFGNRVGERVLGTVHTHAFHFKLDLDVAGLKNWVVAEDVVFKPVAAPWNPEHWLQRPQLTRQVLGKEDLTAFSLGSPLPRYLYLASNQTNAWGHQRGYRIQIHSPLGIHIPLESDMERALSWGRYQLVVTQRKEEESQSSSIYHQNDIWTPTVTFADFINNETLLGEDLVAWVTASFLHIPHAEDIPNTVTLGNRVGFLLRPYNFFDEDPSIFSPGSVYFEKGQDAGLCSINPVACLPDLAACVPDLPPFSYHGF

SEQ ID NO: 4386 - protein, 729 aa, Homo sapiens
  Payload ID: 981;
  Gene Symbol: AOC2;
  Gene Name: amine oxidase, copper containing 2 (retina-specific);
  Uniprot ID:  O75106;
  ENSP ID: ENSP00000406134
MHLKIVLAFLALSLITIFALAYVLLTSPGGSSQPPHCPSVSHRAQPWPHPGQSQLFADLSREELTAVMRFLTQRLGPGLVDAAQAQPSDNCIFSVELQLPPKAAALAHLDRGSPPPAREALAIVLFGGQPQPNVSELVVGPLPHPSYMRDVTVERHGGPLPYHRRPVLRAEFTQMWRHLKEVELPKAPIFLSSTFNYNGSTLAAVHATPRGLRSGDRATWMALYHNISGVGLFLHPVGLELLLDHRALDPAHWTVQQVFYLGHYYADLGQLEREFKSGRLEVVRVPLPPPNGASSLRSRNSPGPLPPLQFSPQGSQYSVQGNLVVSSLWSFTFGHGVFSGLRIFDVRFQGERIAYEVSVQECVSIYGADSPKTMLTRYLDSSFGLGRNSRGLVRGVDCPYQATMVDIHILVGKGAVQLLPGAVCVFEEAQGLPLRRHHNYLQNHFYGGLASSALVVRSVSSVGNYDYIWDFVLYPNGALEGRVHATGYINTAFLKGGEEGLLFGNRVGERVLGTVHTHAFHFKLDLDVAGLKNWVVAEDVVFKPVAAPWNPEHWLQRPQLTRQVLGKEDLTAFSLGSPLPRYLYLASNQTNAWGHQRGYQLVVTQRKEEESQSSSIYHQNDIWTPTVTFADFINNETLLGEDLVAWVTASFLHIPHAEDIPNTVTLGNRVGFLLRPYNFFDEDPSIFSPGSVYFEKGQDAGLCSINPVACLPDLAACVPDLPPFSYHGF

SEQ ID NO: 4387 - protein, 763 aa, Homo sapiens
  Payload ID: 982;
  Gene Symbol: AOC3;
  Gene Name: amine oxidase, copper containing 3;
  Uniprot ID:  Q16853;
  ENSP ID: ENSP00000312326
MNQKTILVLLILAVITIFALVCVLLVGRGGDGGEPSQLPHCPSVSPSAQPWTHPGQSQLFADLSREELTAVMRFLTQRLGPGLVDAAQARPSDNCVFSVELQLPPKAAALAHLDRGSPPPAREALAIVFFGRQPQPNVSELVVGPLPHPSYMRDVTVERHGGPLPYHRRPVLFQEYLDIDQMIFNRELPQASGLLHHCCFYKHRGRNLVTMTTAPRGLQSGDRATWFGLYYNISGAGFFLHHVGLELLVNHKALDPARWTIQKVFYQGRYYDSLAQLEAQFEAGLVNVVLIPDNGTGGSWSLKSPVPPGPAPPLQFYPQGPRFSVQGSRVASSLWTFSFGLGAFSGPRIFDVRFQGERLVYEISLQEALAIYGGNSPAAMTTRYVDGGFGMGKYTTPLTRGVDCPYLATYVDWHFLLESQAPKTIRDAFCVFEQNQGLPLRRHHSDLYSHYFGGLAETVLVVRSMSTLLNYDYVWDTVFHPSGAIEIRFYATGYISSAFLFGATGKYGNQVSEHTLGTVHTHSAHFKVDLDVAGLENWVWAEDMVFVPMAVPWSPEHQLQRLQVTRKLLEMEEQAAFLVGSATPRYLYLASNHSNKWGHPRGYRIQMLSFAGEPLPQNSSMARGFSWERYQLAVTQRKEEEPSSSSVFNQNDPWAPTVDFSDFINNETIAGKDLVAWVTAGFLHIPHAEDIPNTVTVGNGVGFFLRPYNFFDEDPSFYSADSIYFRGDQDAGACEVNPLACLPQAAACAPDLPAFSHGGFSHN

SEQ ID NO: 4388 - protein, 144 aa, Homo sapiens
  Payload ID: 982;
  Gene Symbol: AOC3;
  Gene Name: amine oxidase, copper containing 3;
  ENSP ID: ENSP00000464787
  MOD_RES (1)..(1): Any amino acid
XYDYVWDTVFHPSGAIEIRFYATGYISSAFLFGATGKYGNQVSEHTLGTVHTHSAHFKVDLDVAGDPEAAGDGGAGRLPRGKRHPSLPVPGQQPQQQVGSPPGLPHPDAQLCWRAAAPKQLHGERLQLGEVPAGCDPAEGGGAQ

SEQ ID NO: 4389 - protein, 152 aa, Homo sapiens
  Payload ID: 982;
  Gene Symbol: AOC3;
  Gene Name: amine oxidase, copper containing 3;
  ENSP ID: ENSP00000465913
MVFVPMAVPWSPEHQLQRLQVTRKLLEMEEQAAFLVGSATPRYLYLASNHSNKWGHPRGYRIQMLSFAGEPLPQNSSMARGFSWERYQLAVTQRKEEEPSSSSVFNQNDPWAPTVDFSDFINNETIAGKDLVAWVTAGFLHIPHAEDIPNTV

SEQ ID NO: 4390 - protein, 112 aa, Homo sapiens
  Payload ID: 982;
  Gene Symbol: AOC3;
  Gene Name: amine oxidase, copper containing 3;
  ENSP ID: ENSP00000468043
MVFVPMAVPWSPEHQLQRLQVTRKLLEMEEQAAFLVGSATPRYLYLASNHSNKWGHPRGYRIQMLSFAGEPLPQNSSMARGFSWERYQLAVTQRKEEEPSSSSVFNQNDPWA

SEQ ID NO: 4391 - protein, 220 aa, Homo sapiens
  Payload ID: 982;
  Gene Symbol: AOC3;
  Gene Name: amine oxidase, copper containing 3;
  Uniprot ID:  Q16853;
  ENSP ID: ENSP00000468632
MVFVPMAVPWSPEHQLQRLQVTRKLLEMEEQAAFLVGSATPRYLYLASNHSNKWGHPRGYRIQMLSFAGEPLPQNSSMARGFSWERYQLAVTQRKEEEPSSSSVFNQNDPWAPTVDFSDFINNETIAGKDLVAWVTAGFLHIPHAEDIPNTVTVGNGVGFFLRPYNFFDEDPSFYSADSIYFRGDQDAGACEVNPLACLPQAAACAPDLPAFSHGGFSHN

SEQ ID NO: 4392 - protein, 220 aa, Homo sapiens; identical to SEQ ID NO: 4391
  Payload ID: 982;
  Gene Symbol: AOC3;
  Gene Name: amine oxidase, copper containing 3;
  Uniprot ID:  Q16853;
  ENSP ID: ENSP00000477686

SEQ ID NO: 4393 - protein, 634 aa, Homo sapiens
  Payload ID: 982;
  Gene Symbol: AOC3;
  Gene Name: amine oxidase, copper containing 3;
  Uniprot ID:  Q16853;
  ENSP ID: ENSP00000484312
MNQKTILVLLILAVITIFALVCVLLVGRGGDGGEPSQLPHCPSVSPSAQPWTHPGQSQLFADLSREELTAVMRFLTQRLGPGLVDAAQARPSDNCVFSVELQLPPKAAALAHLDRGSPPPAREALAIVFFGRQPQPNVSELVVGPLPHPSYMRDVTVERHGGPLPYHRRPVLFQEYLDIDQMIFNRELPQASGLLHHCCFYKHRGRNLVTMTTAPRGLQSGDRATWFGLYYNISGAGFFLHHVGLELLVNHKALDPARWTIQKVFYQGRYYDSLAQLEAQFEAGLVNVVLIPDNGTGGSWSLKSPVPPGPAPPLQFYPQGPRFSVQGSRVASSLWTFSFGLGAFSGPRIFDVRFQGERLVYEISLQEALAIYGGNSPAAMTTRYVDGGFGMGKYTTPLTRGVDCPYLATYVDWHFLLESQAPKTIRDAFCVFEQNQGLPLRRHHSDLYSHYFGGLAETVLVVRSMSTLLNYDYVWDTVFHPSGAIEIRFYATGYISSAFLFGATGKYGNQVSEHTLGTVHTHSAHFKVDLDVAGLENWVWAEDMVFVPMAVPWSPEHQLQRLQVTRKLLEMEEQAAFLVGSATPRYLYLASNHSNKWGHPRGYRIQMLSFAGEPLPQNSSMARGFSWERIWWPG

SEQ ID NO: 4394 - protein, 312 aa, Homo sapiens
  Payload ID: 983;
  Gene Symbol: AIMP1;
  Gene Name: aminoacyl tRNA synthetase complex-interacting multifunctional prt 1;
  Uniprot ID:  Q12904;
  ENSP ID: ENSP00000350699
MANNDAVLKRLEQKGAEADQIIEYLKQQVSLLKEKAILQATLREEKKLRVENAKLKKEIEELKQELIQAEIQNGVKQIPFPSGTPLHANSMVSENVIQSTAVTTVSSGTKEQIKGGTGDEKKAKEKIEKKGEKKEKKQQSIAGSADSKPIDVSRLDLRIGCIITARKHPDADSLYVEEVDVGEIAPRTVVSGLVNHVPLEQMQNRMVILLCNLKPAKMRGVLSQAMVMCASSPEKIEILAPPNGSVPGDRITFDAFPGEPDKELNPKKKIWEQIQPDLHTNDECVATYKGVPFEVKGKGVCRAQTMSNSGIK

SEQ ID NO: 4395 - protein, 336 aa, Homo sapiens
  Payload ID: 983;
  Gene Symbol: AIMP1;
  Gene Name: aminoacyl tRNA synthetase complex-interacting multifunctional prt 1;
  Uniprot ID:  Q12904;
  ENSP ID: ENSP00000378191
MLPAVAVSEPVVLRFMIFCRLLAKMANNDAVLKRLEQKGAEADQIIEYLKQQVSLLKEKAILQATLREEKKLRVENAKLKKEIEELKQELIQAEIQNGVKQIPFPSGTPLHANSMVSENVIQSTAVTTVSSGTKEQIKGGTGDEKKAKEKIEKKGEKKEKKQQSIAGSADSKPIDVSRLDLRIGCIITARKHPDADSLYVEEVDVGEIAPRTVVSGLVNHVPLEQMQNRMVILLCNLKPAKMRGVLSQAMVMCASSPEKIEILAPPNGSVPGDRITFDAFPGEPDKELNPKKKIWEQIQPDLHTNDECVATYKGVPFEVKGKGVCRAQTMSNSGIK

SEQ ID NO: 4396 - protein, 312 aa, Homo sapiens; identical to SEQ ID NO: 4394
  Payload ID: 983;
  Gene Symbol: AIMP1;
  Gene Name: aminoacyl tRNA synthetase complex-interacting multifunctional prt 1;
  Uniprot ID:  Q12904;
  ENSP ID: ENSP00000405248

SEQ ID NO: 4397 - protein, 150 aa, Homo sapiens
  Payload ID: 983;
  Gene Symbol: AIMP1;
  Gene Name: aminoacyl tRNA synthetase complex-interacting multifunctional prt 1;
  ENSP ID: ENSP00000423681
MANNDAVLKRLEQKGAEADQIIEYLKQQVSLLKEKAILQATLREEKKLRVENAKLKKEIEELKQELIQAEIQNGVKQIPFPSGTPLHANSMVSENVIQSTAVTTVSSGTKEQIKGGTGDEKKAKEKIEKKGEKKEKKQQSIAGSADSKPI

SEQ ID NO: 4398 - protein, 320 aa, Homo sapiens
  Payload ID: 984;
  Gene Symbol: AIMP2;
  Gene Name: aminoacyl tRNA synthetase complex-interacting multifunctional prt 2;
  Uniprot ID:  Q13155;
  ENSP ID: ENSP00000223029
MPMYQVKPYHGGGAPLRVELPTCMYRLPNVHGRSYGPAPGAGHVQEESNLSLQALESRQDDILKRLYELKAAVDGLSKMIQTPDADLDVTNIIQADEPTTLTTNALDLNSVLGKDYGALKDIVINANPASPPLSLLVLHRLLCEHFRVLSTVHTHSSVKSVPENLLKCFGEQNKKQPRQDYQLGFTLIWKNVPKTQMKFSIQTMCPIEGEGNIARFLFSLFGQKHNAVNATLIDSWVDIAIFQLKEGSSKEKAAVFRSMNSALGKSPWLAGNELTVADVVLWSVLQQIGGCSVTVPANVQRWMRSCENLAPFNTALKLLK

SEQ ID NO: 4399 - protein, 251 aa, Homo sapiens
  Payload ID: 984;
  Gene Symbol: AIMP2;
  Gene Name: aminoacyl tRNA synthetase complex-interacting multifunctional prt 2;
  ENSP ID: ENSP00000378658
MPMYQVKPYHGGGAPLRVELPTCMYRLPNVHGRSYGPAPGAGHVQDYGALKDIVINANPASPPLSLLVLHRLLCEHFRVLSTVHTHSSVKSVPENLLKCFGEQNKKQPRQDYQLGFTLIWKNVPKTQMKFSIQTMCPIEGEGNIARFLFSLFGQKHNAVNATLIDSWVDIAIFQLKEGSSKEKAAVFRSMNSALGKSPWLAGNELTVADVVLWSVLQQIGGCSVTVPANVQRWMRSCENLAPFNTALKLLK

SEQ ID NO: 4400 - protein, 242 aa, Homo sapiens
  Payload ID: 984;
  Gene Symbol: AIMP2;
  Gene Name: aminoacyl tRNA synthetase complex-interacting multifunctional prt 2;
  ENSP ID: ENSP00000383327
MIQTPDADLDVTNIIQADEPTTLTTNALDLNSVLGKDYGALKDIVINANPASPPLSLLVLHRLLCEHFRVLSTVHTHSSVKSVPENLLKCFGEQNKKQPRQDYQLGFTLIWKNVPKTQMKFSIQTMCPIEGEGNIARFLFSLFGQKHNAVNATLIDSWVDIAIFQLKEGSSKEKAAVFRSMNSALGKSPWLAGNELTVADVVLWSVLQQIGGCSVTVPANVQRWMRSCENLAPFNTALKLLK

SEQ ID NO: 4401 - protein, 48 aa, Homo sapiens
  Payload ID: 984;
  Gene Symbol: AIMP2;
  Gene Name: aminoacyl tRNA synthetase complex-interacting multifunctional prt 2;
  ENSP ID: ENSP00000392519
MPMYQVKPYHGGGAPLRVELPTCMYRLPNVHGRSYGPAPGAGHVQPLQ

SEQ ID NO: 4402 - protein, 408 aa, Homo sapiens
  Payload ID: 985;
  Gene Symbol: ACY1;
  Gene Name: aminoacylase 1;
  Uniprot ID:  Q03154;
  ENSP ID: ENSP00000384296
MTSKGPEEEHPSVTLFRQYLRIRTVQPKPDYGAAVAFFEETARQLGLGCQKVEVAPGYVVTVLTWPGTNPTLSSILLNSHTDVVPVFKEHWSHDPFEAFKDSEGYIYARGAQDMKCVSIQYLEAVRRLKVEGHRFPRTIHMTFVPDEEVGGHQGMELFVQRPEFHALRAGFALDEGIANPTDAFTVFYSERSPWWVRVTSTGRPGHASRFMEDTAAEKLHKVVNSILAFREKEWQRLQSNPHLKEGSVTSVNLTKLEGGVAYNVIPATMSASFDFRVAPDVDFKAFEEQLQSWCQAAGEGVTLEFAQKWMHPQVTPTDDSNPWWAAFSRVCKDMNLTLEPEIMPAATDNRYIRAVGVPALGFSPMNRTPVLLHDHDERLHEAVFLRGVDIYTRLLPALASVPALPSDS

SEQ ID NO: 4403 - protein, 373 aa, Homo sapiens
  Payload ID: 985;
  Gene Symbol: ACY1;
  Gene Name: aminoacylase 1;
  Uniprot ID:  Q03154;
  ENSP ID: ENSP00000417056
MTSKGPEEEHPSVTLFRQYLRIRTVQPKPDYGTNPTLSSILLNSHTDVVPVFKEHWSHDPFEAFKDSEGYIYARGAQDMKCVSIQYLEAVRRLKVEGHRFPRTIHMTFVPDEEVGGHQGMELFVQRPEFHALRAGFALDEGIANPTDAFTVFYSERSPWWVRVTSTGRPGHASRFMEDTAAEKLHKVVNSILAFREKEWQRLQSNPHLKEGSVTSVNLTKLEGGVAYNVIPATMSASFDFRVAPDVDFKAFEEQLQSWCQAAGEGVTLEFAQKWMHPQVTPTDDSNPWWAAFSRVCKDMNLTLEPEIMPAATDNRYIRAVGVPALGFSPMNRTPVLLHDHDERLHEAVFLRGVDIYTRLLPALASVPALPSDS

SEQ ID NO: 4404 - protein, 336 aa, Homo sapiens
  Payload ID: 985;
  Gene Symbol: ACY1;
  Gene Name: aminoacylase 1;
  Uniprot ID:  Q03154;
  ENSP ID: ENSP00000417618
MTSKGPEEEHPSVTLFRQYLRIRTVQPKPDYGAAVAFFEETARQLGLGCQKVEVAPGYVVTVLTWPGTNPTLSSILLNSHTDVVPVFKEHWSHDPFEAFKDSEGIANPTDAFTVFYSERSPWWVRVTSTGRPGHASRFMEDTAAEKLHKVVNSILAFREKEWQRLQSNPHLKEGSVTSVNLTKLEGGVAYNVIPATMSASFDFRVAPDVDFKAFEEQLQSWCQAAGEGVTLEFAQKWMHPQVTPTDDSNPWWAAFSRVCKDMNLTLEPEIMPAATDNRYIRAVGVPALGFSPMNRTPVLLHDHDERLHEAVFLRGVDIYTRLLPALASVPALPSDS

SEQ ID NO: 4405 - protein, 201 aa, Homo sapiens
  Payload ID: 985;
  Gene Symbol: ACY1;
  Gene Name: aminoacylase 1;
  ENSP ID: ENSP00000418683
MTSKGPEEEHPSVTLFRQYLRIRTVQPKPDYGAAVAFFEETARQLGLGCQKVEVAPGYVVTVLTWPGTNPTLSSILLNSHTDVVPVFKEHWSHDPFEAFKDSEGYIYARGAQDMKCVSIQYLEAVRRLKVEGHRFPRTIHMTFVPDEEVGGHQGMELFVQRPEFHALRAGFALDEGIANPTDAFTVFYSERSPWCCSQTPT

SEQ ID NO: 4406 - protein, 343 aa, Homo sapiens
  Payload ID: 985;
  Gene Symbol: ACY1;
  Gene Name: aminoacylase 1;
  Uniprot ID:  Q03154;
  ENSP ID: ENSP00000419262
MTSKGPEEEHPSVTLFRQYLRIRTVQPKPDYGAAVAFFEETARQLGLGCQKVEVAPGYVVTVLTWPGTNPTLSSILLNSHTDVVPVFKEHWSHDPFEAFKDSEGYIYARGAQDMKCVSIQYLEAVRRLKVEGHRFPRTIHMTFVPDEEVGGHQGMELFVQRPEFHALRAGFALDEGIANPTDAFTVFYSERSPWWVRVTSTGRPGHASRFMEDTAAEKLAFEEQLQSWCQAAGEGVTLEFAQKWMHPQVTPTDDSNPWWAAFSRVCKDMNLTLEPEIMPAATDNRYIRAVGVPALGFSPMNRTPVLLHDHDERLHEAVFLRGVDIYTRLLPALASVPALPSDS

SEQ ID NO: 4407 - protein, 228 aa, Homo sapiens
  Payload ID: 985;
  Gene Symbol: ACY1;
  Gene Name: aminoacylase 1;
  ENSP ID: ENSP00000419830
MTSKGPEEEHPSVTLFRQYLRIRTVQPKPDYGAAVAFFEETARQLGLGCQKVETTYPPDHLQVAPGYVVTVLTWPGTNPTLSSILLNSHTDVVPVFKEHWSHDPFEAFKDSEGYIYARGAQDMKCVSIQYLEAVRRLKVEGHRFPRTIHMTFVPDEEVGGHQGMELFVQRPEFHALRAGFALDEGIANPTDAFTVFYSERSPWWVRVTSTGRPGHASRFMEDTAAEKL

SEQ ID NO: 4408 - protein, 319 aa, Homo sapiens
  Payload ID: 986;
  Gene Symbol: ACY3;
  Gene Name: aminoacylase 3;
  Uniprot ID:  Q96HD9;
  ENSP ID: ENSP00000255082
MCSLPVPREPLRRVAVTGGTHGNEMSGVYLARHWLHAPAELQRASFSAVPVLANPAATSGCRRYVDHDLNRTFTSSFLNSRPTPDDPYEVTRARELNQLLGPKASGQAFDFVLDLHNTTANMGTCLIAKSSHEVFAMHLCRHLQLQYPELSCQVFLYQRSGEESYNLDSVAKNGLGLELGPQPQGVLRADIFSRMRTLVATVLDFIELFNQGTAFPAFEMEAYRPVGVVDFPRTEAGHLAGTVHPQLQDRDFQPLQPGAPIFQMFSGEDLLYEGESTVYPVFINEAAYYEKGVAFVQTEKFTFTVPAMPALTPAPSPAS

SEQ ID NO: 4409 - protein, 198 aa, Homo sapiens
  Payload ID: 986;
  Gene Symbol: ACY3;
  Gene Name: aminoacylase 3;
  ENSP ID: ENSP00000434270
MGTCLIAKSSHEVFAMHLCRHLQLQYPELSCQVFLYQRSGEESYNLDSVAKNGLGLELGPQPQGVLRADIFSRMRTLVATVLDFIELFNQGTAFPAFEMEAYRPVGVVDFPRTEAGHLAGTVHPQLQDRDFQPLQPGAPIFQMFSGEDLLYEGESTVYPVFINEAAYYEKGVAFVQTEKFTFTVPAMPALTPAPSPAS

SEQ ID NO: 4410 - protein, 425 aa, Homo sapiens
  Payload ID: 987;
  Gene Symbol: AADAT;
  Gene Name: aminoadipate aminotransferase;
  Uniprot ID:  Q8N5Z0;
  ENSP ID: ENSP00000226840
MNYARFITAASAARNPSPIRTMTDILSRGPKSMISLAGGLPNPNMFPFKTAVITVENGKTIQFGEEMMKRALQYSPSAGIPELLSWLKQLQIKLHNPPTIHYPPSQGQMDLCVTSGSQQGLCKVFEMIINPGDNVLLDEPAYSGTLQSLHPLGCNIINVASDESGIVPDSLRDILSRWKPEDAKNPQKNTPKFLYTVPNGNNPTGNSLTSERKKEIYELARKYDFLIIEDDPYYFLQFNKFRVPTFLSMDVDGRVIRADSFSKIISSGLRIGFLTGPKPLIERVILHIQVSTLHPSTFNQLMISQLLHEWGEEGFMAHVDRVIDFYSNQKDAILAAADKWLTGLAEWHVPAAGMFLWIKVKGINDVKELIEEKAVKMGVLMLPGNAFYVDSSAPSPYLRASFSSASPEQMDVAFQVLAQLIKESL

SEQ ID NO: 4411 - protein, 425 aa, Homo sapiens; identical to SEQ ID NO: 4410
  Payload ID: 987;
  Gene Symbol: AADAT;
  Gene Name: aminoadipate aminotransferase;
  Uniprot ID:  Q8N5Z0;
  ENSP ID: ENSP00000336808

SEQ ID NO: 4412 - protein, 209 aa, Homo sapiens
  Payload ID: 987;
  Gene Symbol: AADAT;
  Gene Name: aminoadipate aminotransferase;
  ENSP ID: ENSP00000421389
MNYARFITAASAARNPSPIRTMTDILSRGPKSMISLAGGLPNPNMFPFKTAVITVENGKTIQFGEEMMKRALQYSPSAGIPELLSWLKQLQIKLHNPPTIHYPPSQGQMDLCVTSGSQQGLCKVFEMIINPGDNVLLDEPAYSGTLQSLHPLGCNIINVASDESGIVPDSLRDILSRWKPEDAKNPQKNTPKFLYTVPNGNNPTGNSLT

SEQ ID NO: 4413 - protein, 429 aa, Homo sapiens
  Payload ID: 987;
  Gene Symbol: AADAT;
  Gene Name: aminoadipate aminotransferase;
  Uniprot ID:  Q8N5Z0;
  ENSP ID: ENSP00000423190
MNYARFITAASAARNPSPIRTMSEKRADILSRGPKSMISLAGGLPNPNMFPFKTAVITVENGKTIQFGEEMMKRALQYSPSAGIPELLSWLKQLQIKLHNPPTIHYPPSQGQMDLCVTSGSQQGLCKVFEMIINPGDNVLLDEPAYSGTLQSLHPLGCNIINVASDESGIVPDSLRDILSRWKPEDAKNPQKNTPKFLYTVPNGNNPTGNSLTSERKKEIYELARKYDFLIIEDDPYYFLQFNKFRVPTFLSMDVDGRVIRADSFSKIISSGLRIGFLTGPKPLIERVILHIQVSTLHPSTFNQLMISQLLHEWGEEGFMAHVDRVIDFYSNQKDAILAAADKWLTGLAEWHVPAAGMFLWIKVKGINDVKELIEEKAVKMGVLMLPGNAFYVDSSAPSPYLRASFSSASPEQMDVAFQVLAQLIKESL

SEQ ID NO: 4414 - protein, 425 aa, Homo sapiens; identical to SEQ ID NO: 4410
  Payload ID: 987;
  Gene Symbol: AADAT;
  Gene Name: aminoadipate aminotransferase;
  Uniprot ID:  Q8N5Z0;
  ENSP ID: ENSP00000423341

SEQ ID NO: 4415 - protein, 180 aa, Homo sapiens
  Payload ID: 987;
  Gene Symbol: AADAT;
  Gene Name: aminoadipate aminotransferase;
  ENSP ID: ENSP00000423843
MNYARFITAASAARNPSPIRTMTDILSRGPKSMISLAGGLPNPNMFPFKTAVITVENGKTIQFGEEMMKRALQYSPSAGIPELLSWLKQLQIKLHNPPTIHYPPSQGQMDLCVTSGSQQGLCKVFEMIINPGDNVLLDEPAYSGTLQSLHPLGCNIINVASDESGIVPDSLRDILSRWKP

SEQ ID NO: 4416 - protein, 220 aa, Homo sapiens
  Payload ID: 987;
  Gene Symbol: AADAT;
  Gene Name: aminoadipate aminotransferase;
  ENSP ID: ENSP00000425067
MHSVQMGVQWRGPADILSRGPKSMISLAGGLPNPNMFPFKTAVITVENGKTIQFGEEMMKRALQYSPSAGIPELLSWLKQLQIKLHNPPTIHYPPSQGQMDLCVTSGSQQGLCKVFEMIINPGDNVLLDEPAYSGTLQSLHPLGCNIINVASDESGIVPDSLRDILSRWKPEDAKNPQKNTPKFLYTVPNGNNPTGNSLTSERKKEIYELARKYDFLIIE

SEQ ID NO: 4417 - protein, 1098 aa, Homo sapiens
  Payload ID: 988;
  Gene Symbol: AASDH;
  Gene Name: aminoadipate-semialdehyde dehydrogenase;
  Uniprot ID:  Q4L235;
  ENSP ID: ENSP00000205214
MTLQELVHKAASCYMDRVAVCFDECNNQLPVYYTYKTVVNAASELSNFLLLHCDFQGIREIGLYCQPGIDLPSWILGILQVPAAYVPIEPDSPPSLSTHFMKKCNLKYILVEKKQINKFKSFHETLLNYDTFTVEHNDLVLFRLHWKNTEVNLMLNDGKEKYEKEKIKSISSEHVNEEKAEEHMDLRLKHCLAYVLHTSGTTGIPKIVRVPHKCIVPNIQHFRVLFDITQEDVLFLASPLTFDPSVVEIFLALSSGASLLIVPTSVKLLPSKLASVLFSHHRVTVLQATPTLLRRFGSQLIKSTVLSATTSLRVLALGGEAFPSLTVLRSWRGEGNKTQIFNVYGITEVSSWATIYRIPEKTLNSTLKCELPVQLGFPLLGTVVEVRDTNGFTIQEGSGQVFLGGRNRVCFLDDEVTVPLGTMRATGDFVTVKDGEIFFLGRKDSQIKRHGKRLNIELVQQVAEELQQVESCAVTWYNQEKLILFMVSKDASVKEYIFKELQKYLPSHAVPDELVLIDSLPFTSHGKIDVSELNKIYLNYINLKSENKLSGKEDLWEKLQYLWKSTLNLPEDLLRVPDESLFLNSGGDSLKSIRLLSEIEKLVGTSVPGLLEIILSSSILEIYNHILQTVVPDEDVTFRKSCATKRKLSDINQEEASGTSLHQKAIMTFTCHNEINAFVVLSRGSQILSLNSTRFLTKLGHCSSACPSDSVSQTNIQNLKGLNSPVLIGKSKDPSCVAKVSEEGKPAIGTQKMELHVRWRSDTGKCVDASPLVVIPTFDKSSTTVYIGSHSHRMKAVDFYSGKVKWEQILGDRIESSACVSKCGNFIVVGCYNGLVYVLKSNSGEKYWMFTTEDAVKSSATMDPTTGLIYIGSHDQHAYALDIYRKKCVWKSKCGGTVFSSPCLNLIPHHLYFATLGGLLLAVNPATGNVIWKHSCGKPLFSSPQCCSQYICIGCVDGNLLCFTHFGEQVWQFSTSGPIFSSPCTSPSEQKIFFGSHDCFIYCCNMKGHLQWKFETTSRVYATPFAFHNYNGSNEMLLAAASTDGKVWILESQSGQLQSVYELPGEVFSSPVVLESMLIIGCRDNYVYCLDLLGGNQK

SEQ ID NO: 4418 - protein, 857 aa, Homo sapiens
  Payload ID: 988;
  Gene Symbol: AASDH;
  Gene Name: aminoadipate-semialdehyde dehydrogenase;
  Uniprot ID:  Q4L235;
  ENSP ID: ENSP00000409656
MTLQELVHKAASCYMDRVAVCFDECNNQLPVYYTYKTVVNAASELSNFLLLHCDFQGIREIGLYCQPGIDLPSWILGILQVPAAYVPIEPDSPPSLSTHFMKKCNLKYILVEKKQINKFKSFHETLLNYDTFTVEHNDLVLFRLHWKNTEVNLMLNDGKEKYEKEKIKSISSEHVNEEKAEEHMDLRLKHCLAYVLHTSGTTGIPKIVRVPHKCIVPNIQHFRVLFDITQEDVLFLASPLTFDPSVVEIFLALSSGASLLIVPTSVKLLPSKLASVLFSHHRVTVLQATPTLLRRFGSQLIKSTVLSATTSLRVLALGGEAFPSLTVLRSWRGEGNKTQIFNVYGITEVSSWATIYRIPEKTLNSTLKCELPVQLGFPLLGTVVEVRDTNGFTIQEGSGQVFLGGRNRVCFLDDEVTVPLGTMRATGDFVTVKDGEIFFLGRKDSQIKRHGKRLNIELVQQVAEELQQVESCAVTWYNQEKLILFMVSKDASVKEYIFKELQKYLPSHAVPDELVLIDSLPFTSHGKIDVSELNKIYLNYINLKSENKLSGKEDLWEKLQYLWKSTLNLPEDLLRVPDESLFLNSGGDSLKSIRLLSEIEKLVGTSVPGLLEIILSSSILEIYNHILQTVVPDEDVTFRKSCATKRKLSDINQEEASGTSLHQKAIMTFTCHNEINAFVVLSRGSQILSLNSTRFLTKLGHCSSACPSDSVSQTNIQNLKGLNSPVLIGKSKDPSCVAKVSEEGKPAIGTQKMELHVRWRSDTGKCVDASPLVVIPTFDKSSTTVYIGSHSHRMKAVDFYSGKVKWEQILGDRIESSACVSKCGNFIVVGLAVLYQWTNLFIPVYLTIRAKNIFWFP

SEQ ID NO: 4419 - protein, 841 aa, Homo sapiens
  Payload ID: 988;
  Gene Symbol: AASDH;
  Gene Name: aminoadipate-semialdehyde dehydrogenase;
  Uniprot ID:  Q4L235;
  ENSP ID: ENSP00000421171
MTLQELVHKAASCYMDRVAVCFDECNNQLPVYYTYKTVVNAASELSNFLLLHCDFQGIREIGLYCQPGIDLPSWILGILQVPAAYVPIEPDSPPSLSTHFMKKCNLKYILVEKKQINKFKSFHETLLNYDTFTVEHNDLVLFRLHWKNTEVNLMLNDGKEKYEKEKIKSISSEHVNEEKAEEHMDLRLKHCLAYVLHTSGTTGIPKIVRVPHKCIVPNIQHFRVLFDITQEDVLFLASPLTFDPSVVEIFLALSSGASLLIVPTSVKLLPSKLASVLFSHHRVTVLQATPTLLRRFGSQLIKSTVLSATTSLRVLALGGEAFPSLTVLRSWRGEGNKTQIFNVYGITEVSSWATIYRIPEKTLNSTLKCELPVQLGFPLLGTVVEVRDTNGFTIQEGSGQVFLGGRNRVCFLDDEVTVPLGTMRATGDFVTVKDGEIFFLGRKDSQIKRHGKRLNIELVQQVAEELQQVESCAVTWYNQEKLILFMVSKDASVKEYIFKELQKYLPSHAVPDELVLIDSLPFTSHGKIDVSELNKIYLNYINLKSENKLSGKEDLWEKLQYLWKSTLNLPEDLLRVPDESLFLNSGGDSLKSIRLLSEIEKLVGTSVPGLLEIILSSSILEIYNHILQTVVPDEDVTFRKSCATKRKLSDINQEEASGTSLHQKAIMTFTCHNEINAFVVLSRGSQILSLNSTRFLTKLGHCSSACPSDSVSQTNIQNLKGLNSPVLIGKSKDPSCVAKVSEEGKPAIGTQKMELHVRWRSDTGKCVDASPLVVIPTFDKSSTTVYIGSHSHRMKAVDFYSGKVKWEQILGDRIESSACVSKCGNFIVVGKFLNLRFVELN

SEQ ID NO: 4420 - protein, 86 aa, Homo sapiens
  Payload ID: 988;
  Gene Symbol: AASDH;
  Gene Name: aminoadipate-semialdehyde dehydrogenase;
  ENSP ID: ENSP00000421658
MTLQELVHKAASCYMDRVAVCFDECNNQLPVYYTYKTVVNAASELSNFLLLHCDFQGIREIGLYCQPGIDLPSWILGNLNLFMKHY

SEQ ID NO: 4421 - protein, 998 aa, Homo sapiens
  Payload ID: 988;
  Gene Symbol: AASDH;
  Gene Name: aminoadipate-semialdehyde dehydrogenase;
  Uniprot ID:  Q4L235;
  ENSP ID: ENSP00000423760
MKKCNLKYILVEKKQINKFKSFHETLLNYDTFTVEHNDLVLFRLHWKNTEVNLMLNDGKEKYEKEKIKSISSEHVNEEKAEEHMDLRLKHCLAYVLHTSGTTGIPKIVRVPHKCIVPNIQHFRVLFDITQEDVLFLASPLTFDPSVVEIFLALSSGASLLIVPTSVKLLPSKLASVLFSHHRVTVLQATPTLLRRFGSQLIKSTVLSATTSLRVLALGGEAFPSLTVLRSWRGEGNKTQIFNVYGITEVSSWATIYRIPEKTLNSTLKCELPVQLGFPLLGTVVEVRDTNGFTIQEGSGQVFLGGRNRVCFLDDEVTVPLGTMRATGDFVTVKDGEIFFLGRKDSQIKRHGKRLNIELVQQVAEELQQVESCAVTWYNQEKLILFMVSKDASVKEYIFKELQKYLPSHAVPDELVLIDSLPFTSHGKIDVSELNKIYLNYINLKSENKLSGKEDLWEKLQYLWKSTLNLPEDLLRVPDESLFLNSGGDSLKSIRLLSEIEKLVGTSVPGLLEIILSSSILEIYNHILQTVVPDEDVTFRKSCATKRKLSDINQEEASGTSLHQKAIMTFTCHNEINAFVVLSRGSQILSLNSTRFLTKLGHCSSACPSDSVSQTNIQNLKGLNSPVLIGKSKDPSCVAKVSEEGKPAIGTQKMELHVRWRSDTGKCVDASPLVVIPTFDKSSTTVYIGSHSHRMKAVDFYSGKVKWEQILGDRIESSACVSKCGNFIVVGCYNGLVYVLKSNSGEKYWMFTTEDAVKSSATMDPTTGLIYIGSHDQHAYALDIYRKKCVWKSKCGGTVFSSPCLNLIPHHLYFATLGGLLLAVNPATGNVIWKHSCGKPLFSSPQCCSQYICIGCVDGNLLCFTHFGEQVWQFSTSGPIFSSPCTSPSEQKIFFGSHDCFIYCCNMKGHLQWKFETTSRVYATPFAFHNYNGSNEMLLAAASTDGKVWILESQSGQLQSVYELPGEVFSSPVVLESMLIIGCRDNYVYCLDLLGGNQK

SEQ ID NO: 4422 - protein, 120 aa, Homo sapiens
  Payload ID: 988;
  Gene Symbol: AASDH;
  Gene Name: aminoadipate-semialdehyde dehydrogenase;
  ENSP ID: ENSP00000427298
MTLQELVHKAASCYMDRVAVCFDECNNQLPVYYTYKTVVNAASELSNFLLLHCDFQGIREIGLYCQPGIDLPSWILGILQVPAAYVPIEPDSPPSLSTHFMKKCNLKYILVEKKQINGTF

SEQ ID NO: 4423 - protein, 945 aa, Homo sapiens
  Payload ID: 988;
  Gene Symbol: AASDH;
  Gene Name: aminoadipate-semialdehyde dehydrogenase;
  ENSP ID: ENSP00000473564
MLNDGKEKYEKEKIKSISSEHVNEEKAEEHMDLRLKHCLAYVLHTSGTTGIPKIVRVPHKCIVPNIQHFRVLFDITQEDVLFLASPLTFDPSVVEIFLALSSGASLLIVPTSVKLLPSKLASVLFSHHRVTVLQATPTLLRRFGSQLIKSTVLSATTSLRVLALGGEAFPSLTVLRSWRGEGNKTQIFNVYGITEVSSWATIYRIPEKTLNSTLKCELPVQLGFPLLGTVVEVRDTNGFTIQEGSGQVFLGGRNRVCFLDDEVTVPLGTMRATGDFVTVKDGEIFFLGRKDSQIKRHGKRLNIELVQQVAEELQQVESCAVTWYNQEKLILFMVSKDASVKEYIFKELQKYLPSHAVPDELVLIDSLPFTSHGKIDVSELNKIYLNYINLKSENKLSGKEDLWEKLQYLWKSTLNLPEDLLRVPDESLFLNSGGDSLKSIRLLSEIEKLVGTSVPGLLEIILSSSILEIYNHILQTVVPDEDVTFRKSCATKRKLSDINQEEASGTSLHQKAIMTFTCHNEINAFVVLSRGSQILSLNSTRFLTKLGHCSSACPSDSVSQTNIQNLKGLNSPVLIGKSKDPSCVAKVSEEGKPAIGTQKMELHVRWRSDTGKCVDASPLVVIPTFDKSSTTVYIGSHSHRMKAVDFYSGKVKWEQILGDRIESSACVSKCGNFIVVGCYNGLVYVLKSNSGEKYWMFTTEDAVKSSATMDPTTGLIYIGSHDQHAYALDIYRKKCVWKSKCGGTVFSSPCLNLIPHHLYFATLGGLLLAVNPATGNVIWKHSCGKPLFSSPQCCSQYICIGCVDGNLLCFTHFGEQVWQFSTSGPIFSSPCTSPSEQKIFFGSHDCFIYCCNMKGHLQWKFETTSRVYATPFAFHNYNGSNEMLLAAASTDGKVWILESQSGQLQSVYELPGEVFSSPVVLESMLIIGCRDNYVYCLDLLGGNQK

SEQ ID NO: 4424 - protein, 309 aa, Homo sapiens
  Payload ID: 989;
  Gene Symbol: AASDHPPT;
  Gene Name: aminoadipate-semialdehyde dehydrogenase-phosphopantetheinyl transferase;
  Uniprot ID:  Q9NRN7;
  ENSP ID: ENSP00000278618
MVFPAKRFCLVPSMEGVRWAFSCGTWLPSRAEWLLAVRSIQPEEKERIGQFVFARDAKAAMAGRLMIRKLVAEKLNIPWNHIRLQRTAKGKPVLAKDSSNPYPNFNFNISHQGDYAVLAAEPELQVGIDIMKTSFPGRGSIPEFFHIMKRKFTNKEWETIRSFKDEWTQLDMFYRNWALKESFIKAIGVGLGFELQRLEFDLSPLNLDIGQVYKETRLFLDGEEEKEWAFEESKIDEHHFVAVALRKPDGSRHQDVPSQDDSKPTQRQFTILNFNDLMSSAVPMTPEDPSFWDCFCFTEEIPIRNGTKS

SEQ ID NO: 4425 - protein, 190 aa, Homo sapiens
  Payload ID: 989;
  Gene Symbol: AASDHPPT;
  Gene Name: aminoadipate-semialdehyde dehydrogenase-phosphopantetheinyl transferase;
  ENSP ID: ENSP00000435099
MIRKLVAEKLNIPWNHIRLQRTAKGKPVLAKDSSNPYPNFNFNISHQGDYAVLAAEPELQVGIDIMKTSFPGRGSIPEFFHIMKRKFTNKEWETIRSFKDEWTQLDMFYRNWALKESFIKAIGVGLGFELQRLEFDLSPLNLDIGQVYKETRLFLDGEEEKEWAFEESKIDEHHFVAVALRKPDGSRHQD

SEQ ID NO: 4426 - protein, 138 aa, Homo sapiens
  Payload ID: 989;
  Gene Symbol: AASDHPPT;
  Gene Name: aminoadipate-semialdehyde dehydrogenase-phosphopantetheinyl transferase;
  Uniprot ID:  Q9NRN7;
  ENSP ID: ENSP00000437144
MVFPAKRFCLVPSMEGVRWAFSCGTWLPSRAEWLLAVRSIQPEEKERIGQFVFARDAKAAMAGRLMIRKLVAEKLNIPWNHIRLQRTAKGKPVLAKDSSNPYPNFNFNISHQGDYAVLAAEPELQVGIDIMKTSFPGT

SEQ ID NO: 4427 - protein, 160 aa, Homo sapiens
  Payload ID: 989;
  Gene Symbol: AASDHPPT;
  Gene Name: aminoadipate-semialdehyde dehydrogenase-phosphopantetheinyl transferase;
  ENSP ID: ENSP00000437175
MIRKLVAEKLNIPWNHIRLQRTAKGKPVLAKDSSNPYPNFNFNISHQGDYAVLAAEPELQVGIDIMKTSFPGRGSIPEFFHIMKRKFTNKEWETIRSFKDEWTQLDMFYRNWALKESFIKAIGVGLGFELQRLEFDLSPLNLDIGQVYKETRLFLDGEEE

SEQ ID NO: 4428 - protein, 732 aa, Homo sapiens
  Payload ID: 990;
  Gene Symbol: AASS;
  Gene Name: aminoadipate-semialdehyde synthase;
  ENSP ID: ENSP00000351834
MLQVHRTGLGRLGVSLSKGLHHKAVLAVRREDVNAWERRAPLAPKHIKGITNLGYKVLIQPSNRRAIHDKDYVKAGGILQEDISEACLILGVKRPPEEKLMSRKTYAFFSHTIKAQEANMGLLDEILKQEIRLIDYEKMVDHRGVRVVAFGQWAGVAGMINILHGMGLRLLALGHHTPFMHIGMAHNYRNSSQAVQAVRDAGYEISLGLMPKSIGPLTFVFTGTGNVSKGAQAIFNELPCEYVEPHELKEVSQTGDLRKVYGTVLSRHHHLVRKTDAVYDPAEYDKHPERYISRFNTDIAPYTTCLINGIYWEQNTPRLLTRQDAQSLLAPGKFSPAGVEGCPALPHKLVAICDISADTGGSIEFMTECTTIEHPFCMYDADQHIIHDSVEGSGILMCSIDNLPAQLPIEATECFGDMLYPYVEEMILSDATQPLESQNFSPVVRDAVITSNGTLPDKYKYIQTLRESRERAQSLSMGTRRKVLVLGSGYISEPVLEYLSRDGNIEITVGSDMKNQIEQLGKKYNINPVSMDICKQEEKLGFLVAKQDLVISLLPYVLHPLVAKACITNKVNMVTASYITPALKELEKSVEDAGITIIGELGLDPGLDHMLAMETIDKAKEVGATIESYISYCGGLPAPEHSNNPLRYKFSWSPVGVLMNVMQSATYLLDGKVVNVAGGISFLDAVTSMDFFPGLNLEGYPNRDSTKYAEIYGISSAHTLLRGTLRYKGLEC

SEQ ID NO: 4429 - protein, 926 aa, Homo sapiens
  Payload ID: 990;
  Gene Symbol: AASS;
  Gene Name: aminoadipate-semialdehyde synthase;
  Uniprot ID:  Q9UDR5;
  ENSP ID: ENSP00000377040
MLQVHRTGLGRLGVSLSKGLHHKAVLAVRREDVNAWERRAPLAPKHIKGITNLGYKVLIQPSNRRAIHDKDYVKAGGILQEDISEACLILGVKRPPEEKLMSRKTYAFFSHTIKAQEANMGLLDEILKQEIRLIDYEKMVDHRGVRVVAFGQWAGVAGMINILHGMGLRLLALGHHTPFMHIGMAHNYRNSSQAVQAVRDAGYEISLGLMPKSIGPLTFVFTGTGNVSKGAQAIFNELPCEYVEPHELKEVSQTGDLRKVYGTVLSRHHHLVRKTDAVYDPAEYDKHPERYISRFNTDIAPYTTCLINGIYWEQNTPRLLTRQDAQSLLAPGKFSPAGVEGCPALPHKLVAICDISADTGGSIEFMTECTTIEHPFCMYDADQHIIHDSVEGSGILMCSIDNLPAQLPIEATECFGDMLYPYVEEMILSDATQPLESQNFSPVVRDAVITSNGTLPDKYKYIQTLRESRERAQSLSMGTRRKVLVLGSGYISEPVLEYLSRDGNIEITVGSDMKNQIEQLGKKYNINPVSMDICKQEEKLGFLVAKQDLVISLLPYVLHPLVAKACITNKVNMVTASYITPALKELEKSVEDAGITIIGELGLDPGLDHMLAMETIDKAKEVGATIESYISYCGGLPAPEHSNNPLRYKFSWSPVGVLMNVMQSATYLLDGKVVNVAGGISFLDAVTSMDFFPGLNLEGYPNRDSTKYAEIYGISSAHTLLRGTLRYKGYMKALNGFVKLGLINREALPAFRPEANPLTWKQLLCDLVGISPSSEHDVLKEAVLKKLGGDNTQLEAAEWLGLLGDEQVPQAESILDALSKHLVMKLSYGPEEKDMIVMRDSFGIRHPSGHLEHKTIDLVAYGDINGFSAMAKTVGLPTAMAAKMLLDGEIGAKGLMGPFSKEIYGPILERIKAEGIIYTTQSTIKP

SEQ ID NO: 4430 - protein, 21 aa, Homo sapiens
  Payload ID: 990;
  Gene Symbol: AASS;
  Gene Name: aminoadipate-semialdehyde synthase;
  ENSP ID: ENSP00000394180
WIGMLNNVEYLPMVSSLTPSP

SEQ ID NO: 4431 - protein, 926 aa, Homo sapiens; identical to SEQ ID NO: 4429
  Payload ID: 990;
  Gene Symbol: AASS;
  Gene Name: aminoadipate-semialdehyde synthase;
  Uniprot ID:  Q9UDR5;
  ENSP ID: ENSP00000403768

SEQ ID NO: 4432 - protein, 511 aa, Homo sapiens
  Payload ID: 990;
  Gene Symbol: AASS;
  Gene Name: aminoadipate-semialdehyde synthase;
  ENSP ID: ENSP00000414001
MLQVHRTGLGRLGVSLSKGLHHKAVLAVRREDVNAWERRAPLAPKHIKGITNLGYKVLIQPSNRRAIHDKDYVKAGGILQEDISEACLILGVKRPPEEKLMSRKTYAFFSHTIKAQEANMGLLDEILKQEIRLIDYEKMVDHRGVRVVAFGQWAGVAGMINILHGMGLRLLALGHHTPFMHIGMAHNYRNSSQAVQAVRDAGYEISLGLMPKSIGPLTFVFTGTGNVSKGAQAIFNELPCEYVEPHELKEVSQTGDLRKVYGTVLSRHHHLVRKTDAVYDPAEYDKHPERYISRFNTDIAPYTTCLINGIYWEQNTPRLLTRQDAQSLLAPGKFSPAGVEGCPALPHKLVAICDISADTGGSIEFMTECTTIEHPFCMYDADQHIIHDSVEGSGILMCSIDNLPAQLPIEATECFGDMLYPYVEEMILSDATQPLESQNFSPVVRDAVITSNGTLPDKYKYIQTLRESRERAQSLSMGTRRKVLVLGSGYISEPVLEYLSRDGNIEITDLT

SEQ ID NO: 4433 - protein, 336 aa, Homo sapiens
  Payload ID: 991;
  Gene Symbol: ACMSD;
  Gene Name: aminocarboxymuconate semialdehyde decarboxylase;
  Uniprot ID:  Q8TDX5;
  ENSP ID: ENSP00000348459
MKIDIHSHILPKEWPDLKKRFGYGGWVQLQHHSKGEAKLLKDGKVFRVVRENCWDPEVRIREMDQKGVTVQALSTVPVMFSYWAKPEDTLNLCQLLNNDLASTVVSYPRRFVGLGTLPMQAPELAVKEMERCVKELGFPGVQIGTHVNEWDLNAQELFPVYAAAERLKCSLFVHPWDMQMDGRMAKYWLPWLVGMPAETTIAICSMIMGGVFEKFPKLKVCFAHGGGAFPFTVGRISHGFSMRPDLCAQDNPMNPKKYLGSFYTDALVHDPLSLKLLTDVIGKDKVILGTDYPFPLGELEPGKLIESMEEFDEETKNKLKAGNALAFLGLERKQFE

SEQ ID NO: 4434 - protein, 278 aa, Homo sapiens
  Payload ID: 991;
  Gene Symbol: ACMSD;
  Gene Name: aminocarboxymuconate semialdehyde decarboxylase;
  Uniprot ID:  Q8TDX5;
  ENSP ID: ENSP00000376659
MGKSSEWCERIAGIQKFVLEKWTKKAKPEDTLNLCQLLNNDLASTVVSYPRRFVGLGTLPMQAPELAVKEMERCVKELGFPGVQIGTHVNEWDLNAQELFPVYAAAERLKCSLFVHPWDMQMDGRMAKYWLPWLVGMPAETTIAICSMIMGGVFEKFPKLKVCFAHGGGAFPFTVGRISHGFSMRPDLCAQDNPMNPKKYLGSFYTDALVHDPLSLKLLTDVIGKDKVILGTDYPFPLGELEPGKLIESMEEFDEETKNKLKAGNALAFLGLERKQFE

SEQ ID NO: 4435 - protein, 330 aa, Homo sapiens
  Payload ID: 992;
  Gene Symbol: ALAD;
  Gene Name: aminolevulinate dehydratase;
  Uniprot ID:  P13716;
  ENSP ID: ENSP00000386284
MQPQSVLHSGYFHPLLRAWQTATTTLNASNLIYPIFVTDVPDDIQPITSLPGVARYGVKRLEEMLRPLVEEGLRCVLIFGVPSRVPKDERGSAADSEESPAIEAIHLLRKTFPNLLVACDVCLCPYTSHGHCGLLSENGAFRAEESRQRLAEVALAYAKAGCQVVAPSDMMDGRVEAIKEALMAHGLGNRVSVMSYSAKFASCFYGPFRDAAKSSPAFGDRRCYQLPPGARGLALRAVDRDVREGADMLMVKPGMPYLDIVREVKDKHPDLPLAVYHVSGEFAMLWHGAQAGAFDLKAAVLEAMTAFRRAGADIIITYYTPQLLQWLKEE

SEQ ID NO: 4436 - protein, 120 aa, Homo sapiens
  Payload ID: 992;
  Gene Symbol: ALAD;
  Gene Name: aminolevulinate dehydratase;
  ENSP ID: ENSP00000392748
MPLCPLAHAMQPQSVLHSGYFHPLLRAWQTATTTLNASNLIYPIFVTDVPDDIQPITSLPGVARYGVKRLEEMLRPLVEEGLRCVLIFGVPSRVPKDERGSAADSEESPAIEAIHLLRKT

SEQ ID NO: 4437 - protein, 14 aa, Homo sapiens
  Payload ID: 992;
  Gene Symbol: ALAD;
  Gene Name: aminolevulinate dehydratase;
  ENSP ID: ENSP00000398438
MPLCPLAHAMQPQS

SEQ ID NO: 4438 - protein, 59 aa, Homo sapiens
  Payload ID: 992;
  Gene Symbol: ALAD;
  Gene Name: aminolevulinate dehydratase;
  ENSP ID: ENSP00000415737
MPLCPLAHAMQPQSVLHSGYFHPLLRAWQTATTTLNASNLIYPIFVTDVPDDIQPITSL

SEQ ID NO: 4439 - protein, 403 aa, Homo sapiens
  Payload ID: 993;
  Gene Symbol: AMT;
  Gene Name: amino methyltransferase;
  Uniprot ID:  P48728;
  ENSP ID: ENSP00000273588
MQRAVSVVARLGFRLQAFPPALCRPLSCAQEVLRRTPLYDFHLAHGGKMVAFAGWSLPVQYRDSHTDSHLHTRQHCSLFDVSHMLQTKILGSDRVKLMESLVVGDIAELRPNQGTLSLFTNEAGGILDDLIVTNTSEGHLYVVSNAGCWEKDLALMQDKVRELQNQGRDVGLEVLDNALLALQGPTAAQVLQAGVADDLRKLPFMTSAVMEVFGVSGCRVTRCGYTGEDGVEISVPVAGAVHLATAILKNPEVKLAGLAARDSLRLEAGLCLYGNDIDEHTTPVEGSLSWTLGKRRRAAMDFPGAKVIVPQLKGRVQRRRVGLMCEGAPMRAHSPILNMEGTKIGTVTSGCPSPSLKKNVAMGYVPCEYSRPGTMLLVEVRRKQQMAVVSKMPFVPTNYYTLK

SEQ ID NO: 4440 - protein, 386 aa, Homo sapiens
  Payload ID: 993;
  Gene Symbol: AMT;
  Gene Name: amino methyltransferase;
  Uniprot ID:  P48728;
  ENSP ID: ENSP00000378747
MQRAVSVVARLGFRLQAFPPALCRPLSCAQEVLRRTPLYDFHLAHGGKMVAFAGWSLPVQYRDSHTDSHLHTRQHCSLFDVSHMLQTKILGSDRVKLMESLVVGDIAELRPNQGTLSLFTNEAGGILDDLIVTNTSEGHLYVVSNAGCWEKDLALMQDKVRELQNQGRDVGLEVLDNALLALQGPTAAQVLQAGVADDLRKLPFMTSAVMEVFGVSGCRVTRCGYTGEDGVEISVPVAGAVHLATAILKNPEVKLAGLAARDSLRLEAGLCLYGNDIDEHTTPVEGSLSWTLGKRRRAAMDFPGAKVIVPQLKGRVQRRRVGLMCEGAPMRAHSPILNMEGTKIGTVTSGCPSPSLKKNVAMGYVPCEYSRPGTMLLVELPSGPCF

SEQ ID NO: 4441 - protein, 262 aa, Homo sapiens
  Payload ID: 993;
  Gene Symbol: AMT;
  Gene Name: amino methyltransferase;
  ENSP ID: ENSP00000388068
MQRAVSVVARLGFRLQAFPPALCRPLSCAQTKILGSDRVKLMESLVVGDIAELRPNQGTLSLFTNEAGGILDDLIVTNTSEGHLYVVSNAGCWEKDLALMQDKVRELQNQGRDVGLEVLDNALLALQGPTAAQVLQAGVADDLRKLPFMTSAVMEVFGVSGCRVTRCGYTGEDGVEISVPVAGAVHLATAILKNPEVKLAGLAARDSLRLEAGLCLYGNDIDEHTTPVEGSLSWTLGKRRRAAMDFPGAKVIVPQLKGRVQR

SEQ ID NO: 4442 - protein, 39 aa, Homo sapiens
  Payload ID: 993;
  Gene Symbol: AMT;
  Gene Name: amino methyltransferase;
  ENSP ID: ENSP00000399943
MQRAVSVVARLGFRLQAFPPALCRPLSCAQWSTPWLCLL

SEQ ID NO: 4443 - protein, 384 aa, Homo sapiens
  Payload ID: 993;
  Gene Symbol: AMT;
  Gene Name: amino methyltransferase;
  ENSP ID: ENSP00000403821
  MOD_RES (1)..(1): Any amino acid
XAVSVVARLGFRLQAFPPALCRPLSCAQEVLRRTPLYDFHLAHGGKMVAFAGWSLPVQYRDSHTDSHLHTRQHCSLFDVSHMLQTKILGSDRVKLMESLVVGDIAELRPNQGTLSLFTNEAGGILDDLIVTNTSEGHLYVVSNAGCWEKDLALMQDKVRELQNQGRDVGLEVLDNALLALQGPTAAQVLQAGVADDLRKLPFMTSAVMEVFGVSGCRVTRCGYTGEDGVEISVPVAGAVHLATAILKNPEVKLAGLAARDSLRLEAGLCLYGNDIDEHTTPVEGSLSWTLGKRRRAAMDFPGAKVIVPQLKGRVQRRRVGLMCEGAPMRAHSPILNMEGTKIGTVTSGCPSPSLKKNVAMGYVPCEYSRPGTMLLVELPSGPCF

SEQ ID NO: 4444 - protein, 359 aa, Homo sapiens
  Payload ID: 993;
  Gene Symbol: AMT;
  Gene Name: amino methyltransferase;
  Uniprot ID:  P48728;
  ENSP ID: ENSP00000415619
MQRAVSVVARLGFRLQAFPPALCRPLSCAQEVLRRTPLYDFHLAHGGKMVAFAGWSLPVQYRDSHTDSHLHTRQHCSLFDVSHMLQTKILGSDRVKLMESLVVGDIAELRPNQDKVRELQNQGRDVGLEVLDNALLALQGPTAAQVLQAGVADDLRKLPFMTSAVMEVFGVSGCRVTRCGYTGEDGVEISVPVAGAVHLATAILKNPEVKLAGLAARDSLRLEAGLCLYGNDIDEHTTPVEGSLSWTLGKRRRAAMDFPGAKVIVPQLKGRVQRRRVGLMCEGAPMRAHSPILNMEGTKIGTVTSGCPSPSLKKNVAMGYVPCEYSRPGTMLLVEVRRKQQMAVVSKMPFVPTNYYTLK

SEQ ID NO: 4445 - protein, 347 aa, Homo sapiens
  Payload ID: 993;
  Gene Symbol: AMT;
  Gene Name: amino methyltransferase;
  Uniprot ID:  P48728;
  ENSP ID: ENSP00000443200
MQRAVSVVARLGFRLQAFPPALCRPLSCAQTKILGSDRVKLMESLVVGDIAELRPNQGTLSLFTNEAGGILDDLIVTNTSEGHLYVVSNAGCWEKDLALMQDKVRELQNQGRDVGLEVLDNALLALQGPTAAQVLQAGVADDLRKLPFMTSAVMEVFGVSGCRVTRCGYTGEDGVEISVPVAGAVHLATAILKNPEVKLAGLAARDSLRLEAGLCLYGNDIDEHTTPVEGSLSWTLGKRRRAAMDFPGAKVIVPQLKGRVQRRRVGLMCEGAPMRAHSPILNMEGTKIGTVTSGCPSPSLKKNVAMGYVPCEYSRPGTMLLVEVRRKQQMAVVSKMPFVPTNYYTLK

SEQ ID NO: 4446 - protein, 919 aa, Homo sapiens
  Payload ID: 994;
  Gene Symbol: NPEPPS;
  Gene Name: aminopeptidase puromycin sensitive;
  Uniprot ID:  P55786;
  ENSP ID: ENSP00000320324
MWLAAAAPSLARRLLFLGPPPPPLLLLVFSRSSRRRLHSLGLAAMPEKRPFERLPADVSPINYSLCLKPDLLDFTFEGKLEAAAQVRQATNQIVMNCADIDIITASYAPEGDEEIHATGFNYQNEDEKVTLSFPSTLQTGTGTLKIDFVGELNDKMKGFYRSKYTTPSGEVRYAAVTQFEATDARRAFPCWDEPAIKATFDISLVVPKDRVALSNMNVIDRKPYPDDENLVEVKFARTPVMSTYLVAFVVGEYDFVETRSKDGVCVRVYTPVGKAEQGKFALEVAAKTLPFYKDYFNVPYPLPKIDLIAIADFAAGAMENWGLVTYRETALLIDPKNSCSSSRQWVALVVGHELAHQWFGNLVTMEWWTHLWLNEGFASWIEYLCVDHCFPEYDIWTQFVSADYTRAQELDALDNSHPIEVSVGHPSEVDEIFDAISYSKGASVIRMLHDYIGDKDFKKGMNMYLTKFQQKNAATEDLWESLENASGKPIAAVMNTWTKQMGFPLIYVEAEQVEDDRLLRLSQKKFCAGGSYVGEDCPQWMVPITISTSEDPNQAKLKILMDKPEMNVVLKNVKPDQWVKLNLGTVGFYRTQYSSAMLESLLPGIRDLSLPPVDRLGLQNDLFSLARAGIISTVEVLKVMEAFVNEPNYTVWSDLSCNLGILSTLLSHTDFYEEIQEFVKDVFSPIGERLGWDPKPGEGHLDALLRGLVLGKLGKAGHKATLEEARRRFKDHVEGKQILSADLRSPVYLTVLKHGDGTTLDIMLKLHKQADMQEEKNRIERVLGATLLPDLIQKVLTFALSEEVRPQDTVSVIGGVAGGSKHGRKAAWKFIKDNWEELYNRYQGGFLISRLIKLSVEGFAVDKMAGEVKAFFESHPAPSAERTIQQCCENILLNAAWLKRDAESIHQYLLQRKASPPTV

SEQ ID NO: 4447 - protein, 65 aa, Homo sapiens
  Payload ID: 994;
  Gene Symbol: NPEPPS;
  Gene Name: aminopeptidase puromycin sensitive;
  ENSP ID: ENSP00000432127
  MOD_RES (1)..(1): Any amino acid
XKNVKPDQWVKLNLGTVGFYRTQYSSAMLESLLPGIRDLSLPPVDRLGLQNDLFSLTSMRKSRSL

SEQ ID NO: 4448 - protein, 915 aa, Homo sapiens
  Payload ID: 994;
  Gene Symbol: NPEPPS;
  Gene Name: aminopeptidase puromycin sensitive;
  ENSP ID: ENSP00000433287
MASFSMDCSPSFCVPGLWNPFIIFRSRSSRRRLHSLGLAAMPEKRPFERLPADVSPINYSLCLKPDLLDFTFEGKLEAAAQVRQATNQIVMNCADIDIITASYAPEGDEEIHATGFNYQNEDEKVTLSFPSTLQTGTGTLKIDFVGELNDKMKGFYRSKYTTPSGEVRYAAVTQFEATDARRAFPCWDEPAIKATFDISLVVPKDRVALSNMNVIDRKPYPDDENLVEVKFARTPVMSTYLVAFVVGEYDFVETRSKDGVCVRVYTPVGKAEQGKFALEVAAKTLPFYKDYFNVPYPLPKIDLIAIADFAAGAMENWGLVTYRETALLIDPKNSCSSSRQWVALVVGHELAHQWFGNLVTMEWWTHLWLNEGFASWIEYLCVDHCFPEYDIWTQFVSADYTRAQELDALDNSHPIEVSVGHPSEVDEIFDAISYSKGASVIRMLHDYIGDKDFKKGMNMYLTKFQQKNAATEDLWESLENASGKPIAAVMNTWTKQMGFPLIYVEAEQVEDDRLLRLSQKKFCAGGSYVGEDCPQWMVPITISTSEDPNQAKLKILMDKPEMNVVLKNVKPDQWVKLNLGTVGFYRTQYSSAMLESLLPGIRDLSLPPVDRLGLQNDLFSLARAGIISTVEVLKVMEAFVNEPNYTVWSDLSCNLGILSTLLSHTDFYEEIQEFVKDVFSPIGERLGWDPKPGEGHLDALLRGLVLGKLGKAGHKATLEEARRRFKDHVEGKQILSADLRSPVYLTVLKHGDGTTLDIMLKLHKQADMQEEKNRIERVLGATLLPDLIQKVLTFALSEEVRPQDTVSVIGGVAGGSKHGRKAAWKFIKDNWEELYNRYQGGFLISRLIKLSVEGFAVDKMAGEVKAFFESHPAPSAERTIQQCCENILLNAAWLKRDAESIHQYLLQRKASPPTV

SEQ ID NO: 4449 - protein, 169 aa, Homo sapiens
  Payload ID: 994;
  Gene Symbol: NPEPPS;
  Gene Name: aminopeptidase puromycin sensitive;
  ENSP ID: ENSP00000433549
LHKQADMQEEKNRIERVLGATLLPDLIQKVLTFALSEEVRPQDTVSVIGGVAGGSKHGRKAAWKFIKDNWEELYNRYQGGFLISRLIKVQWLTPVIPALWDAELSVEGFAVDKMAGEVKAFFESHPAPSAERTIQQCCENILLNAAWLKRDAESIHQYLLQRKASPPTV

SEQ ID NO: 4450 - protein, 141 aa, Homo sapiens
  Payload ID: 994;
  Gene Symbol: NPEPPS;
  Gene Name: aminopeptidase puromycin sensitive;
  ENSP ID: ENSP00000433649
SRSSRRRLHSLGLAAMPEKRPFERLPADVSPINYSLCLKPDLLDFTFEGKLEAAAQVRQATNQIVMNCADIDIITASYAPEGDEEIHATGFNYQNEDEKVTLSFPSTLQTGTGTLKIDFVGELNDKMKGFYRINAWLVAWH

SEQ ID NO: 4451 - protein, 134 aa, Homo sapiens
  Payload ID: 994;
  Gene Symbol: NPEPPS;
  Gene Name: aminopeptidase puromycin sensitive;
  ENSP ID: ENSP00000433735
MASFSMDCSPSFCVPGLWNPFIIFRSRSSRRRLHSLGLAAMPEKRPFERLPADVSPINYSLCLKPDLLDFTFEGKLEAAAQVRQATNQIVMNCADIDIITASYAPEGDEVSGLQMFRSLITFHLWTAFLLVHLS

SEQ ID NO: 4452 - protein, 178 aa, Homo sapiens
  Payload ID: 994;
  Gene Symbol: NPEPPS;
  Gene Name: aminopeptidase puromycin sensitive;
  ENSP ID: ENSP00000434554
MASFSMDCSPSFCVPGLWNPFIIFRSRSSRRRLHSLGLAAMPEKRPFERLPADVSPINYSLCLKPDLLDFTFEGKLEAAAQVRQATNQIVMNCADIDIITASYAPEGDEEIHATGFNYQNEDEKVTLSFPSTLQTGNNSFQYFVFCLVCHFLEVVTVNILLWFDGLGDLKPSKSVREP

SEQ ID NO: 4453 - protein, 163 aa, Homo sapiens
  Payload ID: 994;
  Gene Symbol: NPEPPS;
  Gene Name: aminopeptidase puromycin sensitive;
  ENSP ID: ENSP00000434585
MWLAAAAPSLARRLLFLGPPPPPLLLLVFSRSSRRRLHSLGLAAMPEKRPFERLPADVSPINYSLCLKPDLLDFTFEGKLEAAAQVRQATNQIVMNCADIDIITASYAPEGDEEIHATGFNYQNEDEKVTLSFPSTLQTGTGTLKIDFVGELNDKMKGFYRSY

SEQ ID NO: 4454 - protein, 158 aa, Homo sapiens
  Payload ID: 994;
  Gene Symbol: NPEPPS;
  Gene Name: aminopeptidase puromycin sensitive;
  ENSP ID: ENSP00000435639
MENWGLVTYRETALLIDPKNSCSSSRQWVALVVGHELAHQWFGNLVTMEWWTHLWLNEGFASWIEYLCVDHCFPEYDIWTQFVSADYTRAQELDALDNSHPIEVSVGHPSEVDEIFDAISYSKGASVIRMLHDYIGDKDFKKGMNMYLTKFQQKNAAT

SEQ ID NO: 4455 - protein, 172 aa, Homo sapiens
  Payload ID: 994;
  Gene Symbol: NPEPPS;
  Gene Name: aminopeptidase puromycin sensitive;
  ENSP ID: ENSP00000435966
MENWGLVTYSSFIAIYPAWRTFPNFISSSQVFTCLSPQHKHWVALVVGHELAHQWFGNLVTMEWWTHLWLNEGFASWIEYLCVDHCFPEYDIWTQFVSADYTRAQELDALDNSHPIEVSVGHPSEVDEIFDAISYSKGASVIRMLHDYIGDKDFKKGMNMYLTKFQQKNAAT

SEQ ID NO: 4456 - protein, 127 aa, Homo sapiens
  Payload ID: 994;
  Gene Symbol: NPEPPS;
  Gene Name: aminopeptidase puromycin sensitive;
  ENSP ID: ENSP00000436733
MENWGLVTYRETALLIDPKNSCSSSRQWVALVVGHELAHQWFGNLVTMEWWTHLWLNEGFASWIEYLCVDHCFPEYDIWTQFVSADYTRAQELDALDNSHPIEYYRLSASCHNPESHCLPGQCGPSI

SEQ ID NO: 4457 - protein, 201 aa, Homo sapiens
  Payload ID: 994;
  Gene Symbol: NPEPPS;
  Gene Name: aminopeptidase puromycin sensitive;
  ENSP ID: ENSP00000437019
MASFSMDCSPSFCVPGLWNPFIIFRSLGLAAMPEKRPFERLPADVSPINYSLCLKPDLLDFTFEGKLEAAAQVRQATNQIVMNCADIDIITASYAPEGDEEIHATGFNYQNEDEKVTLSFPSTLQTGTGTLKIDFVGELNDKMKGFYRSKYTTPSGEVRYAAVTQFEATDARRAFPCWDEPAIKATFDISLVVPKDRVALS

SEQ ID NO: 4458 - protein, 523 aa, Homo sapiens
  Payload ID: 995;
  Gene Symbol: NPEPL1;
  Gene Name: aminopeptidase-like 1;
  Uniprot ID:  Q8NDH3;
  ENSP ID: ENSP00000348395
MANVGLQFQASAGDSDPQSRPLLLLGQLHHLHRVPWSHVRGKLQPRVTEELWQAALSTLNPNPTDSCPLYLNYATVAALPCRVSRHNSPSAAHFITRLVRTCLPPGAHRCIVMVCEQPEVFASACALARAFPLFTHRSGASRRLEKKTVTVEFFLVGQDNGPVEVSTLQCLANATDGVRLAARIVDTPCNEMNTDTFLEEINKVGKELGIIPTIIRDEELKTRGFGGIYGVGKAALHPPALAVLSHTPDGATQTIAWVGKGIVYDTGGLSIKGKTTMPGMKRDCGGAAAVLGAFRAAIKQGFKDNLHAVFCLAENSVGPNATRPDDIHLLYSGKTVEINNTDAEGRLVLADGVSYACKDLGADIILDMATLTGAQGIATGKYHAAVLTNSAEWEAACVKAGRKCGDLVHPLVYCPELHFSEFTSAVADMKNSVADRDNSPSSCAGLFIASHIGFDWPGVWVHLDIAAPVHAGERATGFGVALLLALFGRASEDPLLNLVSPLGCEVDVEEGDLGRDSKRRRLV

SEQ ID NO: 4459 - protein, 495 aa, Homo sapiens
  Payload ID: 995;
  Gene Symbol: NPEPL1;
  Gene Name: aminopeptidase-like 1;
  Uniprot ID:  Q8NDH3;
  ENSP ID: ENSP00000434810
MELHGGNRGGYQPKALEQSGCWLWQAALSTLNPNPTDSCPLYLNYATVAALPCRVSRHNSPSAAHFITRLVRTCLPPGAHRCIVMVCEQPEVFASACALARAFPLFTHRSGASRRLEKKTVTVEFFLVGQDNGPVEVSTLQCLANATDGVRLAARIVDTPCNEMNTDTFLEEINKVGKELGIIPTIIRDEELKTRGFGGIYGVGKAALHPPALAVLSHTPDGATQTIAWVGKGIVYDTGGLSIKGKTTMPGMKRDCGGAAAVLGAFRAAIKQGFKDNLHAVFCLAENSVGPNATRPDDIHLLYSGKTVEINNTDAEGRLVLADGVSYACKDLGADIILDMATLTGAQGIATGKYHAAVLTNSAEWEAACVKAGRKCGDLVHPLVYCPELHFSEFTSAVADMKNSVADRDNSPSSCAGLFIASHIGFDWPGVWVHLDIAAPVHAGERATGFGVALLLALFGRASEDPLLNLVSPLGCEVDVEEGDLGRDSKRRRLV

SEQ ID NO: 4460 - protein, 180 aa, Homo sapiens
  Payload ID: 995;
  Gene Symbol: NPEPL1;
  Gene Name: aminopeptidase-like 1;
  ENSP ID: ENSP00000436265
  MOD_RES (1)..(1): Any amino acid
XMVCEQPEVFASACALARAFPLFTHRSGASRRLEKKTVTVEFFLVGQDNGPVEVSTLQCLANATDGVRLAARIVDTPCNEMNTDTFLEEINKVGKELGIIPTIIRDEELKTRGFGGIYGVGKAALHPPALAVLSHTPDGATQTIAWVGKGIVYDTGGLSIKGKRARKRIQWLPDLFGTVA

SEQ ID NO: 4461 - protein, 475 aa, Homo sapiens
  Payload ID: 995;
  Gene Symbol: NPEPL1;
  Gene Name: aminopeptidase-like 1;
  Uniprot ID:  Q8NDH3;
  ENSP ID: ENSP00000437112
MELWQAALSTLNPNPTDSCPLYLNYATVAALPCRVSRHNSPSAAHFITRLVRTCLPPGAHRCIVMVCEQPEVFASACALARAFPLFTHRSGASRRLEKKTVTVEFFLVGQDNGPVEVSTLQCLANATDGVRLAARIVDTPCNEMNTDTFLEEINKVGKELGIIPTIIRDEELKTRGFGGIYGVGKAALHPPALAVLSHTPDGATQTIAWVGKGIVYDTGGLSIKGKTTMPGMKRDCGGAAAVLGAFRAAIKQGFKDNLHAVFCLAENSVGPNATRPDDIHLLYSGKTVEINNTDAEGRLVLADGVSYACKDLGADIILDMATLTGAQGIATGKYHAAVLTNSAEWEAACVKAGRKCGDLVHPLVYCPELHFSEFTSAVADMKNSVADRDNSPSSCAGLFIASHIGFDWPGVWVHLDIAAPVHAGERATGFGVALLLALFGRASEDPLLNLVSPLGCEVDVEEGDLGRDSKRRRLV

SEQ ID NO: 4462 - protein, 264 aa, Homo sapiens
  Payload ID: 996;
  Gene Symbol: AES;
  Gene Name: amino-terminal enhancer of split;
  Uniprot ID:  Q08117;
  ENSP ID: ENSP00000221561
MCHKNGFPQEGGITAAFLQKRKLRLSKNHRPARAKVTEHVRGTRPGRATAGPAASTRAAGSLFFDRWGNRGPAGCRGSSHLPQQLKFTTSDSCDRIKDEFQLLQAQYHSLKLECDKLASEKSEMQRHYVMYYEMSYGLNIEMHKQAEIVKRLNGICAQVLPYLSQEHQQQVLGAIERAKQVTAPELNSIIRQQLQAHQLSQLQALALPLTPLPVGLQPPSLPAVSAGTGLLSLSALGSQAHLSKEDKNGHDGDTHQEDDGEKSD

SEQ ID NO: 4463 - protein, 197 aa, Homo sapiens
  Payload ID: 996;
  Gene Symbol: AES;
  Gene Name: amino-terminal enhancer of split;
  Uniprot ID:  Q08117;
  ENSP ID: ENSP00000317537
MMFPQSRHSGSSHLPQQLKFTTSDSCDRIKDEFQLLQAQYHSLKLECDKLASEKSEMQRHYVMYYEMSYGLNIEMHKQAEIVKRLNGICAQVLPYLSQEHQQQVLGAIERAKQVTAPELNSIIRQQLQAHQLSQLQALALPLTPLPVGLQPPSLPAVSAGTGLLSLSALGSQAHLSKEDKNGHDGDTHQEDDGEKSD

SEQ ID NO: 4464 - protein, 264 aa, Homo sapiens
  Payload ID: 996;
  Gene Symbol: AES;
  Gene Name: amino-terminal enhancer of split;
  ENSP ID: ENSP00000466038
  MOD_RES (1)..(1): Any amino acid
XAFLQKRKLRLSKNHRPARAKVTEHVRGTRPGRATAGPAASTRAAGSLFFDRWGNRGPAGCRGSSHLPQQLKFTTSDSCDRIKDEFQLLQAQYHSLKLECDKLASEKSEMQRHYVMYYEMSYGLNIEMHKQAEIVKRLNGICAQVLPYLSQEHQQQVLGAIERAKQVTAPELNSIIRVCMGTWAGGRGTGGPQAANVPLPRPAAAAPSPPAVPAAGPGPALDPTTRGAAAAFAAGGQRRHRPPLAVRAGFPGPPLQGRQERARW

SEQ ID NO: 4465 - protein, 48 aa, Homo sapiens
  Payload ID: 996;
  Gene Symbol: AES;
  Gene Name: amino-terminal enhancer of split;
  ENSP ID: ENSP00000466179
MMFPQSRHSGSSHLPQQLKFTTSDSCDRIKDEFQLLQAQYHRLRSSKG

SEQ ID NO: 4466 - protein, 141 aa, Homo sapiens
  Payload ID: 996;
  Gene Symbol: AES;
  Gene Name: amino-terminal enhancer of split;
  ENSP ID: ENSP00000467831
MQRHYVMYYEMSYGLNIEMHKQAEIVKRLNGICAQVLPYLSQEHQQQVLGAIERAKQVTAPELNSIIRQQLQAHQLSQLQALALPLTPLPVGLQPPSLPAVSAGTGLLSLSALGSQAHLSKEDKNGHDGDTHQEDDGEKSD

SEQ ID NO: 4467 - protein, 310 aa, Homo sapiens
  Payload ID: 997;
  Gene Symbol: AMMECR1L;
  Gene Name: AMMECR 1-like;
  Uniprot ID:  Q6DCA0;
  ENSP ID: ENSP00000272647
MGKRRCVPPLEPKLAAGCCGVKKPKLSGSGTHSHGNQSTTVPGSSSGPLQNHQHVDSSSGRENVSDLTLGPGNSPITRMNPASGALSPLPRPNGTANTTKNLVVTAEMCCYCFDVLYCHLYGFPQPRLPRFTNDPYPLFVTWKTGRDKRLRGCIGTFSAMNLHSGLREYTLTSALKDSRFPPLTREELPKLFCSVSLLTNFEDASDYLDWEVGVHGIRIEFINEKGVKRTATYLPEVAKEQDWDQIQTIDSLLRKGGFKAPITSEFRKTIKLTRYRSEKVTISYAEYIASRQHCFQNGTLHAPPLYNHYS

SEQ ID NO: 4468 - protein, 310 aa, Homo sapiens; identical to SEQ ID NO: 4467
  Payload ID: 997;
  Gene Symbol: AMMECR1L;
  Gene Name: AMMECR 1-like;
  Uniprot ID:  Q6DCA0;
  ENSP ID: ENSP00000376726

SEQ ID NO: 4469 - protein, 453 aa, Homo sapiens
  Payload ID: 998;
  Gene Symbol: AMN;
  Gene Name: amnion associated transmembrane prt;
  Uniprot ID:  Q9BXJ7;
  ENSP ID: ENSP00000299155
MGVLGRVLLWLQLCALTQAVSKLWVPNTDFDVAANWSQNRTPCAGGAVEFPADKMVSVLVQEGHAVSDMLLPLDGELVLASGAGFGVSDVGSHLDCGAGEPAVFRDSDRFSWHDPHLWRSGDEAPGLFFVDAERVPCRHDDVFFPPSASFRVGLGPGASPVRVRSISALGRTFTRDEDLAVFLASRAGRLRFHGPGALSVGPEDCADPSGCVCGNAEAQPWICAALLQPLGGRCPQAACHSALRPQGQCCDLCGAVVLLTHGPAFDLERYRARILDTFLGLPQYHGLQVAVSKVPRSSRLREADTEIQVVLVENGPETGGAGRLARALLADVAENGEALGVLEATMRESGAHVWGSSAAGLAGGVAAAVLLALLVLLVAPPLLRRAGRLRWRRHEAAAPAGAPLGFRNPVFDVTASEELPLPRRLSLVPKAAADSTSHSYFVNPLFAGAEAEA

SEQ ID NO: 4470 - protein, 131 aa, Homo sapiens
  Payload ID: 998;
  Gene Symbol: AMN;
  Gene Name: amnion associated transmembrane prt;
  ENSP ID: ENSP00000452831
  MOD_RES (1)..(1): Any amino acid
XAPGLFFVDAERVPCRHDDVFFPPSASFRVGLGPGASPVRVRSEALGVLEATMRESGAHVWGSSAAGLAGGVAAAVLLALLVLLVAPPLLRRAGRLRWRRHEAAAPAGAPLGFRNPVFDVTASEELPLPRR

SEQ ID NO: 4471 - protein, 107 aa, Homo sapiens
  Payload ID: 998;
  Gene Symbol: AMN;
  Gene Name: amnion associated transmembrane prt;
  ENSP ID: ENSP00000453786
  MOD_RES (1)..(1): Any amino acid
XLWRSGDEAPGLFFVDAERVPCRHDDVFFPPSASFRVGLGPGASPTFTRDEDLAVFLASRAGRLRFHGPGALSVGPEDCADPSGCVCGNAEAQPWICAALLQPLGGR

SEQ ID NO: 4472 - protein, 653 aa, Homo sapiens
  Payload ID: 999;
  Gene Symbol: AMPH;
  Gene Name: amphiphysin;
  Uniprot ID:  P49418;
  ENSP ID: ENSP00000317441
MADIKTGIFAKNVQKRLNRAQEKVLQKLGKADETKDEQFEEYVQNFKRQEAEGTRLQRELRGYLAAIKGMQEASMKLTESLHEVYEPDWYGREDVKMVGEKCDVLWEDFHQKLVDGSLLTLDTYLGQFPDIKNRIAKRSRKLVDYDSARHHLEALQSSKRKDESRISKAEEEFQKAQKVFEEFNVDLQEELPSLWSRRVGFYVNTFKNVSSLEAKFHKEIAVLCHKLYEVMTKLGDQHADKAFTIQGAPSDSGPLRIAKTPSPPEEPSPLPSPTASPNHTLAPASPAPARPRSPSQTRKGPPVPPLPKVTPTKELQQENIISFFEDNFVPEISVTTPSQNEVPEVKKEETLLDLDFDPFKPEVTPAGSAGVTHSPMSQTLPWDLWTTSTDLVQPASGGSFNGFTQPQDTSLFTMQTDQSMICNLIIPGADADAAVGTLVSAAEGAPGEEAEAEKATVPAGEGVSLEEAKIGTETTEGAESAQPEAEELEATVPQEKVIPSVVIEPASNHEEEGENEITIGAEPKETTEDAAPPGPTSETPELATEQKPIQDPQPTPSAPAMGAADQLASAREASQELPPGFLYKVETLHDFEAANSDELTLQRGDVVLVVPSDSEADQDAGWLVGVKESDWLQYRDLATYKGLFPENFTRRLD

SEQ ID NO: 4473 - protein, 695 aa, Homo sapiens
  Payload ID: 999;
  Gene Symbol: AMPH;
  Gene Name: amphiphysin;
  Uniprot ID:  P49418;
  ENSP ID: ENSP00000348602
MADIKTGIFAKNVQKRLNRAQEKVLQKLGKADETKDEQFEEYVQNFKRQEAEGTRLQRELRGYLAAIKGMQEASMKLTESLHEVYEPDWYGREDVKMVGEKCDVLWEDFHQKLVDGSLLTLDTYLGQFPDIKNRIAKRSRKLVDYDSARHHLEALQSSKRKDESRISKAEEEFQKAQKVFEEFNVDLQEELPSLWSRRVGFYVNTFKNVSSLEAKFHKEIAVLCHKLYEVMTKLGDQHADKAFTIQGAPSDSGPLRIAKTPSPPEEPSPLPSPTASPNHTLAPASPAPARPRSPSQTRKGPPVPPLPKVTPTKELQQENIISFFEDNFVPEISVTTPSQNEVPEVKKEETLLDLDFDPFKPEVTPAGSAGVTHSPMSQTLPWDLWTTSTDLVQPASGGSFNGFTQPQDTSLFTMQTDQSMICNLAESEQAPPTEPKAEEPLAAVTPAVGLDLGMDTRAEEPVEEAVIIPGADADAAVGTLVSAAEGAPGEEAEAEKATVPAGEGVSLEEAKIGTETTEGAESAQPEAEELEATVPQEKVIPSVVIEPASNHEEEGENEITIGAEPKETTEDAAPPGPTSETPELATEQKPIQDPQPTPSAPAMGAADQLASAREASQELPPGFLYKVETLHDFEAANSDELTLQRGDVVLVVPSDSEADQDAGWLVGVKESDWLQYRDLATYKGLFPENFTRRLD

SEQ ID NO: 4474 - protein, 112 aa, Homo sapiens
  Payload ID: 999;
  Gene Symbol: AMPH;
  Gene Name: amphiphysin;
  ENSP ID: ENSP00000400404
  MOD_RES (1)..(1): Any amino acid
XGGNEQLPPKPAPEAGVAIAACVEMEQLYDPLDSDMPAMDTAGLFKESHEDMKKSDEEEEKQKMEDSLWAGVEACQKASGGSFNGFTQPQDTSLFTMQTDQSMICNLEITVN

SEQ ID NO: 4475 - protein, 578 aa, Homo sapiens
  Payload ID: 999;
  Gene Symbol: AMPH;
  Gene Name: amphiphysin;
  ENSP ID: ENSP00000415085
  MOD_RES (1)..(1): Any amino acid
XDSGPLRIAKTPSPPEEPSPLPSPTASPNHTLAPASPAPARPRSPSQTRKGPPVPPLPKVTPTKELQQENIISFFEDNFVPEISVTTPSQNEVPEVKKEETLLDLDFDPFKPEVTPAGSAGVTHSPMSQTLPWDLWTTSTDLVQPTDSSESLSLCNLIMEETPDSGLAEEIQRSQNDIGAFTWGPDASTDRVSQEVTSGGFGEDSACPSETEQDIRLSTSLLSSADWPTVAEESEHAPGPAFPGGNEQLPPKPAPEAGVAIAACVEMEQLYDPLDSDMPAMDTAGLFKESHEDMKKSDEEEEKQKMEDSLWAGVEACQKASGGSFNGFTQPQDTSLFTMQTDQSMICNLIIPGADADAAVGTLVSAAEGAPGEEAEAEKATVPAGEGVSLEEAKIGTETTEGAESAQPEAEELEATVPQEKVIPSVVIEPASNHEEEGENEITIGAEPKETTEDAAPPGPTSETPELATEQKPIQDPQPTPSAPAMGAADQLASAREASQELPPGFLYKVETLHDFEAANSDELTLQRGDVVLVVPSDSEADQDAGWLVGVKESDWLQYRDLATYKGLFPENFTRRLD

SEQ ID NO: 4476 - protein, 252 aa, Homo sapiens
  Payload ID: 1000;
  Gene Symbol: AREG;
  Gene Name: amphiregulin;
  Uniprot ID:  P15514;
  ENSP ID: ENSP00000379097
MRAPLLPPAPVVLSLLILGSGHYAAGLDLNDTYSGKREPFSGDHSADGFEVTSRSEMSSGSEISPVSEMPSSSEPSSGADYDYSEEYDNEPQIPGYIVDDSVRVEQVVKPPQNKTESENTSDKPKRKKKGGKNGKNRRNRKKKNPCNAEFQNFCIHGECKYIEHLEAVTCKCQQEYFGERCGEKSMKTHSMIDSSLSKIALAAIAAFMSAVILTAVAVITVQLRRQYVRKYEGEAEERKKLRQENGNVHAIA

SEQ ID NO: 4477 - protein, 274 aa, Homo sapiens
  Payload ID: 1000;
  Gene Symbol: AREG;
  Gene Name: amphiregulin;
  ENSP ID: ENSP00000421414
MRAPLLPPAPVVLSLLILGSGHYAAGLDLNDTYSGKREPFSGDHSADGFEVTSRSEMSSGSEISPVSEMPSSSEPSSGADYDYSEEYDNEPQIPGYIVDDSVRVEQVVKPPQNKTESENTSDKPKRKKKGGKNGKNRRNRKKKNPCNAEFQNFCIHGECKYIEHLEAVTCKCQQEYFGERCGEKSMKTHSMIDSSLSKIALAAIAAFMSAVILTAVAVITVQISHWSHCQVIAINDESVLFPVDHKTMDPFCYDGFKLSIVTFYAISVYKGARR

SEQ ID NO: 4478 - protein, 511 aa, Homo sapiens
  Payload ID: 1001;
  Gene Symbol: AMY1A;
  Gene Name: amylase, alpha 1A (salivary);
  Uniprot ID:  P04745;
  ENSP ID: ENSP00000359100
MKLFWLLFTIGFCWAQYSSNTQQGRTSIVHLFEWRWVDIALECERYLAPKGFGGVQVSPPNENVAIHNPFRPWWERYQPVSYKLCTRSGNEDEFRNMVTRCNNVGVRIYVDAVINHMCGNAVSAGTSSTCGSYFNPGSRDFPAVPYSGWDFNDGKCKTGSGDIENYNDATQVRDCRLSGLLDLALGKDYVRSKIAEYMNHLIDIGVAGFRIDASKHMWPGDIKAILDKLHNLNSNWFPEGSKPFIYQEVIDLGGEPIKSSDYFGNGRVTEFKYGAKLGTVIRKWNGEKMSYLKNWGEGWGFMPSDRALVFVDNHDNQRGHGAGGASILTFWDARLYKMAVGFMLAHPYGFTRVMSSYRWPRYFENGKDVNDWVGPPNDNGVTKEVTINPDTTCGNDWVCEHRWRQIRNMVNFRNVVDGQPFTNWYDNGSNQVAFGRGNRGFIVFNNDDWTFSLTLQTGLPAGTYCDVISGDKINGNCTGIKIYVSDDGKAHFSISNSAEDPFIAIHAESKL

SEQ ID NO: 4479 - protein, 226 aa, Homo sapiens
  Payload ID: 1001;
  Gene Symbol: AMY1A;
  Gene Name: amylase, alpha 1A (salivary);
  ENSP ID: ENSP00000399836
MKLFWLLFTIGFCWAQYSSNTQQGRTSIVHLFEWRWVDIALECERYLAPKGFGGVQVSPPNENVAIHNPFRPWWERYQPVSYKLCTRSGNEDEFRNMVTRCNNVGVRIYVDAVINHMCGNAVSAGTSSTCGSYFNPGSRDFPAVPYSGWDFNDGKCKTGSGDIENYNDATQVRDCRLSGLLDLALGKDYVRSKIAEYMNHLIDIGVAGFRIDASKHMWPGDIKAIL

SEQ ID NO: 4480 - protein, 105 aa, Homo sapiens
  Payload ID: 1001;
  Gene Symbol: AMY1A;
  Gene Name: amylase, alpha 1A (salivary);
  ENSP ID: ENSP00000408386
MKLFWLLFTIGFCWAQYSSNTQQGRTSIVHLFEWRWVDIALECERYLAPKGFGGVQVSPPNENVAIHNPFRPWWERYQPVSYKLCTRSGNEDEFRNMVTRCNNVG

SEQ ID NO: 4481 - protein, 511 aa, Homo sapiens; identical to SEQ ID NO: 4478
  Payload ID: 1002;
  Gene Symbol: AMY1B;
  Gene Name: amylase, alpha 1B (salivary);
  Uniprot ID:  P04745;
  ENSP ID: ENSP00000330484

SEQ ID NO: 4482 - protein, 511 aa, Homo sapiens; identical to SEQ ID NO: 4478
  Payload ID: 1002;
  Gene Symbol: AMY1B;
  Gene Name: amylase, alpha 1B (salivary);
  Uniprot ID:  P04745;
  ENSP ID: ENSP00000359097

SEQ ID NO: 4483 - protein, 226 aa, Homo sapiens; identical to SEQ ID NO: 4479
  Payload ID: 1002;
  Gene Symbol: AMY1B;
  Gene Name: amylase, alpha 1B (salivary);
  ENSP ID: ENSP00000390219

SEQ ID NO: 4484 - protein, 105 aa, Homo sapiens; identical to SEQ ID NO: 4480
  Payload ID: 1002;
  Gene Symbol: AMY1B;
  Gene Name: amylase, alpha 1B (salivary);
  ENSP ID: ENSP00000393584

SEQ ID NO: 4485 - protein, 511 aa, Homo sapiens; identical to SEQ ID NO: 4478
  Payload ID: 1003;
  Gene Symbol: AMY1C;
  Gene Name: amylase, alpha 1C (salivary);
  Uniprot ID:  P04745;
  ENSP ID: ENSP00000359096

SEQ ID NO: 4486 - protein, 209 aa, Homo sapiens
  Payload ID: 1004;
  Gene Symbol: AMY2A;
  Gene Name: amylase, alpha 2A (pancreatic);
  ENSP ID: ENSP00000390832
  MOD_RES (1)..(1): Any amino acid
XFFLLLFTIGFCWAQYSPNTQQGRTSIVHLFEWRWVDIALECERYLAPKGFGGVQVSPPNENVAIYNPFRPWWERYQPVSYKLCTRSGNEDEFRNMVTRCNNVGVRIYVDAVINHMCGNAVSAGTSSTCGSYFNPGSRDFPAVPYSGWDFNDGKCKTGSGDIENYNDATQVIDLGGEPIKSSDYFGNGRVTEFKYGAKLGTVIRKWNGE

SEQ ID NO: 4487 - protein, 511 aa, Homo sapiens
  Payload ID: 1004;
  Gene Symbol: AMY2A;
  Gene Name: amylase, alpha 2A (pancreatic);
  Uniprot ID:  P04746;
  ENSP ID: ENSP00000397582
MKFFLLLFTIGFCWAQYSPNTQQGRTSIVHLFEWRWVDIALECERYLAPKGFGGVQVSPPNENVAIYNPFRPWWERYQPVSYKLCTRSGNEDEFRNMVTRCNNVGVRIYVDAVINHMCGNAVSAGTSSTCGSYFNPGSRDFPAVPYSGWDFNDGKCKTGSGDIENYNDATQVRDCRLTGLLDLALEKDYVRSKIAEYMNHLIDIGVAGFRLDASKHMWPGDIKAILDKLHNLNSNWFPAGSKPFIYQEVIDLGGEPIKSSDYFGNGRVTEFKYGAKLGTVIRKWNGEKMSYLKNWGEGWGFVPSDRALVFVDNHDNQRGHGAGGASILTFWDARLYKMAVGFMLAHPYGFTRVMSSYRWPRQFQNGNDVNDWVGPPNNNGVIKEVTINPDTTCGNDWVCEHRWRQIRNMVIFRNVVDGQPFTNWYDNGSNQVAFGRGNRGFIVFNNDDWSFSLTLQTGLPAGTYCDVISGDKINGNCTGIKIYVSDDGKAHFSISNSAEDPFIAIHAESKL

SEQ ID NO: 4488 - protein, 511 aa, Homo sapiens; identical to SEQ ID NO: 4487
  Payload ID: 1004;
  Gene Symbol: AMY2A;
  Gene Name: amylase, alpha 2A (pancreatic);
  Uniprot ID:  P04746;
  ENSP ID: ENSP00000481450

SEQ ID NO: 4489 - protein, 511 aa, Homo sapiens
  Payload ID: 1005;
  Gene Symbol: AMY2B;
  Gene Name: amylase, alpha 2B (pancreatic);
  Uniprot ID:  P19961;
  ENSP ID: ENSP00000354610
MKFFLLLFTIGFCWAQYSPNTQQGRTSIVHLFEWRWVDIALECERYLAPKGFGGVQVSPPNENVAIHNPFRPWWERYQPVSYKLCTRSGNEDEFRNMVTRCNNVGVRIYVDAVINHMSGNAVSAGTSSTCGSYFNPGSRDFPAVPYSGWDFNDGKCKTGSGDIENYNDATQVRDCRLVGLLDLALEKDYVRSKIAEYMNHLIDIGVAGFRLDASKHMWPGDIKAILDKLHNLNSNWFPAGSKPFIYQEVIDLGGEPIKSSDYFGNGRVTEFKYGAKLGTVIRKWNGEKMSYLKNWGEGWGFMPSDRALVFVDNHDNQRGHGAGGASILTFWDARLYKMAVGFMLAHPYGFTRVMSSYRWPRQFQNGNDVNDWVGPPNNNGVIKEVTINPDTTCGNDWVCEHRWRQIRNMVNFRNVVDGQPFTNWYDNGSNQVAFGRGNRGFIVFNNDDWTFSLTLQTGLPAGTYCDVISGDKINGNCTGIKIYVSDDGKAHFSISNSAEDPFIAIHAESKL

SEQ ID NO: 4490 - protein, 96 aa, Homo sapiens
  Payload ID: 1005;
  Gene Symbol: AMY2B;
  Gene Name: amylase, alpha 2B (pancreatic);
  ENSP ID: ENSP00000391423
MKFFLLLFTIGFCWAQYSPNTQQGRTSIVHLFEWRWVDIALECERYLAPKGFGGVQVSPPNENVAIHNPFRPWWERYQPVSYKLCTRSGNEDEFRN

SEQ ID NO: 4491 - protein, 86 aa, Homo sapiens
  Payload ID: 1005;
  Gene Symbol: AMY2B;
  Gene Name: amylase, alpha 2B (pancreatic);
  ENSP ID: ENSP00000401627
MKFFLLLFTIGFCWAQYSPNTQQGRTSIVHLFEWRWVDIALECERYLAPKGFGGVQVSPPNENVAIHNPFRPWWERYQPVSYKLCT

SEQ ID NO: 4492 - protein, 370 aa, Homo sapiens
  Payload ID: 1005;
  Gene Symbol: AMY2B;
  Gene Name: amylase, alpha 2B (pancreatic);
  Uniprot ID:  P19961;
  ENSP ID: ENSP00000433347
MKFFLLLFTIGFCWAQYSPNTQQGRTSIVHLFEWRWVDIALECERYLAPKGFGGVQVSPPNENVAIHNPFRPWWERYQPVSYKLCTRSGNEDEFRNMVTRCNNVGVRIYVDAVINHMSGNAVSAGTSSTCGSYFNPGSRDFPAVPYSGWDFNDGKCKTGSGDIENYNDATQVRDCRLVGLLDLALEKDYVRSKIAEYMNHLIDIGVAGFRLDASKHMWPGDIKAILDKLHNLNSNWFPAGSKPFIYQEVIDLGGEPIKSSDYFGNGRVTEFKYGAKLGTVIRKWNGEKMSYLKNWGEGWGFMPSDRALVFVDNHDNQRGHGAGGASILTFWDARLYKMAVGFMLAHPYGFTRVMSSYRWPRQFQNGNEHG

SEQ ID NO: 4493 - protein, 511 aa, Homo sapiens; identical to SEQ ID NO: 4489
  Payload ID: 1005;
  Gene Symbol: AMY2B;
  Gene Name: amylase, alpha 2B (pancreatic);
  Uniprot ID:  P19961;
  ENSP ID: ENSP00000481588

SEQ ID NO: 4494 - protein, 1532 aa, Homo sapiens
  Payload ID: 1006;
  Gene Symbol: AGL;
  Gene Name: amylo-alpha-1, 6-glucosidase, 4-alpha-glucanotransferase;
  Uniprot ID:  P35573;
  ENSP ID: ENSP00000294724
MGHSKQIRILLLNEMEKLEKTLFRLEQGYELQFRLGPTLQGKAVTVYTNYPFPGETFNREKFRSLDWENPTEREDDSDKYCKLNLQQSGSFQYYFLQGNEKSGGGYIVVDPILRVGADNHVLPLDCVTLQTFLAKCLGPFDEWESRLRVAKESGYNMIHFTPLQTLGLSRSCYSLANQLELNPDFSRPNRKYTWNDVGQLVEKLKKEWNVICITDVVYNHTAANSKWIQEHPECAYNLVNSPHLKPAWVLDRALWRFSCDVAEGKYKEKGIPALIENDHHMNSIRKIIWEDIFPKLKLWEFFQVDVNKAVEQFRRLLTQENRRVTKSDPNQHLTIIQDPEYRRFGCTVDMNIALTTFIPHDKGPAAIEECCNWFHKRMEELNSEKHRLINYHQEQAVNCLLGNVFYERLAGHGPKLGPVTRKHPLVTRYFTFPFEEIDFSMEESMIHLPNKACFLMAHNGWVMGDDPLRNFAEPGSEVYLRRELICWGDSVKLRYGNKPEDCPYLWAHMKKYTEITATYFQGVRLDNCHSTPLHVAEYMLDAARNLQPNLYVVAELFTGSEDLDNVFVTRLGISSLIREAMSAYNSHEEGRLVYRYGGEPVGSFVQPCLRPLMPAIAHALFMDITHDNECPIVHRSAYDALPSTTIVSMACCASGSTRGYDELVPHQISVVSEERFYTKWNPEALPSNTGEVNFQSGIIAARCAISKLHQELGAKGFIQVYVDQVDEDIVAVTRHSPSIHQSVVAVSRTAFRNPKTSFYSKEVPQMCIPGKIEEVVLEARTIERNTKPYRKDENSINGTPDITVEIREHIQLNESKIVKQAGVATKGPNEYIQEIEFENLSPGSVIIFRVSLDPHAQVAVGILRNHLTQFSPHFKSGSLAVDNADPILKIPFASLASRLTLAELNQILYRCESEEKEDGGGCYDIPNWSALKYAGLQGLMSVLAEIRPKNDLGHPFCNNLRSGDWMIDYVSNRLISRSGTIAEVGKWLQAMFFYLKQIPRYLIPCYFDAILIGAYTTLLDTAWKQMSSFVQNGSTFVKHLSLGSVQLCGVGKFPSLPILSPALMDVPYRLNEITKEKEQCCVSLAAGLPHFSSGIFRCWGRDTFIALRGILLITGRYVEARNIILAFAGTLRHGLIPNLLGEGIYARYNCRDAVWWWLQCIQDYCKMVPNGLDILKCPVSRMYPTDDSAPLPAGTLDQPLFEVIQEAMQKHMQGIQFRERNAGPQIDRNMKDEGFNITAGVDEETGFVYGGNRFNCGTWMDKMGESDRARNRGIPATPRDGSAVEIVGLSKSAVRWLLELSKKNIFPYHEVTVKRHGKAIKVSYDEWNRKIQDNFEKLFHVSEDPSDLNEKHPNLVHKRGIYKDSYGASSPWCDYQLRPNFTIAMVVAPELFTTEKAWKALEIAEKKLLGPLGMKTLDPDDMVYCGIYDNALDNDNYNLAKGFNYHQGPEWLWPIGYFLRAKLYFSRLMGPETTAKTIVLVKNVLSRHYVHLERSPWKGLPELTNENAQYCPFSCETQAWSIATILETLYDL

SEQ ID NO: 4495 - protein, 1515 aa, Homo sapiens
  Payload ID: 1006;
  Gene Symbol: AGL;
  Gene Name: amylo-alpha-1, 6-glucosidase, 4-alpha-glucanotransferase;
  Uniprot ID:  P35573;
  ENSP ID: ENSP00000354635
MSLLTCAFYLGYELQFRLGPTLQGKAVTVYTNYPFPGETFNREKFRSLDWENPTEREDDSDKYCKLNLQQSGSFQYYFLQGNEKSGGGYIVVDPILRVGADNHVLPLDCVTLQTFLAKCLGPFDEWESRLRVAKESGYNMIHFTPLQTLGLSRSCYSLANQLELNPDFSRPNRKYTWNDVGQLVEKLKKEWNVICITDVVYNHTAANSKWIQEHPECAYNLVNSPHLKPAWVLDRALWRFSCDVAEGKYKEKGIPALIENDHHMNSIRKIIWEDIFPKLKLWEFFQVDVNKAVEQFRRLLTQENRRVTKSDPNQHLTIIQDPEYRRFGCTVDMNIALTTFIPHDKGPAAIEECCNWFHKRMEELNSEKHRLINYHQEQAVNCLLGNVFYERLAGHGPKLGPVTRKHPLVTRYFTFPFEEIDFSMEESMIHLPNKACFLMAHNGWVMGDDPLRNFAEPGSEVYLRRELICWGDSVKLRYGNKPEDCPYLWAHMKKYTEITATYFQGVRLDNCHSTPLHVAEYMLDAARNLQPNLYVVAELFTGSEDLDNVFVTRLGISSLIREAMSAYNSHEEGRLVYRYGGEPVGSFVQPCLRPLMPAIAHALFMDITHDNECPIVHRSAYDALPSTTIVSMACCASGSTRGYDELVPHQISVVSEERFYTKWNPEALPSNTGEVNFQSGIIAARCAISKLHQELGAKGFIQVYVDQVDEDIVAVTRHSPSIHQSVVAVSRTAFRNPKTSFYSKEVPQMCIPGKIEEVVLEARTIERNTKPYRKDENSINGTPDITVEIREHIQLNESKIVKQAGVATKGPNEYIQEIEFENLSPGSVIIFRVSLDPHAQVAVGILRNHLTQFSPHFKSGSLAVDNADPILKIPFASLASRLTLAELNQILYRCESEEKEDGGGCYDIPNWSALKYAGLQGLMSVLAEIRPKNDLGHPFCNNLRSGDWMIDYVSNRLISRSGTIAEVGKWLQAMFFYLKQIPRYLIPCYFDAILIGAYTTLLDTAWKQMSSFVQNGSTFVKHLSLGSVQLCGVGKFPSLPILSPALMDVPYRLNEITKEKEQCCVSLAAGLPHFSSGIFRCWGRDTFIALRGILLITGRYVEARNIILAFAGTLRHGLIPNLLGEGIYARYNCRDAVWWWLQCIQDYCKMVPNGLDILKCPVSRMYPTDDSAPLPAGTLDQPLFEVIQEAMQKHMQGIQFRERNAGPQIDRNMKDEGFNITAGVDEETGFVYGGNRFNCGTWMDKMGESDRARNRGIPATPRDGSAVEIVGLSKSAVRWLLELSKKNIFPYHEVTVKRHGKAIKVSYDEWNRKIQDNFEKLFHVSEDPSDLNEKHPNLVHKRGIYKDSYGASSPWCDYQLRPNFTIAMVVAPELFTTEKAWKALEIAEKKLLGPLGMKTLDPDDMVYCGIYDNALDNDNYNLAKGFNYHQGPEWLWPIGYFLRAKLYFSRLMGPETTAKTIVLVKNVLSRHYVHLERSPWKGLPELTNENAQYCPFSCETQAWSIATILETLYDL

SEQ ID NO: 4496 - protein, 1516 aa, Homo sapiens
  Payload ID: 1006;
  Gene Symbol: AGL;
  Gene Name: amylo-alpha-1, 6-glucosidase, 4-alpha-glucanotransferase;
  Uniprot ID:  P35573;
  ENSP ID: ENSP00000354971
MAPILSINLFIGYELQFRLGPTLQGKAVTVYTNYPFPGETFNREKFRSLDWENPTEREDDSDKYCKLNLQQSGSFQYYFLQGNEKSGGGYIVVDPILRVGADNHVLPLDCVTLQTFLAKCLGPFDEWESRLRVAKESGYNMIHFTPLQTLGLSRSCYSLANQLELNPDFSRPNRKYTWNDVGQLVEKLKKEWNVICITDVVYNHTAANSKWIQEHPECAYNLVNSPHLKPAWVLDRALWRFSCDVAEGKYKEKGIPALIENDHHMNSIRKIIWEDIFPKLKLWEFFQVDVNKAVEQFRRLLTQENRRVTKSDPNQHLTIIQDPEYRRFGCTVDMNIALTTFIPHDKGPAAIEECCNWFHKRMEELNSEKHRLINYHQEQAVNCLLGNVFYERLAGHGPKLGPVTRKHPLVTRYFTFPFEEIDFSMEESMIHLPNKACFLMAHNGWVMGDDPLRNFAEPGSEVYLRRELICWGDSVKLRYGNKPEDCPYLWAHMKKYTEITATYFQGVRLDNCHSTPLHVAEYMLDAARNLQPNLYVVAELFTGSEDLDNVFVTRLGISSLIREAMSAYNSHEEGRLVYRYGGEPVGSFVQPCLRPLMPAIAHALFMDITHDNECPIVHRSAYDALPSTTIVSMACCASGSTRGYDELVPHQISVVSEERFYTKWNPEALPSNTGEVNFQSGIIAARCAISKLHQELGAKGFIQVYVDQVDEDIVAVTRHSPSIHQSVVAVSRTAFRNPKTSFYSKEVPQMCIPGKIEEVVLEARTIERNTKPYRKDENSINGTPDITVEIREHIQLNESKIVKQAGVATKGPNEYIQEIEFENLSPGSVIIFRVSLDPHAQVAVGILRNHLTQFSPHFKSGSLAVDNADPILKIPFASLASRLTLAELNQILYRCESEEKEDGGGCYDIPNWSALKYAGLQGLMSVLAEIRPKNDLGHPFCNNLRSGDWMIDYVSNRLISRSGTIAEVGKWLQAMFFYLKQIPRYLIPCYFDAILIGAYTTLLDTAWKQMSSFVQNGSTFVKHLSLGSVQLCGVGKFPSLPILSPALMDVPYRLNEITKEKEQCCVSLAAGLPHFSSGIFRCWGRDTFIALRGILLITGRYVEARNIILAFAGTLRHGLIPNLLGEGIYARYNCRDAVWWWLQCIQDYCKMVPNGLDILKCPVSRMYPTDDSAPLPAGTLDQPLFEVIQEAMQKHMQGIQFRERNAGPQIDRNMKDEGFNITAGVDEETGFVYGGNRFNCGTWMDKMGESDRARNRGIPATPRDGSAVEIVGLSKSAVRWLLELSKKNIFPYHEVTVKRHGKAIKVSYDEWNRKIQDNFEKLFHVSEDPSDLNEKHPNLVHKRGIYKDSYGASSPWCDYQLRPNFTIAMVVAPELFTTEKAWKALEIAEKKLLGPLGMKTLDPDDMVYCGIYDNALDNDNYNLAKGFNYHQGPEWLWPIGYFLRAKLYFSRLMGPETTAKTIVLVKNVLSRHYVHLERSPWKGLPELTNENAQYCPFSCETQAWSIATILETLYDL

SEQ ID NO: 4497 - protein, 1532 aa, Homo sapiens; identical to SEQ ID NO: 4494
  Payload ID: 1006;
  Gene Symbol: AGL;
  Gene Name: amylo-alpha-1, 6-glucosidase, 4-alpha-glucanotransferase;
  Uniprot ID:  P35573;
  ENSP ID: ENSP00000355106

SEQ ID NO: 4498 - protein, 1516 aa, Homo sapiens; identical to SEQ ID NO: 4496
  Payload ID: 1006;
  Gene Symbol: AGL;
  Gene Name: amylo-alpha-1, 6-glucosidase, 4-alpha-glucanotransferase;
  Uniprot ID:  P35573;
  ENSP ID: ENSP00000359180

SEQ ID NO: 4499 - protein, 1532 aa, Homo sapiens; identical to SEQ ID NO: 4494
  Payload ID: 1006;
  Gene Symbol: AGL;
  Gene Name: amylo-alpha-1, 6-glucosidase, 4-alpha-glucanotransferase;
  Uniprot ID:  P35573;
  ENSP ID: ENSP00000359182

SEQ ID NO: 4500 - protein, 1532 aa, Homo sapiens; identical to SEQ ID NO: 4494
  Payload ID: 1006;
  Gene Symbol: AGL;
  Gene Name: amylo-alpha-1, 6-glucosidase, 4-alpha-glucanotransferase;
  Uniprot ID:  P35573;
  ENSP ID: ENSP00000359184

SEQ ID NO: 4501 - protein, 770 aa, Homo sapiens
  Payload ID: 1007;
  Gene Symbol: APP;
  Gene Name: amyloid beta (A4) precursor prt;
  Uniprot ID:  P05067;
  ENSP ID: ENSP00000284981
MLPGLALLLLAAWTARALEVPTDGNAGLLAEPQIAMFCGRLNMHMNVQNGKWDSDPSGTKTCIDTKEGILQYCQEVYPELQITNVVEANQPVTIQNWCKRGRKQCKTHPHFVIPYRCLVGEFVSDALLVPDKCKFLHQERMDVCETHLHWHTVAKETCSEKSTNLHDYGMLLPCGIDKFRGVEFVCCPLAEESDNVDSADAEEDDSDVWWGGADTDYADGSEDKVVEVAEEEEVAEVEEEEADDDEDDEDGDEVEEEAEEPYEEATERTTSIATTTTTTTESVEEVVREVCSEQAETGPCRAMISRWYFDVTEGKCAPFFYGGCGGNRNNFDTEEYCMAVCGSAMSQSLLKTTQEPLARDPVKLPTTAASTPDAVDKYLETPGDENEHAHFQKAKERLEAKHRERMSQVMREWEEAERQAKNLPKADKKAVIQHFQEKVESLEQEAANERQQLVETHMARVEAMLNDRRRLALENYITALQAVPPRPRHVFNMLKKYVRAEQKDRQHTLKHFEHVRMVDPKKAAQIRSQVMTHLRVIYERMNQSLSLLYNVPAVAEEIQDEVDELLQKEQNYSDDVLANMISEPRISYGNDALMPSLTETKTTVELLPVNGEFSLDDLQPWHSFGADSVPANTENEVEPVDARPAADRGLTTRPGSGLTNIKTEEISEVKMDAEFRHDSGYEVHHQKLVFFAEDVGSNKGAIIGLMVGGVVIATVIVITLVMLKKKQYTSIHHGVVEVDAAVTPEERHLSKMQQNGYENPTYKFFEQMQN

SEQ ID NO: 4502 - protein, 695 aa, Homo sapiens
  Payload ID: 1007;
  Gene Symbol: APP;
  Gene Name: amyloid beta (A4) precursor prt;
  Uniprot ID:  P05067;
  ENSP ID: ENSP00000345463
MLPGLALLLLAAWTARALEVPTDGNAGLLAEPQIAMFCGRLNMHMNVQNGKWDSDPSGTKTCIDTKEGILQYCQEVYPELQITNVVEANQPVTIQNWCKRGRKQCKTHPHFVIPYRCLVGEFVSDALLVPDKCKFLHQERMDVCETHLHWHTVAKETCSEKSTNLHDYGMLLPCGIDKFRGVEFVCCPLAEESDNVDSADAEEDDSDVWWGGADTDYADGSEDKVVEVAEEEEVAEVEEEEADDDEDDEDGDEVEEEAEEPYEEATERTTSIATTTTTTTESVEEVVRVPTTAASTPDAVDKYLETPGDENEHAHFQKAKERLEAKHRERMSQVMREWEEAERQAKNLPKADKKAVIQHFQEKVESLEQEAANERQQLVETHMARVEAMLNDRRRLALENYITALQAVPPRPRHVFNMLKKYVRAEQKDRQHTLKHFEHVRMVDPKKAAQIRSQVMTHLRVIYERMNQSLSLLYNVPAVAEEIQDEVDELLQKEQNYSDDVLANMISEPRISYGNDALMPSLTETKTTVELLPVNGEFSLDDLQPWHSFGADSVPANTENEVEPVDARPAADRGLTTRPGSGLTNIKTEEISEVKMDAEFRHDSGYEVHHQKLVFFAEDVGSNKGAIIGLMVGGVVIATVIVITLVMLKKKQYTSIHHGVVEVDAAVTPEERHLSKMQQNGYENPTYKFFEQMQN

SEQ ID NO: 4503 - protein, 639 aa, Homo sapiens
  Payload ID: 1007;
  Gene Symbol: APP;
  Gene Name: amyloid beta (A4) precursor prt;
  Uniprot ID:  P05067;
  ENSP ID: ENSP00000346129
MLPGLALLLLAAWTARALEVYPELQITNVVEANQPVTIQNWCKRGRKQCKTHPHFVIPYRCLVGEFVSDALLVPDKCKFLHQERMDVCETHLHWHTVAKETCSEKSTNLHDYGMLLPCGIDKFRGVEFVCCPLAEESDNVDSADAEEDDSDVWWGGADTDYADGSEDKVVEVAEEEEVAEVEEEEADDDEDDEDGDEVEEEAEEPYEEATERTTSIATTTTTTTESVEEVVRVPTTAASTPDAVDKYLETPGDENEHAHFQKAKERLEAKHRERMSQVMREWEEAERQAKNLPKADKKAVIQHFQEKVESLEQEAANERQQLVETHMARVEAMLNDRRRLALENYITALQAVPPRPRHVFNMLKKYVRAEQKDRQHTLKHFEHVRMVDPKKAAQIRSQVMTHLRVIYERMNQSLSLLYNVPAVAEEIQDEVDELLQKEQNYSDDVLANMISEPRISYGNDALMPSLTETKTTVELLPVNGEFSLDDLQPWHSFGADSVPANTENEVEPVDARPAADRGLTTRPGSGLTNIKTEEISEVKMDAEFRHDSGYEVHHQKLVFFAEDVGSNKGAIIGLMVGGVVIATVIVITLVMLKKKQYTSIHHGVVEVDAAVTPEERHLSKMQQNGYENPTYKFFEQMQN

SEQ ID NO: 4504 - protein, 751 aa, Homo sapiens
  Payload ID: 1007;
  Gene Symbol: APP;
  Gene Name: amyloid beta (A4) precursor prt;
  Uniprot ID:  P05067;
  ENSP ID: ENSP00000350578
MLPGLALLLLAAWTARALEVPTDGNAGLLAEPQIAMFCGRLNMHMNVQNGKWDSDPSGTKTCIDTKEGILQYCQEVYPELQITNVVEANQPVTIQNWCKRGRKQCKTHPHFVIPYRCLVGEFVSDALLVPDKCKFLHQERMDVCETHLHWHTVAKETCSEKSTNLHDYGMLLPCGIDKFRGVEFVCCPLAEESDNVDSADAEEDDSDVWWGGADTDYADGSEDKVVEVAEEEEVAEVEEEEADDDEDDEDGDEVEEEAEEPYEEATERTTSIATTTTTTTESVEEVVREVCSEQAETGPCRAMISRWYFDVTEGKCAPFFYGGCGGNRNNFDTEEYCMAVCGSAIPTTAASTPDAVDKYLETPGDENEHAHFQKAKERLEAKHRERMSQVMREWEEAERQAKNLPKADKKAVIQHFQEKVESLEQEAANERQQLVETHMARVEAMLNDRRRLALENYITALQAVPPRPRHVFNMLKKYVRAEQKDRQHTLKHFEHVRMVDPKKAAQIRSQVMTHLRVIYERMNQSLSLLYNVPAVAEEIQDEVDELLQKEQNYSDDVLANMISEPRISYGNDALMPSLTETKTTVELLPVNGEFSLDDLQPWHSFGADSVPANTENEVEPVDARPAADRGLTTRPGSGLTNIKTEEISEVKMDAEFRHDSGYEVHHQKLVFFAEDVGSNKGAIIGLMVGGVVIATVIVITLVMLKKKQYTSIHHGVVEVDAAVTPEERHLSKMQQNGYENPTYKFFEQMQN

SEQ ID NO: 4505 - protein, 752 aa, Homo sapiens
  Payload ID: 1007;
  Gene Symbol: APP;
  Gene Name: amyloid beta (A4) precursor prt;
  Uniprot ID:  P05067;
  ENSP ID: ENSP00000351796
MLPGLALLLLAAWTARALEVPTDGNAGLLAEPQIAMFCGRLNMHMNVQNGKWDSDPSGTKTCIDTKEGILQYCQEVYPELQITNVVEANQPVTIQNWCKRGRKQCKTHPHFVIPYRCLVGEFVSDALLVPDKCKFLHQERMDVCETHLHWHTVAKETCSEKSTNLHDYGMLLPCGIDKFRGVEFVCCPLAEESDNVDSADAEEDDSDVWWGGADTDYADGSEDKVVEVAEEEEVAEVEEEEADDDEDDEDGDEVEEEAEEPYEEATERTTSIATTTTTTTESVEEVVREVCSEQAETGPCRAMISRWYFDVTEGKCAPFFYGGCGGNRNNFDTEEYCMAVCGSAMSQSLLKTTQEPLARDPVKLPTTAASTPDAVDKYLETPGDENEHAHFQKAKERLEAKHRERMSQVMREWEEAERQAKNLPKADKKAVIQHFQEKVESLEQEAANERQQLVETHMARVEAMLNDRRRLALENYITALQAVPPRPRHVFNMLKKYVRAEQKDRQHTLKHFEHVRMVDPKKAAQIRSQVMTHLRVIYERMNQSLSLLYNVPAVAEEIQDEVDELLQKEQNYSDDVLANMISEPRISYGNDALMPSLTETKTTVELLPVNGEFSLDDLQPWHSFGADSVPANTENEGSGLTNIKTEEISEVKMDAEFRHDSGYEVHHQKLVFFAEDVGSNKGAIIGLMVGGVVIATVIVITLVMLKKKQYTSIHHGVVEVDAAVTPEERHLSKMQQNGYENPTYKFFEQMQN

SEQ ID NO: 4506 - protein, 660 aa, Homo sapiens
  Payload ID: 1007;
  Gene Symbol: APP;
  Gene Name: amyloid beta (A4) precursor prt;
  ENSP ID: ENSP00000352760
MFCGRLNMHMNVQNGKWDSDPSGTKTCIDTKEGILQYCQEVYPELQITNVVEANQPVTIQNWCKRGRKQCKTHPHFVIPYRCLVGEFVSDALLVPDKCKFLHQERMDVCETHLHWHTVAKETCSEKSTNLHDYGMLLPCGIDKFRGVEFVCCPLAEESDNVDSADAEEDDSDVWWGGADTDYADGSEDKVVEVAEEEEVAEVEEEEADDDEDDEDGDEVEEEAEEPYEEATERTTSIATTTTTTTESVEEVVRVPTTAASTPDAVDKYLETPGDENEHAHFQKAKERLEAKHRERMSQVMREWEEAERQAKNLPKADKKAVIQHFQEKVESLEQEAANERQQLVETHMARVEAMLNDRRRLALENYITALQAVPPRPRHVFNMLKKYVRAEQKDRQHTLKHFEHVRMVDPKKAAQIRSQVMTHLRVIYERMNQSLSLLYNVPAVAEEIQDEVDELLQKEQNYSDDVLANMISEPRISYGNDALMPSLTETKTTVELLPVNGEFSLDDLQPWHSFGADSVPANTENEVEPVDARPAADRGLTTRPGSGLTNIKTEEISEVKMDAEFRHDSGYEVHHQKLVFFAEDVGSNKGAIIGLMVGGVVIATVIVITLVMLKKKQYTSIHHGVVEVDAAVTPEERHLSKMQQNGYENPTYKFFEQMQN

SEQ ID NO: 4507 - protein, 746 aa, Homo sapiens
  Payload ID: 1007;
  Gene Symbol: APP;
  Gene Name: amyloid beta (A4) precursor prt;
  Uniprot ID:  P05067;
  ENSP ID: ENSP00000387483
MDQLEDLLVLFINYVPTDGNAGLLAEPQIAMFCGRLNMHMNVQNGKWDSDPSGTKTCIDTKEGILQYCQEVYPELQITNVVEANQPVTIQNWCKRGRKQCKTHPHFVIPYRCLVGEFVSDALLVPDKCKFLHQERMDVCETHLHWHTVAKETCSEKSTNLHDYGMLLPCGIDKFRGVEFVCCPLAEESDNVDSADAEEDDSDVWWGGADTDYADGSEDKVVEVAEEEEVAEVEEEEADDDEDDEDGDEVEEEAEEPYEEATERTTSIATTTTTTTESVEEVVREVCSEQAETGPCRAMISRWYFDVTEGKCAPFFYGGCGGNRNNFDTEEYCMAVCGSAIPTTAASTPDAVDKYLETPGDENEHAHFQKAKERLEAKHRERMSQVMREWEEAERQAKNLPKADKKAVIQHFQEKVESLEQEAANERQQLVETHMARVEAMLNDRRRLALENYITALQAVPPRPRHVFNMLKKYVRAEQKDRQHTLKHFEHVRMVDPKKAAQIRSQVMTHLRVIYERMNQSLSLLYNVPAVAEEIQDEVDELLQKEQNYSDDVLANMISEPRISYGNDALMPSLTETKTTVELLPVNGEFSLDDLQPWHSFGADSVPANTENEVEPVDARPAADRGLTTRPGSGLTNIKTEEISEVKMDAEFRHDSGYEVHHQKLVFFAEDVGSNKGAIIGLMVGGVVIATVIVITLVMLKKKQYTSIHHGVVEVDAAVTPEERHLSKMQQNGYENPTYKFFEQMQN

SEQ ID NO: 4508 - protein, 485 aa, Homo sapiens
  Payload ID: 1007;
  Gene Symbol: APP;
  Gene Name: amyloid beta (A4) precursor prt;
  ENSP ID: ENSP00000396923
  MOD_RES (1)..(1): Any amino acid
XLQITNVVEANQPVTIQNWCKRGRKQCKTHPHFVIPYRCLVGEFVSDALLVPDKCKFLHQERMDVCETHLHWHTVAKETCSEKSTNLHDYGMLLPCGIDKFRGVEFVCCPLAEESDNVDSADAEEDDSDVWWGGADTDYADGSEDKVVEVAEEEEVAEVEEEEADDDEDDEDGDEVEEEAEEPYEEATERTTSIATTTTTTTESVEEVVREVCSEQAETGPCRAMISRWYFDVTEGKCAPFFYGGCGGNRNNFDTEEYCMAVCGSAIPTTAASTPDAVDKYLETPGDENEHAHFQKAKERLEAKHRERMSQVMREWEEAERQAKNLPKADKKAVIQHFQEKVESLEQEAANERQQLVETHMARVEAMLNDRRRLALENYITALQAVPPRPRHVFNMLKKYVRAEQKDRQHTLKHFEHVRMVDPKKAAQIRSQVMTHLRVIYERMNQSLSLLYNVPAVAEEIQDEVGAVAHACNSSILGGQGGQMT

SEQ ID NO: 4509 - protein, 714 aa, Homo sapiens
  Payload ID: 1007;
  Gene Symbol: APP;
  Gene Name: amyloid beta (A4) precursor prt;
  ENSP ID: ENSP00000398879
MLPGLALLLLAAWTARALEVYPELQITNVVEANQPVTIQNWCKRGRKQCKTHPHFVIPYRCLVGEFVSDALLVPDKCKFLHQERMDVCETHLHWHTVAKETCSEKSTNLHDYGMLLPCGIDKFRGVEFVCCPLAEESDNVDSADAEEDDSDVWWGGADTDYADGSEDKVVEVAEEEEVAEVEEEEADDDEDDEDGDEVEEEAEEPYEEATERTTSIATTTTTTTESVEEVVREVCSEQAETGPCRAMISRWYFDVTEGKCAPFFYGGCGGNRNNFDTEEYCMAVCGSAMSQSLLKTTQEPLARDPVKLPTTAASTPDAVDKYLETPGDENEHAHFQKAKERLEAKHRERMSQVMREWEEAERQAKNLPKADKKAVIQHFQEKVESLEQEAANERQQLVETHMARVEAMLNDRRRLALENYITALQAVPPRPRHVFNMLKKYVRAEQKDRQHTLKHFEHVRMVDPKKAAQIRSQVMTHLRVIYERMNQSLSLLYNVPAVAEEIQDEVDELLQKEQNYSDDVLANMISEPRISYGNDALMPSLTETKTTVELLPVNGEFSLDDLQPWHSFGADSVPANTENEVEPVDARPAADRGLTTRPGSGLTNIKTEEISEVKMDAEFRHDSGYEVHHQKLVFFAEDVGSNKGAIIGLMVGGVVIATVIVITLVMLKKKQYTSIHHGVVEVDAAVTPEERHLSKMQQNGYENPTYKFFEQMQN

SEQ ID NO: 4510 - protein, 181 aa, Homo sapiens
  Payload ID: 1007;
  Gene Symbol: APP;
  Gene Name: amyloid beta (A4) precursor prt;
  ENSP ID: ENSP00000406539
  MOD_RES (1)..(1): Any amino acid
XGGADTDYADGSEDKVVEVAEEEEVAEVEEEEADDDEDDEDGDEVEEEAEEPYEEATERTTSIATTTTTTTESVEEVVRVSQSLLKTTQEPLARDPVKLPTTAASTPDAVDKYLETPGDENEHAHFQKAKERLEAKHRERMSQVMREWEEAERQAKNLPKADKKAVIQHFQEKVESLEQEA

SEQ ID NO: 4511 - protein, 837 aa, Homo sapiens
  Payload ID: 1008;
  Gene Symbol: APBA1;
  Gene Name: amyloid beta (A4) precursor prt-binding, family A, member 1;
  Uniprot ID:  Q02410;
  ENSP ID: ENSP00000265381
MNHLEGSAEVEVTDEAAGGEVNESVEADLEHPEVEEEQQQPPQQQHYVGRHQRGRALEDLRAQLGQEEEERGECLARSASTESGFHNHTDTAEGDVIAAARDGYDAERAQDPEDESAYAVQYRPEAEEYTEQAEAEHAEATHRRALPNHLHFHSLEHEEAMNAAYSGYVYTHRLFHRGEDEPYSEPYADYGGLQEHVYEEIGDAPELDARDGLRLYEQERDEAAAYRQEALGARLHHYDERSDGESDSPEKEAEFAPYPRMDSYEQEEDIDQIVAEVKQSMSSQSLDKAAEDMPEAEQDLERPPTPAGGRPDSPGLQAPAGQQRAVGPAGGGEAGQRYSKEKRDAISLAIKDIKEAIEEVKTRTIRSPYTPDEPKEPIWVMRQDISPTRDCDDQRPMDGDSPSPGSSSPLGAESSSTSLHPSDPVEASTNKESRKSLASFPTYVEVPGPCDPEDLIDGIIFAANYLGSTQLLSDKTPSKNVRMMQAQEAVSRIKMAQKLAKSRKKAPEGESQPMTEVDLFISTQRIKVLNADTQETMMDHPLRTISYIADIGNIVVLMARRRMPRSNSQENVEASHPSQDGKRQYKMICHVFESEDAQLIAQSIGQAFSVAYQEFLRANGINPEDLSQKEYSDLLNTQDMYNDDLIHFSKSENCKDVFIEKQKGEILGVVIVESGWGSILPTVIIANMMHGGPAEKSGKLNIGDQIMSINGTSLVGLPLSTCQSIIKGLKNQSRVKLNIVRCPPVTTVLIRRPDLRYQLGFSVQNGIICSLMRGGIAERGGVRVGHRIIEINGQSVVATPHEKIVHILSNAVGEIHMKTMPAAMYRLLTAQEQPVYI

SEQ ID NO: 4512 - protein, 437 aa, Homo sapiens
  Payload ID: 1008;
  Gene Symbol: APBA1;
  Gene Name: amyloid beta (A4) precursor prt-binding, family A, member 1;
  ENSP ID: ENSP00000479031
SPSPGSSSPLGAESSSTSLHPSDPVEASTNKESRKSLASFPTYVEVPGPCDPEDLIDGIIFAANYLGSTQLLSDKTPSKNVRMMQAQEAVSRIKMAQKLAKSRKKAPEGESQPMTEVDLFISTQRIKVLNADTQETMMDHPLRTISYIADIGNIVVLMARRRMPRSNSQENVEASHPSQDGKRQYKMICHVFESEDAQLIAQSIGQAFSVAYQEFLRANGINPEDLSQKEYSDLLNTQDMYNDDLIHFSKSENCKDVFIEKQKGEILGVVIVESGWGSILPTVIIANMMHGGPAEKSGKLNIGDQIMSINGTSLVGLPLSTCQSIIKGLKNQSRVKLNIVRCPPVTTVLIRRPDLRYQLGFSVQNGIICSLMRGGIAERGGVRVGHRIIEINGQSVVATPHEKIVHILSNAVGEIHMKTMPAAMYRLLTAQEQPVYI

SEQ ID NO: 4513 - protein, 122 aa, Homo sapiens
  Payload ID: 1008;
  Gene Symbol: APBA1;
  Gene Name: amyloid beta (A4) precursor prt-binding, family A, member 1;
  ENSP ID: ENSP00000486435
EDLIDGIIFAANYLGSTQLLSDKTPSKNVRMMQAQEAVSRIKAPEGESQPMTEVDLFISTQRIKVLNADTQETMMDHPLRTISYIADIGNIVVLMARRRMPRSNSQENVEASHPSQDGKRQY

SEQ ID NO: 4514 - protein, 122 aa, Homo sapiens; identical to SEQ ID NO: 4513
  Payload ID: 1008;
  Gene Symbol: APBA1;
  Gene Name: amyloid beta (A4) precursor prt-binding, family A, member 1;
  ENSP ID: ENSP00000486873

SEQ ID NO: 4515 - protein, 737 aa, Homo sapiens
  Payload ID: 1009;
  Gene Symbol: APBA2;
  Gene Name: amyloid beta (A4) precursor prt-binding, family A, member 2;
  Uniprot ID:  Q99767;
  ENSP ID: ENSP00000409312
MAHRKLESVGSGMLDHRVRPGPVPHSQEPESEDMELPLEGYVPEGLELAALRPESPAPEEQECHNHSPDGDSSSDYVNNTSEEEDYDEGLPEEEEGITYYIRYCPEDDSYLEGMDCNGEEYLAHSAHPVDTDECQEAVEEWTDSAGPHPHGHEAEGSQDYPDGQLPIPEDEPSVLEAHDQEEDGHYCASKEGYQDYYPEEANGNTGASPYRLRRGDGDLEDQEEDIDQIVAEIKMSLSMTSITSASEASPEHGPEPGPEDSVEACPPIKASCSPSRHEARPKSLNLLPEAKHPGDPQRGFKPKTRTPEERLKWPHEQVCNGLEQPRKQQRSDLNGPVDNNNIPETKKVASFPSFVAVPGPCEPEDLIDGIIFAANYLGSTQLLSERNPSKNIRMMQAQEAVSRVKNSEGDAQTLTEVDLFISTQRIKVLNADTQETMMDHALRTISYIADIGNIVVLMARRRMPRSASQDCIETTPGAQEGKKQYKMICHVFESEDAQLIAQSIGQAFSVAYQEFLRANGINPEDLSQKEYSDIINTQEMYNDDLIHFSNSENCKELQLEKHKGEILGVVVVESGWGSILPTVILANMMNGGPAARSGKLSIGDQIMSINGTSLVGLPLATCQGIIKGLKNQTQVKLNIVSCPPVTTVLIKRPDLKYQLGFSVQNGIICSLMRGGIAERGGVRVGHRIIEINGQSVVATAHEKIVQALSNSVGEIHMKTMPAAMFRLLTGQETPLYI

SEQ ID NO: 4516 - protein, 4 aa, Homo sapiens
  Payload ID: 1009;
  Gene Symbol: APBA2;
  Gene Name: amyloid beta (A4) precursor prt-binding, family A, member 2;
  ENSP ID: ENSP00000452699
MAHR

SEQ ID NO: 4517 - protein, 737 aa, Homo sapiens; identical to SEQ ID NO: 4515
  Payload ID: 1009;
  Gene Symbol: APBA2;
  Gene Name: amyloid beta (A4) precursor prt-binding, family A, member 2;
  Uniprot ID:  Q99767;
  ENSP ID: ENSP00000452722

SEQ ID NO: 4518 - protein, 112 aa, Homo sapiens
  Payload ID: 1009;
  Gene Symbol: APBA2;
  Gene Name: amyloid beta (A4) precursor prt-binding, family A, member 2;
  ENSP ID: ENSP00000453034
MAHRKLESVGSGMLDHRVRPGPVPHSQEPESEDMELPLEGYVPEGLELAALRPESPAPEEQECHNHSPDGDSSSDYVNNTSEEEDYDEGLPEEEEGITYYIRYCPEDDSYLE

SEQ ID NO: 4519 - protein, 749 aa, Homo sapiens
  Payload ID: 1009;
  Gene Symbol: APBA2;
  Gene Name: amyloid beta (A4) precursor prt-binding, family A, member 2;
  Uniprot ID:  Q99767;
  ENSP ID: ENSP00000453144
MAHRKLESVGSGMLDHRVRPGPVPHSQEPESEDMELPLEGYVPEGLELAALRPESPAPEEQECHNHSPDGDSSSDYVNNTSEEEDYDEGLPEEEEGITYYIRYCPEDDSYLEGMDCNGEEYLAHSAHPVDTDECQEAVEEWTDSAGPHPHGHEAEGSQDYPDGQLPIPEDEPSVLEAHDQEEDGHYCASKEGYQDYYPEEANGNTGASPYRLRRGDGDLEDQEEDIDQIVAEIKMSLSMTSITSASEASPEHGPEPGPEDSVEACPPIKASCSPSRHEARPKSLNLLPEAKHPGDPQRGFKPKTRTPEERLKWPHEQVCNGLEQPRKQQRSDLNGPVDNNNIPETKKVASFPSFVAVPGPCEPEDLIDGIIFAANYLGSTQLLSERNPSKNIRMMQAQEAVSRVKRMQKAAKIKKKANSEGDAQTLTEVDLFISTQRIKVLNADTQETMMDHALRTISYIADIGNIVVLMARRRMPRSASQDCIETTPGAQEGKKQYKMICHVFESEDAQLIAQSIGQAFSVAYQEFLRANGINPEDLSQKEYSDIINTQEMYNDDLIHFSNSENCKELQLEKHKGEILGVVVVESGWGSILPTVILANMMNGGPAARSGKLSIGDQIMSINGTSLVGLPLATCQGIIKGLKNQTQVKLNIVSCPPVTTVLIKRPDLKYQLGFSVQNGIICSLMRGGIAERGGVRVGHRIIEINGQSVVATAHEKIVQALSNSVGEIHMKTMPAAMFRLLTGQETPLYI

SEQ ID NO: 4520 - protein, 749 aa, Homo sapiens; identical to SEQ ID NO: 4519
  Payload ID: 1009;
  Gene Symbol: APBA2;
  Gene Name: amyloid beta (A4) precursor prt-binding, family A, member 2;
  Uniprot ID:  Q99767;
  ENSP ID: ENSP00000453293

SEQ ID NO: 4521 - protein, 263 aa, Homo sapiens
  Payload ID: 1009;
  Gene Symbol: APBA2;
  Gene Name: amyloid beta (A4) precursor prt-binding, family A, member 2;
  ENSP ID: ENSP00000453715
MAHRKLESVGSGMLDHRVRPGPVPHSQEPESEDMELPLEGYVPEGLELAALRPESPAPEEQECHNHSPDGDSSSDYVNNTSEEEDYDEGLPEEEEGITYYIRYCPEDDSYLEGMDCNGEEYLAHSAHPVDTDECQEAVEEWTDSAGPHPHGHEAEGSQDYPDGQLPIPEDEPSVLEAHDQEEDGHYCASKEGYQDYYPEEANGNTGASPYRLRRGDGDLEDQEEDIDQIVAEIKMSLSMTSITSASEASPEHGPEPGPEDSVE

SEQ ID NO: 4522 - protein, 27 aa, Homo sapiens
  Payload ID: 1009;
  Gene Symbol: APBA2;
  Gene Name: amyloid beta (A4) precursor prt-binding, family A, member 2;
  ENSP ID: ENSP00000453981
MAHRKLESVGSGMLDHRVRPGPVPHSQ

SEQ ID NO: 4523 - protein, 70 aa, Homo sapiens
  Payload ID: 1009;
  Gene Symbol: APBA2;
  Gene Name: amyloid beta (A4) precursor prt-binding, family A, member 2;
  ENSP ID: ENSP00000454001
MAHRKLESVGSGMLDHRVRPGPVPHSQEPESEDMELPLEGYVPEGLELAALRPESPAPEEQECHNHSPDG

SEQ ID NO: 4524 - protein, 749 aa, Homo sapiens; identical to SEQ ID NO: 4519
  Payload ID: 1009;
  Gene Symbol: APBA2;
  Gene Name: amyloid beta (A4) precursor prt-binding, family A, member 2;
  Uniprot ID:  Q99767;
  ENSP ID: ENSP00000454171

SEQ ID NO: 4525 - protein, 749 aa, Homo sapiens; identical to SEQ ID NO: 4519
  Payload ID: 1009;
  Gene Symbol: APBA2;
  Gene Name: amyloid beta (A4) precursor prt-binding, family A, member 2;
  Uniprot ID:  Q99767;
  ENSP ID: ENSP00000480384

SEQ ID NO: 4526 - protein, 737 aa, Homo sapiens; identical to SEQ ID NO: 4515
  Payload ID: 1009;
  Gene Symbol: APBA2;
  Gene Name: amyloid beta (A4) precursor prt-binding, family A, member 2;
  Uniprot ID:  Q99767;
  ENSP ID: ENSP00000483174

SEQ ID NO: 4527 - protein, 263 aa, Homo sapiens; identical to SEQ ID NO: 4521
  Payload ID: 1009;
  Gene Symbol: APBA2;
  Gene Name: amyloid beta (A4) precursor prt-binding, family A, member 2;
  ENSP ID: ENSP00000487880

SEQ ID NO: 4528 - protein, 27 aa, Homo sapiens
  Payload ID: 1009;
  Gene Symbol: APBA2;
  Gene Name: amyloid beta (A4) precursor prt-binding, family A, member 2;
  ENSP ID: ENSP00000488031
MAHRKLESVGSGMLDHRVRPGPVPHSQ

SEQ ID NO: 4529 - protein, 749 aa, Homo sapiens; identical to SEQ ID NO: 4519
  Payload ID: 1009;
  Gene Symbol: APBA2;
  Gene Name: amyloid beta (A4) precursor prt-binding, family A, member 2;
  Uniprot ID:  Q99767;
  ENSP ID: ENSP00000488107

SEQ ID NO: 4530 - protein, 4 aa, Homo sapiens
  Payload ID: 1009;
  Gene Symbol: APBA2;
  Gene Name: amyloid beta (A4) precursor prt-binding, family A, member 2;
  ENSP ID: ENSP00000488322
MAHR

SEQ ID NO: 4531 - protein, 112 aa, Homo sapiens; identical to SEQ ID NO: 4518
  Payload ID: 1009;
  Gene Symbol: APBA2;
  Gene Name: amyloid beta (A4) precursor prt-binding, family A, member 2;
  ENSP ID: ENSP00000488620

SEQ ID NO: 4532 - protein, 70 aa, Homo sapiens; identical to SEQ ID NO: 4523
  Payload ID: 1009;
  Gene Symbol: APBA2;
  Gene Name: amyloid beta (A4) precursor prt-binding, family A, member 2;
  ENSP ID: ENSP00000488632

SEQ ID NO: 4533 - protein, 575 aa, Homo sapiens
  Payload ID: 1010;
  Gene Symbol: APBA3;
  Gene Name: amyloid beta (A4) precursor prt-binding, family A, member 3;
  Uniprot ID:  O96018;
  ENSP ID: ENSP00000315136
MDFPTISRSPSGPPAMDLEGPRDILVPSEDLTPDSQWDPMPGGPGSLSRMELDESSLQELVQQFEALPGDLVGPSPGGAPCPLHIATGHGLASQEIADAHGLLSAEAGRDDLLGLLHCEECPPSQTGPEEPLEPAPRLLQPPEDPDEDSDSPEWVEGASAEQEGSRSSSSSPEPWLETVPLVTPEEPPAGAQSPETLASYPAPQEVPGPCDHEDLLDGVIFGARYLGSTQLVSERNPPTSTRMAQAREAMDRVKAPDGETQPMTEVDLFVSTKRIKVLTADSQEAMMDHALHTISYTADIGCVLVLMARRRLARRPAPQDHGRRLYKMLCHVFYAEDAQLIAQAIGQAFAAAYSQFLRESGIDPSQVGVHPSPGACHLHNGDLDHFSNSDNCREVHLEKRRGEGLGVALVESGWGSLLPTAVIANLLHGGPAERSGALSIGDRLTAINGTSLVGLPLAACQAAVRETKSQTSVTLSIVHCPPVTTAIIHRPHAREQLGFCVEDGIICSLLRGGIAERGGIRVGHRIIEINGQSVVATPHARIIELLTEAYGEVHIKTMPAATYRLLTGQEQPVYL

SEQ ID NO: 4534 - protein, 708 aa, Homo sapiens
  Payload ID: 1011;
  Gene Symbol: APBB1;
  Gene Name: amyloid beta (A4) precursor prt-binding, family B, member 1 (Fe65);
  Uniprot ID:  O00213;
  ENSP ID: ENSP00000299402
MSVPSSLSQSAINANSHGGPALSLPLPLHAAHNQLLNAKLQATAVGPKDLRSAMGEGGGPEPGPANAKWLKEGQNQLRRAATAHRDQNRNVTLTLAEEASQEPEMAPLGPKGLIHLYSELELSAHNAANRGLRGPGLIISTQEQGPDEGEEKAAGEAEEEEEDDDDEEEEEDLSSPPGLPEPLESVEAPPRPQALTDGPREHSKSASLLFGMRNSAASDEDSSWATLSQGSPSYGSPEDTDSFWNPNAFETDSDLPAGWMRVQDTSGTYYWHIPTGTTQWEPPGRASPSQGSSPQEESQLTWTGFAHGEGFEDGEFWKDEPSDEAPMELGLKEPEEGTLTFPAQSLSPEPLPQEEEKLPPRNTNPGIKCFAVRSLGWVEMTEEELAPGRSSVAVNNCIRQLSYHKNNLHDPMSGGWGEGKDLLLQLEDETLKLVEPQSQALLHAQPIISIRVWGVGRDSGRDFAYVARDKLTQMLKCHVFRCEAPAKNIATSLHEICSKIMAERRNARCLVNGLSLDHSKLVDVPFQVEFPAPKNELVQKFQVYYLGNVPVAKPVGVDVINGALESVLSSSSREQWTPSHVSVAPATLTILHQQTEAVLGECRVRFLSFLAVGRDVHTFAFIMAAGPASFCCHMFWCEPNAASLSEAVQAACMLRYQKCLDARSQASTSCLPAPPAESVARRVGWTVRRGVQSLWGSLKPKRLGAHTP

SEQ ID NO: 4535 - protein, 708 aa, Homo sapiens; identical to SEQ ID NO: 4534
  Payload ID: 1011;
  Gene Symbol: APBB1;
  Gene Name: amyloid beta (A4) precursor prt-binding, family B, member 1 (Fe65);
  Uniprot ID:  O00213;
  ENSP ID: ENSP00000311912

SEQ ID NO: 4536 - protein, 710 aa, Homo sapiens [sequence omitted]

SEQ ID NO: 4537 - protein, 488 aa, Homo sapiens
  Payload ID: 1011;
  Gene Symbol: APBB1;
  Gene Name: amyloid beta (A4) precursor prt-binding, family B, member 1 (Fe65);
  Uniprot ID:  O00213;
  ENSP ID: ENSP00000433338
MSAMFSQDFFLAIILQDSSADSFWNPNAFETDSDLPAGWMRVQDTSGTYYWHIPTGTTQWEPPGRASPSQGSSPQEESQLTWTGFAHGEGFEDGEFWKDEPSDEAPMELGLKEPEEGTLTFPAQSLSPEPLPQEEEKLPPRNTNPGIKCFAVRSLGWVEMTEEELAPGRSSVAVNNCIRQLSYHKNNLHDPMSGGWGEGKDLLLQLEDETLKLVEPQSQALLHAQPIISIRVWGVGRDSGRDFAYVARDKLTQMLKCHVFRCEAPAKNIATSLHEICSKIMAERRNARCLVNGLSLDHSKLVDVPFQVEFPAPKNELVQKFQVYYLGNVPVAKPVGVDVINGALESVLSSSSREQWTPSHVSVAPATLTILHQQTEAVLGECRVRFLSFLAVGRDVHTFAFIMAAGPASFCCHMFWCEPNAASLSEAVQAACMLRYQKCLDARSQASTSCLPAPPAESVARRVGWTVRRGVQSLWGSLKPKRLGAHTP

SEQ ID NO: 4538 - protein, 451 aa, Homo sapiens
  Payload ID: 1011;
  Gene Symbol: APBB1;
  Gene Name: amyloid beta (A4) precursor prt-binding, family B, member 1 (Fe65);
  Uniprot ID:  O00213;
  ENSP ID: ENSP00000476442
MRVQDTSGTYYWHIPTGTTQWEPPGRASPSQGSSPQEESQLTWTGFAHGEGFEDGEFWKDEPSDEAPMELGLKEPEEGTLTFPAQSLSPEPLPQEEEKLPPRNTNPGIKCFAVRSLGWVEMTEEELAPGRSSVAVNNCIRQLSYHKNNLHDPMSGGWGEGKDLLLQLEDETLKLVEPQSQALLHAQPIISIRVWGVGRDSGRERDFAYVARDKLTQMLKCHVFRCEAPAKNIATSLHEICSKIMAERRNARCLVNGLSLDHSKLVDVPFQVEFPAPKNELVQKFQVYYLGNVPVAKPVGVDVINGALESVLSSSSREQWTPSHVSVAPATLTILHQQTEAVLGECRVRFLSFLAVGRDVHTFAFIMAAGPASFCCHMFWCEPNAASLSEAVQAACMLRYQKCLDARSQASTSCLPAPPAESVARRVGWTVRRGVQSLWGSLKPKRLGAHTP

SEQ ID NO: 4539 - protein, 261 aa, Homo sapiens
  Payload ID: 1011;
  Gene Symbol: APBB1;
  Gene Name: amyloid beta (A4) precursor prt-binding, family B, member 1 (Fe65);
  ENSP ID: ENSP00000476536
MRVQDTSGTYYWHIPTGTTQWEPPGRASPSQGSSPQEESQLTWTGFAHGEGFEDGEFWKDEPSDEAPMELGLKEPEEGTLTFPAQSLSPEPLPQEEEKLPPRNTNPGIKCFAVRSLGWVEMTEEELAPGRSSVAVNNCIRQLSYHKNNLHDPMSGGWGEGKDLLLQLEDETLKLVEPQSQALLHAQPIISIRVWGVGRDSGRDFAYVARDKLTQMLKCHVFRCEAPAKNIATSLHEICSKIMAERRNARCLVNGLSLDHSK

SEQ ID NO: 4540 - protein, 451 aa, Homo sapiens; identical to SEQ ID NO: 4538
  Payload ID: 1011;
  Gene Symbol: APBB1;
  Gene Name: amyloid beta (A4) precursor prt-binding, family B, member 1 (Fe65);
  Uniprot ID:  O00213;
  ENSP ID: ENSP00000476646

SEQ ID NO: 4541 - protein, 87 aa, Homo sapiens
  Payload ID: 1011;
  Gene Symbol: APBB1;
  Gene Name: amyloid beta (A4) precursor prt-binding, family B, member 1 (Fe65);
  ENSP ID: ENSP00000476647
MRVQDTSGTYYWHIPTGTTQWEPPGRASPSQGSSPQEESQLTWTGFAHGEGFEDGEFWKDEPSDEAPMELGLKEPEEGTLTFPAQSL

SEQ ID NO: 4542 - protein, 706 aa, Homo sapiens
  Payload ID: 1011;
  Gene Symbol: APBB1;
  Gene Name: amyloid beta (A4) precursor prt-binding, family B, member 1 (Fe65);
  ENSP ID: ENSP00000476776
MSVPSSLSQSAINANSHGGPALSLPLPLHAAHNQLLNAKLQATAVGPKDLRSAMGEGGGPEPGPANAKWLKEGQNQLRRAATAHRDQNRNVTLTLAEEASQEPEMAPLGPKGLIHLYSELELSAHNAANRGLRGPGLIISTQEQGPDEGEEKAAGEAEEEEEDDDDEEEEEDLSSPPGLPEPLESVEAPPRPQALTDGPREHSKSASLLFGMRNSAASDEDSSWATLSQGSPSYGSPEDTDSFWNPNAFETDSDLPAGWMRVQDTSGTYYWHIPTGTTQWEPPGRASPSQGSSPQEESQLTWTGFAHGEGFEDGEFWKDEPSDEAPMELGLKEPEEGTLTFPAQSLSPEPLPQEEEKLPPRNTNPGIKCFAVRSLGWVEMTEEELAPGRSSVAVNNCIRQLSYHKNNLHDPMSGGWGEGKDLLLQLEDETLKLVEPQSQALLHAQPIISIRVWGVGRDSGRERDFAYVARDKLTQMLKCHVFRCEAPAKNIATSLHEICSKIMAERRNARCLVNGLSLDHSKLVDVPFQVEFPAPKNELVQKFQVYYLGNVPVAKPVGVDVINGALESVLSSSSREQWTPSHVSVAPATLTILHQQTEAVLGECRVRFLSFLAVGRDVHTFAFIMAAGPASFCCHMFWCEPNAASLSEAVQAACMVEQEELVQARPHPPGPSRGRRRKGLVQAWVPSPCSMGTSAVLISLIKSVCT

SEQ ID NO: 4543 - protein, 490 aa, Homo sapiens
  Payload ID: 1011;
  Gene Symbol: APBB1;
  Gene Name: amyloid beta (A4) precursor prt-binding, family B, member 1 (Fe65);
  Uniprot ID:  O00213;
  ENSP ID: ENSP00000476846
MSAMFSQDFFLAIILQDSSADSFWNPNAFETDSDLPAGWMRVQDTSGTYYWHIPTGTTQWEPPGRASPSQGSSPQEESQLTWTGFAHGEGFEDGEFWKDEPSDEAPMELGLKEPEEGTLTFPAQSLSPEPLPQEEEKLPPRNTNPGIKCFAVRSLGWVEMTEEELAPGRSSVAVNNCIRQLSYHKNNLHDPMSGGWGEGKDLLLQLEDETLKLVEPQSQALLHAQPIISIRVWGVGRDSGRERDFAYVARDKLTQMLKCHVFRCEAPAKNIATSLHEICSKIMAERRNARCLVNGLSLDHSKLVDVPFQVEFPAPKNELVQKFQVYYLGNVPVAKPVGVDVINGALESVLSSSSREQWTPSHVSVAPATLTILHQQTEAVLGECRVRFLSFLAVGRDVHTFAFIMAAGPASFCCHMFWCEPNAASLSEAVQAACMLRYQKCLDARSQASTSCLPAPPAESVARRVGWTVRRGVQSLWGSLKPKRLGAHTP

SEQ ID NO: 4544 - protein, 451 aa, Homo sapiens; identical to SEQ ID NO: 4538
  Payload ID: 1011;
  Gene Symbol: APBB1;
  Gene Name: amyloid beta (A4) precursor prt-binding, family B, member 1 (Fe65);
  Uniprot ID:  O00213;
  ENSP ID: ENSP00000476871

SEQ ID NO: 4545 - protein, 235 aa, Homo sapiens
  Payload ID: 1011;
  Gene Symbol: APBB1;
  Gene Name: amyloid beta (A4) precursor prt-binding, family B, member 1 (Fe65);
  ENSP ID: ENSP00000477022
MLKCHVFRCEAPAKNIATSLHEICSKIMAERRNARCLVNGLSLDHSKLVDVPFQVEFPAPKNELVQKFQVYYLGNVPVAKPVGVDVINGALESVLSSSSREQWTPSHVSVAPATLTILHQQTEAVLGECRVRFLSFLAVGRDVHTFAFIMAAGPASFCCHMFWCEPNAASLSEAVQAACMLRYQKCLDARSQASTSCLPAPPAESVARRVGWTVRRGVQSLWGSLKPKRLGAHTP

SEQ ID NO: 4546 - protein, 475 aa, Homo sapiens
  Payload ID: 1011;
  Gene Symbol: APBB1;
  Gene Name: amyloid beta (A4) precursor prt-binding, family B, member 1 (Fe65);
  Uniprot ID:  O00213;
  ENSP ID: ENSP00000477069
MTQMRDSFWNPNAFETDSDLPAGWMRVQDTSGTYYWHIPTGTTQWEPPGRASPSQGSSPQEESQLTWTGFAHGEGFEDGEFWKDEPSDEAPMELGLKEPEEGTLTFPAQSLSPEPLPQEEEKLPPRNTNPGIKCFAVRSLGWVEMTEEELAPGRSSVAVNNCIRQLSYHKNNLHDPMSGGWGEGKDLLLQLEDETLKLVEPQSQALLHAQPIISIRVWGVGRDSGRERDFAYVARDKLTQMLKCHVFRCEAPAKNIATSLHEICSKIMAERRNARCLVNGLSLDHSKLVDVPFQVEFPAPKNELVQKFQVYYLGNVPVAKPVGVDVINGALESVLSSSSREQWTPSHVSVAPATLTILHQQTEAVLGECRVRFLSFLAVGRDVHTFAFIMAAGPASFCCHMFWCEPNAASLSEAVQAACMLRYQKCLDARSQASTSCLPAPPAESVARRVGWTVRRGVQSLWGSLKPKRLGAHTP

SEQ ID NO: 4547 - protein, 710 aa, Homo sapiens
  Payload ID: 1011;
  Gene Symbol: APBB1;
  Gene Name: amyloid beta (A4) precursor prt-binding, family B, member 1 (Fe65);
  Uniprot ID:  O00213;
  ENSP ID: ENSP00000477213
MSVPSSLSQSAINANSHGGPALSLPLPLHAAHNQLLNAKLQATAVGPKDLRSAMGEGGGPEPGPANAKWLKEGQNQLRRAATAHRDQNRNVTLTLAEEASQEPEMAPLGPKGLIHLYSELELSAHNAANRGLRGPGLIISTQEQGPDEGEEKAAGEAEEEEEDDDDEEEEEDLSSPPGLPEPLESVEAPPRPQALTDGPREHSKSASLLFGMRNSAASDEDSSWATLSQGSPSYGSPEDTDSFWNPNAFETDSDLPAGWMRVQDTSGTYYWHIPTGTTQWEPPGRASPSQGSSPQEESQLTWTGFAHGEGFEDGEFWKDEPSDEAPMELGLKEPEEGTLTFPAQSLSPEPLPQEEEKLPPRNTNPGIKCFAVRSLGWVEMTEEELAPGRSSVAVNNCIRQLSYHKNNLHDPMSGGWGEGKDLLLQLEDETLKLVEPQSQALLHAQPIISIRVWGVGRDSGRERDFAYVARDKLTQMLKCHVFRCEAPAKNIATSLHEICSKIMAERRNARCLVNGLSLDHSKLVDVPFQVEFPAPKNELVQKFQVYYLGNVPVAKPVGVDVINGALESVLSSSSREQWTPSHVSVAPATLTILHQQTEAVLGECRVRFLSFLAVGRDVHTFAFIMAAGPASFCCHMFWCEPNAASLSEAVQAACMLRYQKCLDARSQASTSCLPAPPAESVARRVGWTVRRGVQSLWGSLKPKRLGAHTP

SEQ ID NO: 4548 - protein, 475 aa, Homo sapiens [sequence omitted]

SEQ ID NO: 4549 - protein, 451 aa, Homo sapiens [sequence omitted]

SEQ ID NO: 4550 - protein, 451 aa, Homo sapiens [sequence omitted]

SEQ ID NO: 4551 - protein, 172 aa, Homo sapiens
  Payload ID: 1012;
  Gene Symbol: APBB1IP;
  Gene Name: amyloid beta (A4) precursor prt-binding, family B, member 1 interacting prt;
  Uniprot ID:  Q7Z5R6;
  ENSP ID: ENSP00000349237
MGESSEDIDQMFSTLLGEMDLLTQSLGVDTLPPPDPNPPRAEFNYSVGFKDLNESLNALEDQDLDALMADLVADISEAEQRTIQAQKESLQNQHHSASLQASIFSGAASLGYGTNVAATGISQYEDDLPPPPADPVLDLPLPPPPPEPLSQVSMWDQRWQDHQPLLPITDVP

SEQ ID NO: 4552 - protein, 666 aa, Homo sapiens
  Payload ID: 1012;
  Gene Symbol: APBB1IP;
  Gene Name: amyloid beta (A4) precursor prt-binding, family B, member 1 interacting prt;
  Uniprot ID:  Q7Z5R6;
  ENSP ID: ENSP00000365411
MGESSEDIDQMFSTLLGEMDLLTQSLGVDTLPPPDPNPPRAEFNYSVGFKDLNESLNALEDQDLDALMADLVADISEAEQRTIQAQKESLQNQHHSASLQASIFSGAASLGYGTNVAATGISQYEDDLPPPPADPVLDLPLPPPPPEPLSQEEEEAQAKADKIKLALEKLKEAKVKKLVVKVHMNDNSTKSLMVDERQLARDVLDNLFEKTHCDCNVDWCLYEIYPELQIERFFEDHENVVEVLSDWTRDTENKILFLEKEEKYAVFKNPQNFYLDNRGKKESKETNEKMNAKNKESLLEESFCGTSIIVPELEGALYLKEDGKKSWKRRYFLLRASGIYYVPKGKTKTSRDLACFIQFENVNIYYGTQHKMKYKAPTDYCFVLKHPQIQKESQYIKYLCCDDTRTLNQWVMGIRIAKYGKTLYDNYQRAVAKAGLASRWTNLGTVNAAAPAQPSTGPKTGTTQPNGQIPQATHSVSAVLQEAQRHAETSKDKKPALGNHHDPAVPRAPHAPKSSLPPPPPVRRSSDTSGSPATPLKAKGTGGGGLPAPPDDFLPPPPPPPPLDDPELPPPPPDFMEPPPDFVPPPPPSYAGIAGSELPPPPPPPPAPAPAPVPDSARPPPAVAKRPPVPPKRQENPGHPGGAGGGEQDFMSDLMKALQKKRGNVS

SEQ ID NO: 4553 - protein, 758 aa, Homo sapiens
  Payload ID: 1013;
  Gene Symbol: APBB2;
  Gene Name: amyloid beta (A4) precursor prt-binding, family B, member 2;
  Uniprot ID:  Q92870;
  ENSP ID: ENSP00000295974
MSEVLPADSGVDTLAVFMASSGTTDVTNRNSPATPPNTLNLRSSHNELLNAEIKHTETKNSTPPKCRKKYALTNIQAAMGLSDPAAQPLLGNGSANIKLVKNGENQLRKAAEQGQQDPNKNLSPTAVINITSEKLEGKEPHPQDSSSCEILPSQPRRTKSFLNYYADLETSARELEQNRGNHHGTAEEKSQPVQGQASTIIGNGDLLLQKPNRPQSSPEDGQVATVSSSPETKKDHPKTGAKTDCALHRIQNLAPSDEESSWTTLSQDSASPSSPDETDIWSDHSFQTDPDLPPGWKRVSDIAGTYYWHIPTGTTQWERPVSIPADLQGSRKGSLSSVTPSPTPENEKQPWSDFAVLNGGKINSDIWKDLHAATVNPDPSLKEFEGATLRYASLKLRNAPHPDDDDSCSINSDPEAKCFAVRSLGWVEMAEEDLAPGKSSVAVNNCIRQLSYCKNDIRDTVGIWGEGKDMYLILENDMLSLVDPMDRSVLHSQPIVSIRVWGVGRDNGRDFAYVARDKDTRILKCHVFRCDTPAKAIATSLHEICSKIMAERKNAKALACSSLQERANVNLDVPLQVDFPTPKTELVQKFHVQYLGMLPVDKPVGMDILNSAIENLMTSSNKEDWLSVNMNVADATVTVISEKNEEEVLVECRVRFLSFMGVGKDVHTFAFIMDTGNQRFECHVFWCEPNAGNVSEAVQAACMLRYQKCLVARPPSQKVRPPPPPADSVTRRVTTNVKRGVLSLIDTLKQKRPVTEMP

SEQ ID NO: 4554 - protein, 10 aa, Homo sapiens
  Payload ID: 1013;
  Gene Symbol: APBB2;
  Gene Name: amyloid beta (A4) precursor prt-binding, family B, member 2;
  ENSP ID: ENSP00000421205
MSEVLPADSG

SEQ ID NO: 4555 - protein, 87 aa, Homo sapiens
  Payload ID: 1013;
  Gene Symbol: APBB2;
  Gene Name: amyloid beta (A4) precursor prt-binding, family B, member 2;
  ENSP ID: ENSP00000421301
MAERKNAKALACSSLQERANVNLDVPLQVDFPTPKTELVQKFHVQYLGMLPVDKPVGMDILNSAIENLMTSSNKEDWLSVNMNVADA

SEQ ID NO: 4556 - protein, 737 aa, Homo sapiens
  Payload ID: 1013;
  Gene Symbol: APBB2;
  Gene Name: amyloid beta (A4) precursor prt-binding, family B, member 2;
  ENSP ID: ENSP00000421539
MSEVLPADSGVDTLAVFMASSGTTDVTNRNSPATPPNTLNLRSSHNELLNAEIKHTETKNSTPPKCRKKYALTNIQAAMGLSDPAAQPLLGNGSANIKLVKNGENQLRKAAEQGQQDPNKNLSPTAVINITSEKLEGKEPHPQDSSSCEILPSQPRRTKSFLNYYADLETSARELEQNRGNHHGTAEEKSQPVQGQASTIIGNGDLLLQKPNRPQSSPEDGQVATVSSSPETKKDHPKTGAKTDCALHRIQNLAPSDEESSWTTLSQDSASPSSPDETDIWSDHSFQTDPDLPPGWKRVSDIAGTYYWHIPTGTTQWERPVSIPADLQGSRKGSLSSVTPSPTPENEDLHAATVNPDPSLKEFEGATLRYASLKLRNAPHPDDDDSCSINSDPEAKCFAVRSLGWVEMAEEDLAPGKSSVAVNNCIRQLSYCKNDIRDTVGIWGEGKDMYLILENDMLSLVDPMDRSVLHSQPIVSIRVWGVGRDNGRDFAYVARDKDTRILKCHVFRCDTPAKAIATSLHEICSKIMAERKNAKALACSSLQERANVNLDVPLQVDFPTPKTELVQKFHVQYLGMLPVDKPVGMDILNSAIENLMTSSNKEDWLSVNMNVADATVTVISEKNEEEVLVECRVRFLSFMGVGKDVHTFAFIMDTGNQRFECHVFWCEPNAGNVSEAVQAACMLRYQKCLVARPPSQKVRPPPPPADSVTRRVTTNVKRGVLSLIDTLKQKRPVTEMP

SEQ ID NO: 4557 - protein, 95 aa, Homo sapiens
  Payload ID: 1013;
  Gene Symbol: APBB2;
  Gene Name: amyloid beta (A4) precursor prt-binding, family B, member 2;
  ENSP ID: ENSP00000421751
MAERKNAKALACSSLQERANVNLDVPLQVDFPTPKTELVQKFHVQYLGMLPVDKPVGMDILNSAIENLMTSSNKEDWLSVNMNVADATVTVISEK

SEQ ID NO: 4558 - protein, 27 aa, Homo sapiens
  Payload ID: 1013;
  Gene Symbol: APBB2;
  Gene Name: amyloid beta (A4) precursor prt-binding, family B, member 2;
  ENSP ID: ENSP00000422723
MSEVLPADSGVDTLAVFMASSGTTDVT

SEQ ID NO: 4559 - protein, 41 aa, Homo sapiens
  Payload ID: 1013;
  Gene Symbol: APBB2;
  Gene Name: amyloid beta (A4) precursor prt-binding, family B, member 2;
  ENSP ID: ENSP00000422948
  MOD_RES (1)..(1): Any amino acid
XDTPAKAIATSLHEICSKVRLWLNGRMPKRWPAAPYRKGPM

SEQ ID NO: 4560 - protein, 210 aa, Homo sapiens
  Payload ID: 1013;
  Gene Symbol: APBB2;
  Gene Name: amyloid beta (A4) precursor prt-binding, family B, member 2;
  Uniprot ID:  Q92870;
  ENSP ID: ENSP00000423765
MAERKNAKALACSSLQERANVNLDVPLQVDFPTPKTELVQKFHVQYLGMLPVDKPVGMDILNSAIENLMTSSNKEDWLSVNMNVADATVTVISEKNEEEVLVECRVRFLSFMGVGKDVHTFAFIMDTGNQRFECHVFWCEPNAGNVSEAVQAACMLRYQKCLVARPPSQKVRPPPPPADSVTRRVTTNVKRGVLSLIDTLKQKRPVTEMP

SEQ ID NO: 4561 - protein, 140 aa, Homo sapiens
  Payload ID: 1013;
  Gene Symbol: APBB2;
  Gene Name: amyloid beta (A4) precursor prt-binding, family B, member 2;
  ENSP ID: ENSP00000424414
MASSGTTDVTNRNSPATPPNTLNLRSSHNELLNAEIKHTETKNSTPPKCRKKYALTNIQAAMGLSDPAAQPLLGNGSANIKLVKNGENQLRKAAEQGQQDPNKNLSPTAVINITSEKLEGKEPHPQDSSSCEILPSQPRR

SEQ ID NO: 4562 - protein, 68 aa, Homo sapiens
  Payload ID: 1013;
  Gene Symbol: APBB2;
  Gene Name: amyloid beta (A4) precursor prt-binding, family B, member 2;
  ENSP ID: ENSP00000424579
MSEVLPADSGVDTLAVFMASSGTTDVTNRNSPATPPNTLNLRSSHNELLNAEIKHTETKNSTPPKCRK

SEQ ID NO: 4563 - protein, 142 aa, Homo sapiens
  Payload ID: 1013;
  Gene Symbol: APBB2;
  Gene Name: amyloid beta (A4) precursor prt-binding, family B, member 2;
  ENSP ID: ENSP00000425121
  MOD_RES (1)..(1): Any amino acid
XGEGKDMYLILENDMLSLVDPMDRSVLHSQPIVSIRVWGVGRDNGRERDFAYVARDKDTRILKCHVFRCDTPAKAIATSLHEICSKIMAERKNAKALACSSLQERANVNLDVPLQDFPTPKTELVQKFHVQYLGMLPVDKPV

SEQ ID NO: 4564 - protein, 26 aa, Homo sapiens
  Payload ID: 1013;
  Gene Symbol: APBB2;
  Gene Name: amyloid beta (A4) precursor prt-binding, family B, member 2;
  ENSP ID: ENSP00000425202
MASSGTTDVTNRNSPATPPNTLNLRS

SEQ ID NO: 4565 - protein, 210 aa, Homo sapiens; identical to SEQ ID NO: 4560
  Payload ID: 1013;
  Gene Symbol: APBB2;
  Gene Name: amyloid beta (A4) precursor prt-binding, family B, member 2;
  Uniprot ID:  Q92870;
  ENSP ID: ENSP00000425802

SEQ ID NO: 4566 - protein, 736 aa, Homo sapiens
  Payload ID: 1013;
  Gene Symbol: APBB2;
  Gene Name: amyloid beta (A4) precursor prt-binding, family B, member 2;
  Uniprot ID:  Q92870;
  ENSP ID: ENSP00000426018
MSEVLPADSGVDTLAVFMASSGTTDVTNRNSPATPPNTLNLRSSHNELLNAEIKHTETKNSTPPKCRKKYALTNIQAAMGLSDPAAQPLLGNGSANIKLVKNGENQLRKAAEQGQQDPNKNLSPTAVINITSEKLEGKEPHPQDSSSCEILPSQPRRTKSFLNYYADLETSARELEQNRGNHHGTAEEKSQPVQGQASTIIGNGDLLLQKPNRPQSSPEDGQVATVSSSPETKKDHPKTGAKTDCALHRIQNLAPSDEESSWTTLSQDSASPSSPDETDIWSDHSFQTDPDLPPGWKRVSDIAGTYYWHIPTGTTQWERPVSIPADLQGSRKGSLSSVTPSPTPENEDLHAATVNPDPSLKEFEGATLRYASLKLRNAPHPDDDDSCSINSDPEAKCFAVRSLGWVEMAEEDLAPGKSSVAVNNCIRQLSYCKNDIRDTVGIWGEGKDMYLILENDMLSLVDPMDRSVLHSQPIVSIRVWGVGRDNGRDFAYVARDKDTRILKCHVFRCDTPAKAIATSLHEICSKIMAERKNAKALACSSLQERANVNLDVPLQDFPTPKTELVQKFHVQYLGMLPVDKPVGMDILNSAIENLMTSSNKEDWLSVNMNVADATVTVISEKNEEEVLVECRVRFLSFMGVGKDVHTFAFIMDTGNQRFECHVFWCEPNAGNVSEAVQAACMLRYQKCLVARPPSQKVRPPPPPADSVTRRVTTNVKRGVLSLIDTLKQKRPVTEMP

SEQ ID NO: 4567 - protein, 179 aa, Homo sapiens
  Payload ID: 1013;
  Gene Symbol: APBB2;
  Gene Name: amyloid beta (A4) precursor prt-binding, family B, member 2;
  ENSP ID: ENSP00000426429
VLHSQPIVSIRVWGVGRDNGRERDFAYVARDKDTRILKCHVFRCDTPAKAIATSLHEICSKIMAERKNAKALACSSLQERANVNLDVPLQVDFPTPKTELVQKFHVQYLGMLPVDKPVGMDILNSAIENLMTSSNKEDWLSVNMNVADATVTVISEKNEEEVLVECRVRFLSFMGVGKD

SEQ ID NO: 4568 - protein, 102 aa, Homo sapiens
  Payload ID: 1013;
  Gene Symbol: APBB2;
  Gene Name: amyloid beta (A4) precursor prt-binding, family B, member 2;
  ENSP ID: ENSP00000427107
MAERKNAKALACSSLQERANVNLDVPLQVDFPTPKTELVQKFHVQYLGMLPVDKPVGMDILNSAIENLMTSSNKEDWLSVNMNVADATVTVISEKNEEEVLV

SEQ ID NO: 4569 - protein, 759 aa, Homo sapiens
  Payload ID: 1013;
  Gene Symbol: APBB2;
  Gene Name: amyloid beta (A4) precursor prt-binding, family B, member 2;
  Uniprot ID:  Q92870;
  ENSP ID: ENSP00000427211
MSEVLPADSGVDTLAVFMASSGTTDVTNRNSPATPPNTLNLRSSHNELLNAEIKHTETKNSTPPKCRKKYALTNIQAAMGLSDPAAQPLLGNGSANIKLVKNGENQLRKAAEQGQQDPNKNLSPTAVINITSEKLEGKEPHPQDSSSCEILPSQPRRTKSFLNYYADLETSARELEQNRGNHHGTAEEKSQPVQGQASTIIGNGDLLLQKPNRPQSSPEDGQVATVSSSPETKKDHPKTGAKTDCALHRIQNLAPSDEESSWTTLSQDSASPSSPDETADIWSDHSFQTDPDLPPGWKRVSDIAGTYYWHIPTGTTQWERPVSIPADLQGSRKGSLSSVTPSPTPENEKQPWSDFAVLNGGKINSDIWKDLHAATVNPDPSLKEFEGATLRYASLKLRNAPHPDDDDSCSINSDPEAKCFAVRSLGWVEMAEEDLAPGKSSVAVNNCIRQLSYCKNDIRDTVGIWGEGKDMYLILENDMLSLVDPMDRSVLHSQPIVSIRVWGVGRDNGRDFAYVARDKDTRILKCHVFRCDTPAKAIATSLHEICSKIMAERKNAKALACSSLQERANVNLDVPLQVDFPTPKTELVQKFHVQYLGMLPVDKPVGMDILNSAIENLMTSSNKEDWLSVNMNVADATVTVISEKNEEEVLVECRVRFLSFMGVGKDVHTFAFIMDTGNQRFECHVFWCEPNAGNVSEAVQAACMLRYQKCLVARPPSQKVRPPPPPADSVTRRVTTNVKRGVLSLIDTLKQKRPVTEMP

SEQ ID NO: 4570 - protein, 728 aa, Homo sapiens
  Payload ID: 1013;
  Gene Symbol: APBB2;
  Gene Name: amyloid beta (A4) precursor prt-binding, family B, member 2;
  ENSP ID: ENSP00000427307
  MOD_RES (1)..(1): Any amino acid
XDTLAVFMASSGTTDVTNRNSPATPPNTLNLRSSHNELLNAEIKHTETKNSTPPKCRKKYALTNIQAAMGLSDPAAQPLLGNGSANIKLVKNGENQLRKAAEQGQQDPNKNLSPTAVINITSEKLEGKEPHPQDSSSCEILPSQPRRTKSFLNYYADLETSARELEQNRGNHHGTAEEKSQPVQGQASTIIGNGDLLLQKPNRPQSSPEDGQVATVSSSPETKKDHPKTGAKTDCALHRIQNLAPSDEESSWTTLSQDSASPSSPDETADIWSDHSFQTDPDLPPGWKRVSDIAGTYYWHIPTGTTQWERPVSIPADLQGSRKGSLSSVTPSPTPENEDLHAATVNPDPSLKEFEGATLRYASLKLRNAPHPDDDDSCSINSDPEAKCFAVRSLGWVEMAEEDLAPGKSSVAVNNCIRQLSYCKNDIRDTVGIWGEGKDMYLILENDMLSLVDPMDRSVLHSQPIVSIRVWGVGRDNGRDFAYVARDKDTRILKCHVFRCDTPAKAIATSLHEICSKIMAERKNAKALACSSLQERANVNLDVPLQVDFPTPKTELVQKFHVQYLGMLPVDKPVGMDILNSAIENLMTSSNKEDWLSVNMNVADATVTVISEKNEEEVLVECRVRFLSFMGVGKDVHTFAFIMDTGNQRFECHVFWCEPNAGNVSEAVQAACMLRYQKCLVARPPSQKVRPPPPPADSVTRRVTTNVKRGVLSLIDTLKQKRPVTEMP

SEQ ID NO: 4571 - protein, 210 aa, Homo sapiens; identical to SEQ ID NO: 4560
  Payload ID: 1013;
  Gene Symbol: APBB2;
  Gene Name: amyloid beta (A4) precursor prt-binding, family B, member 2;
  Uniprot ID:  Q92870;
  ENSP ID: ENSP00000439357

SEQ ID NO: 4572 - protein, 493 aa, Homo sapiens
  Payload ID: 1014;
  Gene Symbol: APBB3;
  Gene Name: amyloid beta (A4) precursor prt-binding, family B, member 3;
  Uniprot ID:  O95704;
  ENSP ID: ENSP00000346378
MLGKDYMLAIILVNCDDDLWGDHSLEVEAGLPPGWRKIHDAAGTYYWHVPSGSTQWQRPTWELGDAEDPGTGTEGIWGLRPPKGRSFSSLESSLDRSNSLSWYGGESYIQSMEPGAKCFAVRSLGWVEVPEEDLAPGKSSIAVNNCIQQLAQTRSRSQPPDGAWGEGQNMLMILKKDAMSLVNPLDHSLIHCQPLVHIRVWGVGSSKGRDSPISAPARDFAFVASDKDSCMLKCHVFCCDVPAKAIASALHGLCAQILSERVEVSGDASCCSPDPISPEDLPRQVELLDAVSQAAQKYEALYMGTLPVTKAMGMDVLNEAIGTLTARGDRNAWVPTMLSVSDSLMTAHPIQAEASTEEEPLWQCPVRLVTFIGVGRDPHTFGLIADLGRQSFQCAAFWCQPHAGGLSEAVQAACMVQYQKCLVASAARGKAWGAQARARLRLKRTSSMDSPGGPLPLPLLKGGVGGAGATPRKRGVFSFLDAFRLKPSLLHMP

SEQ ID NO: 4573 - protein, 491 aa, Homo sapiens
  Payload ID: 1014;
  Gene Symbol: APBB3;
  Gene Name: amyloid beta (A4) precursor prt-binding, family B, member 3;
  Uniprot ID:  O95704;
  ENSP ID: ENSP00000349177
MLGKDYMLAIILVNCDDDLWGDHSLEVEAGLPPGWRKIHDAAGTYYWHVPSGSTQWQRPTWELGDAEDPGTGTEGIWGLRPPKGRSFSSLESSLDRSNSLSWYGGESYIQSMEPGAKCFAVRSLGWVEVPEEDLAPGKSSIAVNNCIQQLAQTRSRSQPPDGAWGEGQNMLMILKKDAMSLVNPLDHSLIHCQPLVHIRVWGVGSSKGRPISAPARDFAFVASDKDSCMLKCHVFCCDVPAKAIASALHGLCAQILSERVEVSGDASCCSPDPISPEDLPRQVELLDAVSQAAQKYEALYMGTLPVTKAMGMDVLNEAIGTLTARGDRNAWVPTMLSVSDSLMTAHPIQAEASTEEEPLWQCPVRLVTFIGVGRDPHTFGLIADLGRQSFQCAAFWCQPHAGGLSEAVQAACMVQYQKCLVASAARGKAWGAQARARLRLKRTSSMDSPGGPLPLPLLKGGVGGAGATPRKRGVFSFLDAFRLKPSLLHMP

SEQ ID NO: 4574 - protein, 486 aa, Homo sapiens
  Payload ID: 1014;
  Gene Symbol: APBB3;
  Gene Name: amyloid beta (A4) precursor prt-binding, family B, member 3;
  Uniprot ID:  O95704;
  ENSP ID: ENSP00000350171
MLGKDYMLAIILVNCDDDLWGDHSLEVEAGLPPGWRKIHDAAGTYYWHVPSGSTQWQRPTWELGDAEDPGTGTEGIWGLRPPKGRSFSSLESSLDRSNSLSWYGGESYIQSMEPGAKCFAVRSLGWVEVPEEDLAPGKSSIAVNNCIQQLAQTRSRSQPPDGAWGEGQNMLMILKKDAMSLVNPLDHSLIHCQPLVHIRVWGVGSSKGRDRDFAFVASDKDSCMLKCHVFCCDVPAKAIASALHGLCAQILSERVEVSGDASCCSPDPISPEDLPRQVELLDAVSQAAQKYEALYMGTLPVTKAMGMDVLNEAIGTLTARGDRNAWVPTMLSVSDSLMTAHPIQAEASTEEEPLWQCPVRLVTFIGVGRDPHTFGLIADLGRQSFQCAAFWCQPHAGGLSEAVQAACMVQYQKCLVASAARGKAWGAQARARLRLKRTSSMDSPGGPLPLPLLKGGVGGAGATPRKRGVFSFLDAFRLKPSLLHMP

SEQ ID NO: 4575 - protein, 339 aa, Homo sapiens
  Payload ID: 1014;
  Gene Symbol: APBB3;
  Gene Name: amyloid beta (A4) precursor prt-binding, family B, member 3;
  ENSP ID: ENSP00000351389
MLGKDYMLAIILVNCDDDLWGDHSLEVEAGLPPGWRKIHDAAGTYYWHVPSGSTQWQRPTWELGDAEDPGTGTEGIWGLRPPKGRSFSSLESSLDRSNSLSWYGGESYIQSMEPGAKCFAVRSLGWVEVPEEDLAPGKSSIAVNNCIQQLAQTRSRSQPPDGAWGEGQNMLMILKKDAMSLVNPLDHSLIHCQPLVHIRVWGVGSSKGRDRDFAFVASDKDSCMLKCHVFCCDVPAKAIASALHGLCAQILSERVEVSGDASCCSPDPISPEDLPRQVELLDAVSQAAQKYEALYMGTLPVTKAMGRGQYRGGAIVAVPCAPCDIYWCWPRPTHLWPHR

SEQ ID NO: 4576 - protein, 484 aa, Homo sapiens
  Payload ID: 1014;
  Gene Symbol: APBB3;
  Gene Name: amyloid beta (A4) precursor prt-binding, family B, member 3;
  Uniprot ID:  O95704;
  ENSP ID: ENSP00000402591
MLGKDYMLAIILVNCDDDLWGDHSLEVEAGLPPGWRKIHDAAGTYYWHVPSGSTQWQRPTWELGDAEDPGTGTEGIWGLRPPKGRSFSSLESSLDRSNSLSWYGGESYIQSMEPGAKCFAVRSLGWVEVPEEDLAPGKSSIAVNNCIQQLAQTRSRSQPPDGAWGEGQNMLMILKKDAMSLVNPLDHSLIHCQPLVHIRVWGVGSSKGRDFAFVASDKDSCMLKCHVFCCDVPAKAIASALHGLCAQILSERVEVSGDASCCSPDPISPEDLPRQVELLDAVSQAAQKYEALYMGTLPVTKAMGMDVLNEAIGTLTARGDRNAWVPTMLSVSDSLMTAHPIQAEASTEEEPLWQCPVRLVTFIGVGRDPHTFGLIADLGRQSFQCAAFWCQPHAGGLSEAVQAACMVQYQKCLVASAARGKAWGAQARARLRLKRTSSMDSPGGPLPLPLLKGGVGGAGATPRKRGVFSFLDAFRLKPSLLHMP

SEQ ID NO: 4577 - protein, 245 aa, Homo sapiens
  Payload ID: 1014;
  Gene Symbol: APBB3;
  Gene Name: amyloid beta (A4) precursor prt-binding, family B, member 3;
  Uniprot ID:  O95704;
  ENSP ID: ENSP00000422718
MLGKDYMLAIILVNCDDDLWGDHSLEVEAGLPPGWRKIHDAAGTYYWHVPSGSTQWQRPTWELGDAEDPGTGTEGIWGLRPPKGRSFSSLESSLDRSNSLSWYGGESYIQSMEPGAKCFAVRSLGWVEVPEEDLAPGKSSIAVNNCIQQLAQTRSRSQPPDGAWGEGQNMLMILKKDAMSLVNPLDHSLIHCQPLVHIRVWGVGSSKGRSSDVDPGLLPLPGPALVGEGGPSSAGTVWGESERLG

SEQ ID NO: 4578 - protein, 337 aa, Homo sapiens
  Payload ID: 1014;
  Gene Symbol: APBB3;
  Gene Name: amyloid beta (A4) precursor prt-binding, family B, member 3;
  ENSP ID: ENSP00000424317
MLGKDYMLAIILVNCDDDLWGDHSLEVEAGLPPGWRKIHDAAGTYYWHVPSGSTQWQRPTWELGDAEDPGTGTEGIWGLRPPKGRSFSSLESSLDRSNSLSWYGGESYIQSMEPGAKCFAVRSLGWVEVPEEDLAPGKSSIAVNNCIQQLAQTRSRSQPPDGAWGEGQNMLMILKKDAMSLVNPLDHSLIHCQPLVHIRVWGVGSSKGRDFAFVASDKDSCMLKCHVFCCDVPAKAIASALHGLCAQILSERVEVSGDASCCSPDPISPEDLPRQVELLDAVSQAAQKYEALYMGTLPVTKAMGRGQYRGGAIVAVPCAPCDIYWCWPRPTHLWPHR

SEQ ID NO: 4579 - protein, 214 aa, Homo sapiens
  Payload ID: 1014;
  Gene Symbol: APBB3;
  Gene Name: amyloid beta (A4) precursor prt-binding, family B, member 3;
  Uniprot ID:  O95704;
  ENSP ID: ENSP00000426107
MLGKDYMLAIILVNCDDDLWGDHSLEVEAGLPPGWRKIHDAAGTYYWHVPSGSTQWQRPTWELGDAEDPGTGTEGIWGLRPPKGRSFSSLESSLDRSNSLSWYGGESYIQSMEPGAKCFAVRSLGWVEVPEEDLAPGKSSIAVNNCIQQLAQTRSRSQPPDGAWGEGQNMLMILKKDAMSLVNPLDHSLIHCQPLAVIPTDADPQYLNPWTQIL

SEQ ID NO: 4580 - protein, 163 aa, Homo sapiens
  Payload ID: 1014;
  Gene Symbol: APBB3;
  Gene Name: amyloid beta (A4) precursor prt-binding, family B, member 3;
  ENSP ID: ENSP00000427272
MLGKDYMLAIILVNCDDDLWGDHSLEVEAGLPPGWRKIHDAAGTYYWHVPSGSTQWQRPTWELGDAEDPGTCFAVRSLGWVEVPEEDLAPGKSSIAVNNCIQQLAQTRSRSQPPDGAWGEGQNMLMILKKDAMSLVNPLDHSLIHCQPLVHIRVWGVGSSKGR

SEQ ID NO: 4581 - protein, 651 aa, Homo sapiens
  Payload ID: 1015;
  Gene Symbol: APLP1;
  Gene Name: amyloid beta (A4) precursor-like prt 1;
  Uniprot ID:  P51693;
  ENSP ID: ENSP00000221891
MGPASPAARGLSRRPGQPPLPLLLPLLLLLLRAQPAIGSLAGGSPGAAEAPGSAQVAGLCGRLTLHRDLRTGRWEPDPQRSRRCLRDPQRVLEYCRQMYPELQIARVEQATQAIPMERWCGGSRSGSCAHPHHQVVPFRCLPGEFVSEALLVPEGCRFLHQERMDQCESSTRRHQEAQEACSSQGLILHGSGMLLPCGSDRFRGVEYVCCPPPGTPDPSGTAVGDPSTRSWPPGSRVEGAEDEEEEESFPQPVDDYFVEPPQAEEEEETVPPPSSHTLAVVGKVTPTPRPTDGVDIYFGMPGEISEHEGFLRAKMDLEERRMRQINEVMREWAMADNQSKNLPKADRQALNEHFQSILQTLEEQVSGERQRLVETHATRVIALINDQRRAALEGFLAALQADPPQAERVLLALRRYLRAEQKEQRHTLRHYQHVAAVDPEKAQQMRFQVHTHLQVIEERVNQSLGLLDQNPHLAQELRPQIQELLHSEHLGPSELEAPAPGGSSEDKGGLQPPDSKDADTPMTLPKGSTEQDAASPEKEKMNPLEQYERKVNASVPRGFPFHSSEIQRDELAPAGTGVSREAVSGLLIMGAGGGSLIVLSMLLLRRKKPYGAISHGVVEVDPMLTLEEQQLRELQRHGYENPTYRFLEERP

SEQ ID NO: 4582 - protein, 611 aa, Homo sapiens
  Payload ID: 1015;
  Gene Symbol: APLP1;
  Gene Name: amyloid beta (A4) precursor-like prt 1;
  ENSP ID: ENSP00000441501
MLASLEKDKTAPGSAQVAGLCGRLTLHRDLRTGRWEPDPQRSRRCLRDPQRVLEYCRQMYPELQIARVEQATQAIPMERWCGGSRSGSCAHPHHQVVPFRCLPGEFVSEALLVPEGCRFLHQERMDQCESSTRRHQEAQEACSSQGLILHGSGMLLPCGSDRFRGVEYVCCPPPGTPDPSGTAVGDPSTRSWPPGSRVEGAEDEEEEESFPQPVDDYFVEPPQAEEEEETVPPPSSHTLAVVGKVTPTPRPTDGVDIYFGMPGEISEHEGFLRAKMDLEERRMRQINEVMREWAMADNQSKNLPKADRQALNEHFQSILQTLEEQVSGERQRLVETHATRVIALINDQRRAALEGFLAALQADPPQAERVLLALRRYLRAEQKEQRHTLRHYQHVAAVDPEKAQQMRFQVHTHLQVIEERVNQSLGLLDQNPHLAQELRPQIQELLHSEHLGPSELEAPAPGGSSEDKGGLQPPDSKDDTPMTLPKGSTEQDAASPEKEKMNPLEQYERKVNASVPRGFPFHSSEIQRDELAPAGTGVSREAVSGLLIMGAGGGSLIVLSMLLLRRKKPYGAISHGVVEVDPMLTLEEQQLRELQRHGYENPTYRFLEERP

SEQ ID NO: 4583 - protein, 644 aa, Homo sapiens
  Payload ID: 1015;
  Gene Symbol: APLP1;
  Gene Name: amyloid beta (A4) precursor-like prt 1;
  ENSP ID: ENSP00000465694
MEAVCGAWGRGLVLGVSVLGSKEPGDPHANAPRALTVLSTSIQAPGSAQVAGLCGRLTLHRDLRTGRWEPDPQRSRRCLRDPQRVLEYCRQMYPELQIARVEQATQAIPMERWCGGSRSGSCAHPHHQVVPFRCLPGEFVSEALLVPEGCRFLHQERMDQCESSTRRHQEAQEACSSQGLILHGSGMLLPCGSDRFRGVEYVCCPPPGTPDPSGTAVGDPSTRSWPPGSRVEGAEDEEEEESFPQPVDDYFVEPPQAEEEEETVPPPSSHTLAVVGKVTPTPRPTDGVDIYFGMPGEISEHEGFLRAKMDLEERRMRQINEVMREWAMADNQSKNLPKADRQALNEHFQSILQTLEEQVSGERQRLVETHATRVIALINDQRRAALEGFLAALQADPPQAERVLLALRRYLRAEQKEQRHTLRHYQHVAAVDPEKAQQMRFQVHTHLQVIEERVNQSLGLLDQNPHLAQELRPQIQELLHSEHLGPSELEAPAPGGSSEDKGGLQPPDSKDDTPMTLPKGSTEQDAASPEKEKMNPLEQYERKVNASVPRGFPFHSSEIQRDELAPAGTGVSREAVSGLLIMGAGGGSLIVLSMLLLRRKKPYGAISHGVVEVDPMLTLEEQQLRELQRHGYENPTYRFLEERP

SEQ ID NO: 4584 - protein, 173 aa, Homo sapiens
  Payload ID: 1015;
  Gene Symbol: APLP1;
  Gene Name: amyloid beta (A4) precursor-like prt 1;
  ENSP ID: ENSP00000466116
MYPELQIARVEQATQAIPMERWCGGSRSGSCAHPHHQVVPFRCLPGEFVSEALLVPEGCRFLHQERMDQCESSTRRHQEAQEACSSQGLILHGSGMLLPCGSDRFRGVEYVCCPPPGTPDPSGTAVGDPSTRSWPPGSRVEGAEDEEEEESFPQPVDDYFVEPPQAEEEEETV

SEQ ID NO: 4585 - protein, 221 aa, Homo sapiens
  Payload ID: 1015;
  Gene Symbol: APLP1;
  Gene Name: amyloid beta (A4) precursor-like prt 1;
  ENSP ID: ENSP00000466576
  MOD_RES (1)..(1): Any amino acid
XEWAMADNQSKNLPKADRQALNEAERVLLALRRYLRAEQKEQRHTLRHYQHVAAVDPEKAQQMRFQVHTHLQVIEERVNQSLGLLDQNPHLAQELRPQIQELLHSEHLGPSELEAPAPGGSSEDKGGLQPPDSKDDTPMTLPKGSTEQDAASPEKEKMNPLEQYERKVNASVPRGFPFHSSEIQRDELAPAGTGVSREAVSGLLIMGAGGGSLIVLSMLLL

SEQ ID NO: 4586 - protein, 118 aa, Homo sapiens
  Payload ID: 1015;
  Gene Symbol: APLP1;
  Gene Name: amyloid beta (A4) precursor-like prt 1;
  ENSP ID: ENSP00000466623
MGPASPAARGLSRRPGQPPLPLLLPLLLLLLRAQPAIGSLAGGSPGAAETHSALDAVSGTRSACWSTADRCTRSCRLHVWSRLRRPSPWSAGAGVPGAAAAPTPTTRLCPSAACLVNL

SEQ ID NO: 4587 - protein, 294 aa, Homo sapiens
  Payload ID: 1015;
  Gene Symbol: APLP1;
  Gene Name: amyloid beta (A4) precursor-like prt 1;
  ENSP ID: ENSP00000467854
MYPELQIARVEQATQAIPMERWCGGSRSGSCAHPHHQVVPFRCLPGEFVSEALLVPEGCRFLHQERMDQCESSTRRHQEAQEACSSQGLILHGSGMLLPCGSDRFRGVEYVCCPPPGTPDPSGTAVGDPSTRSWPPGSRVEGAEDEEEEESFPQPVDDYFVEPPQAEEEEETVPPPSSHTLAVVGKVTPTPRPTDGVDIYFGMPGEISEHEGFLRAKMDLEERRMRQINEVMREWAMADNQSKNLPKADRQALNEHFQSILQTLEEQVSGERQRLVETHATRVIALINDQRRAA

SEQ ID NO: 4588 - protein, 289 aa, Homo sapiens
  Payload ID: 1015;
  Gene Symbol: APLP1;
  Gene Name: amyloid beta (A4) precursor-like prt 1;
  ENSP ID: ENSP00000474762
  MOD_RES (1)..(1): Any amino acid
XQSILQTLEEQVSGERQRLVETHATRVIALINDQRRAALEGFLAALQADPPQAERVLLALRRYLRAEQKEQRHTLRHYQHVAAVDPEKAQQMRFQVHTHLQVIEERVNQSLGLLDQNPHLAQELRPQIQELLHSEHLGPSELEAPAPGGSSEDKGGLQPPDSKDGSTEQDAASPEKEKMNPLEQYERKVNASVPRGFPFHSSEIQRDELAPAGTGVSREAVSGLLIMGAGGGSLIVLSMLLLRRKKPYGAISHGVVEVDPMLTLEEQQLRELQRHGYENPTYRFLEERP

SEQ ID NO: 4589 - protein, 763 aa, Homo sapiens
  Payload ID: 1016;
  Gene Symbol: APLP2;
  Gene Name: amyloid beta (A4) precursor-like prt 2;
  Uniprot ID:  Q06481;
  ENSP ID: ENSP00000263574
MAATGTAAAAATGRLLLLLLVGLTAPALALAGYIEALAANAGTGFAVAEPQIAMFCGKLNMHVNIQTGKWEPDPTGTKSCFETKEEVLQYCQEMYPELQITNVMEANQRVSIDNWCRRDKKQCKSRFVTPFKCLVGEFVSDVLLVPEKCQFFHKERMEVCENHQHWHTVVKEACLTQGMTLYSYGMLLPCGVDQFHGTEYVCCPQTKIIGSVSKEEEEEDEEEEEEEDEEEDYDVYKSEFPTEADLEDFTEAAVDEDDEDEEEGEEVVEDRDYYYDTFKGDDYNEENPTEPGSDGTMSDKEITHDVKAVCSQEAMTGPCRAVMPRWYFDLSKGKCVRFIYGGCGGNRNNFESEDYCMAVCKAMIPPTPLPTNDVDVYFETSADDNEHARFQKAKEQLEIRHRNRMDRVKKEWEEAELQAKNLPKAERQTLIQHFQAMVKALEKEAASEKQQLVETHLARVEAMLNDRRRMALENYLAALQSDPPRPHRILQALRRYVRAENKDRLHTIRHYQHVLAVDPEKAAQMKSQVMTHLHVIEERRNQSLSLLYKVPYVAQEIQEEIDELLQEQRADMDQFTASISETPVDVRVSSEESEEIPPFHPFHPFPALPENEDTQPELYHPMKKGSGVGEQDGGLIGAEEKVINSKNKVDENMVIDETLDVKEMIFNAERVGGLEEERESVGPLREDFSLSSSALIGLLVIAVAIATVIVISLVMLRKRQYGTISHGIVEVDPMLTPEERHLNKMQNHGYENPTYKYLEQMQI

SEQ ID NO: 4590 - protein, 522 aa, Homo sapiens
  Payload ID: 1016;
  Gene Symbol: APLP2;
  Gene Name: amyloid beta (A4) precursor-like prt 2;
  Uniprot ID:  Q06481;
  ENSP ID: ENSP00000263575
MAATGTAAAAATGRLLLLLLVGLTAPALALAGYIEALAANAGTGFAVAEPQIAMFCGKLNMHVNIQTGKWEPDPTGTKSCFETKEEVLQYCQEMYPELQITNVMEANQRVSIDNWCRRDKKQCKSRFVTPFKCLVPPTPLPTNDVDVYFETSADDNEHARFQKAKEQLEIRHRNRMDRVKKEWEEAELQAKNLPKAERQTLIQHFQAMVKALEKEAASEKQQLVETHLARVEAMLNDRRRMALENYLAALQSDPPRPHRILQALRRYVRAENKDRLHTIRHYQHVLAVDPEKAAQMKSQVMTHLHVIEERRNQSLSLLYKVPYVAQEIQEEIDELLQEQRADMDQFTASISETPVDVRVSSEESEEIPPFHPFHPFPALPENEGSGVGEQDGGLIGAEEKVINSKNKVDENMVIDETLDVKEMIFNAERVGGLEEERESVGPLREDFSLSSSALIGLLVIAVAIATVIVISLVMLRKRQYGTISHGIVEVDPMLTPEERHLNKMQNHGYENPTYKYLEQMQI

SEQ ID NO: 4591 - protein, 761 aa, Homo sapiens
  Payload ID: 1016;
  Gene Symbol: APLP2;
  Gene Name: amyloid beta (A4) precursor-like prt 2;
  Uniprot ID:  Q06481;
  ENSP ID: ENSP00000278756
MLRAPGELPRQAARCSLCRLGPGRGRAFFKWRCLPASVDRGNPLWALAANAGTGFAVAEPQIAMFCGKLNMHVNIQTGKWEPDPTGTKSCFETKEEVLQYCQEMYPELQITNVMEANQRVSIDNWCRRDKKQCKSRFVTPFKCLVGEFVSDVLLVPEKCQFFHKERMEVCENHQHWHTVVKEACLTQGMTLYSYGMLLPCGVDQFHGTEYVCCPQTKIIGSVSKEEEEEDEEEEEEEDEEEDYDVYKSEFPTEADLEDFTEAAVDEDDEDEEEGEEVVEDRDYYYDTFKGDDYNEENPTEPGSDGTMSDKEITHDVKAVCSQEAMTGPCRAVMPRWYFDLSKGKCVRFIYGGCGGNRNNFESEDYCMAVCKAMIPPTPLPTNDVDVYFETSADDNEHARFQKAKEQLEIRHRNRMDRVKKEWEEAELQAKNLPKAERQTLIQHFQAMVKALEKEAASEKQQLVETHLARVEAMLNDRRRMALENYLAALQSDPPRPHRILQALRRYVRAENKDRLHTIRHYQHVLAVDPEKAAQMKSQVMTHLHVIEERRNQSLSLLYKVPYVAQEIQEEIDELLQEQRADMDQFTASISETPVDVRVSSEESEEIPPFHPFHPFPALPENEGSGVGEQDGGLIGAEEKVINSKNKVDENMVIDETLDVKEMIFNAERVGGLEEERESVGPLREDFSLSSSALIGLLVIAVAIATVIVISLVMLRKRQYGTISHGIVEVDPMLTPEERHLNKMQNHGYENPTYKYLEQMQI

SEQ ID NO: 4592 - protein, 751 aa, Homo sapiens
  Payload ID: 1016;
  Gene Symbol: APLP2;
  Gene Name: amyloid beta (A4) precursor-like prt 2;
  Uniprot ID:  Q06481;
  ENSP ID: ENSP00000345444
MAATGTAAAAATGRLLLLLLVGLTAPALALAGYIEALAANAGTGFAVAEPQIAMFCGKLNMHVNIQTGKWEPDPTGTKSCFETKEEVLQYCQEMYPELQITNVMEANQRVSIDNWCRRDKKQCKSRFVTPFKCLVGEFVSDVLLVPEKCQFFHKERMEVCENHQHWHTVVKEACLTQGMTLYSYGMLLPCGVDQFHGTEYVCCPQTKIIGSVSKEEEEEDEEEEEEEDEEEDYDVYKSEFPTEADLEDFTEAAVDEDDEDEEEGEEVVEDRDYYYDTFKGDDYNEENPTEPGSDGTMSDKEITHDVKAVCSQEAMTGPCRAVMPRWYFDLSKGKCVRFIYGGCGGNRNNFESEDYCMAVCKAMIPPTPLPTNDVDVYFETSADDNEHARFQKAKEQLEIRHRNRMDRVKKEWEEAELQAKNLPKAERQTLIQHFQAMVKALEKEAASEKQQLVETHLARVEAMLNDRRRMALENYLAALQSDPPRPHRILQALRRYVRAENKDRLHTIRHYQHVLAVDPEKAAQMKSQVMTHLHVIEERRNQSLSLLYKVPYVAQEIQEEIDELLQEQRADMDQFTASISETPVDVRVSSEESEEIPPFHPFHPFPALPENEGSGVGEQDGGLIGAEEKVINSKNKVDENMVIDETLDVKEMIFNAERVGGLEEERESVGPLREDFSLSSSALIGLLVIAVAIATVIVISLVMLRKRQYGTISHGIVEVDPMLTPEERHLNKMQNHGYENPTYKYLEQMQI

SEQ ID NO: 4593 - protein, 35 aa, Homo sapiens
  Payload ID: 1016;
  Gene Symbol: APLP2;
  Gene Name: amyloid beta (A4) precursor-like prt 2;
  ENSP ID: ENSP00000433582
MAATGTAAAAATGRLLLLLLVGLTAPALALAGYIE

SEQ ID NO: 4594 - protein, 158 aa, Homo sapiens
  Payload ID: 1016;
  Gene Symbol: APLP2;
  Gene Name: amyloid beta (A4) precursor-like prt 2;
  ENSP ID: ENSP00000434059
MAATGTAAAAATGRLLLLLLVGLTAPALALAGYIESSQICCSPRSFLISTLKCLIVDEINALAANAGTGFAVAEPQIAMFCGKLNMHVNIQTGKWEPDPTGTKSCFETKEEVLQYCQEMYPELQITNVMEANQRVSIDNWCRRDKKQCKSRFVTPFKC

SEQ ID NO: 4595 - protein, 158 aa, Homo sapiens
  Payload ID: 1016;
  Gene Symbol: APLP2;
  Gene Name: amyloid beta (A4) precursor-like prt 2;
  ENSP ID: ENSP00000434379
MAATGTAAAAATGRLLLLLLALAANAGTGFAVAEPQIAMFCGKLNMHVNIQTGKWEPDPTGTKSCFETKEEVLQYCQEMYPELQITNVMEANQRVSIDNWCRRDKKQCKSRFVTPFKCLVGEFVSDVLLVPEKCQFFHKERMEVCENHQHWHTVVKEV

SEQ ID NO: 4596 - protein, 39 aa, Homo sapiens
  Payload ID: 1016;
  Gene Symbol: APLP2;
  Gene Name: amyloid beta (A4) precursor-like prt 2;
  ENSP ID: ENSP00000434592
MAATGTAAAAATGRLLLLLLVGLTAPALALAGYIEWVNL

SEQ ID NO: 4597 - protein, 116 aa, Homo sapiens
  Payload ID: 1016;
  Gene Symbol: APLP2;
  Gene Name: amyloid beta (A4) precursor-like prt 2;
  ENSP ID: ENSP00000435470
MAATGTAAAAATGRLLLLLLVGLTAPALALAGYIEALAANAGTGFAVAEPQIAMFCGKLNMHVNIQTGKWEPDPTGTKSCFETKEEVLQYCQEMYPELQITNSGWRCVRITSTGTR

SEQ ID NO: 4598 - protein, 695 aa, Homo sapiens
  Payload ID: 1016;
  Gene Symbol: APLP2;
  Gene Name: amyloid beta (A4) precursor-like prt 2;
  Uniprot ID:  Q06481;
  ENSP ID: ENSP00000435914
MAATGTAAAAATGRLLLLLLVGLTAPALALAGYIEALAANAGTGFAVAEPQIAMFCGKLNMHVNIQTGKWEPDPTGTKSCFETKEEVLQYCQEMYPELQITNVMEANQRVSIDNWCRRDKKQCKSRFVTPFKCLVGEFVSDVLLVPEKCQFFHKERMEVCENHQHWHTVVKEACLTQGMTLYSYGMLLPCGVDQFHGTEYVCCPQTKIIGSVSKEEEEEDEEEEEEEDEEEDYDVYKSEFPTEADLEDFTEAAVDEDDEDEEEGEEVVEDRDYYYDTFKGDDYNEENPTEPGSDGTMSDKEITHDVKVPPTPLPTNDVDVYFETSADDNEHARFQKAKEQLEIRHRNRMDRVKKEWEEAELQAKNLPKAERQTLIQHFQAMVKALEKEAASEKQQLVETHLARVEAMLNDRRRMALENYLAALQSDPPRPHRILQALRRYVRAENKDRLHTIRHYQHVLAVDPEKAAQMKSQVMTHLHVIEERRNQSLSLLYKVPYVAQEIQEEIDELLQEQRADMDQFTASISETPVDVRVSSEESEEIPPFHPFHPFPALPENEGSGVGEQDGGLIGAEEKVINSKNKVDENMVIDETLDVKEMIFNAERVGGLEEERESVGPLREDFSLSSSALIGLLVIAVAIATVIVISLVMLRKRQYGTISHGIVEVDPMLTPEERHLNKMQNHGYENPTYKYLEQMQI

SEQ ID NO: 4599 - protein, 585 aa, Homo sapiens
  Payload ID: 1017;
  Gene Symbol: APPBP2;
  Gene Name: amyloid beta precursor prt (cytoplasmic tail) binding prt 2;
  Uniprot ID:  Q92624;
  ENSP ID: ENSP00000083182
MAAVELEWIPETLYNTAISAVVDNYIRSRRDIRSLPENIQFDVYYKLYQQGRLCQLGSEFCELEVFAKVLRALDKRHLLHHCFQALMDHGVKVASVLAYSFSRRCSYIAESDAAVKEKAIQVGFVLGGFLSDAGWYSDAEKVFLSCLQLCTLHDEMLHWFRAVECCVRLLHVRNGNCKYHLGEETFKLAQTYMDKLSKHGQQANKAALYGELCALLFAKSHYDEAYKWCIEAMKEITAGLPVKVVVDVLRQASKACVVKREFKKAEQLIKHAVYLARDHFGSKHPKYSDTLLDYGFYLLNVDNICQSVAIYQAALDIRQSVFGGKNIHVATAHEDLAYSSYVHQYSSGKFDNALFHAERAIGIITHILPEDHLLLASSKRVKALILEEIAIDCHNKETEQRLLQEAHDLHLSSLQLAKKAFGEFNVQTAKHYGNLGRLYQSMRKFKEAEEMHIKAIQIKEQLLGQEDYEVALSVGHLASLYNYDMNQYENAEKLYLRSIAIGKKLFGEGYSGLEYDYRGLIKLYNSIGNYEKVFEYHNVLSNWNRLRDRQYSVTDALEDVSTSPQSTEEVVQSFLISQNVEGPSC

SEQ ID NO: 4600 - protein, 123 aa, Homo sapiens
  Payload ID: 1017;
  Gene Symbol: APPBP2;
  Gene Name: amyloid beta precursor prt (cytoplasmic tail) binding prt 2;
  ENSP ID: ENSP00000464962
MAAVELEWIPETLYNTAISAVVDNYIRSRRDIRSLPENIQFDVYYKLYQQGRLCQLGSEFCELEVFAKVLRALDKRHLLHHCFQALMDHGVKVASVLAYSFSRRCSYIAESDAAVKEKAIQVG

SEQ ID NO: 4601 - protein, 95 aa, Homo sapiens
  Payload ID: 1017;
  Gene Symbol: APPBP2;
  Gene Name: amyloid beta precursor prt (cytoplasmic tail) binding prt 2;
  ENSP ID: ENSP00000466802
MAAVELEWIPETLYNTAISAVVDNYIRSRRDIRSLPENIQFDVYYKLYQQGRLCQLGSEFCELEVFAKVLRALDKRLSFTKSKSFDICFIIVFRL

SEQ ID NO: 4602 - protein, 61 aa, Homo sapiens
  Payload ID: 1017;
  Gene Symbol: APPBP2;
  Gene Name: amyloid beta precursor prt (cytoplasmic tail) binding prt 2;
  ENSP ID: ENSP00000467025
MAAVELEWIPETLYNTAISAVVDNYIRSRRDIRSLPENIQFDVYYKTFASSLFSGFDGSWC

SEQ ID NO: 4603 - protein, 223 aa, Homo sapiens
  Payload ID: 1018;
  Gene Symbol: APCS;
  Gene Name: amyloid P component, serum;
  Uniprot ID:  P02743;
  ENSP ID: ENSP00000255040
MNKPLLWISVLTSLLEAFAHTDLSGKVFVFPRESVTDHVNLITPLEKPLQNFTLCFRAYSDLSRAYSLFSYNTQGRDNELLVYKERVGEYSLYIGRHKVTSKVIEKFPAPVHICVSWESSSGIAEFWINGTPLVKKGLRQGYFVEAQPKIVLGQEQDSYGGKFDRSQSFVGEIGDLYMWDSVLPPENILSAYQGTPLPANILDWQALNYEIRGYVIIKPLVWV

SEQ ID NO: 4604 - protein, 1657 aa, Homo sapiens
  Payload ID: 1019;
  Gene Symbol: ALS2;
  Gene Name: amyotrophic lateral sclerosis 2 (juvenile);
  Uniprot ID:  Q96Q42;
  ENSP ID: ENSP00000264276
MDSKKRSSTEAEGSKERGLVHIWQAGSFPITPERLPGWGGKTVLQAALGVKHGVLLTEDGEVYSFGTLPWRSGPVEICPSSPILENALVGQYVITVATGSFHSGAVTDNGVAYMWGENSAGQCAVANQQYVPEPNPVSIADSEASPLLAVRILQLACGEEHTLALSISREIWAWGTGCQLGLITTAFPVTKPQKVEHLAGRVVLQVACGAFHSLALVQCLPSQDLKPVPERCNQCSQLLITMTDKEDHVIISDSHCCPLGVTLTESQAENHASTALSPSTETLDRQEEVFENTLVANDQSVATELNAVSAQITSSDAMSSQQNVMGTTEISSARNIPSYPDTQAVNEYLRKLSDHSVREDSEHGEKPVPSQPLLEEAIPNLHSPPTTSTSALNSLVVSCASAVGVRVAATYEAGALSLKKVMNFYSTTPCETGAQAGSSAIGPEGLKDSREEQVKQESMQGKKSSSLVDIREEETEGGSRRLSLPGLLSQVSPRLLRKAARVKTRTVVLTPTYSGEADALLPSLRTEVWTWGKGKEGQLGHGDVLPRLQPLCVKCLDGKEVIHLEAGGYHSLALTAKSQVYSWGSNTFGQLGHSDFPTTVPRLAKISSENGVWSIAAGRDYSLFLVDTEDFQPGLYYSGRQDPTEGDNLPENHSGSKTPVLLSCSKLGYISRVTAGKDSYLALVDKNIMGYIASLHELATTERRFYSKLSDIKSQILRPLLSLENLGTTTTVQLLQEVASRFSKLCYLIGQHGASLSSFLHGVKEARSLVILKHSSLFLDSYTEYCTSITNFLVMGGFQLLAKPAIDFLNKNQELLQDLSEVNDENTQLMEILNTLFFLPIRRLHNYAKVLLKLATCFEVASPEYQKLQDSSSCYECLALHLGRKRKEAEYTLGFWKTFPGKMTDSLRKPERRLLCESSNRALSLQHAGRFSVNWFILFNDALVHAQFSTHHVFPLATLWAEPLSEEAGGVNGLKITTPEEQFTLISSTPQEKTKWLRAISQAVDQALRGMSDLPPYGSGSSVQRQEPPISRSAKYTFYKDPRLKDATYDGRWLSGKPHGRGVLKWPDGKMYSGMFRNGLEDGYGEYRIPNKAMNKEDHYVGHWKEGKMCGQGVYSYASGEVFEGCFQDNMRHGHGLLRSGKLTSSSPSMFIGQWVMDKKAGYGVFDDITRGEKYMGMWQDDVCQGNGVVVTQFGLYYEGNFHLNKMMGNGVLLSEDDTIYEGEFSDDWTLSGKGTLTMPNGDYIEGYFSGEWGSGIKITGTYFKPSLYESDKDRPKVFRKLGNLAVPADEKWKAVFDECWRQLGCEGPGQGEVWKAWDNIAVALTTSRRQHRDSPEILSRSQTQTLESLEFIPQHVGAFSVEKYDDIRKYLIKACDTPLHPLGRLVETLVAVYRMTYVGVGANRRLLQEAVKEIKSYLKRIFQLVRFLFPELPEEGSTIPLSAPLPTERKSFCTGKSDSRSESPEPGYVVTSSGLLLPVLLPRLYPPLFMLYALDNDREEDIYWECVLRLNKQPDIALLGFLGVQRKFWPATLSILGESKKVLPTTKDACFASAVECLQQISTTFTPSDKLKVIQQTFEEISQSVLASLHEDFLWSMDDLFPVFLYVVLRARIRNLGSEVHLIEDLMDPYLQHGEQGIMFTTLKACYYQIQREKLN

SEQ ID NO: 4605 - protein, 139 aa, Homo sapiens
  Payload ID: 1019;
  Gene Symbol: ALS2;
  Gene Name: amyotrophic lateral sclerosis 2 (juvenile);
  ENSP ID: ENSP00000386384
MDSKKRSSTEAEGSKERGLVHIWQAGSFPITPERLPGWGGKTVLQAALGVKHGVLLTEDGEVYSFGTLPWRSGPVEICPSSPILENALVGQYVITVATGSFHSGAVTDNGVAYMWGENSAGQCAVANQQYVPEPNPVSI

SEQ ID NO: 4606 - protein, 106 aa, Homo sapiens
  Payload ID: 1019;
  Gene Symbol: ALS2;
  Gene Name: amyotrophic lateral sclerosis 2 (juvenile);
  ENSP ID: ENSP00000386948
MDSKKRSSTEAEGSKERGLVHIWQAGSFPITPERLPGWGGKTVLQAALGVKHGVLLTEDGEVYSFGTLPWRSGPVEICPSSPILENALVGQYVITVATGSFHSGAV

SEQ ID NO: 4607 - protein, 585 aa, Homo sapiens
  Payload ID: 1019;
  Gene Symbol: ALS2;
  Gene Name: amyotrophic lateral sclerosis 2 (juvenile);
  ENSP ID: ENSP00000403832
  MOD_RES (1)..(1): Any amino acid
XLALVDKNIMGYIASLHELATTERRFYSKLSDIKSQILRPLLSLENLGTTTTVQLLQEVASRFSKLCYLIGQHGASLSSFLHGVKEARSLVILKHSSLFLDSYTEYCTSITNFLVMGGFQLLAKPAIDFLNKNQELLQDLSEVNDENTQLMEILNTLFFLPIRRLHNYAKVLLKLATCFEVASPEYQKLQDSSSCYECLALHLGRKRKEAEYTLGFWKTFPGKMTDSLRKPERRLLCESSNRALSLQHAGRFSVNWFILFNDALVHAQFSTHHVFPLATLWAEPLSEEAGGVNGLKITTPEEQFTLISSTPQEKTKWLRAISQAVDQALRGMSDLPPYGSGSSVQRQEPPISRSAKYTFYKDPRLKDATYDGRWLSGKPHGRGVLKWPDGKMYSGMFRNGLEDGYGEYRIPNKAMNKEDHYVGHWKEGKMCGQGVYSYASGEVFEGCFQDNMRHGHGLLRSGKLTSSSPSMFIGQWVMDKKAGYGVFDDITRGEKYMGMWQDDVCQGNGVVVTQFGLYYEGNFHLNKMMGNGVLLSEDDTIYEGEFSDDWTLSGKDNSGLIEQVGKCSLLPYFLKVCEALVLFLL

SEQ ID NO: 4608 - protein, 396 aa, Homo sapiens
  Payload ID: 1019;
  Gene Symbol: ALS2;
  Gene Name: amyotrophic lateral sclerosis 2 (juvenile);
  Uniprot ID:  Q96Q42;
  ENSP ID: ENSP00000429223
MDSKKRSSTEAEGSKERGLVHIWQAGSFPITPERLPGWGGKTVLQAALGVKHGVLLTEDGEVYSFGTLPWRSGPVEICPSSPILENALVGQYVITVATGSFHSGAVTDNGVAYMWGENSAGQCAVANQQYVPEPNPVSIADSEASPLLAVRILQLACGEEHTLALSISREIWAWGTGCQLGLITTAFPVTKPQKVEHLAGRVVLQVACGAFHSLALVQCLPSQDLKPVPERCNQCSQLLITMTDKEDHVIISDSHCCPLGVTLTESQAENHASTALSPSTETLDRQEEVFENTLVANDQSVATELNAVSAQITSSDAMSSQQNVMGTTEISSARNIPSYPDTQAVNEYLRKLSDHSVREDSEHGEKPVPSQVPAQFYKIKVCLELNCMGFSLETLK

SEQ ID NO: 4609 - protein, 623 aa, Homo sapiens
  Payload ID: 1020;
  Gene Symbol: ALS2CR11;
  Gene Name: amyotrophic lateral sclerosis 2 (juvenile) chromosome region, candidate 11;
  Uniprot ID:  Q53TS8;
  ENSP ID: ENSP00000286195
MEPPQETNRPFSTLDNRSGQVQVLSATPLLQRNPYSSPDIMHIKGSEASSVPYALNQGTTALPKNKNQEGTGHRLLNMLRKTLKESDSEELEITQETPNLVPFGDVVGCLGIHIKNCRHFMPKISLQHYANLFIRISINKAVKCTKMCSLLSKNDEKNTVIKFDEVKYFSVQVPRRYDDKRNNILLELIQYDNREKRAFLLGSVQIHLYEVIQKGCFIEEVQVLHGNIFVCRLEVEFMFSYGNFGYGFSHQLKPLQKITEPSMFMNLAPPPERTDPVTKVITPQTVEYPAFLSPDLNVTVGTPAVQSSNQPSVVRLEKLQQQPRERLEKMKKEYRNLNTWIDKANYLESILMPKLEHKDSEETNIDEASENTKSNHPEEELENIVGVDIPLVNEEAETTANELLDNDSEKGLTIPTLNQSDQDNSTADASKNDESTPSPTEVHSLCTISNQETIKAGRIPPLGERQSESMPDRKMKNVFFPLEVKLKDNYPSILKADSSLSEVAFSPKEYNSPSFRPEYIEFKPKFQDCSDKFEDLHDMTSFTHLKKVKSRSRLLGKSSDDIHNHARHSARPYTAPEVNKQRESYSGKFTSRRMVSSGLVHINDKTSDYEMHKMRPKKIKRGY

SEQ ID NO: 4610 - protein, 550 aa, Homo sapiens
  Payload ID: 1020;
  Gene Symbol: ALS2CR11;
  Gene Name: amyotrophic lateral sclerosis 2 (juvenile) chromosome region, candidate 11;
  Uniprot ID:  Q53TS8;
  ENSP ID: ENSP00000399016
MEPPQETNRPFSTLDNRSGQVQVLSATPLLQRNPYSSPDIMHIKGSEASSVPYALNQGTTALPKNKNQEGTGHRLLNMLRKTLKESDSEELEITQETPNLVPFGDVVGCLGIHIKNCRHFMPKISLQHYANLFIRISINKAVKCTKMCSLLSKNDEKNTVIKFDEVKYFSVQVPRRYDDKRNNILLELIQYDNREKRAFLLGSVQIHLYEVIQKGCFIEEVQVLHGNIFVCRLEVEFMFSYGNFGYGFSHQLKPLQKITEPSMFMNLAPPPERTDPVTKVITPQTVEYPAFLSPDLNVTVGTPAVQSSNQPSVVRLEKLQQQPRERLEKMKKEYRNLNTWIDKANYLESILMPKLEHKDSEETNIDEASENTKSNHPEEELENIVGVDIPLVNEEAETTANELLDNDSEKGLTIPTLNQSDQDNSTADASKNDESTPSPTEVHSLCTISNQETIKAGRIPPLGERQSESMPDRKMKNVFFPLEVKLKDNYPSILKADSSLSEVNLRSICINPKSRNLDSSPTEISWQNNNLNLAERENTGLVSTRLKIKR

SEQ ID NO: 4611 - protein, 395 aa, Homo sapiens
  Payload ID: 1020;
  Gene Symbol: ALS2CR11;
  Gene Name: amyotrophic lateral sclerosis 2 (juvenile) chromosome region, candidate 11;
  Uniprot ID:  Q53TS8;
  ENSP ID: ENSP00000400672
MEPPQETNRPFSTLDNRSGQVQVLSATPLLQRNPYSSPDIMHIKGSEASSVPYALNQGTTALPKNKNQEGTGHRLLNMLRKTLKESDSEELEITQETPNLVPFGDVVGCLGIHIKNCRHFMPKISLQHYANLFIRISINKAVKCTKMCSLLSKNDEKNTVIKFDEVKYFSVQVPRRYDDKRNNILLELIQYDNREKRAFLLGSVQIHLYEVIQKGCFIEEVQVLHGNIFVCRLEVEFMFSYGNFGYGFSHQLKPLQKITEPSMFMNLAPPPERTDPVTKVITPQTVEYPAFLSPDLNVTVGTPAVQSSNQPSVVRLEKLQQQPRERLEKMKKEYRNLNTWIDKANYLESILMPKLEHKDSEETNIDEASENTKSNHPEEELENIVGVGGFFTKRI

SEQ ID NO: 4612 - protein, 1820 aa, Homo sapiens
  Payload ID: 1020;
  Gene Symbol: ALS2CR11;
  Gene Name: amyotrophic lateral sclerosis 2 (juvenile) chromosome region, candidate 11;
  Uniprot ID:  Q53TS8;
  ENSP ID: ENSP00000409937
MEPPQETNRPFSTLDNRSGQVQVLSATPLLQRNPYSSPDIMHIKGSEASSVPYALNQGTTALPKNKNQEGTGHRLLNMLRKTLKESDSEELEITQETPNLVPFGDVVGCLGIHIKNCRHFMPKISLQHYANLFIRISINKAVKCTKMCSLLSKNDEKNTVIKFDEVKYFSVQVPRRYDDKRNNILLELIQYDNREKRAFLLGSVQIHLYEVIQKGCFIEEVQVLHGNIFVCRLEVEFMFSYGNFGYGFSHQLKPLQKITEPSMFMNLAPPPERTDPVTKVITPQTVEYPAFLSPDLNVTVGTPAVQSSNQPSVVRLEKLQQQPRERLEKMKKEYRNLNTWIDKANYLESILMPKLEHKDSEETNIDEASENTKSNHPEEELENIVGVDIPLVNEEAETTANELLDNDSEKGLTIPTLNQSDQDNSTADASKNDESTPSPTEVHSLCTISNQETIKAGRIPPLGERQSESMPDRKMKNVFFPLEVKLKDNYPSILKADSSLSEVAFSPKEYNSPSFRPEYIEFKPKFQFQKFNKNGFDPFLRNINKMSVRKRKDQDIYKYRNILGAEVIEHEDQDPPYPAQSKTAGPANTTWAHDPNIFTTKMLETENKLAPDPTINTIKGLDTKNSLKENLPNVSLPSIKGESSRAGNVQANTCHLSKSLNFTPHIEYLKQSMILKSILSENLQDLSDKLFSKPEVSMNSEAREKSSSPLLSIHDKSSSSMEDNVLEKKQDLNNWLSEKDILNSKTTLSQIIKNIPADSFSEGSQIIENIPADSLLEGGQVIKNIPEYSLSEGGQIIKNIPADSFLESGPGQSPEVEEHVSKKHFEADERDFPIKKNSSTKKKHLISEVPNSKSGSSGTVHDYIMRQIFTAPIFSELEIEVKEPSETPMNLENQLPTPWKRSLSSHILFHEENADEIELPQPRSATSQIIQAFPIDTLLESGIIKVIELDKEHHKSSLLGTGITSPKGNLKDSQEYYSEIRSETEPLSEQSIPIIPKDTTSVSRAEFIQEDQNMFPQDSSYYSIANKELYLPRNGQRLCKDKNDLSSTLESLTNSLMDKLSESDEIMLKSFLKNIFNVFFKYNHSERRGQPEKELERLIQPSFTSDTEHLEELQEDFDKADKLDRKPILSPKLRVFLEELSESEVKHLKSELSKQIQHYLVERLSESGHITKEDLPKIYQNLYLMNEKAEQKGPNSFQGKYSETVKEIMSFVNNFNHHFIDKHLEIKLRSFLKEILQNYFLKNISESSLFNETASETIYPNISSLRTKSVSISFHELEQDISKGSFGRRFEINMKYPLSKSLQNYLIALSENELLHLKADLSKHLQSLFIEKLSKSGLMTKKQLEGINQHINLLNSSSIPLKYIKTHLPFRDDCHFVEKHSEKQNKYSRIVQQTTLQTVSEDKLREAELIREKEKKYFPLQNLKGNSSLIKEQKSYYTKEEAKTPSLIKVQPSSNENIQASPLSKSSEILTDILLKKLRKEHVFTQLPQAENSVHKTEIQDPYSWGGKSKITQSKAWCEKTLKMKSLDRKEHVNIYKWTVQEKPEAVLTSYPRIPNARMPREDEYLNRITFPSWQSSTLTHFNTETGEKSKLEDQYCQTLKGNNNNNKKHLVTFAQYKKEIQTLYIKPDEICSEKCAKFPEIQSFQYKVVEDEKNLKPHLFPELFKIEDLKPKVRKERDRVAQPKKSFNKIVRILPTTLPTTRIHLKKSVPRTLLHWTARRTIHDCSDKFEDLHDMTSFTHLKKVKSRSRLLGKSSDDIHNHARHSARPYTAPEVNKQRESYSGKFTSRRMVSSGLVHINDKTSDYEMHKMRPKKIKRGY

SEQ ID NO: 4613 - protein, 445 aa, Homo sapiens
  Payload ID: 1021;
  Gene Symbol: ALS2CR12;
  Gene Name: amyotrophic lateral sclerosis 2 (juvenile) chromosome region, candidate 12;
  Uniprot ID:  Q96Q35;
  ENSP ID: ENSP00000286190
MYPNPLIYCTCWDPWNLGPRKLIKTPQLPRKNSTGSSKLTPLVPAPKNHNYLQPTKPVVSPKMKIHSARQEETNKSFYEVINVSPGYQLVRNREQISVTLGDEMFDRKKRWESEIPDKGRFSRTNIISDLEEQISELTAIIEQMNRDHQSAQKLLSSEMDLRCAEMKQNFENKNRELKEAHEAELSELENNYKAALKAEKLAAQEKLEEMGKEYKYLKNMFRTYQDSIYDEMEEKWSKQKAKWKKDEKFERENILLQQKKKMTKKFEMESGEEDKKINESCSAVFENFIQEKEELLKQHQSDTLQLEELRKTKEVPWRRDQINRHWHDVLQQLLLMQVMQEELHAQALILESLNTNLYYTQLELQKEKAIVGNLEKMLQTKFAETEEKYKHTIQILTEENIHLKQKIISKNEEICEGCSGRLASITVSKDDSDTVQDGSKKGQES

SEQ ID NO: 4614 - protein, 422 aa, Homo sapiens
  Payload ID: 1021;
  Gene Symbol: ALS2CR12;
  Gene Name: amyotrophic lateral sclerosis 2 (juvenile) chromosome region, candidate 12;
  Uniprot ID:  Q96Q35;
  ENSP ID: ENSP00000376086
MYPNPLIYCTCWDPWNLGPRKLIKTPQLPRKNSTGSSKLTPLVPAPKNHNYLQPTKPVVSPKMKIHSARQEETNKSFYEVINVSPGYQLVRNREQISVTLGDEMFDRKKRWESEIPDKGRFSRTNIISDLEEQISELTAIIEQMNRDHQSAQKLLSSEMDLRCAEMKQNFENKNRELKEAHEAELSELENNYKAALKAEKLAAQEKLEEMGKEYKYLKNMFRTYQDSIYDEMEEKWSKQKAKWKKDEKFERENILLQQKKKMTKKFEMESGEEDKKINESCSAVFENFIQEKEELLKQHQSDTLQLEELRKTKEVMQEELHAQALILESLNTNLYYTQLELQKEKAIVGNLEKMLQTKFAETEEKYKHTIQILTEENIHLKQKIISKNEEICEGCSGRLASITVSKDDSDTVQDGSKKGQES

SEQ ID NO: 4615 - protein, 445 aa, Homo sapiens; identical to SEQ ID NO: 4613
  Payload ID: 1021;
  Gene Symbol: ALS2CR12;
  Gene Name: amyotrophic lateral sclerosis 2 (juvenile) chromosome region, candidate 12;
  Uniprot ID:  Q96Q35;
  ENSP ID: ENSP00000385098

SEQ ID NO: 4616 - protein, 143 aa, Homo sapiens
  Payload ID: 1021;
  Gene Symbol: ALS2CR12;
  Gene Name: amyotrophic lateral sclerosis 2 (juvenile) chromosome region, candidate 12;
  ENSP ID: ENSP00000393945
MKIHSARQEETNKSFYEVINVSPGYQLVRNREQISVTLGDEMFDRKKRWESEIPDKGRFSRELKEAHEAELSELENNYKAALKAEKLAAQEKLEEMGKEYKYLKNMFRTYQDSIYDEMEEKWSKQKAKWKKDEKFERENILLQ

SEQ ID NO: 4617 - protein, 124 aa, Homo sapiens
  Payload ID: 1021;
  Gene Symbol: ALS2CR12;
  Gene Name: amyotrophic lateral sclerosis 2 (juvenile) chromosome region, candidate 12;
  ENSP ID: ENSP00000402327
  MOD_RES (1)..(1): Any amino acid
XSIYDEMEEKWSKQKAKWKKDEKFERENILLQQKKKMTKKFEMESGEEDKKINESCSAVFENFIQEKEELLKQHQSDTLQLEELRKTKEVMQEELHAQALILESLNTNLYYTQLELQKEAKDNF

SEQ ID NO: 4618 - protein, 49 aa, Homo sapiens
  Payload ID: 1021;
  Gene Symbol: ALS2CR12;
  Gene Name: amyotrophic lateral sclerosis 2 (juvenile) chromosome region, candidate 12;
  ENSP ID: ENSP00000407585
MYPNPLIYCTCWDPWNLGPRKLIKTPQLPRKNSTGSSKLTPLVPAPKNH

SEQ ID NO: 4619 - protein, 422 aa, Homo sapiens; identical to SEQ ID NO: 4614
  Payload ID: 1021;
  Gene Symbol: ALS2CR12;
  Gene Name: amyotrophic lateral sclerosis 2 (juvenile) chromosome region, candidate 12;
  Uniprot ID:  Q96Q35;
  ENSP ID: ENSP00000412073

SEQ ID NO: 4620 - protein, 1944 aa, Homo sapiens
  Payload ID: 1022;
  Gene Symbol: ANAPC1;
  Gene Name: anaphase promoting complex subunit 1;
  Uniprot ID:  Q9H1A4;
  ENSP ID: ENSP00000339109
MSNFYEERTTMIAARDLQEFVPFGRDHCKHHPNALNLQLRQLQPASELWSSDGAAGLVGSLQEVTIHEKQKESWQLRKGVSEIGEDVDYDEELYVAGNMVIWSKGSKSQALAVYKAFTVDSPVQQALWCDFIISQDKSEKAYSSNEVEKCICILQSSCINMHSIEGKDYIASLPFQVANVWPTKYGLLFERSASSHEVPPGSPREPLPTMFSMLHPLDEITPLVCKSGSLFGSSRVQYVVDHAMKIVFLNTDPSIVMTYDAVQNVHSVWTLRRVKSEEENVVLKFSEQGGTPQNVATSSSLTAHLRSLSKGDSPVTSPFQNYSSIHSQSRSTSSPSLHSRSPSISNMAALSRAHSPALGVHSFSGVQRFNISSHNQSPKRHSISHSPNSNSNGSFLAPETEPIVPELCIDHLWTETITNIREKNSQASKVFITSDLCGQKFLCFLVESQLQLRCVKFQESNDKTQLIFGSVTNIPAKDAAPVEKIDTMLVLEGSGNLVLYTGVVRVGKVFIPGLPAPSLTMSNTMPRPSTPLDGVSTPKPLSKLLGSLDEVVLLSPVPELRDSSKLHDSLYNEDCTFQQLGTYIHSIRDPVHNRVTLELSNGSMVRITIPEIATSELVQTCLQAIKFILPKEIAVQMLVKWYNVHSAPGGPSYHSEWNLFVTCLMNMMGYNTDRLAWTRNFDFEGSLSPVIAPKKARPSETGSDDDWEYLLNSDYHQNVESHLLNRSLCLSPSEASQMKDEDFSQNLSLDSSTLLFTHIPAIFFVLHLVYEELKLNTLMGEGICSLVELLVQLARDLKLGPYVDHYYRDYPTLVRTTGQVCTIDPGQTGFMHHPSFFTSEPPSIYQWVSSCLKGEGMPPYPYLPGICERSRLVVLSIALYILGDESLVSDESSQYLTRITIAPQKLQVEQEENRFSFRHSTSVSSLAERLVVWMTNVGFTLRDLETLPFGIALPIRDAIYHCREQPASDWPEAVCLLIGRQDLSKQACEGNLPKGKSVLSSDVPSGTETEEEDDGMNDMNHEVMSLIWSEDLRVQDVRRLLQSAHPVRVNVVQYPELSDHEFIEEKENRLLQLCQRTMALPVGRGMFTLFSYHPVPTEPLPIPKLNLTGRAPPRNTTVDLNSGNIDVPPNMTSWASFHNGVAAGLKIAPASQIDSAWIVYNKPKHAELANEYAGFLMALGLNGHLTKLATLNIHDYLTKGHEMTSIGLLLGVSAAKLGTMDMSITRLLSIHIPALLPPTSTELDVPHNVQVAAVVGIGLVYQGTAHRHTAEVLLAEIGRPPGPEMEYCTDRESYSLAAGLALGMVCLGHGSNLIGMSDLNVPEQLYQYMVGGHRRFQTGMHREKHKSPSYQIKEGDTINVDVTCPGATLALAMIYLKTNNRSIADWLRAPDTMYLLDFVKPEFLLLRTLARCLILWDDILPNSKWVDSNVPQIIRENSISLSEIELPCSEDLNLETLSQAHVYIIAGACLSLGFRFAGSENLSAFNCLHKFAKDFMTYLSAPNASVTGPHNLETCLSVVLLSLAMVMAGSGNLKVLQLCRFLHMKTGGEMNYGFHLAHHMALGLLFLGGGRYSLSTSNSSIAALLCALYPHFPAHSTDNRYHLQALRHLYVLAAEPRLLVPVDVDTNTPCYALLEVTYKGTQWYEQTKEELMAPTLLPELHLLKQIKVKGPRYWELLIDLSKGTQHLKSILSKDGVLYVKLRAGQLSYKEDPMGWQSLLAQTVANRNSEARAFKPETISAFTSDPALLSFAEYFCKPTVNMGQKQEILDLFSSVLYECVTQETPEMLPAYIAMDQAIRRLGRREMSETSELWQIKLVLEFFSSRSHQERLQNHPKRGLFMNSEFLPVVKCTIDNTLDQWLQVGGDMCVHAYLSGQPLEESQLSMLACFLVYHSVPAPQHLPPIGLEGSTSFAELLFKFKQLKMPVRALLRLAPLLLGNPQPMVM

SEQ ID NO: 4621 - protein, 1452 aa, Homo sapiens
  Payload ID: 1022;
  Gene Symbol: ANAPC1;
  Gene Name: anaphase promoting complex subunit 1;
  ENSP ID: ENSP00000396695
  MOD_RES (1)..(1): Any amino acid
XIFGSVTNIPAKDAAPVEKIDTMLVLEGSGNLVLYTGVVRVGKVFIPGLPAPSLTMSNTMPRPSTPLDGVSTPKPLSKLLGSLDEVVLLSPVPELRDSSKLHDSLYNEDCTFQQLGTYIHSIRDPVHNRVTLELSNGSMVRITIPEIATSELVQTCLQAIKFILPKEIAVQMLVKWYNVHSAPGGPSYHSEWNLFVTCLMNMMGYNTDRLAWTRNFDFEGSLSPVIAPKKARPSETGSDDDWEYLLNSDYHQNVESHLLNRSLCLSPSEASQMKDEDFSQNLSLDSSTLLFTHIPAIFFVLHLVYEELKLNTLMGEGICSLVELLVQLARDLKLGPYVDHYYRDYPTLVRTTGQVCTIDPGQTGFMHHPSFFTSEPPSIYQWVSSCLKGEGMPPYPYLPGICERSRLVVLSIALYILGDESLVSDESSQYLTRITIAPQKLQVEQEENRFSFRHSTSVSSLAERLVVWMTNVGFTLRDLETLPFGIALPIRDAIYHCREQPASDWPEAVCLLIGRQDLSKQACEGNLPKGKSVLSSDVPSGTETEEEDDGMNDMNHEVMSLIWSEDLRVQDVRRLLQSAHPVRVNVVQYPELSDHEFIEEKENRLLQLCQRTMALPVGRGMFTLFSYHPVPTEPLPIPKLNLTGRAPPRNTTVDLNSGNIDVPPNMTSWASFHNGVAAGLKIAPASQIDSAWIVYNKPKHAELANEYAGFLMALGLNGHLTKLATLNIHDYLTKGHEMTSIGLLLGVSAAKLGTMDMSITRLLSIHIPALLPPTSTELDVPHNVQVAAVVGIGLVYQGTAHRHTAEVLLAEIGRPPGPEMEYCTDRESYSLAAGLALGMVCLGHGSNLIGMSDLNVPEQLYQYMVGGHRRFQTGMHREKHKSPSYQIKEGDTINVDVTCPGATLALAMIYLKTNNRSIADWLRAPDTMYLLDFVKPEFLLLRTLARCLILWDDILPNSKWVDSNVPQIIRENSISLSEIELPCSEDLNLETLSQAHVYIIAGACLSLGFRFAGSENLSAFNCLHKFAKDFMTYLSAPNASVTGPHNLETCLSVVLLSLAMVMAGSGNLKVLQLCRFLHMKTGGEMNYGFHLAHHMALGLLFLGGGRYSLSTSNSSIAALLCALYPHFPAHSTDNRYHLQALRHLYVLAAEPRLLVPVDVDTNTPCYALLEVTYKGTQWYEQTKEELMAPTLLPELHLLKQIKVKGPRYWELLIDLSKGTQHLKSILSKDGVLYVKLRAGQLSYKEDPMGWQSLLAQTVANRNSEARAFKPETISAFTSDPALLSFAEYFCKPTVNMGQKQEILDLFSSVLYECVTQETPEMLPAYIAMDQAIRRLGRREMSETSELWQIKLVLEFFSSRSHQERLQNHPKRGLFMNSEFLPVVKCTIDNTLDQWLQVGGDMCVHAYLSGQPLEESQLSMLACFLVYHSVPAPQHLPPIGLEGLLKDLAGDSG

SEQ ID NO: 4622 - protein, 149 aa, Homo sapiens
  Payload ID: 1022;
  Gene Symbol: ANAPC1;
  Gene Name: anaphase promoting complex subunit 1;
  ENSP ID: ENSP00000405375
MSNFYEERTTMIAARDLQEFVPFGRDHCKHHPNALNLQLRQLQPASELWSSDGAAGLVGSLQEVTIHEKQKESWQLRKGVSEIGEDVDYDEELYVAGNMVIWSKGSKSQALAVYKAFTVDSPVQQALWCDFIISQDKSEKAYSCKCLAH

SEQ ID NO: 4623 - protein, 149 aa, Homo sapiens; identical to SEQ ID NO: 4622
  Payload ID: 1022;
  Gene Symbol: ANAPC1;
  Gene Name: anaphase promoting complex subunit 1;
  ENSP ID: ENSP00000486322

SEQ ID NO: 4624 - protein, 185 aa, Homo sapiens
  Payload ID: 1023;
  Gene Symbol: ANAPC10;
  Gene Name: anaphase promoting complex subunit 10;
  Uniprot ID:  Q9UM13;
  ENSP ID: ENSP00000310071
MTTPNKTPPGADPKQLERTGTVREIGSQAVWSLSSCKPGFGVDQLRDDNLETYWQSDGSQPHLVNIQFRRKTTVKTLCIYADYKSDESYTPSKISVRVGNNFHNLQEIRQLELVEPSGWIHVPLTDNHKKPTRTFMIQIAVLANHQNGRDTHMRQIKIYTPVEESSIGKFPRCTTIDFMMYRSIR

SEQ ID NO: 4625 - protein, 185 aa, Homo sapiens; identical to SEQ ID NO: 4624
  Payload ID: 1023;
  Gene Symbol: ANAPC10;
  Gene Name: anaphase promoting complex subunit 10;
  Uniprot ID:  Q9UM13;
  ENSP ID: ENSP00000403891

SEQ ID NO: 4626 - protein, 158 aa, Homo sapiens
  Payload ID: 1023;
  Gene Symbol: ANAPC10;
  Gene Name: anaphase promoting complex subunit 10;
  ENSP ID: ENSP00000421609
MTTPNKTPPGADPKQLERTGTVREIGSQAVWSLSSCKPGFGVDQLRDDNLETYWQSDGSQPHLVNIQFRRKTTVKTLCIYADYKSDESYTPSKISVRVGNNFHNLQEIRQLELVEPSGWIHVPLTDNHKKPTRTFMIQIAVLANHQNGRDTHMRQIKI

SEQ ID NO: 4627 - protein, 158 aa, Homo sapiens; identical to SEQ ID NO: 4626
  Payload ID: 1023;
  Gene Symbol: ANAPC10;
  Gene Name: anaphase promoting complex subunit 10;
  ENSP ID: ENSP00000423043

SEQ ID NO: 4628 - protein, 109 aa, Homo sapiens
  Payload ID: 1023;
  Gene Symbol: ANAPC10;
  Gene Name: anaphase promoting complex subunit 10;
  ENSP ID: ENSP00000423223
MTTPNKTPPGADPKQLERTGTVREIGSQAVWSLSSCKPGFGVDQLRDDNLETYWQSDGSQPHLVNIQFRRKTTVKTLCIYADYKSDESYTPSKISVRVGNNFHNLQEIR

SEQ ID NO: 4629 - protein, 185 aa, Homo sapiens; identical to SEQ ID NO: 4624
  Payload ID: 1023;
  Gene Symbol: ANAPC10;
  Gene Name: anaphase promoting complex subunit 10;
  Uniprot ID:  Q9UM13;
  ENSP ID: ENSP00000423995

SEQ ID NO: 4630 - protein, 68 aa, Homo sapiens
  Payload ID: 1023;
  Gene Symbol: ANAPC10;
  Gene Name: anaphase promoting complex subunit 10;
  ENSP ID: ENSP00000424463
MTTPNKTPPGADPKQLERTGTVREIGSQAVWSLSSCKPGFGVDQLRDDNLETYWQSDGSQPHLVNIQF

SEQ ID NO: 4631 - protein, 126 aa, Homo sapiens
  Payload ID: 1023;
  Gene Symbol: ANAPC10;
  Gene Name: anaphase promoting complex subunit 10;
  ENSP ID: ENSP00000425459
MTTPNKTPPGADPKQLERTGTVREIGSQAVWSLSSCKPGFGVDQLRDDNLETYWQSDGSQPHLVNIQFRRKTTVKTLCIYADYKSDESYTPSKISVRVGNNFHNLQEIRPHVLHVNEESMNLQVSG

SEQ ID NO: 4632 - protein, 185 aa, Homo sapiens; identical to SEQ ID NO: 4624
  Payload ID: 1023;
  Gene Symbol: ANAPC10;
  Gene Name: anaphase promoting complex subunit 10;
  Uniprot ID:  Q9UM13;
  ENSP ID: ENSP00000478501

SEQ ID NO: 4633 - protein, 84 aa, Homo sapiens
  Payload ID: 1024;
  Gene Symbol: ANAPC11;
  Gene Name: anaphase promoting complex subunit 11;
  Uniprot ID:  Q9NYG5;
  ENSP ID: ENSP00000339695
MKVKIKCWNGVATWLWVANDENCGICRMAFNGCCPDCKVPGDDCPLVWGQCSHCFHMHCILKWLHAQQVQQHCPMCRQEWKFKE

SEQ ID NO: 4634 - protein, 196 aa, Homo sapiens
  Payload ID: 1024;
  Gene Symbol: ANAPC11;
  Gene Name: anaphase promoting complex subunit 11;
  Uniprot ID:  Q9NYG5;
  ENSP ID: ENSP00000349957
MKVKIKCWNGVATWLWVANDENCGICRMAFNGCCPDCPLHGESISRCLGWCPQPVPVLGGRAHPQVPINTASPTPGQHTGSLMSREESSRSPDPTPPALDQETSSLLRCTSPWCLDHSCDLFGITDQVSADGPRACRQGARRRLPAGVGPVLPLLPHALHPQVAARTAGAAALPHVPPGMEVQGVRPDLALAGGAS

SEQ ID NO: 4635 - protein, 84 aa, Homo sapiens; identical to SEQ ID NO: 4633
  Payload ID: 1024;
  Gene Symbol: ANAPC11;
  Gene Name: anaphase promoting complex subunit 11;
  Uniprot ID:  Q9NYG5;
  ENSP ID: ENSP00000376181

SEQ ID NO: 4636 - protein, 84 aa, Homo sapiens; identical to SEQ ID NO: 4633
  Payload ID: 1024;
  Gene Symbol: ANAPC11;
  Gene Name: anaphase promoting complex subunit 11;
  Uniprot ID:  Q9NYG5;
  ENSP ID: ENSP00000458143

SEQ ID NO: 4637 - protein, 84 aa, Homo sapiens; identical to SEQ ID NO: 4633
  Payload ID: 1024;
  Gene Symbol: ANAPC11;
  Gene Name: anaphase promoting complex subunit 11;
  Uniprot ID:  Q9NYG5;
  ENSP ID: ENSP00000458265

SEQ ID NO: 4638 - protein, 84 aa, Homo sapiens; identical to SEQ ID NO: 4633
  Payload ID: 1024;
  Gene Symbol: ANAPC11;
  Gene Name: anaphase promoting complex subunit 11;
  Uniprot ID:  Q9NYG5;
  ENSP ID: ENSP00000458515

SEQ ID NO: 4639 - protein, 84 aa, Homo sapiens; identical to SEQ ID NO: 4633
  Payload ID: 1024;
  Gene Symbol: ANAPC11;
  Gene Name: anaphase promoting complex subunit 11;
  Uniprot ID:  Q9NYG5;
  ENSP ID: ENSP00000459200

SEQ ID NO: 4640 - protein, 84 aa, Homo sapiens; identical to SEQ ID NO: 4633
  Payload ID: 1024;
  Gene Symbol: ANAPC11;
  Gene Name: anaphase promoting complex subunit 11;
  Uniprot ID:  Q9NYG5;
  ENSP ID: ENSP00000460064

SEQ ID NO: 4641 - protein, 84 aa, Homo sapiens; identical to SEQ ID NO: 4633
  Payload ID: 1024;
  Gene Symbol: ANAPC11;
  Gene Name: anaphase promoting complex subunit 11;
  Uniprot ID:  Q9NYG5;
  ENSP ID: ENSP00000460678

SEQ ID NO: 4642 - protein, 84 aa, Homo sapiens; identical to SEQ ID NO: 4633
  Payload ID: 1024;
  Gene Symbol: ANAPC11;
  Gene Name: anaphase promoting complex subunit 11;
  Uniprot ID:  Q9NYG5;
  ENSP ID: ENSP00000461648

SEQ ID NO: 4643 - protein, 44 aa, Homo sapiens
  Payload ID: 1024;
  Gene Symbol: ANAPC11;
  Gene Name: anaphase promoting complex subunit 11;
  ENSP ID: ENSP00000462250
MKVKIKCWNGVATWLWVANDENCGICRMAFNGCCPDCECPLHAV

SEQ ID NO: 4644 - protein, 111 aa, Homo sapiens
  Payload ID: 1024;
  Gene Symbol: ANAPC11;
  Gene Name: anaphase promoting complex subunit 11;
  ENSP ID: ENSP00000462527
MKVKIKCWNGVATWLWVANDENCGICRMAFNGCCPDCWSAMARSRLAATSASRVQTVLLPQPSKQLGLQACARRRLPAGVGPVLPLLPHALHPQVAARTAGAAALPHVPPG

SEQ ID NO: 4645 - protein, 44 aa, Homo sapiens; identical to SEQ ID NO: 4643
  Payload ID: 1024;
  Gene Symbol: ANAPC11;
  Gene Name: anaphase promoting complex subunit 11;
  ENSP ID: ENSP00000462691

SEQ ID NO: 4646 - protein, 44 aa, Homo sapiens; identical to SEQ ID NO: 4643
  Payload ID: 1024;
  Gene Symbol: ANAPC11;
  Gene Name: anaphase promoting complex subunit 11;
  ENSP ID: ENSP00000463357

SEQ ID NO: 4647 - protein, 84 aa, Homo sapiens; identical to SEQ ID NO: 4633
  Payload ID: 1024;
  Gene Symbol: ANAPC11;
  Gene Name: anaphase promoting complex subunit 11;
  Uniprot ID:  Q9NYG5;
  ENSP ID: ENSP00000463567

SEQ ID NO: 4648 - protein, 84 aa, Homo sapiens; identical to SEQ ID NO: 4633
  Payload ID: 1024;
  Gene Symbol: ANAPC11;
  Gene Name: anaphase promoting complex subunit 11;
  Uniprot ID:  Q9NYG5;
  ENSP ID: ENSP00000463598

SEQ ID NO: 4649 - protein, 84 aa, Homo sapiens; identical to SEQ ID NO: 4633
  Payload ID: 1024;
  Gene Symbol: ANAPC11;
  Gene Name: anaphase promoting complex subunit 11;
  Uniprot ID:  Q9NYG5;
  ENSP ID: ENSP00000463640

SEQ ID NO: 4650 - protein, 44 aa, Homo sapiens; identical to SEQ ID NO: 4643
  Payload ID: 1024;
  Gene Symbol: ANAPC11;
  Gene Name: anaphase promoting complex subunit 11;
  ENSP ID: ENSP00000463889

SEQ ID NO: 4651 - protein, 44 aa, Homo sapiens; identical to SEQ ID NO: 4643
  Payload ID: 1024;
  Gene Symbol: ANAPC11;
  Gene Name: anaphase promoting complex subunit 11;
  ENSP ID: ENSP00000464403

SEQ ID NO: 4652 - protein, 72 aa, Homo sapiens
  Payload ID: 1024;
  Gene Symbol: ANAPC11;
  Gene Name: anaphase promoting complex subunit 11;
  ENSP ID: ENSP00000464519
MKVKIKCWNGVATWLWVANDENCGICRMAFNGCCPDCPLHGESISRCLGWCPQPVPVLGGRAHPQARCPATT

SEQ ID NO: 4653 - protein, 84 aa, Homo sapiens; identical to SEQ ID NO: 4633
  Payload ID: 1024;
  Gene Symbol: ANAPC11;
  Gene Name: anaphase promoting complex subunit 11;
  Uniprot ID:  Q9NYG5;
  ENSP ID: ENSP00000464615

SEQ ID NO: 4654 - protein, 89 aa, Homo sapiens
  Payload ID: 1024;
  Gene Symbol: ANAPC11;
  Gene Name: anaphase promoting complex subunit 11;
  ENSP ID: ENSP00000484031
MRTVASAGWHLTDAALTVSVPSMLSERPRLQGARRRLPAGVGPVLPLLPHALHPQVAARTAGAAALPHVPPGMEVQGVRPDLALAGGAS

SEQ ID NO: 4655 - protein, 74 aa, Homo sapiens
  Payload ID: 1025;
  Gene Symbol: ANAPC13;
  Gene Name: anaphase promoting complex subunit 13;
  Uniprot ID:  Q9BS18;
  ENSP ID: ENSP00000346987
MDSEVQRDGRILDLIDDAWREDKLPYEDVAIPLNELPEPEQDNGGTTESVKEQEMKWTDLALQYLHENVPPIGN

SEQ ID NO: 4656 - protein, 74 aa, Homo sapiens; identical to SEQ ID NO: 4655
  Payload ID: 1025;
  Gene Symbol: ANAPC13;
  Gene Name: anaphase promoting complex subunit 13;
  Uniprot ID:  Q9BS18;
  ENSP ID: ENSP00000421760

SEQ ID NO: 4657 - protein, 74 aa, Homo sapiens; identical to SEQ ID NO: 4655
  Payload ID: 1025;
  Gene Symbol: ANAPC13;
  Gene Name: anaphase promoting complex subunit 13;
  Uniprot ID:  Q9BS18;
  ENSP ID: ENSP00000421842

SEQ ID NO: 4658 - protein, 74 aa, Homo sapiens; identical to SEQ ID NO: 4655
  Payload ID: 1025;
  Gene Symbol: ANAPC13;
  Gene Name: anaphase promoting complex subunit 13;
  Uniprot ID:  Q9BS18;
  ENSP ID: ENSP00000427327

SEQ ID NO: 4659 - protein, 121 aa, Homo sapiens
  Payload ID: 1026;
  Gene Symbol: ANAPC15;
  Gene Name: anaphase promoting complex subunit 15;
  Uniprot ID:  P60006;
  ENSP ID: ENSP00000227618
MSTLFPSLFPRVTETLWFNLDRPCVEETELQQQEQQHQAWLQSIAEKDNNLVPIGKPASEHYDDEEEEDDEDDEDSEEDSEDDEDMQDMDEMNDYNESPDDGEVNEVDMEGNEQDQDQWMI

SEQ ID NO: 4660 - protein, 92 aa, Homo sapiens
  Payload ID: 1026;
  Gene Symbol: ANAPC15;
  Gene Name: anaphase promoting complex subunit 15;
  ENSP ID: ENSP00000389730
MSTLFPSLFPRVTETLWFNLDRPCVEETELQQQEQQHQAWLQSIAEKDNNLVPIGKPASEACRAYRLCPAHQHYDDEEEEDDEDDEDSEEDS

SEQ ID NO: 4661 - protein, 190 aa, Homo sapiens
  Payload ID: 1026;
  Gene Symbol: ANAPC15;
  Gene Name: anaphase promoting complex subunit 15;
  ENSP ID: ENSP00000437360
MSTLFPSLFPRVTETLWFNLDRPCVEETELQQQEQQHQAWLQSIAEKDNNLVPIGKPASEHYDDEEEEDDEDDEDSEEDSEDDEDMQDMDEMNDYNESPDDGEVNEVHLSVLPTCGLYHSHPKQLCPESIKLSHSFMPHVYMWLALPFPPPSPSAWPTQNFQIQFKCCSFSMKSQAETTTLSFRFMKGLC

SEQ ID NO: 4662 - protein, 123 aa, Homo sapiens
  Payload ID: 1026;
  Gene Symbol: ANAPC15;
  Gene Name: anaphase promoting complex subunit 15;
  ENSP ID: ENSP00000437683
MSTLFPSLFPRVTETLWFNLDRPCVEETELQQQEQQHQAWLQSIAEKDNNLVPIGKPASEACRAYRLCPAHQHYDDEEEEDDEDDEDSEEDSEDDEDMQDMDEMNDYNESPDDGEVNEVGKGY

SEQ ID NO: 4663 - protein, 65 aa, Homo sapiens
  Payload ID: 1026;
  Gene Symbol: ANAPC15;
  Gene Name: anaphase promoting complex subunit 15;
  ENSP ID: ENSP00000439362
MSTLFPSLFPRVTETLWFNLDRPCVEETELQQQEQQHQAWLQSIAEKDNNLVPIGKPASEHYDDE

SEQ ID NO: 4664 - protein, 125 aa, Homo sapiens
  Payload ID: 1026;
  Gene Symbol: ANAPC15;
  Gene Name: anaphase promoting complex subunit 15;
  Uniprot ID:  P60006;
  ENSP ID: ENSP00000439403
MSTLFPSLFPRVTETLWFNLDRPCVEETELQQQEQQHQAWLQSIAEKDNNLVPIGKPASEHYDDEEEEDDEDDEDSEEDSEDDEDMQDMDEMNDYNESPDDGEVNEPPLQVDMEGNEQDQDQWMI

SEQ ID NO: 4665 - protein, 121 aa, Homo sapiens; identical to SEQ ID NO: 4659
  Payload ID: 1026;
  Gene Symbol: ANAPC15;
  Gene Name: anaphase promoting complex subunit 15;
  Uniprot ID:  P60006;
  ENSP ID: ENSP00000440002

SEQ ID NO: 4666 - protein, 44 aa, Homo sapiens
  Payload ID: 1026;
  Gene Symbol: ANAPC15;
  Gene Name: anaphase promoting complex subunit 15;
  ENSP ID: ENSP00000440380
MSTLFPSLFPRVTETLWFNLDRPCVEETELQQQEQQHQAWLQSI

SEQ ID NO: 4667 - protein, 121 aa, Homo sapiens; identical to SEQ ID NO: 4659
  Payload ID: 1026;
  Gene Symbol: ANAPC15;
  Gene Name: anaphase promoting complex subunit 15;
  Uniprot ID:  P60006;
  ENSP ID: ENSP00000440983

SEQ ID NO: 4668 - protein, 105 aa, Homo sapiens
  Payload ID: 1026;
  Gene Symbol: ANAPC15;
  Gene Name: anaphase promoting complex subunit 15;
  ENSP ID: ENSP00000441774
MQDMDEMNDYNESPDDGEVNEVHLSVLPTCGLYHSHPKQLCPESIKLSHSFMPHVYMWLALPFPPPSPSAWPTQNFQIQFKCCSFSMKSQAETTTLSFRFMKGLC

SEQ ID NO: 4669 - protein, 121 aa, Homo sapiens; identical to SEQ ID NO: 4659
  Payload ID: 1026;
  Gene Symbol: ANAPC15;
  Gene Name: anaphase promoting complex subunit 15;
  Uniprot ID:  P60006;
  ENSP ID: ENSP00000443383

SEQ ID NO: 4670 - protein, 125 aa, Homo sapiens; identical to SEQ ID NO: 4664
  Payload ID: 1026;
  Gene Symbol: ANAPC15;
  Gene Name: anaphase promoting complex subunit 15;
  Uniprot ID:  P60006;
  ENSP ID: ENSP00000443645

SEQ ID NO: 4671 - protein, 121 aa, Homo sapiens; identical to SEQ ID NO: 4659
  Payload ID: 1026;
  Gene Symbol: ANAPC15;
  Gene Name: anaphase promoting complex subunit 15;
  Uniprot ID:  P60006;
  ENSP ID: ENSP00000443911

SEQ ID NO: 4672 - protein, 110 aa, Homo sapiens
  Payload ID: 1026;
  Gene Symbol: ANAPC15;
  Gene Name: anaphase promoting complex subunit 15;
  ENSP ID: ENSP00000445212
MSTLFPSLFPRVTETLWFNLDRPCVEETELQQQEQQHQAWLQSIAEKDNNLVPIGKPASEHYDDEEEEDDEDDEDSEEDSEDDEDMQDMDEMNDYNESPDDGEVNENGMG

SEQ ID NO: 4673 - protein, 121 aa, Homo sapiens; identical to SEQ ID NO: 4659
  Payload ID: 1026;
  Gene Symbol: ANAPC15;
  Gene Name: anaphase promoting complex subunit 15;
  Uniprot ID:  P60006;
  ENSP ID: ENSP00000446383

SEQ ID NO: 4674 - protein, 121 aa, Homo sapiens; identical to SEQ ID NO: 4659
  Payload ID: 1026;
  Gene Symbol: ANAPC15;
  Gene Name: anaphase promoting complex subunit 15;
  Uniprot ID:  P60006;
  ENSP ID: ENSP00000446412

SEQ ID NO: 4675 - protein, 110 aa, Homo sapiens
  Payload ID: 1027;
  Gene Symbol: ANAPC16;
  Gene Name: anaphase promoting complex subunit 16;
  Uniprot ID:  Q96DE5;
  ENSP ID: ENSP00000299381
MAASSSSSSAGGVSGSSVTGSGFSVSDLAPPRKALFTYPKGAGEMLEDGSERFLCESVFSYQVASTLKQVKHDQQVARMEKLAGLVEELEADEWRFKPIEQLLGFTPSSG

SEQ ID NO: 4676 - protein, 110 aa, Homo sapiens; identical to SEQ ID NO: 4675
  Payload ID: 1027;
  Gene Symbol: ANAPC16;
  Gene Name: anaphase promoting complex subunit 16;
  Uniprot ID:  Q96DE5;
  ENSP ID: ENSP00000477760

SEQ ID NO: 4677 - protein, 85 aa, Homo sapiens
  Payload ID: 1027;
  Gene Symbol: ANAPC16;
  Gene Name: anaphase promoting complex subunit 16;
  ENSP ID: ENSP00000478792
MAASSSSSSAGGVSGSSVTGSGFSVSDLAPPRKALFTYPKGAGEMLEDQQVARMEKLAGLVEELEADEWRFKPIEQLLGFTPSSG

SEQ ID NO: 4678 - protein, 822 aa, Homo sapiens
  Payload ID: 1028;
  Gene Symbol: ANAPC2;
  Gene Name: anaphase promoting complex subunit 2;
  Uniprot ID:  Q9UJX6;
  ENSP ID: ENSP00000314004
MAAAVVVAEGDSDSRPGQELLVAWNTVSTGLVPPAALGLVSSRTSGAVPPKEEELRAAVEVLRGHGLHSVLEEWFVEVLQNDLQANISPEFWNAISQCENSADEPQCLLLLLDAFGLLESRLDPYLRSLELLEKWTRLGLLMGTGAQGLREEVHTMLRGVLFFSTPRTFQEMIQRLYGCFLRVYMQSKRKGEGGTDPELEGELDSRYARRRYYRLLQSPLCAGCSSDKQQCWCRQALEQFHQLSQVLHRLSLLERVSAEAVTTTLHQVTRERMEDRCRGEYERSFLREFHKWIERVVGWLGKVFLQDGPARPASPEAGNTLRRWRCHVQRFFYRIYASLRIEELFSIVRDFPDSRPAIEDLKYCLERTDQRQQLLVSLKAALETRLLHPGVNTCDIITLYISAIKALRVLDPSMVILEVACEPIRRYLRTREDTVRQIVAGLTGDSDGTGDLAVELSKTDPASLETGQDSEDDSGEPEDWVPDPVDADPGKSSSKRRSSDIISLLVSIYGSKDLFINEYRSLLADRLLHQFSFSPEREIRNVELLKLRFGEAPMHFCEVMLKDMADSRRINANIREEDEKRPAEEQPPFGVYAVILSSEFWPPFKDEKLEVPEDIRAALEAYCKKYEQLKAMRTLSWKHTLGLVTMDVELADRTLSVAVTPVQAVILLYFQDQASWTLEELSKAVKMPVALLRRRMSVWLQQGVLREEPPGTFSVIEEERPQDRDNMVLIDSDDESDSGMASQADQKEEELLLFWTYIQAMLTNLESLSLDRIYNMLRMFVVTGPALAEIDLQELQGYLQKKVRDQQLVYSAGVYRLPKNCS

SEQ ID NO: 4679 - protein, 808 aa, Homo sapiens
  Payload ID: 1029;
  Gene Symbol: ANAPC4;
  Gene Name: anaphase promoting complex subunit 4;
  Uniprot ID:  Q9UJX5;
  ENSP ID: ENSP00000318775
MLRFPTCFPSFRVVGEKQLPQEIIFLVWSPKRDLIALANTAGEVLLHRLASFHRVWSFPPNENTGKEVTCLAWRPDGKLLAFALADTKKIVLCDVEKPESLHSFSVEAPVSCMHWMEVTVESSVLTSFYNAEDESNLLLPKLPTLPKNYSNTSKIFSEENSDEIIKLLGDVRLNILVLGGSSGFIELYAYGMFKIARVTGIAGTCLALCLSSDLKSLSVVTEVSTNGASEVSYFQLETNLLYSFLPEVTRMARKFTHISALLQYINLSLTCMCEAWEEILMQMDSRLTKFVQEKNTTTSVQDEFMHLLLWGKASAELQTLLMNQLTVKGLKKLGQSIESSYSSIQKLVISHLQSGSESLLYHLSELKGMASWKQKYEPLGLDAAGIEEAITAVGSFILKANELLQVIDSSMKNFKAFFRWLYVAMLRMTEDHVLPELNKMTQKDITFVAEFLTEHFNEAPDLYNRKGKYFNVERVGQYLKDEDDDLVSPPNTEGNQWYDFLQNSSHLKESPLLFPYYPRKSLHFVKRRMENIIDQCLQKPADVIGKSMNQAICIPLYRDTRSEDSTRRLFKFPFLWNNKTSNLHYLLFTILEDSLYKMCILRRHTDISQSVSNGLIAIKFGSFTYATTEKVRRSIYSCLDAQFYDDETVTVVLKDTVGREGRDRLLVQLPLSLVYNSEDSAEYQFTGTYSTRLDEQCSAIPTRTMHFEKHWRLLESMKAQYVAGNGFRKVSCVLSSNLRHVRVFEMDIDDEWELDESSDEEEEASNKPVKIKEEVLSESEAENQQAGAAALAPEIVIKVEKLDPELDS

SEQ ID NO: 4680 - protein, 162 aa, Homo sapiens
  Payload ID: 1029;
  Gene Symbol: ANAPC4;
  Gene Name: anaphase promoting complex subunit 4;
  ENSP ID: ENSP00000421840
MLRFPTCFPSFRVVGEKQLPQEIIFLVWSPKRDLIALANTAGEVLLHRLASFHRVWSFPPNENTGKEVTCLAWRPDGKLLAFALADTKKIVLCDVEKPESLHSFSVEAPVSCMHWMEVTVESSVLTSFYNAEDESNLLLPKLPTLPKNYSNTSKIFSEENSD

SEQ ID NO: 4681 - protein, 83 aa, Homo sapiens
  Payload ID: 1029;
  Gene Symbol: ANAPC4;
  Gene Name: anaphase promoting complex subunit 4;
  ENSP ID: ENSP00000426512
MLRFPTCFPSFRVVGEKQLPQEIIFLVWSPKRDLIALANTAGEVLLHRLASFHRVWSFPPNENTGKEFWPLLLLIPRKLFCVM

SEQ ID NO: 4682 - protein, 809 aa, Homo sapiens
  Payload ID: 1029;
  Gene Symbol: ANAPC4;
  Gene Name: anaphase promoting complex subunit 4;
  Uniprot ID:  Q9UJX5;
  ENSP ID: ENSP00000426654
MLRFPTCFPSFRVVGEKQLPQEIIFLVWSPKRDLIALANTAGEVLLHRLASFHRVWSFPPNENTGKEVTCLAWRPDGKLLAFALADTKKIVLCDVEKPESLHSFSVEAPVSCMHWMEVTVESSVLTSFYNAEDESNLLLPKLPTLPKNYSNTSKIFSEENSDEIIKLLGDVRLNILVLGGSSGFIELYAYGMFKIARVTGIAGTCLALCLSSDLKSLSVVTEVSTNGASEVSYFQLETNLLYSFLPEVTRMARKFTHISALLQYINLSLTCMCEAWEEILMQMDSRLTKFVQEKNTTTSVQDEFMHLLLWGKASAELQTLLMNQLTVKGLKKLGQSIESSYSSIQKLVISHLQSGSESLLYHLSELKGMASWKQKYEPLGLDAAGIEEAITAVGSFILKANELLQVIDSSMKNFKAFFRWLYVAMLRMTEDHVLPELNKVMTQKDITFVAEFLTEHFNEAPDLYNRKGKYFNVERVGQYLKDEDDDLVSPPNTEGNQWYDFLQNSSHLKESPLLFPYYPRKSLHFVKRRMENIIDQCLQKPADVIGKSMNQAICIPLYRDTRSEDSTRRLFKFPFLWNNKTSNLHYLLFTILEDSLYKMCILRRHTDISQSVSNGLIAIKFGSFTYATTEKVRRSIYSCLDAQFYDDETVTVVLKDTVGREGRDRLLVQLPLSLVYNSEDSAEYQFTGTYSTRLDEQCSAIPTRTMHFEKHWRLLESMKAQYVAGNGFRKVSCVLSSNLRHVRVFEMDIDDEWELDESSDEEEEASNKPVKIKEEVLSESEAENQQAGAAALAPEIVIKVEKLDPELDS

SEQ ID NO: 4683 - protein, 755 aa, Homo sapiens
  Payload ID: 1030;
  Gene Symbol: ANAPC5;
  Gene Name: anaphase promoting complex subunit 5;
  Uniprot ID:  Q9UJX4;
  ENSP ID: ENSP00000261819
MASVHESLYFNPMMTNGVVHANVFGIKDWVTPYKIAVLVLLNEMSRTGEGAVSLMERRRLNQLLLPLLQGPDITLSKLYKLIEESCPQLANSVQIRIKLMAEGELKDMEQFFDDLSDSFSGTEPEVHKTSVVGLFLRHMILAYSKLSFSQVFKLYTALQQYFQNGEKKTVEDADMELTSRDEGERKMEKEELDVSVREEEVSCSGPLSQKQAEFFLSQQASLLKNDETKALTPASLQKELNNLLKFNPDFAEAHYLSYLNNLRVQDVFSSTHSLLHYFDRLILTGAESKSNGEEGYGRSLRYAALNLAALHCRFGHYQQAELALQEAIRIAQESNDHVCLQHCLSWLYVLGQKRSDSYVLLEHSVKKAVHFGLPYLASLGIQSLVQQRAFAGKTANKLMDALKDSDLLHWKHSLSELIDISIAQKTAIWRLYGRSTMALQQAQMLLSMNSLEAVNAGVQQNNTESFAVALCHLAELHAEQGCFAAASEVLKHLKERFPPNSQHAQLWMLCDQKIQFDRAMNDGKYHLADSLVTGITALNSIEGVYRKAVVLQAQNQMSEAHKLLQKLLVHCQKLKNTEMVISVLLSVAELYWRSSSPTIALPMLLQALALSKEYRLQYLASETVLNLAFAQLILGIPEQALSLLHMAIEPILADGAILDKGRAMFLVAKCQVASAASYDQPKKAEALEAAIENLNEAKNYFAKVDCKERIRDVVYFQARLYHTLGKTQERNRCAMLFRQLHQELPSHGVPLINHL

SEQ ID NO: 4684 - protein, 643 aa, Homo sapiens
  Payload ID: 1030;
  Gene Symbol: ANAPC5;
  Gene Name: anaphase promoting complex subunit 5;
  Uniprot ID:  Q9UJX4;
  ENSP ID: ENSP00000415061
MAEGELKDMEQFFDDLSDSFSGTEPEVHKTSVVGLFLRHMILAYSKLSFSQVFKLYTALQQYFQNGEKKTVEDADMELTSRDEGERKMEKEELDVSVREEEVSCSGPLSQKQAEFFLSQQASLLKNDETKALTPASLQKELNNLLKFNPDFAEAHYLSYLNNLRVQDVFSSTHSLLHYFDRLILTGAESKSNGEEGYGRSLRYAALNLAALHCRFGHYQQAELALQEAIRIAQESNDHVCLQHCLSWLYVLGQKRSDSYVLLEHSVKKAVHFGLPRAFAGKTANKLMDALKDSDLLHWKHSLSELIDISIAQKTAIWRLYGRSTMALQQAQMLLSMNSLEAVNAGVQQNNTESFAVALCHLAELHAEQGCFAAASEVLKHLKERFPPNSQHAQLWMLCDQKIQFDRAMNDGKYHLADSLVTGITALNSIEGVYRKAVVLQAQNQMSEAHKLLQKLLVHCQKLKNTEMVISVLLSVAELYWRSSSPTIALPMLLQALALSKEYRLQYLASETVLNLAFAQLILGIPEQALSLLHMAIEPILADGAILDKGRAMFLVAKCQVASAASYDQPKKAEALEAAIENLNEAKNYFAKVDCKERIRDVVYFQARLYHTLGKTQERNRCAMLFRQLHQELPSHGVPLINHL

SEQ ID NO: 4685 - protein, 396 aa, Homo sapiens
  Payload ID: 1030;
  Gene Symbol: ANAPC5;
  Gene Name: anaphase promoting complex subunit 5;
  ENSP ID: ENSP00000437857
  MOD_RES (1)..(1): Any amino acid
XASLLKNDETKALTPASLQKELNNLLKFNPDFAEAHYLSYLNNLRVQDVFSSTHSLLHYFDRLILTGAESKSNGEEGYGRSLRYAALNLAALHCRFGHYQQAELALQEAIRIAQESNDHVCLQHCLSWLYVLGQKRSDSYVLLEHSVKKAVHFGLPYLASLGIQSLVQQRAFAGKTANKLMDALKDSDLLHWKHSLSELIDISIAQKTAIWRLYGRSTMALQQAQMLLSMNSLEAVNAGVQQNNTESFAVALCHLAELHAEQGCFAAASEVLKHLKERFPPNSQHAQLWMLCDQKIQFDRAMNDGKYHLADSLVTGITALNSIEGVYRKAVVLQAQNQMSEAHKLLQKLLVHCQKLKNTEMVIRAVLAIFLPYHRAAHAPAGSGPLQGVPVTVLGL

SEQ ID NO: 4686 - protein, 421 aa, Homo sapiens
  Payload ID: 1030;
  Gene Symbol: ANAPC5;
  Gene Name: anaphase promoting complex subunit 5;
  ENSP ID: ENSP00000438754
MIYFDDFSCQSWLYVLGQKRSDSYVLLEHSVKKAVHFGLPYLASLGIQSLVQQRAFAGKTANKLMDALKDSDLLHWKHSLSELIDISIAQKTAIWRLYGRSTMALQQAQMLLSMNSLEAVNAGVQQNNTESFAVALCHLAELHAEQGCFAAASEVLKHLKERFPPNSQHAQLWMLCDQKIQFDRAMNDGKYHLADSLVTGITALNSIEGVYRKAVVLQAQNQMSEAHKLLQKLLVHCQKLKNTEMVISVLLSVAELYWRSSSPTIALPMLLQALALSKEYRLQYLASETVLNLAFAQLILGIPEQALSLLHMAIEPILADGAILDKGRAMFLVAKCQVASAASYDQPKKAEALEAAIENLNEAKNYFAKVDCKERIRDVVYFQARLYHTLGKTQERNRCAMLFRQLHQELPSHGVPLINHL

SEQ ID NO: 4687 - protein, 742 aa, Homo sapiens
  Payload ID: 1030;
  Gene Symbol: ANAPC5;
  Gene Name: anaphase promoting complex subunit 5;
  ENSP ID: ENSP00000439875
MASVHESLYFNPMMTNGVVHANVFGIKDWVTPYKIAVLVLLNEMSRTGEGAVSLMERRRLNQLLLPLLQGPDITLSKLYKLIEESCPQLANSVQIRIKLMAEGELKDMEQFFDDLSDSFSGTEPEVHKTSVVGLFLRHMILAYSKLSFSQVFKLYTALQQYFQNGEKKTVEDADMELTSRDEGERKMEKEELDVSVREEEVSCSGPLSQKQAEFFLSQQASLLKNDETKALTPASLQKELNNLLKFNPDFAEAHYLSYLNNLRVQDVFSSTHSLLHYFDRLILTGAESKSNGEEGYGRSLRYAALNLAALHCRFGHYQQAELALQEAIRIAQESNDHVCLQHCLSWLYVLGQKRSDSYVLLEHSVKKAVHFGLPRAFAGKTANKLMDALKDSDLLHWKHSLSELIDISIAQKTAIWRLYGRSTMALQQAQMLLSMNSLEAVNAGVQQNNTESFAVALCHLAELHAEQGCFAAASEVLKHLKERFPPNSQHAQLWMLCDQKIQFDRAMNDGKYHLADSLVTGITALNSIEGVYRKAVVLQAQNQMSEAHKLLQKLLVHCQKLKNTEMVISVLLSVAELYWRSSSPTIALPMLLQALALSKEYRLQYLASETVLNLAFAQLILGIPEQALSLLHMAIEPILADGAILDKGRAMFLVAKCQVASAASYDQPKKAEALEAAIENLNEAKNYFAKVDCKERIRDVVYFQARLYHTLGKTQERNRCAMLFRQLHQELPSHGVPLINHL

SEQ ID NO: 4688 - protein, 217 aa, Homo sapiens
  Payload ID: 1030;
  Gene Symbol: ANAPC5;
  Gene Name: anaphase promoting complex subunit 5;
  ENSP ID: ENSP00000440800
MAEGELKDMEQFFDDLSDSFSGTEPEVHKTSVVGLFLRHMILAYSKLSFSQVFKLYTALQQYFQNGEKKTVEDADMELTSRDEGERKMEKEELDVSVREEEVSCSGPLSQKQAEFFLSQQASLLKNDETKALTPASLQKELNNLLKFNPDFAEAHYLSYLNNLRVQDVFSSTHSLLHYFDRLILTGAESKSNGEEGYGRSLRYAALNLAALHCRFGH

SEQ ID NO: 4689 - protein, 44 aa, Homo sapiens
  Payload ID: 1030;
  Gene Symbol: ANAPC5;
  Gene Name: anaphase promoting complex subunit 5;
  ENSP ID: ENSP00000441508
MAEGELKDMEQFFDDLSDSFSGTEPEVHKTSVVGLFLRHMILAY

SEQ ID NO: 4690 - protein, 216 aa, Homo sapiens
  Payload ID: 1030;
  Gene Symbol: ANAPC5;
  Gene Name: anaphase promoting complex subunit 5;
  ENSP ID: ENSP00000445191
MASVHESLYFNPMMTNGVVHANVFGIKDWVTPYKIAVLVLLNEMSRTGEGAVSLMERRRLNQLLLPLLQRRDFAMLPRLAGNSWTQAILPSGLPEYWDYRSEPLRPAVMCYFILQTQGPDITLSKLYKLIEESCPQLANSVQIRIKLMAEGELKDMEQFFDDLSDSFSGTEPEVHKTSVVGLFLRHMILAYSKLSFSQVFKLYTALQQYFQNGEKK

SEQ ID NO: 4691 - protein, 599 aa, Homo sapiens
  Payload ID: 1031;
  Gene Symbol: ANAPC7;
  Gene Name: anaphase promoting complex subunit 7;
  Uniprot ID:  Q9UJX3;
  ENSP ID: ENSP00000394394
MDPGDAAILESSLRILYRLFESVLPPLPAALQSRMNVIDHVRDMAAAGLHSNVRLLSSLLLTMSNNNPELFSPPQKYQLLVYHADSLFHDKEYRNAVSKYTMALQQKKALSKTSKVRPSTGNSASTPQSQCLPSEIEVKYKMAECYTMLKQDKDAIAILDGIPSRQRTPKINMMLANLYKKAGQERPSVTSYKEVLRQCPLALDAILGLLSLSVKGAEVASMTMNVIQTVPNLDWLSVWIKAYAFVHTGDNSRAISTICSLEKKSLLRDNVDLLGSLADLYFRAGDNKNSVLKFEQAQMLDPYLIKGMDVYGYLLAREGRLEDVENLGCRLFNISDQHAEPWVVSGCHSFYSKRYSRALYLGAKAIQLNSNSVQALLLKGAALRNMGRVQEAIIHFREAIRLAPCRLDCYEGLIECYLASNSIREAMVMANNVYKTLGANAQTLTLLATVCLEDPVTQEKAKTLLDKALTQRPDYIKAVVKKAELLSREQKYEDGIALLRNALANQSDCVLHRILGDFLVAVNEYQEAMDQYSIALSLDPNDQKSLEGMQKMEKEESPTDATQEEDVDDMEGSGEEGDLEGSDSEAAQWADQEQWFGMQ

SEQ ID NO: 4692 - protein, 537 aa, Homo sapiens
  Payload ID: 1031;
  Gene Symbol: ANAPC7;
  Gene Name: anaphase promoting complex subunit 7;
  Uniprot ID:  Q9UJX3;
  ENSP ID: ENSP00000402314
MDPGDAAILESSLRILYRLFESVLPPLPAALQSRMNVIDHVRDMAAAGLHSNVRLLSSLLLTMSNNNPELFSPPQKYQLLVYHADSLFHDKEYRNAVSKYTMALQQKKALSKTSKVRPSTGNSASTPQSQCLPSEIEVKYKMAECYTMLKQDKDAIAILDGIPSRQRTPKINMMLANLYKKAGQERPSVTSYKEVLRQCPLALDAILGLLSLSVKGAEVASMTMNVIQTVPNLDWLSVWIKAYAFVHTGDNSRAISTICSLEKKSLLRDNVDLLGSLADLYFRAGDNKNSVLKFEQAQMLDPYLIKGMDVYGYLLAREGRLEDVENLGCRLFNISDQHAEPWVVSGCHSFYSKRYSRALYLGAKAIQLNSNSVQALLLKGAALRNMGRVQEAIIHFREAIRLAPCRLDCYEGLIECYLASNSIREAMVMANNVYKTLGANAQTLTLLATVCLEDPVTQEKAKTLLDKALTQRPDYIKAVVKKAELLSREQKYEDGIALLRNALANQSDCVLHRILGDFLVAVNEYQEAMDQYSIALR

SEQ ID NO: 4693 - protein, 149 aa, Homo sapiens
  Payload ID: 1031;
  Gene Symbol: ANAPC7;
  Gene Name: anaphase promoting complex subunit 7;
  ENSP ID: ENSP00000450293
  MOD_RES (1)..(1): Any amino acid
XLLKGAALRNMGRVQEAIIHFREAIRLAPCRLDCYEGREQKYEDGIALLRNALANQSDCVLHRILGDFLVAVNEYQEAMDQYSIALSLDPNDQKSLEGMQKMEKEESPTDATQEEDVDDMEGSGEEGDLEGSDSEAAQWADQEQWFGMQ

SEQ ID NO: 4694 - protein, 54 aa, Homo sapiens
  Payload ID: 1031;
  Gene Symbol: ANAPC7;
  Gene Name: anaphase promoting complex subunit 7;
  ENSP ID: ENSP00000450405
  MOD_RES (1)..(1): Any amino acid
XVLPPLPAALQSRMNVIDHVRDMAAAGLHSNVRLLSSLLLTMSNNNPVFHLKLK

SEQ ID NO: 4695 - protein, 1620 aa, Homo sapiens
  Payload ID: 1032;
  Gene Symbol: ALK;
  Gene Name: anaplastic lymphoma receptor tyr kinase;
  Uniprot ID:  Q9UM73;
  ENSP ID: ENSP00000373700
MGAIGLLWLLPLLLSTAAVGSGMGTGQRAGSPAAGPPLQPREPLSYSRLQRKSLAVDFVVPSLFRVYARDLLLPPSSSELKAGRPEARGSLALDCAPLLRLLGPAPGVSWTAGSPAPAEARTLSRVLKGGSVRKLRRAKQLVLELGEEAILEGCVGPPGEAAVGLLQFNLSELFSWWIRQGEGRLRIRLMPEKKASEVGREGRLSAAIRASQPRLLFQIFGTGHSSLESPTNMPSPSPDYFTWNLTWIMKDSFPFLSHRSRYGLECSFDFPCELEYSPPLHDLRNQSWSWRRIPSEEASQMDLLDGPGAERSKEMPRGSFLLLNTSADSKHTILSPWMRSSSEHCTLAVSVHRHLQPSGRYIAQLLPHNEAAREILLMPTPGKHGWTVLQGRIGRPDNPFRVALEYISSGNRSLSAVDFFALKNCSEGTSPGSKMALQSSFTCWNGTVLQLGQACDFHQDCAQGEDESQMCRKLPVGFYCNFEDGFCGWTQGTLSPHTPQWQVRTLKDARFQDHQDHALLLSTTDVPASESATVTSATFPAPIKSSPCELRMSWLIRGVLRGNVSLVLVENKTGKEQGRMVWHVAAYEGLSLWQWMVLPLLDVSDRFWLQMVAWWGQGSRAIVAFDNISISLDCYLTISGEDKILQNTAPKSRNLFERNPNKELKPGENSPRQTPIFDPTVHWLFTTCGASGPHGPTQAQCNNAYQNSNLSVEVGSEGPLKGIQIWKVPATDTYSISGYGAAGGKGGKNTMMRSHGVSVLGIFNLEKDDMLYILVGQQGEDACPSTNQLIQKVCIGENNVIEEEIRVNRSVHEWAGGGGGGGGATYVFKMKDGVPVPLIIAAGGGGRAYGAKTDTFHPERLENNSSVLGLNGNSGAAGGGGGWNDNTSLLWAGKSLQEGATGGHSCPQAMKKWGWETRGGFGGGGGGCSSGGGGGGYIGGNAASNNDPEMDGEDGVSFISPLGILYTPALKVMEGHGEVNIKHYLNCSHCEVDECHMDPESHKVICFCDHGTVLAEDGVSCIVSPTPEPHLPLSLILSVVTSALVAALVLAFSGIMIVYRRKHQELQAMQMELQSPEYKLSKLRTSTIMTDYNPNYCFAGKTSSISDLKEVPRKNITLIRGLGHGAFGEVYEGQVSGMPNDPSPLQVAVKTLPEVCSEQDELDFLMEALIISKFNHQNIVRCIGVSLQSLPRFILLELMAGGDLKSFLRETRPRPSQPSSLAMLDLLHVARDIACGCQYLEENHFIHRDIAARNCLLTCPGPGRVAKIGDFGMARDIYRASYYRKGGCAMLPVKWMPPEAFMEGIFTSKTDTWSFGVLLWEIFSLGYMPYPSKSNQEVLEFVTSGGRMDPPKNCPGPVYRIMTQCWQHQPEDRPNFAIILERIEYCTQDPDVINTALPIEYGPLVEEEEKVPVRPKDPEGVPPLLVSQQAKREEERSPAAPPPLPTTSSGKAAKKPTAAEISVRVPRGPAVEGGHVNMAFSQSNPPSELHKVHGSRNKPTSLWNPTYGSWFTEKPTKKNNPIAKKEPHDRGNLGLEGSCTVPPNVATGRLPGASLLLEPSSLTANMKEVPLFRLRHFPCGNVNYGYQQQGLPLEAATAPGAGHYEDTILKSKNSMNQPGP

SEQ ID NO: 4696 - protein, 152 aa, Homo sapiens
  Payload ID: 1032;
  Gene Symbol: ALK;
  Gene Name: anaplastic lymphoma receptor tyr kinase;
  ENSP ID: ENSP00000387488
SSISDLKEVPRKNITLIRGLGHGAFGEVYEGQVSGMPNDPSPLQVAVKTLPEVCSEQDELDFLMEALIISLSWKQLFCFTFCLRPSWEKSTMNSSTQSTHQYLRKTLSCPLRHFLTQVPEQHPHSSSHSPANGTPVEPAVVLPTCSPARFWV

SEQ ID NO: 4697 - protein, 580 aa, Homo sapiens
  Payload ID: 1032;
  Gene Symbol: ALK;
  Gene Name: anaplastic lymphoma receptor tyr kinase;
  ENSP ID: ENSP00000414027
MVTTCSAIYTFQFIRSSVYRRKHQELQAMQMELQSPEYKLSKLRTSTIMTDYNPNYCFAGKTSSISDLKEVPRKNITLIRGLGHGAFGEVYEGQVSGMPNDPSPLQVAVKTLPEVCSEQDELDFLMEALIISKFNHQNIVRCIGVSLQSLPRFILLELMAGGDLKSFLRETRPRPSQPSSLAMLDLLHVARDIACGCQYLEENHFIHRDIAARNCLLTCPGPGRVAKIGDFGMARDIYRASYYRKGGCAMLPVKWMPPEAFMEGIFTSKTDTWSFGVLLWEIFSLGYMPYPSKSNQEVLEFVTSGGRMDPPKNCPGPVYRIMTQCWQHQPEDRPNFAIILERIEYCTQDPDVINTALPIEYGPLVEEEEKVPVRPKDPEGVPPLLVSQQAKREEERSPAAPPPLPTTSSGKAAKKPTAAEISVRVPRGPAVEGGHVNMAFSQSNPPSELHKVHGSRNKPTSLWNPTYGSWFTEKPTKKNNPIAKKEPHDRGNLGLEGSCTVPPNVATGRLPGASLLLEPSSLTANMKEVPLFRLRHFPCGNVNYGYQQQGLPLEAATAPGAGHYEDTILKSKNSMNQPGP

SEQ ID NO: 4698 - protein, 1243 aa, Homo sapiens
  Payload ID: 1032;
  Gene Symbol: ALK;
  Gene Name: anaplastic lymphoma receptor tyr kinase;
  ENSP ID: ENSP00000482733
MPTPGKHGWTVLQGRIGRPDNPFRVALEYISSGNRSLSAVDFFALKNCSEGTSPGSKMALQSSFTCWNGTVLQLGQACDFHQDCAQGEDESQMCRKLPVGFYCNFEDGFCGWTQGTLSPHTPQWQVRTLKDARFQDHQDHALLLSTTDVPASESATVTSATFPAPIKSSPCELRMSWLIRGVLRGNVSLVLVENKTGKEQGRMVWHVAAYEGLSLWQWMVLPLLDVSDRFWLQMVAWWGQGSRAIVAFDNISISLDCYLTISGEDKILQNTAPKSRNLFERNPNKELKPGENSPRQTPIFDPTVHWLFTTCGASGPHGPTQAQCNNAYQNSNLSVEVGSEGPLKGIQIWKVPATDTYSISGYGAAGGKGGKNTMMRSHGVSVLGIFNLEKDDMLYILVGQQGEDACPSTNQLIQKVCIGENNVIEEEIRVNRSVHEWAGGGGGGGGATYVFKMKDGVPVPLIIAAGGGGRAYGAKTDTFHPERLENNSSVLGLNGNSGAAGGGGGWNDNTSLLWAGKSLQEGATGGHSCPQAMKKWGWETRGGFGGGGGGCSSGGGGGGYIGGNAASNNDPEMDGEDGVSFISPLGILYTPALKVMEGHGEVNIKHYLNCSHCEVDECHMDPESHKVICFCDHGTVLAEDGVSCIVSPTPEPHLPLSLILSVVTSALVAALVLAFSGIMIVYRRKHQELQAMQMELQSPEYKLSKLRTSTIMTDYNPNYCFAGKTSSISDLKEVPRKNITLIRGLGHGAFGEVYEGQVSGMPNDPSPLQVAVKTLPEVCSEQDELDFLMEALIISKFNHQNIVRCIGVSLQSLPRFILLELMAGGDLKSFLRETRPRPSQPSSLAMLDLLHVARDIACGCQYLEENHFIHRDIAARNCLLTCPGPGRVAKIGDFGMARDIYRASYYRKGGCAMLPVKWMPPEAFMEGIFTSKTDTWSFGVLLWEIFSLGYMPYPSKSNQEVLEFVTSGGRMDPPKNCPGPVYRIMTQCWQHQPEDRPNFAIILERIEYCTQDPDVINTALPIEYGPLVEEEEKVPVRPKDPEGVPPLLVSQQAKREEERSPAAPPPLPTTSSGKAAKKPTAAEISVRVPRGPAVEGGHVNMAFSQSNPPSELHKVHGSRNKPTSLWNPTYGSWFTEKPTKKNNPIAKKEPHDRGNLGLEGSCTVPPNVATGRLPGASLLLEPSSLTANMKEVPLFRLRHFPCGNVNYGYQQQGLPLEAATAPGAGHYEDTILKSKNSMNQPGP

SEQ ID NO: 4699 - protein, 410 aa, Homo sapiens
  Payload ID: 1033;
  Gene Symbol: AUP1;
  Gene Name: ancient ubiquitous prt 1;
  Uniprot ID:  Q9Y679;
  ENSP ID: ENSP00000366748
MELPSGPGPERLFDSHRLPGDCFLLLVLLLYAPVGFCLLVLRLFLGIHVFLVSCALPDSVLRRFVVRTMCAVLGLVARQEDSGLRDHSVRVLISNHVTPFDHNIVNLLTTCSTPLLNSPPSFVCWSRGFMEMNGRGELVESLKRFCASTRLPPTPLLLFPEEEATNGREGLLRFSSWPFSIQDVVQPLTLQVQRPLVSVTVSDASWVSELLWSLFVPFTVYQVRWLRPVHRQLGEANEEFALRVQQLVAKELGQTGTRLTPADKAEHMKRQRHPRLRPQSAQSSFPPSPGPSPDVQLATLAQRVKEVLPHVPLGVIQRDLAKTGCVDLTITNLLEGAVAFMPEDITKGTQSLPTASASKFPSSGPVTPQPTALTFAKSSWARQESLQERKQALYEYARRRFTERRAQEAD

SEQ ID NO: 4700 - protein, 373 aa, Homo sapiens
  Payload ID: 1033;
  Gene Symbol: AUP1;
  Gene Name: ancient ubiquitous prt 1;
  Uniprot ID:  Q9Y679;
  ENSP ID: ENSP00000403430
MELPSGPGPERLFDSHRLPGDCFLLLVLLLYAPVGFCLLVLRLFLGIHVFLVSCALPDSVLRRFVVRTMCAVLGLVARQEDSGLRDHSVRVLISNHVTPFDHNIVNLLTTCSTPLLNSPPSFVCWSRGFMEMNGRGELVESLKRFCASTRLPPTPLLLFPEEEATNGREGLLRFSSWPFSIQDVVQPLTLQVQRPLVSVTVSDASWVSELLWSLFVPFTVYQVRWLRPVHRQLGEANEEFALRVQQLVAKELGQTGTRLTPADKAEHMKRQRHPRLRPQSAQSSFPPSPGPSPDVQLATLAQRVKEVLPHVPLGVIQRDLAKTGCVDLTITNLLEGAVAFMPEDITKGTQSLPTASASKAFDACLMMMTPQAL

SEQ ID NO: 4701 - protein, 920 aa, Homo sapiens
  Payload ID: 1034;
  Gene Symbol: AR;
  Gene Name: androgen receptor;
  ENSP ID: ENSP00000363822
MEVQLGLGRVYPRPPSKTYRGAFQNLFQSVREVIQNPGPRHPEAASAAPPGASLLLLQQQQQQQQQQQQQQQQQQQQQQQETSPRQQQQQQGEDGSPQAHRRGPTGYLVLDEEQQPSQPQSALECHPERGCVPEPGAAVAASKGLPQQLPAPPDEDDSAAPSTLSLLGPTFPGLSSCSADLKDILSEASTMQLLQQQQQEAVSEGSSSGRAREASGAPTSSKDNYLGGTSTISDNAKELCKAVSVSMGLGVEALEHLSPGEQLRGDCMYAPLLGVPPAVRPTPCAPLAECKGSLLDDSAGKSTEDTAEYSPFKGGYTKGLEGESLGCSGSAAAGSSGTLELPSTLSLYKSGALDEAAAYQSRDYYNFPLALAGPPPPPPPPHPHARIKLENPLDYGSAWAAAAAQCRYGDLASLHGAGAAGPGSGSPSAAASSSWHTLFTAEEGQLYGPCGGGGGGGGGGGGGGGGGGGGGGGEAGAVAPYGYTRPPQGLAGQESDFTAPDVWYPGGMVSRVPYPSPTCVKSEMGPWMDSYSGPYGDMRLETARDHVLPIDYYFPPQKTCLICGDEASGCHYGALTCGSCKVFFKRAAEGKQKYLCASRNDCTIDKFRRKNCPSCRLRKCYEAGMTLGARKLKKLGNLKLQEEGEASSTTSPTEETTQKLTVSHIEGYECQPIFLNVLEAIEPGVVCAGHDNNQPDSFAALLSSLNELGERQLVHVVKWAKALPGFRNLHVDDQMAVIQYSWMGLMVFAMGWRSFTNVNSRMLYFAPDLVFNEYRMHKSRMYSQCVRMRHLSQEFGWLQITPQEFLCMKALLLFSIIPVDGLKNQKFFDELRMNYIKELDRIIACKRKNPTSCSRRFYQLTKLLDSVQPIARELHQFTFDLLIKSHMVSVDFPEMMAEIISVQVPKILSGKVKPIYFHTQ

SEQ ID NO: 4702 - protein, 388 aa, Homo sapiens
  Payload ID: 1034;
  Gene Symbol: AR;
  Gene Name: androgen receptor;
  Uniprot ID:  P10275;
  ENSP ID: ENSP00000379358
MILWLHSLETARDHVLPIDYYFPPQKTCLICGDEASGCHYGALTCGSCKVFFKRAAEGKQKYLCASRNDCTIDKFRRKNCPSCRLRKCYEAGMTLGARKLKKLGNLKLQEEGEASSTTSPTEETTQKLTVSHIEGYECQPIFLNVLEAIEPGVVCAGHDNNQPDSFAALLSSLNELGERQLVHVVKWAKALPGFRNLHVDDQMAVIQYSWMGLMVFAMGWRSFTNVNSRMLYFAPDLVFNEYRMHKSRMYSQCVRMRHLSQEFGWLQITPQEFLCMKALLLFSIIPVDGLKNQKFFDELRMNYIKELDRIIACKRKNPTSCSRRFYQLTKLLDSVQPIARELHQFTFDLLIKSHMVSVDFPEMMAEIISVQVPKILSGKVKPIYFHTQ

SEQ ID NO: 4703 - protein, 734 aa, Homo sapiens
  Payload ID: 1034;
  Gene Symbol: AR;
  Gene Name: androgen receptor;
  ENSP ID: ENSP00000379359
MEVQLGLGRVYPRPPSKTYRGAFQNLFQSVREVIQNPGPRHPEAASAAPPGASLLLLQQQQQQQQQQQQQQQQQQQQQQQETSPRQQQQQQGEDGSPQAHRRGPTGYLVLDEEQQPSQPQSALECHPERGCVPEPGAAVAASKGLPQQLPAPPDEDDSAAPSTLSLLGPTFPGLSSCSADLKDILSEASTMQLLQQQQQEAVSEGSSSGRAREASGAPTSSKDNYLGGTSTISDNAKELCKAVSVSMGLGVEALEHLSPGEQLRGDCMYAPLLGVPPAVRPTPCAPLAECKGSLLDDSAGKSTEDTAEYSPFKGGYTKGLEGESLGCSGSAAAGSSGTLELPSTLSLYKSGALDEAAAYQSRDYYNFPLALAGPPPPPPPPHPHARIKLENPLDYGSAWAAAAAQCRYGDLASLHGAGAAGPGSGSPSAAASSSWHTLFTAEEGQLYGPCGGGGGGGGGGGGGGGGGGGGGGGEAGAVAPYGYTRPPQGLAGQESDFTAPDVWYPGGMVSRVPYPSPTCVKSEMGPWMDSYSGPYGDMRLETARDHVLPIDYYFPPQKTCLICGDEASGCHYGALTCGSCKVFFKRAAEGKQKYLCASRNDCTIDKFRRKNCPSCRLRKCYEAGMTLGARKLKKLGNLKLQEEGEASSTTSPTEETTQKLTVSHIEGYECQPIFLNVLEAIEPGVVCAGHDNNQPDSFAALLSSLNELGERQLVHVVKWAKALPDCERAASVHF

SEQ ID NO: 4704 - protein, 644 aa, Homo sapiens
  Payload ID: 1034;
  Gene Symbol: AR;
  Gene Name: androgen receptor;
  ENSP ID: ENSP00000421155
MEVQLGLGRVYPRPPSKTYRGAFQNLFQSVREVIQNPGPRHPEAASAAPPGASLLLLQQQQQQQQQQQQQQQQQQQQQQQETSPRQQQQQQGEDGSPQAHRRGPTGYLVLDEEQQPSQPQSALECHPERGCVPEPGAAVAASKGLPQQLPAPPDEDDSAAPSTLSLLGPTFPGLSSCSADLKDILSEASTMQLLQQQQQEAVSEGSSSGRAREASGAPTSSKDNYLGGTSTISDNAKELCKAVSVSMGLGVEALEHLSPGEQLRGDCMYAPLLGVPPAVRPTPCAPLAECKGSLLDDSAGKSTEDTAEYSPFKGGYTKGLEGESLGCSGSAAAGSSGTLELPSTLSLYKSGALDEAAAYQSRDYYNFPLALAGPPPPPPPPHPHARIKLENPLDYGSAWAAAAAQCRYGDLASLHGAGAAGPGSGSPSAAASSSWHTLFTAEEGQLYGPCGGGGGGGGGGGGGGGGGGGGGGGEAGAVAPYGYTRPPQGLAGQESDFTAPDVWYPGGMVSRVPYPSPTCVKSEMGPWMDSYSGPYGDMRLETARDHVLPIDYYFPPQKTCLICGDEASGCHYGALTCGSCKVFFKRAAEGKQKYLCASRNDCTIDKFRRKNCPSCRLRKCYEAGMTLGEKFRVGNCKHLKMTRP

SEQ ID NO: 4705 - protein, 600 aa, Homo sapiens
  Payload ID: 1034;
  Gene Symbol: AR;
  Gene Name: androgen receptor;
  ENSP ID: ENSP00000425199
MEVQLGLGRVYPRPPSKTYRGAFQNLFQSVREVIQNPGPRHPEAASAAPPGASLLLLQQQQQQQQQQQQQQQQQQQQQQQETSPRQQQQQQGEDGSPQAHRRGPTGYLVLDEEQQPSQPQSALECHPERGCVPEPGAAVAASKGLPQQLPAPPDEDDSAAPSTLSLLGPTFPGLSSCSADLKDILSEASTMQLLQQQQQEAVSEGSSSGRAREASGAPTSSKDNYLGGTSTISDNAKELCKAVSVSMGLGVEALEHLSPGEQLRGDCMYAPLLGVPPAVRPTPCAPLAECKGSLLDDSAGKSTEDTAEYSPFKGGYTKGLEGESLGCSGSAAAGSSGTLELPSTLSLYKSGALDEAAAYQSRDYYNFPLALAGPPPPPPPPHPHARIKLENPLDYGSAWAAAAAQCRYGDLASLHGAGAAGPGSGSPSAAASSSWHTLFTAEEGQLYGPCGGGGGGGGGGGGGGGGGGGGGGGEAGAVAPYGYTRPPQGLAGQESDFTAPDVWYPGGMVSRVPYPSPTCVKSEMGPWMDSYSGPYGDMRLETARDHVLPIDYYFPPQKTCLICGDEASGCHYGALTCGSCKVFFKRAAEGFFRMNKLKES

SEQ ID NO: 4706 - protein, 572 aa, Homo sapiens
  Payload ID: 1034;
  Gene Symbol: AR;
  Gene Name: androgen receptor;
  ENSP ID: ENSP00000479013
MEVQLGLGRVYPRPPSKTYRGAFQNLFQSVREVIQNPGPRHPEAASAAPPGASLLLLQQQQQQQQQQQQQQQQQQQQQQQETSPRQQQQQQGEDGSPQAHRRGPTGYLVLDEEQQPSQPQSALECHPERGCVPEPGAAVAASKGLPQQLPAPPDEDDSAAPSTLSLLGPTFPGLSSCSADLKDILSEASTMQLLQQQQQEAVSEGSSSGRAREASGAPTSSKDNYLGGTSTISDNAKELCKAVSVSMGLGVEALEHLSPGEQLRGDCMYAPLLGVPPAVRPTPCAPLAECKGSLLDDSAGKSTEDTAEYSPFKGGYTKGLEGESLGCSGSAAAGSSGTLELPSTLSLYKSGALDEAAAYQSRDYYNFPLALAGPPPPPPPPHPHARIKLENPLDYGSAWAAAAAQCRYGDLASLHGAGAAGPGSGSPSAAASSSWHTLFTAEEGQLYGPCGGGGGGGGGGGGGGGGGGGGGGGEAGAVAPYGYTRPPQGLAGQESDFTAPDVWYPGGMVSRVPYPSPTCVKSEMGPWMDSYSGPYGDMRNTRRKRLWKLIIRSINSCICSPRETEVPVRQQK

SEQ ID NO: 4707 - protein, 642 aa, Homo sapiens
  Payload ID: 1034;
  Gene Symbol: AR;
  Gene Name: androgen receptor;
  ENSP ID: ENSP00000482407
MEVQLGLGRVYPRPPSKTYRGAFQNLFQSVREVIQNPGPRHPEAASAAPPGASLLLLQQQQQQQQQQQQQQQQQQQQQQQETSPRQQQQQQGEDGSPQAHRRGPTGYLVLDEEQQPSQPQSALECHPERGCVPEPGAAVAASKGLPQQLPAPPDEDDSAAPSTLSLLGPTFPGLSSCSADLKDILSEASTMQLLQQQQQEAVSEGSSSGRAREASGAPTSSKDNYLGGTSTISDNAKELCKAVSVSMGLGVEALEHLSPGEQLRGDCMYAPLLGVPPAVRPTPCAPLAECKGSLLDDSAGKSTEDTAEYSPFKGGYTKGLEGESLGCSGSAAAGSSGTLELPSTLSLYKSGALDEAAAYQSRDYYNFPLALAGPPPPPPPPHPHARIKLENPLDYGSAWAAAAAQCRYGDLASLHGAGAAGPGSGSPSAAASSSWHTLFTAEEGQLYGPCGGGGGGGGGGGGGGGGGGGGGGGEAGAVAPYGYTRPPQGLAGQESDFTAPDVWYPGGMVSRVPYPSPTCVKSEMGPWMDSYSGPYGDMRLETARDHVLPIDYYFPPQKTCLICGDEASGCHYGALTCGSCKVFFKRAAEGFFRMNKLKESSDTNPKPYCMAAPMGLTENNRNRKKSYRETNLKAVSWPLNHT

SEQ ID NO: 4708 - protein, 737 aa, Homo sapiens
  Payload ID: 1034;
  Gene Symbol: AR;
  Gene Name: androgen receptor;
  ENSP ID: ENSP00000484033
MQLLQQQQQEAVSEGSSSGRAREASGAPTSSKDNYLGGTSTISDNAKELCKAVSVSMGLGVEALEHLSPGEQLRGDCMYAPLLGVPPAVRPTPCAPLAECKGSLLDDSAGKSTEDTAEYSPFKGGYTKGLEGESLGCSGSAAAGSSGTLELPSTLSLYKSGALDEAAAYQSRDYYNFPLALAGPPPPPPPPHPHARIKLENPLDYGSAWAAAAAQCRYGDLASLHGAGAAGPGSGSPSAAASSSWHTLFTAEEGQLYGPCGGGGGGGGGGGGGGGGGGGGGGGEAGAVAPYGYTRPPQGLAGQESDFTAPDVWYPGGMVSRVPYPSPTCVKSEMGPWMDSYSGPYGDMRLETARDHVLPIDYYFPPQKTCLICGDEASGCHYGALTCGSCKVFFKRAAEGKQKYLCASRNDCTIDKFRRKNCPSCRLRKCYEAGMTLGARKLKKLGNLKLQEEGEASSTTSPTEETTQKLTVSHIEGYECQPIFLNVLEAIEPGVVCAGHDNNQPDSFAALLSSLNELGERQLVHVVKWAKALPGFRNLHVDDQMAVIQYSWMGLMVFAMGWRSFTNVNSRMLYFAPDLVFNEYRMHKSRMYSQCVRMRHLSQEFGWLQITPQEFLCMKALLLFSIKANLFARIPVDGLKNQKFFDELRMNYIKELDRIIACKRKNPTSCSRRFYQLTKLLDSVQPIARELHQFTFDLLIKSHMVSVDFPEMMAEIISVQVPKILSGKVKPIYFHTQ

SEQ ID NO: 4709 - protein, 248 aa, Homo sapiens
  Payload ID: 1035;
  Gene Symbol: ADTRP;
  Gene Name: androgen-dependent TFPI-regulating prt;
  Uniprot ID:  Q96IZ2;
  ENSP ID: ENSP00000229583
MTKTSTCIYHFLVLSWYTFLNYYISQEGKDEVKPKILANGARWKYMTLLNLLKNRTAGFDIYQPGSFRQLLQTIFYGVTCLDDVLKRTKGGKDIKFLTAFRDLLFTTLAFPVSTFVFLAFWILFLYNRDLIYPKVLDTVIPVWLNHAMHTFIFPITLAEVVLRPHSYPSKKTGLTLLAAASIAYISRILWLYFETGTWVYPVFAKLSLLGLAAFFSLSYVFIASIYLLGEKLNHWKWGDMRQPRKKRK

SEQ ID NO: 4710 - protein, 168 aa, Homo sapiens
  Payload ID: 1035;
  Gene Symbol: ADTRP;
  Gene Name: androgen-dependent TFPI-regulating prt;
  ENSP ID: ENSP00000368726
MTKTSTCIYHFLVLSWYTFLNYYISQEGKDEVKPKILANGARWKYMTLLNLLLQTIFYGVTCLDDVLKRTKGGKDIKFLTAFRDLLFTTLAFPVSTFVFLAFWILFLYNRDLIYPKVLDTVIPVWLNHAMHTFIFPITLAEVVLRPHSYPSKKTGLTLLAAASIAYIS

SEQ ID NO: 4711 - protein, 230 aa, Homo sapiens
  Payload ID: 1035;
  Gene Symbol: ADTRP;
  Gene Name: androgen-dependent TFPI-regulating prt;
  Uniprot ID:  Q96IZ2;
  ENSP ID: ENSP00000404416
MTKTSTCIYHFLVLSWYTFLNYYISQEGKDEVKPKILANGARWKYMTLLNLLLQTIFYGVTCLDDVLKRTKGGKDIKFLTAFRDLLFTTLAFPVSTFVFLAFWILFLYNRDLIYPKVLDTVIPVWLNHAMHTFIFPITLAEVVLRPHSYPSKKTGLTLLAAASIAYISRILWLYFETGTWVYPVFAKLSLLGLAAFFSLSYVFIASIYLLGEKLNHWKWGDMRQPRKKRK

SEQ ID NO: 4712 - protein, 86 aa, Homo sapiens
  Payload ID: 1035;
  Gene Symbol: ADTRP;
  Gene Name: androgen-dependent TFPI-regulating prt;
  ENSP ID: ENSP00000420956
MTKTSTCIYHFLVLSWYTFLNYYISQEGKDEVKPKILANGARWKYMTLLNLSSSRTGLLGLTSTSQEALGSSCRPFSTGSPAWMMC

SEQ ID NO: 4713 - protein, 168 aa, Homo sapiens; identical to SEQ ID NO: 4710
  Payload ID: 1035;
  Gene Symbol: ADTRP;
  Gene Name: androgen-dependent TFPI-regulating prt;
  ENSP ID: ENSP00000422927

SEQ ID NO: 4714 - protein, 120 aa, Homo sapiens
  Payload ID: 1035;
  Gene Symbol: ADTRP;
  Gene Name: androgen-dependent TFPI-regulating prt;
  ENSP ID: ENSP00000424680
  MOD_RES (1)..(1): Any amino acid
XLIYPKVLDTVIPVWLNHAMHTFIFPITLAEVVLRPHSYPSKKTGLTLLAAASIAYISRILWLYFETGTWVYPVFAKLSLLGLAAFFSLSYVFIASIYLLGEKLNHWKWGDMRQPRKKRK

SEQ ID NO: 4715 - protein, 116 aa, Homo sapiens
  Payload ID: 1035;
  Gene Symbol: ADTRP;
  Gene Name: androgen-dependent TFPI-regulating prt;
  ENSP ID: ENSP00000426507
AEVVLRPHSYPSKKTGLTLLAAASIAYISRILWLYFETGTWVYPVFAKLSLLGLAAFFSLSYVFIASIYLLGEKLNHWKWVSVQILQRWRLESVGICFQWPDWKSPAKHQLVKNIR

SEQ ID NO: 4716 - protein, 245 aa, Homo sapiens
  Payload ID: 1036;
  Gene Symbol: AIG1;
  Gene Name: androgen-induced 1;
  Uniprot ID:  Q9NVV5;
  ENSP ID: ENSP00000275235
MALVPCQVLRMAILLSYCSILCNYKAIEMPSHQTYGGSWKFLTFIDLVIQAVFFGICVLTDLSSLLTRGSGNQEQERQLKKLISLRDWMLAVLAFPVGVFVVAVFWIIYAYDREMIYPKLLDNFIPGWLNHGMHTTVLPFILIEMRTSHHQYPSRSSGLTAICTFSVGYILWVCWVHHVTGMWVYPFLEHIGPGARIIFFGSTTILMNFLYLLGEVLNNYIWDTQKKPPSWQDMKIKFMYLGPSS

SEQ ID NO: 4717 - protein, 223 aa, Homo sapiens
  Payload ID: 1036;
  Gene Symbol: AIG1;
  Gene Name: androgen-induced 1;
  ENSP ID: ENSP00000340090
MAILLSYCSILCNYKAIEMPSHQTYGGSWKFLTFIDLVIQAVFFGICVLTDLSSLLTRGSGNQEQERQLKKLISLRDWMLAVLAFPVGVFVVAVFWIIYAYDREMIYPKLLDNFIPGWLNHGMHTTVLPFILIEMRTSHHQYPSRSSGLTAICTFSVGYILWVCWVHHVTGMGVPFPGTIGPGARIIFFGSTTILMNFLYLLGEVLNNYIWDTEKYGRRERKA

SEQ ID NO: 4718 - protein, 238 aa, Homo sapiens
  Payload ID: 1036;
  Gene Symbol: AIG1;
  Gene Name: androgen-induced 1;
  Uniprot ID:  Q9NVV5;
  ENSP ID: ENSP00000350509
MALVPCQVLRMAILLSYCSILCNYKAIEMPSHQTYGGSWKFLTFIDLVIQAVFFGICVLTDLSSLLTRGSGNQEQERQLKKLISLRDWMLAVLAFPVGVFVVAVFWIIYAYDREMIYPKLLDNFIPGWLNHGMHTTVLPFILIEMRTSHHQYPSRSSGLTAICTFSVGYILWVCWVHHVTGMWVYPFLEHIGPGARIIFFGSTTILMNFLYLLGEVLNNYIWDTQKSMEEEKEKPKLE

SEQ ID NO: 4719 - protein, 47 aa, Homo sapiens
  Payload ID: 1036;
  Gene Symbol: AIG1;
  Gene Name: androgen-induced 1;
  ENSP ID: ENSP00000356568
MALVPCQVLRMAILLSYCSILCNYKAIEMPSHQTYGGSWKFLTFIDL

SEQ ID NO: 4720 - protein, 192 aa, Homo sapiens
  Payload ID: 1036;
  Gene Symbol: AIG1;
  Gene Name: androgen-induced 1;
  ENSP ID: ENSP00000356573
MTKVLRMAILLSYCSILCNYKAIEMPSHQTYGGSWKFLTFIDLVIQAVFFGICVLTDLSSLLTRGSGNQEQERQLKKLISLRDWMLAVLAFPVGVFVVAVFWIIYAYDREMIYPKLLDNFIPGWLNHGMHTTVLPFILIEMRTSHHQYPSRSSGLTAICTFSVGYILWVCWVHHVTGMWVYPFLEHIGPGAR

SEQ ID NO: 4721 - protein, 123 aa, Homo sapiens
  Payload ID: 1036;
  Gene Symbol: AIG1;
  Gene Name: androgen-induced 1;
  ENSP ID: ENSP00000405048
MALVPCQVLRMAILLSYCSILCNYKAIEMPSHQTYGGSWKFLTFIDLFVVAVFWIIYAYDREMIYPKLLDNFIPGWLNHGMHTTVLPFILIEMRTSHHQYPSRSSGLTAICTFSVGYILWVCW

SEQ ID NO: 4722 - protein, 138 aa, Homo sapiens
  Payload ID: 1036;
  Gene Symbol: AIG1;
  Gene Name: androgen-induced 1;
  ENSP ID: ENSP00000407817
MLAVLAFPVGVFVVAVFWIIYAYDREMIYPKLLDNFIPGWLNHGMHTTVLPFILIEMRTSHHQYPSRSSGLTAICTFSVGYILWVCWVHHVTGMWVYPFLEHIGPGARIIFFGSTTILMNFLYLLGEVLNNYIWDTQK

SEQ ID NO: 4723 - protein, 137 aa, Homo sapiens
  Payload ID: 1036;
  Gene Symbol: AIG1;
  Gene Name: androgen-induced 1;
  Uniprot ID:  Q9NVV5;
  ENSP ID: ENSP00000473952
MALVPCQVLRMAILLSYCSILCNYKAIEMPSHQTYGGSWKFLTFIDLVIQAVFFGICVLTDLSSLLTRGSGNQEQERQLKKLISLRDWMLAVLAFPVGVFVVAVFWIIYAYDREMIYPKLLDNFIPGWLNHGMHFKA

SEQ ID NO: 4724 - protein, 134 aa, Homo sapiens
  Payload ID: 1036;
  Gene Symbol: AIG1;
  Gene Name: androgen-induced 1;
  Uniprot ID:  Q9NVV5;
  ENSP ID: ENSP00000485875
MALVPCQVLRMAILLSYCSILCNYKAIEMPSHQTYGGSWKFLTFIDLVIQAVFFGICVLTDLSSLLTRGSGNQEQERQLKKLISLRDWMLAVLAFPVGVFVVAVFWIIYAYDREMIYPKLLDNFIPGWLNHGML

SEQ ID NO: 4725 - protein, 259 aa, Homo sapiens
  Payload ID: 1037;
  Gene Symbol: ADGB;
  Gene Name: androglobin;
  ENSP ID: ENSP00000323839
MHEHATPVTSAYGERHEELINLGSPDSHTISEGQKSSVTSKTTRKGKEKSSEKEKTAKEKQAPRFEPQISTVHPQQEDPNKPYWILRLVTEHNESELFEVKKDTERADEIRAMKQAWETTEPGRAIKASQARLHYLSGFIKKTSDAESPPISESQTKPKEEVETAARGVKEPNSKNSAGSESKEMTQTGSGSAVWKKWQLTKGLRDVAKSTSSESGGVSSPGKEEREQSTRKENIQTGPRTRSPTILETSPRLIRKALE

SEQ ID NO: 4726 - protein, 112 aa, Homo sapiens
  Payload ID: 1037;
  Gene Symbol: ADGB;
  Gene Name: androglobin;
  ENSP ID: ENSP00000356459
DELNQQQAMQKAEEIHQFRQHRTRVLSIRNIDQEERLKLKDEVLDMYKEMQDSLDEARQKIFDIREEYRNKLLEAEHLKLEALSAQEAAMKLETEKMTPAPDTQKKKKGKKK

SEQ ID NO: 4727 - protein, 625 aa, Homo sapiens
  Payload ID: 1037;
  Gene Symbol: ADGB;
  Gene Name: androglobin;
  ENSP ID: ENSP00000356460
VADTLQKVWAVLEMNLEQYAVSLLRLMFKSKCKSLESYPCYQDEETKIAFADYTVTYQEQPPNSWFIVFRETFLVHQDMILVPKVYTTLPICILHIVNNDTMEQVPKVFQKVVPYLYTKNKKGYTFVAEAFTGDTYVAASRWKLRLIGSSAPLPCLSRDSPCNSFAIKEIRDYYIPNDKKILFRYSVKVLTPQPATIQVRTSKPDAFIKLQVLENEETMVSSTGKGQAIIPAFHFLKSEKGLSSQSYGERHEELINLGSPDSHTISEGQKSSVTSKTTRKGKEKSSEKEKTAKEKQAPRFEPQISTVHPQQEDPNKPYWILRLVTEHNESELFEVKKDTERADEIRAMKQAWETTEPGRAIKASQARLHYLSGFIKKTSDAESPPISESQTKPKEEVETAARGVKEPNSKNSAGSESKEMTQTGSGSAVWKKWQLTKGLRDVAKSTSSESGGVSSPGKEEREQSTRKENIQTGPRTRSPTILETSPRLIRKALEFMDLSQYVRKTDTDPLLQTDELNQQQAMQKAEEIHQFRQHRTRVLSIRNIDQEERLKLKDEVLDMYKEMQDSLDEARQKIFDIREEYRNKLLEAEHLKLETLAAQEAAMKLETEKMTPAPDTQKKKKGKKK

SEQ ID NO: 4728 - protein, 1667 aa, Homo sapiens
  Payload ID: 1037;
  Gene Symbol: ADGB;
  Gene Name: androglobin;
  Uniprot ID:  Q8N7X0;
  ENSP ID: ENSP00000381036
MASKQTKKKEVHRINSAHGSDKSKDFYPFGSNVQSGSTEQKKGKFPLWPEWSEADINSEKWDAGKGAKEKDKTGKSPVFHFFEDPEGKIELPPSLKIYSWKRPQDILFSQTPVVVKNEITFDLFSANEHLLCSELMRWIISEIYAVWKIFNGGILSNYFKGTSGEPPLLPWKPWEHIYSLCKAVKGHMPLFNSYGKYVVKLYWMGCWRKITIDDFLPFDEDNNLLLPATTYEFELWPMLLSKAIIKLANIDIHVADRRELGEFTVIHALTGWLPEVISLHPGYMDKVWELLKEILPEFKLSDEASSESKIAVLDSKLKEPGKEGKEGKEIKDGKEVKDVKEFKPESSLTTLKAPEKSDKVPKEKADARDIGKKRSKDGEKEKFKFSLHGSRPSSEVQYSVQSLSDCSSAIQTSHMVVYATFTPLYLFENKIFSLEKMADSAEKLREYGLSHICSHPVLVTRSRSCPLVAPPKPPPLPPWKLIRQKKETVITDEAQELIVKKPERFLEISSPFLNYRMTPFTIPTEMHFVRSLIKKGIPPGSDLPSVSETDETATHSQTDLSQITKATSQGNTASQVILGKGTDEQTDFGLGDAHQSDGLNLEREIVSQTTATQEKSQEELPTTNNSVSKEIWLDFEDFCVCFQNIYIFHKPSSYCLNFQKSEFKFSEERVSYYLFVDSLKPIELLVCFSALVRWGEYGALTKDSPPIEPGLLTAETFSWKSLKPGSLVLKIHTYATKATVVRLPVGRHMLLFNAYSPVGHSIHICSMVSFVIGDEHVVLPNFEPESCRFTEQSLLIMKAIGNVIANFKDKGKLSAALKDLQTAHYPVPFHDKELTAQHFRVFHLSLWRLMKKVQITKPPPNFKFAFRAMVLDLELLNSSLEEVSLVEWLDVKYCMPTSDKEYSAEEVAAAIKIQAMWRGTYVRLLMKARIPDTKENISVADTLQKVWAVLEMNLEQYAVSLLRLMFKSKCKSLESYPCYQDEETKIAFADYTVTYQEQPPNSWFIVFRETFLVHQDMILVPKVYTTLPICILHIVNNDTMEQVPKVFQKVVPYLYTKNKKGYTFVAEAFTGDTYVAASRWKLRLIGSSAPLPCLSRDSPCNSFAIKEIRDYYIPNDKKILFRYSVKVLTPQPATIQVRTSKPDAFIKLQVLENEETMVSSTGKGQAIIPAFHFLKSEKGLSSQSSKHILSFHSASKKEQEVYVKKKAAQGIQKSPKGRAVSAIQDIGLPLVEEETTSTPTREDSSSTPLQNYKYIIQCSVLYNSWPLTESQLTFVQALKDLKKSNTKAYGERHEELINLGSPDSHTISEGQKSSVTSKTTRKGKEKSSEKEKTAKEKQAPRFEPQISTVHPQQEDPNKPYWILRLVTEHNESELFEVKKDTERADEIRAMKQAWETTEPGRAIKASQARLHYLSGFIKKTSDAESPPISESQTKPKEEVETAARGVKEPNSKNSAGSESKEMTQTGSGSAVWKKWQLTKGLRDVAKSTSSESGGVSSPGKEEREQSTRKENIQTGPRTRSPTILETSPRLIRKALEFMDLSQYVRKTDTDPLLQTDELNQQQAMQKAEEIHQFRQHRTRVLSIRNIDQEERLKLKDEVLDMYKEMQDSLDEARQKIFDIREEYRNKLLEAEHLKLETLAAQEAAMKLETEKMTPAPDTQKKKKGKKK

SEQ ID NO: 4729 - protein, 141 aa, Homo sapiens
  Payload ID: 1037;
  Gene Symbol: ADGB;
  Gene Name: androglobin;
  ENSP ID: ENSP00000427779
MHEHATPVTSAYGERHEELINLGSPDSHTISEGQKSSVTSKTTRKGKEKSSEKEKTAKEKQAPRFEPQASQARLHYLSGFIKKTSDAESPPISESQTKPKEEVETAARGVKEPNSKNSAGSESKEMTQTGSGSAVWKKWQL

SEQ ID NO: 4730 - protein, 178 aa, Homo sapiens
  Payload ID: 1037;
  Gene Symbol: ADGB;
  Gene Name: androglobin;
  ENSP ID: ENSP00000428035
MASKQTKKKEVHRINSAHGSDKSKDNVQSGSTEQKKGKFPLWPEWSEADINSEKWDAGKGAKEKDKTGKSPVFHFFEDPEGKIELPPSLKIYSWKRPQDILFSQTPVVVKNEITFDLFSANEHLLCSELMRWIISEIYAVWKIFNGGILSNYFKGTSGEPPLLPWKPWEHIYSLCKAV

SEQ ID NO: 4731 - protein, 714 aa, Homo sapiens
  Payload ID: 1037;
  Gene Symbol: ADGB;
  Gene Name: androglobin;
  ENSP ID: ENSP00000429315
  MOD_RES (1)..(1): Any amino acid
XTDEQTDFGLGDAHQSDGLNLEREIVSQTTATQEKSQEELPTTNNSVSKEIWLDFEDFCVCFQNIYIFHKPSSYCLNFQKSEFKFSEERVSYYLFVDSLKPIELLVCFSALVRWGEYGALTKDSPPIEPGLLTAETFSWKSLKPGSLVLKIHTYATKATVVRLPVGRHMLLFNAYSPVGHSIHICSMVSFVIGDEHVVLPNFEPESCRFTEQSLLIMKAIGNVIANFKDKGKLSAALKDLQTAHYPVPFHDKELTAQHFRVFHLSLWRLMKKVQITKPPPNFKFAFRAMVLDLELLNSSLEEVSLVEWLDVKYCMPTSDKEYSAEEVAAAIKIQAMWRGTYVRLLMKARIPDTKENISVADTLQKVWAVLEMNLEQYAVSLLRLMFKSKCKSLESYPCYQDEETKIAFADYTVTYQEQPPNSWFIVFRETFLVHQDMILVPKVYTTLPICILHIVNNDTMEQVPKVFQKVVPYLYTKNKKGYTFVAEAFTGDTYVAASRWKLRLIGSSAPLPCLSRDSPCNSFAIKEIRDYYIPNDKKILFRYSVKVLTPQPATIQVRTSKPDAFIKLQVLENEETMVSSTGKGQAIIPAFHFLKSEKGLSSQSYGERHEELINLGSPDSHTISEGQKSSVTSKTTRKGKEKSSEKEKTAKEKQAPRFEPQISTVHPQQEDPNKPYWILRLLRLVCITLAGSLRKHLMLRVRLYLKAKLNQKKK

SEQ ID NO: 4732 - protein, 35 aa, Homo sapiens
  Payload ID: 1037;
  Gene Symbol: ADGB;
  Gene Name: androglobin;
  ENSP ID: ENSP00000429365
MASKQTKKKEVHRINSAHGSDKSKESKAEDALQNQ

SEQ ID NO: 4733 - protein, 220 aa, Homo sapiens
  Payload ID: 1037;
  Gene Symbol: ADGB;
  Gene Name: androglobin;
  ENSP ID: ENSP00000430244
MASKQTKKKEVHRINSAHGSDKSKDFYPFGSNVQSGSTEQKKGKFPLWPEWSEADINSEKWDAGKGAKEKDKTGKSPVFHFFEDPEGKIELPPSLKIYSWKRPQDILFSQTPVVVKNEITFDLFSANEHLLCSELMRWIISEIYAVWKIFNGGILSNYFKGTSGEPPLLPWKPWEHIYSLCKAVKGHMPLFNSYGKYVVKLYWMPGIYGQSLGAPERNIA

SEQ ID NO: 4734 - protein, 71 aa, Homo sapiens
  Payload ID: 1037;
  Gene Symbol: ADGB;
  Gene Name: androglobin;
  ENSP ID: ENSP00000430834
PLFNSYGKYVVKLYWMGCWRKITIDDFLPFDEDNNLLLPATTYEFELWPMLLSKAIIKLANIEYVMTLSLT

SEQ ID NO: 4735 - protein, 670 aa, Homo sapiens
  Payload ID: 1038;
  Gene Symbol: ANGEL1;
  Gene Name: angel homolog 1 (Drosophila);
  Uniprot ID:  Q9UNK9;
  ENSP ID: ENSP00000251089
MIASCLCYLLLPATRLFRALSDAFFTCRKNVLLANSSSPQVEGDFAMAPRGPEQEECEGLLQQWREEGLSQVLSTASEGPLIDKGLAQSSLALLMDNPGEENAASEDRWSSRQLSDLRAAENLDEPFPEMLGEEPLLEVEGVEGSMWAAIPMQSEPQYADCAALPVGALATEQWEEDPAVLAWSIAPEPVPQEEASIWPFEGLGQLQPPAVEIPYHEILWREWEDFSTQPDAQGLKAGDGPQFQFTLMSYNILAQDLMQQSSELYLHCHPDILNWNYRFVNLMQEFQHWDPDILCLQEVQEDHYWEQLEPSLRMMGFTCFYKRRTGCKTDGCAVCYKPTRFRLLCASPVEYFRPGLELLNRDNVGLVLLLQPLVPEGLGQVSVAPLCVANTHILYNPRRGDVKLAQMAILLAEVDKVARLSDGSHCPIILCGDLNSVPDSPLYNFIRDGELQYHGMPAWKVSGQEDFSHQLYQRKLQAPLWPSSLGITDCCQYVTSCHPKRSERRKYGRDFLLRFRFCSIACQRPVGLVLMEGVTDTKPERPAGWAESVLEEDASELEPAFSRTVGTIQHCLHLTSVYTHFLPQRGRPEVTTMPLGLGMTVDYIFFSAESCENGNRTDHRLYRDGTLKLLGRLSLLSEEILWAANGLPNPFCSSDHLCLLASFGMEVTAP

SEQ ID NO: 4736 - protein, 235 aa, Homo sapiens
  Payload ID: 1038;
  Gene Symbol: ANGEL1;
  Gene Name: angel homolog 1 (Drosophila);
  ENSP ID: ENSP00000451534
MSQNMGCYFLFLSWFPYSHPSFSTQVSGQEDFSHQLYQRKLQAPLWPSSLGITDCCQYVTSCHPKRSERRKYGRDFLLRFRFCSIACQRPVGLVLMEGVTDTKPERPAGWAESVLEEDASELEPAFSRTVGTIQHCLHLTSVYTHFLPQRGRPEVTTMPLGLGMTVDYIFFSAESCENGNRTDHRLYRDGTLKLLGRLSLLSEEILWAANGLPNPFCSSDHLCLLASFGMEVTAP

SEQ ID NO: 4737 - protein, 129 aa, Homo sapiens
  Payload ID: 1038;
  Gene Symbol: ANGEL1;
  Gene Name: angel homolog 1 (Drosophila);
  ENSP ID: ENSP00000451568
MAPRGPEQEECEGLLQQWREEGLSQVLSTASEGPLIDKGLAQSSLALLMDNPGEENAASEDRWSSRQLSDLRAAENLDEPFPEMLGEEPLLEVEGVEGSMWAAIPMQSEPQYADCAALPVGALATEQWE

SEQ ID NO: 4738 - protein, 67 aa, Homo sapiens
  Payload ID: 1038;
  Gene Symbol: ANGEL1;
  Gene Name: angel homolog 1 (Drosophila);
  ENSP ID: ENSP00000452287
MEGVTDTKPERPAGWAESVLEEDASELEPAFSRTVGTIQHCLHLTSVYTHFLPQRGRPEVTTMPLGL

SEQ ID NO: 4739 - protein, 375 aa, Homo sapiens
  Payload ID: 1039;
  Gene Symbol: ANGEL2;
  Gene Name: angel homolog 2 (Drosophila);
  Uniprot ID:  Q5VTE6;
  ENSP ID: ENSP00000353696
MSYNILSQDLLEDNSHLYRHCRRPVLHWSFRFPNILKEIKHFDADVLCLQEVQEDHYGAEIRPSLESLGYHCEYKMRTGRKPDGCAICFKHSKFSLLSVNPVEFFRPDISLLDRDNVGLVLLLQPKIPYAACPAICVANTHLLYNPRRGDIKLTQLAMLLAEISSVAHQKDGSFCPIVMCGDFNSVPGSPLYSFIKEGKLNYEGLPIGKVSGQEQSSRGQRILSIPIWPPNLGISQNCVYEVQQVPKVEKTDSDLTQTQLKQTEVLVTAEKLSSNLQHHFSLSSVYSHYFPDTGIPEVTTCHSRSAITVDYIFYSAEKEDVAGHPGAEVALVGGLKLLARLSLLTEQDLWTVNGLPNENNSSDHLPLLAKFRLEL

SEQ ID NO: 4740 - protein, 544 aa, Homo sapiens
  Payload ID: 1039;
  Gene Symbol: ANGEL2;
  Gene Name: angel homolog 2 (Drosophila);
  Uniprot ID:  Q5VTE6;
  ENSP ID: ENSP00000355929
MEAWRCVRKGYGHCVVGRGRYPMFPHHSRSLGRDWTTPWENLQRCCWNRHISSCMRWPGHYSRAPYPYFSSRHFSLNWRPPCLFESRTQFQYCNWRPDNLSQTSLIHLSSYVMNAEGDEPSSKRRKHQGVIKRNWEYICSHDKEKTKILGDKNVDPKCEDSENKFDFSVMSYNILSQDLLEDNSHLYRHCRRPVLHWSFRFPNILKEIKHFDADVLCLQEVQEDHYGAEIRPSLESLGYHCEYKMRTGRKPDGCAICFKHSKFSLLSVNPVEFFRPDISLLDRDNVGLVLLLQPKIPYAACPAICVANTHLLYNPRRGDIKLTQLAMLLAEISSVAHQKDGSFCPIVMCGDFNSVPGSPLYSFIKEGKLNYEGLPIGKVSGQEQSSRGQRILSIPIWPPNLGISQNCVYEVQQVPKVEKTDSDLTQTQLKQTEVLVTAEKLSSNLQHHFSLSSVYSHYFPDTGIPEVTTCHSRSAITVDYIFYSAEKEDVAGHPGAEVALVGGLKLLARLSLLTEQDLWTVNGLPNENNSSDHLPLLAKFRLEL

SEQ ID NO: 4741 - protein, 375 aa, Homo sapiens; identical to SEQ ID NO: 4739
  Payload ID: 1039;
  Gene Symbol: ANGEL2;
  Gene Name: angel homolog 2 (Drosophila);
  Uniprot ID:  Q5VTE6;
  ENSP ID: ENSP00000438141

SEQ ID NO: 4742 - protein, 262 aa, Homo sapiens
  Payload ID: 1039;
  Gene Symbol: ANGEL2;
  Gene Name: angel homolog 2 (Drosophila);
  ENSP ID: ENSP00000484198
MFPHHSRSLGRDWTTPWENLQRCCWNRHISSCMRWPGHYSRAPYPYFSSRHFSLNWRPPCLFESRTQFQYCNWRPDNLSQTSLIHLSSYVMNAEGDEPSSKRRKHQGVIKRNWEYICSHDKEKTKILGDKNVDPKCEDSENKFDFSVMSYNILSQDLLEDNSHLYRHCRRPVLHWSFRFPNILKEIKHFDADVLCLQEVQEDHYGAEIRPSLESLGTMQLFFFFFFFETGSHSVAQLECSGTIMAHYSLNLLGSSNPLISAS

SEQ ID NO: 4743 - protein, 434 aa, Homo sapiens
  Payload ID: 1040;
  Gene Symbol: AAMP;
  Gene Name: angio-associated, migratory cell prt;
  Uniprot ID:  Q13685;
  ENSP ID: ENSP00000248450
MESESESGAAADTPPLETLSFHGDEEIIEVVELDPGPPDPDDLAQEMEDVDFEEEEEEEGNEEGWVLEPQEGVVGSMEGPDDSEVTFALHSASVFCVSLDPKTNTLAVTGGEDDKAFVWRLSDGELLFECAGHKDSVTCAGFSHDSTLVATGDMSGLLKVWQVDTKEEVWSFEAGDLEWMEWHPRAPVLLAGTADGNTWMWKVPNGDCKTFQGPNCPATCGRVLPDGKRAVVGYEDGTIRIWDLKQGSPIHVLKGTEGHQGPLTCVAANQDGSLILTGSVDCQAKLVSATTGKVVGVFRPETVASQPSLGEGEESESNSVESLGFCSVMPLAAVGYLDGTLAIYDLATQTLRHQCQHQSGIVQLLWEAGTAVVYTCSLDGIVRLWDARTGRLLTDYRGHTAEILDFALSKDASLVVTTSGDHKAKVFCVQRPDR

SEQ ID NO: 4744 - protein, 200 aa, Homo sapiens
  Payload ID: 1040;
  Gene Symbol: AAMP;
  Gene Name: angio-associated, migratory cell prt;
  ENSP ID: ENSP00000393818
MEDVDFEEEEEEEGNEEGWVLEPQEGVVGSMEGPDDSEVTFALHSASVFCVSLDPKTNTLAVTGGEDDKAFVWRLSDGELLFECAGHKDSVTCAGFSHDSTLVATGDMSGLLKVWQVDTKEEVWSFEAGDLEWMEWHPRAPVLLAGTADGNTWMWKVPNGDCKTFQGPNCPATCGRVLPDGKRAVVGYEDGTIRIWDLKQ

SEQ ID NO: 4745 - protein, 189 aa, Homo sapiens
  Payload ID: 1040;
  Gene Symbol: AAMP;
  Gene Name: angio-associated, migratory cell prt;
  ENSP ID: ENSP00000396295
  MOD_RES (1)..(1): Any amino acid
XIHVLKGIRGTEGHQGPLTCVAANQDGSLILTGSVDCQAKLVSATTGKVVGVFRPETVASQPSLGEGEESESNSVESLGFCSVMPLAAVGYLDGTLAIYDLATQTLRHQCQHQSGIVQLLWEAGTAVVYTCSLDGIVRLWDARTGRLLTDYRGHTAEILDFALSKDASLVVTTSGDHKAKVFCVQRPDR

SEQ ID NO: 4746 - protein, 435 aa, Homo sapiens
  Payload ID: 1040;
  Gene Symbol: AAMP;
  Gene Name: angio-associated, migratory cell prt;
  ENSP ID: ENSP00000403343
MESESESGAAADTPPLETLSFHGDEEIIEVVELDPGPPDPADDLAQEMEDVDFEEEEEEEGNEEGWVLEPQEGVVGSMEGPDDSEVTFALHSASVFCVSLDPKTNTLAVTGGEDDKAFVWRLSDGELLFECAGHKDSVTCAGFSHDSTLVATGDMSGLLKVWQVDTKEEVWSFEAGDLEWMEWHPRAPVLLAGTADGNTWMWKVPNGDCKTFQGPNCPATCGRVLPDGKRAVVGYEDGTIRIWDLKQGSPIHVLKGTEGHQGPLTCVAANQDGSLILTGSVDCQAKLVSATTGKVVGVFRPETVASQPSLGEGEESESNSVESLGFCSVMPLAAVGYLDGTLAIYDLATQTLRHQCQHQSGIVQLLWEAGTAVVYTCSLDGIVRLWDARTGRLLTDYRGHTAEILDFALSKDASLVVTTSGDHKAKVFCVQRPDR

SEQ ID NO: 4747 - protein, 415 aa, Homo sapiens
  Payload ID: 1040;
  Gene Symbol: AAMP;
  Gene Name: angio-associated, migratory cell prt;
  ENSP ID: ENSP00000416394
MLLSVPLTASRAPSSNPLPKADDLAQEMEDVDFEEEEEEEGNEEGWVLEPQEGVVGSMEGPDDSEVTFALHSASVFCVSLDPKTNTLAVTGGEDDKAFVWRLSDGELLFECAGHKDSVTCAGFSHDSTLVATGDMSGLLKVWQVDTKEEVWSFEAGDLEWMEWHPRAPVLLAGTADGNTWMWKVPNGDCKTFQGPNCPATCGRVLPDGKRAVVGYEDGTIRIWDLKQGSPIHVLKGTEGHQGPLTCVAANQDGSLILTGSVDCQAKLVSATTGKVVGVFRPETVASQPSLGEGEESESNSVESLGFCSVMPLAAVGYLDGTLAIYDLATQTLRHQCQHQSGIVQLLWEAGTAVVYTCSLDGIVRLWDARTGRLLTDYRGHTAEILDFALSKDASLVVTTSGDHKAKVFCVQRPDR

SEQ ID NO: 4748 - protein, 714 aa, Homo sapiens
  Payload ID: 1041;
  Gene Symbol: AGGF1;
  Gene Name: angiogenic  factor with G patch and FHA domains 1;
  Uniprot ID:  Q8N302;
  ENSP ID: ENSP00000316109
MASEAPSPPRSPPPPTSPEPELAQLRRKVEKLERELRSCKRQVREIEKLLHHTERLYQNAESNNQELRTQVEELSKILQRGRNEDNKKSDVEVQTENHAPWSISDYFYQTYYNDVSLPNKVTELSDQQDQAIETSILNSKDHLQVENDAYPGTDRTENVKYRQVDHFASNSQEPASALATEDTSLEGSSLAESLRAAAEAAVSQTGFSYDENTGLYFDHSTGFYYDSENQLYYDPSTGIYYYCDVESGRYQFHSRVDLQPYPTSSTKQSKDKKLKKKRKDPDSSATNEEKDLNSEDQKAFSVEHTSCNEEENFANMKKKAKIGIHHKNSPPKVTVPTSGNTIESPLHENISNSTSFKDEKIMETDSEPEEGEITDSQTEDSYDEAITSEGNVTAEDSEDEDEDKIWPPCIRVIVIRSPVLQIGSLFIITAVNPATIGREKDMEHTLRIPEVGVSKFHAEIYFDHDLQSYVLVDQGSQNGTIVNGKQILQPKTKCDPYVLEHGDEVKIGETVLSFHIHPGSDTCDGCEPGQVRAHLRLDKKDESFVGPTLSKEEKELERRKELKKIRVKYGLQNTEYEDEKTLKNPKYKDRAGKRREQVGSEGTFQRDDAPASVHSEITDSNKGRKMLEKMGWKKGEGLGKDGGGMKTPIQLQLRRTHAGLGTGKPSSFEDVHLLQNKNKKNWDKARERFTENFPETKPQKDDPGTMPWVKGTLE

SEQ ID NO: 4749 - protein, 87 aa, Homo sapiens
  Payload ID: 1041;
  Gene Symbol: AGGF1;
  Gene Name: angiogenic  factor with G patch and FHA domains 1;
  ENSP ID: ENSP00000420874
  MOD_RES (1)..(1): Any amino acid
XFPAQLGSCWSSSGLWFSDCLSDAPPSVSVAGEGSFQESFPVCRPRTSGRGHPRSPCSLLAAPFGYKWKNSVKYSNVGEMKIIKSLM

SEQ ID NO: 4750 - protein, 176 aa, Homo sapiens
  Payload ID: 1041;
  Gene Symbol: AGGF1;
  Gene Name: angiogenic  factor with G patch and FHA domains 1;
  Uniprot ID:  Q8N302;
  ENSP ID: ENSP00000424733
MASEAPSPPRSPPPPTSPEPELAQLRRKVEKLERELRSCKRQVREIEKLLHHTERLYQNAESNNQELRTQVEELSKILQRGRNEDNKKSDVEVQTENHAPWSISDYFYQTYYNDVSLPNKVTELSDQQDQAIETSILNSKDHLQVENDAYPGTDRTENVKYRQVDHFASNSQVIKC

SEQ ID NO: 4751 - protein, 147 aa, Homo sapiens
  Payload ID: 1042;
  Gene Symbol: ANG;
  Gene Name: angiogenin, ribonuclease, RNase A family, 5;
  Uniprot ID:  P03950;
  ENSP ID: ENSP00000336762
MVMGLGVLLLVFVLGLGLTPPTLAQDNSRYTHFLTQHYDAKPQGRDDRYCESIMRRRGLTSPCKDINTFIHGNKRSIKAICENKNGNPHRENLRISKSSFQVTTCKLHGGSPWPPCQYRATAGFRNVVVACENGLPVHLDQSIFRRP

SEQ ID NO: 4752 - protein, 147 aa, Homo sapiens; identical to SEQ ID NO: 4751
  Payload ID: 1042;
  Gene Symbol: ANG;
  Gene Name: angiogenin, ribonuclease, RNase A family, 5;
  Uniprot ID:  P03950;
  ENSP ID: ENSP00000381077

SEQ ID NO: 4753 - protein, 675 aa, Homo sapiens
  Payload ID: 1043;
  Gene Symbol: AMOT;
  Gene Name: angiomotin;
  Uniprot ID:  Q4VCS5;
  ENSP ID: ENSP00000305557
MPRAQPSSASYQPVPADPFAIVSRAQQMVEILSDENRNLRQELEGCYEKVARLQKVETEIQRVSEAYENLVKSSSKREALEKAMRNKLEGEIRRMHDFNRDLRERLETANKQLAEKEYEGSEDTRKTISQLFAKNKESQREKEKLEAELATARSTNEDQRRHIEIRDQALSNAQAKVVKLEEELKKKQVYVDKVEKMQQALVQLQAACEKREQLEHRLRTRLERELESLRIQQRQGNCQPTNVSEYNAAALMELLREKEERILALEADMTKWEQKYLEENVMRHFALDAAATVAAQRDTTVISHSPNTSYDTALEARIQKEEEEILMANKRCLDMEGRIKTLHAQIIEKDAMIKVLQQRSRKEPSKTEQLSCMRPAKSLMSISNAGSGLLSHSSTLTGSPIMEEKRDDKSWKGSLGILLGGDYRAEYVPSTPSPVPPSTPLLSAHSKTGSRDCSTQTERGTESNKTAAVAPISVPAPVAAAATAAAITATAATITTTMVAAAPVAVAAAAAPAAAAAPSPATAAATAAAVSPAAAGQIPAAASVASAAAVAPSAAAAAAVQVAPAAPAPVPAPALVPVPAPAAAQASAPAQTQAPTSAPAVAPTPAPTPTPAVAQAEVPASPATGPGPHRLSIPSLTCNPDKTDGPVFHSNTLERKTPIQILGQEPDAEMVEYLI

SEQ ID NO: 4754 - protein, 597 aa, Homo sapiens
  Payload ID: 1043;
  Gene Symbol: AMOT;
  Gene Name: angiomotin;
  ENSP ID: ENSP00000361026
MEHRGPPPEYPFKGMPPQSVVCKPQEPGHFYSEHRLNQPGRTEGQLMRYQHPPEYGAARPAQDISLPLSARNSQPHSPTSSLTSGGSLPLLQSPPSTRLSPARHPLVPNQGDHSAHLPRPQQHFLPNQAHQGDHYRLSQPGLSQQQQQQQQQHHHHHHHQQQQQQQPQQQPGEAYSAMPRAQPSSASYQPVPADPFAIVSRAQQMVEILSDENRNLRQELEGCYEKVARLQKVETEIQRVSEAYENLVKSSSKREALEKAMRNKLEGEIRRMHDFNRDLRERLETANKQLAEKEYEGSEDTRKTISQLFAKNKESQREKEKLEAELATARSTNEDQRRHIEIRDQALSNAQAKVVKLEEELKKKQVYVDKVEKMQQALVQLQAACEKREQLEHRLRTRLERELESLRIQQRQGNCQPTNVSEYNAAALMELLREKEERILALEADMTKWEQKYLEENVMRHFALDAAATVAAQRDTTVISHSPNTSYDTALEARIQKEEEEILMANKRCLDMEGRIKTLHAQIIEKDAMIKVLQQRSRKEPSKTEQLSCMRPAKSLMSISNAGSGLLSHSSTLTGSPIMEEKRDDKSWKGSLGNDSK

SEQ ID NO: 4755 - protein, 1084 aa, Homo sapiens
  Payload ID: 1043;
  Gene Symbol: AMOT;
  Gene Name: angiomotin;
  Uniprot ID:  Q4VCS5;
  ENSP ID: ENSP00000361027
MRNSEEQPSGGTTVLQRLLQEQLRYGNPSENRSLLAIHQQATGNGPPFPSGSGNPGPQSDVLSPQDHHQQLVAHAARQEPQGQEIQSENLIMEKQLSPRMQNNEELPTYEEAKVQSQYFRGQQHASVGAAFYVTGVTNQKMRTEGRPSVQRLNPGKMHQDEGLRDLKQGHVRSLSERLMQMSLATSGVKAHPPVTSAPLSPPQPNDLYKNPTSSSEFYKAQGPLPNQHSLKGMEHRGPPPEYPFKGMPPQSVVCKPQEPGHFYSEHRLNQPGRTEGQLMRYQHPPEYGAARPAQDISLPLSARNSQPHSPTSSLTSGGSLPLLQSPPSTRLSPARHPLVPNQGDHSAHLPRPQQHFLPNQAHQGDHYRLSQPGLSQQQQQQQQQHHHHHHHQQQQQQQPQQQPGEAYSAMPRAQPSSASYQPVPADPFAIVSRAQQMVEILSDENRNLRQELEGCYEKVARLQKVETEIQRVSEAYENLVKSSSKREALEKAMRNKLEGEIRRMHDFNRDLRERLETANKQLAEKEYEGSEDTRKTISQLFAKNKESQREKEKLEAELATARSTNEDQRRHIEIRDQALSNAQAKVVKLEEELKKKQVYVDKVEKMQQALVQLQAACEKREQLEHRLRTRLERELESLRIQQRQGNCQPTNVSEYNAAALMELLREKEERILALEADMTKWEQKYLEENVMRHFALDAAATVAAQRDTTVISHSPNTSYDTALEARIQKEEEEILMANKRCLDMEGRIKTLHAQIIEKDAMIKVLQQRSRKEPSKTEQLSCMRPAKSLMSISNAGSGLLSHSSTLTGSPIMEEKRDDKSWKGSLGILLGGDYRAEYVPSTPSPVPPSTPLLSAHSKTGSRDCSTQTERGTESNKTAAVAPISVPAPVAAAATAAAITATAATITTTMVAAAPVAVAAAAAPAAAAAPSPATAAATAAAVSPAAAGQIPAAASVASAAAVAPSAAAAAAVQVAPAAPAPVPAPALVPVPAPAAAQASAPAQTQAPTSAPAVAPTPAPTPTPAVAQAEVPASPATGPGPHRLSIPSLTCNPDKTDGPVFHSNTLERKTPIQILGQEPDAEMVEYLI

SEQ ID NO: 4756 - protein, 852 aa, Homo sapiens
  Payload ID: 1043;
  Gene Symbol: AMOT;
  Gene Name: angiomotin;
  ENSP ID: ENSP00000361030
MEHRGPPPEYPFKGMPPQSVVCKPQEPGHFYSEHRLNQPGRTEGQLMRYQHPPEYGAARPAQDISLPLSARNSQPHSPTSSLTSGGSLPLLQSPPSTRLSPARHPLVPNQGDHSAHLPRPQQHFLPNQAHQGDHYRLSQPGLSQQQQQQQQQHHHHHHHQQQQQQQPQQQPGEAYSAMPRAQPSSASYQPVPADPFAIVSRAQQMVEILSDENRNLRQELEGCYEKVARLQKVETEIQRVSEAYENLVKSSSKREALEKAMRNKLEGEIRRMHDFNRDLRERLETANKQLAEKEYEGSEDTRKTISQLFAKNKESQREKEKLEAELATARSTNEDQRRHIEIRDQALSNAQAKVVKLEEELKKKQVYVDKVEKMQQALVQLQAACEKREQLEHRLRTRLERELESLRIQQRQGNCQPTNVSEYNAAALMELLREKEERILALEADMTKWEQKYLEENVMRHFALDAAATVAAQRDTTVISHSPNTSYDTALEARIQKEEEEILMANKRCLDMEGRIKTLHAQIIEKDAMIKVLQQRSRKEPSKTEQLSCMRPAKSLMSISNAGSGLLSHSSTLTGSPIMEEKRDDKSWKGSLGILLGGDYRAEYVPSTPSPVPPSTPLLSAHSKTGSRDCSTQTERGTESNKTAAVAPISVPAPVAAAATAAAITATAATITTTMVAAAPVAVAAAAAPAAAAAPSPATAAATAAAVSPAAAGQIPAAASVASAAAVAPSAAAAAAVQVAPAAPAPVPAPALVPVPAPAAAQASAPAQTQAPTSAPAVAPTPAPTPTPAVAQAEVPASPATGPGPHRLSIPSLTCNPDKTDGPVFHSNTLERKTPIQILGQEPDAEMVEYLI

SEQ ID NO: 4757 - protein, 1084 aa, Homo sapiens; identical to SEQ ID NO: 4755
  Payload ID: 1043;
  Gene Symbol: AMOT;
  Gene Name: angiomotin;
  Uniprot ID:  Q4VCS5;
  ENSP ID: ENSP00000429013

SEQ ID NO: 4758 - protein, 145 aa, Homo sapiens
  Payload ID: 1044;
  Gene Symbol: AMOTL1;
  Gene Name: angiomotin like 1;
  ENSP ID: ENSP00000299004
MDLSEKWTLEEGAWLSHAGIHHFASTRADSEFVEASPASYSPDELGSPSACYSPSSPVQVLEDSTYFSPDFQLYSGRHETSALTVEATSSIREKVVEDPLCNFHSPNFLRISEVEMRGSEDAAAGTVLQRLIQEQLRYGTPTENM

SEQ ID NO: 4759 - protein, 906 aa, Homo sapiens
  Payload ID: 1044;
  Gene Symbol: AMOTL1;
  Gene Name: angiomotin like 1;
  Uniprot ID:  Q8IY63;
  ENSP ID: ENSP00000320968
MWRAKLRRGTCEPAVKVEDPLCNFHSPNFLRISEVEMRGSEDAAAGTVLQRLIQEQLRYGTPTENMNLLAIQHQATGSAGPAHPTNNFSSTENLTQEDPQMVYQSARQEPQGQEHQVDNTVMEKQVRSTQPQQNNEELPTYEEAKAQSQFFRGQQQQQQQQGAVGHGYYMAGGTSQKSRTEGRPTVNRANSGQAHKDEALKELKQGHVRSLSERIMQLSLERNGAKQHLPGSGNGKGFKVGGGPSPAQPAGKVLDPRGPPPEYPFKTKQMMSPVSKTQEHGLFYGDQHPGMLHEMVKPYPAPQPVRTDVAVLRYQPPPEYGVTSRPCQLPFPSTMQQHSPMSSQTSSASGPLHSVSLPLPLPMALGAPQPPPAASPSQQLGPDAFAIVERAQQMVEILTEENRVLHQELQGYYDNADKLHKFEKELQRISEAYESLVKSTTKRESLDKAMRNKLEGEIRRLHDFNRDLRDRLETANRQLSSREYEGHEDKAAEGHYASQNKEFLKEKEKLEMELAAVRTASEDHRRHIEILDQALSNAQARVIKLEEELREKQAYVEKVEKLQQALTQLQSACEKREQMERRLRTWLERELDALRTQQKHGNGQPANMPEYNAPALLELVREKEERILALEADMTKWEQKYLEESTIRHFAMNAAATAAAERDTTIINHSRNGSYGESSLEAHIWQEEEEVVQANRRCQDMEYTIKNLHAKIIEKDAMIKVLQQRSRKDAGKTDSSSLRPARSVPSIAAATGTHSRQTSLTSSQLAEEKKEEKTWKGSIGLLLGKEHHEHASAPLLPPPPTSALSSIASTTAASSAHAKTGSKDSSTQTDKSAELFWPSMASLPSRGRLSTTPAHSPVLKHPAAKGTAEKLENSPGHGKSPDHRGRVSSLLHKPEFPDGEMMEVLI

SEQ ID NO: 4760 - protein, 956 aa, Homo sapiens
  Payload ID: 1044;
  Gene Symbol: AMOTL1;
  Gene Name: angiomotin like 1;
  Uniprot ID:  Q8IY63;
  ENSP ID: ENSP00000387739
MWRAKLRRGTCEPAVKGSPSACYSPSSPVQVLEDSTYFSPDFQLYSGRHETSALTVEATSSIREKVVEDPLCNFHSPNFLRISEVEMRGSEDAAAGTVLQRLIQEQLRYGTPTENMNLLAIQHQATGSAGPAHPTNNFSSTENLTQEDPQMVYQSARQEPQGQEHQVDNTVMEKQVRSTQPQQNNEELPTYEEAKAQSQFFRGQQQQQQQQGAVGHGYYMAGGTSQKSRTEGRPTVNRANSGQAHKDEALKELKQGHVRSLSERIMQLSLERNGAKQHLPGSGNGKGFKVGGGPSPAQPAGKVLDPRGPPPEYPFKTKQMMSPVSKTQEHGLFYGDQHPGMLHEMVKPYPAPQPVRTDVAVLRYQPPPEYGVTSRPCQLPFPSTMQQHSPMSSQTSSASGPLHSVSLPLPLPMALGAPQPPPAASPSQQLGPDAFAIVERAQQMVEILTEENRVLHQELQGYYDNADKLHKFEKELQRISEAYESLVKSTTKRESLDKAMRNKLEGEIRRLHDFNRDLRDRLETANRQLSSREYEGHEDKAAEGHYASQNKEFLKEKEKLEMELAAVRTASEDHRRHIEILDQALSNAQARVIKLEEELREKQAYVEKVEKLQQALTQLQSACEKREQMERRLRTWLERELDALRTQQKHGNGQPANMPEYNAPALLELVREKEERILALEADMTKWEQKYLEESTIRHFAMNAAATAAAERDTTIINHSRNGSYGESSLEAHIWQEEEEVVQANRRCQDMEYTIKNLHAKIIEKDAMIKVLQQRSRKDAGKTDSSSLRPARSVPSIAAATGTHSRQTSLTSSQLAEEKKEEKTWKGSIGLLLGKEHHEHASAPLLPPPPTSALSSIASTTAASSAHAKTGSKDSSTQTDKSAELFWPSMASLPSRGRLSTTPAHSPVLKHPAAKGTAEKLENSPGHGKSPDHRGRVSSLLHKPEFPDGEMMEVLI

SEQ ID NO: 4761 - protein, 780 aa, Homo sapiens
  Payload ID: 1045;
  Gene Symbol: AMOTL2;
  Gene Name: angiomotin like 2;
  Uniprot ID:  Q9Y2J4;
  ENSP ID: ENSP00000249883
MRTLEDSSGTVLHRLIQEQLRYGNLTETRTLLAIQQQALRGGAGTGGTGSPQASLEILAPEDSQVLQQATRQEPQGQEHQGGENHLAENTLYRLCPQPSKGEELPTYEEAKAHSQYYAAQQAGTRPHAGDRDPRGAPGGSRRQDEALRELRHGHVRSLSERLLQLSLERNGARAPSHMSSSHSFPQLARNQQGPPLRGPPAEGPESRGPPPQYPHVVLAHETTTAVTDPRYRARGSPHFQHAEVRILQAQVPPVFLQQQQQYQYLQQSQEHPPPPHPAALGHGPLSSLSPPAVEGPVSAQASSATSGSAHLAQMEAVLRENARLQRDNERLQRELESSAEKAGRIEKLESEIQRLSEAHESLTRASSKREALEKTMRNKMDSEMRRLQDFNRDLRERLESANRRLASKTQEAQAGSQDMVAKLLAQSYEQQQEQEKLEREMALLRGAIEDQRRRAELLEQALGNAQGRAARAEEELRKKQAYVEKVERLQQALGQLQAACEKREQLELRLRTRLEQELKALRAQQRQAGAPGGSSGSGGSPELSALRLSEQLREKEEQILALEADMTKWEQKYLEERAMRQFAMDAAATAAAQRDTTLIRHSPQPSPSSSFNEGLLTGGHRHQEMESRLKVLHAQILEKDAVIKVLQQRSRRDPGKAIQGSLRPAKSVPSVFAAAAAGTQGWQGLSSSERQTADAPARLTTADRAPTEEPVVTAPPAAHAKHGSRDGSTQTEGPPDSTSTCLPPEPDSLLGCSSSQRAASLDSVATSRVQDLSDMVEILI

SEQ ID NO: 4762 - protein, 779 aa, Homo sapiens
  Payload ID: 1045;
  Gene Symbol: AMOTL2;
  Gene Name: angiomotin like 2;
  Uniprot ID:  Q9Y2J4;
  ENSP ID: ENSP00000409999
MRTLEDSSGTVLHRLIQEQLRYGNLTETRTLLAIQQQALRGGAGTGGTGSPQASLEILAPEDSQVLQQATRQEPQGQEHQGGENHLAENTLYRLCPQPSKGEELPTYEEAKAHSQYYAAQQAGTRPHAGDRDPRGAPGGSRRQDEALRELRHGHVRSLSERLLQLSLERNGARAPSHMSSSHSFPQLARNQQGPPLRGPPAEGPESRGPPPQYPHVVLAHETTTAVTDPRYRARGSPHFQHAEVRILQAQVPPVFLQQQQQYQYLQQSQEHPPPPHPAALGHGPLSSLSPPAVEGPVSAQASSATSGSAHLAQMEAVLRENARLQRDNERLQRELESSAEKAGRIEKLESEIQRLSEAHESLTRASSKREALEKTMRNKMDSEMRRLQDFNRDLRERLESANRRLASKTQEAQAGSQDMVAKLLAQSYEQQQEQEKLEREMALLRGAIEDQRRRAELLEQALGNAQGRAARAEEELRKKQAYVEKVERLQQALGQLQAACEKREQLELRLRTRLEQELKALRAQQRQAGAPGGSSGSGGSPELSALRLSEQLREKEEQILALEADMTKWEQKYLEERAMRQFAMDAAATAAAQRDTTLIRHSPQPSPSSSFNEGLLTGGHRHQEMESRLKVLHAQILEKDAVIKVLQQRSRRDPGKAIQGSLRPAKSVPSVFAAAAAGTQGWQGLSSSERQTADAPARLTTDRAPTEEPVVTAPPAAHAKHGSRDGSTQTEGPPDSTSTCLPPEPDSLLGCSSSQRAASLDSVATSRVQDLSDMVEILI

SEQ ID NO: 4763 - protein, 33 aa, Homo sapiens
  Payload ID: 1045;
  Gene Symbol: AMOTL2;
  Gene Name: angiomotin like 2;
  ENSP ID: ENSP00000421521
MRTLEDSSGTVLHRLIQEQLRYGNLTETRTLLA

SEQ ID NO: 4764 - protein, 127 aa, Homo sapiens
  Payload ID: 1045;
  Gene Symbol: AMOTL2;
  Gene Name: angiomotin like 2;
  ENSP ID: ENSP00000422658
MRTLEDSSGTVLHRLIQEQLRYGNLTETRTLLAIQQQALRGGAGTGGTGSPQASLEILAPEDSQVLQQATRQEPQGQEHQGGENHLAENTLYRLCPQPSKGEELPTYEEAKAHSQYYAAQQAGTRPH

SEQ ID NO: 4765 - protein, 837 aa, Homo sapiens
  Payload ID: 1045;
  Gene Symbol: AMOTL2;
  Gene Name: angiomotin like 2;
  Uniprot ID:  Q9Y2J4;
  ENSP ID: ENSP00000424765
MTGRKASGGTPCTLRKGAPIITLGKNWTERLAAGDSVGCSGARCHRPLSRQLCASQRSMRTLEDSSGTVLHRLIQEQLRYGNLTETRTLLAIQQQALRGGAGTGGTGSPQASLEILAPEDSQVLQQATRQEPQGQEHQGGENHLAENTLYRLCPQPSKGEELPTYEEAKAHSQYYAAQQAGTRPHAGDRDPRGAPGGSRRQDEALRELRHGHVRSLSERLLQLSLERNGARAPSHMSSSHSFPQLARNQQGPPLRGPPAEGPESRGPPPQYPHVVLAHETTTAVTDPRYRARGSPHFQHAEVRILQAQVPPVFLQQQQQYQYLQQSQEHPPPPHPAALGHGPLSSLSPPAVEGPVSAQASSATSGSAHLAQMEAVLRENARLQRDNERLQRELESSAEKAGRIEKLESEIQRLSEAHESLTRASSKREALEKTMRNKMDSEMRRLQDFNRDLRERLESANRRLASKTQEAQAGSQDMVAKLLAQSYEQQQEQEKLEREMALLRGAIEDQRRRAELLEQALGNAQGRAARAEEELRKKQAYVEKVERLQQALGQLQAACEKREQLELRLRTRLEQELKALRAQQRQAGAPGGSSGSGGSPELSALRLSEQLREKEEQILALEADMTKWEQKYLEERAMRQFAMDAAATAAAQRDTTLIRHSPQPSPSSSFNEGLLTGGHRHQEMESRLKVLHAQILEKDAVIKVLQQRSRRDPGKAIQGSLRPAKSVPSVFAAAAAGTQGWQGLSSSERQTADAPARLTTDRAPTEEPVVTAPPAAHAKHGSRDGSTQTEGPPDSTSTCLPPEPDSLLGCSSSQRAASLDSVATSRVQDLSDMVEILI

SEQ ID NO: 4766 - protein, 151 aa, Homo sapiens
  Payload ID: 1045;
  Gene Symbol: AMOTL2;
  Gene Name: angiomotin like 2;
  ENSP ID: ENSP00000424910
MRTLEDSSGTVLHRLIQEQLRYGNLTETRTLLAIQQQALRGGAGTGGTGSPQASLEILAPEDSQVLQQATRQEPQGQEHQGGENHLAENTLYRLCPQPSKGEELPTYEEAKAHSQYYAAQQAGTRPHAGDRDPRGAPGGSRRQDEALRELR

SEQ ID NO: 4767 - protein, 777 aa, Homo sapiens
  Payload ID: 1045;
  Gene Symbol: AMOTL2;
  Gene Name: angiomotin like 2;
  Uniprot ID:  Q9Y2J4;
  ENSP ID: ENSP00000425475
MRTLEDSSGTVLHRLIQEQLRYGNLTETRTLLAIQQQALRGGAGTGGTGSPQASLEILAPEDSQVLQQATRQEPQGQEHQGGENHLAENTLYRLCPQPSKGEELPTYEEAKAHSQYYAAQQAGTRPHAGDRDPRGAPGGSRRQDEALRELRHGHVRSLSERLLQLSLERNGARAPSHMSSSHSFPQLARNQQGPPLRGPPAEGPESRGPPPQYPHVVLAHETTTAVTDPRYRARGSPHFQHAEVRILQAQVPPVFLQQQQQYQYLQQSQEHPPPPHPAALGHGPLSSLSPPAVEGPVSAQASSATSGSAHLAQMEAVLRENARLQRDNERLQRELESSAEKAGRIEKLESEIQRLSEAHESLTRASSKREALEKTMRNKMDSEMRRLQDFNRDLRERLESANRRLASKTQEAQAGSQDMVAKLLAQSYEQQQEQEKLEREMALLRGAIEDQRRRAELLEQALGNAQGRAARAEEELRKKQAYVEKVERLQQALGQLQAACEKREQLELRLRTRLEQELKALRAQQAGAPGGSSGSGGSPELSALRLSEQLREKEEQILALEADMTKWEQKYLEERAMRQFAMDAAATAAAQRDTTLIRHSPQPSPSSSFNEGLLTGGHRHQEMESRLKVLHAQILEKDAVIKVLQQRSRRDPGKAIQGSLRPAKSVPSVFAAAAAGTQGWQGLSSSERQTADAPARLTTDRAPTEEPVVTAPPAAHAKHGSRDGSTQTEGPPDSTSTCLPPEPDSLLGCSSSQRAASLDSVATSRVQDLSDMVEILI

SEQ ID NO: 4768 - protein, 198 aa, Homo sapiens
  Payload ID: 1045;
  Gene Symbol: AMOTL2;
  Gene Name: angiomotin like 2;
  ENSP ID: ENSP00000427184
MRTLEDSSGTVLHRLIQEQLRYGNLTETRTLLAIQQQALRGGAGTGGTGSPQASLEILAPEDSQVLQQATRQEPQGQEHQGGENHLAENTLYRLCPQPSKGEELPTYEEAKAHSQYYAAQQAGTRPHAGDRDPRGAPGGSRRQDEALRELRHGHVRSLSERLLQLSLERNGARAPSHMSSSHSFPQLARNQQGPPLRG

SEQ ID NO: 4769 - protein, 144 aa, Homo sapiens
  Payload ID: 1045;
  Gene Symbol: AMOTL2;
  Gene Name: angiomotin like 2;
  ENSP ID: ENSP00000427292
MRTLEDSSGTVLHRLIQEQLRYGNLTETRTLLAIQQQALRGGAGTGGTGSPQASLEILAPEDSQVLQQATRQEPQGQEHQGGENHLAENTLYRLCPQPSKGEELPTYEEAKAHSQYYAAQQAGTRPHAGDRDPRGAPGGSRRQD

SEQ ID NO: 4770 - protein, 123 aa, Homo sapiens
  Payload ID: 1045;
  Gene Symbol: AMOTL2;
  Gene Name: angiomotin like 2;
  ENSP ID: ENSP00000427482
MRTLEDSSGTVLHRLIQEQLRYGNLTETRTLLAIQQQALRGGAGTGGTGSPQASLEILAPEDSQVLQQATRQEPQGQEHQGGENHLAENTLYRLCPQPSKGEELPTYEEAKAHSQYYAAQQAG

SEQ ID NO: 4771 - protein, 497 aa, Homo sapiens
  Payload ID: 1046;
  Gene Symbol: ANGPT1;
  Gene Name: angiopoietin 1;
  Uniprot ID:  Q15389;
  ENSP ID: ENSP00000297450
MTVFLSFAFLAAILTHIGCSNQRRSPENSGRRYNRIQHGQCAYTFILPEHDGNCRESTTDQYNTNALQRDAPHVEPDFSSQKLQHLEHVMENYTQWLQKLENYIVENMKSEMAQIQQNAVQNHTATMLEIGTSLLSQTAEQTRKLTDVETQVLNQTSRLEIQLLENSLSTYKLEKQLLQQTNEILKIHEKNSLLEHKILEMEGKHKEELDTLKEEKENLQGLVTRQTYIIQELEKQLNRATTNNSVLQKQQLELMDTVHNLVNLCTKEVLLKGGKREEEKPFRDCADVYQAGFNKSGIYTIYINNMPEPKKVFCNMDVNGGGWTVIQHREDGSLDFQRGWKEYKMGFGNPSGEYWLGNEFIFAITSQRQYMLRIELMDWEGNRAYSQYDRFHIGNEKQNYRLYLKGHTGTAGKQSSLILHGADFSTKDADNDNCMCKCALMLTGGWWFDACGPSNLNGMFYTAGQNHGKLNGIKWHYFKGPSYSLRSTTMMIRPLDF

SEQ ID NO: 4772 - protein, 498 aa, Homo sapiens
  Payload ID: 1046;
  Gene Symbol: ANGPT1;
  Gene Name: angiopoietin 1;
  Uniprot ID:  Q15389;
  ENSP ID: ENSP00000428340
MTVFLSFAFLAAILTHIGCSNQRRSPENSGRRYNRIQHGQCAYTFILPEHDGNCRESTTDQYNTNALQRDAPHVEPDFSSQKLQHLEHVMENYTQWLQKLENYIVENMKSEMAQIQQNAVQNHTATMLEIGTSLLSQTAEQTRKLTDVETQVLNQTSRLEIQLLENSLSTYKLEKQLLQQTNEILKIHEKNSLLEHKILEMEGKHKEELDTLKEEKENLQGLVTRQTYIIQELEKQLNRATTNNSVLQKQQLELMDTVHNLVNLCTKEGVLLKGGKREEEKPFRDCADVYQAGFNKSGIYTIYINNMPEPKKVFCNMDVNGGGWTVIQHREDGSLDFQRGWKEYKMGFGNPSGEYWLGNEFIFAITSQRQYMLRIELMDWEGNRAYSQYDRFHIGNEKQNYRLYLKGHTGTAGKQSSLILHGADFSTKDADNDNCMCKCALMLTGGWWFDACGPSNLNGMFYTAGQNHGKLNGIKWHYFKGPSYSLRSTTMMIRPLDF

SEQ ID NO: 4773 - protein, 30 aa, Homo sapiens
  Payload ID: 1046;
  Gene Symbol: ANGPT1;
  Gene Name: angiopoietin 1;
  ENSP ID: ENSP00000428908
MKSEMAQIQQNAVQNHTATMLEIGTSLLSQ

SEQ ID NO: 4774 - protein, 297 aa, Homo sapiens
  Payload ID: 1046;
  Gene Symbol: ANGPT1;
  Gene Name: angiopoietin 1;
  ENSP ID: ENSP00000429349
MEGKHKEELDTLKEEKENLQGLVTRQTYIIQELEKQLNRATTNNSVLQKQQLELMDTVHNLVNLCTKEVLLKGGKREEEKPFRDCADVYQAGFNKSGIYTIYINNMPEPKKVFCNMDVNGGGWTVIQHREDGSLDFQRGWKEYKMGFGNPSGEYWLGNEFIFAITSQRQYMLRIELMDWEGNRAYSQYDRFHIGNEKQNYRLYLKGHTGTAGKQSSLILHGADFSTKDADNDNCMCKCALMLTGGWWFDACGPSNLNGMFYTAGQNHGKLNGIKWHYFKGPSYSLRSTTMMIRPLDF

SEQ ID NO: 4775 - protein, 298 aa, Homo sapiens
  Payload ID: 1046;
  Gene Symbol: ANGPT1;
  Gene Name: angiopoietin 1;
  ENSP ID: ENSP00000430750
MEGKHKEELDTLKEEKENLQGLVTRQTYIIQELEKQLNRATTNNSVLQKQQLELMDTVHNLVNLCTKEGVLLKGGKREEEKPFRDCADVYQAGFNKSGIYTIYINNMPEPKKVFCNMDVNGGGWTVIQHREDGSLDFQRGWKEYKMGFGNPSGEYWLGNEFIFAITSQRQYMLRIELMDWEGNRAYSQYDRFHIGNEKQNYRLYLKGHTGTAGKQSSLILHGADFSTKDADNDNCMCKCALMLTGGWWFDACGPSNLNGMFYTAGQNHGKLNGIKWHYFKGPSYSLRSTTMMIRPLDF

SEQ ID NO: 4776 - protein, 496 aa, Homo sapiens
  Payload ID: 1047;
  Gene Symbol: ANGPT2;
  Gene Name: angiopoietin 2;
  Uniprot ID:  O15123;
  ENSP ID: ENSP00000314897
MWQIVFFTLSCDLVLAAAYNNFRKSMDSIGKKQYQVQHGSCSYTFLLPEMDNCRSSSSPYVSNAVQRDAPLEYDDSVQRLQVLENIMENNTQWLMKLENYIQDNMKKEMVEIQQNAVQNQTAVMIEIGTNLLNQTAEQTRKLTDVEAQVLNQTTRLELQLLEHSLSTNKLEKQILDQTSEINKLQDKNSFLEKKVLAMEDKHIIQLQSIKEEKDQLQVLVSKQNSIIEELEKKIVTATVNNSVLQKQQHDLMETVNNLLTMMSTSNSAKDPTVAKEEQISFRDCAEVFKSGHTTNGIYTLTFPNSTEEIKAYCDMEAGGGGWTIIQRREDGSVDFQRTWKEYKVGFGNPSGEYWLGNEFVSQLTNQQRYVLKIHLKDWEGNEAYSLYEHFYLSSEELNYRIHLKGLTGTAGKISSISQPGNDFSTKDGDNDKCICKCSQMLTGGWWFDACGPSNLNGMYYPQRQNTNKFNGIKWYYWKGSGYSLKATTMMIRPADF

SEQ ID NO: 4777 - protein, 444 aa, Homo sapiens
  Payload ID: 1047;
  Gene Symbol: ANGPT2;
  Gene Name: angiopoietin 2;
  Uniprot ID:  O15123;
  ENSP ID: ENSP00000343517
MWQIVFFTLSCDLVLAAAYNNFRKSMDSIGKKQYQVQHGSCSYTFLLPEMDNCRSSSSPYVSNAVQRDAPLEYDDSVQRLQVLENIMENNTQWLMKVLNQTTRLELQLLEHSLSTNKLEKQILDQTSEINKLQDKNSFLEKKVLAMEDKHIIQLQSIKEEKDQLQVLVSKQNSIIEELEKKIVTATVNNSVLQKQQHDLMETVNNLLTMMSTSNSAKDPTVAKEEQISFRDCAEVFKSGHTTNGIYTLTFPNSTEEIKAYCDMEAGGGGWTIIQRREDGSVDFQRTWKEYKVGFGNPSGEYWLGNEFVSQLTNQQRYVLKIHLKDWEGNEAYSLYEHFYLSSEELNYRIHLKGLTGTAGKISSISQPGNDFSTKDGDNDKCICKCSQMLTGGWWFDACGPSNLNGMYYPQRQNTNKFNGIKWYYWKGSGYSLKATTMMIRPADF

SEQ ID NO: 4778 - protein, 459 aa, Homo sapiens
  Payload ID: 1047;
  Gene Symbol: ANGPT2;
  Gene Name: angiopoietin 2;
  ENSP ID: ENSP00000428023
MWQIVFFTLSCDLVLAAAYNNFRKSMDSIGKKQYQVQHGSCSYTFLLPEMDNCRSSSSPYVSNAVQRDAPLEYDDSVQRLQVLENIMENNTQWLMKLENYIQDNMKKEMVEIQQNAVQNQTAVMIEIGTNLLNQTAEQTRKLTDVEAQVLNQTTRLELQLLEHSLSTNKLEKQILDQTSEINKLQDKNSFLEKKVLAMEDKHIIQLQSIKEEKDQLQVLVSKQNSIIEELEKKIVTATVNNSVLQKQQHDLMETVNNLLTMMSTSNSKDPTVAKEEQISFRDCAEVFKSGHTTNGIYTLTFPNSTEEIKAYCDMEAGGGGWTIIQRREDGSVDFQRTWKEYKVGFGNPSGEYWLGNEFVSQLTNQQRYVLKIHLKDWEGNEAYSLYEHFYLSSEELNYRIHLKGLTGTAGKISSISQPGNDFSTKDGDNDKCICKCSQMLTGGRDDFLSSYLYWQGMIS

SEQ ID NO: 4779 - protein, 495 aa, Homo sapiens
  Payload ID: 1047;
  Gene Symbol: ANGPT2;
  Gene Name: angiopoietin 2;
  Uniprot ID:  O15123;
  ENSP ID: ENSP00000486858
MWQIVFFTLSCDLVLAAAYNNFRKSMDSIGKKQYQVQHGSCSYTFLLPEMDNCRSSSSPYVSNAVQRDAPLEYDDSVQRLQVLENIMENNTQWLMKLENYIQDNMKKEMVEIQQNAVQNQTAVMIEIGTNLLNQTAEQTRKLTDVEAQVLNQTTRLELQLLEHSLSTNKLEKQILDQTSEINKLQDKNSFLEKKVLAMEDKHIIQLQSIKEEKDQLQVLVSKQNSIIEELEKKIVTATVNNSVLQKQQHDLMETVNNLLTMMSTSNSKDPTVAKEEQISFRDCAEVFKSGHTTNGIYTLTFPNSTEEIKAYCDMEAGGGGWTIIQRREDGSVDFQRTWKEYKVGFGNPSGEYWLGNEFVSQLTNQQRYVLKIHLKDWEGNEAYSLYEHFYLSSEELNYRIHLKGLTGTAGKISSISQPGNDFSTKDGDNDKCICKCSQMLTGGWWFDACGPSNLNGMYYPQRQNTNKFNGIKWYYWKGSGYSLKATTMMIRPADF

SEQ ID NO: 4780 - protein, 503 aa, Homo sapiens
  Payload ID: 1048;
  Gene Symbol: ANGPT4;
  Gene Name: angiopoietin 4;
  Uniprot ID:  Q9Y264;
  ENSP ID: ENSP00000371347
MLSQLAMLQGSLLLVVATMSVAQQTRQEADRGCETLVVQHGHCSYTFLLPKSEPCPPGPEVSRDSNTLQRESLANPLHLGKLPTQQVKQLEQALQNNTQWLKKLERAIKTILRSKLEQVQQQMAQNQTAPMLELGTSLLNQTTAQIRKLTDMEAQLLNQTSRMDAQMPETFLSTNKLENQLLLQRQKLQQLQGQNSALEKRLQALETKQQEELASILSKKAKLLNTLSRQSAALTNIERGLRGVRHNSSLLQDQQHSLRQLLVLLRHLVQERANASAPAFIMAGEQVFQDCAEIQRSGASASGVYTIQVSNATKPRKVFCDLQSSGGRWTLIQRRENGTVNFQRNWKDYKQGFGDPAGEHWLGNEVVHQLTRRAAYSLRVELQDWEGHEAYAQYEHFHLGSENQLYRLSVVGYSGSAGRQSSLVLQNTSFSTLDSDNDHCLCKCAQVMSGGWWFDACGLSNLNGVYYHAPDNKYKMDGIRWHYFKGPSYSLRASRMMIRPLDI

SEQ ID NO: 4781 - protein, 491 aa, Homo sapiens
  Payload ID: 1049;
  Gene Symbol: ANGPTL1;
  Gene Name: angiopoietin-like 1;
  Uniprot ID:  O95841;
  ENSP ID: ENSP00000234816
MKTFTWTLGVLFFLLVDTGHCRGGQFKIKKINQRRYPRATDGKEEAKKCAYTFLVPEQRITGPICVNTKGQDASTIKDMITRMDLENLKDVLSRQKREIDVLQLVVDVDGNIVNEVKLLRKESRNMNSRVTQLYMQLLHEIIRKRDNSLELSQLENKILNVTTEMLKMATRYRELEVKYASLTDLVNNQSVMITLLEEQCLRIFSRQDTHVSPPLVQVVPQHIPNSQQYTPGLLGGNEIQRDPGYPRDLMPPPDLATSPTKSPFKIPPVTFINEGPFKDCQQAKEAGHSVSGIYMIKPENSNGPMQLWCENSLDPGGWTVIQKRTDGSVNFFRNWENYKKGFGNIDGEYWLGLENIYMLSNQDNYKLLIELEDWSDKKVYAEYSSFRLEPESEFYRLRLGTYQGNAGDSMMWHNGKQFTTLDRDKDMYAGNCAHFHKGGWWYNACAHSNLNGVWYRGGHYRSKHQDGIFWAEYRGGSYSLRAVQMMIKPID

SEQ ID NO: 4782 - protein, 491 aa, Homo sapiens; identical to SEQ ID NO: 4781
  Payload ID: 1049;
  Gene Symbol: ANGPTL1;
  Gene Name: angiopoietin-like 1;
  Uniprot ID:  O95841;
  ENSP ID: ENSP00000356601

SEQ ID NO: 4783 - protein, 114 aa, Homo sapiens
  Payload ID: 1049;
  Gene Symbol: ANGPTL1;
  Gene Name: angiopoietin-like 1;
  ENSP ID: ENSP00000392023
MKTFTWTLGVLFFLLVDTGHCRGGQFKIKKINQRRYPRATDGKEEAKKCAYTFLVPEQRITGPICVNTKGQDASTIKDMITRMDLENLKDVLSRQKREIDVLQLVVDVDGNIVN

SEQ ID NO: 4784 - protein, 191 aa, Homo sapiens
  Payload ID: 1050;
  Gene Symbol: ANGPTL2;
  Gene Name: angiopoietin-like 2;
  Uniprot ID:  Q9UKU9;
  ENSP ID: ENSP00000362516
MQVWCDQRHDPGGWTVIQRRLDGSVNFFRNWETYKQGFGNIDGEYWLGLENIYWLTNQGNYKLLVTMEDWSGRKVFAEYASFRLEPESEYYKLRLGRYHGNAGDSFTWHNGKQFTTLDRDHDVYTGNCAHYQKGGWWYNACAHSNLNGVWYRGGHYRSRYQDGVYWAEFRGGSYSLKKVVMMIRPNPNTFH

SEQ ID NO: 4785 - protein, 493 aa, Homo sapiens
  Payload ID: 1050;
  Gene Symbol: ANGPTL2;
  Gene Name: angiopoietin-like 2;
  Uniprot ID:  Q9UKU9;
  ENSP ID: ENSP00000362524
MRPLCVTCWWLGLLAAMGAVAGQEDGFEGTEEGSPREFIYLNRYKRAGESQDKCTYTFIVPQQRVTGAICVNSKEPEVLLENRVHKQELELLNNELLKQKRQIETLQQLVEVDGGIVSEVKLLRKESRNMNSRVTQLYMQLLHEIIRKRDNALELSQLENRILNQTADMLQLASKYKDLEHKYQHLATLAHNQSEIIAQLEEHCQRVPSARPVPQPPPAAPPRVYQPPTYNRIINQISTNEIQSDQNLKVLPPPLPTMPTLTSLPSSTDKPSGPWRDCLQALEDGHDTSSIYLVKPENTNRLMQVWCDQRHDPGGWTVIQRRLDGSVNFFRNWETYKQGFGNIDGEYWLGLENIYWLTNQGNYKLLVTMEDWSGRKVFAEYASFRLEPESEYYKLRLGRYHGNAGDSFTWHNGKQFTTLDRDHDVYTGNCAHYQKGGWWYNACAHSNLNGVWYRGGHYRSRYQDGVYWAEFRGGSYSLKKVVMMIRPNPNTFH

SEQ ID NO: 4786 - protein, 460 aa, Homo sapiens
  Payload ID: 1051;
  Gene Symbol: ANGPTL3;
  Gene Name: angiopoietin-like 3;
  Uniprot ID:  Q9Y5C1;
  ENSP ID: ENSP00000360170
MFTIKLLLFIVPLVISSRIDQDNSSFDSLSPEPKSRFAMLDDVKILANGLLQLGHGLKDFVHKTKGQINDIFQKLNIFDQSFYDLSLQTSEIKEEEKELRRTTYKLQVKNEEVKNMSLELNSKLESLLEEKILLQQKVKYLEEQLTNLIQNQPETPEHPEVTSLKTFVEKQDNSIKDLLQTVEDQYKQLNQQHSQIKEIENQLRRTSIQEPTEISLSSKPRAPRTTPFLQLNEIRNVKHDGIPAECTTIYNRGEHTSGMYAIRPSNSQVFHVYCDVISGSPWTLIQHRIDGSQNFNETWENYKYGFGRLDGEFWLGLEKIYSIVKQSNYVLRIELEDWKDNKHYIEYSFYLGNHETNYTLHLVAITGNVPNAIPENKDLVFSTWDHKAKGHFNCPEGYSGGWWWHDECGENNLNGKYNKPRAKSKPERRRGLSWKSQNGRLYSIKSTKMLIHPTDSESFE

SEQ ID NO: 4787 - protein, 406 aa, Homo sapiens
  Payload ID: 1052;
  Gene Symbol: ANGPTL4;
  Gene Name: angiopoietin-like 4;
  Uniprot ID:  Q9BY76;
  ENSP ID: ENSP00000301455
MSGAPTAGAALMLCAATAVLLSAQGGPVQSKSPRFASWDEMNVLAHGLLQLGQGLREHAERTRSQLSALERRLSACGSACQGTEGSTDLPLAPESRVDPEVLHSLQTQLKAQNSRIQQLFHKVAQQQRHLEKQHLRIQHLQSQFGLLDHKHLDHEVAKPARRKRLPEMAQPVDPAHNVSRLHRLPRDCQELFQVGERQSGLFEIQPQGSPPFLVNCKMTSDGGWTVIQRRHDGSVDFNRPWEAYKAGFGDPHGEFWLGLEKVHSITGDRNSRLAVQLRDWDGNAELLQFSVHLGGEDTAYSLQLTAPVAGQLGATTVPPSGLSVPFSTWDQDHDLRRDKNCAKSLSGGWWFGTCSHSNLNGQYFRSIPQQRQKLKKGIFWKTWRGRYYPLQATTMLIQPMAAEAAS

SEQ ID NO: 4788 - protein, 368 aa, Homo sapiens
  Payload ID: 1052;
  Gene Symbol: ANGPTL4;
  Gene Name: angiopoietin-like 4;
  Uniprot ID:  Q9BY76;
  ENSP ID: ENSP00000377534
MSGAPTAGAALMLCAATAVLLSAQGGPVQSKSPRFASWDEMNVLAHGLLQLGQGLREHAERTRSQLSALERRLSACGSACQGTEGSTDLPLAPESRVDPEVLHSLQTQLKAQNSRIQQLFHKVAQQQRHLEKQHLRIQHLQSQFGLLDHKHLDHEVAKPARRKRLPEMAQPVDPAHNVSRLHHGGWTVIQRRHDGSVDFNRPWEAYKAGFGDPHGEFWLGLEKVHSITGDRNSRLAVQLRDWDGNAELLQFSVHLGGEDTAYSLQLTAPVAGQLGATTVPPSGLSVPFSTWDQDHDLRRDKNCAKSLSGGWWFGTCSHSNLNGQYFRSIPQQRQKLKKGIFWKTWRGRYYPLQATTMLIQPMAAEAAS

SEQ ID NO: 4789 - protein, 96 aa, Homo sapiens
  Payload ID: 1052;
  Gene Symbol: ANGPTL4;
  Gene Name: angiopoietin-like 4;
  ENSP ID: ENSP00000470307
MSGAPTAGAALMLCAATAVLLSAQGGPVQSKSPRFASWDEMNVLAHGLLQLGQGLREHAERTRSQLSALERRLSACGSACQGTEGSTDLPLAPESR

SEQ ID NO: 4790 - protein, 85 aa, Homo sapiens
  Payload ID: 1052;
  Gene Symbol: ANGPTL4;
  Gene Name: angiopoietin-like 4;
  ENSP ID: ENSP00000471345
MSGAPTAGAALMLCAATAVLLSAQGGPVQSKSPRFASWDEMNVLAHGLLQLGQGLREHAERTRSQLSALERRLSACGSACQGTEG

SEQ ID NO: 4791 - protein, 406 aa, Homo sapiens; identical to SEQ ID NO: 4787
  Payload ID: 1052;
  Gene Symbol: ANGPTL4;
  Gene Name: angiopoietin-like 4;
  Uniprot ID:  Q9BY76;
  ENSP ID: ENSP00000472551

SEQ ID NO: 4792 - protein, 129 aa, Homo sapiens
  Payload ID: 1052;
  Gene Symbol: ANGPTL4;
  Gene Name: angiopoietin-like 4;
  ENSP ID: ENSP00000472869
  MOD_RES (1)..(1): Any amino acid
XPVQSKSPRFASWDEMNVLAHGLLQLGQGLREHAERTRSQLSALERRLSACGSACQGTEGSTDLPLAPESRVDPEVLHSLQTQLKAQNSRIQQLFHKVAQQQRHLEKQHLRIQHLQSQTGLNGGLSHID

SEQ ID NO: 4793 - protein, 128 aa, Homo sapiens
  Payload ID: 1052;
  Gene Symbol: ANGPTL4;
  Gene Name: angiopoietin-like 4;
  ENSP ID: ENSP00000473025
MSGAPTAGAALMLCAATAVLLSAQGGPVQSKSPRFASWDEMNVLAHGLLQLGQGLREHAERTRSQLSALERRLSACGSFTACRHNSRLRTAGSSNSSTRWPSSSGTWRSSTCEFSICKASLASWTTST

SEQ ID NO: 4794 - protein, 104 aa, Homo sapiens
  Payload ID: 1052;
  Gene Symbol: ANGPTL4;
  Gene Name: angiopoietin-like 4;
  ENSP ID: ENSP00000473090
MSGAPTAGAALMLCAATAVLLSAQGGPVQSKSPRFASWDEMNVLAHGLLQLGQGLREHAERTRSQLSALERRLSACGSACQGTEGSTDLPLAPESRVDPEVLHS

SEQ ID NO: 4795 - protein, 388 aa, Homo sapiens
  Payload ID: 1053;
  Gene Symbol: ANGPTL5;
  Gene Name: angiopoietin-like 5;
  Uniprot ID:  Q86XS5;
  ENSP ID: ENSP00000335255
MMSPSQASLLFLNVCIFICGEAVQGNCVHHSTDSSVVNIVEDGSNAKDESKSNDTVCKEDCEESCDVKTKITREEKHFMCRNLQNSIVSYTRSTKKLLRNMMDEQQASLDYLSNQVNELMNRVLLLTTEVFRKQLDPFPHRPVQSHGLDCTDIKDTIGSVTKTPSGLYIIHPEGSSYPFEVMCDMDYRGGGRTVIQKRIDGIIDFQRLWCDYLDGFGDLLGEFWLGLKKIFYIVNQKNTSFMLYVALESEDDTLAYASYDNFWLEDETRFFKMHLGRYSGNAGDAFRGLKKEDNQNAMPFSTSDVDNDGCRPACLVNGQSVKSCSHLHNKTGWWFNECGLANLNGIHHFSGKLLATGIQWGTWTKNNSPVKIKSVSMKIRRMYNPYFK

SEQ ID NO: 4796 - protein, 192 aa, Homo sapiens
  Payload ID: 1053;
  Gene Symbol: ANGPTL5;
  Gene Name: angiopoietin-like 5;
  ENSP ID: ENSP00000433562
MMSPSQASLLFLNVCIFICGEAVQGNCVHHSTDSSVVNIVEDGSNAKDESKSNDTVCKEDCEESCDVKTKITREEKHFMCRNLQNSIVSYTRSTKKLLRNMMDEQQASLDYLSNQVMCDMDYRGGGRTVIQKRIDGIIDFQRLWCDYLDGFGDLLGEFWLGLKKIFYIVNQKNTSFMLYVALESEDDTLAYA

SEQ ID NO: 4797 - protein, 470 aa, Homo sapiens
  Payload ID: 1054;
  Gene Symbol: ANGPTL6;
  Gene Name: angiopoietin-like 6;
  Uniprot ID:  Q8NI99;
  ENSP ID: ENSP00000253109
MGKPWLRALQLLLLLGASWARAGAPRCTYTFVLPPQKFTGAVCWSGPASTRATPEAANASELAALRMRVGRHEELLRELQRLAAADGAVAGEVRALRKESRGLSARLGQLRAQLQHEAGPGAGPGADLGAEPAAALALLGERVLNASAEAQRAAARFHQLDVKFRELAQLVTQQSSLIARLERLCPGGAGGQQQVLPPPPLVPVVPVRLVGSTSDTSRMLDPAPEPQRDQTQRQQEPMASPMPAGHPAVPTKPVGPWQDCAEARQAGHEQSGVYELRVGRHVVSVWCEQQLEGGGWTVIQRRQDGSVNFFTTWQHYKAGFGRPDGEYWLGLEPVYQLTSRGDHELLVLLEDWGGRGARAHYDGFSLEPESDHYRLRLGQYHGDAGDSLSWHNDKPFSTVDRDRDSYSGNCALYQRGGWWYHACAHSNLNGVWHHGGHYRSRYQDGVYWAEFRGGAYSLRKAAMLIRPLKL

SEQ ID NO: 4798 - protein, 430 aa, Homo sapiens
  Payload ID: 1054;
  Gene Symbol: ANGPTL6;
  Gene Name: angiopoietin-like 6;
  ENSP ID: ENSP00000465597
MGKPWLRALQLLLLLGASWARAGAPRCTYTFVLPPQKFTGAVCWSGPASTRATPEAANASELAALRMRVGRHEELLRELQRLAAADGAVAGEVRALRKESRGLSARLGQLRAQLQHEAGPGAGPGADLGAEPAAALALLGERVLNASAEAQRAAARFHQLDVKFRELAQLVTQQSSLIARLERLCPGGAGGQQQVLPPPPLVPVVPVRLVGSTSDTSRMLDPAPEPQRDQTQRQQEPMASPMPAGHPAVPTKPVGPWQDCAEARQAGHEQSGVYELRAGFGRPDGEYWLGLEPVYQLTSRGDHELLVLLEDWGGRGARAHYDGFSLEPESDHYRLRLGQYHGDAGDSLSWHNDKPFSTVDRDRDSYSGNCALYQRGGWWYHACAHSNLNGVWHHGGHYRSRYQDGVYWAEFRGGAYSLRKAAMLIRPLKL

SEQ ID NO: 4799 - protein, 470 aa, Homo sapiens; identical to SEQ ID NO: 4797
  Payload ID: 1054;
  Gene Symbol: ANGPTL6;
  Gene Name: angiopoietin-like 6;
  Uniprot ID:  Q8NI99;
  ENSP ID: ENSP00000467930

SEQ ID NO: 4800 - protein, 346 aa, Homo sapiens
  Payload ID: 1055;
  Gene Symbol: ANGPTL7;
  Gene Name: angiopoietin-like 7;
  Uniprot ID:  O43827;
  ENSP ID: ENSP00000366015
MLKKPLSAVTWLCIFIVAFVSHPAWLQKLSKHKTPAQPQLKAANCCEEVKELKAQVANLSSLLSELNKKQERDWVSVVMQVMELESNSKRMESRLTDAESKYSEMNNQIDIMQLQAAQTVTQTSADAIYDCSSLYQKNYRISGVYKLPPDDFLGSPELEVFCDMETSGGGWTIIQRRKSGLVSFYRDWKQYKQGFGSIRGDFWLGNEHIHRLSRQPTRLRVEMEDWEGNLRYAEYSHFVLGNELNSYRLFLGNYTGNVGNDALQYHNNTAFSTKDKDNDNCLDKCAQLRKGGYWYNCCTDSNLNGVYYRLGEHNKHLDGITWYGWHGSTYSLKRVEMKIRPEDFKP

SEQ ID NO: 4801 - protein, 732 aa, Homo sapiens
  Payload ID: 1056;
  Gene Symbol: ACE;
  Gene Name: angiotensin I converting enzyme;
  Uniprot ID:  P12821;
  ENSP ID: ENSP00000290863
MGQGWATAGLPSLLFLLLCYGHPLLVPSQEASQQVTVTHGTSSQATTSSQTTTHQATAHQTSAQSPNLVTDEAEASKFVEEYDRTSQVVWNEYAEANWNYNTNITTETSKILLQKNMQIANHTLKYGTQARKFDVNQLQNTTIKRIIKKVQDLERAALPAQELEEYNKILLDMETTYSVATVCHPNGSCLQLEPDLTNVMATSRKYEDLLWAWEGWRDKAGRAILQFYPKYVELINQAARLNGYVDAGDSWRSMYETPSLEQDLERLFQELQPLYLNLHAYVRRALHRHYGAQHINLEGPIPAHLLGNMWAQTWSNIYDLVVPFPSAPSMDTTEAMLKQGWTPRRMFKEADDFFTSLGLLPVPPEFWNKSMLEKPTDGREVVCHASAWDFYNGKDFRIKQCTTVNLEDLVVAHHEMGHIQYFMQYKDLPVALREGANPGFHEAIGDVLALSVSTPKHLHSLNLLSSEGGSDEHDINFLMKMALDKIAFIPFSYLVDQWRWRVFDGSITKENYNQEWWSLRLKYQGLCPPVPRTQGDFDPGAKFHIPSSVPYIRYFVSFIIQFQFHEALCQAAGHTGPLHKCDIYQSKEAGQRLATAMKLGFSRPWPEAMQLITGQPNMSASAMLSYFKPLLDWLRTENELHGEKLGWPQYNWTPNSARSEGPLPDSGRVSFLGLDLDAQQARVGQWLLLFLGIALLVATLGLSQRLFSIRHRSLHRHSHGPQFGSEVELRHS

SEQ ID NO: 4802 - protein, 1306 aa, Homo sapiens
  Payload ID: 1056;
  Gene Symbol: ACE;
  Gene Name: angiotensin I converting enzyme;
  Uniprot ID:  P12821;
  ENSP ID: ENSP00000290866
MGAASGRRGPGLLLPLPLLLLLPPQPALALDPGLQPGNFSADEAGAQLFAQSYNSSAEQVLFQSVAASWAHDTNITAENARRQEEAALLSQEFAEAWGQKAKELYEPIWQNFTDPQLRRIIGAVRTLGSANLPLAKRQQYNALLSNMSRIYSTAKVCLPNKTATCWSLDPDLTNILASSRSYAMLLFAWEGWHNAAGIPLKPLYEDFTALSNEAYKQDGFTDTGAYWRSWYNSPTFEDDLEHLYQQLEPLYLNLHAFVRRALHRRYGDRYINLRGPIPAHLLGDMWAQSWENIYDMVVPFPDKPNLDVTSTMLQQGWNATHMFRVAEEFFTSLELSPMPPEFWEGSMLEKPADGREVVCHASAWDFYNRKDFRIKQCTRVTMDQLSTVHHEMGHIQYYLQYKDLPVSLRRGANPGFHEAIGDVLALSVSTPEHLHKIGLLDRVTNDTESDINYLLKMALEKIAFLPFGYLVDQWRWGVFSGRTPPSRYNFDWWYLRTKYQGICPPVTRNETHFDAGAKFHVPNVTPYIRYFVSFVLQFQFHEALCKEAGYEGPLHQCDIYRSTKAGAKLRKVLQAGSSRPWQEVLKDMVGLDALDAQPLLKYFQPVTQWLQEQNQQNGEVLGWPEYQWHPPLPDNYPEGIDLVTDEAEASKFVEEYDRTSQVVWNEYAEANWNYNTNITTETSKILLQKNMQIANHTLKYGTQARKFDVNQLQNTTIKRIIKKVQDLERAALPAQELEEYNKILLDMETTYSVATVCHPNGSCLQLEPDLTNVMATSRKYEDLLWAWEGWRDKAGRAILQFYPKYVELINQAARLNGYVDAGDSWRSMYETPSLEQDLERLFQELQPLYLNLHAYVRRALHRHYGAQHINLEGPIPAHLLGNMWAQTWSNIYDLVVPFPSAPSMDTTEAMLKQGWTPRRMFKEADDFFTSLGLLPVPPEFWNKSMLEKPTDGREVVCHASAWDFYNGKDFRIKQCTTVNLEDLVVAHHEMGHIQYFMQYKDLPVALREGANPGFHEAIGDVLALSVSTPKHLHSLNLLSSEGGSDEHDINFLMKMALDKIAFIPFSYLVDQWRWRVFDGSITKENYNQEWWSLRLKYQGLCPPVPRTQGDFDPGAKFHIPSSVPYIRYFVSFIIQFQFHEALCQAAGHTGPLHKCDIYQSKEAGQRLATAMKLGFSRPWPEAMQLITGQPNMSASAMLSYFKPLLDWLRTENELHGEKLGWPQYNWTPNSARSEGPLPDSGRVSFLGLDLDAQQARVGQWLLLFLGIALLVATLGLSQRLFSIRHRSLHRHSHGPQFGSEVELRHS

SEQ ID NO: 4803 - protein, 691 aa, Homo sapiens
  Payload ID: 1056;
  Gene Symbol: ACE;
  Gene Name: angiotensin I converting enzyme;
  Uniprot ID:  P12821;
  ENSP ID: ENSP00000392247
MGQGWATAGLPSLLFLLLCYGHPLLVPSQEASQQVTVTHGTSSQATTSSQTTTHQATAHQTSAQSPNLVTDEAEASKFVEEYDRTSQVVWNEYAEANWNYNTNITTETSKILLQKNMQIANHTLKYGTQARKFDVNQLQNTTIKRIIKKVQDLERAALPAQELEEYNKILLDMETTYSVATVCHPNGSCLQLEPDLTNVMATSRKYEDLLWAWEGWRDKAGRAILQFYPKYVELINQAARLNGYVDAGDSWRSMYETPSLEQDLERLFQELQPLYLNLHAYVRRALHRHYGAQHINLEGPIPAHLLGNMWAQTWSNIYDLVVPFPSAPSMDTTEAMLKQGWTPRRMFKEADDFFTSLGLLPVPPEFWNKSMLEKPTDGREVVCHASAWDFYNGKDFRIKQCTTVNLEDLVVAHHEMGHIQYFMQYKDLPVALREGANPGFHEAIGDVLALSVSTPKHLHSLNLLSSEGGSDEHDINFLMKMALDKIAFIPFSYLVDQWRWRVFDGSITKENYNQEWWSLRLKYQGLCPPVPRTQGDFDPGAKFHIPSSVPYIRTAMKLGFSRPWPEAMQLITGQPNMSASAMLSYFKPLLDWLRTENELHGEKLGWPQYNWTPNSARSEGPLPDSGRVSFLGLDLDAQQARVGQWLLLFLGIALLVATLGLSQRLFSIRHRSLHRHSHGPQFGSEVELRHS

SEQ ID NO: 4804 - protein, 1242 aa, Homo sapiens
  Payload ID: 1056;
  Gene Symbol: ACE;
  Gene Name: angiotensin I converting enzyme;
  ENSP ID: ENSP00000397593
MGAASGRRGPGLLLPLPLLLLLPPQPALALDPGLQPGNFSADEAGAQLFAQSYNSSAEQVLFQSVAASWAHDTNITAENARRQEEAALLSQEFAEAWGQKAKELYEPIWQNFTDPQLRRIIGAVRTLGSANLPLAKRQQYNALLSNMSRIYSTAKVCLPNKTATCWSLDPDLTNILASSRSYAMLLFAWEGWHNAAGIPLKPLYEDFTALSNEAYKQDGFTDTGAYWRSWYNSPTFEDDLEHLYQQLEPLYLNLHAFVRRALHRRYGDRYINLRGPIPAHLLGDMWAQSWENIYDMVVPFPDKPNLDVTSTMLQQGWNATHMFRVAEEFFTSLELSPMPPEFWEGSMLEKPADGREVVCHASAWDFYNRKDFRIKQCTRVTMDQLSTVHHEMGHIQYYLQYKDLPVSLRRGANPGFHEAIGDVLALSVSTPEHLHKIGLLDRVTNDTESDINYLLKMALEKIAFLPFGYLVDQWRWGVFSGRTPPSRYNFDWWYLRTKYQGICPPVTRNETHFDAGAKFHVPNVTPYIRYFVSFVLQFQFHEALCKEAGYEGPLHQCDIYRSTKAGAKLRKVLQAGSSRPWQEVLKDMVGLDALDAQPLLKYFQPVTQWLQEQNQQNGEVLGWPEYQWHPPLPDNYPEGIDLVTDEAEASKFVEEYDRTSQVVWNEYAEANWNYNTNITTETSKILLQKNMQIANHTLKYGTQARKFDVNQLQNTTIKRIIKKVQDLERAALPAQELEEYNKILLDMETTYSVATVCHPNGSCLQLEPDLTNVMATSRKYEDLLWAWEGWRDKAGRAILQFYPKYVELINQAARLNGYVDAGDSWRSMYETPSLEQDLERLFQELQPLYLNLHAYVRRALHRHYGAQHINLEGPIPAHLLGNMWAQTWSNIYDLVVPFPSAPSMDTTEAMLKQGWTPRRMFKEADDFFTSLGLLPVPPEFWNKSMLEKPTDGREVVCHASAWDFYNGKDFRIKQCTTVNLEDLVVAHHEMGHIQYFMQYKDLPVALREGANPGFHEAIGDVLALSVSTPKHLHSLNLLSSEGGSDEHDINFLMKMALDKIAFIPFSYLVDQWRWRVFDGSITKENYNQEWWSLRLKYQGLCPPVPRTQGDFDPGAKFHIPSSVPYIRYFVSFIIQFQFHEALCQAAGHTGPLHKCDIYQSKEAGQRLATAMKLGFSRPWPEAMQLITGQPNMSASAMLSYFKPLLDWLRTENELHGEKLGWPQYNWTPNSGTATHPTSSLGS

SEQ ID NO: 4805 - protein, 145 aa, Homo sapiens
  Payload ID: 1056;
  Gene Symbol: ACE;
  Gene Name: angiotensin I converting enzyme;
  ENSP ID: ENSP00000462002
MGQGWATAGLPSLLFLLLCYGHPLLVPSQEASQQVTVTHGTSSQATTSSQTTTHQATAHQTSAQSPNLVTDEAEASKFVEEYDRTSQVVWNEYAEANWNYNTNITTETSKILGLYDTWGSSLLCPCLDMCCLTAGIQGGCRRTCK

SEQ ID NO: 4806 - protein, 36 aa, Homo sapiens
  Payload ID: 1056;
  Gene Symbol: ACE;
  Gene Name: angiotensin I converting enzyme;
  ENSP ID: ENSP00000462110
MGQGWATAGLPSLLFLLLCYGHPLLVPSQEASQQTW

SEQ ID NO: 4807 - protein, 314 aa, Homo sapiens
  Payload ID: 1056;
  Gene Symbol: ACE;
  Gene Name: angiotensin I converting enzyme;
  ENSP ID: ENSP00000462280
MDEGGCSQAAPAFAEGAGLGSGAPALSGSCLLTSGRCRCHRHRTALSIHPPLARPLFWSQFLLHHSHEADSLQKEEARLPQTKEEAALLSQEFAEAWGQKAKELYEPIWQNFTDPQLRRIIGAVRTLGSANLPLAKRQQYNALLSNMSRIYSTAKVCLPNKTATCWSLDPDLTNILASSRSYAMLLFAWEGWHNAAGIPLKPLYEDFTALSNEAYKQDGFTDTGAYWRSWYNSPTFEDDLEHLYQQLEPLYLNLHAFVRRALHRRYGDRYINLRGPIPAHLLGDMWAQSWENIYDMVVPFPDKPNLDVTSTMLQ

SEQ ID NO: 4808 - protein, 208 aa, Homo sapiens
  Payload ID: 1056;
  Gene Symbol: ACE;
  Gene Name: angiotensin I converting enzyme;
  ENSP ID: ENSP00000462599
MGQGWATAGLPSLLFLLLCYGHPLLVPSQEASQQVTVTHGTSSQATTSSQTTTHQATAHQTSAQSPNLVTDEAEASKFVEEYDRTSQVVWNEYAEANWNYNTNITTETSKILLQKNMQIANHTLKYGTQARKFDVNQLQNTTIKRIIKKVQDLERAALPAQELEEYNKILLDMETTYSVATVCHPNGSCLQLEPALKFSELPLQAEVS

SEQ ID NO: 4809 - protein, 282 aa, Homo sapiens
  Payload ID: 1056;
  Gene Symbol: ACE;
  Gene Name: angiotensin I converting enzyme;
  ENSP ID: ENSP00000462909
LDMETTYSVATVCHPNGSCLQLEPDLTNVMATSRKYEDLLWAWEGWRDKAGRAILQFYPKYVELINQAARLNGYVDAGDSWRSMYETPSLEQDLERLFQELQPLYLNLHAYVRRALHRHYGAQHINLEGPIPAHLLGNMWAQTWSNIYDLVVPFPSAPSMDTTEAMLKQGWTPRRMFKEADDFFTSLGLLPVPPEFWNKSMLEKPTDGREVVCHASAWDFYNEHDINFLMKMALDKIAFIPFSYLVDQWRWRVFDGSITKENYNQEWWSLRLKYQGLCPPVP

SEQ ID NO: 4810 - protein, 168 aa, Homo sapiens
  Payload ID: 1056;
  Gene Symbol: ACE;
  Gene Name: angiotensin I converting enzyme;
  ENSP ID: ENSP00000462995
MGAASGRRGPGLLLPLPLLLLLPPQPALALDPGLQPGNFSADEAGAQLFAQSYNSSAEQVLFQSVAASWAHDTNITAENARRQEEAALLSQEFAEAWGQKAKELYEPIWQNFTDPQLRRIIGAVRTLGSANLPLAKRQQISPTSWLPREATPCSCLPGRAGTTLRASR

SEQ ID NO: 4811 - protein, 119 aa, Homo sapiens
  Payload ID: 1056;
  Gene Symbol: ACE;
  Gene Name: angiotensin I converting enzyme;
  ENSP ID: ENSP00000463673
  MOD_RES (1)..(1): Any amino acid
XQAGSSRPWQEVLKDMVGLDALDAQPLLKYFQPVTQWLQEQNQQNGEVLGWPEYQWHPPLPDNYPEGIGDSHPWDKQPGNNQQPDNHPPGDGPPDISPEPKWDHAGEGQGARGGRGGAG

SEQ ID NO: 4812 - protein, 138 aa, Homo sapiens
  Payload ID: 1056;
  Gene Symbol: ACE;
  Gene Name: angiotensin I converting enzyme;
  ENSP ID: ENSP00000464428
  MOD_RES (1)..(1): Any amino acid
XRTQGDFDPGAKFHIPSSVPYIRYFVSFIIQFQFHEALCQAAGHTGPLHKCDIYQSKEAGQRLATAMKLGFSRPWPEAMQLITGQPNMSASAMLSYFKPLLDWLRTENELHGEKLGWPQYNWTPNSGTATHPTSSLGS

SEQ ID NO: 4813 - protein, 36 aa, Homo sapiens; identical to SEQ ID NO: 4806
  Payload ID: 1056;
  Gene Symbol: ACE;
  Gene Name: angiotensin I converting enzyme;
  ENSP ID: ENSP00000464629

SEQ ID NO: 4814 - protein, 805 aa, Homo sapiens [sequence omitted]

SEQ ID NO: 4815 - protein, 805 aa, Homo sapiens [sequence omitted]

SEQ ID NO: 4816 - protein, 359 aa, Homo sapiens [sequence omitted]

SEQ ID NO: 4817 - protein, 359 aa, Homo sapiens [sequence omitted]

SEQ ID NO: 4818 - protein, 388 aa, Homo sapiens
  Payload ID: 1058;
  Gene Symbol: AGTR1;
  Gene Name: angiotensin II receptor, type 1;
  ENSP ID: ENSP00000385641
MLTFTSECGCTTFGVFDIVFATNSTQVIKMILNSSTEDGIKRIQDDCPKAGRHNYIFVMIPTLYSIIFVVGIFGNSLVVIVIYFYMKLKTVASVFLLNLALADLCFLLTLPLWAVYTAMEYRWPFGNYLCKIASASVSFNLYASVFLLTCLSIDRYLAIVHPMKSRLRRTMLVAKVTCIIIWLLAGLASLPAIIHRNVFFIENTNITVCAFHYESQNSTLPIGLGLTKNILGFLFPFLIILTSYTLIWKALKKAYEIQKNKPRNDDIFKIIMAIVLFFFFSWIPHQIFTFLDVLIQLGIIRDCRIADIVDTAMPITICIAYFNNCLNPLFYGFLGKKFKRYFLQLLKYIPPKAKSHSNLSTKMSTLSYRPSDNVSSSTKKPAPCFEVE

SEQ ID NO: 4819 - protein, 394 aa, Homo sapiens
  Payload ID: 1058;
  Gene Symbol: AGTR1;
  Gene Name: angiotensin II receptor, type 1;
  ENSP ID: ENSP00000398832
MKKMNHKSTDSPKAPQLRGGVFDIVFATNSTQVIKMILNSSTEDGIKRIQDDCPKAGRHNYIFVMIPTLYSIIFVVGIFGNSLVVIVIYFYMKLKTVASVFLLNLALADLCFLLTLPLWAVYTAMEYRWPFGNYLCKIASASVSFNLYASVFLLTCLSIDRYLAIVHPMKSRLRRTMLVAKVTCIIIWLLAGLASLPAIIHRNVFFIENTNITVCAFHYESQNSTLPIGLGLTKNILGFLFPFLIILTSYTLIWKALKKAYEIQKNKPRNDDIFKIIMAIVLFFFFSWIPHQIFTFLDVLIQLGIIRDCRIADIVDTAMPITICIAYFNNCLNPLFYGFLGKKFKRYFLQLLKYIPPKAKSHSNLSTKMSTLSYRPSDNVSSSTKKPAPCFEVE

SEQ ID NO: 4820 - protein, 359 aa, Homo sapiens [sequence omitted]

SEQ ID NO: 4821 - protein, 359 aa, Homo sapiens [sequence omitted]

SEQ ID NO: 4822 - protein, 359 aa, Homo sapiens [sequence omitted]

SEQ ID NO: 4823 - protein, 359 aa, Homo sapiens [sequence omitted]

SEQ ID NO: 4824 - protein, 363 aa, Homo sapiens
  Payload ID: 1059;
  Gene Symbol: AGTR2;
  Gene Name: angiotensin II receptor, type 2;
  Uniprot ID:  P50052;
  ENSP ID: ENSP00000360973
MKGNSTLATTSKNITSGLHFGLVNISGNNESTLNCSQKPSDKHLDAIPILYYIIFVIGFLVNIVVVTLFCCQKGPKKVSSIYIFNLAVADLLLLATLPLWATYYSYRYDWLFGPVMCKVFGSFLTLNMFASIFFITCMSVDRYQSVIYPFLSQRRNPWQASYIVPLVWCMACLSSLPTFYFRDVRTIEYLGVNACIMAFPPEKYAQWSAGIALMKNILGFIIPLIFIATCYFGIRKHLLKTNSYGKNRITRDQVLKMAAAVVLAFIICWLPFHVLTFLDALAWMGVINSCEVIAVIDLALPFAILLGFTNSCVNPFLYCFVGNRFQQKLRSVFRVPITWLQGKRESMSCRKSSSLREMETFVS

SEQ ID NO: 4825 - protein, 159 aa, Homo sapiens
  Payload ID: 1060;
  Gene Symbol: AGTRAP;
  Gene Name: angiotensin II receptor-associated prt;
  Uniprot ID:  Q6RW13;
  ENSP ID: ENSP00000319713
MELPAVNLKVILLGHWLLTTWGCIVFSGSYAWANFTILALGVWAVAQRDSIDAISMFLGGLLATIFLDIVHISIFYPRVSLTDTGRFGVGMAILSLLLKPLSCCFVYHMYRERGGELLVHTGFLGSSQDRSAYQTIDSAEAPADPFAVPEGRSQDARGY

SEQ ID NO: 4826 - protein, 159 aa, Homo sapiens
  Payload ID: 1060;
  Gene Symbol: AGTRAP;
  Gene Name: angiotensin II receptor-associated prt;
  ENSP ID: ENSP00000365814
MELPAVNLKCASSSVPRNHPHVILLGHWLLTTCFWRHFSAKPRLETIELTCALCKLRSAAHRATAGLHCILRLLCLGQLHHPGLGRVGCGSAGLHRRHKHVSGWLAGHHLPGHRAHQHLLPAGQPHGHGPLWRGHGHPQLAAQAALLLLRLPHVPGARG

SEQ ID NO: 4827 - protein, 152 aa, Homo sapiens
  Payload ID: 1060;
  Gene Symbol: AGTRAP;
  Gene Name: angiotensin II receptor-associated prt;
  Uniprot ID:  Q6RW13;
  ENSP ID: ENSP00000365816
MELPAVNLKVILLGHWLLTTWGCIVFSGSYAWANFTILALGVWAVAQRDSIDAISMFLGGLLATIFLDIVHISIFYPRVSLTDTGRFGVGMAILSLLLKPLSCCFVYHMYRERGGFLGSSQDRSAYQTIDSAEAPADPFAVPEGRSQDARGY

SEQ ID NO: 4828 - protein, 111 aa, Homo sapiens
  Payload ID: 1060;
  Gene Symbol: AGTRAP;
  Gene Name: angiotensin II receptor-associated prt;
  Uniprot ID:  Q6RW13;
  ENSP ID: ENSP00000365824
MELPAVNLKGLHCILRLLCLGQLHHPGLGRVGCGSAGLHRRHKHVSGWLAGHHLPGHRAHQHLLPAGQPHGHGPLWRGHGHPQLAAQAALLLLRLPHVPGARGFPWVFSGP

SEQ ID NO: 4829 - protein, 147 aa, Homo sapiens
  Payload ID: 1060;
  Gene Symbol: AGTRAP;
  Gene Name: angiotensin II receptor-associated prt;
  Uniprot ID:  Q6RW13;
  ENSP ID: ENSP00000383688
MELPAVNLKVILLGHWLLTTCFWRHFSAKPRLETIELTCALCKLRSAAHRATAGLHCILRLLCLGQLHHPGLGRVGCGSAGLHRRHKHVSGWLAGHHLPGHRAHQHLLPAGQPHGHGPLWRGHGHPQLAAQAALLLLRLPHVPGARG

SEQ ID NO: 4830 - protein, 155 aa, Homo sapiens
  Payload ID: 1060;
  Gene Symbol: AGTRAP;
  Gene Name: angiotensin II receptor-associated prt;
  Uniprot ID:  Q6RW13;
  ENSP ID: ENSP00000408505
MELPAVNLKVILLGHWLLTTCFWRHFSAKPRLETIELTCALCKLRSAAHRATAGLHCILRLLCLGQLHHPGLGRVGCGSAGLHRRHKHVSGWLAGHHLPGHRAHQHLLPAGQPHGHGPLWRGHGHPQLAAQAALLLLRLPHVPGARGFPWVFSGP

SEQ ID NO: 4831 - protein, 155 aa, Homo sapiens
  Payload ID: 1060;
  Gene Symbol: AGTRAP;
  Gene Name: angiotensin II receptor-associated prt;
  ENSP ID: ENSP00000422647
MELPAVNLKVILLGHWLLTTCFWVACWPPSSWTSCTSASSTRGSASRTRAALAWAWPSSACCSSRSPAASSTTCTGSAGVSSWSTLVSLGLLRTVVPTRRLTQQRRPQIPLQSQRAGVKMPEGTEASHAAPGPAPGLPRAWEVVLGMLLTSVSWT

SEQ ID NO: 4832 - protein, 63 aa, Homo sapiens
  Payload ID: 1060;
  Gene Symbol: AGTRAP;
  Gene Name: angiotensin II receptor-associated prt;
  ENSP ID: ENSP00000424455
MELPAVNLKVILLGHWLLTTWHKDCTPCRSWEGDVEVLIRAPQGLPHSEASALQLDFHLYHLF

SEQ ID NO: 4833 - protein, 485 aa, Homo sapiens
  Payload ID: 1061;
  Gene Symbol: AGT;
  Gene Name: angiotensinogen (serpin peptidase inhibitor, clade A, member 8);
  Uniprot ID:  P01019;
  ENSP ID: ENSP00000355627
MRKRAPQSEMAPAGVSLRATILCLLAWAGLAAGDRVYIHPFHLVIHNESTCEQLAKANAGKPKDPTFIPAPIQAKTSPVDEKALQDQLVLVAAKLDTEDKLRAAMVGMLANFLGFRIYGMHSELWGVVHGATVLSPTAVFGTLASLYLGALDHTADRLQAILGVPWKDKNCTSRLDAHKVLSALQAVQGLLVAQGRADSQAQLLLSTVVGVFTAPGLHLKQPFVQGLALYTPVVLPRSLDFTELDVAAEKIDRFMQAVTGWKTGCSLMGASVDSTLAFNTYVHFQGKMKGFSLLAEPQEFWVDNSTSVSVPMLSGMGTFQHWSDIQDNFSVTQVPFTESACLLLIQPHYASDLDKVEGLTFQQNSLNWMKKLSPRTIHLTMPQLVLQGSYDLQDLLAQAELPAILHTELNLQKLSNDRIRVGEVLNSIFFELEADEREPTESTQQLNKPEVLEVTLNRPFLFAVYDQSATALHFLGRVANPLSTA

SEQ ID NO: 4834 - protein, 1124 aa, Homo sapiens
  Payload ID: 1062;
  Gene Symbol: ANLN;
  Gene Name: anillin actin binding prt;
  Uniprot ID:  Q9NQW6;
  ENSP ID: ENSP00000265748
MDPFTEKLLERTRARRENLQRKMAERPTAAPRSMTHAKRARQPLSEASNQQPLSGGEEKSCTKPSPSKKRCSDNTEVEVSNLENKQPVESTSAKSCSPSPVSPQVQPQAADTISDSVAVPASLLGMRRGLNSRLEATAASSVKTRMQKLAEQRRRWDNDDMTDDIPESSLFSPMPSEEKAASPPRPLLSNASATPVGRRGRLANLAATICSWEDDVNHSFAKQNSVQEQPGTACLSKFSSASGASARINSSSVKQEATFCSQRDGDASLNKALSSSADDASLVNASISSSVKATSPVKSTTSITDAKSCEGQNPELLPKTPISPLKTGVSKPIVKSTLSQTVPSKGELSREICLQSQSKDKSTTPGGTGIKPFLERFGERCQEHSKESPARSTPHRTPIITPNTKAIQERLFKQDTSSSTTHLAQQLKQERQKELACLRGRFDKGNIWSAEKGGNSKSKQLETKQETHCQSTPLKKHQGVSKTQSLPVTEKVTENQIPAKNSSTEPKGFTECEMTKSSPLKITLFLEEDKSLKVTSDPKVEQKIEVIREIEMSVDDDDINSSKVINDLFSDVLEEGELDMEKSQEEMDQALAESSEEQEDALNISSMSLLAPLAQTVGVVSPESLVSTPRLELKDTSRSDESPKPGKFQRTRVPRAESGDSLGSEDRDLLYSIDAYRSQRFKETERPSIKQVIVRKEDVTSKLDEKNNAFPCQVNIKQKMQELNNEINMQQTVIYQASQALNCCVDEEHGKGSLEEAEAERLLLIATGKRTLLIDELNKLKNEGPQRKNKASPQSEFMPSKGSVTLSEIRLPLKADFVCSTVQKPDAANYYYLIILKAGAENMVATPLASTSNSLNGDALTFTTTFTLQDVSNDFEINIEVYSLVQKKDPSGLDKKKKTSKSKAITPKRLLTSITTKSNIHSSVMASPGGLSAVRTSNFALVGSYTLSLSSVGNTKFVLDKVPFLSSLEGHIYLKIKCQVNSSVEERGFLTIFEDVSGFGAWHRRWCVLSGNCISYWTYPDDEKRKNPIGRINLANCTSRQIEPANREFCARRNTFELITVRPQREDDRETLVSQCRDTLCVTKNWLSADTKEERDLWMQKLNQVLVDIRLWQPDACYKPIGKP

SEQ ID NO: 4835 - protein, 1087 aa, Homo sapiens
  Payload ID: 1062;
  Gene Symbol: ANLN;
  Gene Name: anillin actin binding prt;
  Uniprot ID:  Q9NQW6;
  ENSP ID: ENSP00000379380
MDPFTEKLLERTRARRENLQRKMAERPTAAPRSMTHAKRARQPLSEASNQQPLSGGEEKSCTKPSPSKKRCSDNTEVEVSNLENKQPVESTSAKSCSPSPVSPQVQPQAADTISDSVAVPASLLGMRRGLNSRLEATAASSVKTRMQKLAEQRRRWDNDDMTDDIPESSLFSPMPSEEKAASPPRPLLSNASATPVGRRGRLANLAATICSWEDDVNHSFAKQNSVQEQPGTACLSKFSSASGASARINSSSVKQEATFCSQRDGDASLNKALSSSADDASLVNASISSSVKATSPVKSTTSITDAKSCEGQNPELLPKTPISPLKTGVSKPIVKSTLSQTVPSKGELSREICLQSQSKDKSTTPGGTGIKPFLERFGERCQEHSKESPARSTPHRTPIITPNTKAIQERLFKQDTSSSTTHLAQQLKQERQKELACLRGRFDKGNIWSAEKGGNSKSKQLETKQETHCQSTPLKKHQGVSKTQSLPVTEKVTENQIPAKNSSTEPKEVIREIEMSVDDDDINSSKVINDLFSDVLEEGELDMEKSQEEMDQALAESSEEQEDALNISSMSLLAPLAQTVGVVSPESLVSTPRLELKDTSRSDESPKPGKFQRTRVPRAESGDSLGSEDRDLLYSIDAYRSQRFKETERPSIKQVIVRKEDVTSKLDEKNNAFPCQVNIKQKMQELNNEINMQQTVIYQASQALNCCVDEEHGKGSLEEAEAERLLLIATGKRTLLIDELNKLKNEGPQRKNKASPQSEFMPSKGSVTLSEIRLPLKADFVCSTVQKPDAANYYYLIILKAGAENMVATPLASTSNSLNGDALTFTTTFTLQDVSNDFEINIEVYSLVQKKDPSGLDKKKKTSKSKAITPKRLLTSITTKSNIHSSVMASPGGLSAVRTSNFALVGSYTLSLSSVGNTKFVLDKVPFLSSLEGHIYLKIKCQVNSSVEERGFLTIFEDVSGFGAWHRRWCVLSGNCISYWTYPDDEKRKNPIGRINLANCTSRQIEPANREFCARRNTFELITVRPQREDDRETLVSQCRDTLCVTKNWLSADTKEERDLWMQKLNQVLVDIRLWQPDACYKPIGKP

SEQ ID NO: 4836 - protein, 69 aa, Homo sapiens
  Payload ID: 1062;
  Gene Symbol: ANLN;
  Gene Name: anillin actin binding prt;
  ENSP ID: ENSP00000397465
  MOD_RES (1)..(1): Any amino acid
XFSSASGASARINSSSVKQEATFCSQRDGDASLNKALSSSADDASLVNASISSSVVKSYFSSEIYYIYH

SEQ ID NO: 4837 - protein, 73 aa, Homo sapiens
  Payload ID: 1062;
  Gene Symbol: ANLN;
  Gene Name: anillin actin binding prt;
  ENSP ID: ENSP00000398712
KFSSASGASARINSSSVKQEATFCSQRDGDASLNKALSSSADDASLVNASISSSVCFHVSESYFSSEIYYIYH

SEQ ID NO: 4838 - protein, 252 aa, Homo sapiens
  Payload ID: 1062;
  Gene Symbol: ANLN;
  Gene Name: anillin actin binding prt;
  ENSP ID: ENSP00000399553
  MOD_RES (1)..(1): Any amino acid
XMPSKGSVTLSEIRLPLKADFVCSTVQKPDAANYYYLIILKAGAENMVATPLASTSNSLNGDALTFTTTFTLQDVSNDFEINIEVYSLVQKKDPSGLDKKKKTSKSKAITPKRLLTSITTKSNIHSSVMASPGGLSAVRTSNFALVGSYTLSLSSVGNTKFVLDKINYDVRERELLGYLFQEKVPFLSSLEGHIYLKIKCQVNSSVEERGFLTIFEDVSGFGAWHRRWCVLSGNCISYWTYPDDEKRKNPIG

SEQ ID NO: 4839 - protein, 276 aa, Homo sapiens
  Payload ID: 1062;
  Gene Symbol: ANLN;
  Gene Name: anillin actin binding prt;
  ENSP ID: ENSP00000400777
  MOD_RES (1)..(1): Any amino acid
XPKPGKFQRTRVPRAESGDSLGSEDRDLLYRSQRFKETERPSIKQVIVRKEDVTSKLDEKNNAFPCQVNIKQKMQELNNEINMQQTVIYQASQALNCCVDEEHGKGSLEEAEAERLLLIATGKRTLLIDELNKLKNEGPQRKNKASPQSEFMPSKGSVTLSEIRLPLKADFVCSTVQKPDAANYYYLIILKAGAENMVATPLASTSNSLNGDALTFTTTFTLQDVSNDFEINIEVYSLVQKKDPSGLDKKKKTSKSKAITPKRLLTSITTKSNIHS

SEQ ID NO: 4840 - protein, 169 aa, Homo sapiens
  Payload ID: 1062;
  Gene Symbol: ANLN;
  Gene Name: anillin actin binding prt;
  ENSP ID: ENSP00000404979
MAERPTAAPRSMTHAKRARQPLSEASNQQPLSGGEEKSCTKPSPSKKRCSDNTEVEVSNLENKQPVESTSAKSCSPSPVSPQVQPQAADTISDSVAVPASLLGMRRGLNSRLEATAASSVKTRMQKLAEQRRRWDNDDMTDDIPESSLFSPMPSEEKAASPPRPLLSNA

SEQ ID NO: 4841 - protein, 36 aa, Homo sapiens
  Payload ID: 1062;
  Gene Symbol: ANLN;
  Gene Name: anillin actin binding prt;
  ENSP ID: ENSP00000406584
MAERPTAAPRSMTHAKRARQPLSEASNQQPLSGGEG

SEQ ID NO: 4842 - protein, 26 aa, Homo sapiens
  Payload ID: 1062;
  Gene Symbol: ANLN;
  Gene Name: anillin actin binding prt;
  ENSP ID: ENSP00000413441
  MOD_RES (1)..(1): Any amino acid
XSLVNASISSSVVKSYFSSEIYYIYH

SEQ ID NO: 4843 - protein, 236 aa, Homo sapiens
  Payload ID: 1062;
  Gene Symbol: ANLN;
  Gene Name: anillin actin binding prt;
  ENSP ID: ENSP00000413522
  MOD_RES (1)..(1): Any amino acid
XQEHSKESPARSTPHRTPIITPNTKAIQERLFKQDVSNDFEINIEVYSLVQKKDPSGLDKKKKTSKSKAITPKRLLTSITTKSNIHSSVMASPGGLSAVRTSNFALVGSYTLSLSSVGNTKFVLDKVPFLSSLEGHIYLKIKCQVNSSVEERGFLTIFEDVSGFGAWHRRWCVLSGNCISYWTYPDDEKRKNPIGRINLANCTSRQIEPANREFCARRNTFELITVRPQREDDRET

SEQ ID NO: 4844 - protein, 492 aa, Homo sapiens
  Payload ID: 1063;
  Gene Symbol: ANKH;
  Gene Name: ANKH inorganic pyrophosphate transport regulator;
  Uniprot ID:  Q9HCJ1;
  ENSP ID: ENSP00000284268
MVKFPALTHYWPLIRFLVPLGITNIAIDFGEQALNRGIAAVKEDAVEMLASYGLAYSLMKFFTGPMSDFKNVGLVFVNSKRDRTKAVLCMVVAGAIAAVFHTLIAYSDLGYYIINKLHHVDESVGSKTRRAFLYLAAFPFMDAMAWTHAGILLKHKYSFLVGCASISDVIAQVVFVAILLHSHLECREPLLIPILSLYMGALVRCTTLCLGYYKNIHDIIPDRSGPELGGDATIRKMLSFWWPLALILATQRISRPIVNLFVSRDLGGSSAATEAVAILTATYPVGHMPYGWLTEIRAVYPAFDKNNPSNKLVSTSNTVTAAHIKKFTFVCMALSLTLCFVMFWTPNVSEKILIDIIGVDFAFAELCVVPLRIFSFFPVPVTVRAHLTGWLMTLKKTFVLAPSSVLRIIVLIASLVVLPYLGVHGATLGVGSLLAGFVGESTMVAIAACYVYRKQKKKMENESATEGEDSAMTDMPPTEEVTDIVEMREENE

SEQ ID NO: 4845 - protein, 126 aa, Homo sapiens
  Payload ID: 1063;
  Gene Symbol: ANKH;
  Gene Name: ANKH inorganic pyrophosphate transport regulator;
  ENSP ID: ENSP00000426332
MVKFPALTHYWPLIRFLVPLGITNIAIDFGEQVSPGPAPHARSPCLGLTRPDTGAEGSHLLRVPLYPETFGRVCSLSRVTFPAPHSLPPSPQLFSRLFQPSLENVKKTGWCEASPMEGFLVHGSIM

SEQ ID NO: 4846 - protein, 636 aa, Homo sapiens
  Payload ID: 1064;
  Gene Symbol: ANKHD1-EIF4EBP3;
  Gene Name: ANKHD1-EIF4EBP3 readthrough;
  ENSP ID: ENSP00000396882
SSAPITSGQAPTTFLPASTSQAQLSSQKMESFSAVPPTKEKVSTQDQPMANLCTPSSTANSCSSSASNTPGAPETHPSSSPTPTSSNTQEEAQPSSVSDLSPMSMPFASNSEPAPLTLTSPRMVAADNQDTSNLPQLAVPAPRVSHRMQPRGSFYSMVPNATIHQDPQSIFVTNPVTLTPPQGPPAAVQLSSAVNIMNGSQMHINPANKSLPPTFGPATLFNHFSSLFDSSQVPANQGWGDGPLSSRVATDASFTVQSAFLGNSVLGHLENMHPDNSKAPGFRPPSQRVSTSPVGLPSIDPSGSSPSSSSAPLASFSGIPGTRVFLQGPAPVGTPSFNRQHFSPHPWTSASNSCDSPIPSVSSGSSSPLSATSAPPTLGQPKGVSASQDRKIPPPIGTERLARIRQGGSVAQAPAGTSFVAPVGHSGIWSFGVNAVSEGLSGWSQSVMGNHPMHQQLSDPSTFSQHQPMERDDSGMVAPSNIFHQPMGLPISMYGGTIIPSHPQLADVPGGPLFNGLHNPDPAWNPMIKVIQNSTECTDAQQASLLPSVPALKGEIPSPQLTRPKKRIGRPMVASPNQRHQDHLRPKVPAGVQELTHCPDTPLLPPSDSRGHNSSNSPSLQAGGAEGAGDRGRDTR

SEQ ID NO: 4847 - protein, 2617 aa, Homo sapiens
  Payload ID: 1064;
  Gene Symbol: ANKHD1-EIF4EBP3;
  Gene Name: ANKHD1-EIF4EBP3 readthrough;
  ENSP ID: ENSP00000432016
MLTDSGGGGTSFEEDLDSVAPRSAPAGASEPPPPGGVGLGIRTVRLFGEAGPASGVGSSGGGGSGSGTGGGDAALDFKLAAAVLRTGGGGGASGSDEDEVSEVESFILDQEDLDNPVLKTTSEIFLSSTAEGADLRTVDPETQARLEALLEAAGIGKLSTADGKAFADPEVLRRLTSSVSCALDEAAAALTRMKAENSHNAGQVDTRSLAEACSDGDVNAVRKLLDEGRSVNEHTEEGESLLCLACSAGYYELAQVLLAMHANVEDRGNKGDITPLMAASSGGYLDIVKLLLLHDADVNSQSATGNTALTYACAGGFVDIVKVLLNEGANIEDHNENGHTPLMEAASAGHVEVARVLLDHGAGINTHSNEFKESALTLACYKGHLDMVRFLLEAGADQEHKTDEMHTALMEACMDGHVEVARLLLDSGAQVNMPADSFESPLTLAACGGHVELAALLIERGANLEEVNDEGYTPLMEAAREGHEEMVALLLAQGANINAQTEETQETALTLACCGGFSEVADFLIKAGADIELGCSTPLMEASQEGHLELVKYLLASGANVHATTATGDTALTYACENGHTDVADVLLQAGADLEHESEGGRTPLMKAARAGHLCTVQFLISKGANVNRATANNDHTVVSLACAGGHLAVVELLLAHGADPTHRLKDGSTMLIEAAKGGHTNVVSYLLDYPNNVLSVPTTDVSQLPPPSQDQSQVPRVPTHTLAMVVPPQEPDRTSQENSPALLGVQKGTSKQKSSSLQVADQDLLPSFHPYQPLECIVEETEGKLNELGQRISAIEKAQLKSLELIQGEPLNKDKIEELKKNREEQVQKKKKILKELQKVERQLQMKTQQQFTKEYLETKGQKDTVSLHQQCSHRGVFPEGEGDGSLPEDHFSELPQVDTILFKDNDVDDEQQSPPSAEQIDFVPVQPLSSPQCNFSSDLGSNGTNSLELQKVSGNQQIVGQPQIAITGHDQGLLVQEPDGLMVATPAQTLTDTLDDLIAAVSTRVPTGSNSSSQTTECLTPESCSQTTSNVASQSMPPVYPSVDIDAHTESNHDTALTLACAGGHEELVSVLIARDAKIEHRDKKGFTPLILAATAGHVGVVEILLDKGGDIEAQSERTKDTPLSLACSGGRQEVVDLLLARGANKEHRNVSDYTPLSLAASGGYVNIIKILLNAGAEINSRTGSKLGISPLMLAAMNGHVPAVKLLLDMGSDINAQIETNRNTALTLACFQGRAEVVSLLLDRKANVEHRAKTGLTPLMEAASGGYAEVGRVLLDKGADVNAPPVPSSRDTALTIAADKGHYKFCELLIHRGAHIDVRNKKGNTPLWLASNGGHFDVVQLLVQAGADVDAADNRKITPLMSAFRKGHVKVVQYLVKEVNQFPSDIECMRYIATITDKELLKKCHQCVETIVKAKDQQAAEANKNASILLKELDLEKSREESRKQALAAKREKRKEKRKKKKEEQKRKQEEDEENKPKENSELPEDEDEEENDEDVEQEVPIEPPSATTTTTIGISATSATFTNVFGKKRANVVTTPSTNRKNKKNKTKETPPTAHLILPEQHMSLAQQKADKNKINGEPRGGGAGGNSDSDNLDSTDCNSESSSGGKSQELNFVMDVNSSKYPSLLLHSQEEKTSTATSKTQTRLEGEVTPNSLSTSYKTVSLPLSSPNIKLNLTSPKRGQKREEGWKEVVRRSKKLSVPASVVSRIMGRGGCNITAIQDVTGAHIDVDKQKDKNGERMITIRGGTESTRYAVQLINALIQDPAKELEDLIPKNHIRTPASTKSIHANFSSGVGTTAASSKNAFPLGAPTLVTSQATTLSTFQPANKLNKNVPTNVRSSFPVSLPLAYPHPHFALLAAQTMQQIRHPRLPMAQFGGTFSPSPNTWGPFPVRPVNPGNTNSSPKHNNTSRLPNQNGTVLPSESAGLATASCPITVSSVVAASQQLCVTNTRTPSSVRKQLFACVPKTSPPATVISSVTSTCSSLPSVSSAPITSGQAPTTFLPASTSQAQLSSQKMESFSAVPPTKEKVSTQDQPMANLCTPSSTANSCSSSASNTPGAPETHPSSSPTPTSSNTQEEAQPSSVSDLSPMSMPFASNSEPAPLTLTSPRMVAADNQDTSNLPQLAVPAPRVSHRMQPRGSFYSMVPNATIHQDPQSIFVTNPVTLTPPQGPPAAVQLSSAVNIMNGSQMHINPANKSLPPTFGPATLFNHFSSLFDSSQVPANQGWGDGPLSSRVATDASFTVQSAFLGNSVLGHLENMHPDNSKAPGFRPPSQRVSTSPVGLPSIDPSGSSPSSSSAPLASFSGIPGTRVFLQGPAPVGTPSFNRQHFSPHPWTSASNSSTSAPPTLGQPKGVSASQDRKIPPPIGTERLARIRQGGSVAQAPAGTSFVAPVGHSGIWSFGVNAVSEGLSGWSQSVMGNHPMHQQLSDPSTFSQHQPMERDDSGMVAPSNIFHQPMASGFVDFSKGLPISMYGGTIIPSHPQLADVPGGPLFNGLHNPDPAWNPMIKVIQNSTECTDAQQASLLPSVPALKGEIPSPQLTRPKKRIGRPMVASPNQRHQDHLRPKVPAGVQELTHCPDTPLLPPSDSRGHNSSNSPSLQAGGAEGAGDRGRDTR

SEQ ID NO: 4848 - protein, 1897 aa, Homo sapiens
  Payload ID: 1065;
  Gene Symbol: ANK1;
  Gene Name: ankyrin 1, erythrocytic;
  Uniprot ID:  P16157;
  ENSP ID: ENSP00000265709
MAQAAKQLKKIKDIEAQALQEQKEKEESNRKRRNRSRDRKKKADAATSFLRAARSGNLDKALDHLRNGVDINTCNQNGLNGLHLASKEGHVKMVVELLHKEIILETTTKKGNTALHIAALAGQDEVVRELVNYGANVNAQSQKGFTPLYMAAQENHLEVVKFLLENGANQNVATEDGFTPLAVALQQGHENVVAHLINYGTKGKVRLPALHIAARNDDTRTAAVLLQNDPNPDVLSKTGFTPLHIAAHYENLNVAQLLLNRGASVNFTPQNGITPLHIASRRGNVIMVRLLLDRGAQIETKTKDELTPLHCAARNGHVRISEILLDHGAPIQAKTKNGLSPIHMAAQGDHLDCVRLLLQYDAEIDDITLDHLTPLHVAAHCGHHRVAKVLLDKGAKPNSRALNGFTPLHIACKKNHVRVMELLLKTGASIDAVTESGLTPLHVASFMGHLPIVKNLLQRGASPNVSNVKVETPLHMAARAGHTEVAKYLLQNKAKVNAKAKDDQTPLHCAARIGHTNMVKLLLENNANPNLATTAGHTPLHIAAREGHVETVLALLEKEASQACMTKKGFTPLHVAAKYGKVRVAELLLERDAHPNAAGKNGLTPLHVAVHHNNLDIVKLLLPRGGSPHSPAWNGYTPLHIAAKQNQVEVARSLLQYGGSANAESVQGVTPLHLAAQEGHAEMVALLLSKQANGNLGNKSGLTPLHLVAQEGHVPVADVLIKHGVMVDATTRMGYTPLHVASHYGNIKLVKFLLQHQADVNAKTKLGYSPLHQAAQQGHTDIVTLLLKNGASPNEVSSDGTTPLAIAKRLGYISVTDVLKVVTDETSFVLVSDKHRMSFPETVDEILDVSEDEGTAHITIMGEELISFKAERRDSRDVDEEKELLDFVPKLDQVVESPAIPRIPCAMPETVVIRSEEQEQASKEYDEDSLIPSSPATETSDNISPVASPVHTGFLVSFMVDARGGSMRGSRHNGLRVVIPPRTCAAPTRITCRLVKPQKLSTPPPLAEEEGLASRIIALGPTGAQFLSPVIVEIPHFASHGRGDRELVVLRSENGSVWKEHRSRYGESYLDQILNGMDEELGSLEELEKKRVCRIITTDFPLYFVIMSRLCQDYDTIGPEGGSLKSKLVPLVQATFPENAVTKRVKLALQAQPVPDELVTKLLGNQATFSPIVTVEPRRRKFHRPIGLRIPLPPSWTDNPRDSGEGDTTSLRLLCSVIGGTDQAQWEDITGTTKLVYANECANFTTNVSARFWLSDCPRTAEAVNFATLLYKELTAVPYMAKFVIFAKMNDPREGRLRCYCMTDDKVDKTLEQHENFVEVARSRDIEVLEGMSLFAELSGNLVPVKKAAQQRSFHFQSFRENRLAMPVKVRDSSREPGGSLSFLRKAMKYEDTQHILCHLNITMPPCAKGSGAEDRRRTPTPLALRYSILSESTPGSLSGTEQAEMKMAVISEHLGLSWAELARELQFSVEDINRIRVENPNSLLEQSVALLNLWVIREGQNANMENLYTALQSIDRGEIVNMLEGSGRQSRNLKPDRRHTDRDYSLSPSQMNGYSSLQDELLSPASLGCALSSPLRADQYWNEVAVLDAIPLAATEHDTMLEMSDMQVWSAGLTPSLVTAEDSSLECSKAEDSDATGHEWKLEGALSEEPRGPELGSLELVEDDTVDSDATNGLIDLLEQEEGQRSEEKLPGSKRQDDATGAGQDSENEVSLVSGHQRGQARITHSPTVSQVTERSQDRLQDWDADGSIVSYLQDAAQGSWQEEVTQGPHSFQGTSTMTEGLEPGGSQEYEKVLVSVSEHTWTEQPEAESSQADRDRRQQGQEEQVQEAKNTFTQVVQGNEFQNIPGEQVTEEQFTDEQGNIVTKKIIRKVVRQIDLSSADAAQEHEEDHTSTPNP

SEQ ID NO: 4849 - protein, 1880 aa, Homo sapiens
  Payload ID: 1065;
  Gene Symbol: ANK1;
  Gene Name: ankyrin 1, erythrocytic;
  Uniprot ID:  P16157;
  ENSP ID: ENSP00000289734
MPYSVGFREADAATSFLRAARSGNLDKALDHLRNGVDINTCNQNGLNGLHLASKEGHVKMVVELLHKEIILETTTKKGNTALHIAALAGQDEVVRELVNYGANVNAQSQKGFTPLYMAAQENHLEVVKFLLENGANQNVATEDGFTPLAVALQQGHENVVAHLINYGTKGKVRLPALHIAARNDDTRTAAVLLQNDPNPDVLSKTGFTPLHIAAHYENLNVAQLLLNRGASVNFTPQNGITPLHIASRRGNVIMVRLLLDRGAQIETKTKDELTPLHCAARNGHVRISEILLDHGAPIQAKTKNGLSPIHMAAQGDHLDCVRLLLQYDAEIDDITLDHLTPLHVAAHCGHHRVAKVLLDKGAKPNSRALNGFTPLHIACKKNHVRVMELLLKTGASIDAVTESGLTPLHVASFMGHLPIVKNLLQRGASPNVSNVKVETPLHMAARAGHTEVAKYLLQNKAKVNAKAKDDQTPLHCAARIGHTNMVKLLLENNANPNLATTAGHTPLHIAAREGHVETVLALLEKEASQACMTKKGFTPLHVAAKYGKVRVAELLLERDAHPNAAGKNGLTPLHVAVHHNNLDIVKLLLPRGGSPHSPAWNGYTPLHIAAKQNQVEVARSLLQYGGSANAESVQGVTPLHLAAQEGHAEMVALLLSKQANGNLGNKSGLTPLHLVAQEGHVPVADVLIKHGVMVDATTRMGYTPLHVASHYGNIKLVKFLLQHQADVNAKTKLGYSPLHQAAQQGHTDIVTLLLKNGASPNEVSSDGTTPLAIAKRLGYISVTDVLKVVTDETSFVLVSDKHRMSFPETVDEILDVSEDEGEELISFKAERRDSRDVDEEKELLDFVPKLDQVVESPAIPRIPCAMPETVVIRSEEQEQASKEYDEDSLIPSSPATETSDNISPVASPVHTGFLVSFMVDARGGSMRGSRHNGLRVVIPPRTCAAPTRITCRLVKPQKLSTPPPLAEEEGLASRIIALGPTGAQFLSPVIVEIPHFASHGRGDRELVVLRSENGSVWKEHRSRYGESYLDQILNGMDEELGSLEELEKKRVCRIITTDFPLYFVIMSRLCQDYDTIGPEGGSLKSKLVPLVQATFPENAVTKRVKLALQAQPVPDELVTKLLGNQATFSPIVTVEPRRRKFHRPIGLRIPLPPSWTDNPRDSGEGDTTSLRLLCSVIGGTDQAQWEDITGTTKLVYANECANFTTNVSARFWLSDCPRTAEAVNFATLLYKELTAVPYMAKFVIFAKMNDPREGRLRCYCMTDDKVDKTLEQHENFVEVARSRDIEVLEGMSLFAELSGNLVPVKKAAQQRSFHFQSFRENRLAMPVKVRDSSREPGGSLSFLRKAMKYEDTQHILCHLNITMPPCAKGSGAEDRRRTPTPLALRYSILSESTPGSLSGTEQAEMKMAVISEHLGLSWAELARELQFSVEDINRIRVENPNSLLEQSVALLNLWVIREGQNANMENLYTALQSIDRGEIVNMLEGSGRQSRNLKPDRRHTDRDYSLSPSQMNGYSSLQDELLSPASLGCALSSPLRADQYWNEVAVLDAIPLAATEHDTMLEMSDMQVWSAGLTPSLVTAEDSSLECSKAEDSDATGHEWKLEGALSEEPRGPELGSLELVEDDTVDSDATNGLIDLLEQEEGQRSEEKLPGSKRQDDATGAGQDSENEVSLVSGHQRGQARITHSPTVSQVTERSQDRLQDWDADGSIVSYLQDAAQGSWQEEVTQGPHSFQGTSTMTEGLEPGGSQEYEKVLVSVSEHTWTEQPEAESSQADRDRRQQGQEEQVQEAKNTFTQVVQGNEFQNIPGEQVTEEQFTDEQGNIVTKKIIRKVVRQIDLSSADAAQEHEEVELRGSGLQPDLIEGRKGAQIVKRASLKRGKQ

SEQ ID NO: 4850 - protein, 109 aa, Homo sapiens
  Payload ID: 1065;
  Gene Symbol: ANK1;
  Gene Name: ankyrin 1, erythrocytic;
  Uniprot ID:  P16157;
  ENSP ID: ENSP00000297744
MWTFVTQLLVTLVLLSFFLVSCQNVMHIVRGSLCFVLKHIHQELDKELGESEGLSDDEETISTRVVRRRVFLKGNEFQNIPGEQVTEEQFTDEQGNIVTKKDHTSTPNP

SEQ ID NO: 4851 - protein, 155 aa, Homo sapiens
  Payload ID: 1065;
  Gene Symbol: ANK1;
  Gene Name: ankyrin 1, erythrocytic;
  Uniprot ID:  P16157;
  ENSP ID: ENSP00000319123
MWTFVTQLLVTLVLLSFFLVSCQNVMHIVRGSLCFVLKHIHQELDKELGESEGLSDDEETISTRVVRRRVFLKGNEFQNIPGEQVTEEQFTDEQGNIVTKKIIRKVVRQIDLSSADAAQEHEEVELRGSGLQPDLIEGRKGAQIVKRASLKRGKQ

SEQ ID NO: 4852 - protein, 113 aa, Homo sapiens
  Payload ID: 1065;
  Gene Symbol: ANK1;
  Gene Name: ankyrin 1, erythrocytic;
  ENSP ID: ENSP00000335031
MWTFVTQLLVTLVLLSFFLVSCQNVMHIVRGSLCFVLKHIHQELDKELGESEGLSDDEETISTRVVRRRVFLKGNEFQNIPGEQVTEEQFTDEQGNIVTKKVELRGSGLQPDL

SEQ ID NO: 4853 - protein, 1881 aa, Homo sapiens
  Payload ID: 1065;
  Gene Symbol: ANK1;
  Gene Name: ankyrin 1, erythrocytic;
  Uniprot ID:  P16157;
  ENSP ID: ENSP00000339620
MPYSVGFREADAATSFLRAARSGNLDKALDHLRNGVDINTCNQNGLNGLHLASKEGHVKMVVELLHKEIILETTTKKGNTALHIAALAGQDEVVRELVNYGANVNAQSQKGFTPLYMAAQENHLEVVKFLLENGANQNVATEDGFTPLAVALQQGHENVVAHLINYGTKGKVRLPALHIAARNDDTRTAAVLLQNDPNPDVLSKTGFTPLHIAAHYENLNVAQLLLNRGASVNFTPQNGITPLHIASRRGNVIMVRLLLDRGAQIETKTKDELTPLHCAARNGHVRISEILLDHGAPIQAKTKNGLSPIHMAAQGDHLDCVRLLLQYDAEIDDITLDHLTPLHVAAHCGHHRVAKVLLDKGAKPNSRALNGFTPLHIACKKNHVRVMELLLKTGASIDAVTESGLTPLHVASFMGHLPIVKNLLQRGASPNVSNVKVETPLHMAARAGHTEVAKYLLQNKAKVNAKAKDDQTPLHCAARIGHTNMVKLLLENNANPNLATTAGHTPLHIAAREGHVETVLALLEKEASQACMTKKGFTPLHVAAKYGKVRVAELLLERDAHPNAAGKNGLTPLHVAVHHNNLDIVKLLLPRGGSPHSPAWNGYTPLHIAAKQNQVEVARSLLQYGGSANAESVQGVTPLHLAAQEGHAEMVALLLSKQANGNLGNKSGLTPLHLVAQEGHVPVADVLIKHGVMVDATTRMGYTPLHVASHYGNIKLVKFLLQHQADVNAKTKLGYSPLHQAAQQGHTDIVTLLLKNGASPNEVSSDGTTPLAIAKRLGYISVTDVLKVVTDETSFVLVSDKHRMSFPETVDEILDVSEDEGEELISFKAERRDSRDVDEEKELLDFVPKLDQVVESPAIPRIPCAMPETVVIRSEEQEQASKEYDEDSLIPSSPATETSDNISPVASPVHTGFLVSFMVDARGGSMRGSRHNGLRVVIPPRTCAAPTRITCRLVKPQKLSTPPPLAEEEGLASRIIALGPTGAQFLSPVIVEIPHFASHGRGDRELVVLRSENGSVWKEHRSRYGESYLDQILNGMDEELGSLEELEKKRVCRIITTDFPLYFVIMSRLCQDYDTIGPEGGSLKSKLVPLVQATFPENAVTKRVKLALQAQPVPDELVTKLLGNQATFSPIVTVEPRRRKFHRPIGLRIPLPPSWTDNPRDSGEGDTTSLRLLCSVIGGTDQAQWEDITGTTKLVYANECANFTTNVSARFWLSDCPRTAEAVNFATLLYKELTAVPYMAKFVIFAKMNDPREGRLRCYCMTDDKVDKTLEQHENFVEVARSRDIEVLEGMSLFAELSGNLVPVKKAAQQRSFHFQSFRENRLAMPVKVRDSSREPGGSLSFLRKAMKYEDTQHILCHLNITMPPCAKGSGAEDRRRTPTPLALRYSILSESTPGSLSGTEQAEMKMAVISEHLGLSWAELARELQFSVEDINRIRVENPNSLLEQSVALLNLWVIREGQNANMENLYTALQSIDRGEIVNMLEGSGRQSRNLKPDRRHTDRDYSLSPSQMNGYSSLQDELLSPASLGCALSSPLRADQYWNEVAVLDAIPLAATEHDTMLEMSDMQVWSAGLTPSLVTAEDSSLECSKAEDSDATGHEWKLEGALSEEPRGPELGSLELVEDDTVDSDATNGLIDLLEQEEGQRSEEKLPGSKRQDDATGAGQDSENEVSLVSGHQRGQARITHSPTVSQVTERSQDRLQDWDADGSIVSYLQDAAQGSWQEEVTQGPHSFQGTSTMTEGLEPGGSQEYEKVLVSVSEHTWTEQPEAESSQADRDRRQQGQEEQVQEAKNTFTQVVQGNEFQNIPGEQVTEEQFTDEQGNIVTKKIIRKVVRQIDLSSADAAQEHEEVTVEGPLEDPSELEVDIDYFMKHSKDHTSTPNP

SEQ ID NO: 4854 - protein, 177 aa, Homo sapiens
  Payload ID: 1065;
  Gene Symbol: ANK1;
  Gene Name: ankyrin 1, erythrocytic;
  ENSP ID: ENSP00000428315
  MOD_RES (1)..(1): Any amino acid
XEDTQHILCHLNITMPPCAKGSGAEDRRRTPTPLALRYSILSESTPGSLSGTEQAEMKMAVISEHLGLSWAELARELQFSVEDINRIRVENPNSLLEQSVALLNLWVIREGQNANMENLYTALQSIDRGEIVNMLEGSGRQSRNLKPDRRHTDRDYSLSPSQMNGGRSEVRREAARF

SEQ ID NO: 4855 - protein, 131 aa, Homo sapiens
  Payload ID: 1065;
  Gene Symbol: ANK1;
  Gene Name: ankyrin 1, erythrocytic;
  ENSP ID: ENSP00000428750
MWTFVTQLLVTLVLLSFFLVSCQNVMHIVRGSLCFVLKHIHQELDKELGESEGLSDDEETISTRVVRRRVFLKGNEFQNIPGEQVTEEQFTDEQGNIVTKKIIRKVVRQIDLSSADAAQEHEEDHTSTPNP

SEQ ID NO: 4856 - protein, 1040 aa, Homo sapiens
  Payload ID: 1065;
  Gene Symbol: ANK1;
  Gene Name: ankyrin 1, erythrocytic;
  ENSP ID: ENSP00000430174
  MOD_RES (1)..(1): Any amino acid
XIKHGVMVDATTRMGYTPLHVASHYGNIKLVKFLLQHQADVNAKTKLGYSPLHQAAQQGHTDIVTLLLKNGASPNEVSSDGTTPLAIAKRLGYISVTDVLKVVTDETSFVLVSDKHRMSFPETVDEILDVSEDEGTAHITIMGEELISFKAERRDSRDVDEEKELLDFVPKLDQVVESPAIPRIPCAMPETVVIRSEEQEQASKEYDEDSLIPSSPATETSDNISPVASPVHTGFLVSFMVDARGGSMRGSRHNGLRVVIPPRTCAAPTRITCRLVKPQKLSTPPPLAEEEGLASRIIALGPTGAQFLSPVIVEIPHFASHGRGDRELVVLRSENGSVWKEHRSRYGESYLDQILNGMDEELGSLEELEKKRVCRIITTDFPLYFVIMSRLCQDYDTIGPEGGSLKSKLVPLVQATFPENAVTKRVKLALQAQPVPDELVTKLLGNQATFSPIVTVEPRRRKFHRPIGLRIPLPPSWTDNPRDSGEGDTTSLRLLCSVIGGTDQAQWEDITGTTKLVYANECANFTTNVSARFWLSDCPRTAEAVNFATLLYKELTAVPYMAKFVIFAKMNDPREGRLRCYCMTDDKVDKTLEQHENFVEVARSRDIEVLEGMSLFAELSGNLVPVKKAAQQRSFHFQSFRENRLAMPVKVRDSSREPGGSLSFLRKAMKYEDTQHILCHLNITMPPCAKGSGAEDRRRTPTPLALRYSILSESTPGSLSGTEQAEMKMAVISEHLGLSWAELARELQFSVEDINRIRVENPNSLLEQSVALLNLWVIREGQNANMENLYTALQSIDRGEIVNMLEGSGRQSRNLKPDRRHTDRDYSLSPSQMNGHQRGQARITHSPTVSQVTERSQDRLQDWDADGSIVSYLQDAAQGSWQEEVTQGPHSFQGTSTMTEGLEPGGSQEYEKVLVSVSEHTWTEQPEAESSQADRDRRQQGQEEQVQEAKNTFTQVVQGNEFQNIPGEQVTEEQFTDEQGNIVTKKIIRKVVRQIDLSSADAAQEHEEVELRGSGLQPDLIEGRKGAQIVKRASLKRGKQ

SEQ ID NO: 4857 - protein, 156 aa, Homo sapiens
  Payload ID: 1065;
  Gene Symbol: ANK1;
  Gene Name: ankyrin 1, erythrocytic;
  Uniprot ID:  P16157;
  ENSP ID: ENSP00000430368
MWTFVTQLLVTLVLLSFFLVSCQNVMHIVRGSLCFVLKHIHQELDKELGESEGLSDDEETISTRVVRRRVFLKGNEFQNIPGEQVTEEQFTDEQGNIVTKKIIRKVVRQIDLSSADAAQEHEEVTVEGPLEDPSELEVDIDYFMKHSKDHTSTPNP

SEQ ID NO: 4858 - protein, 3924 aa, Homo sapiens
  Payload ID: 1066;
  Gene Symbol: ANK2;
  Gene Name: ankyrin 2, neuronal;
  ENSP ID: ENSP00000264366
MMNEDAAQKSDSGEKFNGSSQRRKRPKKSDSNASFLRAARAGNLDKVVEYLKGGIDINTCNQNGLNALHLAAKEGHVGLVQELLGRGSSVDSATKKGNTALHIASLAGQAEVVKVLVKEGANINAQSQNGFTPLYMAAQENHIDVVKYLLENGANQSTATEDGFTPLAVALQQGHNQAVAILLENDTKGKVRLPALHIAARKDDTKSAALLLQNDHNADVQSKMMVNRTTESGFTPLHIAAHYGNVNVATLLLNRGAAVDFTARNGITPLHVASKRGNTNMVKLLLDRGGQIDAKTRDGLTPLHCAARSGHDQVVELLLERGAPLLARTKNGLSPLHMAAQGDHVECVKHLLQHKAPVDDVTLDYLTALHVAAHCGHYRVTKLLLDKRANPNARALNGFTPLHIACKKNRIKVMELLVKYGASIQAITESGLTPIHVAAFMGHLNIVLLLLQNGASPDVTNIRGETALHMAARAGQVEVVRCLLRNGALVDARAREEQTPLHIASRLGKTEIVQLLLQHMAHPDAATTNGYTPLHISAREGQVDVASVLLEAGAAHSLATKKGFTPLHVAAKYGSLDVAKLLLQRRAAADSAGKNGLTPLHVAAHYDNQKVALLLLEKGASPHATAKNGYTPLHIAAKKNQMQIASTLLNYGAETNIVTKQGVTPLHLASQEGHTDMVTLLLDKGANIHMSTKSGLTSLHLAAQEDKVNVADILTKHGADQDAHTKLGYTPLIVACHYGNVKMVNFLLKQGANVNAKTKNGYTPLHQAAQQGHTHIINVLLQHGAKPNATTANGNTALAIAKRLGYISVVDTLKVVTEEVTTTTTTITEKHKLNVPETMTEVLDVSDEEGDDTMTGDGGEYLRPEDLKELGDDSLPSSQFLDGMNYLRYSLEGGRSDSLRSFSSDRSHTLSHASYLRDSAVMDDSVVIPSHQVSTLAKEAERNSYRLSWGTENLDNVALSSSPIHSGFLVSFMVDARGGAMRGCRHNGLRIIIPPRKCTAPTRVTCRLVKRHRLATMPPMVEGEGLASRLIEVGPSGAQFLGPVIVEIPHFAALRGKERELVVLRSENGDSWKEHFCDYTEDELNEILNGMDEVLDSPEDLEKKRICRIITRDFPQYFAVVSRIKQDSNLIGPEGGVLSSTVVPQVQAVFPEGALTKRIRVGLQAQPMHSELVKKILGNKATFSPIVTLEPRRRKFHKPITMTIPVPKASSDVMLNGFGGDAPTLRLLCSITGGTTPAQWEDITGTTPLTFVNECVSFTTNVSARFWLIDCRQIQESVTFASQVYREIICVPYMAKFVVFAKSHDPIEARLRCFCMTDDKVDKTLEQQENFAEVARSRDVEVLEGKPIYVDCFGNLVPLTKSGQHHIFSFFAFKENRLPLFVKVRDTTQEPCGRLSFMKEPKSTRGLVHQAICNLNITLPIYTKESESDQEQEEEIDMTSEKNDETESTETSVLKSHLVNEVPVLASPDLLSEVSEMKQDLIKMTAILTTDVSDKAGSIKVKELVKAAEEEPGEPFEIVERVKEDLEKVNEILRSGTCTRDESSVQSSRSERGLVEEEWVIVSDEEIEEARQKAPLEITEYPCVEVRIDKEIKGKVEKDSTGLVNYLTDDLNTCVPLPKEQLQTVQDKAGKKCEALAVGRSSEKEGKDIPPDETQSTQKQHKPSLGIKKPVRRKLKEKQKQKEEGLQASAEKAELKKGSSEESLGEDPGLAPEPLPTVKATSPLIEETPIGSIKDKVKALQKRVEDEQKGRSKLPIRVKGKEDVPKKTTHRPHPAASPSLKSERHAPGSPSPKTERHSTLSSSAKTERHPPVSPSSKTEKHSPVSPSAKTERHSPASSSSKTEKHSPVSPSTKTERHSPVSSTKTERHPPVSPSGKTDKRPPVSPSGRTEKHPPVSPGRTEKRLPVSPSGRTDKHQPVSTAGKTEKHLPVSPSGKTEKQPPVSPTSKTERIEETMSVRELMKAFQSGQDPSKHKTGLFEHKSAKQKQPQEKGKVRVEKEKGPILTQREAQKTENQTIKRGQRLPVTGTAESKRGVRVSSIGVKKEDAAGGKEKVLSHKIPEPVQSVPEEESHRESEVPKEKMADEQGDMDLQISPDRKTSTDFSEVIKQELEDNDKYQQFRLSEETEKAQLHLDQVLTSPFNTTFPLDYMKDEFLPALSLQSGALDGSSESLKNEGVAGSPCGSLMEGTPQISSEESYKHEGLAETPETSPESLSFSPKKSEEQTGETKESTKTETTTEIRSEKEHPTTKDITGGSEERGATVTEDSETSTESFQKEATLGSPKDTSPKRQDDCTGSCSVALAKETPTGLTEEAACDEGQRTFGSSAHKTQTDSEVQESTATSDETKALPLPEASVKTDTGTESKPQGVIRSPQGLELALPSRDSEVLSAVADDSLAVSHKDSLEASPVLEDNSSHKTPDSLEPSPLKESPCRDSLESSPVEPKMKAGIFPSHFPLPAAVAKTELLTEVASVRSRLLRDPDGSAEDDSLEQTSLMESSGKSPLSPDTPSSEEVSYEVTPKTTDVSTPKPAVIHECAEEDDSENGEKKRFTPEEEMFKMVTKIKMFDELEQEAKQKRDYKKEPKQEESSSSSDPDADCSVDVDEPKHTGSGEDESGVPVLVTSESRKVSSSSESEPELAQLKKGADSGLLPEPVIRVQPPSPLPSSMDSNSSPEEVQFQPVVSKQYTFKMNEDTQEEPGKSEEEKDSESHLAEDRHAVSTEAEDRSYDKLNRDTDQPKICDGHGCEAMSPSSSAAPVSSGLQSPTGDDVDEQPVIYKESLALQGTHEKDTEGEELDVSRAESPQADCPSESFSSSSSLPHCLVSEGKELDEDISATSSIQKTEVTKTDETFENLPKDCPSQDSSITTQTDRFSMDVPVSDLAENDEIYDPQITSPYENVPSQSFFSSEESKTQTDANHTTSFHSSEVYSVTITSPVEDVVVASSSSGTVLSKESNFEGQDIKMESQQESTLWEMQSDSVSSSFEPTMSATTTVVGEQISKVIITKTDVDSDSWSEIREDDEAFEARVKEEEQKIFGLMVDRQSQGTTPDTTPARTPTEEGTPTSEQNPFLFQEGKLFEMTRSGAIDMTKRSYADESFHFFQIGQESREETLSEDVKEGATGADPLPLETSAESLALSESKETVDDEADLLPDDVSEEVEEIPASDAQLNSQMGISASTETPTKEAVSVGTKDLPTVQTGDIPPLSGVKQISCPDSSEPAVQVQLDFSTLTRSVYSDRGDDSPDSSPEEQKSVIEIPTAPMENVPFTESKSKIPVRTMPTSTPAPPSAEYESSVSEDFLSSVDEENKADEAKPKSKLPVKVPLQRVEQQLSDLDTSVQKTVAPQGQDMASIAPDNRSKSESDASSLDSKTKCPVKTRSYTETETESRERAEELELESEEGATRPKILTSRLPVKSRSTTSSCRGGTSPTKESKEHFFDLYRNSIEFFEEISDEASKLVDRLTQSEREQEIVSDDESSSALEVSVIENLPPVETEHSVPEDIFDTRPIWDESIETLIERIPDENGHDHAEDPQDEQERIEERLAYIADHLGFSWTELARELDFTEEQIHQIRIENPNSLQDQSHALLKYWLERDGKHATDTNLVECLTKINRMDIVHLMETNTEPLQERISHSYAEIEQTITLDHSEGFSVLQEELCTAQHKQKEEQAVSKESETCDHPPIVSEEDISVGYSTFQDGVPKTEGDSSATALFPQTHKEQVQQDFSGKMQDLPEESSLEYQQEYFVTTPGTETSETQKAMIVPSSPSKTPEEVSTPAEEEKLYLQTPTSSERGGSPIIQEPEEPSEHREESSPRKTSLVIVESADNQPETCERLDEDAAFEKGDDMPEIPPETVTEEEYIDEHGHTVVKKVTRKIIRRYVSSEGTEKEEIMVQGMPQEPVNIEEGDGYSKVIKRVVLKSDTEQSEDNNE

SEQ ID NO: 4859 - protein, 3957 aa, Homo sapiens
  Payload ID: 1066;
  Gene Symbol: ANK2;
  Gene Name: ankyrin 2, neuronal;
  Uniprot ID:  Q01484;
  ENSP ID: ENSP00000349588
MMNEDAAQKSDSGEKFNGSSQRRKRPKKSDSNASFLRAARAGNLDKVVEYLKGGIDINTCNQNGLNALHLAAKEGHVGLVQELLGRGSSVDSATKKGNTALHIASLAGQAEVVKVLVKEGANINAQSQNGFTPLYMAAQENHIDVVKYLLENGANQSTATEDGFTPLAVALQQGHNQAVAILLENDTKGKVRLPALHIAARKDDTKSAALLLQNDHNADVQSKMMVNRTTESGFTPLHIAAHYGNVNVATLLLNRGAAVDFTARNGITPLHVASKRGNTNMVKLLLDRGGQIDAKTRDGLTPLHCAARSGHDQVVELLLERGAPLLARTKNGLSPLHMAAQGDHVECVKHLLQHKAPVDDVTLDYLTALHVAAHCGHYRVTKLLLDKRANPNARALNGFTPLHIACKKNRIKVMELLVKYGASIQAITESGLTPIHVAAFMGHLNIVLLLLQNGASPDVTNIRGETALHMAARAGQVEVVRCLLRNGALVDARAREEQTPLHIASRLGKTEIVQLLLQHMAHPDAATTNGYTPLHISAREGQVDVASVLLEAGAAHSLATKKGFTPLHVAAKYGSLDVAKLLLQRRAAADSAGKNGLTPLHVAAHYDNQKVALLLLEKGASPHATAKNGYTPLHIAAKKNQMQIASTLLNYGAETNIVTKQGVTPLHLASQEGHTDMVTLLLDKGANIHMSTKSGLTSLHLAAQEDKVNVADILTKHGADQDAHTKLGYTPLIVACHYGNVKMVNFLLKQGANVNAKTKNGYTPLHQAAQQGHTHIINVLLQHGAKPNATTANGNTALAIAKRLGYISVVDTLKVVTEEVTTTTTTITEKHKLNVPETMTEVLDVSDEEGDDTMTGDGGEYLRPEDLKELGDDSLPSSQFLDGMNYLRYSLEGGRSDSLRSFSSDRSHTLSHASYLRDSAVMDDSVVIPSHQVSTLAKEAERNSYRLSWGTENLDNVALSSSPIHSGFLVSFMVDARGGAMRGCRHNGLRIIIPPRKCTAPTRVTCRLVKRHRLATMPPMVEGEGLASRLIEVGPSGAQFLGKLHLPTAPPPLNEGESLVSRILQLGPPGTKFLGPVIVEIPHFAALRGKERELVVLRSENGDSWKEHFCDYTEDELNEILNGMDEVLDSPEDLEKKRICRIITRDFPQYFAVVSRIKQDSNLIGPEGGVLSSTVVPQVQAVFPEGALTKRIRVGLQAQPMHSELVKKILGNKATFSPIVTLEPRRRKFHKPITMTIPVPKASSDVMLNGFGGDAPTLRLLCSITGGTTPAQWEDITGTTPLTFVNECVSFTTNVSARFWLIDCRQIQESVTFASQVYREIICVPYMAKFVVFAKSHDPIEARLRCFCMTDDKVDKTLEQQENFAEVARSRDVEVLEGKPIYVDCFGNLVPLTKSGQHHIFSFFAFKENRLPLFVKVRDTTQEPCGRLSFMKEPKSTRGLVHQAICNLNITLPIYTKESESDQEQEEEIDMTSEKNDETESTETSVLKSHLVNEVPVLASPDLLSEVSEMKQDLIKMTAILTTDVSDKAGSIKVKELVKAAEEEPGEPFEIVERVKEDLEKVNEILRSGTCTRDESSVQSSRSERGLVEEEWVIVSDEEIEEARQKAPLEITEYPCVEVRIDKEIKGKVEKDSTGLVNYLTDDLNTCVPLPKEQLQTVQDKAGKKCEALAVGRSSEKEGKDIPPDETQSTQKQHKPSLGIKKPVRRKLKEKQKQKEEGLQASAEKAELKKGSSEESLGEDPGLAPEPLPTVKATSPLIEETPIGSIKDKVKALQKRVEDEQKGRSKLPIRVKGKEDVPKKTTHRPHPAASPSLKSERHAPGSPSPKTERHSTLSSSAKTERHPPVSPSSKTEKHSPVSPSAKTERHSPASSSSKTEKHSPVSPSTKTERHSPVSSTKTERHPPVSPSGKTDKRPPVSPSGRTEKHPPVSPGRTEKRLPVSPSGRTDKHQPVSTAGKTEKHLPVSPSGKTEKQPPVSPTSKTERIEETMSVRELMKAFQSGQDPSKHKTGLFEHKSAKQKQPQEKGKVRVEKEKGPILTQREAQKTENQTIKRGQRLPVTGTAESKRGVRVSSIGVKKEDAAGGKEKVLSHKIPEPVQSVPEEESHRESEVPKEKMADEQGDMDLQISPDRKTSTDFSEVIKQELEDNDKYQQFRLSEETEKAQLHLDQVLTSPFNTTFPLDYMKDEFLPALSLQSGALDGSSESLKNEGVAGSPCGSLMEGTPQISSEESYKHEGLAETPETSPESLSFSPKKSEEQTGETKESTKTETTTEIRSEKEHPTTKDITGGSEERGATVTEDSETSTESFQKEATLGSPKDTSPKRQDDCTGSCSVALAKETPTGLTEEAACDEGQRTFGSSAHKTQTDSEVQESTATSDETKALPLPEASVKTDTGTESKPQGVIRSPQGLELALPSRDSEVLSAVADDSLAVSHKDSLEASPVLEDNSSHKTPDSLEPSPLKESPCRDSLESSPVEPKMKAGIFPSHFPLPAAVAKTELLTEVASVRSRLLRDPDGSAEDDSLEQTSLMESSGKSPLSPDTPSSEEVSYEVTPKTTDVSTPKPAVIHECAEEDDSENGEKKRFTPEEEMFKMVTKIKMFDELEQEAKQKRDYKKEPKQEESSSSSDPDADCSVDVDEPKHTGSGEDESGVPVLVTSESRKVSSSSESEPELAQLKKGADSGLLPEPVIRVQPPSPLPSSMDSNSSPEEVQFQPVVSKQYTFKMNEDTQEEPGKSEEEKDSESHLAEDRHAVSTEAEDRSYDKLNRDTDQPKICDGHGCEAMSPSSSAAPVSSGLQSPTGDDVDEQPVIYKESLALQGTHEKDTEGEELDVSRAESPQADCPSESFSSSSSLPHCLVSEGKELDEDISATSSIQKTEVTKTDETFENLPKDCPSQDSSITTQTDRFSMDVPVSDLAENDEIYDPQITSPYENVPSQSFFSSEESKTQTDANHTTSFHSSEVYSVTITSPVEDVVVASSSSGTVLSKESNFEGQDIKMESQQESTLWEMQSDSVSSSFEPTMSATTTVVGEQISKVIITKTDVDSDSWSEIREDDEAFEARVKEEEQKIFGLMVDRQSQGTTPDTTPARTPTEEGTPTSEQNPFLFQEGKLFEMTRSGAIDMTKRSYADESFHFFQIGQESREETLSEDVKEGATGADPLPLETSAESLALSESKETVDDEADLLPDDVSEEVEEIPASDAQLNSQMGISASTETPTKEAVSVGTKDLPTVQTGDIPPLSGVKQISCPDSSEPAVQVQLDFSTLTRSVYSDRGDDSPDSSPEEQKSVIEIPTAPMENVPFTESKSKIPVRTMPTSTPAPPSAEYESSVSEDFLSSVDEENKADEAKPKSKLPVKVPLQRVEQQLSDLDTSVQKTVAPQGQDMASIAPDNRSKSESDASSLDSKTKCPVKTRSYTETETESRERAEELELESEEGATRPKILTSRLPVKSRSTTSSCRGGTSPTKESKEHFFDLYRNSIEFFEEISDEASKLVDRLTQSEREQEIVSDDESSSALEVSVIENLPPVETEHSVPEDIFDTRPIWDESIETLIERIPDENGHDHAEDPQDEQERIEERLAYIADHLGFSWTELARELDFTEEQIHQIRIENPNSLQDQSHALLKYWLERDGKHATDTNLVECLTKINRMDIVHLMETNTEPLQERISHSYAEIEQTITLDHSEGFSVLQEELCTAQHKQKEEQAVSKESETCDHPPIVSEEDISVGYSTFQDGVPKTEGDSSATALFPQTHKEQVQQDFSGKMQDLPEESSLEYQQEYFVTTPGTETSETQKAMIVPSSPSKTPEEVSTPAEEEKLYLQTPTSSERGGSPIIQEPEEPSEHREESSPRKTSLVIVESADNQPETCERLDEDAAFEKGDDMPEIPPETVTEEEYIDEHGHTVVKKVTRKIIRRYVSSEGTEKEEIMVQGMPQEPVNIEEGDGYSKVIKRVVLKSDTEQSEDNNE

SEQ ID NO: 4860 - protein, 1872 aa, Homo sapiens
  Payload ID: 1066;
  Gene Symbol: ANK2;
  Gene Name: ankyrin 2, neuronal;
  Uniprot ID:  Q01484;
  ENSP ID: ENSP00000378044
MMNEDAAQKSDSGEKFNGSSQRRKRPKKSDSNASFLRAARAGNLDKVVEYLKGGIDINTCNQNGLNALHLAAKEGHVGLVQELLGRGSSVDSATKKGNTALHIASLAGQAEVVKVLVKEGANINAQSQNGFTPLYMAAQENHIDVVKYLLENGANQSTATEDGFTPLAVALQQGHNQAVAILLENDTKGKVRLPALHIAARKDDTKSAALLLQNDHNADVQSKMMVNRTTESGFTPLHIAAHYGNVNVATLLLNRGAAVDFTARNGITPLHVASKRGNTNMVKLLLDRGGQIDAKTRDGLTPLHCAARSGHDQVVELLLERGAPLLARTKNGLSPLHMAAQGDHVECVKHLLQHKAPVDDVTLDYLTALHVAAHCGHYRVTKLLLDKRANPNARALNGFTPLHIACKKNRIKVMELLVKYGASIQAITESGLTPIHVAAFMGHLNIVLLLLQNGASPDVTNIRGETALHMAARAGQVEVVRCLLRNGALVDARAREEQTPLHIASRLGKTEIVQLLLQHMAHPDAATTNGYTPLHISAREGQVDVASVLLEAGAAHSLATKKGFTPLHVAAKYGSLDVAKLLLQRRAAADSAGKNGLTPLHVAAHYDNQKVALLLLEKGASPHATAKNGYTPLHIAAKKNQMQIASTLLNYGAETNIVTKQGVTPLHLASQEGHTDMVTLLLDKGANIHMSTKSGLTSLHLAAQEDKVNVADILTKHGADQDAHTKLGYTPLIVACHYGNVKMVNFLLKQGANVNAKTKNGYTPLHQAAQQGHTHIINVLLQHGAKPNATTANGNTALAIAKRLGYISVVDTLKVVTEEVTTTTTTITEKHKLNVPETMTEVLDVSDEEGDDTMTGDGGEYLRPEDLKELGDDSLPSSQFLDGMNYLRYSLEGGRSDSLRSFSSDRSHTLSHASYLRDSAVMDDSVVIPSHQVSTLAKEAERNSYRLSWGTENLDNVALSSSPIHSGFLVSFMVDARGGAMRGCRHNGLRIIIPPRKCTAPTRVTCRLVKRHRLATMPPMVEGEGLASRLIEVGPSGAQFLGKLHLPTAPPPLNEGESLVSRILQLGPPGTKFLGPVIVEIPHFAALRGKERELVVLRSENGDSWKEHFCDYTEDELNEILNGMDEVLDSPEDLEKKRICRIITRDFPQYFAVVSRIKQDSNLIGPEGGVLSSTVVPQVQAVFPEGALTKRIRVGLQAQPMHSELVKKILGNKATFSPIVTLEPRRRKFHKPITMTIPVPKASSDVMLNGFGGDAPTLRLLCSITGGTTPAQWEDITGTTPLTFVNECVSFTTNVSARFWLIDCRQIQESVTFASQVYREIICVPYMAKFVVFAKSHDPIEARLRCFCMTDDKVDKTLEQQENFAEVARSRDVEVLEGKPIYVDCFGNLVPLTKSGQHHIFSFFAFKENRLPLFVKVRDTTQEPCGRLSFMKEPKSTRGLVHQAICNLNITLPIYTKESESDQEQEEEIDMTSEKNPQDEQERIEERLAYIADHLGFSWTELARELDFTEEQIHQIRIENPNSLQDQSHALLKYWLERDGKHATDTNLVECLTKINRMDIVHLMETNTEPLQERISHSYAEIEQTITLDHSEGFSVLQEELCTAQHKQKEEQAVSKESETCDHPPIVSEEDISVGYSTFQDGVPKTEGDSSATALFPQTHKEQVQQDFSGKMQDLPEESSLEYQQEYFVTTPGTETSETQKAMIVPSSPSKTPEEVSTPAEEEKLYLQTPTSSERGGSPIIQEPEEPSEHREESSPRKTSLVIVESADNQPETCERLDEDAAFEKGDDMPEIPPETVTEEEYIDEHGHTVVKKVTRKIIRRYVSSEGTEKEEIMVQGMPQEPVNIEEGDGYSKVIKRVVLKSDTEQSEDNNE

SEQ ID NO: 4861 - protein, 1611 aa, Homo sapiens
  Payload ID: 1066;
  Gene Symbol: ANK2;
  Gene Name: ankyrin 2, neuronal;
  ENSP ID: ENSP00000421011
MTTMLQKSDSNASFLRAARAGNLDKVVEYLKGGIDINTCNQNGLNALHLAAKEGHVGLVQELLGRGSSVDSATKKGNTALHIASLAGQAEVVKVLVKEGANINAQSQNGFTPLYMAAQENHIDVVKYLLENGANQSTATEDGFTPLAVALQQGHNQAVAILLENDTKGKVRLPALHIAARKDDTKSAALLLQNDHNADVQSKMMVNRTTESGFTPLHIAAHYGNVNVATLLLNRGAAVDFTARNGITPLHVASKRGNTNMVKLLLDRGGQIDAKTRDGLTPLHCAARSGHDQVVELLLERGAPLLARTKNGLSPLHMAAQGDHVECVKHLLQHKAPVDDVTLDYLTALHVAAHCGHYRVTKLLLDKRANPNARALNGFTPLHIACKKNRIKVMELLVKYGASIQAITESGLTPIHVAAFMGHLNIVLLLLQNGASPDVTNIRGETALHMAARAGQVEVVRCLLRNGALVDARAREEQTPLHIASRLGKTEIVQLLLQHMAHPDAATTNGYTPLHISAREGQVDVASVLLEAGAAHSLATKKGFTPLHVAAKYGSLDVAKLLLQRRAAADSAGKNGYTPLHIAAKKNQMQIASTLLNYGAETNIVTKQGVTPLHLASQEGHTDMVTLLLDKGANIHMSTKSGLTSLHLAAQEDKVNVADILTKHGADQDAHTKLGYTPLIVACHYGNVKMVNFLLKQGANVNAKTKNGYTPLHQAAQQGHTHIINVLLQHGAKPNATTANGNTALAIAKRLGYISVVDTLKVVTEEVTTTTTTITEKHKLNVPETMTEVLDVSDEEGDDTMTGDGGEYLRPEDLKELGDDSLPSSQFLDGMNYLRYSLEGGRSDSLRSFSSDRSHTLSHASYLRDSAVMDDSVVIPSHQVSTLAKEAERNSYRLSWGTENLDNVALSSSPIHSGFLVSFMVDARGGAMRGCRHNGLRIIIPPRKCTAPTRVTCRLVKRHRLATMPPMVEGEGLASRLIEVGPSGAQFLGPVIVEIPHFAALRGKERELVVLRSENGDSWKEHFCDYTEDELNEILNGMDEVLDSPEDLEKKRICRIITRDFPQYFAVVSRIKQDSNLIGPEGGVLSSTVVPQVQAVFPEGALTKRIRVGLQAQPMHSELVKKILGNKATFSPIVTLEPRRRKFHKPITMTIPVPKASSDVMLNGFGGDAPTLRLLCSITGGTTPAQWEDITGTTPLTFVNECVSFTTNVSARFWLIDCRQIQESVTFASQVYREIICVPYMAKFVVFAKSHDPIEARLRCFCMTDDKVDKTLEQQENFAEVARSRDVEVLEGKPIYVDCFGNLVPLTKSGQHHIFSFFAFKENRLPLFVKVRDTTQEPCGRLSFMKEPKSTRGLVHQAICNLNITLPIYTKESESDQEQEEEIDMTSEKNDETESTETSVLKSHLVNEVPVLASPDLLSEVSEMKQDLIKMTAILTTDVSDKAGSIKVKELVKAAEEEPGEPFEIVERVKEDLEKVNEILRSGTCTRDESSVQSSRSERGLVEEEWVIVSDEEIEEARQKAPLEITEYPCVEVRIDKEIKGKVEKDSTGLVNYLTDDLNTCVPLPKEQLQTVQDKAGKKCEALAVGRSSEKEGKDIPPDETQSTQKQHKPSL

SEQ ID NO: 4862 - protein, 555 aa, Homo sapiens
  Payload ID: 1066;
  Gene Symbol: ANK2;
  Gene Name: ankyrin 2, neuronal;
  Uniprot ID:  Q01484;
  ENSP ID: ENSP00000421023
MTDDKVDKTLEQQENFAEVARSRDVEVLEGKPIYVDCFGNLVPLTKSGQHHIFSFFAFKENRLPLFVKVRDTTQEPCGRLSFMKEPKSTRGLVHQAICNLNITLPIYTKESESDQEQEEEIDMTSEKNPQDEQERIEERLAYIADHLGFSWTELARELDFTEEQIHQIRIENPNSLQDQSHALLKYWLERDGKHATDTNLVECLTKINRMDIVHLMETNTEPLQERISHSYAEIEQTITLDHSEGFSVLQEELCTAQHKQKEEQAVSKESETCDHPPIVSEEDISVGYSTFQDGVPKTEGDSSATALFPQTHKEQVQQDFSGKMQDLPEESSLEYQQEYFVTTPGTETSETQKAMIVPSSPSKTPEEVSTPAEEEKLYLQTPTSSERGGSPIIQEPEEPSEHREESSPRKTSLVIVESADNQPETCERLDEDAAFEKELTEELGELEASSDEEAMVTTRVVRRRVIIQGDDMPEIPPETVTEEEYIDEHGHTVVKKVTRKIIRRYVSSEGTEKEEIMVQGMPQEPVNIEEGDGYSKVIKRVVLKSDTEQSEDNNE

SEQ ID NO: 4863 - protein, 65 aa, Homo sapiens
  Payload ID: 1066;
  Gene Symbol: ANK2;
  Gene Name: ankyrin 2, neuronal;
  ENSP ID: ENSP00000421059
MAAQENHIDVVKYLLENGANQSTATEDGFTPLAVALQQGHNQAVAILLENDTKGKVRLPALHIAA

SEQ ID NO: 4864 - protein, 1863 aa, Homo sapiens
  Payload ID: 1066;
  Gene Symbol: ANK2;
  Gene Name: ankyrin 2, neuronal;
  Uniprot ID:  Q01484;
  ENSP ID: ENSP00000421067
MTTMLQKSDSNASFLRAARAGNLDKVVEYLKGGIDINTCNQNGLNALHLAAKEGHVGLVQELLGRGSSVDSATKKGNTALHIASLAGQAEVVKVLVKEGANINAQSQNGFTPLYMAAQENHIDVVKYLLENGANQSTATEDGFTPLAVALQQGHNQAVAILLENDTKGKVRLPALHIAARKDDTKSAALLLQNDHNADVQSKMMVNRTTESGFTPLHIAAHYGNVNVATLLLNRGAAVDFTARNGITPLHVASKRGNTNMVKLLLDRGGQIDAKTRDGLTPLHCAARSGHDQVVELLLERGAPLLARTKNGLSPLHMAAQGDHVECVKHLLQHKAPVDDVTLDYLTALHVAAHCGHYRVTKLLLDKRANPNARALNGFTPLHIACKKNRIKVMELLVKYGASIQAITESGLTPIHVAAFMGHLNIVLLLLQNGASPDVTNIRGETALHMAARAGQVEVVRCLLRNGALVDARAREEQTPLHIASRLGKTEIVQLLLQHMAHPDAATTNGYTPLHISAREGQVDVASVLLEAGAAHSLATKKGFTPLHVAAKYGSLDVAKLLLQRRAAADSAGKNGLTPLHVAAHYDNQKVALLLLEKGASPHATAKNGYTPLHIAAKKNQMQIASTLLNYGAETNIVTKQGVTPLHLASQEGHTDMVTLLLDKGANIHMSTKSGLTSLHLAAQEDKVNVADILTKHGADQDAHTKLGYTPLIVACHYGNVKMVNFLLKQGANVNAKTKNGYTPLHQAAQQGHTHIINVLLQHGAKPNATTANGNTALAIAKRLGYISVVDTLKVVTEEVTTTTTTITEKHKLNVPETMTEVLDVSDEEGDDTMTGDGGEYLRPEDLKELGDDSLPSSQFLDGMNYLRYSLEGGRSDSLRSFSSDRSHTLSHASYLRDSAVMDDSVVIPSHQVSTLAKEAERNSYRLSWGTENLDNVALSSSPIHSGRASPCLERDNSSFLVSFMVDARGGAMRGCRHNGLRIIIPPRKCTAPTRVTCRLVKRHRLATMPPMVEGEGLASRLIEVGPSGAQFLGKLHLPTAPPPLNEGESLVSRILQLGPPGTKFLGPVIVEIPHFAALRGKERELVVLRSENGDSWKEHFCDYTEDELNEILNGMDEVLDSPEDLEKKRICRIITRDFPQYFAVVSRIKQDSNLIGPEGGVLSSTVVPQVQAVFPEGALTKRIRVGLQAQPMHSELVKKILGNKATFSPIVTLEPRRRKFHKPITMTIPVPKASSDVMLNGFGGDAPTLRLLCSITGGTTPAQWEDITGTTPLTFVNECVSFTTNVSARFWLIDCRQIQESVTFASQVYREIICVPYMAKFVVFAKSHDPIEARLRCFCMTDDKVDKTLEQQENFAEVARSRDVEVLEGKPIYVDCFGNLVPLTKSGQHHIFSFFAFKENRLPLFVKVRDTTQEPCGRLSFMKEPKSTRGLVHQAICNLNITLPIYTKESESDQEQEEEIDMTSEKNPQDEQERIEERLAYIADHLGFSWTELARELDFTEEQIHQIRIENPNSLQDQSHALLKYWLERDGKHATDTNLVECLTKINRMDIVHLMETNTEPLQERISHSYAEIEQTITLDHSEGFSVLQEELCTAQHKQKEEQAVSKESETCDHPPIVSEEDISVGYSTFQDGVPKTEGDSSATALFPQTHKEQVQQDFSGKMQDLPEESSLEYQQEYFVTTPGTETSETQKAMIVPSSPSKTPEEVSTPAEEEKLYLQTPTSSERGGSPIIQEPEEPSEHREESSPRKTSLVIVESADNQPETCERLDEDAAFEKGDDMPEIPPETVTEEEYIDEHGHTVVKKVTRKIIRRYVSSEGTEKEEIMVQGMPQEPVNIEEGDGYSKVIKRVVLKSDTEQSEDNNE

SEQ ID NO: 4865 - protein, 81 aa, Homo sapiens
  Payload ID: 1066;
  Gene Symbol: ANK2;
  Gene Name: ankyrin 2, neuronal;
  ENSP ID: ENSP00000422486
  MOD_RES (1)..(1): Any amino acid
XPQEPVNIEEGDGYSKVIKRVVLKSDTEQSEALSYTGSHMKVHLPSLVENEILKEDGSIIKRTTMSKAITQKRAVVKDQHG

SEQ ID NO: 4866 - protein, 1028 aa, Homo sapiens
  Payload ID: 1066;
  Gene Symbol: ANK2;
  Gene Name: ankyrin 2, neuronal;
  ENSP ID: ENSP00000422498
QDIKMESQQESTLWEMQSDSVSSSFEPTMSATTTVVGEQISKVIITKTDVDSDSWSEIREDDEAFEARVKEEEQKIFGLMVDRQSQGTTPDTTPARTPTEEGTPTSEQNPFLFQEGKLFEMTRSGAIDMTKRSYADESFHFFQIGQESREETLSEDVKEGATGADPLPLETSAESLALSESKETVDDEADLLPDDVSEEVEEIPASDAQLNSQMGISASTETPTKEAVSVGTKDLPTVQTGDIPPLSGVKQISCPDSSEPAVQVQLDFSTLTRSVYSDRGDDSPDSSPEEQKSVIEIPTAPMENVPFTESKSKIPVRTMPTSTPAPPSAEYESSVSEDFLSSVDEENKADEAKPKSKLPVKVPLQRVEQQLSDLDTSVQKTVAPQGQDMASIAPDNRSKSESDASSLDSKTKCPVKTRSYTETETESRERAEELELESEEGATRPKILTSRLPVKSRSTTSSCRGGTSPTKESKEHFFDLYRNSIEFFEEISDEASKLVDRLTQSEREQEIVSDDESSSALEVSVIENLPPVETEHSVPEDIFDTRPIWDESIETLIERIPDENGHDHAEDPQDEQERIEERLAYIADHLGFSWTELARELDFTEEQIHQIRIENPNSLQDQSHALLKYWLERDGKHATDTNLVECLTKINRMDIVHLMETNTEPLQERISHSYAEIEQTITLDHSEGFSVLQEELCTAQHKQKEEQAVSKESETCDHPPIVSEEDISVGYSTFQDGVPKTEGDSSATALFPQTHKEQVQQDFSGKMQDLPEESSLEYQQEYFVTTPGTETSETQKAMIVPSSPSKTPEEVSTPAEEEKLYLQTPTSSERGGSPIIQEPEEPSEHREESSPRKTSLVIVESADNQPETCERLDEDAAFEKGDDMPEIPPETVTEEEYIDEHGHTVVKKVTRKIIRRYVSSEGTEKEEIMVQGMPQEPVNIEEGDGYSKVIKRVVLKSDTEQSEVTLCEPSILSSTSQFQAEPVEGRRVSKVVKTTVVLGERMEKHLGDSSLATDLPSAKDDFEEDNNE

SEQ ID NO: 4867 - protein, 966 aa, Homo sapiens
  Payload ID: 1066;
  Gene Symbol: ANK2;
  Gene Name: ankyrin 2, neuronal;
  ENSP ID: ENSP00000422853
  MOD_RES (1)..(1): Any amino acid
XNVALSSSPIHSGFLVSFMVDARGGAMRGCRHNGLRIIIPPRKCTAPTRVTCRLVKRHRLATMPPMVEGEGLASRLIEVGPSGAQFLGPVIVEIPHFAALRGKERELVVLRSENGDSWKEHFCDYTEDELNEILNGMDEVLDSPEDLEKKRICRIITRDFPQYFAVVSRIKQDSNLIGPEGGVLSSTVVPQVQAVFPEGALTKRIRVGLQAQPMHSELVKKILGNKATFSPIVTLEPRRRKFHKPITMTIPVPKASSDVMLNGFGGDAPTLRLLCSITGGTTPAQWEDITGTTPLTFVNECVSFTTNVSARFWLIDCRQIQESVTFASQVYREIICVPYMAKFVVFAKSHDPIEARLRCFCMTDDKVDKTLEQQENFAEVARSRDVEVLEGKPIYVDCFGNLVPLTKSGQHHIFSFFAFKENRLPLFVKVRDTTQEPCGRLSFMKEPKSTRGLVHQAICNLNITLPIYTKIDMTSEKNPQDEQERIEERLAYIADHLGFSWTELARELDFTEEQIHQIRIENPNSLQDQSHALLKYWLERDGKHATDTNLVECLTKINRMDIVHLMETNTEPLQERISHSYAEIEQTITLDHSEGFSVLQEELCTAQHKQKEEQAVSKESETCDHPPIVSEEDISVGYSTFQDGVPKTEGDSSATALFPQTHKEQVQQDFSGKMQDLPEESSLEYQQEYFVTTPGTETSETQKAMIVPSSPSKTPEEVSTPAEEEKLYLQTPTSSERGGSPIIQEPEEPSEHREESSPRKTSLVIVESADNQPETCERLDEDAAFEKELTEELGELEASSDEEAMVTTRVVRRRVIIQGDDMPEIPPETVTEEEYIDEHGHTVVKKVTRKIIRRYVSSEGTEKEEIMVQGMPQEPVNIEEGDGYSKVIKRVVLKSDTEQSEVTLCEPSILSSTSQFQAEPVEGRRVSKVVKTTVVLGERMEKHLGDSSLATDLPSAKDDFEEDNNE

SEQ ID NO: 4868 - protein, 197 aa, Homo sapiens
  Payload ID: 1066;
  Gene Symbol: ANK2;
  Gene Name: ankyrin 2, neuronal;
  ENSP ID: ENSP00000422888
  MOD_RES (1)..(1): Any amino acid
XSEGTEKEEIMVQGMPQEPVNIEEGDGYSKVIKRVVLKSDTEQSEVTLCEPSILSSTSQFQAEPVEGRRVSKVVKTTVVLGERMEKHLGDSSLATDLPSAKDDFEEALSYTGSHMKVHLPSLVENEILKEDGSIIKRTTMSKAITQKRAVVKDQHGKRIDLEHLEDVPEALDQDDLQRDLQQLLRHFCKEDLKQEAK

SEQ ID NO: 4869 - protein, 177 aa, Homo sapiens
  Payload ID: 1066;
  Gene Symbol: ANK2;
  Gene Name: ankyrin 2, neuronal;
  ENSP ID: ENSP00000422900
MAHAAASIKKVREADLDEKEKNLERDRKKQRKIPRERMERKRKSDSNASFLRAARAGNLDKVVEYLKGGIDINTCNQNGLNALHLAAKEGHVGLVQELLGRGSSVDSATKKGNTALHIASLAGQAEVVKVLVKEGANINAQSQNGFTPLYMAAQENHIDVVKYLLENGANQSTATED

SEQ ID NO: 4870 - protein, 1114 aa, Homo sapiens
  Payload ID: 1066;
  Gene Symbol: ANK2;
  Gene Name: ankyrin 2, neuronal;
  ENSP ID: ENSP00000423799
MTTMLQKSDSNASFLRAARAGNLDKVVEYLKGGIDINTCNQNGLNALHLAAKEGHVGLVQELLGRGSSVDSATKKGNTALHIASLAGQAEVVKVLVKEGANINAQSQNGFTPLYMAAQENHIDVVKYLLENGANQSTATEDGFTPLAVALQQGHNQAVAILLENDTKGKVRLPALHIAARKDDTKSAALLLQNDHNADVQSKMMVNRTTESGFTPLHIAAHYGNVNVATLLLNRGAAVDFTARNGITPLHVASKRGNTNMVKLLLDRGGQIDAKTRDGLTPLHCAARSGHDQVVELLLERGAPLLARTKNGLSPLHMAAQGDHVECVKHLLQHKAPVDDVTLDYLTALHVAAHCGHYRVTKLLLDKRANPNARALNGFTPLHIACKKNRIKVMELLVKYGASIQAITESGLTPIHVAAFMGHLNIVLLLLQNGASPDVTNIRGETALHMAARAGQVEVVRCLLRNGALVDARAREEQTPLHIASRLGKTEIVQLLLQHMAHPDAATTNGYTPLHISAREGQVDVASVLLEAGAAHSLATKKGFTPLHVAAKYGSLDVAKLLLQRRAAADSAGKNGLTPLHVAAHYDNQKVALLLLEKGASPHATAKNGYTPLHIAAKKNQMQIASTLLNYGAETNIVTKQGVTPLHLASQEGHTDMVTLLLDKGANIHMSTKSGLTSLHLAAQEDKVNVADILTKHGADQDAHTKLGYTPLIVACHYGNVKMVNFLLKQGANVNAKTKNGYTPLHQAAQQGHTHIINVLLQHGAKPNATTANGNTALAIAKRLGYISVVDTLKVVTEEVTTTTTTITEKHKLNVPETMTEVLDVSDEEGDDTMTGDGGEYLRPEDLKELGDDSLPSSQFLDGMNYLRYSLEGGRSDSLRSFSSDRSHTLSHASYLRDSAVMDDSVVIPSHQVSTLAKEAERNSYRLSWGTENLDNVALSSSPIHSGFLVSFMVDARGGAMRGCRHNGLRIIIPPRKCTAPTRVTCRLVKRHRLATMPPMVEGEGLASRLIEVGPSGAQFLGKLHLPTAPPPLNEGESLVSRILQLGPPGTKFLGPVIVEIPHFAALRGKERELVVLRSENGDSWKEHFCDYTEDELNEILNGMDEVLDSPEDLE

SEQ ID NO: 4871 - protein, 1730 aa, Homo sapiens
  Payload ID: 1066;
  Gene Symbol: ANK2;
  Gene Name: ankyrin 2, neuronal;
  ENSP ID: ENSP00000424722
MMNEDAAQKSDSGEKFNGSSQRRKRPKKVTCPQMKPEAANIEKSDSNASFLRAARAGNLDKVVEYLKGGIDINTCNQNGLNALHLAAKEGHVGLVQELLGRGSSVDSATKKGNTALHIASLAGQAEVVKVLVKEGANINAQSQNGFTPLYMAAQENHIDVVKYLLENGANQSTATEDGFTPLAVALQQGHNQAVAILLENDTKGKVRLPALHIAARKDDTKSAALLLQNDHNADVQSKMMVNRTTESGFTPLHIAAHYGNVNVATLLLNRGAAVDFTARNGITPLHVASKRGNTNMVKLLLDRGGQIDAKTRDGLTPLHCAARSGHDQVVELLLERGAPLLARTKNGLSPLHMAAQGDHVECVKHLLQHKAPVDDVTLDYLTALHVAAHCGHYRVTKLLLDKRANPNARALNGFTPLHIACKKNRIKVMELLVKYGASIQAITESGLTPIHVAAFMGHLNIVLLLLQNGASPDVTNIRGETALHMAARAGQVEVVRCLLRNGALVDARAREEQTPLHIASRLGKTEIVQLLLQHMAHPDAATTNGYTPLHISAREGQVDVASVLLEAGAAHSLATKKGFTPLHVAAKYGSLDVAKLLLQRRAAADSAGKNGLTPLHVAAHYDNQKVALLLLEKGASPHATAKNGYTPLHIAAKKNQMQIASTLLNYGAETNIVTKQGVTPLHLASQEGHTDMVTLLLDKGANIHMSTKSGLTSLHLAAQEDKVNVADILTKHGADQDAHTKLGYTPLIVACHYGNVKMVNFLLKQGANVNAKTKNGYTPLHQAAQQGHTHIINVLLQHGAKPNATTANGNTALAIAKRLGYISVVDTLKVVTEEVTTTTTTITEKHKLNVPETMTEVLDVSDEEGDDTMTGDGGEYLRPEDLKELGDDSLPSSQFLDGMNYLRYSLEGGRSDSLRSFSSDRSHTLSHASYLRDSAVMDDSVVIPSHQVSTLAKEAERNSYRLSWGTENLDNVALSSSPIHSGFLVSFMVDARGGAMRGCRHNGLRIIIPPRKCTAPTRVTCRLVKRHRLATMPPMVEGEGLASRLIEVGPSGAQFLGKLHLPTAPPPLNEGESLVSRILQLGPPGTKFLGPVIVEIPHFAALRGKERELVVLRSENGDSWKEHFCDYTEDELNEILNGMDEVLDSPEDLEKKRICRIITRDFPQYFAVVSRIKQDSNLIGPEGGVLSSTVVPQVQAVFPEGALTKRIRVGLQAQPMHSELVKKILGNKATFSPIVTLEPRRRKFHKPITMTIPVPKASSDVMLNGFGGDAPTLRLLCSITGGTTPAQWEDITGTTPLTFVNECVSFTTNVSARFWLIDCRQIQESVTFASQVYREIICVPYMAKFVVFAKSHDPIEARLRCFCMTDDKVDKTLEQQENFAEVARSRDVEVLEGKPIYVDCFGNLVPLTKSGQHHIFSFFAFKENRLPLFVKVRDTTQEPCGRLSFMKEPKSTRGLVHQAICNLNITLPIYTKESESDQEQEEEIDMTSEKNDETESTETSVLKSHLVNEVPVLASPDLLSEVSEMKQDLIKMTAILTTDVSDKAGSIKVKELVKAAEEEPGEPFEIVERVKEDLEKVNEILRSGTCTRDESSVQSSRSERGLVEEEWVIVSDEEIEEARQKAPLEITEYPCVEVRIDKEIKGKVEKDSTGLVNYLTDDLNTCVPLPKEQLQTVQDKAGKKCEALAVGRSSEKEGKDIPPDETQSTQKQHKPSLGIKKPVRRKLKEKQKQK

SEQ ID NO: 4872 - protein, 112 aa, Homo sapiens
  Payload ID: 1066;
  Gene Symbol: ANK2;
  Gene Name: ankyrin 2, neuronal;
  ENSP ID: ENSP00000425775
MGNAALCSSCHADKSIRAQGNMQELDKTPDYYGCNSEDVKEPGVWSDSNASFLRAARAGNLDKVVEYLKGGIDINTCNQNGLNALHLAAKEGHVGLVQELLGRGSSVDSATK

SEQ ID NO: 4873 - protein, 1048 aa, Homo sapiens
  Payload ID: 1066;
  Gene Symbol: ANK2;
  Gene Name: ankyrin 2, neuronal;
  ENSP ID: ENSP00000426944
MNGNTALAIAKRLGYISVVDTLKVVTEEVTTTTTTITEKHKLNVPETMTEVLDVSDEEGDDTMTGDGGEYLRPEDLKELGDDSLPSSQFLDGMNYLRYSLEGGRSDSLRSFSSDRSHTLSHASYLRDSAVMDDSVVIPSHQVSTLAKEAERNSYRLSWGTENLDNVALSSSPIHSGFLVSFMVDARGGAMRGCRHNGLRIIIPPRKCTAPTRVTCRLVKRHRLATMPPMVEGEGLASRLIEVGPSGAQFLGPVIVEIPHFAALRGKERELVVLRSENGDSWKEHFCDYTEDELNEILNGMDEVLDSPEDLEKKRICRIITRDFPQYFAVVSRIKQDSNLIGPEGGVLSSTVVPQVQAVFPEGALTKRIRVGLQAQPMHSELVKKILGNKATFSPIVTLEPRRRKFHKPITMTIPVPKASSDVMLNGFGGDAPTLRLLCSITGGTTPAQWEDITGTTPLTFVNECVSFTTNVSARFWLIDCRQIQESVTFASQVYREIICVPYMAKFVVFAKSHDPIEARLRCFCMTDDKVDKTLEQQENFAEVARSRDVEVLEGKPIYVDCFGNLVPLTKSGQHHIFSFFAFKENRLPLFVKVRDTTQEPCGRLSFMKEPKSTRGLVHQAICNLNITLPIYTKESESDQEQEEEIDMTSEKNPQDEQERIEERLAYIADHLGFSWTELARELDFTEEQIHQIRIENPNSLQDQSHALLKYWLERDGKHATDTNLVECLTKINRMDIVHLMETNTEPLQERISHSYAEIEQTITLDHSEGFSVLQEELCTAQHKQKEEQAVSKESETCDHPPIVSEEDISVGYSTFQDGVPKTEGDSSATALFPQTHKEQVQQDFSGKMQDLPEESSLEYQQEYFVTTPGTETSETQKAMIVPSSPSKTPEEVSTPAEEEKLYLQTPTSSERGGSPIIQEPEEPSEHREESSPRKTSLVIVESADNQPETCERLDEDAAFEKGDDMPEIPPETVTEEEYIDEHGHTVVKKVTRKIIRRYVSSEGTEKEEIMVQGMPQEPVNIEEGDGYSKVIKRVVLKSDTEQSEDNNE

SEQ ID NO: 4874 - protein, 187 aa, Homo sapiens
  Payload ID: 1066;
  Gene Symbol: ANK2;
  Gene Name: ankyrin 2, neuronal;
  ENSP ID: ENSP00000426994
  MOD_RES (1)..(1): Any amino acid
XIQESVTFASQVYREIICVPYMAKFVVFAKSHDPIEARLRCFCMTDDKVDKTLEQQENFAEVARSRDVEVRDTTQEPCGRLSFMKEPKSTRGLVHQAICNLNITLPIYTKESESDQEQEEEIDMTSEKNPQDEQERIEERLAYIADHLGFSWTELARELDFTEEQIHQIRIENPNSLQDQSHALLKY

SEQ ID NO: 4875 - protein, 180 aa, Homo sapiens [sequence omitted]

SEQ ID NO: 4876 - protein, 1194 aa, Homo sapiens
  Payload ID: 1066;
  Gene Symbol: ANK2;
  Gene Name: ankyrin 2, neuronal;
  ENSP ID: ENSP00000489091
SDSNASFLRAARAGNLDKVVEYLKGGIDINTCNQNGLNALHLAAKEGHVGLVQELLGRGSSVDSATKKGNTALHIASLAGQAEVVKVLVKEGANINAQSQNGFTPLYMAAQENHIDVVKYLLENGANQSTATEDGFTPLAVALQQGHNQAVAILLENDTKGKVRLPALHIAARKDDTKSAALLLQNDHNADVQSKMMVNRTTESGFTPLHIAAHYGNVNVATLLLNRGAAVDFTARNGITPLHVASKRGNTNMVKLLLDRGGQIDAKTRDGLTPLHCAARSGHDQVVELLLERGAPLLARTKNGLSPLHMAAQGDHVECVKHLLQHKAPVDDVTLDYLTALHVAAHCGHYRVTKLLLDKRANPNARALNGFTPLHIACKKNRIKVMELLVKYGASIQAITESGLTPIHVAAFMGHLNIVLLLLQNGASPDVTNIRGETALHMAARAGQVEVVRCLLRNGALVDARAREEQTPLHIASRLGKTEIVQLLLQHMAHPDAATTNGYTPLHISAREGQVDVASVLLEAGAAHSLATKKGFTPLHVAAKYGSLDVAKLLLQRRAAADSAGKNGLTPLHVAAHYDNQKVALLLLEKGASPHATAKNGYTPLHIAAKKNQMQIASTLLNYGAETNIVTKQGVTPLHLASQEGHTDMVTLLLDKGANIHMSTKSGLTSLHLAAQEDKVNVADILTKHGADQDAHTKLGYTPLIVACHYGNVKMVNFLLKQGANVNAKTKNGYTPLHQAAQQGHTHIINVLLQHGAKPNATTANGNTALAIAKRLGYISVVDTLKVVTEEVTTTTTTITEKHKLNVPETMTEVLDVSDEEGDDTMTGDGGEYLRPEDLKELGDDSLPSSQFLDGMNYLRYSLEGGRSDSTMPSSDRSHTLSHASYLRDSAVMDDSVVIPSHQVSTLAKEAERNSYRLSWGTENLDNVALSSSPIHSGFLVSFMVDARGGAMRGCRHNGLRIIIPPRKCTAPTRVTCRLVKRHRLATMPPMVEGEGLASRLIEVGPSGAQFLGKLHLPTAPPPLNEGESLVSRILQLGPPGTKFLGPVIVEIPHFAALRGKERELVVLRSENGDSWKEHFCDYTEDELNEILNGMDEVLDSPEDLEKKRICRIITRDFPQYFAVVSRIKQDSNLIGPEGGVLSSTVVPQVQAVFPEGALTKRIRVGLQAQPMHSELVKKILGNKATFSPIVTLE

SEQ ID NO: 4877 - protein, 4377 aa, Homo sapiens
  Payload ID: 1067;
  Gene Symbol: ANK3;
  Gene Name: ankyrin 3, node of Ranvier (ankyrin G);
  Uniprot ID:  Q12955;
  ENSP ID: ENSP00000280772
MAHAASQLKKNRDLEINAEEEPEKKRKHRKRSRDRKKKSDANASYLRAARAGHLEKALDYIKNGVDINICNQNGLNALHLASKEGHVEVVSELLQREANVDAATKKGNTALHIASLAGQAEVVKVLVTNGANVNAQSQNGFTPLYMAAQENHLEVVKFLLDNGASQSLATEDGFTPLAVALQQGHDQVVSLLLENDTKGKVRLPALHIAARKDDTKAAALLLQNDNNADVESKSGFTPLHIAAHYGNINVATLLLNRAAAVDFTARNDITPLHVASKRGNANMVKLLLDRGAKIDAKTRDGLTPLHCGARSGHEQVVEMLLDRAAPILSKTKNGLSPLHMATQGDHLNCVQLLLQHNVPVDDVTNDYLTALHVAAHCGHYKVAKVLLDKKANPNAKALNGFTPLHIACKKNRIKVMELLLKHGASIQAVTESGLTPIHVAAFMGHVNIVSQLMHHGASPNTTNVRGETALHMAARSGQAEVVRYLVQDGAQVEAKAKDDQTPLHISARLGKADIVQQLLQQGASPNAATTSGYTPLHLSAREGHEDVAAFLLDHGASLSITTKKGFTPLHVAAKYGKLEVANLLLQKSASPDAAGKSGLTPLHVAAHYDNQKVALLLLDQGASPHAAAKNGYTPLHIAAKKNQMDIATTLLEYGADANAVTRQGIASVHLAAQEGHVDMVSLLLGRNANVNLSNKSGLTPLHLAAQEDRVNVAEVLVNQGAHVDAQTKMGYTPLHVGCHYGNIKIVNFLLQHSAKVNAKTKNGYTPLHQAAQQGHTHIINVLLQNNASPNELTVNGNTALGIARRLGYISVVDTLKIVTEETMTTTTVTEKHKMNVPETMNEVLDMSDDEVRKANAPEMLSDGEYISDVEEGEDAMTGDTDKYLGPQDLKELGDDSLPAEGYMGFSLGARSASLRSFSSDRSYTLNRSSYARDSMMIEELLVPSKEQHLTFTREFDSDSLRHYSWAADTLDNVNLVSSPIHSGFLVSFMVDARGGSMRGSRHHGMRIIIPPRKCTAPTRITCRLVKRHKLANPPPMVEGEGLASRLVEMGPAGAQFLGPVIVEIPHFGSMRGKERELIVLRSENGETWKEHQFDSKNEDLTELLNGMDEELDSPEELGKKRICRIITKDFPQYFAVVSRIKQESNQIGPEGGILSSTTVPLVQASFPEGALTKRIRVGLQAQPVPDEIVKKILGNKATFSPIVTVEPRRRKFHKPITMTIPVPPPSGEGVSNGYKGDTTPNLRLLCSITGGTSPAQWEDITGTTPLTFIKDCVSFTTNVSARFWLADCHQVLETVGLATQLYRELICVPYMAKFVVFAKMNDPVESSLRCFCMTDDKVDKTLEQQENFEEVARSKDIEVLEGKPIYVDCYGNLAPLTKGGQQLVFNFYSFKENRLPFSIKIRDTSQEPCGRLSFLKEPKTTKGLPQTAVCNLNITLPAHKKETESDQDDEIEKTDRRQSFASLALRKRYSYLTEPGMIERSTGATRSLPTTYSYKPFFSTRPYQSWTTAPITVPGPAKSGFTSLSSSSSNTPSASPLKSIWSVSTPSPIKSTLGASTTSSVKSISDVASPIRSFRTMSSPIKTVVSQSPYNIQVSSGTLARAPAVTEATPLKGLASNSTFSSRTSPVTTAGSLLERSSITMTPPASPKSNINMYSSSLPFKSIITSAAPLISSPLKSVVSPVKSAVDVISSAKITMASSLSSPVKQMPGHAEVALVNGSISPLKYPSSSTLINGCKATATLQEKISSATNSVSSVVSAATDTVEKVFSTTTAMPFSPLRSYVSAAPSAFQSLRTPSASALYTSLGSSISATTSSVTSSIITVPVYSVVNVLPEPALKKLPDSNSFTKSAAALLSPIKTLTTETHPQPHFSRTSSPVKSSLFLAPSALKLSTPSSLSSSQEILKDVAEMKEDLMRMTAILQTDVPEEKPFQPELPKEGRIDDEEPFKIVEKVKEDLVKVSEILKKDVCVDNKGSPKSPKSDKGHSPEDDWIEFSSEEIREARQQAAASQSPSLPERVQVKAKAASEKDYNLTKVIDYLTNDIGSSSLTNLKYKFEDAKKDGEERQKRVLKPAIALQEHKLKMPPASMRTSTSEKELCKMADSFFGTDTILESPDDFSQHDQDKSPLSDSGFETRSEKTPSAPQSAESTGPKPLFHEVPIPPVITETRTEVVHVIRSYDPSAGDVPQTQPEEPVSPKPSPTFMELEPKPTTSSIKEKVKAFQMKASSEEDDHNRVLSKGMRVKEETHITTTTRMVYHSPPGGEGASERIEETMSVHDIMKAFQSGRDPSKELAGLFEHKSAVSPDVHKSAAETSAQHAEKDNQMKPKLERIIEVHIEKGNQAEPTEVIIRETKKHPEKEMYVYQKDLSRGDINLKDFLPEKHDAFPCSEEQGQQEEEELTAEESLPSYLESSRVNTPVSQEEDSRPSSAQLISDDSYKTLKLLSQHSIEYHDDELSELRGESYRFAEKMLLSEKLDVSHSDTEESVTDHAGPPSSELQGSDKRSREKIATAPKKEILSKIYKDVSENGVGKVSKDEHFDKVTVLHYSGNVSSPKHAMWMRFTEDRLDRGREKLIYEDRVDRTVKEAEEKLTEVSQFFRDKTEKLNDELQSPEKKARPKNGKEYSSQSPTSSSPEKVLLTELLASNDEWVKARQHGPDGQGFPKAEEKAPSLPSSPEKMVLSQQTEDSKSTVEAKGSISQSKAPDGPQSGFQLKQSKLSSIRLKFEQGTHAKSKDMSQEDRKSDGQSRIPVKKIQESKLPVYQVFAREKQQKAIDLPDESVSVQKDFMVLKTKDEHAQSNEIVVNDSGSDNVKKQRTEMSSKAMPDSFSEQQAKDLACHITSDLATRGPWDKKVFRTWESSGATNNKSQKEKLSHVLVHDVRENHIGHPESKSVDQKNEFMSVTERERKLLTNGSLSEIKEMTVKSPSKKVLYREYVVKEGDHPGGLLDQPSRRSESSAVSHIPVRVADERRMLSSNIPDGFCEQSAFPKHELSQKLSQSSMSKETVETQHFNSIEDEKVTYSEISKVSKHQSYVGLCPPLEETETSPTKSPDSLEFSPGKESPSSDVFDHSPIDGLEKLAPLAQTEGGKEIKTLPVYVSFVQVGKQYEKEIQQGGVKKIISQECKTVQETRGTFYTTRQQKQPPSPQGSPEDDTLEQVSFLDSSGKSPLTPETPSSEEVSYEFTSKTPDSLIAYIPGKPSPIPEVSEESEEEEQAKSTSLKQTTVEETAVEREMPNDVSKDSNQRPKNNRVAYIEFPPPPPLDADQIESDKKHHYLPEKEVDMIEVNLQDEHDKYQLAEPVIRVQPPSPVPPGADVSDSSDDESIYQPVPVKKYTFKLKEVDDEQKEKPKASAEKASNQKELESNGSGKDNEFGLGLDSPQNEIAQNGNNDQSITECSIATTAEFSHDTDATEIDSLDGYDLQDEDDGLTESDSKLPIQAMEIKKDIWNTEGILKPADRSFSQSKLEVIEEEGKVGPDEDKPPSKSSSSEKTPDKTDQKSGAQFFTLEGRHPDRSVFPDTYFSYKVDEEFATPFKTVATKGLDFDPWSNNRGDDEVFDSKSREDETKPFGLAVEDRSPATTPDTTPARTPTDESTPTSEPNPFPFHEGKMFEMTRSGAIDMSKRDFVEERLQFFQIGEHTSEGKSGDQGEGDKSMVTATPQPQSGDTTVETNLERNVETPTVEPNPSIPTSGECQEGTSSSGSLEKSAAATNTSKVDPKLRTPIKMGISASTMTMKKEGPGEITDKIEAVMTSCQGLENETITMISNTANSQMGVRPHEKHDFQKDNFNNNNNLDSSTIQTDNIMSNIVLTEHSAPTCTTEKDNPVKVSSGKKTGVLQGHCVRDKQKVLGEQQKTKELIGIRQKSKLPIKATSPKDTFPPNHMSNTKASKMKQVSQSEKTKALTTSSCVDVKSRIPVKNTHRDNIIAVRKACATQKQGQPEKGKAKQLPSKLPVKVRSTCVTTTTTTATTTTTTTTTTTTSCTVKVRKSQLKEVCKHSIEYFKGISGETLKLVDRLSEEEKKMQSELSDEEESTSRNTSLSETSRGGQPSVTTKSARDKKTEAAPLKSKSEKAGSEKRSSRRTGPQSPCERTDIRMAIVADHLGLSWTELARELNFSVDEINQIRVENPNSLISQSFMLLKKWVTRDGKNATTDALTSVLTKINRIDIVTLLEGPIFDYGNISGTRSFADENNVFHDPVDGWQNETSSGNLESCAQARRVTGGLLDRLDDSPDQCRDSITSYLKGEAGKFEANGSHTEITPEAKTKSYFPESQNDVGKQSTKETLKPKIHGSGHVEEPASPLAAYQKSLEETSKLIIEETKPCVPVSMKKMSRTSPADGKPRLSLHEEEGSSGSEQKQGEGFKVKTKKEIRHVEKKSHS

SEQ ID NO: 4878 - protein, 1001 aa, Homo sapiens
  Payload ID: 1067;
  Gene Symbol: ANK3;
  Gene Name: ankyrin 3, node of Ranvier (ankyrin G);
  Uniprot ID:  Q12955;
  ENSP ID: ENSP00000347436
MALPQSEDAMTGDTDKYLGPQDLKELGDDSLPAEGYMGFSLGARSASLRSFSSDRSYTLNRSSYARDSMMIEELLVPSKEQHLTFTREFDSDSLRHYSWAADTLDNVNLVSSPIHSGFLVSFMVDARGGSMRGSRHHGMRIIIPPRKCTAPTRITCRLVKRHKLANPPPMVEGEGLASRLVEMGPAGAQFLGPVIVEIPHFGSMRGKERELIVLRSENGETWKEHQFDSKNEDLTELLNGMDEELDSPEELGKKRICRIITKDFPQYFAVVSRIKQESNQIGPEGGILSSTTVPLVQASFPEGALTKRIRVGLQAQPVPDEIVKKILGNKATFSPIVTVEPRRRKFHKPITMTIPVPPPSGEGVSNGYKGDTTPNLRLLCSITGGTSPAQWEDITGTTPLTFIKDCVSFTTNVSARFWLADCHQVLETVGLATQLYRELICVPYMAKFVVFAKMNDPVESSLRCFCMTDDKVDKTLEQQENFEEVARSKDIEVLEGKPIYVDCYGNLAPLTKGGQQLVFNFYSFKENRLPFSIKIRDTSQEPCGRLSFLKEPKTTKGLPQTAVCNLNITLPAHKKIEKTDRRQSFASLALRKRYSYLTEPGMSPQSPCERTDIRMAIVADHLGLSWTELARELNFSVDEINQIRVENPNSLISQSFMLLKKWVTRDGKNATTDALTSVLTKINRIDIVTLLEGPIFDYGNISGTRSFADENNVFHDPVDGYPSLQVELETPTGLHYTPPTPFQQDDYFSDISSIESPLRTPSRLSDGLVPSQGNIEHSADGPPVVTAEDASLEDSKLEDSVPLTEMPEAVDVDESQLENVCLSWQNETSSGNLESCAQARRVTGGLLDRLDDSPDQCRDSITSYLKGEAGKFEANGSHTEITPEAKTKSYFPESQNDVGKQSTKETLKPKIHGSGHVEEPASPLAAYQKSLEETSKLIIEETKPCVPVSMKKMSRTSPADGKPRLSLHEEEGSSGSEQKQGEGFKVKTKKEIRHVEKKSHS

SEQ ID NO: 4879 - protein, 195 aa, Homo sapiens
  Payload ID: 1067;
  Gene Symbol: ANK3;
  Gene Name: ankyrin 3, node of Ranvier (ankyrin G);
  ENSP ID: ENSP00000362921
MTGDTDKYLGPQDLKELGDDSLPAEGYMGFSLGARSASLRSFSSDRSYTLNRSSYARDSMMIEELLVPSKEQHLTFTREFDSDSLRHYSWAADTLDNVNLVSSPIHSGFLVSFMVDARGGSMRGSRHHGMRIIIPPRKCTAPTRITCRLVKRHKLANPPPMVEGEGLASRLVEMGPAGAQFLGPVIVEIPHFGSM

SEQ ID NO: 4880 - protein, 459 aa, Homo sapiens
  Payload ID: 1067;
  Gene Symbol: ANK3;
  Gene Name: ankyrin 3, node of Ranvier (ankyrin G);
  ENSP ID: ENSP00000362926
PKTTKGLPQTAVCNLNITLPAHKKETESDQDDEIEKTDRRQSFASLALRKRYSYLTEPGMSPQSPCERTDIRMAIVADHLGLSWTELARELNFSVDEINQIRVENPNSLISQSFMLLKKWVTRDGKNATTDALTSVLTKINRIDIVTLLEGPIFDYGNISGTRSFADENNVFHDPVDGYPSLQVELETPTGLHYTPPTPFQQDDYFSDISSIESPLRTPSRLSDGLVPSQGNIEHSADGPPVVTAEDASLEDSKLEDSVPLTEMPEAVDVDESQLENVCLSWQNETSSGNLESCAQARRVTGGLLDRLDDSPDQCRDSITSYLKGEAGKFEANGSHTEITPEAKTKSYFPESQNDVGKQSTKETLKPKIHGSGHVEEPASPLAAYQKSLEETSKLIIEETKPCVPVSMKKMSRTSPADGKPRLSLHEEEGSSGSEQKQGEGFKVKTKKEIRHVEKKSHS

SEQ ID NO: 4881 - protein, 1861 aa, Homo sapiens
  Payload ID: 1067;
  Gene Symbol: ANK3;
  Gene Name: ankyrin 3, node of Ranvier (ankyrin G);
  Uniprot ID:  Q12955;
  ENSP ID: ENSP00000362933
MASSASSSPAGTEDSAPAQGGFGSDYSRSSRKSDANASYLRAARAGHLEKALDYIKNGVDINICNQNGLNALHLASKEGHVEVVSELLQREANVDAATKKGNTALHIASLAGQAEVVKVLVTNGANVNAQSQNGFTPLYMAAQENHLEVVKFLLDNGASQSLATEDGFTPLAVALQQGHDQVVSLLLENDTKGKVRLPALHIAARKDDTKAAALLLQNDNNADVESKSGFTPLHIAAHYGNINVATLLLNRAAAVDFTARNDITPLHVASKRGNANMVKLLLDRGAKIDAKTRDGLTPLHCGARSGHEQVVEMLLDRAAPILSKTKNGLSPLHMATQGDHLNCVQLLLQHNVPVDDVTNDYLTALHVAAHCGHYKVAKVLLDKKANPNAKALNGFTPLHIACKKNRIKVMELLLKHGASIQAVTESGLTPIHVAAFMGHVNIVSQLMHHGASPNTTNVRGETALHMAARSGQAEVVRYLVQDGAQVEAKAKDDQTPLHISARLGKADIVQQLLQQGASPNAATTSGYTPLHLSAREGHEDVAAFLLDHGASLSITTKKGFTPLHVAAKYGKLEVANLLLQKSASPDAAGKSGLTPLHVAAHYDNQKVALLLLDQGASPHAAAKNGYTPLHIAAKKNQMDIATTLLEYGADANAVTRQGIASVHLAAQEGHVDMVSLLLGRNANVNLSNKSGLTPLHLAAQEDRVNVAEVLVNQGAHVDAQTKMGYTPLHVGCHYGNIKIVNFLLQHSAKVNAKTKNGYTPLHQAAQQGHTHIINVLLQNNASPNELTVNGNTALGIARRLGYISVVDTLKIVTEETMTTTTVTEKHKMNVPETMNEVLDMSDDEVRKANAPEMLSDGEYISDVEEGEDAMTGDTDKYLGPQDLKELGDDSLPAEGYMGFSLGARSASLRSFSSDRSYTLNRSSYARDSMMIEELLVPSKEQHLTFTREFDSDSLRHYSWAADTLDNVNLVSSPIHSGFLVSFMVDARGGSMRGSRHHGMRIIIPPRKCTAPTRITCRLVKRHKLANPPPMVEGEGLASRLVEMGPAGAQFLGPVIVEIPHFGSMRGKERELIVLRSENGETWKEHQFDSKNEDLTELLNGMDEELDSPEELGKKRICRIITKDFPQYFAVVSRIKQESNQIGPEGGILSSTTVPLVQASFPEGALTKRIRVGLQAQPVPDEIVKKILGNKATFSPIVTVEPRRRKFHKPITMTIPVPPPSGEGVSNGYKGDTTPNLRLLCSITGGTSPAQWEDITGTTPLTFIKDCVSFTTNVSARFWLADCHQVLETVGLATQLYRELICVPYMAKFVVFAKMNDPVESSLRCFCMTDDKVDKTLEQQENFEEVARSKDIEVLEGKPIYVDCYGNLAPLTKGGQQLVFNFYSFKENRLPFSIKIRDTSQEPCGRLSFLKEPKTTKGLPQTAVCNLNITLPAHKKIEKTDRRQSFASLALRKRYSYLTEPGMSPQSPCERTDIRMAIVADHLGLSWTELARELNFSVDEINQIRVENPNSLISQSFMLLKKWVTRDGKNATTDALTSVLTKINRIDIVTLLEGPIFDYGNISGTRSFADENNVFHDPVDGYPSLQVELETPTGLHYTPPTPFQQDDYFSDISSIESPLRTPSRLSDGLVPSQGNIEHSADGPPVVTAEDASLEDSKLEDSVPLTEMPEAVDVDESQLENVCLSWQNETSSGNLESCAQARRVTGGLLDRLDDSPDQCRDSITSYLKGEAGKFEANGSHTEITPEAKTKSYFPESQNDVGKQSTKETLKPKIHGSGHVEEPASPLAAYQKSLEETSKLIIEETKPCVPVSMKKMSRTSPADGKPRLSLHEEEGSSGSEQKQGEGFKVKTKKEIRHVEKKSHS

SEQ ID NO: 4882 - protein, 72 aa, Homo sapiens
  Payload ID: 1067;
  Gene Symbol: ANK3;
  Gene Name: ankyrin 3, node of Ranvier (ankyrin G);
  ENSP ID: ENSP00000422506
MTGDTDKYLGPQDLKELGDDSLPAEGYMGFSLGARSASLRSFSSDRSYTLNRSSYARDSMMIEELLVPSKEQ

SEQ ID NO: 4883 - protein, 114 aa, Homo sapiens
  Payload ID: 1067;
  Gene Symbol: ANK3;
  Gene Name: ankyrin 3, node of Ranvier (ankyrin G);
  ENSP ID: ENSP00000422657
TVTEKHKMNVPETMNEVLDMSDDEVRKANAPEMLSDGEYISDVEEGNRCTWYKIPKVQEFTVKSEDAMTGDTDKYLGPQDLKELGDDSLPAEGYMGFSLGARSARYFVVAVFHS

SEQ ID NO: 4884 - protein, 166 aa, Homo sapiens
  Payload ID: 1067;
  Gene Symbol: ANK3;
  Gene Name: ankyrin 3, node of Ranvier (ankyrin G);
  ENSP ID: ENSP00000423057
SPDQCRDSITSYLKGEAGKFEANGSHTEITPEAKTKSYFPESQNDVGKQSTKETLKPKIHGSGHVEEPASPLAAYQKSLEETSKLIIEETKPCVPVSMKKMSRTSPADGKPRLSLHEEEGSSGSEQKVKSPGAAPTRMTACCYKQGEGFKVKTKKEIRHVEKKSHS

SEQ ID NO: 4885 - protein, 196 aa, Homo sapiens
  Payload ID: 1067;
  Gene Symbol: ANK3;
  Gene Name: ankyrin 3, node of Ranvier (ankyrin G);
  ENSP ID: ENSP00000423968
  MOD_RES (1)..(1): Any amino acid
XSSPIHSGFLVSFMVDARGGSMRGSRHHGMRIIIPPRKCTAPTRITCRLVKRHKLANPPPMVEGEGLASRLVEMGPAGAQFLGKLHLPTNPPPVNEGESLVSRILQLGPQGTKFIGPVIVEIPHFGSMRGKERELIVLRSENGETWKEHQFDSKNEDLTELLNGMDEELDSPEELGKKRICRIITKDFPQYFAVVS

SEQ ID NO: 4886 - protein, 1868 aa, Homo sapiens
  Payload ID: 1067;
  Gene Symbol: ANK3;
  Gene Name: ankyrin 3, node of Ranvier (ankyrin G);
  Uniprot ID:  Q12955;
  ENSP ID: ENSP00000425236
MSEEPKEKNAKPAHRKRKGKKSDANASYLRAARAGHLEKALDYIKNGVDINICNQNGLNALHLASKEGHVEVVSELLQREANVDAATKKGNTALHIASLAGQAEVVKVLVTNGANVNAQSQNGFTPLYMAAQENHLEVVKFLLDNGASQSLATEDGFTPLAVALQQGHDQVVSLLLENDTKGKVRLPALHIAARKDDTKAAALLLQNDNNADVESKSGFTPLHIAAHYGNINVATLLLNRAAAVDFTARNDITPLHVASKRGNANMVKLLLDRGAKIDAKTRDGLTPLHCGARSGHEQVVEMLLDRAAPILSKTKNGLSPLHMATQGDHLNCVQLLLQHNVPVDDVTNDYLTALHVAAHCGHYKVAKVLLDKKANPNAKALNGFTPLHIACKKNRIKVMELLLKHGASIQAVTESGLTPIHVAAFMGHVNIVSQLMHHGASPNTTNVRGETALHMAARSGQAEVVRYLVQDGAQVEAKAKDDQTPLHISARLGKADIVQQLLQQGASPNAATTSGYTPLHLSAREGHEDVAAFLLDHGASLSITTKKGFTPLHVAAKYGKLEVANLLLQKSASPDAAGKSGLTPLHVAAHYDNQKVALLLLDQGASPHAAAKNGYTPLHIAAKKNQMDIATTLLEYGADANAVTRQGIASVHLAAQEGHVDMVSLLLGRNANVNLSNKSGLTPLHLAAQEDRVNVAEVLVNQGAHVDAQTKMGYTPLHVGCHYGNIKIVNFLLQHSAKVNAKTKNGYTPLHQAAQQGHTHIINVLLQNNASPNELTVNGNTALGIARRLGYISVVDTLKIVTEETMTTTTVTEKHKMNVPETMNEVLDMSDDEVRKANAPEMLSDGEYISDVEEGNRCTWYKIPKVQEFTVKSEDAMTGDTDKYLGPQDLKELGDDSLPAEGYMGFSLGARSASLRSFSSDRSYTLNRSSYARDSMMIEELLVPSKEQHLTFTREFDSDSLRHYSWAADTLDNVNLVSSPIHSGFLVSFMVDARGGSMRGSRHHGMRIIIPPRKCTAPTRITCRLVKRHKLANPPPMVEGEGLASRLVEMGPAGAQFLGPVIVEIPHFGSMRGKERELIVLRSENGETWKEHQFDSKNEDLTELLNGMDEELDSPEELGKKRICRIITKDFPQYFAVVSRIKQESNQIGPEGGILSSTTVPLVQASFPEGALTKRIRVGLQAQPVPDEIVKKILGNKATFSPIVTVEPRRRKFHKPITMTIPVPPPSGEGVSNGYKGDTTPNLRLLCSITGGTSPAQWEDITGTTPLTFIKDCVSFTTNVSARFWLADCHQVLETVGLATQLYRELICVPYMAKFVVFAKMNDPVESSLRCFCMTDDKVDKTLEQQENFEEVARSKDIEVLEGKPIYVDCYGNLAPLTKGGQQLVFNFYSFKENRLPFSIKIRDTSQEPCGRLSFLKEPKTTKGLPQTAVCNLNITLPAHKKIEKTDRRQSFASLALRKRYSYLTEPGMSPQSPCERTDIRMAIVADHLGLSWTELARELNFSVDEINQIRVENPNSLISQSFMLLKKWVTRDGKNATTDALTSVLTKINRIDIVTLLEGPIFDYGNISGTRSFADENNVFHDPVDGYPSLQVELETPTGLHYTPPTPFQQDDYFSDISSIESPLRTPSRLSDGLVPSQGNIEHSADGPPVVTAEDASLEDSKLEDSVPLTEMPEAVDVDESQLENVCLSWQNETSSGNLESCAQARRVTGGLLDRLDDSPDQCRDSITSYLKGEAGKFEANGSHTEITPEAKTKSYFPESQNDVGKQSTKETLKPKIHGSGHVEEPASPLAAYQKSLEETSKLIIEETKPCVPVSMKKMSRTSPADGKPRLSLHEEEGSSGSEQKQGEGFKVKTKKEIRHVEKKSHS

SEQ ID NO: 4887 - protein, 273 aa, Homo sapiens
  Payload ID: 1067;
  Gene Symbol: ANK3;
  Gene Name: ankyrin 3, node of Ranvier (ankyrin G);
  ENSP ID: ENSP00000426011
MAVEEGESFPEQSDANASYLRAARAGHLEKALDYIKNGVDINICNQNGLNALHLASKEGHVEVVSELLQREANVDAATKKGNTALHIASLAGQAEVVKVLVTNGANVNAQSQNGFTPLYMAAQENHLEVVKFLLDNGASQSLATEDGFTPLAVALQQGHDQVVSLLLENDTKGKVRLPALHIAARKDDTKAAALLLQNDNNADVESKSGFTPLHIAAHYGNINVATLLLNRAAAVDFTARNDITPLHVASKRGNANMVKLLLDRGAKIDAKTR

SEQ ID NO: 4888 - protein, 187 aa, Homo sapiens
  Payload ID: 1067;
  Gene Symbol: ANK3;
  Gene Name: ankyrin 3, node of Ranvier (ankyrin G);
  ENSP ID: ENSP00000426258
  MOD_RES (1)..(1): Any amino acid
XIEKTDRRQSFASLALRKRYSYLTEPGMSPQSPCERTDIRMAIVADHLGLSWTELARELNFSVDEINQIRVENPNSLISQSFMLLKKWVTRDGKNATTDALTSVLTKINRIDIVTLLEGPIFDYGNISGTRSFADENNVFHDPVDDGPPVVTAEDASLEDSKLEDSVPLTEMPEAVDVDESQLENVC

SEQ ID NO: 4889 - protein, 159 aa, Homo sapiens
  Payload ID: 1067;
  Gene Symbol: ANK3;
  Gene Name: ankyrin 3, node of Ranvier (ankyrin G);
  ENSP ID: ENSP00000426582
MTGDTDKYLGPQDLKELGDDSLPAEGYMGFSLGARSASLRSFSSDRSYTLNRSSYARDSMMIEELLVPSKEQHLTFTREFDSDSLRHYSWAADTLDNVNLVSSPIHSGFLVSFMVDARGGSMRGSRHHGMRIIIPPRKCTAPTRITCRLVKRHKLANPP

SEQ ID NO: 4890 - protein, 86 aa, Homo sapiens
  Payload ID: 1067;
  Gene Symbol: ANK3;
  Gene Name: ankyrin 3, node of Ranvier (ankyrin G);
  ENSP ID: ENSP00000426690
MNVPETMNEVLDMSDDEGNRCTWYKIPKVQEFTVKSEDAMTGDTDKYLGPQDLKELGDDSLPAEGYMGFSLGARSARYFVVAVFHS

SEQ ID NO: 4891 - protein, 217 aa, Homo sapiens
  Payload ID: 1067;
  Gene Symbol: ANK3;
  Gene Name: ankyrin 3, node of Ranvier (ankyrin G);
  ENSP ID: ENSP00000427121
  MOD_RES (1)..(1): Any amino acid
XLARELNFSVDEINQIRVENPNSLISQSFMLLKKWVTRDGKNATTDALTSVLTKINRIDIVTLLEGPIFDYGNISGTRSFADENNVFHDPVDVSPNVLSSIGYPSLQVELETPTGLHYTPPTPFQQDDYFSDISSIESPLRTPSRLSDGLVPSQGNIEHSADGPPVVTAEDASLEDSKLEDSVPLTEMPEAVDVDESQLENVCLSWQNETSSGNLES

SEQ ID NO: 4892 - protein, 241 aa, Homo sapiens
  Payload ID: 1067;
  Gene Symbol: ANK3;
  Gene Name: ankyrin 3, node of Ranvier (ankyrin G);
  ENSP ID: ENSP00000477814
  MOD_RES (1)..(1): Any amino acid
XTVATKGLDFDPWSNNRGDDEVFDSKSREDETKPFGLAVEDRSPATTPDTTPARTPTDESTPTSEPNPFPFHEGKMFEMTRSGAIDMSKRDFVEERLQFFQIGPQSPCERTDIRMAIVADHLGLSWTELARELNFSVDEINQIRVENPNSLISQSFMLLKKWVTRDGKNATTDALTSVLTKINRIDIVTLLEGPIFDYGNISGTRSFADENNVFHDPVDGYPSLQVELETPTGLHYTPPTP

SEQ ID NO: 4893 - protein, 1643 aa, Homo sapiens
  Payload ID: 1067;
  Gene Symbol: ANK3;
  Gene Name: ankyrin 3, node of Ranvier (ankyrin G);
  ENSP ID: ENSP00000477827
  MOD_RES (1)..(1): Any amino acid
XFLVSFMVDARGGSMRGSRHHGMRIIIPPRKCTAPTRITCRLVKRHKLANPPPMVEGEGLASRLVEMGPAGAQFLGPVIVEIPHFGSMRGKERELIVLRSENGETWKEHQFDSKNEDLTELLNGMDEELDSPEELGKKRICRIITKDFPQYFAVVSRIKQESNQIGPEGGILSSTTVPLVQASFPEGALTKRIRVGLQAQPVPDEIVKKILGNKATFSPIVTVEPRRRKFHKPITMTIPVPPPSGEGVSNGYKGDTTPNLRLLCSITGGTSPAQWEDITGTTPLTFIKDCVSFTTNVSARFWLADCHQVLETVGLATQLYRELICVPYMAKFVVFAKMNDPVESSLRCFCMTDDKVDKTLEQQENFEEVARSKDIEVLEGKPIYVDCYGNLAPLTKGGQQLVFNFYSFKENRLPFSIKIRDTSQEPCGRLSFLKEPKTTKGLPQTAVCNLNITLPAHKKIEKTDRRQSFASLALRKRYSYLTEPGMKTVERSTGATRSLPTTYSYKPFFSTRPYQSWTTAPITVPGPAKSGFTSLSSSSSNTPSASPLKSIWSVSTPSPIKSTLGASTTSSVKSISDVASPIRSFRTMSSPIKTVVSQSPYNIQVSSGTLARAPAVTEATPLKGLASNSTFSSRTSPVTTAGSLLERSSITMTPPASPKSNINMYSSSLPFKSIITSAAPLISSPLKSVVSPVKSAVDVISSAKITMASSLSSPVKQMPGHAEVALVNGSISPLKYPSSSTLINGCKATATLQEKISSATNSVSSVVSAATDTVEKVFSTTTAMPFSPLRSYVSAAPSAFQSLRTPSASALYTSLGSSISATTSSVTSSIITVPVYSVVNVLPEPALKKLPDSNSFTKSAAALLSPIKTLTTETHPQPHFSRTSSPVKSSLFLAPSALKLSTPSSLSSSQEILKDVAEMKEDLMRMTAILQTDVPEEKPFQPELPKEGRIDDEEPFKIVEKVKEDLVKVSEILKKDVCVDNKGSPKSPKSDKGHSPEDDWIEFSSEEIREARQQAAASQSPSLPERVQVKAKAASEKDYNLTKVIDYLTNDIGSSSLTNLKYKFEDAKKDGEERQKRVLKPAIALQEHKLKMPPASMRTSTSEKELCKMADSFFGTDTILESPDDFSQHDQDKSPLSDSGFETRSEKTPSAPQSAESTGPKPLFHEVPIPPVITETRTEVVHVIRSYDPSAGDVPQTQPEEPVSPKPSPTFMELEPKPTTSSIKEKVKAFQMKASSEEDDHNRVLSKGMRVKEETHITTTTRMVYHSPPGGEGASERIEETMSVHDIMKAFQSGRDPSKELAGLFEHKSAVSPDVHKSAAETSAQHAEKDNQMKPKLERIIEVHIEKGPQSPCERTDIRMAIVADHLGLSWTELARELNFSVDEINQIRVENPNSLISQSFMLLKKWVTRDGKNATTDALTSVLTKINRIDIVTLLEGPIFDYGNISGTRSFADENNVFHDPVDGWQNETSSGNLESCAQARRVTGGLLDRLDDSPDQCRDSITSYLKGEAGKFEANGSHTEITPEAKTKSYFPESQNDVGKQSTKETLKPKIHGSGHVEEPASPLAAYQKSLEETSKLIIEETKPCVPVSMKKMSRTSPADGKPRLSLHEEEGSSGSEQKQGEGFKVKTKKEIRHVEKKSHS

SEQ ID NO: 4894 - protein, 868 aa, Homo sapiens
  Payload ID: 1067;
  Gene Symbol: ANK3;
  Gene Name: ankyrin 3, node of Ranvier (ankyrin G);
  ENSP ID: ENSP00000478037
  MOD_RES (1)..(1): Any amino acid
XDLPDESVSVQKDFMVLKTKDEHAQSNEIVVNDSGSDNVKKQRTEMSSKAMPDSFSEQQAKDLACHITSDLATRGPWDKKVFRTWESSGATNNKSQKEKLSHVLVHDVRENHIGHPESKSVDQKNEFMSVTERERKLLTNGSLSEIKEMTVKSPSKKVLYREYVVKEGDHPGGLLDQPSRRSESSAVSHIPVRVADERRMLSSNIPDGFCEQSAFPKHELSQKLSQSSMSKETVETQHFNSIEDEKVTYSEISKVSKHQSYVGLCPPLEETETSPTKSPDSLEFSPGKESPSSDVFDHSPIDGLEKLAPLAQTEGGKEIKTLPVYVSFVQVGKQYEKEIQQGGVKKIISQECKTVQETRGTFYTTRQQKQPPSPQGSPEDDTLEQVSFLDSSGKSPLTPETPSSEEVSYEFTSKTPDSLIAYIPGKPSPIPEVSEESEEEEQAKSTSLKQTTVEETAVEREMPNDVSKDSNQRPKNNRVAYIEFPPPPPLDADQIESDKKHHYLPEKEVDMIEVNLQDEHDKYQLAEPVIRVQPPSPVPPGADVSDSSDDESIYQPVPVKKYTFKLKEVDDEQKEKPKASAEKASNQKELESNGSGKDNEFGLGLDSPQNEIAQNGNNDQSITECSIATTAEFSHDTDATEIDSLDGYDLQDEDDGLTESDSKLPIQAMEIKKDIWNTEGILKPADRSFSQSKLEVIEEEGKVGPDEDKPPSKSSSSEKTPDKTDQKSGAQFFTLEGRHPDRSVFPDTYFSYKVDEEFATPFKTVATKGLDFDPWSNNRGDDEVFDSKSREDETKPFGLAVEDRSPATTPDTTPARTPTDESTPTSEPNPFPFHEGKMFEMTRSGAIDMSKRDFVEERLQFFQIVVRP

SEQ ID NO: 4895 - protein, 811 aa, Homo sapiens
  Payload ID: 1067;
  Gene Symbol: ANK3;
  Gene Name: ankyrin 3, node of Ranvier (ankyrin G);
  ENSP ID: ENSP00000479018
MALPQSEDAMTGDTDKYLGPQDLKELGDDSLPAEGYMGFSLGARSASLRSFSSDRSYTLNRSSYARDSMMIEELLVPSKEQHLTFTREFDSDSLRHYSWAADTLDNVNLVSSPIHSGFLVSFMVDARGGSMRGSRHHGMRIIIPPRKCTAPTRITCRLVKRHKLANPPPMVEGEGLASRLVEMGPAGAQFLGPVIVEIPHFGSMRGKERELIVLRSENGETWKEHQFDSKNEDLTELLNGMDEELDSPEELGKKRICRIITKDFPQYFAVVSRIKQESNQIGPEGGILSSTTVPLVQASFPEGALTKRIRVGLQAQPVPDEIVKKILGNKATFSPIVTVEPRRRKFHKPITMTIPVPPPSGEGVSNGYKGDTTPNLRLLCSITGGTSPAQWEDITGTTPLTFIKDCVSFTTNVSARFWLADCHQVLETVGLATQLYRELICVPYMAKFVVFAKMNDPVESSLRCFCMTDDKVDKTLEQQENFEEVARSKDIEVLEGKPIYVDCYGNLAPLTKGGQQLVFNFYSFKENRLPFSIKIRDTSQEPCGRLSFLKEPKTTKGLPQTAVCNLNITLPAHKKIEKTDRRQSFASLALRKRYSYLTEPGMSPQSPCERTDIRMAIVADHLGLSWTELARELNFSVDEINQIRVENPNSLISQSFMLLKKWVTRDGKNATTDALTSVLTKINRIDIVTLLEGPIFDYGNISGTRSFADENNVFHDPVDGYPSLQVELETPTGLHYTPPTPFQQDDYFSDISSIESPLRTPSRLSDGLVPSQGNIEHSADGPPVVTAEDASLEDSKLEDSVPLTEMPEAVM

SEQ ID NO: 4896 - protein, 322 aa, Homo sapiens
  Payload ID: 1067;
  Gene Symbol: ANK3;
  Gene Name: ankyrin 3, node of Ranvier (ankyrin G);
  ENSP ID: ENSP00000479337
  MOD_RES (1)..(1): Any amino acid
XGPDEDKPPSKSSSSEKTPDKTDQKSGAQFFTLEGRHPDRSVFPDTYFSYKVDEEFATPFKTVATKGLDFDPWSNNRGDDEVFDSKSREDETKPFGLAVEDRSPATTPDTTPARTPTDESTPTSEPNPFPFHEGKMFEMTRSGAIDMSKRDFVEERLQFFQIGPQSPCERTDIRMAIVADHLGLSWTELARELNFSVDEINQIRVENPNSLISQSFMLLKKWVTRDGKNATTDALTSVLTKINRIDIVTLLEGPIFDYGNISGTRSFADENNVFHDPVDGWQNETSSGNLESCAQARRVTGGLLDRLDDSPDQCRDSITSYL

SEQ ID NO: 4897 - protein, 96 aa, Homo sapiens
  Payload ID: 1067;
  Gene Symbol: ANK3;
  Gene Name: ankyrin 3, node of Ranvier (ankyrin G);
  ENSP ID: ENSP00000480249
  MOD_RES (1)..(1): Any amino acid
XLARELNFSVDEINQIRVENPNSLISQSFMLLKKWVTRDGKNATTDALTSVLTKINRIDIVTLLEGPIFDYGNISGTRSFADENNVFHDPVDGNRI

SEQ ID NO: 4898 - protein, 175 aa, Homo sapiens
  Payload ID: 1067;
  Gene Symbol: ANK3;
  Gene Name: ankyrin 3, node of Ranvier (ankyrin G);
  ENSP ID: ENSP00000480745
  MOD_RES (1)..(1): Any amino acid
XSPLAAYQKSLEETSKLIIEETKPCVPVSMKKMSRTSPADGKPRLSLHEEEGSSGSEQKVKSPGAAPTRMTACCYKDLKDSESDSSSEEERRVTTRVIRRRLIIKGEEAKNIPGESVTEEQFTDEEGNLITRKITRKVLRRIVIPQERKRDDVQGEGFKVKTKKEIRHVEKKSHS

SEQ ID NO: 4899 - protein, 178 aa, Homo sapiens
  Payload ID: 1067;
  Gene Symbol: ANK3;
  Gene Name: ankyrin 3, node of Ranvier (ankyrin G);
  ENSP ID: ENSP00000481611
  MOD_RES (1)..(1): Any amino acid
XWQNETSSGNLESCAQARRVTGGLLDRLDDSPDQCRDSITSYLKGEAGKFEANGSHTEITPEAKTKSYFPESQNDVGKQSTKETLKPKIHGSGHVEEPASPLAAYQKSLEETSKLIIEETKPCVPVSMKKMSRTSPADGKPRLSLHEEEGSSGSEQKGEGFKVKTKKEIRHVEKKSHS

SEQ ID NO: 4900 - protein, 201 aa, Homo sapiens
  Payload ID: 1067;
  Gene Symbol: ANK3;
  Gene Name: ankyrin 3, node of Ranvier (ankyrin G);
  ENSP ID: ENSP00000482307
  MOD_RES (1)..(1): Any amino acid
XEDAMTGDTDKYLGPQDLKELGDDSLPAEGYMGFSLGARSASPKISLRSFSSDRSYTLNRSSYARDSMMIEELLVPSKEQHLTFTREFDSDSLRHYSWAADTLDNVNLVSSPIHSGYSSPLPQYDSRFLVSFMVDARGGSMRGSRHHGMRIIIPPRKCTAPTRITCRLVKRHKLANPPPMVEGEGLASRLVEMGPAGAQFL

SEQ ID NO: 4901 - protein, 973 aa, Homo sapiens
  Payload ID: 1067;
  Gene Symbol: ANK3;
  Gene Name: ankyrin 3, node of Ranvier (ankyrin G);
  ENSP ID: ENSP00000482401
  MOD_RES (1)..(1): Any amino acid
XPVIVEIPHFGSMRGKERELIVLRSENGETWKEHQFDSKNEDLTELLNGMDEELDSPEELGKKRICRIITKDFPQYFAVVSRIKQESNQIGPEGGILSSTTVPLVQASFPEGALTKRIRVGLQAQPVPDEIVKKILGNKATFSPIVTVEPRRRKFHKPITMTIPVPPPSGEGVSNGYKGDTTPNLRLLCSITGGTSPAQWEDITGTTPLTFIKDCVSFTTNVSARFWLADCHQVLETVGLATQLYRELICVPYMAKFVVFAKMNDPVESSLRCFCMTDDKVDKTLEQQENFEEVARSKDIEVLEGKPIYVDCYGNLAPLTKGGQQLVFNFYSFKENRLPFSIKIRDTSQEPCGRLSFLKEPKTTKGLPQTAVCNLNITLPAHKKETESDQDDEIEKTDRRQSFASLALRPQSPCERTDIRMAIVADHLGLSWTELARELNFSVDEINQIRVENPNSLISQSFMLLKKWVTRDGKNATTDALTSVLTKINRIDIVTLLEGPIFDYGNISGTRSFADENNVFHDPVDGYPSLQVELETPTGLHYTPPTPFQQDDYFSDISSIESPLRTPSRLSDGLVPSQGNIEHSADGPPVVTAEDASLEDSKLEDSVPLTEMPEAVDVDESQLENVCLSEYPQYLGNLAGSPKDVKPAEPRKLGVSSEQQEKGKSGPDEEMMEEKLKSLFEDIQLEEGVESEEMTEEKVQAILKRVQQAELEMSSITGWQNETSSGNLESCAQARRVTGGLLDRLDDSPDQCRDSITSYLKGEAGKFEANGSHTEITPEAKTKSYFPESQNDVGKQSTKETLKPKIHGSGHVEEPASPLAAYQKSLEETSKLIIEETKPCVPVSMKKMSRTSPADGKPRLSLHEEEGSSGSEQKDLKDSESDSSSEEERRVTTRVIRRRLIIKGEEAKNIPGESVTEEQFTDEEGNLITRKITRKVLRRIVIPQERKRDDVQGEGFKVKTKKEIRHVEKKSHS

SEQ ID NO: 4902 - protein, 450 aa, Homo sapiens
  Payload ID: 1067;
  Gene Symbol: ANK3;
  Gene Name: ankyrin 3, node of Ranvier (ankyrin G);
  ENSP ID: ENSP00000483244
MSEEPKEKNAKPAHRKRKGKKSDANASYLRAARAGHLEKALDYIKNGVDINICNQNGLNALHLASKEGHVEVVSELLQREANVDAATKKGNTALHIASLAGQAEVVKVLVTNGANVNAQSQNGFTPLYMAAQENHLEVVKFLLDNGASQSLATEDGFTPLAVALQQGHDQVVSLLLENDTKGKVRLPALHIAARKDDTKAAALLLQNDNNADVESKSGFTPLHIAAHYGNINVATLLLNRAAAVDFTARNDITPLHVASKRGNANMVKLLLDRGAKIDAKTRDGLTPLHCGARSGHEQVVEMLLDRAAPILSKTKNGLSPLHMATQGDHLNCVQLLLQHNVPVDDVTNDYLTALHVAAHCGHYKVAKVLLDKKANPNAKALNGFTPLHIACKKNRIKVMELLLKHGASIQAVTESGLTPIHVAAFMGHVNIVSQLMHHGASPNTTNVSCS

SEQ ID NO: 4903 - protein, 63 aa, Homo sapiens
  Payload ID: 1067;
  Gene Symbol: ANK3;
  Gene Name: ankyrin 3, node of Ranvier (ankyrin G);
  ENSP ID: ENSP00000483483
MTGDTDKYLGPQDLKELGDDSLPAEGYMGFSLGARSASHAASTVAKELTDKTGRTNLSHIFQN

SEQ ID NO: 4904 - protein, 1434 aa, Homo sapiens
  Payload ID: 1068;
  Gene Symbol: ANKAR;
  Gene Name: ankyrin and armadillo repeat containing;
  Uniprot ID:  Q7Z5J8;
  ENSP ID: ENSP00000313513
MLRLPKKGLPRFEQVQDEDTYLENLAIQRNASAFFEKYDRSEIQELLTTALVSWLSAKEDVRSQVDLPCGIMSQMNNVGFSTAILLTPVDPTALLDYREVHQMIRELAIGIYCLNQIPSISLEANYDQSSSCQLPPAYYDTRIGQILINIDYMLKALWHGIYMPKEKRARFSELWRAIMDIDPDGKPQTNKDIFSEFSSAGLTDITKDPDFNEIYDEDVNEDPTYDPNSPEETAVFMKYAENIMLKLTFSTTQIQQYENVFIFETGYWLTNAIKYNQDYLDICTYQRLQQRLYLQKKIIQKHFEKKKDIRRGIGYLKLICFLIPFLLSLKKKMKVPYLSSLLQPFSDDKVKTERELPPFIYGRDFKCQNFHYKENQYFHVHGGIEFDISTPSIENALEDFQKNLEKIRDCAANTFIEDSGYKEYYSIPVMEFHGKSYYVIYFELETFYQQLYKTQWWGAINEIVNNLRLKRLPLTDAQLHEQFKKKLGFKRAMKCKSIPFGMKSAVERGLSAVFHTFSRKTSSSTINVSDEAGYTIFHHAALHNRVSIICQLCNANFKVNQRRFVTFSQGPTPLHLAAQACSLETTVCLLCSKADYTLSEKRGWMPIHFAAFYDNVCIIIALCRKDPSLLEAEATAENQCTPLLLAATSGALDTIQYLFSIGANWRKTDIKGNNIIHLSVLTFHTEVLKYIIKLNIPELPVWKTLVEMLQCESYKRRMMAVMSLEVICLANDQYWRCILDAGTIPALINLLKSSKIKLQCKTVGLLSNISTHKSAVHALVEAGGIPSLINLLVCDEPEVHSRCAVILYDIAQCENKDVIAKYNGIPSLINLLNLNIENVLVNVMNCIRVLCIGNENNQRAVREHKGLPYLIRFLSSDSDVLKAVSSAAIAEVGRDNKEIQDAIAMEGAIPPLVALFKGKQISVQMKGAMAVESLASHNALIQKAFLEKSLTKYLLKLLKAFQIDVKEQGAVALWALAGQTLKQQKYMAEQIGYSFIINMLLSPSAKMQYVGGEAVIALSKDSRMHQNQICEGNGIAPLVRLLRISTIAEGTLLSVIRAVGSICIGVAHTSNPVSQQLVVDENAFPVLIQLLRNHPSPNIKVEVAFSLACIVLGNDVLQKDLHENEGFEYADVLYLLHSTEKDICLRAGYALTLFAFNNRFQQYLILESGIMTISIFERFLESTVETEKAMAAFQIVVLAKVIRDMDHITLSARGVTILVDSLYSVQTSTIVLTGNLIASLAHSRAGIPEAFTTLGTIQRLCYHLYSGIEEVRAACSSALGYLTYNANAFRILLKECRNKPNQFIRIKNNISRDASINPAFLKEFQMQQTLVGLPSLSLEKNGGPSIIPIFKRGKEHRRKLKPKIQPKDSLTLLPPVTNFMGLFKATKKTKDSHNIFSFSSTITSDITNVSRPRIVCLNQLGKHVQKANPEPAEG

SEQ ID NO: 4905 - protein, 1009 aa, Homo sapiens
  Payload ID: 1068;
  Gene Symbol: ANKAR;
  Gene Name: ankyrin and armadillo repeat containing;
  ENSP ID: ENSP00000399928
MSQMNNVGFSTAILLTPVDPTALLDYREVHQMIRELAIGIYCLNQIPSISLEANYDQSSSCQLPPAYYDTRIGQILINIDYMLKALWHGIYMPKEKRARFSELWRAIMDIDPDGKPQTNKDIFSEFSSAGLTDITKDPDFNEIYDEDVNEDPTYDPNSPEETAVFMKYAENIMLKLTFSTTQIQQYENVFIFETGYWLTNAIKYNQDYLDICTYQRLQQRLYLQKKIIQKHFEKKKDIRRGIGYLKLICFLIPFLLSLKKKMKVPYLSSLLQPFSDDKVKTERELPPFIYGRDFKCQNFHYKENQYFHVHGGIEFDISTPSIENALEDFQKNLEKIRDCAANTFIEDSGYKEYYSIPVMEFHGKSYYVIYFELETFYQQLYKTQWWGAINEIVNNLRLKRLPLTDAQLHEQFKKKLGFKRAMKCKSIPFGMKSAVERGLSAVFHTFSRKTSSSTINVSDEAGYTIFHHAALHNRVSIICQLCNANFKVNQRRFVTFSQGPTPLHLAAQACSLETTVCLLCSKADYTLSEKRGWMPIHFAAFYDNVCIIIALCRKDPSLLEAEATAENQCTPLLLAATSGALDTIQYLFSIGANWRKTDIKGNNIIHLSVLTFHTEVLKYIIKLNIPELPVWKTLVEMLQCESYKRRMMAVMSLEVICLANDQYWRCILDAGTIPALINLLKSSKIKLQCKTVGLLSNISTHKSAVHALVEAGGIPSLINLLVCDEPEVHSRCAVILYDIAQCENKDVIAKYNGIPSLINLLNLNIENVLVNVMNCIRVLCIGNENNQRAVREHKGLPYLIRFLSSDSDVLKAVSSAAIAEVGRDNKEIQDAIAMEGAIPPLVALFKGKQISVQMKGAMAVESLASHNALIQKAFLEKSLTKYLLKLLKAFQIDVKEQGAVALWALAGQTLKQQKYMAEQIGYSFIINMLLSPSAKMQYVGGEAVIALSKDSRMHQNQICEGNGIAPLVRLLRISTIAEGTLLSVIRAVGSICIGYLLKSRLCINTFCLQ

SEQ ID NO: 4906 - protein, 801 aa, Homo sapiens
  Payload ID: 1068;
  Gene Symbol: ANKAR;
  Gene Name: ankyrin and armadillo repeat containing;
  Uniprot ID:  Q7Z5J8;
  ENSP ID: ENSP00000407459
MKYAENIMLKLTFSTTQIQQYENVFIFETGYWLTNAIKYNQDYLDICTYQRLQQRLYLQKKIIQKHFEKKKDIRRGIGYLKLICFLIPFLLSLKKKMKVPYLSSLLQPFSDDKVKTERELPPFIYGRDFKCQNFHYKENQYFHVHGGIEFDISTPSIENALEDFQKNLEKIRDCAANTFIEDSGYKEYYSIPVMEFHGKSYYVIYFELETFYQQLYKTQWWGAINEIVNNLRLKRLPLTDAQLHEQFKKKLGFKRAMKCKSIPFGMKSAVERGLSAVFHTFSRKTSSSTINVSDEAGYTIFHHAALHNRVSIICQLCNANFKVNQRRFVTFSQGPTPLHLAAQACSLETTVCLLCSKADYTLSEKRGWMPIHFAAFYDNVCIIIALCRKDPSLLEAEATAENQCTPLLLAATSGALDTIQYLFSIGANWRKTDIKGNNIIHLSVLTFHTEVLKYIIKLNIPELPVWKTLVEMLQCESYKRRMMAVMSLEVICLANDQYWRCILDAGTIPALINLLKSSKIKLQCKTVGLLSNISTHKSAVHALVEAGGIPSLINLLVCDEPEVHSRCAVILYDIAQCENKDVIAKYNGIPSLINLLNLNIENVLVNVMNCIRVLCIGNENNQRAVREHKGLPYLIRFLSSDSGLFNLFLNSFEDVLKAVSSAAIAEVGRDNKEIQDAIAMEGAIPPLVALFKGKQISVQMKGAMAVESLASHNALIQKAFLEKSLTKYLLKLLKAFQIDVKEQGAVALWALAGQTLKQQKYMAEQIGYSFIINMLLSPSAKMQYVGYLLKSRLCINTFCLQ

SEQ ID NO: 4907 - protein, 1434 aa, Homo sapiens; identical to SEQ ID NO: 4904
  Payload ID: 1068;
  Gene Symbol: ANKAR;
  Gene Name: ankyrin and armadillo repeat containing;
  Uniprot ID:  Q7Z5J8;
  ENSP ID: ENSP00000427882

SEQ ID NO: 4908 - protein, 478 aa, Homo sapiens
  Payload ID: 1069;
  Gene Symbol: ABTB1;
  Gene Name: ankyrin repeat and BTB (POZ) domain containing 1;
  Uniprot ID:  Q969K4;
  ENSP ID: ENSP00000232744
MDTSDLFASCRKGDVGRVRYLLEQRDVEVNVRDKWDSTPLYYACLCGHEELVLYLLANGARCEANTFDGERCLYGALSDPIRRALRDYKQVTASCRRRDYYDDFLQRLLEQGIHSDVVFVVHGKPFRVHRCVLGARSAYFANMLDTKWKGKSVVVLRHPLINPVAFGALLQYLYTGRLDIGVEHVSDCERLAKQCQLWDLLSDLEAKCEKVSEFVASKPGTCVKVLTIEPPPADPRLREDMALLADCALPPELRGDLWELPFPCPDGFNSCPDICFRVAGCSFLCHKAFFCGRSDYFRALLDDHFRESEEPATSGGPPAVTLHGISPDVFTHVLYYMYSDHTELSPEAAYDVLSVADMYLLPGLKRLCGRSLAQMLDEDTVVGVWRVAKLFRLARLEDQCTEYMAKVIEKLVEREDFVEAVKEEAAAVAARQETDSIPLVDDIRFHVASTVQTYSAIEEAQQRLRALEDLLVSIGLDC

SEQ ID NO: 4909 - protein, 336 aa, Homo sapiens
  Payload ID: 1069;
  Gene Symbol: ABTB1;
  Gene Name: ankyrin repeat and BTB (POZ) domain containing 1;
  Uniprot ID:  Q969K4;
  ENSP ID: ENSP00000412684
MLDTKWKGKSVVVLRHPLINPVAFGALLQYLYTGRLDIGVEHVSDCERLAKQCQLWDLLSDLEAKCEKVSEFVASKPGTCVKVLTIEPPPADPRLREDMALLADCALPPELRGDLWELPFPCPDGFNSCPDICFRVAGCSFLCHKAFFCGRSDYFRALLDDHFRESEEPATSGGPPAVTLHGISPDVFTHVLYYMYSDHTELSPEAAYDVLSVADMYLLPGLKRLCGRSLAQMLDEDTVVGVWRVAKLFRLARLEDQCTEYMAKVIEKLVEREDFVEAVKEEAAAVAARQETDSIPLVDDIRFHVASTVQTYSAIEEAQQRLRALEDLLVSIGLDC

SEQ ID NO: 4910 - protein, 336 aa, Homo sapiens; identical to SEQ ID NO: 4909
  Payload ID: 1069;
  Gene Symbol: ABTB1;
  Gene Name: ankyrin repeat and BTB (POZ) domain containing 1;
  Uniprot ID:  Q969K4;
  ENSP ID: ENSP00000417366

SEQ ID NO: 4911 - protein, 141 aa, Homo sapiens
  Payload ID: 1069;
  Gene Symbol: ABTB1;
  Gene Name: ankyrin repeat and BTB (POZ) domain containing 1;
  ENSP ID: ENSP00000418439
  MOD_RES (1)..(1): Any amino acid
XPGTCVKVLTIEPPPADPRLREDMALLADCALPPELRGDLWELPFPCPDGFNSCPDICFRVAGCSFLCHKAFFCGRSDYFRALLDDHFRESEEPATSGGPPAVTLHGISPDVFTHVLYYMYSDHTEPPQVGMVIYTSWTGN

SEQ ID NO: 4912 - protein, 57 aa, Homo sapiens
  Payload ID: 1069;
  Gene Symbol: ABTB1;
  Gene Name: ankyrin repeat and BTB (POZ) domain containing 1;
  ENSP ID: ENSP00000418641
MDTSDLFASCRKGDVGRVRYLLEQRDVEVLCLLVWARGAGTLPSGQWSPLRGQHLRW

SEQ ID NO: 4913 - protein, 57 aa, Homo sapiens; identical to SEQ ID NO: 4912
  Payload ID: 1069;
  Gene Symbol: ABTB1;
  Gene Name: ankyrin repeat and BTB (POZ) domain containing 1;
  ENSP ID: ENSP00000420748

SEQ ID NO: 4914 - protein, 1025 aa, Homo sapiens
  Payload ID: 1070;
  Gene Symbol: ABTB2;
  Gene Name: ankyrin repeat and BTB (POZ) domain containing 2;
  Uniprot ID:  Q8N961;
  ENSP ID: ENSP00000410157
MAGTYSSTLKTLEDLTLDSGYGAGDSCRSLSLSSSKSNSQALNSSAQQHRGAAWWCYSGSMNSRHNSWDTVNTVLPEDPEVADLFSRCPRLPELEEFPWTEGDVARVLRKGAGGRRLPQFSAEAVRRLAGLLRRALIRVAREAQRLSVLHAKCTRFEVQSAVRLVHSWALAESCALAAVKALSLYSMSAGDGLRRGKSARCGLTFSVGRFFRWMVDTRISVRIHEYAAISLTACMENLVEEIRARVMASHSPDGGGAGGGEVSAEALEMVINNDAELWGVLQPYEHLICGKNANGVLSLPAYFSPYNGGSLGHDERADAYAQLELRTLEQSLLATCVGSISELSDLVSRAMHHMQGRHPLCPGASPARQARQPPQPITWSPDALHTLYYFLRCPQMESMENPNLDPPRMTLNNERPFMLLPPLMEWMRVAITYAEHRRSLTVDSGDIRQAARLLLPGLDCEPRQLKPEHCFSSFRRLDARAATEKFNQDLGFRMLNCGRTDLINQAIEALGPDGVNTMDDQGMTPLMYACAAGDEAMVQMLIDAGANLDIQVPSNSPRHPSIHPDSRHWTSLTFAVLHGHISVVQLLLDAGAHVEGSAVNGGEDSYAETPLQLASAAGNYELVSLLLSRGADPLLSMLEAHGMGSSLHEDMNCFSHSAAHGHRNVLRKLLTQPQQAKADVLSLEEILAEGVEESDASSQGSGSEGPVRLSRTRTKALQEAMYYSAEHGYVDITMELRALGVPWKLHIWIESLRTSFSQSRYSVVQSLLRDFSSIREEEYNEELVTEGLQLMFDILKTSKNDSVIQQLATIFTHCYGSSPIPSIPEIRKTLPARLDPHFLNNKEMSDVTFLVEGKLFYAHKVLLVTASNRFKTLMTNKSEQDGDSSKTIEISDMKYHIFQMMMQYLYYGGTESMEIPTTDILELLSAASLFQLDALQRHCEILCSQTLSMESAVNTYKYAKIHNAPELALFCEGFFLKHMKALLEQDAFRQLIYGRSSKVQGLDPLQDLQNTLAERVHSVYITSRV

SEQ ID NO: 4915 - protein, 522 aa, Homo sapiens
  Payload ID: 1071;
  Gene Symbol: ANKDD1A;
  Gene Name: ankyrin repeat and death domain containing 1A;
  Uniprot ID:  Q495B1;
  ENSP ID: ENSP00000325895
MQEELAWETDGLLPLERQLHEAARQNNVGRMQELIGRRVNTRARNHVGRVALHWAAGAGHEQAVRLLLEHEAAVDEEDAVGALTEARLCFGMNALLLSAWFGHLRILQILVNSGAKIHCESKDGLTLLHCAAQKGHVPVLAFIMEDLEDVALDHVDKLGRTAFHRAAEHGQLDALDFLVGSGCDHNVKDKEGNTALHLAAGRGHMAVLQRLVDIGLDLEEQNAEGLTALHSAAGGSHPDCVQLLLRAGSTVNALTQKNLSCLHYAALSGSEDVSRVLIHAGGCANVVDHQGASPLHLAVRHNFPALVRLLINSDSDVNAVDNRQQTPLHLAAEHAWQDIADMLLIAGVDLNLRDKQGKTALAVAVRSNHVSLVDMIIKADRFYRWEKDHPSDPSGKSLSFKQDHRQETQQLRSVLWRLASRYLQPREWKKLAYSWEFTEAHVDAIEQQWTGTRSYQEHGHRMLLIWLHGVATAGENPSKALFEGLVAIGRRDLAGWSTMARSQLTATSASRVQMILVPQPPE

SEQ ID NO: 4916 - protein, 423 aa, Homo sapiens
  Payload ID: 1071;
  Gene Symbol: ANKDD1A;
  Gene Name: ankyrin repeat and death domain containing 1A;
  ENSP ID: ENSP00000379070
MNALLLSAWFGHLRILQILVNSGAKIHCESKDGLTLLHCAAQKGHVPVLAFIMEDLEDVALDHVDKLGRTAFHRAAEHGQLDALDFLVGSGCDHNVKDKEGNTALHLAAGRGHMAVLQRLVDIGLDLEEQNAEGLTALHSAAGGSHPDCVQLLLRAGSTVNALTQKNLSCLHYAALSGSEDVSRVLIHAGGCANVVDHQGASPLHLAVRHNFPALVRLLINSDSDVNAVDNRQQTPLHLAAEHAWQDIADMLLIAGVDLNLRDKQGKTALAVAVRSNHVSLVDMIIKADRFYRWEKDHPSDPSGKSLSFKQDHRQETQQLRSVLWRLASRYLQPREWKKLAYSWEFTEAHVDAIEQQWTGTRSYQEHGHRMLLIWLHGVATAGENPSKALFEGLVAIGRRDLAENIRKKANAAPSAPRRCTAM

SEQ ID NO: 4917 - protein, 399 aa, Homo sapiens
  Payload ID: 1071;
  Gene Symbol: ANKDD1A;
  Gene Name: ankyrin repeat and death domain containing 1A;
  ENSP ID: ENSP00000379073
MNALLLSAWFGHLRILQILVNSGAKIHCESKDGLTLLHCAAQKGHVPVLAFIMEDLEDVALDHVDKLGRTAFHRAAEHGQLDALDFLVGSGCDHNVKDKEGNTALHLAAGRGHMAVLQRLVDIGLDLEEQNAEGLTALHSAAGGSHPDCVQLLLRAGSTVNALTQKNLSCLHYAALSGSEDVSRVLIHAGGCANVVDHQGASPLHLAVRHNFPALVRLLINSDSDVNAVDNRQQTPLHLAAEHAWQDIADMLLIAGVDLNLRDKDHPSDPSGKSLSFKQDHRQETQQLRSVLWRLASRYLQPREWKKLAYSWEFTEAHVDAIEQQWTGTRSYQEHGHRMLLIWLHGVATAGENPSKALFEGLVAIGRRDLAGWSTMARSQLTATSASRVQMILVPQPPE

SEQ ID NO: 4918 - protein, 181 aa, Homo sapiens
  Payload ID: 1071;
  Gene Symbol: ANKDD1A;
  Gene Name: ankyrin repeat and death domain containing 1A;
  ENSP ID: ENSP00000420999
MNALLLSAWFGHLRILQILVNSGAKIHCESKDGLTLLHCAAQKGHVPVLAFIMEDLEDVALDHVDKLGRTAFHRAAEHGQLDALDFLVGSGCDHNVKDKEGNTALHLAAGRGHMAVLQRLVDIGLDLEEQNAEGLTALHSAAGGSHPDCVQLLLRAGSTVNALTQVARPSQDCGRLLAAEP

SEQ ID NO: 4919 - protein, 133 aa, Homo sapiens
  Payload ID: 1071;
  Gene Symbol: ANKDD1A;
  Gene Name: ankyrin repeat and death domain containing 1A;
  ENSP ID: ENSP00000423548
IGRRVNTRARNHVGRVALHWAAGAGHEQAVRLLLEHEAAVDEEDAVGALTEEGNTALHLAAGRGHMAVLQRLVDIGLDLEEQNAEGLTALHSAAGGSHPDCVQLLLRAGSTVNALTQVARPSQDCGRLLAAEP

SEQ ID NO: 4920 - protein, 123 aa, Homo sapiens
  Payload ID: 1071;
  Gene Symbol: ANKDD1A;
  Gene Name: ankyrin repeat and death domain containing 1A;
  ENSP ID: ENSP00000427091
MQEELAWETDGLLPLERQLHEAARQNNVGRMQELIGRRVNTRARNHVGRVALHWAAGAGHEQAVRLLLEHEAAVDEEDAFGMNALLLSAWFGHLRILQILVNSGAKIHCESKPKKAMCLCWRS

SEQ ID NO: 4921 - protein, 423 aa, Homo sapiens; identical to SEQ ID NO: 4916
  Payload ID: 1071;
  Gene Symbol: ANKDD1A;
  Gene Name: ankyrin repeat and death domain containing 1A;
  ENSP ID: ENSP00000484388

SEQ ID NO: 4922 - protein, 528 aa, Homo sapiens
  Payload ID: 1072;
  Gene Symbol: ANKDD1B;
  Gene Name: ankyrin repeat and death domain containing 1B;
  Uniprot ID:  A6NHY2;
  ENSP ID: ENSP00000471417
MDPAGRARGQGATAGGLLLRAAAAAKGLREDLWGAAALPWRSLSRIPKREGLGEEDTAVAGHELLLPNERSFQNAAKSNNLDLMEKLFEKKVNINVVNNMNRTALHFAVGRNHLSAVDFLLKHKARVDVADKHGLTVIHLAAWSGSLEVMLMLVKAGADQRAKNQDGMSALHFATQSNHVRIVEYLIQDLHLKDLNQPDEKGRKPFLLAAERGHVEMIEKLTFLNLHTSEKDKGGNTALHLAAKHGHSPAVQVLLAQWQDINEMNELNISSLQIATRNGHASLVNFLLSENVDLHQKVEPKESPLHLVVINNHITVVNSLLSAQHDIDILNQKQQTPLHVAADRGNVELVETLLKAGCDLKAVDKQGKTALAVASRSNHSLVVGMLIKAERYYAWREEHHESIRDPSTGFTLTFKQDHSLETRHIRTLLWDLAYHQLKANEWQRLARSWNFTDDQIRAIEEQWSGNESFREHGHRALLIWLHGTLMTQGDPAKQLYEELVHAGFPKLAEKTRHFKSKTDSNSKKCVVS

SEQ ID NO: 4923 - protein, 776 aa, Homo sapiens
  Payload ID: 1073;
  Gene Symbol: ANKEF1;
  Gene Name: ankyrin repeat and EF-hand domain containing 1;
  Uniprot ID:  Q9NU02;
  ENSP ID: ENSP00000367631
MALADKRLENLQIYKVLQCVRNKDKKQIEKLTKLGYPELINYTEPINGLSALHLASVSNDIDMVSFLLDLGAHPDVQDRMGCTPTMRAAELGHELSMEILAKAKADMTIVDNEGKGVLFYCILPTKRHYRCALIALEHGADVNNSTYEGKPIFLRACEDAHDVKDVCLTFLEKGANPNAINSSTGRTALMEASREGVVEIVRGILERGGEVNAFDNDRHHAAHFAAKGGFFDILKLLFAYNGDVGLISINGNTPLHYAAMGGFADCCKYIAQRGCDLKWKNLDHKTPRAVAKEGGFKAASKEIRRAERIANKLARPGAKNPNPLWALRLHDWSVEREAFLREAFAVLDRGDGSISKNDFVMVLEERQDYASSEQLAAIAHLHEKTRGGGVNINEFFKGTRYLNKSFVLGSYGPKKKEKGMGKKGKKGKFVLPLPICVIPEYAFPRRQDGGPPYYMIETYKNVTDSSRFNRDHPPEHPIQDDSVWYIDDSEKVFSNINIITKAGDLASLKKAFESGIPVDMKDNYYKTPLMTACASGNIDVVKFLLEKGANVNATDNFLWTPLHFACHAGQQDIVELLVESGALIDAASINNSTPLNRAIESCRLDTVKYLLDIGAKFQLENRKGHSAMDVAKAYADYRIIDLIKEKLDNLPKPAENQKLKGKTPPILKTEGPEIKKEEELLSSIYGVPTTSEGKKVQKGNVVHLNSLITSGYTKKVDITFIPRRIWSPEATTAELIRKRELRRERFTHEVDFDDFMMPFQKNITEKARALEAALKT

SEQ ID NO: 4924 - protein, 776 aa, Homo sapiens; identical to SEQ ID NO: 4923
  Payload ID: 1073;
  Gene Symbol: ANKEF1;
  Gene Name: ankyrin repeat and EF-hand domain containing 1;
  Uniprot ID:  Q9NU02;
  ENSP ID: ENSP00000367644

SEQ ID NO: 4925 - protein, 1169 aa, Homo sapiens
  Payload ID: 1074;
  Gene Symbol: ANKFY1;
  Gene Name: ankyrin repeat and FYVE domain containing 1;
  Uniprot ID:  Q9P2R3;
  ENSP ID: ENSP00000343362
MAEEEVAKLEKHLMLLRQEYVKLQKKLAETEKRCALLAAQANKESSSESFISRLLAIVADLYEQEQYSDLKIKVGDRHISAHKFVLAARSDSWSLANLSSTKELDLSDANPEVTMTMLRWIYTDELEFREDDVFLTELMKLANRFQLQLLRERCEKGVMSLVNVRNCIRFYQTAEELNASTLMNYCAEIIASHWDDLRKEDFSSMSAQLLYKMIKSKTEYPLHKAIKVEREDVVFLYLIEMDSQLPGKLNEADHNGDLALDLALSRRLESIATTLVSHKADVDMVDKSGWSLLHKGIQRGDLFAATFLIKNGAFVNAATLGAQETPLHLVALYSSKKHSADVMSEMAQIAEALLQAGANPNMQDSKGRTPLHVSIMAGNEYVFSQLLQCKQLDLELKDHEGSTALWLAVQHITVSSDQSVNPFEDVPVVNGTSFDENSFAARLIQRGSHTDAPDTATGNCLLQRAAGAGNEAAALFLATNGAHVNHRNKWGETPLHTACRHGLANLTAELLQQGANPNLQTEEALPLPKEAASLTSLADSVHLQTPLHMAIAYNHPDVVSVILEQKANALHATNNLQIIPDFSLKDSRDQTVLGLALWTGMHTIAAQLLGSGAAINDTMSDGQTLLHMAIQRQDSKSALFLLEHQADINVRTQDGETALQLAIRNQLPLVVDAICTRGADMSVPDEKGNPPLWLALANNLEDIASTLVRHGCDATCWGPGPGGCLQTLLHRAIDENNEPTACFLIRSGCDVNSPRQPGANGEGEEEARDGQTPLHLAASWGLEETVQCLLEFGANVNAQDAEGRTPIHVAISSQHGVIIQLLVSHPDIHLNVRDRQGLTPFACAMTFKNNKSAEAILKRESGAAEQVDNKGRNFLHVAVQNSDIESVLFLISVHANVNSRVQDASKLTPLHLAVQAGSEIIVRNLLLAGAKVNELTKHRQTALHLAAQQDLPTICSVLLENGVDFAAVDENGNNALHLAVMHGRLNNIRVLLTECTVDAEAFNLRGQSPLHILGQYGKENAAAIFDLFLECMPGYPLDKPDADGSTVLLLAYMKGNANLCRAIVRSGARLGVNNNQGVNIFNYQVATKQLLFRLLDMLSKEPPWCDGSYCYECTARFGVTTRKHHCRHCGRLLCHKCSTKEIPIIKFDLNKPVRVCNICFDVLTLGGVS

SEQ ID NO: 4926 - protein, 60 aa, Homo sapiens
  Payload ID: 1074;
  Gene Symbol: ANKFY1;
  Gene Name: ankyrin repeat and FYVE domain containing 1;
  ENSP ID: ENSP00000459247
MAIAYNHPDVVSVILEQKANALHATNNLQIIPDFSLKDSRDQTVLGLALWTGMHTIAAQL

SEQ ID NO: 4927 - protein, 1170 aa, Homo sapiens
  Payload ID: 1074;
  Gene Symbol: ANKFY1;
  Gene Name: ankyrin repeat and FYVE domain containing 1;
  Uniprot ID:  Q9P2R3;
  ENSP ID: ENSP00000459775
MAEEEVAKLEKHLMLLRQEYVKLQKKLAETEKRCALLAAQANKESSSESFISRLLAIVADLYEQEQYSDLKIKVGDRHISAHKFVLAARSDSWSLANLSSTKELDLSDANPEVTMTMLRWIYTDELEFREDDVFLTELMKLANRFQLQLLRERCEKGVMSLVNVRNCIRFYQTAEELNASTLMNYCAEIIASHWDDLRKEDFSSMSAQLLYKMIKSKTEYPLHKAIKVEREDVVFLYLIEMDSQLPGKLNEADHNGDLALDLALSRRLESIATTLVSHKADVDMVDKSGWSLLHKGIQRGDLFAATFLIKNGAFVNAATLGAQETPLHLVALYSSKKHSADVMSEMAQIAEALLQAGANPNMQDSKGRTPLHVSIMAGNEYVFSQLLQCKQLDLELKDHEGSTALWLAVQHITVSSDQSVNPFEDVPVVNGTSFDENSFAARLIQRGSHTDAPDTATGNCLLQRAAGAGNEAAALFLATNGAHVNHRNKWGETPLHTACRHGLANLTAELLQQGANPNLQTEEALPLPKEAASLTSLADSVHLQTPLHMAIAYNHPDVVSVILEQKANALHATNNLQIIPDFSLKDSRDQTVLGLALWTGMHTIAAQLLGSGAAINDTMSDGQTLLHMAIQRQDSKSALFLLEHQADINVSRTQDGETALQLAIRNQLPLVVDAICTRGADMSVPDEKGNPPLWLALANNLEDIASTLVRHGCDATCWGPGPGGCLQTLLHRAIDENNEPTACFLIRSGCDVNSPRQPGANGEGEEEARDGQTPLHLAASWGLEETVQCLLEFGANVNAQDAEGRTPIHVAISSQHGVIIQLLVSHPDIHLNVRDRQGLTPFACAMTFKNNKSAEAILKRESGAAEQVDNKGRNFLHVAVQNSDIESVLFLISVHANVNSRVQDASKLTPLHLAVQAGSEIIVRNLLLAGAKVNELTKHRQTALHLAAQQDLPTICSVLLENGVDFAAVDENGNNALHLAVMHGRLNNIRVLLTECTVDAEAFNLRGQSPLHILGQYGKENAAAIFDLFLECMPGYPLDKPDADGSTVLLLAYMKGNANLCRAIVRSGARLGVNNNQGVNIFNYQVATKQLLFRLLDMLSKEPPWCDGSYCYECTARFGVTTRKHHCRHCGRLLCHKCSTKEIPIIKFDLNKPVRVCNICFDVLTLGGVS

SEQ ID NO: 4928 - protein, 1211 aa, Homo sapiens
  Payload ID: 1074;
  Gene Symbol: ANKFY1;
  Gene Name: ankyrin repeat and FYVE domain containing 1;
  Uniprot ID:  Q9P2R3;
  ENSP ID: ENSP00000459943
MPTPRDCGRLRSRAGRSRAGAACSRGAPRAAREALDCRRCRDAGGKEVAKLEKHLMLLRQEYVKLQKKLAETEKRCALLAAQANKESSSESFISRLLAIVADLYEQEQYSDLKIKVGDRHISAHKFVLAARSDSWSLANLSSTKELDLSDANPEVTMTMLRWIYTDELEFREDDVFLTELMKLANRFQLQLLRERCEKGVMSLVNVRNCIRFYQTAEELNASTLMNYCAEIIASHWDDLRKEDFSSMSAQLLYKMIKSKTEYPLHKAIKVEREDVVFLYLIEMDSQLPGKLNEADHNGDLALDLALSRRLESIATTLVSHKADVDMVDKSGWSLLHKGIQRGDLFAATFLIKNGAFVNAATLGAQETPLHLVALYSSKKHSADVMSEMAQIAEALLQAGANPNMQDSKGRTPLHVSIMAGNEYVFSQLLQCKQLDLELKDHEGSTALWLAVQHITVSSDQSVNPFEDVPVVNGTSFDENSFAARLIQRGSHTDAPDTATGNCLLQRAAGAGNEAAALFLATNGAHVNHRNKWGETPLHTACRHGLANLTAELLQQGANPNLQTEEALPLPKEAASLTSLADSVHLQTPLHMAIAYNHPDVVSVILEQKANALHATNNLQIIPDFSLKDSRDQTVLGLALWTGMHTIAAQLLGSGAAINDTMSDGQTLLHMAIQRQDSKSALFLLEHQADINVRTQDGETALQLAIRNQLPLVVDAICTRGADMSVPDEKGNPPLWLALANNLEDIASTLVRHGCDATCWGPGPGGCLQTLLHRAIDENNEPTACFLIRSGCDVNSPRQPGANGEGEEEARDGQTPLHLAASWGLEETVQCLLEFGANVNAQDAEGRTPIHVAISSQHGVIIQLLVSHPDIHLNVRDRQGLTPFACAMTFKNNKSAEAILKRESGAAEQVDNKGRNFLHVAVQNSDIESVLFLISVHANVNSRVQDASKLTPLHLAVQAGSEIIVRNLLLAGAKVNELTKHRQTALHLAAQQDLPTICSVLLENGVDFAAVDENGNNALHLAVMHGRLNNIRVLLTECTVDAEAFNLRGQSPLHILGQYGKENAAAIFDLFLECMPGYPLDKPDADGSTVLLLAYMKGNANLCRAIVRSGARLGVNNNQGVNIFNYQVATKQLLFRLLDMLSKEPPWCDGSYCYECTARFGVTTRKHHCRHCGRLLCHKCSTKEIPIIKFDLNKPVRVCNICFDVLTLGGVS

SEQ ID NO: 4929 - protein, 69 aa, Homo sapiens
  Payload ID: 1074;
  Gene Symbol: ANKFY1;
  Gene Name: ankyrin repeat and FYVE domain containing 1;
  ENSP ID: ENSP00000460619
MAEEEVAKLEKHLMLLRQEYVKLQKKLAETEKRCALLAAQANKESSSESFISRLLAIVADLYEQEQYRC

SEQ ID NO: 4930 - protein, 80 aa, Homo sapiens
  Payload ID: 1074;
  Gene Symbol: ANKFY1;
  Gene Name: ankyrin repeat and FYVE domain containing 1;
  ENSP ID: ENSP00000467522
  MOD_RES (1)..(1): Any amino acid
XLLLAYMKGNANLCRAIVRSGARLGVNNNQGVNIFNYQVATKQLLFRLLDMLSKEPPWCDGSYCYECTARFGVTTRKHHW

SEQ ID NO: 4931 - protein, 1089 aa, Homo sapiens
  Payload ID: 1075;
  Gene Symbol: ANKIB1;
  Gene Name: ankyrin repeat and IBR domain containing 1;
  Uniprot ID:  Q9P2G1;
  ENSP ID: ENSP00000265742
MGNTTTKFRKALINGDENLACQIYENNPQLKESLDPNTSYGEPYQHNTPLHYAARHGMNKILGTFLGRDGNPNKRNVHNETSMHLLCMGPQIMISEGALHPRLARPTEDDFRRADCLQMILKWKGAKLDQGEYERAAIDAVDNKKNTPLHYAAASGMKACVELLVKHGGDLFAENENKDTPCDCAEKQHHKDLALNLESQMVFSRDPEAEEIEAEYAALDKREPYEGLRPQDLRRLKDMLIVETADMLQAPLFTAEALLRAHDWDREKLLEAWMSNPENCCQRSGVQMPTPPPSGYNAWDTLPSPRTPRTTRSSVTSPDEISLSPGDLDTSLCDICMCSISVFEDPVDMPCGHDFCRGCWESFLNLKIQEGEAHNIFCPAYDCFQLVPVDIIESVVSKEMDKRYLQFDIKAFVENNPAIKWCPTPGCDRAVRLTKQGSNTSGSDTLSFPLLRAPAVDCGKGHLFCWECLGEAHEPCDCQTWKNWLQKITEMKPEELVGVSEAYEDAANCLWLLTNSKPCANCKSPIQKNEGCNHMQCAKCKYDFCWICLEEWKKHSSSTGGYYRCTRYEVIQHVEEQSKEMTVEAEKKHKRFQELDRFMHYYTRFKNHEHSYQLEQRLLKTAKEKMEQLSRALKETEGGCPDTTFIEDAVHVLLKTRRILKCSYPYGFFLEPKSTKKEIFELMQTDLEMVTEDLAQKVNRPYLRTPRHKIIKAACLVQQKRQEFLASVARGVAPADSPEAPRRSFAGGTWDWEYLGFASPEEYAEFQYRRRHRQRRRGDVHSLLSNPPDPDEPSESTLDIPEGGSSSRRPGTSVVSSASMSVLHSSSLRDYTPASRSENQDSLQALSSLDEDDPNILLAIQLSLQESGLALDEETRDFLSNEASLGAIGTSLPSRLDSVPRNTDSPRAALSSSELLELGDSLMRLGAENDPFSTDTLSSHPLSEARSDFCPSSSDPDSAGQDPNINDNLLGNIMAWFHDMNPQSIALIPPATTEISADSQLPCIKDGSEGVKDVELVLPEDSMFEDASVSEGRGTQIEENPLEENILAGEAASQAGDSGNEAANRGDGSDVSSQTPQTSSDWLEQVHLV

SEQ ID NO: 4932 - protein, 54 aa, Homo sapiens
  Payload ID: 1075;
  Gene Symbol: ANKIB1;
  Gene Name: ankyrin repeat and IBR domain containing 1;
  ENSP ID: ENSP00000396406
  MOD_RES (1)..(1): Any amino acid
XRMKAAITCSVLSASMTFAGFALKSGKNIVRPLEVITDVLAMKSFNTWRSNPRK

SEQ ID NO: 4933 - protein, 84 aa, Homo sapiens
  Payload ID: 1075;
  Gene Symbol: ANKIB1;
  Gene Name: ankyrin repeat and IBR domain containing 1;
  ENSP ID: ENSP00000406644
  MOD_RES (1)..(1): Any amino acid
XLPSPRTPRTTRSSVTSPDEISLSPGDLDTSLCDICMCSISVFEDPVDMPCGHDFCRGCWESIVISRESLPMISSVNFTCKIKI

SEQ ID NO: 4934 - protein, 134 aa, Homo sapiens
  Payload ID: 1075;
  Gene Symbol: ANKIB1;
  Gene Name: ankyrin repeat and IBR domain containing 1;
  ENSP ID: ENSP00000407002
MGNTTTKFRKALINGDENLACQIYENNPQLKESLDPNTSYGEPYQHNTPLHYAARHGMNKILGTFLGRDGNPNKRNVHNETSMHLLCMGPQIMISEGALHPRLARPTEDDFRRADCLQMILKWKGAKLDQGEYE

SEQ ID NO: 4935 - protein, 162 aa, Homo sapiens
  Payload ID: 1075;
  Gene Symbol: ANKIB1;
  Gene Name: ankyrin repeat and IBR domain containing 1;
  ENSP ID: ENSP00000407913
  MOD_RES (1)..(1): Any amino acid
XTFLGRDGNPNKRNVHNETSMHLLCMGPQIMISEGALHPRLARPTEDDFRRADCLQMILKWKGAKLDQGEYERAAIDAVDNKKNTPLHYAAASGMKACVELLVKHGGDLFAENENKDTPCDCAEKQHHKDLALNLESQMVFSRDPEAEEIEAEYAALDKREY

SEQ ID NO: 4936 - protein, 687 aa, Homo sapiens
  Payload ID: 1076;
  Gene Symbol: ANKHD1;
  Gene Name: ankyrin repeat and KH domain containing 1;
  ENSP ID: ENSP00000246149
  MOD_RES (1)..(1): Any amino acid
XKAGADIELGCSTPLMEASQEGHLELVKYLLASGANVHATTATGDTALTYACENGHTDVADVLLQAGADLDKQEDMKTILEGIDPAKHQEHESEGGRTPLMKAARAGHLCTVQFLISKGANVNRATANNDHTVVSLACAGGHLAVVELLLAHGADPTHRLKDGSTMLIEAAKGGHTNVVSYLLDYPNNVLSVPTTDVSQLPPPSQDQSQEPDRTSQENSPALLGVQKAVSTRVPTGSNSSSQTTECLTPESCSQTTSNVASQSMPPVYPSVDIDAHTESNHDTALTLACAGGHEELVSVLIARDAKIEHRDKKGFTPLILAATAGHVGVVEILLDKGGDIEAQSERTKDTPLSLACSGGRQEVVDLLLARGANKEHRNVSDYTPLSLAASGGYVNIIKILLNAGAEINSRTGSKLGISPLMLAAMNGHVPAVKLLLDMGSDINAQIETNRNTALTLACFQGRAEVVSLLLDRKANVEHRAKTGLTPLMEAASGGYAEVGRVLLDKGADVNAPPVPSSRDTALTIAADKGHYKFCELLIHRGAHIDVRNKKGNTPLWLASNGGHFDVVQLLVQAGADVDAADNRKITPLMSAFRKGHVKVVQYLVKEVNQFPSDIECMRYIATITDKELLKKCHQCVETIVKAKDQQAAEANKNASILLKELDLEKSREESRKQALAAKREKRKEKRK

SEQ ID NO: 4937 - protein, 866 aa, Homo sapiens
  Payload ID: 1076;
  Gene Symbol: ANKHD1;
  Gene Name: ankyrin repeat and KH domain containing 1;
  ENSP ID: ENSP00000297183
MDVNSSKYPSLLLHSQEEKTSTATSKTQTRLEGEVTPNSLSTSYKTVSLPLSSPNIKLNLTSPKRGQKREEGWKEVVRRSKKLSVPASVVSRIMGRGGCNITAIQDVTGAHIDVDKQKDKNGERMITIRGGTESTRYAVQLINALIQDPAKELEDLIPKNHIRTPASTKSIHANFSSGVGTTAASSKNAFPLGAPTLVTSQATTLSTFQPANKLNKNVPTNVRSSFPVSLPLAYPHPHFALLAAQTMQQIRHPRLPMAQFGGTFSPSPNTWGPFPVRPVNPGNTNSSPKHNNTSRLPNQNGTVLPSESAGLATASCPITVSSVVAASQQLCVTNTRTPSSVRKQLFACVPKTSPPATVISSVTSTCSSLPSVSSAPITSGQAPTTFLPASTSQAQLSSQKMESFSAVPPTKEKVSTQDQPMANLCTPSSTANSCSSSASNTPGAPETHPSSSPTPTSSNTQEEAQPSSVSDLSPMSMPFASNSEPAPLTLTSPRMVAADNQDTSNLPQLAVPAPRVSHRMQPRGSFYSMVPNATIHQDPQSIFVTNPVTLTPPQGPPAAVQLSSAVNIMNGSQMHINPANKSLPPTFGPATLFNHFSSLFDSSQVPANQGWGDGPLSSRVATDASFTVQSAFLGNSVLGHLENMHPDNSKAPGFRPPSQRVSTSPVATSAPPTLGQPKGVSASQDRKIPPPIGTERLARIRQGGSVAQAPAGTSFVAPVGHSGIWSFGVNAVSEGLSGWSQSVMGNHPMHQQLSDPSTFSQHQPMERDDSGMVAPSNIFHQPMASGFVDFSKGLPISMYGGTIIPSHPQLADVPGGPLFNGLHNPDPAWNPMIKVIQNSTECTDAQQIWPGTWAPHIGNMHLKYVN

SEQ ID NO: 4938 - protein, 2542 aa, Homo sapiens
  Payload ID: 1076;
  Gene Symbol: ANKHD1;
  Gene Name: ankyrin repeat and KH domain containing 1;
  Uniprot ID:  Q8IWZ3;
  ENSP ID: ENSP00000354085
MLTDSGGGGTSFEEDLDSVAPRSAPAGASEPPPPGGVGLGIRTVRLFGEAGPASGVGSSGGGGSGSGTGGGDAALDFKLAAAVLRTGGGGGASGSDEDEVSEVESFILDQEDLDNPVLKTTSEIFLSSTAEGADLRTVDPETQARLEALLEAAGIGKLSTADGKAFADPEVLRRLTSSVSCALDEAAAALTRMKAENSHNAGQVDTRSLAEACSDGDVNAVRKLLDEGRSVNEHTEEGESLLCLACSAGYYELAQVLLAMHANVEDRGNKGDITPLMAASSGGYLDIVKLLLLHDADVNSQSATGNTALTYACAGGFVDIVKVLLNEGANIEDHNENGHTPLMEAASAGHVEVARVLLDHGAGINTHSNEFKESALTLACYKGHLDMVRFLLEAGADQEHKTDEMHTALMEACMDGHVEVARLLLDSGAQVNMPADSFESPLTLAACGGHVELAALLIERGANLEEVNDEGYTPLMEAAREGHEEMVALLLAQGANINAQTEETQETALTLACCGGFSEVADFLIKAGADIELGCSTPLMEASQEGHLELVKYLLASGANVHATTATGDTALTYACENGHTDVADVLLQAGADLEHESEGGRTPLMKAARAGHLCTVQFLISKGANVNRATANNDHTVVSLACAGGHLAVVELLLAHGADPTHRLKDGSTMLIEAAKGGHTNVVSYLLDYPNNVLSVPTTDVSQLPPPSQDQSQVPRVPTHTLAMVVPPQEPDRTSQENSPALLGVQKGTSKQKSSSLQVADQDLLPSFHPYQPLECIVEETEGKLNELGQRISAIEKAQLKSLELIQGEPLNKDKIEELKKNREEQVQKKKKILKELQKVERQLQMKTQQQFTKEYLETKGQKDTVSLHQQCSHRGVFPEGEGDGSLPEDHFSELPQVDTILFKDNDVDDEQQSPPSAEQIDFVPVQPLSSPQCNFSSDLGSNGTNSLELQKVSGNQQIVGQPQIAITGHDQGLLVQEPDGLMVATPAQTLTDTLDDLIAAVSTRVPTGSNSSSQTTECLTPESCSQTTSNVASQSMPPVYPSVDIDAHTESNHDTALTLACAGGHEELVSVLIARDAKIEHRDKKGFTPLILAATAGHVGVVEILLDKGGDIEAQSERTKDTPLSLACSGGRQEVVDLLLARGANKEHRNVSDYTPLSLAASGGYVNIIKILLNAGAEINSRTGSKLGISPLMLAAMNGHVPAVKLLLDMGSDINAQIETNRNTALTLACFQGRAEVVSLLLDRKANVEHRAKTGLTPLMEAASGGYAEVGRVLLDKGADVNAPPVPSSRDTALTIAADKGHYKFCELLIHRGAHIDVRNKKGNTPLWLASNGGHFDVVQLLVQAGADVDAADNRKITPLMSAFRKGHVKVVQYLVKEVNQFPSDIECMRYIATITDKELLKKCHQCVETIVKAKDQQAAEANKNASILLKELDLEKSREESRKQALAAKREKRKEKRKKKKEEQKRKQEEDEENKPKENSELPEDEDEEENDEDVEQEVPIEPPSATTTTTIGISATSATFTNVFGKKRANVVTTPSTNRKNKKNKTKETPPTAHLILPEQHMSLAQQKADKNKINGEPRGGGAGGNSDSDNLDSTDCNSESSSGGKSQELNFVMDVNSSKYPSLLLHSQEEKTSTATSKTQTRLEGEVTPNSLSTSYKTVSLPLSSPNIKLNLTSPKRGQKREEGWKEVVRRSKKLSVPASVVSRIMGRGGCNITAIQDVTGAHIDVDKQKDKNGERMITIRGGTESTRYAVQLINALIQDPAKELEDLIPKNHIRTPASTKSIHANFSSGVGTTAASSKNAFPLGAPTLVTSQATTLSTFQPANKLNKNVPTNVRSSFPVSLPLAYPHPHFALLAAQTMQQIRHPRLPMAQFGGTFSPSPNTWGPFPVRPVNPGNTNSSPKHNNTSRLPNQNGTVLPSESAGLATASCPITVSSVVAASQQLCVTNTRTPSSVRKQLFACVPKTSPPATVISSVTSTCSSLPSVSSAPITSGQAPTTFLPASTSQAQLSSQKMESFSAVPPTKEKVSTQDQPMANLCTPSSTANSCSSSASNTPGAPETHPSSSPTPTSSNTQEEAQPSSVSDLSPMSMPFASNSEPAPLTLTSPRMVAADNQDTSNLPQLAVPAPRVSHRMQPRGSFYSMVPNATIHQDPQSIFVTNPVTLTPPQGPPAAVQLSSAVNIMNGSQMHINPANKSLPPTFGPATLFNHFSSLFDSSQVPANQGWGDGPLSSRVATDASFTVQSAFLGNSVLGHLENMHPDNSKAPGFRPPSQRVSTSPVGLPSIDPSGSSPSSSSAPLASFSGIPGTRVFLQGPAPVGTPSFNRQHFSPHPWTSASNSSTSAPPTLGQPKGVSASQDRKIPPPIGTERLARIRQGGSVAQAPAGTSFVAPVGHSGIWSFGVNAVSEGLSGWSQSVMGNHPMHQQLSDPSTFSQHQPMERDDSGMVAPSNIFHQPMASGFVDFSKGLPISMYGGTIIPSHPQLADVPGGPLFNGLHNPDPAWNPMIKVIQNSTECTDAQQIWPGTWAPHIGNMHLKYVN

SEQ ID NO: 4939 - protein, 616 aa, Homo sapiens
  Payload ID: 1076;
  Gene Symbol: ANKHD1;
  Gene Name: ankyrin repeat and KH domain containing 1;
  Uniprot ID:  Q8IWZ3;
  ENSP ID: ENSP00000378211
MLTDSGGGGTSFEEDLDSVAPRSAPAGASEPPPPGGVGLGIRTVRLFGEAGPASGVGSSGGGGSGSGTGGGDAALDFKLAAAVLRTGGGGGASGSDEDEVSEVESFILDQEDLDNPVLKTTSEIFLSSTAEGADLRTVDPETQARLEALLEAAAFADPEVLRRLTSSVSCALDEAAAALTRMKAENSHNAGQVDTRSLAEACSDGDVNAVRKLLDEGRSVNEHTEEGESLLCLACSAGYYELAQVLLAMHANVEDRGNKGDITPLMAASSGGYLDIVKLLLLHDADVNSQSATGNTALTYACAGGFVDIVKVLLNEGANIEDHNENGHTPLMEAASAGHVEVARVLLDHGAGINTHSNEFKESALTLACYKGHLDMVRFLLEAGADQEHKTDEMHTALMEACMDGHVEVARLLLDSGAQVNMPADSFESPLTLAACGGHVELAALLIERGANLEEVNDEGYTPLMEAAREGHEEMVALLLAQGANINAQTEETQETALTLACCGGFSEVADFLIKAGADIELGCSTPLMEASQEGHLELVKYLLASGANVHATTATGDTALTYACENGHTDVADVLLQAGADLDKQEDMKTILEGIDPAKHQVRVAFDACKLLRKE

SEQ ID NO: 4940 - protein, 627 aa, Homo sapiens
  Payload ID: 1076;
  Gene Symbol: ANKHD1;
  Gene Name: ankyrin repeat and KH domain containing 1;
  Uniprot ID:  Q8IWZ3;
  ENSP ID: ENSP00000378212
MLTDSGGGGTSFEEDLDSVAPRSAPAGASEPPPPGGVGLGIRTVRLFGEAGPASGVGSSGGGGSGSGTGGGDAALDFKLAAAVLRTGGGGGASGSDEDEVSEVESFILDQEDLDNPVLKTTSEIFLSSTAEGADLRTVDPETQARLEALLEAAGIGKLSTADGKAFADPEVLRRLTSSVSCALDEAAAALTRMKAENSHNAGQVDTRSLAEACSDGDVNAVRKLLDEGRSVNEHTEEGESLLCLACSAGYYELAQVLLAMHANVEDRGNKGDITPLMAASSGGYLDIVKLLLLHDADVNSQSATGNTALTYACAGGFVDIVKVLLNEGANIEDHNENGHTPLMEAASAGHVEVARVLLDHGAGINTHSNEFKESALTLACYKGHLDMVRFLLEAGADQEHKTDEMHTALMEACMDGHVEVARLLLDSGAQVNMPADSFESPLTLAACGGHVELAALLIERGANLEEVNDEGYTPLMEAAREGHEEMVALLLAQGANINAQTEETQETALTLACCGGFSEVADFLIKAGADIELGCSTPLMEASQEGHLELVKYLLASGANVHATTATGDTALTYACENGHTDVADVLLQAGADLDKQEDMKTILEGIDPAKHQVRVAFDACKLLRKE

SEQ ID NO: 4941 - protein, 1072 aa, Homo sapiens
  Payload ID: 1076;
  Gene Symbol: ANKHD1;
  Gene Name: ankyrin repeat and KH domain containing 1;
  ENSP ID: ENSP00000390034
PKENSELPEDEDEEENDEDVEQEVPIEPPSATTTTTIGISATSATFTNVFGKKRANVVTTPSTNRKNKKNKTKETPPTAHLILPEQHMSLAQQKADKNKINGEPRGGGAGGNSDSDNLDSTDCNSESSSGGKSQELNFVMDVNSSKYPSLLLHSQEEKTSTATSKTQTRLEGEVTPNSLSTSYKTVSLPLSSPNIKLNLTSPKRGQKREEGWKEVVRRSKKLSVPASVVSRIMGRGGCNITAIQDVTGAHIDVDKQKDKNGERMITIRGGTESTRYAVQLINALIQDPAKELEDLIPKNHIRTPASTKSIHANFSSGVGTTAASSKNAFPLGAPTLVTSQATTLSTFQPANKLNKNVPTNVRSSFPVSLPLAYPHPHFALLAAQTMQQIRHPRLPMAQFGGTFSPSPNTWGPFPVRPVNPGNTNSSPKHNNTSRLPNQNGTVLPSESAGLATASCPITVSSVVAASQQLCVTNTRTPSSVRKQLFACVPKTSPPATVISSVTSTCSSLPSVSSAPITSGQAPTTFLPASTSQAQLSSQKMESFSAVPPTKEKVSTQDQPMANLCTPSSTANSCSSSASNTPGAPETHPSSSPTPTSSNTQEEAQPSSVSDLSPMSMPFASNSEPAPLTLTSPRMVAADNQDTSNLPQLAVPAPRVSHRMQPRGSFYSMVPNATIHQDPQSIFVTNPVTLTPPQGPPAAVQLSSAVNIMNGSQMHINPANKSLPPTFGPATLFNHFSSLFDSSQVPANQGWGDGPLSSRVATDASFTVQSAFLGNSVLGHLENMHPDNSKAPGFRPPSQRVSTSPVGLPSIDPSGSSPSSSSAPLASFSGIPGTRVFLQGPAPVGTPSFNRQHFSPHPWTSASNSCDSPIPSVSSGSSSPLSATSAPPTLGQPKGVSASQDRKIPPPIGTERLARIRQGGSVAQAPAGTSFVAPVGHSGIWSFGVNAVSEGLSGWSQSVMGNHPMHQQLSDPSTFSQHQPMERDDSGMVAPSNIFHQPMGLPISMYGGTIIPSHPQLADVPGGPLFNGLHNPDPAWNPMIKVIQNSTECTDAQQIWPGTWAPHIGNMHLKYVN

SEQ ID NO: 4942 - protein, 1215 aa, Homo sapiens
  Payload ID: 1076;
  Gene Symbol: ANKHD1;
  Gene Name: ankyrin repeat and KH domain containing 1;
  ENSP ID: ENSP00000393204
VQAGADVDAADNRKITPLMSAFRKGHVKVVQYLVKEVNQFPSDIECMRYIATITDKELLKKCHQCVETIVKAKDQQAAEANKNASILLKELDLEKSREESRKQALAAKREKRKEKRKKKKEEQKRKQEEDEENKPKENSELPEDEDEEENDEDVEQEVPIEPPSATTTTTIGISATSATFTNVFGKKRANVVTTPSTNRKNKKNKTKETPPTAHLILPEQHMSLAQQKADKNKINGEPRGGGAGGNSDSDNLDSTDCNSESSSGGKSQELNFVMDVNSSKYPSLLLHSQEEKTSTATSKTQTRLEGEVTPNSLSTSYKTVSLPLSSPNIKLNLTSPKRGQKREEGWKEVVRRSKKLSVPASVVSRIMGRGGCNITAIQDVTGAHIDVDKQKDKNGERMITIRGGTESTRYAVQLINALIQDPAKELEDLIPKNHIRTPASTKSIHANFSSGVGTTAASSKNAFPLGAPTLVTSQATTLSTFQPANKLNKNVPTNVRSSFPVSLPLAYPHPHFALLAAQTMQQIRHPRLPMAQFGGTFSPSPNTWGPFPVRPVNPGNTNSSPKHNNTSRLPNQNGTVLPSESAGLATASCPITVSSVVAASQQLCVTNTRTPSSVRKQLFACVPKTSPPATVISSVTSTCSSLPSVSSAPITSGQAPTTFLPASTSQAQLSSQKMESFSAVPPTKEKVSTQDQPMANLCTPSSTANSCSSSASNTPGAPETHPSSSPTPTSSNTQEEAQPSSVSDLSPMSMPFASNSEPAPLTLTSPRMVAADNQDTSNLPQLAVPAPRVSHRMQPRGSFYSMVPNATIHQDPQSIFVTNPVTLTPPQGPPAAVQLSSAVNIMNGSQMHINPANKSLPPTFGPATLFNHFSSLFDSSQVPANQGWGDGPLSSRVATDASFTVQSAFLGNSVLGHLENMHPDNSKAPGFRPPSQRVSTSPVGLPSIDPSGSSPSSSSAPLASFSGIPGTRVFLQGPAPVGTPSFNRQHFSPHPWTSASNSCDSPIPSVSSGSSSPLSATSAPPTLGQPKGVSASQDRKIPPPIGTERLARIRQGGSVAQAPAGTSFVAPVGHSGIWSFGVNAVSEGLSGWSQSVMGNHPMHQQLSDPSTFSQHQPMERDDSGMVAPSNIFHQPMASGFVDFSKGLPISMYGGTIIPSHPQLADVPGGPLFNGLHNPDPAWNPMIKVIQNSTECTDAQQIWPGTWAPHIGNMHLKYVN

SEQ ID NO: 4943 - protein, 1565 aa, Homo sapiens
  Payload ID: 1076;
  Gene Symbol: ANKHD1;
  Gene Name: ankyrin repeat and KH domain containing 1;
  ENSP ID: ENSP00000394489
MLTDSGGGGTSFEEDLDSVAPRSAPAGASEPPPPGGVGLGIRTVRLFGEAGPASGVGSSGGGGSGSGTGGGDAALDFKLAAAVLRTGGGGGASGSDEDEVSEVESFILDQEDLDNPVLKTTSEIFLSSTAEGADLRTVDPETQARLEALLEAAGIGKLSTADGKAFADPEVLRRLTSSVSCALDEAAAALTRMKAENSHNAGQVDTRSLAEACSDGDVNAVRKLLDEGRSVNEHTEEGESLLCLACSAGYYELAQVLLAMHANVEDRGNKGDITPLMAASSGGYLDIVKLLLLHDADVNSQSATGNTALTYACAGGFVDIVKVLLNEGANIEDHNENGHTPLMEAASAGHVEVARVLLDHGAGINTHSNEFKESALTLACYKGHLDMVRFLLEAGADQEHKTDEMHTALMEACMDGHVEVARLLLDSGAQVNMPADSFESPLTLAACGGHVELAALLIERGANLEEVNDEGYTPLMEAAREGHEEMVALLLAQGANINAQTEETQETALTLACCGGFSEVADFLIKAGADIELGCSTPLMEASQEGHLELVKYLLASGANVHATTATGDTALTYACENGHTDVADVLLQAGADLDKQEDMKTILEGIDPAKHQEHESEGGRTPLMKAARAGHLCTVQFLISKGANVNRATANNDHTVVSLACAGGHLAVVELLLAHGADPTHRLKDGSTMLIEAAKGGHTNVVSYLLDYPNNVLSVPTTDVSQLPPPSQDQSQVPRVPTHTLAMVVPPQEPDRTSQENSPALLGVQKGTSKQKSSSLQVADQDLLPSFHPYQPLECIVEETEGKLNELGQRISAIEKAQLKSLELIQGEPLNKDKIEELKKNREEQVQKKKKILKELQKVERQLQMKTQQQFTKEYLETKGQKDTVSLHQQCSHRGVFPEGEGDGSLPEDHFSELPQVDTILFKDNDVDDEQQSPPSAEQIDFVPVQPLSSPQCNFSSDLGSNGTNSLELQKVSGNQQIVGQPQIAITGHDQGLLVQEPDGLMVATPAQTLTDTLDDLIAAVSTRVPTGSNSSSQTTECLTPESCSQTTSNVASQSMPPVYPSVDIDAHTESNHDTALTLACAGGHEELVSVLIARDAKIEHRDKKGFTPLILAATAGHVGVVEILLDKGGDIEAQSERTKDTPLSLACSGGRQEVVDLLLARGANKEHRNVSDYTPLSLAASGGYVNIIKILLNAGAEINSRTGSKLGISPLMLAAMNGHVPAVKLLLDMGSDINAQIETNRNTALTLACFQGRAEVVSLLLDRKANVEHRAKTGLTPLMEAASGGYAEVGRVLLDKGADVNAPPVPSSRDTALTIAADKGHYKFCELLIHRGAHIDVRNKKGNTPLWLASNGGHFDVVQLLVQAGADVDAADNRKITPLMSAFRKGHVKVVQYLVKEVNQFPSDIECMRYIATITDKELLKKCHQCVETIVKAKDQQAAEANKNASILLKELDLEKSREESRKQALAAKREKRKEKRKKKKEEQKRKQEEDEENKPKENSELPEDEDEEENDEDVEQEVPIEPPSATTTTTIGISATSATFTNVFGKKRANVVTTPSTNRKNK

SEQ ID NO: 4944 - protein, 185 aa, Homo sapiens
  Payload ID: 1076;
  Gene Symbol: ANKHD1;
  Gene Name: ankyrin repeat and KH domain containing 1;
  ENSP ID: ENSP00000405345
  MOD_RES (1)..(1): Any amino acid
XTSAPPTLGQPKGVSASQDRKIPPPIGTERLARIRQGGSVAQAPAGTSFVAPVGHSGIWSFGVNAVSEGLSGWSQSVMGNHPMHQQLSDPSTFSQHQPMERDDSGMVAPSNIFHQPMASGFVDFSKGLPISMYGGTIIPSHPQLADVPGGPLFNGLHNPDPAWNPMIKVIQNSTECTDAQQVKWA

SEQ ID NO: 4945 - protein, 608 aa, Homo sapiens
  Payload ID: 1076;
  Gene Symbol: ANKHD1;
  Gene Name: ankyrin repeat and KH domain containing 1;
  ENSP ID: ENSP00000405602
EHESEGGRTPLMKAARAGHLCTVQFLISKGANVNRATANNDHTVVSLACAGGHLAVVELLLAHGADPTHRLKDGSTMLIEAAKGGHTNVVSYLLDYPNNVLSVPTTDVSQLPPPSQDQSQVPRVPTHTLAMVVPPQEPDRTSQENSPALLGVQKAVSTRVPTGSNSSSQTTECLTPESCSQTTSNVASQSMPPVYPSVDIDAHTESNHDTALTLACAGGHEELVSVLIARDAKIEHRDKKGFTPLILAATAGHVGVVEILLDKGGDIEAQSERTKDTPLSLACSGGRQEVVDLLLARGANKEHRNVSDYTPLSLAASGGYVNIIKILLNAGAEINSRTGSKLGISPLMLAAMNGHVPAVKLLLDMGSDINAQIETNRNTALTLACFQGRAEVVSLLLDRKANVEHRAKTGLTPLMEAASGGYAEVGRVLLDKGADVNAPPVPSSRDTALTIAADKGHYKFCELLIHRGAHIDVRNKKGNTPLWLASNGGHFDVVQLLVQAGADVDAADNRKITPLMSAFRKGHVKVVQYLVKEVNQFPSDIECMRYIATITDKELLKKCHQCVETIVKAKDQQAAEANKNASILLKELDLEKSREESRKQALAAKREK

SEQ ID NO: 4946 - protein, 1024 aa, Homo sapiens
  Payload ID: 1076;
  Gene Symbol: ANKHD1;
  Gene Name: ankyrin repeat and KH domain containing 1;
  ENSP ID: ENSP00000410959
  MOD_RES (1)..(1): Any amino acid
XTTTTIGISATSATFTNVFGKKRANVVTTPSTNRKNKKNKTKETPPTAHLILPEQHMSLAQQKADKNKINGEPRGGGAGGNSDSDNLDSTDCNSESSSGGKSQELNFVMDVNSSKYPSLLLHSQEEKTSTATSKTQTRLEGEVTPNSLSTSYKTVSLPLSSPNIKLNLTSPKRGQKREEGWKEVVRRSKKLSVPASVVSRIMGRGGCNITAIQDVTGAHIDVDKQKDKNGERMITIRGGTESTRYAVQLINALIQDPAKELEDLIPKNHIRTPASTKSIHANFSSGVGTTAASSKNAFPLGAPTLVTSQATTLSTFQPANKLNKNVPTNVRSSFPVSLPLAYPHPHFALLAAQTMQQIRHPRLPMAQFGGTFSPSPNTWGPFPVRPVNPGNTNSSPKHNNTSRLPNQNGTVLPSESAGLATASCPITVSSVVAASQQLCVTNTRTPSSVRKQLFACVPKTSPPATVISSVTSTCSSLPSVSSAPITSGQAPTTFLPASTSQAQLSSQKMESFSAVPPTKEKVSTQDQPMANLCTPSSTANSCSSSASNTPGAPETHPSSSPTPTSSNTQEEAQPSSVSDLSPMSMPFASNSEPAPLTLTSPRMVAADNQDTSNLPQLAVPAPRVSHRMQPRGSFYSMVPNATIHQDPQSIFVTNPVTLTPPQGPPAAVQLSSAVNIMNGSQMHINPANKSLPPTFGPATLFNHFSSLFDSSQVPANQGWGDGPLSSRVATDASFTVQSAFLGNSVLGHLENMHPDNSKAPGFRPPSQRVSTSPVGLPSIDPSGSSPSSSSAPLASFSGIPGTRVFLQGPAPVGTPSFNRQHFSPHPWTSASNSSTSAPPTLGQPKGVSASQDRKIPPPIGTERLARIRQGGSVAQAPAGTSFVAPVGHSGIWSFGVNAVSEGLSGWSQSVMGNHPMHQQLSDPSTFSQHQPMERDDSGMVAPSNIFHQPMGLPISMYGGTIIPSHPQLADVPGGPLFNGLHNPDPAWNPMIKVIQNSTECTDAQQIWPGTWAPHIGNMHLKYVN

SEQ ID NO: 4947 - protein, 934 aa, Homo sapiens
  Payload ID: 1076;
  Gene Symbol: ANKHD1;
  Gene Name: ankyrin repeat and KH domain containing 1;
  ENSP ID: ENSP00000415887
  MOD_RES (1)..(1): Any amino acid
XKETPPTAHLILPEQHMSLAQQKADKNKINGEPRGGGAGGNSDSDNLDSTDCNSESSSGGKSQELNFVMDVNSSKYPSLLLHSQEEKTSTATSKTQTRLEGEVTPNSLSTSYKTVSLPLSSPNIKLNLTSPKRGQKREEGWKEVVRRSKKLSVPASVVSRIMGRGGCNITAIQDVTGAHIDVDKQKDKNGERMITIRGGTESTRYAVQLINALIQDPAKELEDLIPKNHIRTPASTKSIHANFSSGVGTTAASSKNAFPLGAPTLVTSQATTLSTFQPANKLNKNVPTNVRSSFPVSLPLAYPHPHFALLAAQTMQQIRHPRLPMAQFGGTFSPSPNTWGPFPVRPVNPGNTNSSPKHNNTSRLPNQNGTVLPSESAGLATASCPITVSSVVAASQQLCVTNTRTPSSVRKQLFACVPKTSPPATVISSVTSTCSSLPSVSSAPITSGQAPTTFLPASTSQAQLSSQKMESFSAVPPTKEKVSTQDQPMANLCTPSSTANSCSSSASNTPGAPETHPSSSPTPTSSNTQEEAQPSSVSDLSPMSMPFASNSEPAPLTLTSPRMVAADNQDTSNLPQLAVPAPRVSHRMQPRGSFYSMVPNATIHQDPQSIFVTNPVTLTPPQGPPAAVQLSSAVNIMNGSQMHINPANKSLPPTFGPATLFNHFSSLFDSSQVPANQGWGDGPLSSRVATDASFTVQSAFLGNSVLGHLENMHPDNSKAPGFRPPSQRVSTSPVATSAPPTLGQPKGVSASQDRKIPPPIGTERLARIRQGGSVAQAPAGTSFVAPVGHSGIWSFGVNAVSEGLSGWSQSVMGNHPMHQQLSDPSTFSQHQPMERDDSGMVAPSNIFHQPMASGFVDFSKGLPISMYGGTIIPSHPQLADVPGGPLFNGLHNPDPAWNPMIKVIQNSTECTDAQQIWPGTWAPHIGNMHLKYVN

SEQ ID NO: 4948 - protein, 368 aa, Homo sapiens
  Payload ID: 1076;
  Gene Symbol: ANKHD1;
  Gene Name: ankyrin repeat and KH domain containing 1;
  ENSP ID: ENSP00000421069
MLTDSGGGGTSFEEDLDSVAPRSAPAGASEPPPPGGVGLGIRTVRLFGEAGPASGVGSSGGGGSGSGTGGGDAALDFKLAAAVLRTGGGGGASGSDEDEVSEVESFILDQEDLDNPVLKTTSEIFLSSTAEGADLRTVDPETQARLEALLEAADPEVLRRLTSSVSCALDEAAAALTRMKAENSHNAGQVDTRSLAEACSDGDVNAVRKLLDEGRSVNEHTEEGESLLCLACSAGYYELAQVLLAMHANVEDRGNKGDITPLMAASSGGYLDIVKLLLLHDADVNSQSATGNTALTYACAGGFVDIVKVLLNEGANIEDHNENGHTPLMEAASAGHVEVARVLLDHGAGINTHSNEFKESALTLACYK

SEQ ID NO: 4949 - protein, 581 aa, Homo sapiens
  Payload ID: 1076;
  Gene Symbol: ANKHD1;
  Gene Name: ankyrin repeat and KH domain containing 1;
  Uniprot ID:  Q8IWZ3;
  ENSP ID: ENSP00000478529
MLTDSGGGGTSFEEDLDSVAPRSAPAGASEPPPPGGVGLGIRTVRLFGEAGPASGVGSSGGGGSGSGTGGGDAALDFKLAAAVLRTGGGGGASGSDEDEVSEVESFILDQEDLDNPVLKTTSEIFLSSTAEGADLRTVDPETQARLEALLEAAGIGKLSTADGKAFADPEVLRRLTSSVSCALDEAAAALTRMKAENSHNAGQVDTRSLAEACSDGDVNAVRKLLDEGRSVNEHTEEGESLLCLACSAGYYELAQVLLAMHANVEDRGNKGDITPLMAASSGGYLDIVKLLLLHDADVNSQSATGNTALTYACAGGFVDIVKVLLNEGANIEDHNENGHTPLMEAASAGHVEVARVLLDHGAGINTHSNEFKESALTLACYKGHLDMVRFLLEAGADQEHKTDEMHTALMEACMDGHVEVARLLLDSGAQVNMPADSFESPLTLAACGGHVELAALLIERGANLEEVNDEGYTPLMEAAREGHEEMVALLLAQGANINAQTEETQETALTLACCGGFSEVADFLIKAGADIELGCSTPLMEASQEGHLELVKYLLASGQAGGHEDYFGGHRSGQASGEGGL

SEQ ID NO: 4950 - protein, 765 aa, Homo sapiens
  Payload ID: 1077;
  Gene Symbol: ANKK1;
  Gene Name: ankyrin repeat and kinase domain containing 1;
  Uniprot ID:  Q8NFD2;
  ENSP ID: ENSP00000306678
MAADPTELRLGSLPVFTRDDFEGDWRLVASGGFSQVFQARHRRWRTEYAIKCAPCLPPDAASSDVNYLIEEAAKMKKIKFQHIVSIYGVCKQPLGIVMEFMANGSLEKVLSTHSLCWKLRFRIIHETSLAMNFLHSIKPPLLHLDLKPGNILLDSNMHVKISDFGLSKWMEQSTRMQYIERSALRGMLSYIPPEMFLESNKAPGPKYDVYSFAIVIWELLTQKKPYSGFNMMMIIIRVAAGMRPSLQPVSDQWPSEAQQMVDLMKRCWDQDPKKRPCFLDITIETDILLSLLQSRVAVPESKALARKVSCKLSLRQPGEVNEDISQELMDSDSGNYLKRALQLSDRKNLVPRDEELCIYENKVTPLHFLVAQGSVEQVRLLLAHEVDVDCQTASGYTPLLIAAQDQQPDLCALLLAHGADANRVDEDGWAPLHFAAQNGDDGTARLLLDHGACVDAQEREGWTPLHLAAQNNFENVARLLVSRQADPNLHEAEGKTPLHVAAYFGHVSLVKLLTSQGAELDAQQRNLRTPLHLAVERGKVRAIQHLLKSGAVPDALDQSGYGPLHTAAARGKYLICKMLLRYGASLELPTHQGWTPLHLAAYKGHLEIIHLLAESHANMGALGAVNWTPLHLAARHGEEAVVSALLQCGADPNAAEQSGWTPLHLAVQRSTFLSVINLLEHHANVHARNKVGWTPAHLAALKGNTAILKVLVEAGAQLDVQDGVSCTPLQLALRSRKQGIMSFLEGKEPSVATLGGSKPGAEMEI

SEQ ID NO: 4951 - protein, 54 aa, Homo sapiens
  Payload ID: 1077;
  Gene Symbol: ANKK1;
  Gene Name: ankyrin repeat and kinase domain containing 1;
  ENSP ID: ENSP00000445810
  MOD_RES (1)..(1): Any amino acid
XSLCWKLRFRIIHETSLAMNFLHSIKPPLLHLDLKPGNILLDSNMHVKVKKLRL

SEQ ID NO: 4952 - protein, 669 aa, Homo sapiens
  Payload ID: 1078;
  Gene Symbol: ANKLE1;
  Gene Name: ankyrin repeat and LEM domain containing 1;
  Uniprot ID:  Q8NAG6;
  ENSP ID: ENSP00000377971
MWTPVRRGAAWLGTLLGPGEGPPEPRGGAAHAHKPPAGSRKSTDQAVRFGPSQGMCSEARLARRLRDALREEEPWAVEELLRCGADPNLVLEDGAAAVHLAAGARHPRGLRCLGALLRQGGDPNARSVEALTPLHVAAAWGCRRGLELLLSQGADPALRDQDGLRPLDLALQQGHLECARVLQDLDTRTRTRTRIGAETQEPEPAPGTPGLSGPTDETLDSIALQKQPCRGDNRDIGLEADPGPPSLPVPLETVDKHGSSASPPGHWDYSSDASFVTAVEVSGAEDPASDTPPWAGSLPPTRQGLLHVVHANQRVPRSQGTEAELNARLQALTLTPPNAAGFQSSPSSMPLLDRSPAHSPPRTPTPGASDCHCLWEHQTSIDSDMATLWLTEDEASSTGGREPVGPCRHLPVSTVSDLELLKGLRALGENPHPITPFTRQLYHQQLEEAQIAPGPEFSGHSLELAAALRTGCIPDVQADEDALAQQFEQPDPARRWREGVVKSSFTYLLLDPRETQDLPARAFSLTPAERLQTFIRAIFYVGKGTRARPYVHLWEALGHHGRSRKQPHQACPKVRQILDIWASGCGVVSLHCFQHVVAVEAYTREACIVEALGIQTLTNQKQGHCYGVVAGWPPARRRRLGVHLLHRALLVFLAEGERQLHPQDIQARG

SEQ ID NO: 4953 - protein, 85 aa, Homo sapiens
  Payload ID: 1078;
  Gene Symbol: ANKLE1;
  Gene Name: ankyrin repeat and LEM domain containing 1;
  ENSP ID: ENSP00000384008
MWTPVRRGAAWLGTLLGPGEGPPEPRGGAAHAHKPPAGSRKSTDQAVRFGPSQGMCSEARLARRLRDALREEEPCRGAAALRRGP

SEQ ID NO: 4954 - protein, 439 aa, Homo sapiens
  Payload ID: 1078;
  Gene Symbol: ANKLE1;
  Gene Name: ankyrin repeat and LEM domain containing 1;
  ENSP ID: ENSP00000384753
MWTPVRRGAAWLGTLLGPGEGPPEPRGGAAHAHKPPAGSRKSTDQAVRFGPSQGMCSEARLARRLRDALREEEPWAVEELLRCGADPNLVLEDGAAAVHLAAGARHPRGLRCLGALLRQGGDPNARSVEALTPLHVAAAWGCRRGLELLLSQGADPALRDQDGLRPLDLALQQGHLECARVLQDLDTRTRTRTRIGAETQEPEPAPGTPGLSGPTDETLDSIALQKQPCRGDNRDIGLEADPGPPSLPVPLETVDKHGSSASPPGHWDYSSDASFVTAVEVSGAEDPASDTPPWAGSLPPTRQGLLHVVHANQRVPRSQGTEAELNARLQALTLTPPNAAGFQSSPSSMPLLDRSPAHSPPRTPTPGASDCHCLWEHQTSIDSDMATLWLTEDEASSTGGREPVGPCRHLPVSTVSDLELLKGLRALGRLRTCQPEPSH

SEQ ID NO: 4955 - protein, 643 aa, Homo sapiens
  Payload ID: 1078;
  Gene Symbol: ANKLE1;
  Gene Name: ankyrin repeat and LEM domain containing 1;
  ENSP ID: ENSP00000468845
MWTPVRRGAAWLGTLLGPGEGPPEPRGGAAHAHKPPAGSRKSTDQAVRFGPSQGMCSEARLARRLRDALREEEPWAVEELLRCGADPNLVLEDGAAAVHLAAGARHPRGLRCLGALLRQGGDPNARSVEALTPLHVAAAWGCRRGLELLLSQGADPALRDQDGLRPLDLALQQGHLECARVLQDLDTRTRTRTRIGAETQEPEPAPGTPGLSGPTDETLDSIALQKQPCRGDNRDIGLEADPGPPSLPVPLETVDKHGSSASPPGHWDYSSDASFVTAVEVSGAEDPASDTPPWAGSLPPTRQGLLHVVHANQRVPRSQGTEAELNARLQALTLTPPNAAGFQSSPSSMPLLDRSPAHSPPRTPTPGASDCHCLWEHQTSIDSDMATLWLTEDEASSTGGREPVGPCRHLPVSTVSDLELLKGLRALGPEFSGHSLELAAALRTGCIPDVQADEDALAQQFEQPDPARRWREGVVKSSFTYLLLDPRETQDLPARAFSLTPAERLQTFIRAIFYVGKGTRARPYVHLWEALGHHGRSRKQPHQACPKVRQILDIWASGCGVVSLHCFQHVVAVEAYTREACIVEALGIQTLTNQKQGHCYGVVAGWPPARRRRLGVHLLHRALLVFLAEGERQLHPQDIQARG

SEQ ID NO: 4956 - protein, 598 aa, Homo sapiens
  Payload ID: 1078;
  Gene Symbol: ANKLE1;
  Gene Name: ankyrin repeat and LEM domain containing 1;
  ENSP ID: ENSP00000470895
  MOD_RES (1)..(1): Any amino acid
XMCSEARLARRLRDALREEEPWAVEELLRCGADPNLVLEDGAAAVHLAAGARHPRGLRCLGALLRQGGDPNARSVEALTPLHVAAAWGCRRGLELLLSQGADPALRDQDGLRPLDLALQQGHLECARVLQDLDTRTRTRTRIGAETQEPEPAPGTPGLSGPTDETLDSIALQKQPCRGDNRDIGLEADPGPPSLPVPLETVDKHGSSASPPGHWDYSSDASFVTAVEVSGAEDPASDTPPWAGSLPPTRQGLLHVVHANQRVPRSQGTEAELNARLQALTLTPPNAAGFQSSPSSMPLLDRSPAHSPPRTPTPGASDCHCLWEHQTSIDSDMATLWLTEDEASSTGGREPVGPCRHLPVSTVSDLELLKGLRALGPEFSGHSLELAAALRTGCIPDVQADEDALAQQFEQPDPARRWREGVVKSSFTYLLLDPRETQDLPARAFSLTPAERLQTFIRAIFYVGKGTRARPYVHLWEALGHHGRSRKQGSRRSPTRSKGTAMEWWQAGHLLVAGAWGCTCCTVPSLSSWLKASDSFIPRTSRPGAECWGVGHPAWGEMFECSSCPMLTAAPISGFRRGVCVCVCVCVCVCVCLCVCVCV

SEQ ID NO: 4957 - protein, 938 aa, Homo sapiens
  Payload ID: 1079;
  Gene Symbol: ANKLE2;
  Gene Name: ankyrin repeat and LEM domain containing 2;
  Uniprot ID:  Q86XL3;
  ENSP ID: ENSP00000350686
MLWPRLAAAEWAALAWELLGASVLLIAVRWLVRRLGPRPGGLGRSGTPVPPPSAAAAPASGEMTMDALLARLKLLNPDDLREEIVKAGLKCGPITSTTRFIFEKKLAQALLEQGGRLSSFYHHEAGVTALSQDPQRILKPAEGNPTDQAGFSEDRDFGYSVGLNPPEEEAVTSKTCSVPPSDTDTYRAGATASKEPPLYYGVCPVYEDVPARNERIYVYENKKEALQAVKMIKGSRFKAFSTREDAEKFARGICDYFPSPSKTSLPLSPVKTAPLFSNDRLKDGLCLSESETVNKERANSYKNPRTQDLTAKLRKAVEKGEEDTFSDLIWSNPRYLIGSGDNPTIVQEGCRYNVMHVAAKENQASICQLTLDVLENPDFMRLMYPDDDEAMLQKRIRYVVDLYLNTPDKMGYDTPLHFACKFGNADVVNVLSSHHLIVKNSRNKYDKTPEDVICERSKNKSVELKERIREYLKGHYYVPLLRAEETSSPVIGELWSPDQTAEASHVSRYGGSPRDPVLTLRAFAGPLSPAKAEDFRKLWKTPPREKAGFLHHVKKSDPERGFERVGRELAHELGYPWVEYWEFLGCFVDLSSQEGLQRLEEYLTQQEIGKKAQQETGEREASCRDKATTSGSNSISVRAFLDEDDMSLEEIKNRQNAARNNSPPTVGAFGHTRCSAFPLEQEADLIEAAEPGGPHSSRNGLCHPLNHSRTLAGKRPKAPRGEEAHLPPVSDLTVEFDKLNLQNIGRSVSKTPDESTKTKDQILTSRINAVERDLLEPSPADQLGNGHRRTESEMSARIAKMSLSPSSPRHEDQLEVTREPARRLFLFGEEPSKLDQDVLAALECADVDPHQFPAVHRWKSAVLCYSPSDRQSWPSPAVKGRFKSQLPDLSGPHSYSPGRNSVAGSNPAKPGLGSPGRYSPVHGSQLRRMARLAELAAL

SEQ ID NO: 4958 - protein, 118 aa, Homo sapiens
  Payload ID: 1079;
  Gene Symbol: ANKLE2;
  Gene Name: ankyrin repeat and LEM domain containing 2;
  ENSP ID: ENSP00000437585
EGCRYNVMHVAAKENQASICQLTLDVLENPDFMRLMYPDDDEAMLQKRIRYVVDLYLNTPDKMGYDTPLHFACKFGNADVVNVLSSHHLIVKNSRNKYDKTPEDELHLDPASQQKVCV

SEQ ID NO: 4959 - protein, 293 aa, Homo sapiens
  Payload ID: 1079;
  Gene Symbol: ANKLE2;
  Gene Name: ankyrin repeat and LEM domain containing 2;
  Uniprot ID:  Q86XL3;
  ENSP ID: ENSP00000437807
MSLEEIKNRQNAARNNSPPTVGAFGHTRCSAFPLEQEADLIEAAEPGGPHSSRNGLCHPLNHSRTLAGKRPKAPRGEEAHLPPVSDLTVEFDKLNLQNIGRSVSKTPDESTKTKDQILTSRINAVERDLLEPSPADQLGNGHRRTESEMSARIAKMSLSPSSPRHEDQLEVTREPARRLFLFGEEPSKLDQDVLAALECADVDPHQFPAVHRWKSAVLCYSPSDRQSWPSPAVKGRFKSQLPDLSGPHSYSPGRNSVAGSNPAKPGLGSPGRYSPVHGSQLRRMARLAELAAL

SEQ ID NO: 4960 - protein, 293 aa, Homo sapiens; identical to SEQ ID NO: 4959
  Payload ID: 1079;
  Gene Symbol: ANKLE2;
  Gene Name: ankyrin repeat and LEM domain containing 2;
  Uniprot ID:  Q86XL3;
  ENSP ID: ENSP00000438551

SEQ ID NO: 4961 - protein, 258 aa, Homo sapiens
  Payload ID: 1079;
  Gene Symbol: ANKLE2;
  Gene Name: ankyrin repeat and LEM domain containing 2;
  ENSP ID: ENSP00000445760
MSLEEIKNRQNAARNNSPPTVGAFGHTRCSAFPLEQEADLIEAAEPGGPHSSRNGLCHPLNHSRTLAGKRPKAPRGEEAHLPPVSDLTVEFDKLNLQNIGRSVSKTPDESTKTKDQILTSRINAVERDLLEPSPADQLGNGHRRTESEMSARIAKMSLSPSSPRHEDQLEVTREPARRLFLFGEEPSKLDQDVLAALECADVDPHQFPAVHRWKSAVLCYSPSDRQSWPSPAVKGRFKSQLPDLSGPHSYSPGRNSVA

SEQ ID NO: 4962 - protein, 941 aa, Homo sapiens
  Payload ID: 1080;
  Gene Symbol: ANKMY1;
  Gene Name: ankyrin repeat and MYND domain containing 1;
  Uniprot ID:  Q9P2S6;
  ENSP ID: ENSP00000272972
MYQGEFGLNMKLGYGKFSWPTGESYHGQFYRDHCHGLGTYMWPDGSSFTGTFYLSHREGYGTMYMKTRLFQGLYKADQRFGPGVETYPDGSQDVGLWFREQLIKLCTQIPSGFSLLRYPEFSSFITHSPARISLSEEEKTEWGLQEGQDPFFYDYKRFLLNDNLTLPPEMYVYSTNSDHLPMTSSFRKELDARIFLNEIPPFVEDGEPWFIINETPLLVKIQKQTYKFRNKPAHTSWNMGAILEGKRSGFAPCGPKEQLSMEMILKAEEGNHEWICRILKDNFASADVADAKGYTVLAAAATHCHNDIVNLLLDCGADVNKCSDEGLTALSMCFLLHYPAQSFKPNVAERTIPEPQEPPKFPVVPILSSSFMDTNLESLYYEVNVPSQGSYELRPPPAPLLLPRVSGSHEGGHFQDTGQCGGSIDHRSSSLKGDSPLVKGSLGHVESGLEDVLGNTDRGSLCSAETKFESNVCVCDFSIELSQAMLERSAQSHSLLKMASPSPCTSSFDKGTMRRMALSMIERRKRWRTIKLLLRRGADPNLCCVPMQVLFLAVKAGDVDGVRLLLEHGARTDICFPPQLSTLTPLHIAAALPGEEGVQIVELLLHAITDVDAKASDEDDTYKPGKLDLLPSSLKLSNEPGPPQAYYSTDTALPEEGGRTALHMACEREDDNKCARDIVRLLLSHGANPNLLWSGHSPLSLSIASGNELVVKELLTQGADPNLPLTKGLGSALCVACDLTYEHQRNMDSKLALIDRLISHGADILKPVMLRQGEKEAVGTAVDYGYFRFFQDRRIARCPFHTLMPAERETFLARKRLLEYMGLQLRQAVFAKESQWDPTWLYLCKRAELIPSHRMKKKGPSLPRGLDVKEQGQIPFFKFCYQCGRSIGVRLLPCPRCYGILTCSKYCKTKAWTEFHKKDCGDLVAIVTQLEQVSRRREEFQ

SEQ ID NO: 4963 - protein, 717 aa, Homo sapiens
  Payload ID: 1080;
  Gene Symbol: ANKMY1;
  Gene Name: ankyrin repeat and MYND domain containing 1;
  Uniprot ID:  Q9P2S6;
  ENSP ID: ENSP00000355097
MEGAHASLSLEDEVSGAGSRQRPLEGKGGETPAAEEPGSLKNYAVFATRDVSAAPEKEEEEAEGPLRAQDLRESYIQLVQGVQEWQDGCMYQGEFGLNMKLGYGKFSWPTGESYHGQFYRDHCHGLGTYMWPDGSSFTGTFYLSHREGYGTMYMKTRLFQTHCHNDIVNLLLDCGADVNKCSDEGLTALSMCFLLHYPAQSFKPNVAERTIPEPQEPPKFPVVPILSSSFMDTNLESLYYEVNVPSQGSYELRPPPAPLLLPRVSGSHEGGHFQDTGQCGGSIDHRSSSLKGDSPLVKGSLGHVESGLEDVLGNTDRGSLCSAETKFESNVCVCDFSIELSQAMLERSAQSHSLLKMASPSPCTSSFDKGTMRRMALSMIERRKRWRTIKLLLRRGADPNLCCVPMQVLFLAVKAGDVDGVRLLLEHGARTDICFPPQLSTLTPLHIAAALPGEEGVQIVELLLHAITDVDAKASDEDDTYKPGKVVKELLTQGADPNLPLTKGLGSALCVACDLTYEHQRNMDSKLALIDRLISHGADILKPVMLRQGEKEAVGTAVDYGYFRFFQDRRIARCPFHTLMPAERETFLARKRLLEYMGLQLRQAVFAKESQWDPTWLYLCKRAELIPSHRMKKKGPSLPRGLDVKEQGQIPFFKFCYQCGRSIGVRLLPCPRCYGILTCSKYCKTKAWTEFHKKDCGDLVAIVTQLEQVSRRREEFQ

SEQ ID NO: 4964 - protein, 720 aa, Homo sapiens
  Payload ID: 1080;
  Gene Symbol: ANKMY1;
  Gene Name: ankyrin repeat and MYND domain containing 1;
  ENSP ID: ENSP00000362415
MEGAHASLSLEDEVSGAGSRQRPLEGKGGETPAAEEPGSLKNYAVFATRDVSAAPEKEEEEAEGPLRAQDLRESYIQLVQGVQEWQDGCMYQGEFGLNMKLGYGKFSWPTGESYHGQFYRDHCHGLGTYMWPDGSSFTGTFYLSHREGYGTMYMKTRLFQTHCHNDIVNLLLDCGADVNKCSDEGLTALSMCFLLHYPAQSFKPNVAERTIPEPQEPPKFPVVPILSSSFMDTNLESLYYEVNVPSQGSYELRPPPAPLLLPRVSGSHEGGHFQDTGQCGGSIDHRSSSLKGDSPLVKGSLGHVESGLEDVLGNTDRGSLCSAETKFESNVCVCDFSIELSQAMLERSAQSHSLLKMASPSPCTSSFDKGTMRRMALSMIERRKRWRTIKLLLRRGADPNLCCVPMQVLFLAVKAGDVDGVRLLLEHGARTDICFPPQLSTLTPLHIAAALPGEEGVQIVELLLHAITDVDAKASDEDDTYKPGKLDLLPSSLKLSNEPGPPQAYYSTDTALPEEGGRTALHMACEREDDNKIDRLISHGADILKPVMLRQGEKEAVGTAVDYGYFRFFQDRRIARCPFHTLMPAERETFLARKRLLEYMGLQLRQAVFAKESQWDPTWLYLCKRAELIPSHRMKKKGPSLPRGLDVKEQGQIPFFKFCYQCGRSIGVRLLPCPRCYGILTCSKYCKTKAWTEFHKKDCGDLVAIVTQLEQVSRRREEFQ

SEQ ID NO: 4965 - protein, 246 aa, Homo sapiens
  Payload ID: 1080;
  Gene Symbol: ANKMY1;
  Gene Name: ankyrin repeat and MYND domain containing 1;
  ENSP ID: ENSP00000375847
MYQGEFGLNMKLGYGKFSWPTGESYHGQFYRDHCHGLGTYMWPDGSSFTGTFYLSHREGYGTMYMKTRLFQGLYKADQRFGPGVETYPDGSQDVGLWFREQLIKLCTQIPSGFSLLRYPEFSSFITHSPARISLSEEEKTEWGLQEGQDPFFYDYKRFLLNDNLTLPPEMYVYSTNSDHLPMTSSFRKELDARIFLNEIPPFVEDGEPWFIINETPLLVKIQKQTYKFRLTATTTLSTFSWTVGPT

SEQ ID NO: 4966 - protein, 190 aa, Homo sapiens
  Payload ID: 1080;
  Gene Symbol: ANKMY1;
  Gene Name: ankyrin repeat and MYND domain containing 1;
  ENSP ID: ENSP00000375848
  MOD_RES (1)..(1): Any amino acid
XKRWRTIKLLLRRGADPNLCCVPMQVLFLAVKAGDVDGVRLLLEHGARTDICFPPQLSTLTPLHIAAALPGEEGVQIVELLLHAITDVDAKASDEDDTYKPGKCARDIVRLLLSHGANPNLLWSGHSPLSLSIASGNELVVKELLTQGADPNLPLTKGLGSALCVACDLTYEHQRNMDSKLALIDRLISH

SEQ ID NO: 4967 - protein, 843 aa, Homo sapiens
  Payload ID: 1080;
  Gene Symbol: ANKMY1;
  Gene Name: ankyrin repeat and MYND domain containing 1;
  ENSP ID: ENSP00000383968
MAAHVGSRCASRSSAGSSNTGTRSSATPGARGPGCWRETLTHSVTPARASCSSAPAARALPRKSEGATRTNGGGWKTTDMEGAHASLSLEDEVSGAGSRQRPLEGKGGETPAAEEPGSLKNYAVFATRDVSAAPEKEEEEAEGPLRAQDLRESYIQLVQGVQEWQDGCMYQGEFGLNMKLGYGKFSWPTGESYHGQFYRDHCHGLGTYMWPDGSSFTGTFYLSHREGYGTMYMKTRLFQTHCHNDIVNLLLDCGADVNKCSDEGLTALSMCFLLHYPAQSFKPNVAERTIPEPQEPPKFPVVPILSSSFMDTNLESLYYEVNVPSQGSYELRPPPAPLLLPRVSGSHEGGHFQDTGQCGGSIDHRSSSLKGDSPLVKGSLGHVESGLEDVLGNTDRGSLCSAETKFESNVCVCDFSIELSQAMLERSAQSHSLLKMASPSPCTSSFDKGTMRRMALSMIERRKRWRTIKLLLRRGADPNLCCVPMQVLFLAVKAGDVDGVRLLLEHGARTDICFPPQLSTLTPLHIAAALPGEEGVQIVELLLHAITDVDAKASDEDDTYKPGKLDLLPSSLKLSNEPGPPQAYYSTDTALPEEGGRTALHMACEREDDNKVVKELLTQGADPNLPLTKGLGSALCVACDLTYEHQRNMDSKLALIDRLISHGADILKPVMLRQGEKEAVGTAVDYGYFRFFQDRRIARCPFHTLMPAERETFLARKRLLEYMGLQLRQAVFAKESQWDPTWLYLCKRAELIPSHRMKKKGPSLPRGLDVKEQGQIPFFKFCYQCGRSIGVRLLPCPRCYGILTCSKYCKTKAWTEFHKKDCGDLVAIVTQLEQVSRRREEFQ

SEQ ID NO: 4968 - protein, 702 aa, Homo sapiens
  Payload ID: 1080;
  Gene Symbol: ANKMY1;
  Gene Name: ankyrin repeat and MYND domain containing 1;
  ENSP ID: ENSP00000384555
MEGAHASLSLEDEVSGAGSRQRPLEGKGGETPAAEEPGSLKNYAVFATRDVSAAPEKEEEEAEGPLRAQDLRESYIQLVQGVQEWQDGCMYQGEFGLNMKLGYGKFSWPTGESYHGQFYRDHCHGLGTYMWPDGSSFTGTFYLSHREGYGTMYMKTRLFQTHCHNDIVNLLLDCGADVNKCSDEGLTALSMCFLLHYPAQSFKPNVAERTIPEPQEPPKFPVVPILSSSFMDTNLESLYYELSQAMLERSAQSHSLLKMASPSPCTSSFDKGTMRRMALSMIERRKRWRTIKLLLRRGADPNLCCVPMQVLFLAVKAGDVDGVRLLLEHGARTDICFPPQLSTLTPLHIAAALPGEEGVQIVELLLHAITDVDAKASDEDDTYKPGKLDLLPSSLKLSNEPGPPQAYYSTDTALPEEGGRTALHMACEREDDNKCARDIVRLLLSHGANPNLLWSGHSPLSLSIASGNELVVKELLTQGADPNLPLTKGLGSALCVACDLTYEHQRNMDSKLALIDRLISHGADILKPVMLRQGEKEAVGTAVDYGYFRFFQDRRIARCPFHTLMPAERETFLARKRLLEYMGLQLRQAVFAKESQWDPTWLYLCKRAELIPSHRMKKKGPSLPRGLDVKEQGQIPFFKFCYQCGRSIGVRLLPCPRCYGILTCSKYCKTKAWTEFHKKDCGDLVAIVTQLEQVSRRREEFQ

SEQ ID NO: 4969 - protein, 292 aa, Homo sapiens
  Payload ID: 1080;
  Gene Symbol: ANKMY1;
  Gene Name: ankyrin repeat and MYND domain containing 1;
  ENSP ID: ENSP00000385145
MYQGEFGLNMKLGYGKFSWPTGESYHGQFYRDHCHGLGTYMWPDGSSFTGTFYLSHREGYGTMYMKTRLFQTHCHNDIVNLLLDCGADVNKCSDEGLTALSMCFLLHYPAQSFKPNVAERTIPEPQEPPKFPVVPILSSSFMDTNLESLYYEVNVPSQGSYELRPPPAPLLLPRVSGSHEGGHFQDTGQCGGSIDHRSSSLKGDSPLVKGSLGHVESGLEDVLGNTDRGSLCSAETKFESNVCVCDFSIELSQAMLERSAQSHSLLKMASPSPCTSSFDKGTMRRMALSMIE

SEQ ID NO: 4970 - protein, 84 aa, Homo sapiens
  Payload ID: 1080;
  Gene Symbol: ANKMY1;
  Gene Name: ankyrin repeat and MYND domain containing 1;
  ENSP ID: ENSP00000385267
  MOD_RES (1)..(1): Any amino acid
XPLPHADASRARDVPGAEAAPGVHGLAATAGCLCQGEPVGPHVAVPVQERIPFFKFCYQCGRSIGVRLLPCPRCYGILTCSKYC

SEQ ID NO: 4971 - protein, 439 aa, Homo sapiens
  Payload ID: 1080;
  Gene Symbol: ANKMY1;
  Gene Name: ankyrin repeat and MYND domain containing 1;
  Uniprot ID:  Q9P2S6;
  ENSP ID: ENSP00000385635
MEGAHASLSLEDEVSGAGSRQRPLEGKGGETPAAEEPGSLKNYAVFATRDVSAAPEKEEEEAEGPLRAQDLRESYIQLVQGVQEWQDGCMYQGEFGLNMKLGYGKFSWPTGESYHGQFYRDHCHGLGTYMWPDGSSFTGTFYLSHREGYGTMYMKTRLFQTHCHNDIVNLLLDCGADVNKCSDEGLTALSMCFLLHYPAQSFKPNVAERTIPEPQEPPKFPVVPILSSSFMDTNLESLYYEVNVPSQGSYELRPPPAPLLLPRVSGSHEGGHFQDTGQCGGSIDHRSSSLKGDSPLVKGSLGHVESGLEDVLGNTDRGSLCSAETKFESNVCVCDFSIELSQAMLERSAQSHSLLKMASPSPCTSSFDKGTMRRMALSMIERRKRWRTIKLLLRRGADPNLCCVPMQVLFLAVKAGDVDGVRLLLEHGARTDICFPPQC

SEQ ID NO: 4972 - protein, 1030 aa, Homo sapiens
  Payload ID: 1080;
  Gene Symbol: ANKMY1;
  Gene Name: ankyrin repeat and MYND domain containing 1;
  ENSP ID: ENSP00000385887
MEGAHASLSLEDEVSGAGSRQRPLEGKGGETPAAEEPGSLKNYAVFATRDVSAAPEKEEEEAEGPLRAQDLRESYIQLVQGVQEWQDGCMYQGEFGLNMKLGYGKFSWPTGESYHGQFYRDHCHGLGTYMWPDGSSFTGTFYLSHREGYGTMYMKTRLFQGLYKADQRFGPGVETYPDGSQDVGLWFREQLIKLCTQIPSGFSLLRYPEFSSFITHSPARISLSEEEKTEWGLQEGQDPFFYDYKRFLLNDNLTLPPEMYVYSTNSDHLPMTSSFRKELDARIFLNEIPPFVEDGEPWFIINETPLLVKIQKQTYKFRNKPAHTSWNMGAILEGKRSGFAPCGPKEQLSMEMILKAEEGNHEWICRILKDNFASADVADAKGYTVLAAAATHCHNDIVNLLLDCGADVNKCSDEGLTALSMCFLLHYPAQSFKPNVAERTIPEPQEPPKFPVVPILSSSFMDTNLESLYYEVNVPSQGSYELRPPPAPLLLPRVSGSHEGGHFQDTGQCGGSIDHRSSSLKGDSPLVKGSLGHVESGLEDVLGNTDRGSLCSAETKFESNVCVCDFSIELSQAMLERSAQSHSLLKMASPSPCTSSFDKGTMRRMALSMIERRKRWRTIKLLLRRGADPNLCCVPMQVLFLAVKAGDVDGVRLLLEHGARTDICFPPQLSTLTPLHIAAALPGEEGVQIVELLLHAITDVDAKASDEDDTYKPGKLDLLPSSLKLSNEPGPPQAYYSTDTALPEEGGRTALHMACEREDDNKCARDIVRLLLSHGANPNLLWSGHSPLSLSIASGNELVVKELLTQGADPNLPLTKGLGSALCVACDLTYEHQRNMDSKLALIDRLISHGADILKPVMLRQGEKEAVGTAVDYGYFRFFQDRRIARCPFHTLMPAERETFLARKRLLEYMGLQLRQAVFAKESQWDPTWLYLCKRAELIPSHRMKKKGPSLPRGLDVKEQGQIPFFKFCYQCGRSIGVRLLPCPRCYGILTCSKYCKTKAWTEFHKKDCGDLVAIVTQLEQVSRRREEFQ

SEQ ID NO: 4973 - protein, 189 aa, Homo sapiens
  Payload ID: 1080;
  Gene Symbol: ANKMY1;
  Gene Name: ankyrin repeat and MYND domain containing 1;
  ENSP ID: ENSP00000404095
  MOD_RES (1)..(1): Any amino acid
XRSRGRVRARRAPTVEGLYKADQRFGPGVETYPDGSQDVGLWFREQLIKLCTQIPSGFSLLRYPEFSSFITHSPARISLSEEEKTEWGLQEGQDPFFYDYKRFLLNDNLTLPPEMYVYSTNSDHLPMTSSFRKELDARIFLNEIPPFVEDGEPWFIINETPLLVKIQKQTYKFRLTATTTLSTFSWTVG

SEQ ID NO: 4974 - protein, 74 aa, Homo sapiens
  Payload ID: 1080;
  Gene Symbol: ANKMY1;
  Gene Name: ankyrin repeat and MYND domain containing 1;
  ENSP ID: ENSP00000404337
MEGAHASLSLEDEVSGAGSRQRPLEGKGGETPAAEEPGSLKNYAVFATRDVSAAPEKEEEEAEGPLRAQDLRES

SEQ ID NO: 4975 - protein, 168 aa, Homo sapiens
  Payload ID: 1080;
  Gene Symbol: ANKMY1;
  Gene Name: ankyrin repeat and MYND domain containing 1;
  ENSP ID: ENSP00000405938
MRDVSAAPEKEEEEAEGPLRAQDLRESYIQLVQGVQEWQDGCMYQGEFGLNMKLGYGKFSWPTGESYHGQFYRDHCHGLGTYMWPDGSSFTGTFYLSHREGYGTMYMKTRLFQTHCHNDIVNLLLDCGADVNKCSDEGLTALSMCFLLHYPAQSFKPNVAERTIPEPQ

SEQ ID NO: 4976 - protein, 227 aa, Homo sapiens
  Payload ID: 1080;
  Gene Symbol: ANKMY1;
  Gene Name: ankyrin repeat and MYND domain containing 1;
  ENSP ID: ENSP00000407015
MYQGEFGLNMKLGYGKFSWPTGESYHGQFYRDHCHGLGTYMWPDGSSFTGTFYLSHREGYGTMYMKTRLFQGLYKADQRFGPGVETYPDGSQDVGLWFREQLIKLCTQIPSGFSLLRYPEFSSFITHSPARISLSEEEKTEWGLQEGQDPFFYDYKRFLLNDNLTLPPEMYVYSTNSDHLPMTSSFRKELDARIFLNEIPPFVEDGEPWFIINETPLLVKIQKQTYK

SEQ ID NO: 4977 - protein, 441 aa, Homo sapiens
  Payload ID: 1081;
  Gene Symbol: ANKMY2;
  Gene Name: ankyrin repeat and MYND domain containing 2;
  Uniprot ID:  Q8IV38;
  ENSP ID: ENSP00000303570
MVHIKKGELTQEEKELLEVIGKGTVQEAGTLLSSKNVRVNCLDENGMTPLMHAAYKGKLDMCKLLLRHGADVNCHQHEHGYTALMFAALSGNKDITWVMLEAGAETDVVNSVGRTAAQMAAFVGQHDCVTIINNFFPRERLDYYTKPQGLDKEPKLPPKLAGPLHKIITTTNLHPVKIVMLVNENPLLTEEAALNKCYRVMDLICEKCMKQRDMNEVLAMKMHYISCIFQKCINFLKDGENKLDTLIKSLLKGRASDGFPVYQEKIIRESIRKFPYCEATLLQQLVRSIAPVEIGSDPTAFSVLTQAITGQVGFVDVEFCTTCGEKGASKRCSVCKMVIYCDQTCQKTHWFTHKKICKNLKDIYEKQQLEAAKEKRQEENHGKLDVNSNCVNEEQPEAEVGISQKDSNPEDSGEGKKESLESEAELEGLQDAPAGPQVSEE

SEQ ID NO: 4978 - protein, 341 aa, Homo sapiens
  Payload ID: 1081;
  Gene Symbol: ANKMY2;
  Gene Name: ankyrin repeat and MYND domain containing 2;
  ENSP ID: ENSP00000392259
MVHIKKGELTQEEKELLEVIGKGTVQEAGTLLSSKNVRVNCLDENGMTPLMHAAYKGKLDMCKLLLRHGADVNCHQHEHGYTALMFAALSGNKDITWVMLEAGAETDVVNSVGRTAAQMAAFVGQHDCVTIINNFFPRERLDYYTKPQGLDKEPKLPPKLAGPLHKIITTTNLHPVKIVMLVNENPLLTEEAALNKCYRVMDLICEKCMKQRDMNEVLAMKMHYISCIFQKCINFLKDGENKLDTLIKSLLKGRASDGFPVYQEKIIRESIRKFPYCEATLLQQLVRSIAPVEIGSDPTAFSVLTQAITGQVGFVDVEFCTTCGEKGASKRCSVCKMCREL

SEQ ID NO: 4979 - protein, 69 aa, Homo sapiens
  Payload ID: 1081;
  Gene Symbol: ANKMY2;
  Gene Name: ankyrin repeat and MYND domain containing 2;
  ENSP ID: ENSP00000410075
MVHIKKGELTQEEKELLEVIGKGVPHFRSAESQRGAPRTSQKPYFPGVPEWTSQRSSLPSPVTWQVTSA

SEQ ID NO: 4980 - protein, 341 aa, Homo sapiens; identical to SEQ ID NO: 4978
  Payload ID: 1081;
  Gene Symbol: ANKMY2;
  Gene Name: ankyrin repeat and MYND domain containing 2;
  ENSP ID: ENSP00000485738

SEQ ID NO: 4981 - protein, 69 aa, Homo sapiens; identical to SEQ ID NO: 4979
  Payload ID: 1081;
  Gene Symbol: ANKMY2;
  Gene Name: ankyrin repeat and MYND domain containing 2;
  ENSP ID: ENSP00000486844

SEQ ID NO: 4982 - protein, 335 aa, Homo sapiens
  Payload ID: 1082;
  Gene Symbol: ASB1;
  Gene Name: ankyrin repeat and SOCS box containing 1;
  Uniprot ID:  Q9Y576;
  ENSP ID: ENSP00000264607
MAEGGSPDGRAGPGSAGRNLKEWLREQFCDHPLEHCEDTRLHDAAYVGDLQTLRSLLQEESYRSRINEKSVWCCGWLPCTPLRIAATAGHGSCVDFLIRKGAEVDLVDVKGQTALYVAVVNGHLESTQILLEAGADPNGSRHHRSTPVYHASRVGRADILKALIRYGADVDVNHHLTPDVQPRFSRRLTSLVVCPLYISAAYHNLQCFRLLLLAGANPDFNCNGPVNTQGFYRGSPGCVMDAVLRHGCEAAFVSLLVEFGANLNLVKWESLGPESRGRRKVDPEALQVFKEARSVPRTLLCLCRVAVRRALGKHRLHLIPSLPLPDPIKKFLLHE

SEQ ID NO: 4983 - protein, 234 aa, Homo sapiens
  Payload ID: 1082;
  Gene Symbol: ASB1;
  Gene Name: ankyrin repeat and SOCS box containing 1;
  ENSP ID: ENSP00000387025
MAEGGSPDGRAGPGSAGRNLKEWLREQFCDHPLEHCEDTRLHDAAYVGDLQTLRSLLQEESYRRYGADVDVNHHLTPDVQPRFSRRLTSLVVCPLYISAAYHNLQCFRLLLLAGANPDFNCNGPVNTQGFYRGSPGCVMDAVLRHGCEAAFVSLLVEFGANLNLVKWESLGPESRGRRKVDPEALQVFKEARSVPRTLLCLCRVAVRRALGKHRLHLIPSLPLPDPIKKFLLHE

SEQ ID NO: 4984 - protein, 61 aa, Homo sapiens
  Payload ID: 1082;
  Gene Symbol: ASB1;
  Gene Name: ankyrin repeat and SOCS box containing 1;
  ENSP ID: ENSP00000411773
MAEGGSPDGRAGPGSAAASTRSLSGAVAGSPAHRCESRPLQAMGAVWTSSSGRGPRWIWWT

SEQ ID NO: 4985 - protein, 429 aa, Homo sapiens
  Payload ID: 1083;
  Gene Symbol: ASB10;
  Gene Name: ankyrin repeat and SOCS box containing 10;
  Uniprot ID:  Q8WXI3;
  ENSP ID: ENSP00000275838
MLMSWSPEECKGQGEPLDDRHPLCARLVEKPSRGSEEHLKSGPGPIVTRTASGPALAFWQAVLAGDVGCVSRILADSSTGLAPDSVFDTSDPERWRDFRFNIRALRLWSLTYEEELTTPLHVAASRGHTEVLRLLLRRRARPDSAPGGRTALHEACAAGHTACVHVLLVAGADPNIADQDGKRPLHLCRGPGTLECAELLLRFGARVDGRSEEEEETPLHVAARLGHVELADLLLRRGACPDARNAEGWTPLLAACDVRCQSITDAEATTARCLQLCSLLLSAGADADAADQDKQRPLHLACRRGHAAVVELLLSCGVSANTMDYGGHTPLHCALQGPAAALAQSPEHVVRALLNHGAVRVWPGALPKKHQRFYSSLFALVRQPRSLQHLSRCALRSHLEGSLPQALPRLPLPPRLLRYLQLDFEGVLY

SEQ ID NO: 4986 - protein, 452 aa, Homo sapiens
  Payload ID: 1083;
  Gene Symbol: ASB10;
  Gene Name: ankyrin repeat and SOCS box containing 10;
  Uniprot ID:  Q8WXI3;
  ENSP ID: ENSP00000367098
MPWGKNSSPHWGHHLGCLPSAPACRIWRPHSRPAWEPPRPSPLLCQDMALQNALYTGDLARLQELFPPHSTADLLLESRAAEPRWSSHQRGLWSLTYEEELTTPLHVAASRGHTEVLRLLLRRRARPDSAPGGRTALHEACAAGHTACVHVLLVAGADPNIADQDGKRPLHLCRGPGTLECAELLLRFGARVDGRSEEEEETPLHVAARLGHVELADLLLRRGACPDARNAEGWTPLLAACDVRCQSITDAEATTARCLQLCSLLLSAGADADAADQDKQRPLHLACRRGHAAVVELLLSCGVSANTMDYGGHTPLHCALQGPAAALAQSPEHVVRALLNHGAVRVWPGALPKVLERWSTCPRTIEVLMNTYSVVQLPEEAVGLVTPETLQKHQRFYSSLFALVRQPRSLQHLSRCALRSHLEGSLPQALPRLPLPPRLLRYLQLDFEGVLY

SEQ ID NO: 4987 - protein, 467 aa, Homo sapiens
  Payload ID: 1083;
  Gene Symbol: ASB10;
  Gene Name: ankyrin repeat and SOCS box containing 10;
  Uniprot ID:  Q8WXI3;
  ENSP ID: ENSP00000391137
MLMSWSPEECKGQGEPLDDRHPLCARLVEKPSRGSEEHLKSGPGPIVTRTASGPALAFWQAVLAGDVGCVSRILADSSTGLAPDSVFDTSDPERWRDFRFNIRALRLWSLTYEEELTTPLHVAASRGHTEVLRLLLRRRARPDSAPGGRTALHEACAAGHTACVHVLLVAGADPNIADQDGKRPLHLCRGPGTLECAELLLRFGARVDGRSEEEEETPLHVAARLGHVELADLLLRRGACPDARNAEGWTPLLAACDVRCQSITDAEATTARCLQLCSLLLSAGADADAADQDKQRPLHLACRRGHAAVVELLLSCGVSANTMDYGGHTPLHCALQGPAAALAQSPEHVVRALLNHGAVRVWPGALPKVLERWSTCPRTIEVLMNTYSVVQLPEEAVGLVTPETLQKHQRFYSSLFALVRQPRSLQHLSRCALRSHLEGSLPQALPRLPLPPRLLRYLQLDFEGVLY

SEQ ID NO: 4988 - protein, 115 aa, Homo sapiens
  Payload ID: 1083;
  Gene Symbol: ASB10;
  Gene Name: ankyrin repeat and SOCS box containing 10;
  ENSP ID: ENSP00000410871
MPWGKNSSPHWGHHLGCLPSAPACRIWRPHSRPAWEPPRPSPLLCQDMALQNALYTGDLARLQELFPPHSTADLLLESRAAEPRWSSHQRGEGHLGVAENQGAGLTASATEVLRA

SEQ ID NO: 4989 - protein, 302 aa, Homo sapiens
  Payload ID: 1084;
  Gene Symbol: ASB11;
  Gene Name: ankyrin repeat and SOCS box containing 11, E3 ubiquitin prt ligase;
  Uniprot ID:  Q8WXH4;
  ENSP ID: ENSP00000343408
MLQLTGENEKNCEVSERIRRSGPWKEISFGDYICHTFQGDCWADRSPLHEAAAQGRLLALKTLIAQGVNVNLVTINRVSSLHEACLGGHVACAKALLENGAHVNGVTVHGATPLFNACCSGSAACVNVLLEFGAKAQLEVHLASPIHEAVKRGHRECMEILLANNVNIDHEVPQLGTPLYVACTYQRVDCVKKLLELGASVDHGQWLDTPLHAAARQSNVEVIHLLTDYGANLKRRNAQGKSALDLAAPKSSVEQALLLREGPPALSQLCRLCVRKCLGRACHQAIHKLHLPEPLERFLLYQ

SEQ ID NO: 4990 - protein, 306 aa, Homo sapiens
  Payload ID: 1084;
  Gene Symbol: ASB11;
  Gene Name: ankyrin repeat and SOCS box containing 11, E3 ubiquitin prt ligase;
  Uniprot ID:  Q8WXH4;
  ENSP ID: ENSP00000369837
MEDGPVFYGFKNIFITMFATFFFFKLLIKVFLALLTHFYIVKGNRKEAARIAEEIYGGISDCWADRSPLHEAAAQGRLLALKTLIAQACLGGHVACAKALLENGAHVNGVTVHGATPLFNACCSGSAACVNVLLEFGAKAQLEVHLASPIHEAVKRGHRECMEILLANNVNIDHEVPQLGTPLYVACTYQRVDCVKKLLELGASVDHGQWLDTPLHAAARQSNVEVIHLLTDYGANLKRRNAQGKSALDLAAPKSSVEQALLLREGPPALSQLCRLCVRKCLGRACHQAIHKLHLPEPLERFLLYQ

SEQ ID NO: 4991 - protein, 323 aa, Homo sapiens
  Payload ID: 1084;
  Gene Symbol: ASB11;
  Gene Name: ankyrin repeat and SOCS box containing 11, E3 ubiquitin prt ligase;
  Uniprot ID:  Q8WXH4;
  ENSP ID: ENSP00000417914
MEDGPVFYGFKNIFITMFATFFFFKLLIKVFLALLTHFYIVKGNRKEAARIAEEIYGGISDCWADRSPLHEAAAQGRLLALKTLIAQGVNVNLVTINRVSSLHEACLGGHVACAKALLENGAHVNGVTVHGATPLFNACCSGSAACVNVLLEFGAKAQLEVHLASPIHEAVKRGHRECMEILLANNVNIDHEVPQLGTPLYVACTYQRVDCVKKLLELGASVDHGQWLDTPLHAAARQSNVEVIHLLTDYGANLKRRNAQGKSALDLAAPKSSVEQALLLREGPPALSQLCRLCVRKCLGRACHQAIHKLHLPEPLERFLLYQ

SEQ ID NO: 4992 - protein, 224 aa, Homo sapiens
  Payload ID: 1084;
  Gene Symbol: ASB11;
  Gene Name: ankyrin repeat and SOCS box containing 11, E3 ubiquitin prt ligase;
  ENSP ID: ENSP00000419385
MEDGPVFYGFKNIFITMFATFFFFKLLIKVFLALLTHFYIVKGNRKEAARIAEEIYGGISDCWADRSPLHEAAAQGRLLALKTLIAQGVNVNLVTINRVSSLHEACLGGHVACAKALLENGAHVNGVTVHGATPLFNACCSGSAACVNVLLEFGAKAQLEVHLASPIHEAVKRESRAVAQAAVQWHDFCSLQPLAPGFKRFSCLSLPSSWDYRSQRVHGDPAGK

SEQ ID NO: 4993 - protein, 318 aa, Homo sapiens
  Payload ID: 1085;
  Gene Symbol: ASB12;
  Gene Name: ankyrin repeat and SOCS box containing 12;
  Uniprot ID:  Q8WXK4;
  ENSP ID: ENSP00000355195
MRIVLQLAKMNLMDITKIFSLLQPDKEEEDTDTEEKQALNQAVYDNDSYTLDQLLRQERYKRFINSRSGWGVPGTPLRLAASYGHLSCLQVLLAHGADVDSLDVKAQTPLFTAVSHGHLDCVRVLLEAGASPGGSIYNNCSPVLTAARDGAVAILQELLDHGAEANVKAKLPVWASNIASCSGPLYLAAVYGHLDCFRLLLLHGADPDYNCTDQGLLARVPRPRTLLEICLHHNCEPEYIQLLIDFGANIYLPSLSLDLTSQDDKGIALLLQARATPRSLLSQVRLVVRRALCQAGQPQAINQLDIPPMLISYLKHQL

SEQ ID NO: 4994 - protein, 278 aa, Homo sapiens
  Payload ID: 1086;
  Gene Symbol: ASB13;
  Gene Name: ankyrin repeat and SOCS box containing 13;
  Uniprot ID:  Q8WXK3;
  ENSP ID: ENSP00000350331
MEPRAADGCFLGDVGFWVERTPVHEAAQRGESLQLQQLIESGACVNQVTVDSITPLHAASLQGQARCVQLLLAAGAQVDARNIDGSTPLCDACASGSIECVKLLLSYGAKVNPPLYTASPLHEACMSGSSECVRLLIDVGANLEAHDCHFGTPLHVACAREHLDCVKVLLNAGANVNAAKLHETALHHAAKVKNVDLIEMLIEFGGNIYARDNRGKKPSDYTWSSSAPAKCFEYYEKTPLTLSQLCRVNLRKATGVRGLEKIAKLNIPPRLIDYLSYN

SEQ ID NO: 4995 - protein, 173 aa, Homo sapiens
  Payload ID: 1086;
  Gene Symbol: ASB13;
  Gene Name: ankyrin repeat and SOCS box containing 13;
  Uniprot ID:  Q8WXK3;
  ENSP ID: ENSP00000433358
MEPRAADGCFLGDVGFWVERTPVHEAAQRGESLQLQQLIESGACVNQVTVDSITPLHAASLQGQARCVQLLLAAGAQVDARNIDGSTPLCDACASGSIECVKLLLSYGAKVNPPLYTASPLHEACMSGSSECVRLLIDVGANLEAHDCHFGTPLHVACAREHLDCVKVLLNAA

SEQ ID NO: 4996 - protein, 587 aa, Homo sapiens
  Payload ID: 1087;
  Gene Symbol: ASB14;
  Gene Name: ankyrin repeat and SOCS box containing 14;
  Uniprot ID:  A6NK59;
  ENSP ID: ENSP00000374252
MDNYTSDEDIDEDFDTQLIIQQSLQDIYKPGTAQHAPKDESLHSFLSADYKKIVETIEKVGKEDALSHLTKYHSAFGEADEIGWIPLHKAAVQLNRKILEITLSASDPSLWEQTTHNGETPLFLAVSSCLLENATFLLLNGCNPNAKNFEGNSPLLAAVLRDCYDMAALLINYGADVNLRCANERTALHEAAKLGREDMVKLMLVSGAHPDPQSTYGFTPLALAAQSGHTEIMEMLLRKGKIFCLASDSSSILLEAASGGNPDAVALLLEYGADANIPKNSGHLPIHVAADRGHLLALKILIPVTDLAAIKQSGISPVHCAAAGAHPQCLELLIQAGFDVNFMLDQRINKHYDDHRKSALYFAVSNSDLSSVKLLLSAGALPNQDPVNCLQIALRMGNYELISLLLRHGANVNYFCRVNPLHFPSALQYTLKDEVMLRMLLNYGYDTERCFDCPHGDKVHPSYTVEGWTSTVIKDTKFCEVITLSWLQHLSGKVVRVMLDYVDQVRICSKLKAVLQKQGIWSEIHFILTNPRSLKHLCRLKIRKCMGRLHLRCPVFMSFLPLPNRLKAYVLYKEYDLYGQGIFTGTW

SEQ ID NO: 4997 - protein, 587 aa, Homo sapiens
  Payload ID: 1087;
  Gene Symbol: ASB14;
  Gene Name: ankyrin repeat and SOCS box containing 14;
  Uniprot ID:  A6NK59;
  ENSP ID: ENSP00000419199
MDNYTSDEDIDEDFDTQLIIQQSLQDIYKPGTAQHAPKDESLHSFLSADYKKIVETIEKGKEDALSHLTKYHSAFGEADEIGWIPLHKAAVQLNRKILEITLSASDPSLWEQTTHNGETPLFLAVSSCLLENATFLLLNGCNPNAKNFEGNSPLLAAVLRDCYDMAALLINYGADVNLRCANERTALHEAAKLGREDMVKLMLVSGAHPDPQSTYGFTPLALAAQSGHTEIMEMLLRKGANAHGQASDSSSILLEAASGGNPDAVALLLEYGADANIPKNSGHLPIHVAADRGHLLALKILIPVTDLAAIKQSGISPVHCAAAGAHPQCLELLIQAGFDVNFMLDQRINKHYDDHRKSALYFAVSNSDLSSVKLLLSAGALPNQDPVNCLQIALRMGNYELISLLLRHGANVNYFCRVNPLHFPSALQYTLKDEVMLRMLLNYGYDTERCFDCPHGDKVHPSYTVEGWTSTVIKDTKFCEVITLSWLQHLSGKVVRVMLDYVDQVRICSKLKAVLQKQGIWSEIHFILTNPRSLKHLCRLKIRKCMGRLHLRCPVFMSFLPLPNRLKAYVLYKEYDLYGQGIFTGTW

SEQ ID NO: 4998 - protein, 588 aa, Homo sapiens
  Payload ID: 1088;
  Gene Symbol: ASB15;
  Gene Name: ankyrin repeat and SOCS box containing 15;
  Uniprot ID:  Q8WXK1;
  ENSP ID: ENSP00000275699
MDTNDDPDEDHLTSYDIQLSIQESIEASKTALCPERFVPLSAQNRKLVEAIKQGHIPELQEYVKYKYAMDEADEKGWFPLHEAVVQPIQQILEIVLDASYKTLWEFKTCDGETPLTLAVKAGLVENVRTLLEKGVWPNTKNDKGETPLLIAVKKGSYDMVSTLIKHNTSLDQPCVKRWSAMHEAAKQGRKDIVALLLKHGGNVHLRDGFGVTPLGVAAEYGHCDVLEHLIHKGGDVLALADDGASVLFEAAGGGNPDCISLLLEYGGSGNVPNRAGHLPIHRAAYEGHYLALKYLIPVTSKNAIRKSGLTPIHSAADGQNAQCLELLIENGFDVNTLLADHISQSYDDERKTALYFGVSNNDVHCTEVLLAAGADPNLDPLNCLLVAVRANNYEIVRLLLSHGANVNCYFMHVNDTRFPSVIQYALNDEVMLRLLLNNGYQVEMCFDCMHGDIFGNSFVWSEIQEEVLPGWTSCVIKDNPFCEFITVPWMKHLVGRVTRVLIDYMDYVPLCAKLKSALEVQREWPEIRQILENPCSLKHLCRLKIRRLMGLQKLCQPASVEKLPLPPAIQRYILFKEYDLYGQELKLT

SEQ ID NO: 4999 - protein, 588 aa, Homo sapiens; identical to SEQ ID NO: 4998
  Payload ID: 1088;
  Gene Symbol: ASB15;
  Gene Name: ankyrin repeat and SOCS box containing 15;
  Uniprot ID:  Q8WXK1;
  ENSP ID: ENSP00000390963

SEQ ID NO: 5000 - protein, 588 aa, Homo sapiens; identical to SEQ ID NO: 4998
  Payload ID: 1088;
  Gene Symbol: ASB15;
  Gene Name: ankyrin repeat and SOCS box containing 15;
  Uniprot ID:  Q8WXK1;
  ENSP ID: ENSP00000397655

SEQ ID NO: 5001 - protein, 241 aa, Homo sapiens
  Payload ID: 1088;
  Gene Symbol: ASB15;
  Gene Name: ankyrin repeat and SOCS box containing 15;
  ENSP ID: ENSP00000401166
MDTNDDPDEDHLTSYDIQLSIQESIEASKTALCPERFVPLSAQNRKLVEAIKQGHIPELQEYVKYKYAMDEADEKGWFPLHEAVVQPIQQILEIVLDASYKTLWEFKTCDGETPLTLAVKAGLVENVRTLLEKGVWPNTKNDKGETPLLIAVKKGSYDMVSTLIKHNTSLDQPCVKRWSAMHEAAKQGRKDIVALLLKHGGNVHLRDGFGVTPLGVAAEYGHCDVLEHLIHKGGDVLALAD

SEQ ID NO: 5002 - protein, 97 aa, Homo sapiens
  Payload ID: 1088;
  Gene Symbol: ASB15;
  Gene Name: ankyrin repeat and SOCS box containing 15;
  ENSP ID: ENSP00000406163
MDTNDDPDEDHLTSYDIQLSIQESIEASKTALCPERFVPLSAQNRKLVEAIKQGHIPELQEYVKYKYAMDEADEKGWFPLHEAVVQPIQQILEIVLD

SEQ ID NO: 5003 - protein, 588 aa, Homo sapiens; identical to SEQ ID NO: 4998
  Payload ID: 1088;
  Gene Symbol: ASB15;
  Gene Name: ankyrin repeat and SOCS box containing 15;
  Uniprot ID:  Q8WXK1;
  ENSP ID: ENSP00000416433

SEQ ID NO: 5004 - protein, 249 aa, Homo sapiens
  Payload ID: 1088;
  Gene Symbol: ASB15;
  Gene Name: ankyrin repeat and SOCS box containing 15;
  ENSP ID: ENSP00000438643
MKQPSKAEYGHCDVLEHLIHKGGDVLALADDGASVLFEAAGGGNPDCISLLLEYGGSGNVPNRAGHLPIHRAAYEGHYLALKYLIPVTSKNAIRKSGLTPIHSAADGQNAQCLELLIENGFDVNTLLADHISQSYDDERKTALYFGVSNNDVHCTEVLLAAGADPNLDPLNCLLVAVRANNYEIVRLLLSHGANVNCYFMHVNDTRFPSVIQYALNDEVMLRLLLNNGYQVEMCFDCMHGDIFGNSFVC

SEQ ID NO: 5005 - protein, 453 aa, Homo sapiens
  Payload ID: 1089;
  Gene Symbol: ASB16;
  Gene Name: ankyrin repeat and SOCS box containing 16;
  Uniprot ID:  Q96NS5;
  ENSP ID: ENSP00000293414
MARETFPFTSSMLRSLRLQQEWLEWEDRRRAAAQQCRSRRCPSSPRARLTRPHRSCRDPAVHQALFSGNLQQVQALFQDEEAANMIVETVSNQLAWSAEQGFWVLTPKTKQTAPLAIATARGYTDCARHLIRQGAELDARVGGRAALHEACARAQFDCVRLLLTFGAKANVLTEEGTTPLHLCTIPESLQCAKLLLEAGATVNLAAGESQETPLHVAAARGLEQHVALYLEHGADVGLRTSQGETALNTACAGAEGPGSCRRHQAAARRLLEAGADARAAGRKRHTPLHNACANGCGGLAELLLRYGARAEVPNGAGHTPMDCALQAVQDSPNWEPEVLFAALLDYGAQPVRPEMLKHCANFPRALEVLLNAYPCVPSCETWVEAVLPELWKEHEAFYSSALCMVNQPRQLQHLARLAVRARLGSRCRQGATRLPLPPLLRDYLLLRVEGCIQ

SEQ ID NO: 5006 - protein, 273 aa, Homo sapiens
  Payload ID: 1089;
  Gene Symbol: ASB16;
  Gene Name: ankyrin repeat and SOCS box containing 16;
  ENSP ID: ENSP00000466033
MARETFPFTSSMLRSLRLQQEWLEWEDRRRAAAQQCRSRRCPSSPRARLTRPHRSCRDPAVHQALFSGNLQQVQALFQDEEAANMIVETVSNQLAWSAEQGFWVLTPKTKQTAPLAIATARGYTDCARHLIRQGAELDARVGGRAALHEACARAQFDCVRLLLTFGAKANVLTEEGTTPLHLCTIPESLQCAKLLLEAGATVNLAAGESQETPLHVAAARGLEQHVALYLEHGADVGLRTSQGETALNTACAGAEGPDAETLRQLPSGPGSPA

SEQ ID NO: 5007 - protein, 71 aa, Homo sapiens
  Payload ID: 1089;
  Gene Symbol: ASB16;
  Gene Name: ankyrin repeat and SOCS box containing 16;
  ENSP ID: ENSP00000466349
MIVETVSNQLAWSAEQGFWVLTPKTKQTAPLAIATARGYTDCARHLIRQGAELDARVGGRAALHEACARAQ

SEQ ID NO: 5008 - protein, 295 aa, Homo sapiens
  Payload ID: 1090;
  Gene Symbol: ASB17;
  Gene Name: ankyrin repeat and SOCS box containing 17;
  Uniprot ID:  Q8WXJ9;
  ENSP ID: ENSP00000284142
MSKSTKLCGKTSCPRSNIFCNLLDKIVKRPSLQFLGQWGYHCYEPRIYRSLAKILRYVDLDGFDALLTDYIAFVEKSGYRFEVSFNLDFTEICVNTILYWVFARKGNPDFVELLLKKTKDYVQDRSCNLALIWRTFTPVYCPSPLSGITPLFYVAQTRQSNIFKILLQYGILEREKNPINIVLTIVLYPSRVRVMVDRELADIHEDAKTCLVLCSRVLSVISVKEIKTQLSLGRHPIISNWFDYIPSTRYKDPCELLHLCRLTIRNQLLTNNMLPDGIFSLLIPARLQNYLNLEI

SEQ ID NO: 5009 - protein, 466 aa, Homo sapiens
  Payload ID: 1091;
  Gene Symbol: ASB18;
  Gene Name: ankyrin repeat and SOCS box containing 18;
  Uniprot ID:  Q6ZVZ8;
  ENSP ID: ENSP00000386532
MSNSDYLPDYPLNSDLVKRLKSALDAKDEERVRDLICTEITPVDAVIELANDDWMKDPSAQLPTGMLLGDLDHLKPLMDQFFQDANVVFEINKDEMEWQVKSPATFGLSGLWTLEYKRELTTPLCIAAAHGHTACVRHLLGRGADPDASPGGRGALHEACLGGHTACVRLLLQHRADPDLLSAEGLAPLHLCRTAASLGCAQALLEHGASVQRVGGTGRDTPLHVAAQRGLDEHARLYLGRGAHVDARNGRGETALSAACGAARRPDEHGRCLRLCALLLRRGAEADARDEDERSPLHKACGHASHSLARLLLRHGADAGALDYGGASPLGRVLQTASCALQASPQRTVQALLNHGSPTVWPDAFPKVLKTCASVPAVIEVLFNSYPQLCLSESWKEVIPEEVFQMHKPFYQSLFALALTPRCLQHLCRCALRRLFGKRCFDLIPLLPLPKPLQNYLLLEPQGVLH

SEQ ID NO: 5010 - protein, 195 aa, Homo sapiens
  Payload ID: 1091;
  Gene Symbol: ASB18;
  Gene Name: ankyrin repeat and SOCS box containing 18;
  ENSP ID: ENSP00000410021
MSNSDYLPDYPLNSDLVKRLKSALDAKDEERVRDLICTEITPVDAVIELANDDWMKDPSAQLPTGMLLGLWTLEYKRELTTPLCIAAAHGHTACVRHLLGRGADPDASPGGRGALHEACLGGHTACVRLLLQHRADPDLLSAEGLAPLHLCRTAASLGCAQALLEHGASVQRVGGTGRDTPLHVAAQRGLDEHAR

SEQ ID NO: 5011 - protein, 148 aa, Homo sapiens
  Payload ID: 1091;
  Gene Symbol: ASB18;
  Gene Name: ankyrin repeat and SOCS box containing 18;
  ENSP ID: ENSP00000411434
ARDEDERSPLHKACGHASHSLARLLLRHGADAGALDYGGASPLGRVLQTASCALQASPQRTVQALLNHGSPTVWPDAFPKVLKTCASVPAVIEVLFNSYPQLCLSESWKEVIPEEVFQARGLPFCPSLVQNFCLFLLLCMGSFALIFG

SEQ ID NO: 5012 - protein, 587 aa, Homo sapiens
  Payload ID: 1092;
  Gene Symbol: ASB2;
  Gene Name: ankyrin repeat and SOCS box containing 2;
  Uniprot ID:  Q96Q27;
  ENSP ID: ENSP00000320675
MTRFSYAEYFSLFHSCSAPSRSTAPPESSPARAPMGLFQGVMQKYSSSLFKTSQLAPADPLIKAIKDGDEEALKTMIKEGKNLAEPNKEGWLPLHEAAYYGQVGCLKVLQRAYPGTIDQRTLQEETAVYLATCRGHLDCLLSLLQAGAEPDISNKSRETPLYKACERKNAEAVKILVQHNADTNHRCNRGWTALHESVSRNDLEVMQILVSGGAKVESKNAYGITPLFVAAQSGQLEALRFLAKYGADINTQASDNASALYEACKNEHEEVVEFLLSQGADANKTNKDGLLPLHIASKKGNYRIVQMLLPVTSRTRIRRSGVSPLHLAAERNHDEVLEALLSARFDVNTPLAPERARLYEDRRSSALYFAVVNNNVYATELLLQHGADPNRDVISPLLVAIRHGCLRTMQLLLDHGANIDAYIATHPTAFPATIMFAMKCLSLLKFLMDLGCDGEPCFSCLYGNGPHPPAPQPSSRFNDAPAADKEPSVVQFCEFVSAPEVSRWAGPIIDVLLDYVGNVQLCSRLKEHIDSFEDWAVIKEKAEPPRPLAHLCRLRVRKAIGKYRIKLLDTLPLPGRLIRYLKYENTQ

SEQ ID NO: 5013 - protein, 481 aa, Homo sapiens
  Payload ID: 1092;
  Gene Symbol: ASB2;
  Gene Name: ankyrin repeat and SOCS box containing 2;
  ENSP ID: ENSP00000450940
MRPADPLIKAIKDGDEEALKTMIKEGKNLAEPNKEGWLPLHEAAYYGQVGCLKVLQRAYPGTIDQRTLQEETAVYLATCRGHLDCLLSLLQAGAEPDISNKSRETPLYKACERKNAEAVKILVQHNADTNHRCNRGWTALHESVSRNDLEVMQILVSGGAKVESKNAYGITPLFVAAQSGQLEALRFLAKYGADINTQASDNASALYEACKNEHEEVVEFLLSQGADANKTNKDGLLPLHIASKKGNYRIVQMLLPVTSRTRIRRSGVSPLHLAAERNHDEVLEALLSARFDVNTPLAPERARLYEDRRSSALYFAVVNNNVYATELLLQHGADPNRDVISPLLVAIRHGCLRTMQLLLDHGANIDAYIATHPTAFPATIMFAMKCLSLLKFLMDLGCDGEPCFSCLYGNGPHPPAPQPSSRFNDAPAADKEPSVVQFCEFVSAPEVSRWAGPIIDVLLDYVGNVQLCSRLKEHIDSFEDW

SEQ ID NO: 5014 - protein, 122 aa, Homo sapiens
  Payload ID: 1092;
  Gene Symbol: ASB2;
  Gene Name: ankyrin repeat and SOCS box containing 2;
  ENSP ID: ENSP00000451355
MATQISTRGSQCTIGQEEYSLYSSLSEDELVQMAIEQSLADKTRGPTTAEATASACTNRQPAHFYPWTRPADPLIKAIKDGDEEALKTMIKEGKNLAEPNKEGWLPLHEAAYYGQVGCLKVL

SEQ ID NO: 5015 - protein, 635 aa, Homo sapiens
  Payload ID: 1092;
  Gene Symbol: ASB2;
  Gene Name: ankyrin repeat and SOCS box containing 2;
  Uniprot ID:  Q96Q27;
  ENSP ID: ENSP00000451575
MATQISTRGSQCTIGQEEYSLYSSLSEDELVQMAIEQSLADKTRGPTTAEATASACTNRQPAHFYPWTRSTAPPESSPARAPMGLFQGVMQKYSSSLFKTSQLAPADPLIKAIKDGDEEALKTMIKEGKNLAEPNKEGWLPLHEAAYYGQVGCLKVLQRAYPGTIDQRTLQEETAVYLATCRGHLDCLLSLLQAGAEPDISNKSRETPLYKACERKNAEAVKILVQHNADTNHRCNRGWTALHESVSRNDLEVMQILVSGGAKVESKNAYGITPLFVAAQSGQLEALRFLAKYGADINTQASDNASALYEACKNEHEEVVEFLLSQGADANKTNKDGLLPLHIASKKGNYRIVQMLLPVTSRTRIRRSGVSPLHLAAERNHDEVLEALLSARFDVNTPLAPERARLYEDRRSSALYFAVVNNNVYATELLLQHGADPNRDVISPLLVAIRHGCLRTMQLLLDHGANIDAYIATHPTAFPATIMFAMKCLSLLKFLMDLGCDGEPCFSCLYGNGPHPPAPQPSSRFNDAPAADKEPSVVQFCEFVSAPEVSRWAGPIIDVLLDYVGNVQLCSRLKEHIDSFEDWAVIKEKAEPPRPLAHLCRLRVRKAIGKYRIKLLDTLPLPGRLIRYLKYENTQ

SEQ ID NO: 5016 - protein, 111 aa, Homo sapiens
  Payload ID: 1092;
  Gene Symbol: ASB2;
  Gene Name: ankyrin repeat and SOCS box containing 2;
  ENSP ID: ENSP00000451654
MGLFQGVMQKYSSSLFKTSQLAPADPLIKAIKDGDEEALKTMIKEGKNLAEPNKEGWLPLHEAAYYGQVGCLKVLQRAYPGTIDQRTLQEETAVYLATCRGHLDCLLSLLQ

SEQ ID NO: 5017 - protein, 135 aa, Homo sapiens
  Payload ID: 1092;
  Gene Symbol: ASB2;
  Gene Name: ankyrin repeat and SOCS box containing 2;
  ENSP ID: ENSP00000451694
MRPADPLIKAIKDGDEEALKTMIKEGKNLAEPNKEGWLPLHEAAYYGQVGCLKVLQRACERKNAEAVKILVQHNADTNHRCNRGWTALHESVSRNDLEVMQILVSGGAKVESKNAYGITPLFVAAQSGQLEALRF

SEQ ID NO: 5018 - protein, 635 aa, Homo sapiens; identical to SEQ ID NO: 5015
  Payload ID: 1092;
  Gene Symbol: ASB2;
  Gene Name: ankyrin repeat and SOCS box containing 2;
  Uniprot ID:  Q96Q27;
  ENSP ID: ENSP00000480388

SEQ ID NO: 5019 - protein, 111 aa, Homo sapiens; identical to SEQ ID NO: 5016
  Payload ID: 1092;
  Gene Symbol: ASB2;
  Gene Name: ankyrin repeat and SOCS box containing 2;
  ENSP ID: ENSP00000486208

SEQ ID NO: 5020 - protein, 481 aa, Homo sapiens; identical to SEQ ID NO: 5013
  Payload ID: 1092;
  Gene Symbol: ASB2;
  Gene Name: ankyrin repeat and SOCS box containing 2;
  ENSP ID: ENSP00000486398

SEQ ID NO: 5021 - protein, 122 aa, Homo sapiens; identical to SEQ ID NO: 5014
  Payload ID: 1092;
  Gene Symbol: ASB2;
  Gene Name: ankyrin repeat and SOCS box containing 2;
  ENSP ID: ENSP00000487105

SEQ ID NO: 5022 - protein, 587 aa, Homo sapiens; identical to SEQ ID NO: 5012
  Payload ID: 1092;
  Gene Symbol: ASB2;
  Gene Name: ankyrin repeat and SOCS box containing 2;
  Uniprot ID:  Q96Q27;
  ENSP ID: ENSP00000487399

SEQ ID NO: 5023 - protein, 135 aa, Homo sapiens; identical to SEQ ID NO: 5017
  Payload ID: 1092;
  Gene Symbol: ASB2;
  Gene Name: ankyrin repeat and SOCS box containing 2;
  ENSP ID: ENSP00000487497

SEQ ID NO: 5024 - protein, 518 aa, Homo sapiens
  Payload ID: 1093;
  Gene Symbol: ASB3;
  Gene Name: ankyrin repeat and SOCS box containing 3;
  Uniprot ID:  Q9Y575;
  ENSP ID: ENSP00000263634
MDFTEAYADTCSTVGLAAREGNVKVLRKLLKKGRSVDVADNRGWMPIHEAAYHNSVECLQMLINADSSENYIKMKTFEGFCALHLAASQGHWKIVQILLEAGADPNATTLEETTPLFLAVENGQIDVLRLLLQHGANVNGSHSMCGWNSLHQASFQENAEIIKLLLRKGANKECQDDFGITPLFVAAQYGKLESLSILISSGANVNCQALDKATPLFIAAQEGHTKCVELLLSSGADPDLYCNEDSWQLPIHAAAQMGHTKILDLLIPLTNRACDTGLNKVSPVYSAVFGGHEDCLEILLRNGYSPDAQACLVFGFSSPVCMAFQKDCEFFGIVNILLKYGAQINELHLAYCLKYEKFSIFRYFLRKGCSLGPWNHIYEFVNHAIKAQAKYKEWLPHLLVAGFDPLILLCNSWIDSVSIDTLIFTLEFTNWKTLAPAVERMLSARASNAWILQQHIATVPSLTHLCRLEIRSSLKSERLRSDSYISQLPLPRSLHNYLLYEDVLRMYEVPELAAIQDG

SEQ ID NO: 5025 - protein, 445 aa, Homo sapiens
  Payload ID: 1093;
  Gene Symbol: ASB3;
  Gene Name: ankyrin repeat and SOCS box containing 3;
  ENSP ID: ENSP00000378206
MKTFEGFCALHLAASQGHWKIVQILLEAGADPNATTLEETTPLFLAVENGQIDVLRLLLQHGANVNGSHSMCGWNSLHQASFQENAEIIKLLLRKGANKECQDDFGITPLFVAAQYGKLESLSILISSGANVNCQALDKATPLFIAAQEGHTKCVELLLSSGADPDLYCNEDSWQLPIHAAAQMGHTKILDLLIPLTNRACDTGLNKVSPVYSAVFGGHEDCLEILLRNGYSPDAQACLVFGFSSPVCMAFQKDCEFFGIVNILLKYGAQINELHLAYCLKYEKFSIFRYFLRKGCSLGPWNHIYEFVNHAIKAQAKYKEWLPHLLVAGFDPLILLCNSWIDSVSIDTLIFTLEFTNWKTLAPAVERMLSARASNAWILQQHIATVPSLTHLCRLEIRSSLKSERLRSDSYISQLPLPRSLHNYLLYEDVLRMYEVPELAAIQDG

SEQ ID NO: 5026 - protein, 445 aa, Homo sapiens; identical to SEQ ID NO: 5025
  Payload ID: 1093;
  Gene Symbol: ASB3;
  Gene Name: ankyrin repeat and SOCS box containing 3;
  ENSP ID: ENSP00000384728

SEQ ID NO: 5027 - protein, 477 aa, Homo sapiens
  Payload ID: 1093;
  Gene Symbol: ASB3;
  Gene Name: ankyrin repeat and SOCS box containing 3;
  ENSP ID: ENSP00000385137
  MOD_RES (1)..(1): Any amino acid
XDTCSTVGLAAREGNVKVLRKLLKKGRSVDVADNRGWMPIHEAAYHNSVECLQMLINADSSENYIKMKTFEGFCALHLAASQGHWKIVQILLEAGADPNATTLEETTPLFLAVENGQIDVLRLLLQHGANVNGSHSMCGWNSLHQASFQENAEIIKLLLRKGANKECQDDFGITPLFVAAQYGKLESLSILISSGANVNCQALDKATPLFIAAQEGHTKCVELLLSSGADPDLYCNEDSWQLPIHAAAQMGHTKILDLLIPLTNRACDTGLNKVSPVYSAVFGGHEDCLEILLRNGYSPDAQACLVFGFSSPVCMAFQKDCEFFGIVNILLKYGAQINELHLAYCLKYEKFSIFRYFLRKGCSLGPWNHIYEFVNHAIKAQAKYKEWLPHLLVAGFDPLILLCNSWIDSVSIDTLIFTLEFTNWKTLAPAVERMLSARASNAWILQQHIEQGFILQKYLGPSNSQVDFLLRGELPIG

SEQ ID NO: 5028 - protein, 426 aa, Homo sapiens
  Payload ID: 1094;
  Gene Symbol: ASB4;
  Gene Name: ankyrin repeat and SOCS box containing 4;
  Uniprot ID:  Q9Y574;
  ENSP ID: ENSP00000321388
MDGTTAPVTKSGAAKLVKRNFLEALKSNDFGKLKAILIQRQIDVDTVFEVEDENMVLASYKQGYWLPSYKLKSSWATGLHLSVLFGHVECLLVLLDHNATINCRPNGKTPLHVACEMANVDCVKILCDRGAKLNCYSLSGHTALHFCTTPSSILCAKQLVWRGANVNMKTNNQDEETPLHTAAHFGLSELVAFYVEHGAIVDSVNAHMETPLAIAAYWALRFKEQEYSTEHHLVCRMLLDYKAEVNARDDDFKSPLHKAAWNCDHVLMHMMLEAGAEANLMDINGCAAIQYVLKVTSVRPAAQPEICYQLLLNHGAARIYPPQFHKVIQACHSCPKAIEVVVNAYEHIRWNTKWRRAIPDDDLEKYWDFYHSLFTVCCNSPRTLMHLSRCAIRRTLHNRCHRAIPLLSLPLSLKKYLLLEPEGIIY

SEQ ID NO: 5029 - protein, 349 aa, Homo sapiens
  Payload ID: 1094;
  Gene Symbol: ASB4;
  Gene Name: ankyrin repeat and SOCS box containing 4;
  Uniprot ID:  Q9Y574;
  ENSP ID: ENSP00000397070
MDGTTAPVTKSGAAKLVKRNFLEALKSNDFGKLKAILIQRQIDVDTVFEVEDENMVLASYKQGYWLPSYKLKSSWATGLHLSVLFGHVECLLVLLDHNATINCRPNGKTPLHVACEMANVDCVKILCDRGAKLNCYSLSGHTALHFCTTPSSILCAKQLVWRGANVNMKTNNQDEETPLHTAAHFGLSELVAFYVEHGAIVDSVNAHMETPLAIAAYWALRFKEQEYSTEHHLVCRMLLDYKAEVNARDDDFKSPLHKAAWNCDHVLMHMMLEAGAEANLMDINGCAAIQYVLKVTSVRPAAQPEICYQLLLNHGAARIYPPQFHKVRLCPVVSRLRKIQMAALSEISK

SEQ ID NO: 5030 - protein, 329 aa, Homo sapiens
  Payload ID: 1095;
  Gene Symbol: ASB5;
  Gene Name: ankyrin repeat and SOCS box containing 5;
  Uniprot ID:  Q8WWX0;
  ENSP ID: ENSP00000296525
MSVLEENRPFAQQLSNVYFTILSLFCFKLFVKISLAILSHFYIVKGNRKEAARIAAEFYGVTQGQGSWADRSPLHEAASQGRLLALRTLLSQGYNVNAVTLDHVTPLHEACLGDHVACARTLLEAGANVNAITIDGVTPLFNACSQGSPSCAELLLEYGAKAQLESCLPSPTHEAASKGHHECLDILISWGIDVDQEIPHLGTPLYVACMSQQFHCIWKLLYAGADVQKGKYWDTPLHAAAQQSSTEIVNLLLEFGADINAKNTELLRPIDVATSSSMVERILLQHEATPSSLYQLCRLCIRSYIGKPRLHLIPQLQLPTLLKNFLQYR

SEQ ID NO: 5031 - protein, 276 aa, Homo sapiens
  Payload ID: 1095;
  Gene Symbol: ASB5;
  Gene Name: ankyrin repeat and SOCS box containing 5;
  Uniprot ID:  Q8WWX0;
  ENSP ID: ENSP00000422877
MPLCNGGNLAVTGSWADRSPLHEAASQGRLLALRTLLSQGYNVNAVTLDHVTPLHEACLGDHVACARTLLEAGANVNAITIDGVTPLFNACSQGSPSCAELLLEYGAKAQLESCLPSPTHEAASKGHHECLDILISWGIDVDQEIPHLGTPLYVACMSQQFHCIWKLLYAGADVQKGKYWDTPLHAAAQQSSTEIVNLLLEFGADINAKNTELLRPIDVATSSSMVERILLQHEATPSSLYQLCRLCIRSYIGKPRLHLIPQLQLPTLLKNFLQYR

SEQ ID NO: 5032 - protein, 20 aa, Homo sapiens
  Payload ID: 1095;
  Gene Symbol: ASB5;
  Gene Name: ankyrin repeat and SOCS box containing 5;
  ENSP ID: ENSP00000423232
MSVLEENRPFAQQLSNVYFT

SEQ ID NO: 5033 - protein, 421 aa, Homo sapiens
  Payload ID: 1096;
  Gene Symbol: ASB6;
  Gene Name: ankyrin repeat and SOCS box containing 6;
  Uniprot ID:  Q9NWX5;
  ENSP ID: ENSP00000277458
MPFLHGFRRIIFEYQPLVDAILGSLGIQDPERQESLDRPSYVASEESRILVLTELLERKAHSPFYQEGVSNALLKMAELGLTRAADVLLRHGANLNFEDPVTYYTALHIAVLRNQPDMVELLVHHGADVNRRDRIHESSPLDLASEEPERLPCLQRLLDLGADVNAADKHGKTALLHALASSDGVQIHNTENIRLLLEGGADVKATTKDGDTVFTCIIFLLGETVGGDKEEAQMINRFCFQVTRLLLAHGADPSECPAHESLTHICLKSFKLHFPLLRFLLESGAAYNCSLHGASCWSGFHIIFERLCSHPGCTEDESHADLLRKAETVLDLMVTNSQKLQLPENFDIHPVGSLAEKIQALHFSLRQLESYPPPLKHLCRVAIRLYLQPWPVDVKVKALPLPDRLKWYLLSEHSGSVEDDI

SEQ ID NO: 5034 - protein, 197 aa, Homo sapiens
  Payload ID: 1096;
  Gene Symbol: ASB6;
  Gene Name: ankyrin repeat and SOCS box containing 6;
  Uniprot ID:  Q9NWX5;
  ENSP ID: ENSP00000277459
MPFLHGFRRIIFEYQPLVDAILGSLGIQDPERQESLDRPSYVASEESRILVLTELLERKAHSPFYQEGVSNALLKMAELGLTRAADVLLRHGANLNFEDPVTYYTALHIAVLRNQPDMVELLVHHGADVNRRDREKLLCSMLWPAATGCRSTILRTFVSYWKEGQTSRPPPKMGTQCSPASSSCLVRPWEGTKRRPR

SEQ ID NO: 5035 - protein, 392 aa, Homo sapiens
  Payload ID: 1096;
  Gene Symbol: ASB6;
  Gene Name: ankyrin repeat and SOCS box containing 6;
  ENSP ID: ENSP00000416172
MPFLHGFRRIIFEYQPLVDAILGSLGIQDPERQESLDRPSYVASEESRILVLTELLERKAHSPFYQEGVSNALLKMAELGLTRAADVLLRHGANLNFEDPVTYYTALHIAVLRNQPDMVELLVHHGADVNRRDRIHESSPLDLASEEPERLPCLQRLLDLGADVNAADKHGADVKATTKDGDTVFTCIIFLLGETVGGDKEEAQMINRFCFQVTRLLLAHGADPSECPAHESLTHICLKSFKLHFPLLRFLLESGAAYNCSLHGASCWSGFHIIFERLCSHPGCTEDESHADLLRKAETVLDLMVTNSQKLQLPENFDIHPVGSLAEKIQALHFSLRQLESYPPPLKHLCRVAIRLYLQPWPVDVKVKALPLPDRLKWYLLSEHSGSVEDDI

SEQ ID NO: 5036 - protein, 318 aa, Homo sapiens
  Payload ID: 1097;
  Gene Symbol: ASB7;
  Gene Name: ankyrin repeat and SOCS box containing 7;
  Uniprot ID:  Q9H672;
  ENSP ID: ENSP00000328327
MLHHHCRRNPELQEELQIQAAVAAGDVHTVRKMLEQGYSPNGRDANGWTLLHFSAARGKERCVRVFLEHGADPTVKDLIGGFTALHYAAMHGRARIARLMLESEYRSDIINAKSNDGWTPLHVAAHYGRDSFVRLLLEFKAEVDPLSDKGTTPLQLAIIRERSSCVKILLDHNANIDIQNGFLLRYAVIKSNHSYCRMFLQRGADTNLGRLEDGQTPLHLSALRDDVLCARMLYNYGADTNTRNYEGQTPLAVSISISGSSRPCLDFLQEVTRQPRNLQDLCRIKIRQCIGLQNLKLLDELPIAKVMKDYLKHKFDDI

SEQ ID NO: 5037 - protein, 274 aa, Homo sapiens
  Payload ID: 1097;
  Gene Symbol: ASB7;
  Gene Name: ankyrin repeat and SOCS box containing 7;
  Uniprot ID:  Q9H672;
  ENSP ID: ENSP00000339819
MLHHHCRRNPELQEELQIQAAVAAGDVHTVRKMLEQGYSPNGRDANGWTLLHFSAARGKERCVRVFLEHGADPTVKDLIGGFTALHYAAMHGRARIARLMLESEYRSDIINAKSNDGWTPLHVAAHYGRDSFVRLLLEFKAEVDPLSDKGTTPLQLAIIRERSSCVKILLDHNANIDIQNGFLLRYAVIKSNHSYCRMFLQRGADTNLGRLEDGQTPLHLSALRDDVLCARMLYNYGADTNTRNYEGQTPLAVSISISGSSRPCLDFLQEVTSM

SEQ ID NO: 5038 - protein, 116 aa, Homo sapiens
  Payload ID: 1097;
  Gene Symbol: ASB7;
  Gene Name: ankyrin repeat and SOCS box containing 7;
  ENSP ID: ENSP00000453626
MLHHHCRRNPELQEELQIQAAVAAGDVHTVRKMLEQGYSPNGRDANGWTLLHFSAARGKERCVRVFLEHGGQPRNLQDLCRIKIRQCIGLQNLKLLDELPIAKVMKDYLKHKFDDI

SEQ ID NO: 5039 - protein, 288 aa, Homo sapiens
  Payload ID: 1098;
  Gene Symbol: ASB8;
  Gene Name: ankyrin repeat and SOCS box containing 8;
  Uniprot ID:  Q9H765;
  ENSP ID: ENSP00000320893
MSSSMWYIMQSIQSKYSLSERLIRTIAAIRSFPHDNVEDLIRGGADVNCTHGTLKPLHCACMVSDADCVELLLEKGAEVNALDGYNRTALHYAAEKDEACVEVLLEYGANPNALDGNRDTPLHWAAFKNNAECVRALLESGASVNALDYNNDTPLSWAAMKGNLESVSILLDYGAEVRVINLIGQTPISRLVALLVRGLGTEKEDSCFELLHRAVGHFELRKNGTMPREVARDPQLCEKLTVLCSAPGTLKTLARYAVRRSLGLQYLPDAVKGLPLPASLKEYLLLLE

SEQ ID NO: 5040 - protein, 86 aa, Homo sapiens
  Payload ID: 1098;
  Gene Symbol: ASB8;
  Gene Name: ankyrin repeat and SOCS box containing 8;
  ENSP ID: ENSP00000437530
MSSSMWYIMQSIQSKYSLSERLIRTIAAIRSFPHDNVEDLIRGGADVNCTHGTLKPLHCACMVSDADCVELLLEKGAEVMFLTHSH

SEQ ID NO: 5041 - protein, 114 aa, Homo sapiens
  Payload ID: 1098;
  Gene Symbol: ASB8;
  Gene Name: ankyrin repeat and SOCS box containing 8;
  ENSP ID: ENSP00000437769
MSSSMWYIMQSIQSKYSLSERLIRTIAAIRSFPHDNVEDLIRGGADVNCTHGTLKPLHCACMVSDADCVELLLEKGAEVNALDGYNRTALHYAAEKDEACVEVLLEYGANPNAL

SEQ ID NO: 5042 - protein, 65 aa, Homo sapiens
  Payload ID: 1098;
  Gene Symbol: ASB8;
  Gene Name: ankyrin repeat and SOCS box containing 8;
  ENSP ID: ENSP00000438434
MSSSMWYIMQSIQSKYSLSERLIRTIAAIRSFPHDNVEDLIRGSMVAIESGLLVQLSCLMIREQM

SEQ ID NO: 5043 - protein, 85 aa, Homo sapiens
  Payload ID: 1098;
  Gene Symbol: ASB8;
  Gene Name: ankyrin repeat and SOCS box containing 8;
  ENSP ID: ENSP00000438498
MSSSMWYIMQSIQSKYSLSERLIRTIAAIRSFPHDNVEDLIRGGADVNCTHGTLKPLHCACMVSDADCVELLLEKGAEDSLGVAC

SEQ ID NO: 5044 - protein, 66 aa, Homo sapiens
  Payload ID: 1098;
  Gene Symbol: ASB8;
  Gene Name: ankyrin repeat and SOCS box containing 8;
  ENSP ID: ENSP00000439557
MSSSMWYIMQSIQSKYSLSERLIRTIAAIRSFPHDNVEDLIRGSMVAIESGLLVQLSCLMIRFPVL

SEQ ID NO: 5045 - protein, 85 aa, Homo sapiens; identical to SEQ ID NO: 5043
  Payload ID: 1098;
  Gene Symbol: ASB8;
  Gene Name: ankyrin repeat and SOCS box containing 8;
  ENSP ID: ENSP00000440773

SEQ ID NO: 5046 - protein, 112 aa, Homo sapiens
  Payload ID: 1098;
  Gene Symbol: ASB8;
  Gene Name: ankyrin repeat and SOCS box containing 8;
  ENSP ID: ENSP00000442639
MSSSMWYIMQSIQSKYSLSERLIRTIAAIRSFPHDNVEDLIRGGADVNCTHGTLKPLHCACMVSDADCVELLLEKGAEVNALDGYNRTALHYAAEKDEACVEVLLEYGANPN

SEQ ID NO: 5047 - protein, 95 aa, Homo sapiens
  Payload ID: 1098;
  Gene Symbol: ASB8;
  Gene Name: ankyrin repeat and SOCS box containing 8;
  ENSP ID: ENSP00000442737
MSSSMWYIMQSIQSKYSLSERLIRTIAAIRSFPHDNVEDLIRGGADVNCTHGTLKPLHCACMVSDADCVELLLEKGAELLSYLHLYHQDSLGVAC

SEQ ID NO: 5048 - protein, 86 aa, Homo sapiens; identical to SEQ ID NO: 5040
  Payload ID: 1098;
  Gene Symbol: ASB8;
  Gene Name: ankyrin repeat and SOCS box containing 8;
  ENSP ID: ENSP00000443148

SEQ ID NO: 5049 - protein, 66 aa, Homo sapiens; identical to SEQ ID NO: 5044
  Payload ID: 1098;
  Gene Symbol: ASB8;
  Gene Name: ankyrin repeat and SOCS box containing 8;
  ENSP ID: ENSP00000443835

SEQ ID NO: 5050 - protein, 127 aa, Homo sapiens
  Payload ID: 1098;
  Gene Symbol: ASB8;
  Gene Name: ankyrin repeat and SOCS box containing 8;
  ENSP ID: ENSP00000444093
MSSSMWYIMQSIQSKYSLSERLIRTIAAIRSFPHDNVEDLIRGGADVNCTHGTLKPLHCACMVSDADCVELLLEKGAEVNALDGYNRTALHYAAEKDEACVEVLLEYGANPNALDGNRDTPLHWAAF

SEQ ID NO: 5051 - protein, 85 aa, Homo sapiens; identical to SEQ ID NO: 5043
  Payload ID: 1098;
  Gene Symbol: ASB8;
  Gene Name: ankyrin repeat and SOCS box containing 8;
  ENSP ID: ENSP00000445540

SEQ ID NO: 5052 - protein, 288 aa, Homo sapiens; identical to SEQ ID NO: 5039
  Payload ID: 1098;
  Gene Symbol: ASB8;
  Gene Name: ankyrin repeat and SOCS box containing 8;
  Uniprot ID:  Q9H765;
  ENSP ID: ENSP00000445622

SEQ ID NO: 5053 - protein, 51 aa, Homo sapiens
  Payload ID: 1098;
  Gene Symbol: ASB8;
  Gene Name: ankyrin repeat and SOCS box containing 8;
  ENSP ID: ENSP00000447819
MSSSMWYIMQSIQSKYSLSERLIRTIAAIRSFPHDNVEDLIRGGADVNCTH

SEQ ID NO: 5054 - protein, 66 aa, Homo sapiens; identical to SEQ ID NO: 5044
  Payload ID: 1098;
  Gene Symbol: ASB8;
  Gene Name: ankyrin repeat and SOCS box containing 8;
  ENSP ID: ENSP00000486138

SEQ ID NO: 5055 - protein, 252 aa, Homo sapiens
  Payload ID: 1099;
  Gene Symbol: ASB9;
  Gene Name: ankyrin repeat and SOCS box containing 9;
  Uniprot ID:  Q96DX5;
  ENSP ID: ENSP00000369850
MDGKQGGMDGSKPAGPRDFPGIRLLSNPLMGDAVSDWSPMHEAAIHGHQLSLRNLISQGWAVNIITADHVSPLHEACLGGHLSCVKILLKHGAQVNGVTADWHTPLFNACVSGSWDCVNLLLQHGASVQPESDLASPIHEAARRAYGGNIDHKISHLGTPLYLACENQQRACVKKLLESGADVNQGKGQDSPLHAVARTASEELACLLMDFGADTQAKNAEGKRPVELVPPESPLAQLFLEREGASLPKPKP

SEQ ID NO: 5056 - protein, 262 aa, Homo sapiens
  Payload ID: 1099;
  Gene Symbol: ASB9;
  Gene Name: ankyrin repeat and SOCS box containing 9;
  Uniprot ID:  Q96DX5;
  ENSP ID: ENSP00000369852
MDGKQGGMDGSKPAGPRDFPGIRLLSNPLMGDAVSDWSPMHEAAIHGHQLSLRNLISQGWAVNIITADHVSPLHEACLGGHLSCVKILLKHGAQVNGVTADWHTPLFNACVSGSWDCVNLLLQHGASVQPESDLASPIHEAARRGHVECVNSLIAYGGNIDHKISHLGTPLYLACENQQRACVKKLLESGADVNQGKGQDSPLHAVARTASEELACLLMDFGADTQAKNAEGKRPVELVPPESPLAQLFLEREGASLPKPKP

SEQ ID NO: 5057 - protein, 294 aa, Homo sapiens
  Payload ID: 1099;
  Gene Symbol: ASB9;
  Gene Name: ankyrin repeat and SOCS box containing 9;
  Uniprot ID:  Q96DX5;
  ENSP ID: ENSP00000369855
MDGKQGGMDGSKPAGPRDFPGIRLLSNPLMGDAVSDWSPMHEAAIHGHQLSLRNLISQGWAVNIITADHVSPLHEACLGGHLSCVKILLKHGAQVNGVTADWHTPLFNACVSGSWDCVNLLLQHGASVQPESDLASPIHEAARRGHVECVNSLIAYGGNIDHKISHLGTPLYLACENQQRACVKKLLESGADVNQGKGQDSPLHAVARTASEELACLLMDFGADTQAKNAEGKRPVELVPPESPLAQLFLEREGPPSLMQLCRLRIRKCFGIQQHHKITKLVLPEDLKQFLLHL

SEQ ID NO: 5058 - protein, 262 aa, Homo sapiens; identical to SEQ ID NO: 5056
  Payload ID: 1099;
  Gene Symbol: ASB9;
  Gene Name: ankyrin repeat and SOCS box containing 9;
  Uniprot ID:  Q96DX5;
  ENSP ID: ENSP00000438943

SEQ ID NO: 5059 - protein, 211 aa, Homo sapiens
  Payload ID: 1099;
  Gene Symbol: ASB9;
  Gene Name: ankyrin repeat and SOCS box containing 9;
  ENSP ID: ENSP00000473542
  MOD_RES (1)..(1): Any amino acid
XKILLKHGAQVNGVTADWHTPLFNACVSGSWDCVNLLLQHGASVQPESDLASPIHEAARRGHVECVNSLIAYGGNIDHKISHLGTPLYLACENQQRACVKKLLESGADVNQGKGQDSPLHAVARTASEELACLLMDFGADTQAKNAEGKRPVELVPPESPLAQLFLEREDGVTLCRPGWSAVARSRLIATSASRNSDKMCSPGQQSFMLLV

SEQ ID NO: 5060 - protein, 1134 aa, Homo sapiens
  Payload ID: 1100;
  Gene Symbol: ANKS1A;
  Gene Name: ankyrin repeat and sterile alpha motif domain containing 1A;
  Uniprot ID:  Q92625;
  ENSP ID: ENSP00000353518
MGKEQELLEAARTGHLPAVEKLLSGKRLSSGFGGGGGGGSGGGGGGSGGGGGGLGSSSHPLSSLLSMWRGPNVNCVDSTGYTPLHHAALNGHKDVVEVLLRNDALTNVADSKGCYPLHLAAWKGDAQIVRLLIHQGPSHTRVNEQNNDNETALHCAAQYGHTEVVKVLLEELTDPTMRNNKFETPLDLAALYGRLEVVKMLLNAHPNLLSCNTKKHTPLHLAARNGHKAVVQVLLDAGMDSNYQTEMGSALHEAALFGKTDVVQILLAAGTDVNIKDNHGLTALDTVRELPSQKSQQIAALIEDHMTGKRSTKEVDKTPPPQPPLISSMDSISQKSQGDVEKAVTELIIDFDANAEEEGPYEALYNAISCHSLDSMASGRSSDQDSTNKEAEAAGVKPAGVRPRERPPPPAKPPPDEEEEDHIDKKYFPLTASEVLSMRPRIHGSAAREEDEHPYELLLTAETKKVVLVDGKTKDHRRSSSSRSQDSAEGQDGQVPEQFSGLLHGSSPVCEVGQDPFQLLCTAGQSHPDGSPQQGACHKASMQLEETGVHAPGASQPSALDQSKRVGYLTGLPTTNSRSHPETLTHTASPHPGGAEEGDRSGARSRAPPTSKPKAELKLSRSLSKSDSDLLTCSPTEDATMGSRSESLSNCSIGKKRLEKSPSFASEWDEIEKIMSSIGEGIDFSQERQKISGLRTLEQSVGEWLESIGLQQYESKLLLNGFDDVHFLGSNVMEEQDLRDIGISDPQHRRKLLQAARSLPKVKALGYDGNSPPSVPSWLDSLGLQDYVHSFLSSGYSSIDTVKNLWELELVNVLKVQLLGHRKRIIASLADRPYEEPPQKPPRFSQLRCQDLLSQTSSPLSQNDSCTGRSADLLLPPGDTGRRRHDSLHDPAAPSRAERFRIQEEHREAKLTLRPPSLAAPYAPVQSWQHQPEKLIFESCGYEANYLGSMLIKDLRGTESTQDACAKMRKSTEHMKKIPTIILSITYKGVKFIDASNKNVIAEHEIRNISCAAQDPEDLCTFAYITKDLQTSHHYCHVFSTVDVNLTYEIILTLGQAFEVAYQLALQAQKSRATGASAAEMIETKSSKPVPKPRVGVRKSALEPPDMDQDAQSHASVSWVVDPKPDSKRSLSTN

SEQ ID NO: 5061 - protein, 289 aa, Homo sapiens
  Payload ID: 1101;
  Gene Symbol: ANKS1B;
  Gene Name: ankyrin repeat and sterile alpha motif domain containing 1B;
  ENSP ID: ENSP00000331256
MQGDARRRRNENYFDDIPRSKLERQMAQSSVCEIWTNQNAGFPFSAIHQVHNTGDWGEPSITLRPPNEATASTPVQYWQHHPEKLIFQSCDYKAFYLGSMLIKELRGTESTQDACAKMRANCQKSTEQMKKVPTIILSVSYKGVKFIDATNKNIIAEHEIRNISCAAQDPEDLSTFAYITKDLKSNHHYCHVFTAFDVNLAYEIILTLGQAFEVAYQLALQARKGGHSSTLPESFENKPSKPIPKPRVSIRKSVIDPSEQKTLANLPWIVEPGQEAKRGINTKYETTIF

SEQ ID NO: 5062 - protein, 332 aa, Homo sapiens
  Payload ID: 1101;
  Gene Symbol: ANKS1B;
  Gene Name: ankyrin repeat and sterile alpha motif domain containing 1B;
  ENSP ID: ENSP00000331381
SIWRGPNVNCTDSSGYTALHHAALNGHKDIVLKLLQYEASTNVADNKGYFPIHLAAWKGDVEIVKILIHHGPSHSRVNEQNNENETALHCAAQYGHSEVVAVLLEELTDPTIRNSKLETPLDLAALYGRLRVVKMIISAHPNLMSCNTRKHTPLHLAARNGHKAVVQVLLEAGMDVSCQTEKGSALHEAALFGKVDVVRVLLETGIDANIKDSLGRTVLDILKEHPSQKSLQIATLLQEYLEGVGRSTVLEEPVQEDATQETHISSPVESPSQKTKSETVTGELSKLLDEIKLCQEKDYSFEDLCHTISDHYLDNLSKISEEELGKNGSQSV

SEQ ID NO: 5063 - protein, 254 aa, Homo sapiens
  Payload ID: 1101;
  Gene Symbol: ANKS1B;
  Gene Name: ankyrin repeat and sterile alpha motif domain containing 1B;
  Uniprot ID:  Q7Z6G8;
  ENSP ID: ENSP00000345510
MQGDARRRRNENYFDDIPRSKLERQMAQTGDWGEPSITLRPPNEATASTPVQYWQHHPEKLIFQSCDYKAFYLGSMLIKELRGTESTQDACAKMRANCQKSTEQMKKVPTIILSVSYKGVKFIDATNKNIIAEHEIRNISCAAQDPEDLSTFAYITKDLKSNHHYCHVFTAFDVNLAYEIILTLGQAFEVAYQLALQARKGGHSSTLPESFENKPSKPIPKPRVSIRKSVDLLHASHTGQEPSERHTEEALRKF

SEQ ID NO: 5064 - protein, 357 aa, Homo sapiens
  Payload ID: 1101;
  Gene Symbol: ANKS1B;
  Gene Name: ankyrin repeat and sterile alpha motif domain containing 1B;
  Uniprot ID:  Q7Z6G8;
  ENSP ID: ENSP00000447312
MANGFDNVQFMGSNVMEDQDLLEIGILNSGHRQRILQAIQLLPKMRPIGHDGYHPTSVAEWLDSIELGDYTKAFLINGYTSMDLLKKIWEVELINQSSVCEIWTNQNAGFPFSAIHQVHNTGDWGEPSITLRPPNEATASTPVQYWQHHPEKLIFQSCDYKAFYLGSMLIKELRGTESTQDACAKMRANCQKSTEQMKKVPTIILSVSYKGVKFIDATNKNIIAEHEIRNISCAAQDPEDLSTFAYITKDLKSNHHYCHVFTAFDVNLAYEIILTLGQAFEVAYQLALQARKGGHSSTLPESFENKPSKPIPKPRVSIRKSVIDPSEQKTLANLPWIVEPGQEAKRGINTKYETTIF

SEQ ID NO: 5065 - protein, 460 aa, Homo sapiens
  Payload ID: 1101;
  Gene Symbol: ANKS1B;
  Gene Name: ankyrin repeat and sterile alpha motif domain containing 1B;
  Uniprot ID:  Q7Z6G8;
  ENSP ID: ENSP00000447839
MMWQCHLSAQDYRYYPVDGYSLLKRFPLHPLTGPRCPVQTVGQWLESIGLPQYENHLMANGFDNVQFMGSNVMEDQDLLEIGILNSGHRQRILQAIQLLPKMRPIGHDGYHPTSVAEWLDSIELGDYTKAFLINGYTSMDLLKKIWEVELINVLKINLIGHRKRILASLGDRLHDDPPQKPPRSITLREPSGNHTPPQLSPSLSQSTYTTGGSLDVPHIIMQGDARRRRNENYFDDIPRSKLERQMAQTGDWGEPSITLRPPNEATASTPVQYWQHHPEKLIFQSCDYKAFYLGSMLIKELRGTESTQDACAKMRANCQKSTEQMKKVPTIILSVSYKGVKFIDATNKNIIAEHEIRNISCAAQDPEDLSTFAYITKDLKSNHHYCHVFTAFDVNLAYEIILTLGQAFEVAYQLALQARKGGHSSTLPESFENKPSKPIPKPRVSIRKSVPFCFKADRPI

SEQ ID NO: 5066 - protein, 450 aa, Homo sapiens
  Payload ID: 1101;
  Gene Symbol: ANKS1B;
  Gene Name: ankyrin repeat and sterile alpha motif domain containing 1B;
  Uniprot ID:  Q7Z6G8;
  ENSP ID: ENSP00000447999
MMWQCHLSAQDYRYYPVDGYSLLKRFPLHPLTGPRCPVQTVGQWLESIGLPQYENHLMANGFDNVQFMGSNVMEDQDLLEIGILNSGHRQRILQAIQLLPKMRPIGHDGYHPTSVAEWLDSIELGDYTKAFLINGYTSMDLLKKIWEVELINVLKINLIGHRKRILASLGDRLHDDPPQKPPRSITLRSSVCEIWTNQNAGFPFSAIHQVHNTGDWGEPSITLRPPNEATASTPVQYWQHHPEKLIFQSCDYKAFYLGSMLIKELRGTESTQDACAKMRANCQKSTEQMKKVPTIILSVSYKGVKFIDATNKNIIAEHEIRNISCAAQDPEDLSTFAYITKDLKSNHHYCHVFTAFDVNLAYEIILTLGQAFEVAYQLALQARKGGHSSTLPESFENKPSKPIPKPRVSIRKSVQIDPSEQKTLANLPWIVEPGQEAKRGINTKYETTIF

SEQ ID NO: 5067 - protein, 510 aa, Homo sapiens
  Payload ID: 1101;
  Gene Symbol: ANKS1B;
  Gene Name: ankyrin repeat and sterile alpha motif domain containing 1B;
  Uniprot ID:  Q7Z6G8;
  ENSP ID: ENSP00000448203
MMWQCHLSAQDYRYYPVDGYSLLKRFPLHPLTGPRCPVQTVGQWLESIGLPQYENHLMANGFDNVQFMGSNVMEDQDLLEIGILNSGHRQRILQAIQLLPKMRPIGHDGYHPTSVAEWLDSIELGDYTKAFLINGYTSMDLLKKIWEVELINVLKINLIGHRKRILASLGDRLHDDPPQKPPRSITLREPSGNHTPPQLSPSLSQSTYTTGGSLDVPHIIMQGDARRRRNENYFDDIPRSKLERQMAQSSVCEIWTNQNAGFPFSAIHQVHNTGDWGEPSITLRPPNEATASTPVQYWQHHPEKLIFQSCDYKAFYLGSMLIKELRGTESTQDACAKMRANCQKSTEQMKKVPTIILSVSYKGVKFIDATNKNIIAEHEIRNISCAAQDPEDLSTFAYITKDLKSNHHYCHVFTAFDVNLAYEIILTLGQAFEVAYQLALQARKGGHSSTLPESFENKPSKPIPKPRVSIRKSVQIDPSEQKTLANLPWIVEPGQEAKRGINTKYETTIF

SEQ ID NO: 5068 - protein, 426 aa, Homo sapiens
  Payload ID: 1101;
  Gene Symbol: ANKS1B;
  Gene Name: ankyrin repeat and sterile alpha motif domain containing 1B;
  Uniprot ID:  Q7Z6G8;
  ENSP ID: ENSP00000448205
MMWQCHLSAQDYRYYPVDGYSLLKRFPLHPLTGPRCPVQTVGQWLESIGLPQYENHLMANGFDNVQFMGSNVMEDQDLLEIGILNSGHRQRILQAIQLLPKMRPIGHDGYHPTSVAEWLDSIELGDYTKAFLINGYTSMDLLKKIWEVELINVLKINLIGHRKRILASLGDRLHDDPPQKPPRSITLRTGDWGEPSITLRPPNEATASTPVQYWQHHPEKLIFQSCDYKAFYLGSMLIKELRGTESTQDACAKMRANCQKSTEQMKKVPTIILSVSYKGVKFIDATNKNIIAEHEIRNISCAAQDPEDLSTFAYITKDLKSNHHYCHVFTAFDVNLAYEIILTLGQAFEVAYQLALQARKGGHSSTLPESFENKPSKPIPKPRVSIRKSVQIDPSEQKTLANLPWIVEPGQEAKRGINTKYETTIF

SEQ ID NO: 5069 - protein, 764 aa, Homo sapiens
  Payload ID: 1101;
  Gene Symbol: ANKS1B;
  Gene Name: ankyrin repeat and sterile alpha motif domain containing 1B;
  Uniprot ID:  Q7Z6G8;
  ENSP ID: ENSP00000448512
MLAQESYPKKRNYTMEIVPSASLDTFPSENENFLCDLMDTAVTKKPCSLEIARAPSPRTDNASEVAVTTPGTSNHRNSSTGPTPDCSPPSPDTALKNIVKVIRPQPKQRTSIVSSLDFHRMNHNQEYFEINTSTGCTSFTASPPASPPTSSVGTTEVKNEGTNHTDDLSRQDDNDPPKEYDPGQFAGLLHGSSPACESPENPFHLYGKREQCEKGQDEVSLANSPLPFKQSPIENNSEPLVKKIKPKVVSRTIFHKKSNQLENHTIVGTRSTRSGSRNGDQWVMNAGGFVERACTLGRIRSLPKALIDMHLSKSVSKSDSDLIAYPSNEKTSRVNWSESSTAEHSSKGNSERTPSFTSEWEEIDKIMSSIDVGINNELKEMNGPRCPVQTVGQWLESIGLPQYENHLMANGFDNVQFMGSNVMEDQDLLEIGILNSGHRQRILQAIQLLPKMRPIGHDGYHPTSVAEWLDSIELGDYTKAFLINGYTSMDLLKKIWEVELINVLKINLIGHRKRILASLGDRLHDDPPQKPPRSITLRTGDWGEPSITLRPPNEATASTPVQYWQHHPEKLIFQSCDYKAFYLGSMLIKELRGTESTQDACAKMRANCQKSTEQMKKVPTIILSVSYKGVKFIDATNKNIIAEHEIRNISCAAQDPEDLSTFAYITKDLKSNHHYCHVFTAFDVNLAYEIILTLGQAFEVAYQLALQARKGGHSSTLPESFENKPSKPIPKPRVSIRKSVDLLHASHTGQEPSERHTEEALRKF

SEQ ID NO: 5070 - protein, 532 aa, Homo sapiens
  Payload ID: 1101;
  Gene Symbol: ANKS1B;
  Gene Name: ankyrin repeat and sterile alpha motif domain containing 1B;
  ENSP ID: ENSP00000448744
  MOD_RES (1)..(1): Any amino acid
XHLSKSVSKSDSDLIAYPSNEKTSRVNWSESSTAEHSSKGNSERTPSFTSEWEEIDKIMSSIDVGINNELKEMNGETTRPRCPVQTVGQWLESIGLPQYENHLMANGFDNVQFMGSNVMEDQDLLEIGILNSGHRQRILQAIQLLPKMRPIGHDGYHPTSVAEWLDSIELGDYTKAFLINGYTSMDLLKKIWEVELINVLKINLIGHRKRILASLGDRLHDDPPQKPPRSITLREPSGNHTPPQLSPSLSQSTYTTGGSLDVPHIIMQGDARRRRNENYFDDIPRSKLERQMAQTGDWGEPSITLRPPNEATASTPVQYWQHHPEKLIFQSCDYKAFYLGSMLIKELRGTESTQDACAKMRANCQKSTEQMKKVPTIILSVSYKGVKFIDATNKNIIAEHEIRNISCAAQDPEDLSTFAYITKDLKSNHHYCHVFTAFDVNLAYEIILTLGQAFEVAYQLALQARKGGHSSTLPESFENKPSKPIPKPRVSIRKSVQIDPSEQKTLANLPWIVEPGQEAKRGINTKYETTIF

SEQ ID NO: 5071 - protein, 414 aa, Homo sapiens
  Payload ID: 1101;
  Gene Symbol: ANKS1B;
  Gene Name: ankyrin repeat and sterile alpha motif domain containing 1B;
  Uniprot ID:  Q7Z6G8;
  ENSP ID: ENSP00000448993
MMWQCHLSAQDYRYYPVDGYSLLKRFPLHPLTGPRCPVQTVGQWLESIGLPQYENHLMANGFDNVQFMGSNVMEDQDLLEIGILNSGHRQRILQAIQLLPKMRPIGHDGYHPTSVAEWLDSIELGDYTKAFLINGYTSMDLLKKIWEVELINVLKINLIGHRKRILASLGDRLHDDPPQKPPRSITLRTGDWGEPSITLRPPNEATASTPVQYWQHHPEKLIFQSCDYKAFYLGSMLIKELRGTESTQDACAKMRANCQKSTEQMKKVPTIILSVSYKGVKFIDATNKNIIAEHEIRNISCAAQDPEDLSTFAYITKDLKSNHHYCHVFTAFDVNLAYEIILTLGQAFEVAYQLALQARKGGHSSTLPESFENKPSKPIPKPRVSIRKSVDLLHASHTGQEPSERHTEEALRKF

SEQ ID NO: 5072 - protein, 1248 aa, Homo sapiens
  Payload ID: 1101;
  Gene Symbol: ANKS1B;
  Gene Name: ankyrin repeat and sterile alpha motif domain containing 1B;
  Uniprot ID:  Q7Z6G8;
  ENSP ID: ENSP00000449629
MGKDQELLEAARTGNVALVEKLLSGRKGGILGGGSGPLPLSNLLSIWRGPNVNCTDSSGYTALHHAALNGHKDIVLKLLQYEASTNVADNKGYFPIHLAAWKGDVEIVKILIHHGPSHSRVNEQNNENETALHCAAQYGHSEVVAVLLEELTDPTIRNSKLETPLDLAALYGRLRVVKMIISAHPNLMSCNTRKHTPLHLAARNGHKAVVQVLLEAGMDVSCQTEKGSALHEAALFGKVDVVRVLLETGIDANIKDSLGRTVLDILKEHPSQKSLQIATLLQEYLEGVGRSTVLEEPVQEDATQETHISSPVESPSQKTKSETVTGELSKLLDEIKLCQEKDYSFEDLCHTISDHYLDNLSKISEEELGKNGSQSVRTSSTINLSPGEVEEEDDDENTCGPSGLWEALTPCNGCRNLGFPMLAQESYPKKRNYTMEIVPSASLDTFPSENENFLCDLMDTAVTKKPCSLEIARAPSPRTDNASEVAVTTPGTSNHRNSSTGPTPDCSPPSPDTALKNIVKVIRPQPKQRTSIVSSLDFHRMNHNQEYFEINTSTGCTSFTASPPASPPTSSVGTTEVKNEGTNHTDDLSRQDDNDPPKEYDPGQFAGLLHGSSPACESPENPFHLYGKREQCEKGQDEVSLANSPLPFKQSPIENNSEPLVKKIKPKVVSRTIFHKKSNQLENHTIVGTRSTRSGSRNGDQWVMNAGGFVERACTLGRIRSLPKALIDMHLSKSVSKSDSDLIAYPSNEKTSRVNWSESSTAEHSSKGNSERTPSFTSEWEEIDKIMSSIDVGINNELKEMNGETTRPRCPVQTVGQWLESIGLPQYENHLMANGFDNVQFMGSNVMEDQDLLEIGILNSGHRQRILQAIQLLPKMRPIGHDGYHPTSVAEWLDSIELGDYTKAFLINGYTSMDLLKKIWEVELINVLKINLIGHRKRILASLGDRLHDDPPQKPPRSITLREPSGNHTPPQLSPSLSQSTYTTGGSLDVPHIIMQGDARRRRNENYFDDIPRSKLERQMAQTGDWGEPSITLRPPNEATASTPVQYWQHHPEKLIFQSCDYKAFYLGSMLIKELRGTESTQDACAKMRANCQKSTEQMKKVPTIILSVSYKGVKFIDATNKNIIAEHEIRNISCAAQDPEDLSTFAYITKDLKSNHHYCHVFTAFDVNLAYEIILTLGQAFEVAYQLALQARKGGHSSTLPESFENKPSKPIPKPRVSIRKSVDLLHASHTGQEPSERHTEEALRKF

SEQ ID NO: 5073 - protein, 562 aa, Homo sapiens
  Payload ID: 1101;
  Gene Symbol: ANKS1B;
  Gene Name: ankyrin repeat and sterile alpha motif domain containing 1B;
  ENSP ID: ENSP00000449894
MGKDQELLEAARTGNVALVEKLLSGRKGGILGGGSGPLPLSNLLSIWRGPNVNCTDSSGYTALHHAALNGHKDIVLKLLQYEASTNVADNKGYFPIHLAAWKGDVEIVKILIHHGPSHSRVNEQNNENETALHCAAQYGHSEVVAVLLEELTDPTIRNSKLETPLDLAALYGRLRVVKMIISAHPNLMSCNTRKHTPLHLAARNGHKAVVQVLLEAGMDVSCQTEKGSALHEAALFGKVDVVRVLLETEYLEGVGRSTVLEEPVQEDATQETHISSPVESPSQKTKSETVTGELSKLLDEIKLCQEKDYSFEDLCHTISDHYLDNLSKISEEELGKNGSQSVRTSSTINLSPGEVEEEDDDENTCGPSGLWEALTPCNGCRNLGFPMLAQESYPKKRNYTMEIVPSASLDTFPSENENFLCDLMDTAVTKKPCSLEIARAPSPRTDNASEVAVTTPGTSNHRNSSTGPTPDCSPPSPDTALKNIVKVIRPQPKQRTSIVSSLDFHRMNHNQEYFEINTSTGCTSFTASPPASPPTSSVGTTEVKNEGTNHTDDLSRQDDNDP

SEQ ID NO: 5074 - protein, 394 aa, Homo sapiens
  Payload ID: 1101;
  Gene Symbol: ANKS1B;
  Gene Name: ankyrin repeat and sterile alpha motif domain containing 1B;
  Uniprot ID:  Q7Z6G8;
  ENSP ID: ENSP00000450015
MGPRCPVQTVGQWLESIGLPQYENHLMANGFDNVQFMGSNVMEDQDLLEIGILNSGHRQRILQAIQLLPKMRPIGHDGYHPTSVAEWLDSIELGDYTKAFLINGYTSMDLLKKIWEVELINVLKINLIGHRKRILASLGDRLHDDPPQKPPRSITLRTGDWGEPSITLRPPNEATASTPVQYWQHHPEKLIFQSCDYKAFYLGSMLIKELRGTESTQDACAKMRANCQKSTEQMKKVPTIILSVSYKGVKFIDATNKNIIAEHEIRNISCAAQDPEDLSTFAYITKDLKSNHHYCHVFTAFDVNLAYEIILTLGQAFEVAYQLALQARKGGHSSTLPESFENKPSKPIPKPRVSIRKSVIDPSEQKTLANLPWIVEPGQEAKRGINTKYETTIF

SEQ ID NO: 5075 - protein, 52 aa, Homo sapiens
  Payload ID: 1101;
  Gene Symbol: ANKS1B;
  Gene Name: ankyrin repeat and sterile alpha motif domain containing 1B;
  ENSP ID: ENSP00000452523
  MOD_RES (1)..(1): Any amino acid
XSSTLPESFENKPSKPIPKPRVSIRKSVDLLHASHTGQEPSERHTEEALRKF

SEQ ID NO: 5076 - protein, 107 aa, Homo sapiens
  Payload ID: 1101;
  Gene Symbol: ANKS1B;
  Gene Name: ankyrin repeat and sterile alpha motif domain containing 1B;
  ENSP ID: ENSP00000473277
MQGDARRRRNENYFDDIPRSKLERQMAQTGDWGEPSITLRPPNEATASTPVQYWQHHPEKLIFQSCDYKAFYLGSMLIKELRGTESTQDACAKMRLSNFNFRSLQSK

SEQ ID NO: 5077 - protein, 95 aa, Homo sapiens
  Payload ID: 1101;
  Gene Symbol: ANKS1B;
  Gene Name: ankyrin repeat and sterile alpha motif domain containing 1B;
  ENSP ID: ENSP00000473300
MAQQSSVCEIWTNQNAGFPFSAIHQVHNTGDWGEPSITLRPPNEATASTPVQYWQHHPEKLIFQSCDYKAFYLGSMLIKELRGTESTQDACAKMR

SEQ ID NO: 5078 - protein, 96 aa, Homo sapiens
  Payload ID: 1101;
  Gene Symbol: ANKS1B;
  Gene Name: ankyrin repeat and sterile alpha motif domain containing 1B;
  ENSP ID: ENSP00000473331
MQGDARRRRNENYFDDIPRSKLERQMAQTGDWGEPSITLRPPNEATASTPVQYWQHHPEKLIFQSCDYKAFYLGSMLIKELRGTESTQDACAKMRV

SEQ ID NO: 5079 - protein, 39 aa, Homo sapiens
  Payload ID: 1101;
  Gene Symbol: ANKS1B;
  Gene Name: ankyrin repeat and sterile alpha motif domain containing 1B;
  ENSP ID: ENSP00000473434
MQGDARRRRNENYFDDIPRSKLERQMAQTGDWGEPSITL

SEQ ID NO: 5080 - protein, 20 aa, Homo sapiens
  Payload ID: 1101;
  Gene Symbol: ANKS1B;
  Gene Name: ankyrin repeat and sterile alpha motif domain containing 1B;
  ENSP ID: ENSP00000473513
MLIKELRGTESTQDACAKMR

SEQ ID NO: 5081 - protein, 27 aa, Homo sapiens
  Payload ID: 1101;
  Gene Symbol: ANKS1B;
  Gene Name: ankyrin repeat and sterile alpha motif domain containing 1B;
  ENSP ID: ENSP00000473517
MQGDARRRRNENYFDDIPRSKLERQMA

SEQ ID NO: 5082 - protein, 151 aa, Homo sapiens
  Payload ID: 1101;
  Gene Symbol: ANKS1B;
  Gene Name: ankyrin repeat and sterile alpha motif domain containing 1B;
  ENSP ID: ENSP00000473522
MQGDARRRRNENYFDDIPRSKLERQMAQSSVCEIWTNQNAGFPFSAIHQVHNTGDWGEPSITLRPPNEATASTPVQYWQHHPEKLIFQSCDYKAFYLGSMLIKELRGTESTQDACAKMRGKEKSTEQMKKVPTIILSVSYKGVKFIDATNK

SEQ ID NO: 5083 - protein, 64 aa, Homo sapiens
  Payload ID: 1101;
  Gene Symbol: ANKS1B;
  Gene Name: ankyrin repeat and sterile alpha motif domain containing 1B;
  ENSP ID: ENSP00000473673
MQGDARRRRNENYFDDIPRSKLERQMAQSSVCEIWTNQNAGFPFSAIHQVHNTGDWGEPSITLR

SEQ ID NO: 5084 - protein, 656 aa, Homo sapiens
  Payload ID: 1102;
  Gene Symbol: ANKS3;
  Gene Name: ankyrin repeat and sterile alpha motif domain containing 3;
  Uniprot ID:  Q6ZW76;
  ENSP ID: ENSP00000304586
MSELSDEASEPELLNRSLSMWHGLGTQVSGEELDVPLDLHTAASIGQYEVVKECVQRRELDLNKKNGGGWTPLMYASYIGHDTIVHLLLEAGVSVNVPTPEGQTPLMLASSCGNESIAYFLLQQGAELEMKDIQGWTALFHCTSAGHQHMVRFLLDSGANANVREPICGFTPLMEAAAAGHEIIVQYFLNHGVKVDARDHSGATARMLAKQYGHMKIVALMDTYSPSLPKSLYRSPEKYEDLSSSDESCPAPQRQRPCRKKGVSIHEGPRALARITGIGLGGRAPRPRYEQAPPRGYVTFNSSGENPLEEEGLCCRDVTSPINERDVESSSSSSSREEHAFCANLGPVQSSSSSEGLARAQGLSSEASVESNEDSDHACKSSARKQAKSYMKTKNPDSQWPPRAATDREGFLAESSPQTQRAPYSGPQDLAALLEQIGCLKYLQVFEEQDVDLRIFLTLTESDLKEIGITLFGPKRKMTSAIARWHSSARPPGDALELAYADRLEAEMQELAIQLHKRCEEVEATRGQVCQEQELRAVVESCLLEQDRAREDLQARLRETWALARDAALVLDQLRACQAELSSRVRQDQPPGAATLGLAVPPADSKGWQASLQAMSLPELSGALEDRVREMGQALCLVTQSLEKLQVLNGKKWRET

SEQ ID NO: 5085 - protein, 549 aa, Homo sapiens
  Payload ID: 1102;
  Gene Symbol: ANKS3;
  Gene Name: ankyrin repeat and sterile alpha motif domain containing 3;
  ENSP ID: ENSP00000388270
MSELSDEASEPELLNRSLSMWHGLGTQVSGEELDVPLDLHTAASIGQYEVVKECVQREPICGFTPLMEAAAAGHEIIVQYFLNHGVKVDARDHSGATARMLAKQYGHMKIVALMDTYSPSLPKSLYRSPEKYEDLSSSDESCPAPQRQRPCRKKGVSIHEGPRALARITGIGLGGRAPRPRYEQAPPRGYVTFNSSGENPLEEEGLCCRDVTSPINERDVESSSSSSSREEHAFCANLGPVQSSSSSEGLARAQGLSSEASVESNEDSDHACKSSARKQAKSYMKTKNPDSQWPPRAATDREGFLAESSPQTQRAPYSGPQDLAALLEQIGCLKYLQVFEEQDVDLRIFLTLTESDLKEIGITLFGPKRKMTSAIARWHSSARPPGDALELAYADRLEAEMQELAIQLHKRCEEVEATRGQVCQEQELRAVVESCLLEQDRAREDLQARLRETWALARDAALVLDQLRACQAELSSRVRQDQPPGAATLGLAVPPADSKGWQASLQAMSLPELSGALEDRVREMGQALCLVTQSLEKLQVLNGKKWRET

SEQ ID NO: 5086 - protein, 527 aa, Homo sapiens
  Payload ID: 1102;
  Gene Symbol: ANKS3;
  Gene Name: ankyrin repeat and sterile alpha motif domain containing 3;
  ENSP ID: ENSP00000406796
MKDIQGWTALFHCTSAGHQHMVRFLLDSGANANVREPICGFTPLMEAAAAGHEIIVQYFLNHGVKVDARDHSGATARMLAKQYGHMKIVALMDTYSPSLPKSLYRSPEKYEDLSSSDESCPAPQRQRPCRKKGVSIHEGPRALARITGIGLGGRAPRPRYEQAPPRGYVTFNSSGENPLEEEGLCCRDVTSPINERDVESSSSSSSREEHAFCANLGPVQSSSSSEGLARAQGLSSEASVESNEDSDHACKSSARKQAKSYMKTKNPDSQWPPRAATDREGFLAESSPQTQRAPYSGPQDLAALLEQIGCLKYLQVFEEQDVDLRIFLTLTESDLKEIGITLFGPKRKMTSAIARWHSSARPPGDALELAYADRLEAEMQELAIQLHKRCEEVEATRGQVCQEQELRAVVESCLLEQDRAREDLQARLRETWALARDAALVLDQLRACQAELSSRVRQDQPPGAATLGLAVPPADSKGWQASLQAMSLPELSGALEDRVREMGQALCLVTQSLEKLQVLNGKKWRET

SEQ ID NO: 5087 - protein, 61 aa, Homo sapiens
  Payload ID: 1102;
  Gene Symbol: ANKS3;
  Gene Name: ankyrin repeat and sterile alpha motif domain containing 3;
  ENSP ID: ENSP00000465203
MSELSDEASEPELLNRSLSMWHGLGTQVSGEELDVPLDLHTAASIGQYEVVKECVQRKVQS

SEQ ID NO: 5088 - protein, 583 aa, Homo sapiens
  Payload ID: 1102;
  Gene Symbol: ANKS3;
  Gene Name: ankyrin repeat and sterile alpha motif domain containing 3;
  Uniprot ID:  Q6ZW76;
  ENSP ID: ENSP00000465294
MYASYIGHDTIVHLLLEAGVSVNVPTPEGQTPLMLASSCGNESIAYFLLQQGAELEMKDIQGWTALFHCTSAGHQHMVRFLLDSGANANVREPICGFTPLMEAAAAGHEIIVQYFLNHGVKVDARDHSGATARMLAKQYGHMKIVALMDTYSPSLPKSLYRSPEKYEDLSSSDESCPAPQRQRPCRKKGVSIHEGPRALARITGIGLGGRAPRPRYEQAPPRGYVTFNSSGENPLEEEGLCCRDVTSPINERDVESSSSSSSREEHAFCANLGPVQSSSSSEGLARAQGLSSEASVESNEDSDHACKSSARKQAKSYMKTKNPDSQWPPRAATDREGFLAESSPQTQRAPYSGPQDLAALLEQIGCLKYLQVFEEQDVDLRIFLTLTESDLKEIGITLFGPKRKMTSAIARWHSSARPPGDALELAYADRLEAEMQELAIQLHKRCEEVEATRGQVCQEQELRAVVESCLLEQDRAREDLQARLRETWALARDAALVLDQLRACQAELSSRVRQDQPPGAATLGLAVPPADSKGWQASLQAMSLPELSGALEDRVREMGQALCLVTQSLEKLQVLNGKKWRET

SEQ ID NO: 5089 - protein, 214 aa, Homo sapiens
  Payload ID: 1102;
  Gene Symbol: ANKS3;
  Gene Name: ankyrin repeat and sterile alpha motif domain containing 3;
  ENSP ID: ENSP00000465306
MSELSDEASEPELLNRSLSMWHGLGTQVSGEELDVPLDLHTAASIGQYEVVKECVQREPICGFTPLMEAAAAGHEIIVQYFLNHGVKVDARDHSGATARMLAKQYGHMKIVALMDTYSPSLPKSLYRSPEKYEDLSSSDESCPAPQRQRPCRKKGVSIHEGPRALARITGIGLGGRAPRPRYGSSPWLCHLQQQWREPPGRRGPLLPGCHLPHQ

SEQ ID NO: 5090 - protein, 126 aa, Homo sapiens
  Payload ID: 1102;
  Gene Symbol: ANKS3;
  Gene Name: ankyrin repeat and sterile alpha motif domain containing 3;
  ENSP ID: ENSP00000465361
MSELSDEASEPELLNRSLSMWHGLGTQVSGEELDVPLDLHTAASIGQYEVVKECVQRRELDLNKKNGGGWTPLMYASYIGHDTIVHLLLEAGVSVNVPTPEGQTPLMLASSCGNESIAYFLLQVQS

SEQ ID NO: 5091 - protein, 172 aa, Homo sapiens
  Payload ID: 1102;
  Gene Symbol: ANKS3;
  Gene Name: ankyrin repeat and sterile alpha motif domain containing 3;
  ENSP ID: ENSP00000465373
MLAKQYGHMKIVALMDTYSPSLPKSLYRSPEKYEDLSSSDESCPAPQRQRPCRKKGVSIHEGPRALARITGIGLGGRAPRPRYEQAPPRGYVTFNSSGENPLEEEGLCCRDVTSPINERDVESSSSSSSREEHAFCANLGPVQSSSSSEGLARAQGLSSEASVESNEDSDHA

SEQ ID NO: 5092 - protein, 61 aa, Homo sapiens; identical to SEQ ID NO: 5087
  Payload ID: 1102;
  Gene Symbol: ANKS3;
  Gene Name: ankyrin repeat and sterile alpha motif domain containing 3;
  ENSP ID: ENSP00000465454

SEQ ID NO: 5093 - protein, 163 aa, Homo sapiens
  Payload ID: 1102;
  Gene Symbol: ANKS3;
  Gene Name: ankyrin repeat and sterile alpha motif domain containing 3;
  ENSP ID: ENSP00000465566
MSELSDEASEPELLNRSLSMWHGLGTQVSGEELDVPLDLHTAASIGQYEVVKECVQRRELDLNKKNGGGWTPLMYASYIGHDTIVHLLLEAGVSVNVPTPEGQTPLMLASSCGNESIAYFLLQQGAELEMKDIQGWTALFHCTSAGHQHMVRFLLDSGANANV

SEQ ID NO: 5094 - protein, 80 aa, Homo sapiens
  Payload ID: 1102;
  Gene Symbol: ANKS3;
  Gene Name: ankyrin repeat and sterile alpha motif domain containing 3;
  ENSP ID: ENSP00000466162
MSELSDEASEPELLNRSLSMWHGLGTQVSGEELDVPLDLHTAASIGQYEVVKECVQRESRWTRETTVEPQPGCWPSSTDT

SEQ ID NO: 5095 - protein, 318 aa, Homo sapiens
  Payload ID: 1102;
  Gene Symbol: ANKS3;
  Gene Name: ankyrin repeat and sterile alpha motif domain containing 3;
  ENSP ID: ENSP00000466228
MSELSDEASEPELLNRSLSMWHGLGTQVSGEELDVPLDLHTAASIGQYEVVKECVQREPICGFTPLMEAAAAGHEIIVQYFLNHGVKVDARDHSGATARMLAKQYGHMKIVALMDTYSPSLPKSLYRSPEKYEDLSSSDESCPAPQRQRPCRKKGVSIHEGPRALARITGIGLGGRAPRPRYEQAPPRGYVTFNSSGENPLEEEGLCCRDVTSPINERDVESSSSSSSREEHAFCANLGPVQSSSSSEGLARAQGLSSEASVESNEDSDHACKSSARKQAKSYMKTKNPDSQWPPRAATDREGFLAESSPQTQRAPYS

SEQ ID NO: 5096 - protein, 133 aa, Homo sapiens
  Payload ID: 1102;
  Gene Symbol: ANKS3;
  Gene Name: ankyrin repeat and sterile alpha motif domain containing 3;
  ENSP ID: ENSP00000466362
MSELSDEASEPELLNRSLSMWHGLGTQVSGEELDVPLDLHTAASIGQYEVVKECVQREPICGFTPLMEAAAAGHEIIVQYFLNHGVKVDARDHSGATARMLAKQYGHMKIVALMDTYSPSLPKSLYRSPEKYE

SEQ ID NO: 5097 - protein, 289 aa, Homo sapiens
  Payload ID: 1102;
  Gene Symbol: ANKS3;
  Gene Name: ankyrin repeat and sterile alpha motif domain containing 3;
  ENSP ID: ENSP00000467439
  MOD_RES (1)..(1): Any amino acid
XLTSPALLLRDRGLAGRRVSASTRDREPWPGSQALAWAAEPHGLAMSRLLPVAMSPSTAVARTPWKKRASAAGMSPPPSMSGMWRAAAAAAVGDLAALLEQIGCLKYLQVFEEQDVDLRIFLTLTESDLKEIGITLFGPKRKMTSAIARWHSSARPPGDALELAYADRLEAEMQELAIQLHKRCEEVEATRGQVCQEQELRAVVESCLLEQDRAREDLQARLRETWALARDAALVLDQLRACQAELSSRVRQDQPPGAATLGLAVPPADSKGWQASLQAMSLPELSGAL

SEQ ID NO: 5098 - protein, 61 aa, Homo sapiens; identical to SEQ ID NO: 5087
  Payload ID: 1102;
  Gene Symbol: ANKS3;
  Gene Name: ankyrin repeat and sterile alpha motif domain containing 3;
  ENSP ID: ENSP00000467474

SEQ ID NO: 5099 - protein, 140 aa, Homo sapiens
  Payload ID: 1102;
  Gene Symbol: ANKS3;
  Gene Name: ankyrin repeat and sterile alpha motif domain containing 3;
  ENSP ID: ENSP00000467591
MSELSDEASEPELLNRSLSMWHGLGTQVSGEELDVPLDLHTAASIGQYEVVKECVQRRELDLNKKNGGGWTPLMYASYIGHDTIVHLLLEAGVSVNVPTPEGQTPLMLASSCGNESIAYFLLQGADMWIYSLDGSSCCWP

SEQ ID NO: 5100 - protein, 108 aa, Homo sapiens
  Payload ID: 1102;
  Gene Symbol: ANKS3;
  Gene Name: ankyrin repeat and sterile alpha motif domain containing 3;
  ENSP ID: ENSP00000467783
MLAKQYGHMKIVALMDTYSPSLPKSLYRSPEKYEDLSSSDESCPAPQRQRPCRKKGVSIHEGPRALARITGIGLGGRAPRPRYEQAPPRGYVTFNSSGENPLEEEGLC

SEQ ID NO: 5101 - protein, 255 aa, Homo sapiens
  Payload ID: 1102;
  Gene Symbol: ANKS3;
  Gene Name: ankyrin repeat and sterile alpha motif domain containing 3;
  ENSP ID: ENSP00000468234
MEAAAAGHEIIVQYFLNHGVKVDARDHSGATARMLAKQYGHMKIVALMDTYSPSLPKSLYRSPEKYEDLSSSDESCPAPQRQRPCRKKGVSIHEGPRALARITGIGLGGRAPRPRYEQAPPRGYVTFNSSGENPLEEEGLCCRDVTSPINERDVESSSSSSSREEHAFCANLGPVQSSSSSEGLARAQGLSSEASVESNEDSDHACKSSARKQAKSYMKTKNPDSQWPPRAATDREGFLAESSPQTQRAPYSGPQ

SEQ ID NO: 5102 - protein, 166 aa, Homo sapiens
  Payload ID: 1102;
  Gene Symbol: ANKS3;
  Gene Name: ankyrin repeat and sterile alpha motif domain containing 3;
  ENSP ID: ENSP00000468380
MSELSDEASEPELLNRSLSMWHGLGTQVSGEELDVPLDLHTAASIGQYEVVKECVQRRELDLNKKNGGGWTPLMYASYIGHDTIVHLLLEAGVSVNVPTPEGQTPLMLASSCGNESIAYFLLQQGAELEMKDIQGWTALFHCTSAGHQHMVRFLLDSGANANVREP

SEQ ID NO: 5103 - protein, 114 aa, Homo sapiens
  Payload ID: 1102;
  Gene Symbol: ANKS3;
  Gene Name: ankyrin repeat and sterile alpha motif domain containing 3;
  ENSP ID: ENSP00000468464
MSELSDEASEPELLNRSLSMWHGLGTQVSGEELDVPLDLHTAASIGQYEVVKECVQREPICGFTPLMEAAAAGHEIIVQYFLNHSPSVAQAGVQQLTAISASRVEAILLPQPPE

SEQ ID NO: 5104 - protein, 656 aa, Homo sapiens; identical to SEQ ID NO: 5084
  Payload ID: 1102;
  Gene Symbol: ANKS3;
  Gene Name: ankyrin repeat and sterile alpha motif domain containing 3;
  Uniprot ID:  Q6ZW76;
  ENSP ID: ENSP00000480350

SEQ ID NO: 5105 - protein, 417 aa, Homo sapiens
  Payload ID: 1103;
  Gene Symbol: ANKS4B;
  Gene Name: ankyrin repeat and sterile alpha motif domain containing 4B;
  Uniprot ID:  Q8N8V4;
  ENSP ID: ENSP00000308772
MSTRYHQAASDSYLELLKEATKRDLNLSDEDGMTPTLLAAYHGNLEALEIICSRGGDPDRCDIWGNTPLHFAASNGHAHCVSFLVNFGANIFALDNDLQTPLDAAASREQNECVALLDKAATAQNIMNPKKVTRLKEQAQKNARRQIKECERLQEKHQNKMAHTYSKEESGTLSSSKGTFSRSSPSNASAPGTFGSLSKGIKDTFKIKFKKNKDTAEQVGKEGRSGQRNVMEVFREEEEDSFSGDFKEKLQLSAEEDGSVHHESILNRPGLGSIVFRRNRISSPEDISDSKREFGFKLPSELLQRQGASEADEGAADEEGEENGLKDDLPWDDDEVEWEEDVVDATPLEVFLLSQHLEEFLPIFKREQIDLEALLLCSDEDLQSIQMQLGPRKKVLNAINRRKQVLQQPGQLVDTSL

SEQ ID NO: 5106 - protein, 871 aa, Homo sapiens
  Payload ID: 1104;
  Gene Symbol: ANKS6;
  Gene Name: ankyrin repeat and sterile alpha motif domain containing 6;
  Uniprot ID:  Q68DC2;
  ENSP ID: ENSP00000297837
MGEGGLPPAFQLLLRACDQGDTETARRLLEPGAAEPAERGAEPEAGAEPAGAEVAGPGAAAAGAVGAPVPVDCSDEAGNTALQFAAAGGHEPLVRFLLRRGASVNSRNHYGWSALMQAARFGHVSVAHLLLDHGADVNAQNRLGASVLTVASRGGHLGVVKLLLEAGAFVDHHHPSGEQLGLGGSRDEPLDITALMAAIQHGHEAVVRLLMEWGADPNHAARTVGWSPLMLAALTGRLGVAQQLVEKGANPDHLSVLEKTAFEVALDCKHRDLVDYLDPLTTVRPKTDEEKRRPDIFHALKMGNFQLVKEIADEDPSHVNLVNGDGATPLMLAAVTGQLALVQLLVERHADVDKQDSVHGWTALMQATYHGNKEIVKYLLNQGADVTLRAKNGYTAFDLVMLLNDPDTELVRLLASVCMQVNKDKGRPSHQPPLPHSKVRQPWSIPVLPDDKGGLKSWWNRMSNRFRKLKLMQTLPRGLSSNQPLPFSDEPEPALDSTMRAAPQDKTSRSALPDAAPVTKDNGPGSTRGEKEDTLLTTMLRNGAPLTRLPSDKLKAVIPPFLPPSSFELWSSDRSRTRHNGKADPMKTALPQRASRGHPVGGGGTDTTPVRPVKFPSLPRSPASSANSGNFNHSPHSSGGSSGVGVSRHGGELLNRSGGSIDNVLSQIAAQRKKAAGLLEQKPSHRSSPVGPAPGSSPSELPASPAGGSAPVGKKLETSKRPPSGTSTTSKSTSPTLTPSPSPKGHTAESSVSSSSSHRQSKSSGGSSSGTITDEDELTGILKKLSLEKYQPIFEEQEVDMEAFLTLTDGDLKELGIKTDGSRQQILAAISELNAGKGRERQILQETIHNFHSSFESSASNTRAPGNSPCA

SEQ ID NO: 5107 - protein, 584 aa, Homo sapiens
  Payload ID: 1104;
  Gene Symbol: ANKS6;
  Gene Name: ankyrin repeat and sterile alpha motif domain containing 6;
  ENSP ID: ENSP00000364159
MGNFQLVKEIADEDPSHVNLVNGDGATPLMLAAVTGQLALVQLLVERHADVDKQDSVHGWTALMQATYHGNKEIVKYLLNQGADVTLRAKNGYTAFDLVMLLNDPDTELVRLLASVCMQVNKDKGRPSHQPPLPHSKVRQPWSIPVLPDDKGGLKSWWNRMSNRFRKLKLMQTLPRGLSSNQPLPFSDEPEPALDSTMRAAPQDKTSRSALPDAAPVTKDNGPGSTRGEKEDTLLTTMLRNGAPLTRLPSDKLKAVIPPFLPPSSFELWSSDRSRTRHNGKADPMKTALPQRASRGHPVGGGGTDTTPVRPVKFPSLPRSPASSANSGNFNHSPHSSGGSSGVGVSRHGGELLNRSGGSIDNVLSQIAAQRKKAAGLLEQKPSHRSSPVGPAPGSSPSELPASPAGGSAPVGKKLETSKRPPSGTSTTSKSTSPTLTPSPSPKGHTAESSVSSSSSHRQSKSSGGSSSGTITDEDELTGILKKLSLEKYQPIFEEQEVDMEAFLTLTDGDLKELGIKTDGSRQQILAAISELNAGKGRERQILQETIHNFHSSFESSASNTRAPGNSPSMVGWVRPEETASGKR

SEQ ID NO: 5108 - protein, 341 aa, Homo sapiens
  Payload ID: 1104;
  Gene Symbol: ANKS6;
  Gene Name: ankyrin repeat and sterile alpha motif domain containing 6;
  ENSP ID: ENSP00000398648
  MOD_RES (1)..(1): Any amino acid
XDTLLTTMLRNGAPLTRLPSDKLKAVIPPFLPPSSFELWSSDRSRTRHNGKADPMKTALPQRASRGHPVGGGGTDTTPVRPVKFPSLPRSPASSANSGNFNHSPHSSGGSSGVGVSRHGGELLNRSGGSIDNVLSQIAAQRKKAAGLLEQKPSHRSSPVGPAPGSSPSELPASPAGGSAPVGKQKLETSKRPPSGTSTTSKSTSPTLTPSPSPKGHTAESSVSSSSSHRQSKSSGGSSSGTITDEDELTGILKKLSLEKYQPIFEEQEVDMEAFLTLTDGDLKELGIKTDGSRQQILAAISELNAGKGRERQILQETIHNFHSSFESSASNTRAPGNSPCA

SEQ ID NO: 5109 - protein, 544 aa, Homo sapiens
  Payload ID: 1105;
  Gene Symbol: ANKUB1;
  Gene Name: ankyrin repeat and ubiquitin domain containing 1;
  ENSP ID: ENSP00000387907
MRIFIAFEGSFEPFDVSADETVEVVKLMIKDYFHIPLSEDKQGRRYLELMYAGAALKDSWSLADVGISFCSTLKCFVKEEDKPTLYVFNAVTQDTMPVMESISLLDKTVSDLRTLVTLRCGLPVSVYCLRTPRGLEMYDCNTLKDYQTDIGTTLRLDVWDGWKEFLMGCLLGQKLKVQRYLSKEGPVLKYQKRVALYIAAFCGYIELTEWALKQGARPHEAVGVHPYRAWCHEALHADVSKCPIHAAAEAGQLLILKAFVNYSVLCLECKNAAGQTPLTIVFKHKHKDCVLYLLSKMWSTVSFPKISVPMRIYIKIKQWILRAQSHSLHKSQFCGARVFGAKVGDTVMVDGFTKPKMTSKSWHKAGNSDSQSIVLKLPSLSKQTASSKPVNPLAISQPDTRKQALKFHPLVNASSFSELQKHQQQNQKKITATARKKEKLIKNTYLPQVPLPPVSRVGYSHPSFFYATPSADFLLKSSFSSFLEHSGKTPWENAIYCLAVASAFKEKRWLQQLEIARVLAKKSISNLTTRGGLTACENSLETVL

SEQ ID NO: 5110 - protein, 502 aa, Homo sapiens
  Payload ID: 1105;
  Gene Symbol: ANKUB1;
  Gene Name: ankyrin repeat and ubiquitin domain containing 1;
  Uniprot ID:  A6NFN9;
  ENSP ID: ENSP00000417635
MRIFIAFEGSFEPFDVSADETVEVVKLMIKDYFHIPLSEDKQGRRYLELMYAGAALKDSWSLADVGISFCSTLKCFVKEEDKPTLYVFNAVTQDTMPVMESISLLDKTVSDLRTLVTLRCGLPVSVYCLRTPRGLEMYDCNTLKDYQTDIGTTLRLDVWDGWKEFLMGCLLGQKLKVQRYLSKEGPVLKYQKRVALYIAAFCGYIELTEWALKQGARPHEAVGVHPYRAWCHEALHADVSKCPIHAAAEAGQLLILKAFVNYSVLCLECKNAAGQTPLTIVFKHKHKDCVLYLLSKMWSTVSFPKISVPMRIYIKIKQWILRAQSHSLHKSQFCGARVFGAKVGDTVMVDGFTKPKMTSKSWHKAGNSDSQSIVLKLPSLSKQTASSKPVNPLAISQPDTRKQALKFHPLVNASSFSELQKHQQQNQKKITATARKKEKLIKNTYLPQVPLPPVSRVGYSHPSFFYATPSADFLLKSSFSSFLEHSGKTPWENAIYCLAVAR

SEQ ID NO: 5111 - protein, 39 aa, Homo sapiens
  Payload ID: 1105;
  Gene Symbol: ANKUB1;
  Gene Name: ankyrin repeat and ubiquitin domain containing 1;
  ENSP ID: ENSP00000420428
MRIFIAFEGSFEPFDVSADETVEVVKLMIKTNKAGGIWS

SEQ ID NO: 5112 - protein, 726 aa, Homo sapiens
  Payload ID: 1106;
  Gene Symbol: ANKZF1;
  Gene Name: ankyrin repeat and zinc finger domain containing 1;
  Uniprot ID:  Q9H8Y5;
  ENSP ID: ENSP00000321617
MSPAPDAAPAPASISLFDLSADAPVFQGLSLVSHAPGEALARAPRTSCSGSGERESPERKLLQGPMDISEKLFCSTCDQTFQNHQEQREHYKLDWHRFNLKQRLKDKPLLSALDFEKQSSTGDLSSISGSEDSDSASEEDLQTLDRERATFEKLSRPPGFYPHRVLFQNAQGQFLYAYRCVLGPHQDPPEEAELLLQNLQSRGPRDCVVLMAAAGHFAGAIFQGREVVTHKTFHRYTVRAKRGTAQGLRDARGGPSHSAGANLRRYNEATLYKDVRDLLAGPSWAKALEEAGTILLRAPRSGRSLFFGGKGAPLQRGDPRLWDIPLATRRPTFQELQRVLHKLTTLHVYEEDPREAVRLHSPQTHWKTVREERKKPTEEEIRKICRDEKEALGQNEESPKQGSGSEGEDGFQVELELVELTVGTLDLCESEVLPKRRRRKRNKKEKSRDQEAGAHRTLLQQTQEEEPSTQSSQAVAAPLGPLLDEAKAPGQPELWNALLAACRAGDVGVLKLQLAPSPADPRVLSLLSAPLGSGGFTLLHAAAAAGRGSVVRLLLEAGADPTVQDSRARPPYTVAADKSTRNEFRRFMEKNPDAYDYNKAQVPGPLTPEMEARQATRKREQKAARRQREEQQQRQQEQEEREREEQRRFAALSDREKRALAAERRLAAQLGAPTSPIPDSAIVNTRRCWSCGASLQGLTPFHYLDFSFCSTRCLQDHRRQAGRPSS

SEQ ID NO: 5113 - protein, 726 aa, Homo sapiens; identical to SEQ ID NO: 5112
  Payload ID: 1106;
  Gene Symbol: ANKZF1;
  Gene Name: ankyrin repeat and zinc finger domain containing 1;
  Uniprot ID:  Q9H8Y5;
  ENSP ID: ENSP00000386337

SEQ ID NO: 5114 - protein, 516 aa, Homo sapiens
  Payload ID: 1106;
  Gene Symbol: ANKZF1;
  Gene Name: ankyrin repeat and zinc finger domain containing 1;
  ENSP ID: ENSP00000386815
MAAAGHFAGAIFQGREVVTHKTFHRYTVRAKRGTAQGLRDARGGPSHSAGANLRRYNEATLYKDVRDLLAGPSWAKALEEAGTILLRAPRSGRSLFFGGKGAPLQRGDPRLWDIPLATRRPTFQELQRVLHKLTTLHVYEEDPREAVRLHSPQTHWKTVREERKKPTEEEIRKICRDEKEALGQNEESPKQGSGSEGEDGFQVELELVELTVGTLDLCESEVLPKRRRRKRNKKEKSRDQEAGAHRTLLQQTQEEEPSTQSSQAVAAPLGPLLDEAKAPGQPELWNALLAACRAGDVGVLKLQLAPSPADPRVLSLLSAPLGSGGFTLLHAAAAAGRGSVVRLLLEAGADPTVQDSRARPPYTVAADKSTRNEFRRFMEKNPDAYDYNKAQVPGPLTPEMEARQATRKREQKAARRQREEQQQRQQEQEEREREEQRRFAALSDREKRALAAERRLAAQLGAPTSPIPDSAIVNTRRCWSCGASLQGLTPFHYLDFSFCSTRCLQDHRRQAGRPSS

SEQ ID NO: 5115 - protein, 115 aa, Homo sapiens
  Payload ID: 1106;
  Gene Symbol: ANKZF1;
  Gene Name: ankyrin repeat and zinc finger domain containing 1;
  ENSP ID: ENSP00000394359
MDISEKLFCSTCDQTFQNHQEQREHYKLDWHRFNLKQRLKDKPLLSALDFEKQSSTGDLSSISGSEDSDSASEEDLQTLDRERATFEKLSRPPGFYPHRVLFQNAQGQFLYAYRC

SEQ ID NO: 5116 - protein, 90 aa, Homo sapiens
  Payload ID: 1106;
  Gene Symbol: ANKZF1;
  Gene Name: ankyrin repeat and zinc finger domain containing 1;
  ENSP ID: ENSP00000394652
MSPAPDAAPAPASISLFDLSADAPVFQGLSLVSHAPGEALARAPRTSCSGSGERESPERKLLQGPMDISEKLFCSTCDQTFQNHQEQREH

SEQ ID NO: 5117 - protein, 140 aa, Homo sapiens
  Payload ID: 1106;
  Gene Symbol: ANKZF1;
  Gene Name: ankyrin repeat and zinc finger domain containing 1;
  ENSP ID: ENSP00000399667
MSPAPDAAPAPASISLFDLSADAPVFQGLSLVSHAPGEALARAPRTSCSGSGERESPERKLLQGPMDISEKLFCSTCDQTFQNHQEQREHYKLDWHRFNLKQRLKDKPLLSALDFEKQSSTGDLSSISGSEDSDSASEED

SEQ ID NO: 5118 - protein, 53 aa, Homo sapiens
  Payload ID: 1106;
  Gene Symbol: ANKZF1;
  Gene Name: ankyrin repeat and zinc finger domain containing 1;
  ENSP ID: ENSP00000404113
MSPAPDAAPAPASISLFDLSADAPVFQGLSLVSHAPGEALARAPRTSCSEGTL

SEQ ID NO: 5119 - protein, 59 aa, Homo sapiens
  Payload ID: 1106;
  Gene Symbol: ANKZF1;
  Gene Name: ankyrin repeat and zinc finger domain containing 1;
  ENSP ID: ENSP00000406514
MSPAPDAAPAPASISLFDLSADAPVFQGLSLAQGREKAQKESYSRVLWIFQRSYFVQLV

SEQ ID NO: 5120 - protein, 319 aa, Homo sapiens
  Payload ID: 1107;
  Gene Symbol: ANKRD1;
  Gene Name: ankyrin repeat domain 1 (cardiac muscle);
  Uniprot ID:  Q15327;
  ENSP ID: ENSP00000360762
MMVLKVEELVTGKKNGNGEAGEFLPEDFRDGEYEAAVTLEKQEDLKTLLAHPVTLGEQQWKSEKQREAELKKKKLEQRSKLENLEDLEIIIQLKKRKKYRKTKVPVVKEPEPEIITEPVDVPTFLKAALENKLPVVEKFLSDKNNPDVCDEYKRTALHRACLEGHLAIVEKLMEAGAQIEFRDMLESTAIHWASRGGNLDVLKLLLNKGAKISARDKLLSTALHVAVRTGHYECAEHLIACEADLNAKDREGDTPLHDAVRLNRYKMIRLLIMYGADLNIKNCAGKTPMDLVLHWQNGTKAIFDSLRENSYKTSRIATF

SEQ ID NO: 5121 - protein, 420 aa, Homo sapiens
  Payload ID: 1108;
  Gene Symbol: ANKRD10;
  Gene Name: ankyrin repeat domain 10;
  Uniprot ID:  Q9NXR5;
  ENSP ID: ENSP00000267339
MSAAGAGAGVEAGFSSEELLSLRFPLHRACRDGDLATLCSLLQQTPHAHLASEDSFYGWTPVHWAAHFGKLECLVQLVRAGATLNVSTTRYAQTPAHIAAFGGHPQCLVWLIQAGANINKPDCEGETPIHKAARSGSLECISALVANGAHVDLRNASGLTAADIAQTQGFQECAQFLLNLQNCHLNHFYNNGILNGGHQNVFPNHISVGTNRKRCLEDSEDFGVKKARTEAQSLDSAVPLTNGDTEDDADKMHVDREFAVVTDMKNSSSVSNTLTNGCVINGHLDFPSTTPLSGMESRNGQCLTGTNGISSGLAPGQPFPSSQGSLCISGTEEPEKTLRANPELCGSLHLNGSPSSCIASRPSWVEDIGDNLYYGHYHGFGDTAESIPELNSVVEHSKSVKVQERYDSAVLGTMHLHHGS

SEQ ID NO: 5122 - protein, 220 aa, Homo sapiens
  Payload ID: 1108;
  Gene Symbol: ANKRD10;
  Gene Name: ankyrin repeat domain 10;
  Uniprot ID:  Q9NXR5;
  ENSP ID: ENSP00000312534
MSAAGAGAGVEAGFSSEELLSLRFPLHRACRDGDLATLCSLLQQTPHAHLASEDSFYGWTPVHWAAHFGKLECLVQLVRAGATLNVSTTRYAQTPAHIAAFGGHPQCLVWLIQAGANINKPDCEGETPIHKAARSGSLECISALVANGAHVEFISQSSVHSCLPGELQHGVTFDPSVLIQCLKPEKCQWPDSSRHCTNPGFPRVCPVSLEPPELSSEPFL

SEQ ID NO: 5123 - protein, 161 aa, Homo sapiens
  Payload ID: 1108;
  Gene Symbol: ANKRD10;
  Gene Name: ankyrin repeat domain 10;
  ENSP ID: ENSP00000431927
MSAAGAGAGVEAGFSSEELLSLRFPLHRACRDGDLATLCSLLQQTPHAHLASEDSFYGWTPVHWAAHFGKLECLVQLVRAGATLNVSTTRYAQTPAHIAAFGGHPQCLVWLIQAGANINKPDCEGETPIHKAARSGSLECISALVANGAHVDNPRKGEHSI

SEQ ID NO: 5124 - protein, 121 aa, Homo sapiens
  Payload ID: 1108;
  Gene Symbol: ANKRD10;
  Gene Name: ankyrin repeat domain 10;
  ENSP ID: ENSP00000474638
  MOD_RES (1)..(1): Any amino acid
XGHQNVFPNHISVGTNRKRCLEDSEDFGVKKARTEAQSLDSAVPLTNGDTEDDADKMHVDREFAVVTGGSGQFPVSCNNNPMVEDTKQQESGSVGPKEIEIYTVSAMQTPCRCRNQYAYYF

SEQ ID NO: 5125 - protein, 2663 aa, Homo sapiens
  Payload ID: 1109;
  Gene Symbol: ANKRD11;
  Gene Name: ankyrin repeat domain 11;
  Uniprot ID:  Q6UB99;
  ENSP ID: ENSP00000301030
MPKGGCPKAPQQEELPLSSDMVEKQTGKKDKDKVSLTKTPKLERGDGGKEVRERASKRKLPFTAGANGEQKDSDTEKQGPERKRIKKEPVTRKAGLLFGMGLSGIRAGYPLSERQQVALLMQMTAEESANSPVDTTPKHPSQSTVCQKGTPNSASKTKDKVNKRNERGETRLHRAAIRGDARRIKELISEGADVNVKDFAGWTALHEACNRGYYDVAKQLLAAGAEVNTKGLDDDTPLHDAANNGHYKVVKLLLRYGGNPQQSNRKGETPLKVANSPTMVNLLLGKGTYTSSEESSTESSEEEDAPSFAPSSSVDGNNTDSEFEKGLKHKAKNPEPQKATAPVKDEYEFDEDDEQDRVPPVDDKHLLKKDYRKETKSNSFISIPKMEVKSYTKNNTIAPKKASHRILSDTSDEEDASVTVGTGEKLRLSAHTILPGSKTREPSNAKQQKEKNKVKKKRKKETKGREVRFGKRSDKFCSSESESESSESGEDDRDSLGSSGCLKGSPLVLKDPSLFSSLSASSTSSHGSSAAQKQNPSHTDQHTKHWRTDNWKTISSPAWSEVSSLSDSTRTRLTSESDYSSEGSSVESLKPVRKRQEHRKRASLSEKKSPFLSSAEGAVPKLDKEGKVVKKHKTKHKHKNKEKGQCSISQELKLKSFTYEYEDSKQKSDKAILLENDLSTENKLKVLKHDRDHFKKEEKLSKMKLEEKEWLFKDEKSLKRIKDTNKDISRSFREEKDRSNKAEKERSLKEKSPKEEKLRLYKEERKKKSKDRPSKLEKKNDLKEDKISKEKEKIFKEDKEKLKKEKVYREDSAFDEYCNKNQFLENEDTKFSLSDDQRDRWFSDLSDSSFDFKGEDSWDSPVTDYRDMKSDSVAKLILETVKEDSKERRRDSRAREKRDYREPFFRKKDRDYLDKNSEKRKEQTEKHKSVPGYLSEKDKKRRESAEAGRDRKDALESCKERRDGRAKPEEAHREELKECGCESGFKDKSDGDFGKGLEPWERHHPAREKEKKDGPDKERKEKTKPERYKEKSSDKDKSEKSILEKCQKDKEFDKCFKEKKDTKEKHKDTHGKDKERKASLDQGKEKKEKAFPGIISEDFSEKKDDKKGKEKSWYIADIFTDESEDDRDSCMGSGFKMGEASDLPRTDGLQEKEEGREAYASDRHRKSSDKQHPERQKDKEPRDRRKDRGAADAGRDKKEKVFEKHKEKKDKESTEKYKDRKDRASVDSTQDKKNKQKLPEKAEKKHAAEDKAKSKHKEKSDKEHSKERKSSRSADAEKSLLEKLEEEALHEYREDSNDKISEVSSDSFTDRGQEPGLTAFLEVSFTEPPGDDKPRESACLPEKLKEKERHRHSSSSSKKSHDRERAKKEKAEKKEKGEDYKEGGSRKDSGQYEKDFLEADAYGVSYNMKADIEDELDKTIELFSTEKKDKNDSEREPSKKIEKELKPYGSSAINILKEKKKREKHREKWRDEKERHRDRHADGLLRHHRDELLRHHRDEQKPATRDKDSPPRVLKDKSRDEGPRLGDAKLKEKFKDGAEKEKGDPVKMSNGNDKVAPSKDPGKKDARPREKLLGDGDLMMTSFERMLSQKDLEIEERHKRHKERMKQMEKLRHRSGDPKLKEKAKPADDGRKKGLDIPAKKPPGLDPPFKDKKLKESTPIPPAAENKLHPASGADSKDWLAGPHMKEVLPASPRPDQSRPTGVPTPTSVLSCPSYEEVMHTPRTPSCSADDYADLVFDCADSQHSTPVPTAPTSACSPSFFDRFSVASSGLSENASQAPARPLSTNLYRSVSVDIRRTPEEEFSVGDKLFRQQSVPAASSYDSPMPPSMEDRAPLPPVPAEKFACLSPGYYSPDYGLPSPKVDALHCPPAAVVTVTPSPEGVFSSLQAKPSPSPRAELLVPSLEGALPPDLDTSEDQQATAAIIPPEPSYLEPLDEGPFSAVITEEPVEWAHPSEQALASSLIGGTSENPVSWPVGSDLLLKSPQRFPESPKRFCPADPLHSAAPGPFSASEAPYPAPPASPAPYALPVAEPGLEDVKDGVDAVPAAISTSEAAPYAPPSGLESFFSNCKSLPEAPLDVAPEPACVAAVAQVEALGPLENSFLDGSRGLSHLGQVEPVPWADAFAGPEDDLDLGPFSLPELPLQTKDAADGEAEPVEESLAPPEEMPPGAPGVINGGDVSTVVAEEPPALPPDQASTRLPAELEPEPSGEPKLDVALEAAVEAETVPEERARGDPDSSVEPAPVPPEQRPLGSGDQGAEAEGPPAASLCAPDGPAPNTVAQAQAADGAGPEDDTEASRAAAPAEGPPGGIQPEAAEPKPTAEAPKAPRVEEIPQRMTRNRAQMLANQSKQGPPPSEKECAPTPAPVTRAKARGSEDDDAQAQHPRKRRFQRSTQQLQQQLNTSTQQTREVIQQTLAAIVDAIKLDAIEPYHSDRANPYFEYLQIRKKIEEKRKILCCITPQAPQCYAEYVTYTGSYLLDGKPLSKLHIPVIAPPPSLAEPLKELFRQQEAVRGKLRLQHSIEREKLIVSCEQEILRVHCRAARTIANQAVPFSACTMLLDSEVYNMPLESQGDENKSVRDRFNARQFISWLQDVDDKYDRMKTCLLMRQQHEAAALNAVQRMEWQLKVQELDPAGHKSLCVNEVPSFYVPMVDVNDDFVLLPA

SEQ ID NO: 5126 - protein, 97 aa, Homo sapiens
  Payload ID: 1109;
  Gene Symbol: ANKRD11;
  Gene Name: ankyrin repeat domain 11;
  ENSP ID: ENSP00000330815
MPKGGCPKAPQQEELPLSSDMVEKQTGKKDKDKVSLTKTPKLERGDGGKEVRERASKRKLPFTAGANGEQKDSDTDASSPVPVVVLQGWYAPRSTMA

SEQ ID NO: 5127 - protein, 2663 aa, Homo sapiens; identical to SEQ ID NO: 5125
  Payload ID: 1109;
  Gene Symbol: ANKRD11;
  Gene Name: ankyrin repeat domain 11;
  Uniprot ID:  Q6UB99;
  ENSP ID: ENSP00000367581

SEQ ID NO: 5128 - protein, 35 aa, Homo sapiens
  Payload ID: 1109;
  Gene Symbol: ANKRD11;
  Gene Name: ankyrin repeat domain 11;
  ENSP ID: ENSP00000367583
MPKGGCPKAPQQEELPLSSDMVEKQTGKKIFPKES

SEQ ID NO: 5129 - protein, 97 aa, Homo sapiens; identical to SEQ ID NO: 5126
  Payload ID: 1109;
  Gene Symbol: ANKRD11;
  Gene Name: ankyrin repeat domain 11;
  ENSP ID: ENSP00000454550

SEQ ID NO: 5130 - protein, 124 aa, Homo sapiens
  Payload ID: 1109;
  Gene Symbol: ANKRD11;
  Gene Name: ankyrin repeat domain 11;
  ENSP ID: ENSP00000455008
MPKGGCPKAPQQEELPLSSDMVEKQTGKKDKDKVSLTKTPKLERGDGGKEVRERASKRKLPFTAGANGEQKDSDTGPPGSCLSWGSHEGALVRSAMGRSCLPSARGCFFGTRGKIMIFLFCFDL

SEQ ID NO: 5131 - protein, 206 aa, Homo sapiens
  Payload ID: 1109;
  Gene Symbol: ANKRD11;
  Gene Name: ankyrin repeat domain 11;
  ENSP ID: ENSP00000458043
  MOD_RES (1)..(1): Any amino acid
XFPGWTALHEACNRGYYDVAKQLLAAGAEVNTKGLDDDTPLHDAANNGHYKIAPPPSLAEPLKELFRQQEAVRGKLRLQHSIEREKLIVSCEQEILRVHCRAARTIANQAVPFSACTMLLDSEVYNMPLESQGDENKSVRDRFNARQFISWLQDVDDKYDRMKTCLLMRQQHEAAALNAVQRMEWQLKVQELDPAGHKSLCVNEVP

SEQ ID NO: 5132 - protein, 366 aa, Homo sapiens [sequence omitted]

SEQ ID NO: 5133 - protein, 2062 aa, Homo sapiens
  Payload ID: 1110;
  Gene Symbol: ANKRD12;
  Gene Name: ankyrin repeat domain 12;
  Uniprot ID:  Q6UB98;
  ENSP ID: ENSP00000262126
MPKSGFTKPIQSENSDSDSNMVEKPYGRKSKDKIASYSKTPKIERSDVSKEMKEKSSMKRKLPFTISPSRNEERDSDTDSDPGHTSENWGERLISSYRTYSEKEGPEKKKTKKEAGNKKSTPVSILFGYPLSERKQMALLMQMTARDNSPDSTPNHPSQTTPAQKKTPSSSSRQKDKVNKRNERGETPLHMAAIRGDVKQVKELISLGANVNVKDFAGWTPLHEACNVGYYDVAKILIAAGADVNTQGLDDDTPLHDSASSGHRDIVKLLLRHGGNPFQANKHGERPVDVAETEELELLLKREVPLSDDDESYTDSEEAQSVNPSSVDENIDSETEKDSLICESKQILPSKTPLPSALDEYEFKDDDDEEINKMIDDRHILRKEQRKENEPEAEKTHLFAKQEKAFYPKSFKSKKQKPSRVLYSSTESSDEEALQNKKISTSCSVIPETSNSDMQTKKEYVVSGEHKQKGKVKRKLKNQNKNKENQELKQEKEGKENTRITNLTVNTGLDCSEKTREEGNFRKSFSPKDDTSLHLFHISTGKSPKHSCGLSEKQSTPLKQEHTKTCLSPGSSEMSLQPDLVRYDNTESEFLPESSSVKSCKHKEKSKHQKDFHLEFGEKSNAKIKDEDHSPTFENSDCTLKKMDKEGKTLKKHKLKHKEREKEKHKKEIEGEKEKYKTKDSAKELQRSVEFDREFWKENFFKSDETEDLFLNMEHESLTLEKKSKLEKNIKDDKSTKEKHVSKERNFKEERDKIKKESEKSFREEKIKDLKEERENIPTDKDSEFTSLGMSAIEESIGLHLVEKEIDIEKQEKHIKESKEKPEKRSQIKEKDIEKMERKTFEKEKKIKHEHKSEKDKLDLSECVDKIKEKDKLYSHHTEKCHKEGEKSKNTAAIKKTDDREKSREKMDRKHDKEKPEKERHLAESKEKHLMEKKNKQSDNSEYSKSEKGKNKEKDRELDKKEKSRDKESINITNSKHIQEEKKSSIVDGNKAQHEKPLSLKEKTKDEPLKTPDGKEKDKKDKDIDRYKERDKHKDKIQINSLLKLKSEADKPKPKSSPASKDTRPKEKRLVNDDLMQTSFERMLSLKDLEIEQWHKKHKEKIKQKEKERLRNRNCLELKIKDKEKTKHTPTESKNKELTRSKSSEVTDAYTKEKQPKDAVSNRSQSVDTKNVMTLGKSSFVSDNSLNRSPRSENEKPGLSSRSVSMISVASSEDSCHTTVTTPRPPVEYDSDFMLESSESQMSFSQSPFLSIAKSPALHERELDSLADLPERIKPPYANRLSTSHLRSSSVEDVKLIISEGRPTIEVRRCSMPSVICEHTKQFQTISEESNQGSLLTVPGDTSPSPKPEVFSNVPERDLSNVSNIHSSFATSPTGASNSKYVSADRNLIKNTAPVNTVMDSPVHLEPSSQVGVIQNKSWEMPVDRLETLSTRDFICPNSNIPDQESSLQSFCNSENKVLKENADFLSLRQTELPGNSCAQDPASFMPPQQPCSFPSQSLSDAESISKHMSLSYVANQEPGILQQKNAVQIISSALDTDNESTKDTENTFVLGDVQKTDAFVPVYSDSTIQEASPNFEKAYTLPVLPSEKDFNGSDASTQLNTHYAFSKLTYKSSSGHEVENSTTDTQVISHEKENKLESLVLTHLSRCDSDLCEMNAGMPKGNLNEQDPKHCPESEKCLLSIEDEESQQSILSSLENHSQQSTQPEMHKYGQLVKVELEENAEDDKTENQIPQRMTRNKANTMANQSKQILASCTLLSEKDSESSSPRGRIRLTEDDDPQIHHPRKRKVSRVPQPVQVSPSLLQAKEKTQQSLAAIVDSLKLDEIQPYSSERANPYFEYLHIRKKIEEKRKLLCSVIPQAPQYYDEYVTFNGSYLLDGNPLSKICIPTITPPPSLSDPLKELFRQQEVVRMKLRLQHSIEREKLIVSNEQEVLRVHYRAARTLANQTLPFSACTVLLDAEVYNVPLDSQSDDSKTSVRDRFNARQFMSWLQDVDDKFDKLKTCLLMRQQHEAAALNAVQRLEWQLKLQELDPATYKSISIYEIQEFYVPLVDVNDDFELTPI

SEQ ID NO: 5134 - protein, 97 aa, Homo sapiens
  Payload ID: 1110;
  Gene Symbol: ANKRD12;
  Gene Name: ankyrin repeat domain 12;
  ENSP ID: ENSP00000352073
  MOD_RES (1)..(1): Any amino acid
XCNVGYYDVAKILIAAGADVNTQGLDDDTPLHDSASSGHRDIVKLLLRHGGNPFQANKHGERPVDVAETEELELLLKREVPLSDDDESYTEYLFSTW

SEQ ID NO: 5135 - protein, 438 aa, Homo sapiens
  Payload ID: 1110;
  Gene Symbol: ANKRD12;
  Gene Name: ankyrin repeat domain 12;
  ENSP ID: ENSP00000372932
MVNVPELLLGQSPSRNDTKIINSEEAQSVNPSSVDENIDSETEKDSLICESKQILPSKTPLPSALDEYEFKDDDDEEINKMIDDRHILRKEQRKENEPEAEKTHLFAKQEKAFYPKSFKSKKQKPSRVLYSSTESSDEEALQNKKISTSCSVIPETSNSDMQTKKEYVVSGEHKQKGKVKRKLKNQNKNKENQELKQEKEGKENTRITNLTVNTGLDCSEKTREEGNFRKSFSPKDDTSLHLFHISTGKSPKHSCGLSEKQSTPLKQEHTKTCLSPGSSEMSLQPDLVRYDNTESEFLPESSSVKSCKHKEKSKHQKDFHLEFGEKSNAKIKDEDHSPTFENSDCTLKKMDKEGKTLKKHKLKHKEREKEKHKKEIEGEKEKYKTKDSAKELQRSVEFDREFWKENFFKSDETEDLFLNMEHESLTLEKIKIGKKHQR

SEQ ID NO: 5136 - protein, 2039 aa, Homo sapiens
  Payload ID: 1110;
  Gene Symbol: ANKRD12;
  Gene Name: ankyrin repeat domain 12;
  Uniprot ID:  Q6UB98;
  ENSP ID: ENSP00000382897
MPKSGFTKPIQSENSDSDSNMVEKPYGRKSKDKIASYSKTPKIERSDVSKEMKEKSSMKRKLPFTISPSRNEERDSDTEKEGPEKKKTKKEAGNKKSTPVSILFGYPLSERKQMALLMQMTARDNSPDSTPNHPSQTTPAQKKTPSSSSRQKDKVNKRNERGETPLHMAAIRGDVKQVKELISLGANVNVKDFAGWTPLHEACNVGYYDVAKILIAAGADVNTQGLDDDTPLHDSASSGHRDIVKLLLRHGGNPFQANKHGERPVDVAETEELELLLKREVPLSDDDESYTDSEEAQSVNPSSVDENIDSETEKDSLICESKQILPSKTPLPSALDEYEFKDDDDEEINKMIDDRHILRKEQRKENEPEAEKTHLFAKQEKAFYPKSFKSKKQKPSRVLYSSTESSDEEALQNKKISTSCSVIPETSNSDMQTKKEYVVSGEHKQKGKVKRKLKNQNKNKENQELKQEKEGKENTRITNLTVNTGLDCSEKTREEGNFRKSFSPKDDTSLHLFHISTGKSPKHSCGLSEKQSTPLKQEHTKTCLSPGSSEMSLQPDLVRYDNTESEFLPESSSVKSCKHKEKSKHQKDFHLEFGEKSNAKIKDEDHSPTFENSDCTLKKMDKEGKTLKKHKLKHKEREKEKHKKEIEGEKEKYKTKDSAKELQRSVEFDREFWKENFFKSDETEDLFLNMEHESLTLEKKSKLEKNIKDDKSTKEKHVSKERNFKEERDKIKKESEKSFREEKIKDLKEERENIPTDKDSEFTSLGMSAIEESIGLHLVEKEIDIEKQEKHIKESKEKPEKRSQIKEKDIEKMERKTFEKEKKIKHEHKSEKDKLDLSECVDKIKEKDKLYSHHTEKCHKEGEKSKNTAAIKKTDDREKSREKMDRKHDKEKPEKERHLAESKEKHLMEKKNKQSDNSEYSKSEKGKNKEKDRELDKKEKSRDKESINITNSKHIQEEKKSSIVDGNKAQHEKPLSLKEKTKDEPLKTPDGKEKDKKDKDIDRYKERDKHKDKIQINSLLKLKSEADKPKPKSSPASKDTRPKEKRLVNDDLMQTSFERMLSLKDLEIEQWHKKHKEKIKQKEKERLRNRNCLELKIKDKEKTKHTPTESKNKELTRSKSSEVTDAYTKEKQPKDAVSNRSQSVDTKNVMTLGKSSFVSDNSLNRSPRSENEKPGLSSRSVSMISVASSEDSCHTTVTTPRPPVEYDSDFMLESSESQMSFSQSPFLSIAKSPALHERELDSLADLPERIKPPYANRLSTSHLRSSSVEDVKLIISEGRPTIEVRRCSMPSVICEHTKQFQTISEESNQGSLLTVPGDTSPSPKPEVFSNVPERDLSNVSNIHSSFATSPTGASNSKYVSADRNLIKNTAPVNTVMDSPVHLEPSSQVGVIQNKSWEMPVDRLETLSTRDFICPNSNIPDQESSLQSFCNSENKVLKENADFLSLRQTELPGNSCAQDPASFMPPQQPCSFPSQSLSDAESISKHMSLSYVANQEPGILQQKNAVQIISSALDTDNESTKDTENTFVLGDVQKTDAFVPVYSDSTIQEASPNFEKAYTLPVLPSEKDFNGSDASTQLNTHYAFSKLTYKSSSGHEVENSTTDTQVISHEKENKLESLVLTHLSRCDSDLCEMNAGMPKGNLNEQDPKHCPESEKCLLSIEDEESQQSILSSLENHSQQSTQPEMHKYGQLVKVELEENAEDDKTENQIPQRMTRNKANTMANQSKQILASCTLLSEKDSESSSPRGRIRLTEDDDPQIHHPRKRKVSRVPQPVQVSPSLLQAKEKTQQSLAAIVDSLKLDEIQPYSSERANPYFEYLHIRKKIEEKRKLLCSVIPQAPQYYDEYVTFNGSYLLDGNPLSKICIPTITPPPSLSDPLKELFRQQEVVRMKLRLQHSIEREKLIVSNEQEVLRVHYRAARTLANQTLPFSACTVLLDAEVYNVPLDSQSDDSKTSVRDRFNARQFMSWLQDVDDKFDKLKTCLLMRQQHEAAALNAVQRLEWQLKLQELDPATYKSISIYEIQEFYVPLVDVNDDFELTPI

SEQ ID NO: 5137 - protein, 310 aa, Homo sapiens
  Payload ID: 1110;
  Gene Symbol: ANKRD12;
  Gene Name: ankyrin repeat domain 12;
  ENSP ID: ENSP00000441510
MPKSGFTKPIQSENSDSDSNMVEKPYGRKSKDKIASYSKTPKIERSDVSKEMKEKSSMKRKLPFTISPSRNEERDSDTEKEGPEKKKTKKEAGNKKSTPVSILFGYPLSERKQMALLMQMTARDNNSTPNHPSQTTPAQKKTPSSSSRQKDKVNKRNERGETPLHMAAIRGDVKQVKELISLGANVNVKDFAGWTPLHEACNVGYYDVAKILIAAGADVNTQGLDDDTPLHDSASSGHRDIVKLLLRHGGNPFQANKHGERPVDVAETEELELLLKREVPLSDDDESYTDSEEAQSVNPSSVDENIDSET

SEQ ID NO: 5138 - protein, 12 aa, Homo sapiens
  Payload ID: 1110;
  Gene Symbol: ANKRD12;
  Gene Name: ankyrin repeat domain 12;
  ENSP ID: ENSP00000462312
MPKSGFTKPIQS

SEQ ID NO: 5139 - protein, 82 aa, Homo sapiens
  Payload ID: 1110;
  Gene Symbol: ANKRD12;
  Gene Name: ankyrin repeat domain 12;
  ENSP ID: ENSP00000462659
MPKSGFTKPIQSENSDSDSNMVEKPYGRKSKDKIASYSKTPKIERSDVSKEMKEKSSMKRKLPFTISPSRNEERDSDTELTG

SEQ ID NO: 5140 - protein, 44 aa, Homo sapiens
  Payload ID: 1110;
  Gene Symbol: ANKRD12;
  Gene Name: ankyrin repeat domain 12;
  ENSP ID: ENSP00000464422
MPKSGFTKPIQSENSDSDSNMVEKPYGRKSKDKIASYSKTPKIE

SEQ ID NO: 5141 - protein, 518 aa, Homo sapiens
  Payload ID: 1111;
  Gene Symbol: ANKRD13D;
  Gene Name: ankyrin repeat domain 13 family, member D;
  Uniprot ID:  Q6ZTN6;
  ENSP ID: ENSP00000310874
MVQLVLQYRDYQRATQRLAGIPELLNKLRQAPDFYVEMKWEFTSWVPLVSKMCPSDVYRVWKRGESLRVDTSLLGFEHMTWQRGRRSFIFKGQEAGALVMEVDHDRQVVHVETLGLTLQEPETLLAAMRPSEEHVASRLTSPIVSTHLDTRNVAFERNKCGIWGWRSEKMETVSGYEAKVYSATNVELVTRTRTEHLSDQDKSRSKAGKTPFQSFLGMAQQHSSHTGAPVQQAASPTNPTAISPEEYFDPNFSLESRNIGRPIEMSSKVQRFKATLWLSEEHPLSLGDQVTPIIDLMAISNAHFAKLRDFITLRLPPGFPVKIEIPLFHVLNARITFSNLCGCDEPLSSVWVPAPSSAVAASGNPFPCEVDPTVFEVPNGYSVLGMERNEPLRDEDDDLLQFAIQQSLLEAGTEAEQVTVWEALTNTRPGARPPPQATVYEEQLQLERALQESLQLSTEPRGPGSPPRTPPAPGPPSFEEQLRLALELSSREQEERERRGQQEEEDLQRILQLSLTEH

SEQ ID NO: 5142 - protein, 518 aa, Homo sapiens; identical to SEQ ID NO: 5141
  Payload ID: 1111;
  Gene Symbol: ANKRD13D;
  Gene Name: ankyrin repeat domain 13 family, member D;
  Uniprot ID:  Q6ZTN6;
  ENSP ID: ENSP00000402616

SEQ ID NO: 5143 - protein, 605 aa, Homo sapiens
  Payload ID: 1111;
  Gene Symbol: ANKRD13D;
  Gene Name: ankyrin repeat domain 13 family, member D;
  Uniprot ID:  Q6ZTN6;
  ENSP ID: ENSP00000427130
MAGPGPTFPLHRLVWANRHRELEAALHSHQHDIEQEDPRGRTPLELAVSLGNLESVRVLLRHNANVGKENRQGWAVLQEAVSTGDPEMVQLVLQYRDYQRATQRLAGIPELLNKLRQAPDFYVEMKWEFTSWVPLVSKMCPSDVYRVWKRGESLRVDTSLLGFEHMTWQRGRRSFIFKGQEAGALVMEVDHDRQVVHVETLGLTLQEPETLLAAMRPSEEHVASRLTSPIVSTHLDTRNVAFERNKCGIWGWRSEKMETVSGYEAKVYSATNVELVTRTRTEHLSDQDKSRSKAGKTPFQSFLGMAQQHSSHTGAPVQQAASPTNPTAISPEEYFDPNFSLESRNIGRPIEMSSKVQRFKATLWLSEEHPLSLGDQVTPIIDLMAISNAHFAKLRDFITLRLPPGFPVKIEIPLFHVLNARITFSNLCGCDEPLSSVWVPAPSSAVAASGNPFPCEVDPTVFEVPNGYSVLGMERNEPLRDEDDDLLQFAIQQSLLEAGTEAEQVTVWEALTNTRPGARPPPQATVYEEQLQLERALQESLQLSTEPRGPGSPPRTPPAPGPPSFEEQLRLALELSSREQEERERRGQQEEEDLQRILQLSLTEH

SEQ ID NO: 5144 - protein, 255 aa, Homo sapiens
  Payload ID: 1111;
  Gene Symbol: ANKRD13D;
  Gene Name: ankyrin repeat domain 13 family, member D;
  Uniprot ID:  Q6ZTN6;
  ENSP ID: ENSP00000443977
MSCGRLGRFKATLWLSEEHPLSLGDQVTPIIDLMAISNAHFAKLRDFITLRLPPGFPVKIEIPLFHVLNARITFSNLCGCDEPLSSVWVPAPSSAVAASGNPFPCEVDPTVFEVPNGYSVLGMERNEPLRDEDDDLLQFAIQQSLLEAGTEAEQVTVWEALTNTRPGARPPPQATVYEEQLQLERALQESLQLSTEPRGPGSPPRTPPAPGPPSFEEQLRLALELSSREQEERERRGQQEEEDLQRILQLSLTEH

SEQ ID NO: 5145 - protein, 518 aa, Homo sapiens; identical to SEQ ID NO: 5141
  Payload ID: 1111;
  Gene Symbol: ANKRD13D;
  Gene Name: ankyrin repeat domain 13 family, member D;
  Uniprot ID:  Q6ZTN6;
  ENSP ID: ENSP00000444404

SEQ ID NO: 5146 - protein, 32 aa, Homo sapiens
  Payload ID: 1111;
  Gene Symbol: ANKRD13D;
  Gene Name: ankyrin repeat domain 13 family, member D;
  ENSP ID: ENSP00000480227
  MOD_RES (1)..(1): Any amino acid
XAISPEEYFDPNFSLESRNIGRPIEMSSKVQR

SEQ ID NO: 5147 - protein, 109 aa, Homo sapiens
  Payload ID: 1111;
  Gene Symbol: ANKRD13D;
  Gene Name: ankyrin repeat domain 13 family, member D;
  ENSP ID: ENSP00000482134
MVQLVLQYRDYQRATQRLAGIPELLNKLRQAPDFYVEMKWEFTSWVPLVSKMCPSDVYRVWKRGESLRVDTSLLGFEHMTWQRGRRSFIFKGQEAGALVMEVDHDRQVV

SEQ ID NO: 5148 - protein, 590 aa, Homo sapiens
  Payload ID: 1112;
  Gene Symbol: ANKRD13A;
  Gene Name: ankyrin repeat domain 13A;
  Uniprot ID:  Q8IZ07;
  ENSP ID: ENSP00000261739
MSSACDAGDHYPLHLLVWKNDYRQLEKELQGQNVEAVDPRGRTLLHLAVSLGHLESARVLLRHKADVTKENRQGWTVLHEAVSTGDPEMVYTVLQHRDYHNTSMALEGVPELLQKILEAPDFYVQMKWEFTSWVPLVSRICPNDVCRIWKSGAKLRVDITLLGFENMSWIRGRRSFIFKGEDNWAELMEVNHDDKVVTTERFDLSQEMERLTLDLMKPKSREVERRLTSPVINTSLDTKNIAFERTKSGFWGWRTDKAEVVNGYEAKVYTVNNVNVITKIRTEHLTEEEKKRYKADRNPLESLLGTVEHQFGAQGDLTTECATANNPTAITPDEYFNEEFDLKDRDIGRPKELTIRTQKFKAMLWMCEEFPLSLVEQVIPIIDLMARTSAHFARLRDFIKLEFPPGFPVKIEIPLFHVLNARITFGNVNGCSTAEESVSQNVEGTQADSASHITNFEVDQSVFEIPESYYVQDNGRNVHLQDEDYEIMQFAIQQSLLESSRSQELSGPASNGGISQTNTYDAQYERAIQESLLTSTEGLCPSALSETSRFDNDLQLAMELSAKELEEWELRLQEEEAELQQVLQLSLTDK

SEQ ID NO: 5149 - protein, 83 aa, Homo sapiens
  Payload ID: 1112;
  Gene Symbol: ANKRD13A;
  Gene Name: ankyrin repeat domain 13A;
  ENSP ID: ENSP00000447110
LMARTSAHFARLRDFIKLEFPPGFPVKIEIPLFHVLNARITFGNVNGCSTAEESVSQNVEGTQADSGTFRTSFEWRDQPDKHL

SEQ ID NO: 5150 - protein, 301 aa, Homo sapiens
  Payload ID: 1112;
  Gene Symbol: ANKRD13A;
  Gene Name: ankyrin repeat domain 13A;
  ENSP ID: ENSP00000449781
  MOD_RES (1)..(1): Any amino acid
XIWKSGAKLRVDITLLGFENMSWIRGRRSFIFKGEDNWAELMEVNHDDKVVTTERFDLSQEMERLTLDLMKPKSREVERRLTSPVINTSLDTKNIAFERTKSGFWGWRTDKAEVVNGYEAKVYTVNNVNVITKIRTEHLTEEEKKRYKDRNPLESLLGTVEHQFGAQGDLTTECATANNPTAITPDEYFNEEFDLKDRDIGRPKELTIRTQKFKAMLWMCEEFPLSLVEQVIPIIDLMARTSAHFARLRDFIKLEFPPGFPVKIEIPLFHVLNARITFGNVNGCSTAEESVSQNVEGTQAD

SEQ ID NO: 5151 - protein, 173 aa, Homo sapiens
  Payload ID: 1112;
  Gene Symbol: ANKRD13A;
  Gene Name: ankyrin repeat domain 13A;
  ENSP ID: ENSP00000474172
MVYTVLQHRDYHNTSMALEGVPELLQKILEAPDFYVQMKWEFTSWVPLVSRICPNDVCRIWKSGAKLRVDITLLGFENMSWIRGRRSFIFKGEDNWAELMEVNHDDKVVTTERFDLSQEMERLTLDLMKPKSREVERRLTSPVINTSLDTKNIAFERVFRVLKLTLLQLTVCS

SEQ ID NO: 5152 - protein, 173 aa, Homo sapiens
  Payload ID: 1112;
  Gene Symbol: ANKRD13A;
  Gene Name: ankyrin repeat domain 13A;
  ENSP ID: ENSP00000474745
  MOD_RES (1)..(1): Any amino acid
XPDEYFNEEFDLKDRDIGRPKELTIRTQKFKAMLWMCEEFPLSLVEQVIPIIDLMARTSAHFARLRDFIKLEFPPGFPVKIEIPLFHVLNARITFGNVNGCSTAEESVSQNVEGTQADSASHITNFEVDQSVFEIPESYYVQDNGRNVHLQDEDYEIMQFAIQQILQLSLTDK

SEQ ID NO: 5153 - protein, 626 aa, Homo sapiens
  Payload ID: 1113;
  Gene Symbol: ANKRD13B;
  Gene Name: ankyrin repeat domain 13B;
  Uniprot ID:  Q86YJ7;
  ENSP ID: ENSP00000378328
MIPANASARKGPEGKYPLHYLVWHNRHRELEKEVRAGQVDIEQLDPRGRTPLHLATTLGHLECARVLLAHGADVGRENRSGWTVLQEAVSTRDLELVQLVLRYRDYQRVVKRLAGIPVLLEKLRKAQDFYVEMKWEFTSWVPLVSKICPSDTYKVWKSGQNLRVDTTLLGFDHMTWQRGNRSFVFRGQDTSAVVMEIDHDRRVVYTETLALAGQDRELLLAAAQPTEEQVLSRLTAPVVTTQLDTKNISFERNKTGILGWRSEKTEMVNGYEAKVYGASNVELITRTRTEHLSEQHKGKVKGCKTPLQSFLGIAEQHGGPQNGTLITQTLSQANPTAITAEEYFNPNFELGNRDMGRPMELTTKTQKFKAKLWLCEEHPLSLCEQVAPIIDLMAVSNALFAKLRDFITLRLPPGFPVKIEIPIFHILNARITFGNLNGCDEPVPSVRGSPSSETPSPGSDSSSVSSSSSTTSCRGCEISPALFEAPRGYSMMGGQREAATRDDDDDLLQFAIQQSLLEAGSEYDQVTIWEALTNSKPGTHPMSYEGRRQDRSAPPTPQRQPAPPASVPSPRPSSGPGSGGHVFRSYDEQLRLAMELSAQEQEERRRRARQEEEELERILRLSLTEQ

SEQ ID NO: 5154 - protein, 626 aa, Homo sapiens; identical to SEQ ID NO: 5153
  Payload ID: 1113;
  Gene Symbol: ANKRD13B;
  Gene Name: ankyrin repeat domain 13B;
  Uniprot ID:  Q86YJ7;
  ENSP ID: ENSP00000431958

SEQ ID NO: 5155 - protein, 128 aa, Homo sapiens
  Payload ID: 1113;
  Gene Symbol: ANKRD13B;
  Gene Name: ankyrin repeat domain 13B;
  ENSP ID: ENSP00000465708
EPVPSVRGSPSSETPSPGSDSSSVSSSSSTTSCRGCEISPALFEAPRGYSMMGGQREAATRDDDDDLLQFAIQQSLLEAGSEYDQVTIWEALTNSKPGTHPMSYEGRRQDRSVPAGPERILRRGSCLP

SEQ ID NO: 5156 - protein, 68 aa, Homo sapiens
  Payload ID: 1113;
  Gene Symbol: ANKRD13B;
  Gene Name: ankyrin repeat domain 13B;
  ENSP ID: ENSP00000467078
MKWEFTSWVPLVSKICPSDTYKVWKSGQNLRVDTTLLGFDHMTWQRGNRSFVFRGQDTSAVVMEIDHD

SEQ ID NO: 5157 - protein, 626 aa, Homo sapiens; identical to SEQ ID NO: 5153
  Payload ID: 1113;
  Gene Symbol: ANKRD13B;
  Gene Name: ankyrin repeat domain 13B;
  Uniprot ID:  Q86YJ7;
  ENSP ID: ENSP00000481530

SEQ ID NO: 5158 - protein, 506 aa, Homo sapiens
  Payload ID: 1114;
  Gene Symbol: ANKRD13C;
  Gene Name: ankyrin repeat domain 13C;
  Uniprot ID:  Q8N6S4;
  ENSP ID: ENSP00000262346
MTGEKIRSLRRDHKPSKEEGDLLEPGDEEAAAALGGTFTRSRIGKGGKACHKIFSNHHHRLQLKAAPASSNPPGAPALPLHNSSVTANSQSPALLAGTNPVAVVADGGSCPAHYPVHECVFKGDVRRLSSLIRTHNIGQKDNHGNTPLHLAVMLGNKVTALLRKLKQQSRESVEEKRPRLLKALKELGDFYLELHWDFQSWVPLLSRILPSDACKIYKQGINIRLDTTLIDFTDMKCQRGDLSFIFNGDAAPSESFVVLDNEQKVYQRIHHEESEMETEEEVDILMSSDIYSATLSTKSISFTRAQTGWLFREDKTERVGNFLADFYLVNGLVLESRKRREHLSEEDILRNKAIMESLSKGGNIMEQNFEPIRRQSLTPPPQNTITWEEYISAENGKAPHLGRELVCKESKKTFKATIAMSQEFPLGIELLLNVLEVVAPFKHFNKLREFVQMKLPPGFPVKLDIPVFPTITATVTFQEFRYDEFDGSIFTIPDDYKEDPSRFPDL

SEQ ID NO: 5159 - protein, 541 aa, Homo sapiens
  Payload ID: 1114;
  Gene Symbol: ANKRD13C;
  Gene Name: ankyrin repeat domain 13C;
  Uniprot ID:  Q8N6S4;
  ENSP ID: ENSP00000359982
MTGEKIRSLRRDHKPSKEEGDLLEPGDEEAAAALGGTFTRSRIGKGGKACHKIFSNHHHRLQLKAAPASSNPPGAPALPLHNSSVTANSQSPALLAGTNPVAVVADGGSCPAHYPVHECVFKGDVRRLSSLIRTHNIGQKDNHGNTPLHLAVMLGNKECAHLLLAHNAPVKVKNAQGWSPLAEAISYGDRQMITALLRKLKQQSRESVEEKRPRLLKALKELGDFYLELHWDFQSWVPLLSRILPSDACKIYKQGINIRLDTTLIDFTDMKCQRGDLSFIFNGDAAPSESFVVLDNEQKVYQRIHHEESEMETEEEVDILMSSDIYSATLSTKSISFTRAQTGWLFREDKTERVGNFLADFYLVNGLVLESRKRREHLSEEDILRNKAIMESLSKGGNIMEQNFEPIRRQSLTPPPQNTITWEEYISAENGKAPHLGRELVCKESKKTFKATIAMSQEFPLGIELLLNVLEVVAPFKHFNKLREFVQMKLPPGFPVKLDIPVFPTITATVTFQEFRYDEFDGSIFTIPDDYKEDPSRFPDL

SEQ ID NO: 5160 - protein, 304 aa, Homo sapiens
  Payload ID: 1115;
  Gene Symbol: ANKRD16;
  Gene Name: ankyrin repeat domain 16;
  Uniprot ID:  Q6P6B7;
  ENSP ID: ENSP00000352361
MAQPGDPRRLCRLVQEGRLRALKEELQAAGGCPGPAGDTLLHCAARHGHRDVLAYLAEAWGMDIEATNRDYKRPLHEAASMGHRDCVRYLLGRGAAVDCLKKADWTPLMMACTRKNLGVIQELVEHGANPLLKNKDGWNSFHIASREGDPLILQYLLTVCPGAWKTESKIRRTPLHTAAMHGHLEAVKVLLKRCQYEPDYRDNCGVTALMDAIQCGHIDVARLLLDEHGACLSAEDSLGAQALHRAAVTGQDEAIRFLVSELGVDVDVRATSTHLTALHYAAKPCIWPVQVSTWPVPSFSCSRD

SEQ ID NO: 5161 - protein, 361 aa, Homo sapiens
  Payload ID: 1115;
  Gene Symbol: ANKRD16;
  Gene Name: ankyrin repeat domain 16;
  Uniprot ID:  Q6P6B7;
  ENSP ID: ENSP00000369434
MAQPGDPRRLCRLVQEGRLRALKEELQAAGGCPGPAGDTLLHCAARHGHRDVLAYLAEAWGMDIEATNRDYKRPLHEAASMGHRDCVRYLLGRGAAVDCLKKADWTPLMMACTRKNLGVIQELVEHGANPLLKNKDGWNSFHIASREGDPLILQYLLTVCPGAWKTESKIRRTPLHTAAMHGHLEAVKVLLKRCQYEPDYRDNCGVTALMDAIQCGHIDVARLLLDEHGACLSAEDSLGAQALHRAAVTGQDEAIRFLVSELGVDVDVRATSTHLTALHYAAKEGHTSTIQTLLSLGADINSKDEKNRSALHLACAGQHLACAKFLLQSGLKDSEDITGTLAQQLPRRADVLQGSGHSAMT

SEQ ID NO: 5162 - protein, 361 aa, Homo sapiens; identical to SEQ ID NO: 5161
  Payload ID: 1115;
  Gene Symbol: ANKRD16;
  Gene Name: ankyrin repeat domain 16;
  Uniprot ID:  Q6P6B7;
  ENSP ID: ENSP00000369436

SEQ ID NO: 5163 - protein, 2352 aa, Homo sapiens
  Payload ID: 1116;
  Gene Symbol: ANKRD17;
  Gene Name: ankyrin repeat domain 17;
  Uniprot ID:  O75179;
  ENSP ID: ENSP00000332265
MEKATVPVAAATAAEGEGSPPAVAAVAGPPAAAEVGGGVGGSSRARSASSPRGMVRVCDLLLKKKPPQQQHHKAKRNRTCRPPSSSESSSDSDNSGGGGGGGGGGGGGGGTSSNNSEEEEDDDDEEEEVSEVESFILDQDDLENPMLETASKLLLSGTADGADLRTVDPETQARLEALLEAAGIGKLSTADGKAFADPEVLRRLTSSVSCALDEAAAALTRMRAESTANAGQSDNRSLAEACSEGDVNAVRKLLIEGRSVNEHTEEGESLLCLACSAGYYELAQVLLAMHANVEDRGIKGDITPLMAAANGGHVKIVKLLLAHKADVNAQSSTGNTALTYACAGGYVDVVKVLLESGASIEDHNENGHTPLMEAGSAGHVEVARLLLENGAGINTHSNEFKESALTLACYKGHLEMVRFLLEAGADQEHKTDEMHTALMEACMDGHVEVARLLLDSGAQVNMPADSFESPLTLAACGGHVELAALLIERGASLEEVNDEGYTPLMEAAREGHEEMVALLLGQGANINAQTEETQETALTLACCGGFLEVADFLIKAGADIELGCSTPLMEAAQEGHLELVKYLLAAGANVHATTATGDTALTYACENGHTDVADVLLQAGADLEHESEGGRTPLMKAARAGHVCTVQFLISKGANVNRTTANNDHTVLSLACAGGHLAVVELLLAHGADPTHRLKDGSTMLIEAAKGGHTSVVCYLLDYPNNLLSAPPPDVTQLTPPSHDLNRAPRVPVQALPMVVPPQEPDKPPANVATTLPIRNKAVSGRASAMSNTPTHSIAASISQPQTPTPSPIISPSAMLPIYPAIDIDAQTESNHDTALTLACAGGHEELVQTLLERGASIEHRDKKGFTPLILAATAGHVGVVEILLDNGADIEAQSERTKDTPLSLACSGGRQEVVELLLARGANKEHRNVSDYTPLSLAASGGYVNIIKILLNAGAEINSRTGSKLGISPLMLAAMNGHTAAVKLLLDMGSDINAQIETNRNTALTLACFQGRTEVVSLLLDRKANVEHRAKTGLTPLMEAASGGYAEVGRVLLDKGADVNAPPVPSSRDTALTIAADKGHYKFCELLIGRGAHIDVRNKKGNTPLWLAANGGHLDVVQLLVQAGADVDAADNRKITPLMAAFRKGHVKVVRYLVKEVNQFPSDSECMRYIATITDKEMLKKCHLCMESIVQAKDRQAAEANKNASILLEELDLEKLREESRRLALAAKREKRKEKRRKKKEEQRRKLEEIEAKNKENFELQAAQEKEKLKVEDEPEVLTEPPSATTTTTIGISATWTTLAGSHGKRNNTITTTSSKRKNRKNKITPENVQIIFDDPLPISYSQPEKVNGESKSSSTSESGDSDNMRISSCSDESSNSNSSRKSDNHSPAVVTTTVSSKKQPSVLVTFPKEERKSVSGKASIKLSETISEGTSNSLSTCTKSGPSPLSSPNGKLTVASPKRGQKREEGWKEVVRRSKKVSVPSTVISRVIGRGGCNINAIREFTGAHIDIDKQKDKTGDRIITIRGGTESTRQATQLINALIKDPDKEIDELIPKNRLKSSSANSKIGSSAPTTTAANTSLMGIKMTTVALSSTSQTATALTVPAISSASTHKTIKNPVNNVRPGFPVSLPLAYPPPQFAHALLAAQTFQQIRPPRLPMTHFGGTFPPAQSTWGPFPVRPLSPARATNSPKPHMVPRHSNQNSSGSQVNSAGSLTSSPTTTTSSSASTVPGTSTNGSPSSPSVRRQLFVTVVKTSNATTTTVTTTASNNNTAPTNATYPMPTAKEHYPVSSPSSPSPPAQPGGVSRNSPLDCGSASPNKVASSSEQEAGSPPVVETTNTRPPNSSSSSGSSSAHSNQQQPPGSVSQEPRPPLQQSQVPPPEVRMTVPPLATSSAPVAVPSTAPVTYPMPQTPMGCPQPTPKMETPAIRPPPHGTTAPHKNSASVQNSSVAVLSVNHIKRPHSVPSSVQLPSTLSTQSACQNSVHPANKPIAPNFSAPLPFGPFSTLFENSPTSAHAFWGGSVVSSQSTPESMLSGKSSYLPNSDPLHQSDTSKAPGFRPPLQRPAPSPSGIVNMDSPYGSVTPSSTHLGNFASNISGGQMYGPGAPLGGAPAAANFNRQHFSPLSLLTPCSSASNDSSAQSVSSGVRAPSPAPSSVPLGSEKPSNVSQDRKVPVPIGTERSARIRQTGTSAPSVIGSNLSTSVGHSGIWSFEGIGGNQDKVDWCNPGMGNPMIHRPMSDPGVFSQHQAMERDSTGIVTPSGTFHQHVPAGYMDFPKVGGMPFSVYGNAMIPPVAPIPDGAGGPIFNGPHAADPSWNSLIKMVSSSTENNGPQTVWTGPWAPHMNSVHMNQLG

SEQ ID NO: 5164 - protein, 2603 aa, Homo sapiens
  Payload ID: 1116;
  Gene Symbol: ANKRD17;
  Gene Name: ankyrin repeat domain 17;
  Uniprot ID:  O75179;
  ENSP ID: ENSP00000351416
MEKATVPVAAATAAEGEGSPPAVAAVAGPPAAAEVGGGVGGSSRARSASSPRGMVRVCDLLLKKKPPQQQHHKAKRNRTCRPPSSSESSSDSDNSGGGGGGGGGGGGGGGTSSNNSEEEEDDDDEEEEVSEVESFILDQDDLENPMLETASKLLLSGTADGADLRTVDPETQARLEALLEAAGIGKLSTADGKAFADPEVLRRLTSSVSCALDEAAAALTRMRAESTANAGQSDNRSLAEACSEGDVNAVRKLLIEGRSVNEHTEEGESLLCLACSAGYYELAQVLLAMHANVEDRGIKGDITPLMAAANGGHVKIVKLLLAHKADVNAQSSTGNTALTYACAGGYVDVVKVLLESGASIEDHNENGHTPLMEAGSAGHVEVARLLLENGAGINTHSNEFKESALTLACYKGHLEMVRFLLEAGADQEHKTDEMHTALMEACMDGHVEVARLLLDSGAQVNMPADSFESPLTLAACGGHVELAALLIERGASLEEVNDEGYTPLMEAAREGHEEMVALLLGQGANINAQTEETQETALTLACCGGFLEVADFLIKAGADIELGCSTPLMEAAQEGHLELVKYLLAAGANVHATTATGDTALTYACENGHTDVADVLLQAGADLEHESEGGRTPLMKAARAGHVCTVQFLISKGANVNRTTANNDHTVLSLACAGGHLAVVELLLAHGADPTHRLKDGSTMLIEAAKGGHTSVVCYLLDYPNNLLSAPPPDVTQLTPPSHDLNRAPRVPVQALPMVVPPQEPDKPPANVATTLPIRNKAASKQKSSSHLPANSQDVQGYITNQSPESIVEEAQGKLTELEQRIKEAIEKNAQLQSLELAHADQLTKEKIEELNKTREEQIQKKQKILEELQKVERELQLKTQQQLKKQYLEVKAQRIQLQQQQQQSCQHLGLLTPVGVGEQLSEGDYARLQQVDPVLLKDEPQQTAAQMGFAPIQPLAMPQALPLAAGPLPPGSIANLTELQGVIVGQPVLGQAQLAGLGQGILTETQQGLMVASPAQTLNDTLDDIMAAVSGRASAMSNTPTHSIAASISQPQTPTPSPIISPSAMLPIYPAIDIDAQTESNHDTALTLACAGGHEELVQTLLERGASIEHRDKKGFTPLILAATAGHVGVVEILLDNGADIEAQSERTKDTPLSLACSGGRQEVVELLLARGANKEHRNVSDYTPLSLAASGGYVNIIKILLNAGAEINSRTGSKLGISPLMLAAMNGHTAAVKLLLDMGSDINAQIETNRNTALTLACFQGRTEVVSLLLDRKANVEHRAKTGLTPLMEAASGGYAEVGRVLLDKGADVNAPPVPSSRDTALTIAADKGHYKFCELLIGRGAHIDVRNKKGNTPLWLAANGGHLDVVQLLVQAGADVDAADNRKITPLMAAFRKGHVKVVRYLVKEVNQFPSDSECMRYIATITDKEMLKKCHLCMESIVQAKDRQAAEANKNASILLEELDLEKLREESRRLALAAKREKRKEKRRKKKEEQRRKLEEIEAKNKENFELQAAQEKEKLKVEDEPEVLTEPPSATTTTTIGISATWTTLAGSHGKRNNTITTTSSKRKNRKNKITPENVQIIFDDPLPISYSQPEKVNGESKSSSTSESGDSDNMRISSCSDESSNSNSSRKSDNHSPAVVTTTVSSKKQPSVLVTFPKEERKSVSGKASIKLSETISEGTSNSLSTCTKSGPSPLSSPNGKLTVASPKRGQKREEGWKEVVRRSKKVSVPSTVISRVIGRGGCNINAIREFTGAHIDIDKQKDKTGDRIITIRGGTESTRQATQLINALIKDPDKEIDELIPKNRLKSSSANSKIGSSAPTTTAANTSLMGIKMTTVALSSTSQTATALTVPAISSASTHKTIKNPVNNVRPGFPVSLPLAYPPPQFAHALLAAQTFQQIRPPRLPMTHFGGTFPPAQSTWGPFPVRPLSPARATNSPKPHMVPRHSNQNSSGSQVNSAGSLTSSPTTTTSSSASTVPGTSTNGSPSSPSVRRQLFVTVVKTSNATTTTVTTTASNNNTAPTNATYPMPTAKEHYPVSSPSSPSPPAQPGGVSRNSPLDCGSASPNKVASSSEQEAGSPPVVETTNTRPPNSSSSSGSSSAHSNQQQPPGSVSQEPRPPLQQSQVPPPEVRMTVPPLATSSAPVAVPSTAPVTYPMPQTPMGCPQPTPKMETPAIRPPPHGTTAPHKNSASVQNSSVAVLSVNHIKRPHSVPSSVQLPSTLSTQSACQNSVHPANKPIAPNFSAPLPFGPFSTLFENSPTSAHAFWGGSVVSSQSTPESMLSGKSSYLPNSDPLHQSDTSKAPGFRPPLQRPAPSPSGIVNMDSPYGSVTPSSTHLGNFASNISGGQMYGPGAPLGGAPAAANFNRQHFSPLSLLTPCSSASNDSSAQSVSSGVRAPSPAPSSVPLGSEKPSNVSQDRKVPVPIGTERSARIRQTGTSAPSVIGSNLSTSVGHSGIWSFEGIGGNQDKVDWCNPGMGNPMIHRPMSDPGVFSQHQAMERDSTGIVTPSGTFHQHVPAGYMDFPKVGGMPFSVYGNAMIPPVAPIPDGAGGPIFNGPHAADPSWNSLIKMVSSSTENNGPQTVWTGPWAPHMNSVHMNQLG

SEQ ID NO: 5165 - protein, 2490 aa, Homo sapiens
  Payload ID: 1116;
  Gene Symbol: ANKRD17;
  Gene Name: ankyrin repeat domain 17;
  Uniprot ID:  O75179;
  ENSP ID: ENSP00000427151
MVETAAEMEAYVLEDILEVESFILDQDDLENPMLETASKLLLSGTADGADLRTVDPETQARLEALLEAAGIGKLSTADGKAFADPEVLRRLTSSVSCALDEAAAALTRMRAESTANAGQSDNRSLAEACSEGDVNAVRKLLIEGRSVNEHTEEGESLLCLACSAGYYELAQVLLAMHANVEDRGIKGDITPLMAAANGGHVKIVKLLLAHKADVNAQSSTGNTALTYACAGGYVDVVKVLLESGASIEDHNENGHTPLMEAGSAGHVEVARLLLENGAGINTHSNEFKESALTLACYKGHLEMVRFLLEAGADQEHKTDEMHTALMEACMDGHVEVARLLLDSGAQVNMPADSFESPLTLAACGGHVELAALLIERGASLEEVNDEGYTPLMEAAREGHEEMVALLLGQGANINAQTEETQETALTLACCGGFLEVADFLIKAGADIELGCSTPLMEAAQEGHLELVKYLLAAGANVHATTATGDTALTYACENGHTDVADVLLQAGADLEHESEGGRTPLMKAARAGHVCTVQFLISKGANVNRTTANNDHTVLSLACAGGHLAVVELLLAHGADPTHRLKDGSTMLIEAAKGGHTSVVCYLLDYPNNLLSAPPPDVTQLTPPSHDLNRAPRVPVQALPMVVPPQEPDKPPANVATTLPIRNKAASKQKSSSHLPANSQDVQGYITNQSPESIVEEAQGKLTELEQRIKEAIEKNAQLQSLELAHADQLTKEKIEELNKTREEQIQKKQKILEELQKVERELQLKTQQQLKKQYLEVKAQRIQLQQQQQQSCQHLGLLTPVGVGEQLSEGDYARLQQVDPVLLKDEPQQTAAQMGFAPIQPLAMPQALPLAAGPLPPGSIANLTELQGVIVGQPVLGQAQLAGLGQGILTETQQGLMVASPAQTLNDTLDDIMAAVSGRASAMSNTPTHSIAASISQPQTPTPSPIISPSAMLPIYPAIDIDAQTESNHDTALTLACAGGHEELVQTLLERGASIEHRDKKGFTPLILAATAGHVGVVEILLDNGADIEAQSERTKDTPLSLACSGGRQEVVELLLARGANKEHRNVSDYTPLSLAASGGYVNIIKILLNAGAEINSRTGSKLGISPLMLAAMNGHTAAVKLLLDMGSDINAQIETNRNTALTLACFQGRTEVVSLLLDRKANVEHRAKTGLTPLMEAASGGYAEVGRVLLDKGADVNAPPVPSSRDTALTIAADKGHYKFCELLIGRGAHIDVRNKKGNTPLWLAANGGHLDVVQLLVQAGADVDAADNRKITPLMAAFRKGHVKVVRYLVKEVNQFPSDSECMRYIATITDKEMLKKCHLCMESIVQAKDRQAAEANKNASILLEELDLEKLREESRRLALAAKREKRKEKRRKKKEEQRRKLEEIEAKNKENFELQAAQEKEKLKVEDEPEVLTEPPSATTTTTIGISATWTTLAGSHGKRNNTITTTSSKRKNRKNKITPENVQIIFDDPLPISYSQPEKVNGESKSSSTSESGDSDNMRISSCSDESSNSNSSRKSDNHSPAVVTTTVSSKKQPSVLVTFPKEERKSVSGKASIKLSETISEGTSNSLSTCTKSGPSPLSSPNGKLTVASPKRGQKREEGWKEVVRRSKKVSVPSTVISRVIGRGGCNINAIREFTGAHIDIDKQKDKTGDRIITIRGGTESTRQATQLINALIKDPDKEIDELIPKNRLKSSSANSKIGSSAPTTTAANTSLMGIKMTTVALSSTSQTATALTVPAISSASTHKTIKNPVNNVRPGFPVSLPLAYPPPQFAHALLAAQTFQQIRPPRLPMTHFGGTFPPAQSTWGPFPVRPLSPARATNSPKPHMVPRHSNQNSSGSQVNSAGSLTSSPTTTTSSSASTVPGTSTNGSPSSPSVRRQLFVTVVKTSNATTTTVTTTASNNNTAPTNATYPMPTAKEHYPVSSPSSPSPPAQPGGVSRNSPLDCGSASPNKVASSSEQEAGSPPVVETTNTRPPNSSSSSGSSSAHSNQQQPPGSVSQEPRPPLQQSQVPPPEVRMTVPPLATSSAPVAVPSTAPVTYPMPQTPMGCPQPTPKMETPAIRPPPHGTTAPHKNSASVQNSSVAVLSVNHIKRPHSVPSSVQLPSTLSTQSACQNSVHPANKPIAPNFSAPLPFGPFSTLFENSPTSAHAFWGGSVVSSQSTPESMLSGKSSYLPNSDPLHQSDTSKAPGFRPPLQRPAPSPSGIVNMDSPYGSVTPSSTHLGNFASNISGGQMYGPGAPLGGAPAAANFNRQHFSPLSLLTPCSSASNDSSAQSVSSGVRAPSPAPSSVPLGSEKPSNVSQDRKVPVPIGTERSARIRQTGTSAPSVIGSNLSTSVGHSGIWSFEGIGGNQDKVDWCNPGMGNPMIHRPMSDPGVFSQHQAMERDSTGIVTPSGTFHQHVPAGYMDFPKVGGMPFSVYGNAMIPPVAPIPDGAGGPIFNGPHAADPSWNSLIKMVSSSTENNGPQTVWTGPWAPHMNSVHMNQLG

SEQ ID NO: 5166 - protein, 862 aa, Homo sapiens
  Payload ID: 1116;
  Gene Symbol: ANKRD17;
  Gene Name: ankyrin repeat domain 17;
  ENSP ID: ENSP00000453294
MEKATVPVAAATAAEGEGSPPAVAAVAGPPAAAEVGGGVGGSSRARSASSPRGMVRVCDLLLKKKPPQQQHHKAKRNRTCRPPSSSESSSDSDNSGGGGGGGGGGGGGGGTSSNNSEEEEDDDDEEEEPDKPPANVATTLPIRNKAASKQKSSSHLPANSQDVQGYITNQSPESIVEEAQGKLTELEQRIKEAIEKNAQLQSLELAHADQLTKEKIEELNKTREEQIQKKQKILEELQKVERELQLKTQQQLKKQYLEVKAQRIQLQQQQQQSCQHLGLLTPVGVGEQLSEGDYARLQQVDPVLLKDEPQQTAAQMGFAPIQPLAMPQALPLAAGPLPPGSIANLTELQGVIVGQPVLGQAQLAGLGQGILTETQQGLMVASPAQTLNDTLDDIMAVSGRASAMSNTPTHSIAASISQPQTPTPSPIISPSAMLPIYPAIDIDAQTESNHDTALTLACAGGHEELVQTLLERGASIEHRDKKGFTPLILAATAGHVGVVEILLDNGADIEAQSERTKDTPLSLACSGGRQEVVELLLARGANKEHRNVSDYTPLSLAASGGYVNIIKILLNAGAEINSRTGSKLGISPLMLAAMNGHTAAVKLLLDMGSDINAQIETNRNTALTLACFQGRTEVVSLLLDRKANVEHRAKTGLTPLMEAASGGYAEVGRVLLDKGADVNAPPVPSSRDTALTIAADKGHYKFCELLIGRGAHIDVRNKKGNTPLWLAANGGHLDVVQLLVQAGADVDAADNRKITPLMAAFRKGHVKVVRYLVKEVNQFPSDSECMRYIATITDKEMLKKCHLCMESIVQAKDRQAAEANKNASILLEELDLEKLREESRRLALAAKREKRKEKRRKKKEEQ

SEQ ID NO: 5167 - protein, 2487 aa, Homo sapiens
  Payload ID: 1116;
  Gene Symbol: ANKRD17;
  Gene Name: ankyrin repeat domain 17;
  ENSP ID: ENSP00000453434
  MOD_RES (1)..(1): Any amino acid
XEEEEDDDDEEEEVSEVESFILDQDDLENPMLETASKLLLSGTADGADLRTVDPETQARLEALLEAAGIGKLSTADGKAFADPEVLRRLTSSVSCALDEAAAALTRMRAESTANAGQSDNRSLAEACSEGDVNAVRKLLIEGRSVNEHTEEGESLLCLACSAGYYELAQVLLAMHANVEDRGIKGDITPLMAAANGGHVKIVKLLLAHKADVNAQSSTGNTALTYACAGGYVDVVKVLLESGASIEDHNENGHTPLMEAGSAGHVEVARLLLENGAGINTHSNEFKESALTLACYKGHLEMVRFLLEAGADQEHKTDEMHTALMEACMDGHVEVARLLLDSGAQVNMPADSFESPLTLAACGGHVELAALLIERGASLEEVNDEGYTPLMEAAREGHEEMVALLLGQGANINAQTEETQETALTLACCGGFLEVADFLIKAGADIELGCSTPLMEAAQEGHLELVKYLLAAGANVHATTATGDTALTYACENGHTDVADVLLQAGADLEHESEGGRTPLMKAARAGHVCTVQFLISKGANVNRTTANNDHTVLSLACAGGHLAVVELLLAHGADPTHRLKDGSTMLIEAAKGGHTSVVCYLLDYPNNLLSAPPPDVTQLTPPSHDLNRAPRVPVQALPMVVPPQEPDKPPANVATTLPIRNKAASKQKSSSHLPANSQDVQGYITNQSPESIVEEAQGKLTELEQRIKEAIEKNAQLQSLELAHADQLTKEKIEELNKTREEQIQKKQKILEELQKVERELQLKTQQQLKKQYLEVKAQRIQLQQQQQQSCQHLGLLTPVGVGEQLSEGDYARLQQVDPVLLKDEPQQTAAQMGFAPIQPLAMPQALPLAAGPLPPGSIANLTELQGVIVGQPVLGQAQLAGLGQGILTETQQGLMVASPAQTLNDTLDDIMAVSGRASAMSNTPTHSIAASISQPQTPTPSPIISPSAMLPIYPAIDIDAQTESNHDTALTLACAGGHEELVQTLLERGASIEHRDKKGFTPLILAATAGHVGVVEILLDNGADIEAQSERTKDTPLSLACSGGRQEVVELLLARGANKEHRNVSDYTPLSLAASGGYVNIIKILLNAGAEINSRTGSKLGISPLMLAAMNGHTAAVKLLLDMGSDINAQIETNRNTALTLACFQGRTEVVSLLLDRKANVEHRAKTGLTPLMEAASGGYAEVGRVLLDKGADVNAPPVPSSRDTALTIAADKGHYKFCELLIGRGAHIDVRNKKGNTPLWLAANGGHLDVVQLLVQAGADVDAADNRKITPLMAAFRKGHVKVVRYLVKEVNQFPSDSECMRYIATITDKEMLKKCHLCMESIVQAKDRQAAEANKNASILLEELDLEKLREESRRLALAAKREKRKEKRRKKKEEQRRKLEEIEAKNKENFELQAAQEKEKLKVEDEPEVLTEPPSATTTTTIGISATWTTLAGSHGKRNNTITTTSSKRKNRKNKITPENVQIIFDDPLPISYSQPEKVNGESKSSSTSESGDSDNMRISSCSDESSNSNSSRKSDNHSPAVVTTTVSSKKQPSVLVTFPKEERKSVSGKASIKLSETISEGTSNSLSTCTKSGPSPLSSPNGKLTVASPKRGQKREEGWKEVVRRSKKVSVPSTVISRVIGRGGCNINAIREFTGAHIDIDKQKDKTGDRIITIRGGTESTRQATQLINALIKDPDKEIDELIPKNRLKSSSANSKIGSSAPTTTAANTSLMGIKMTTVALSSTSQTATALTVPAISSASTHKTIKNPVNNVRPGFPVSLPLAYPPPQFAHALLAAQTFQQIRPPRLPMTHFGGTFPPAQSTWGPFPVRPLSPARATNSPKPHMVPRHSNQNSSGSQVNSAGSLTSSPTTTTSSSASTVPGTSTNGSPSSPSVRRQLFVTVVKTSNATTTTVTTTASNNNTAPTNATYPMPTAKEHYPVSSPSSPSPPAQPGGVSRNSPLDCGSASPNKVASSSEQEAGSPPVVETTNTRPPNSSSSSGSSSAHSNQQQPPGSVSQEPRPPLQQSQVPPPEVRMTVPPLATSSAPVAVPSTAPVTYPMPQTPMGCPQPTPKMETPAIRPPPHGTTAPHKNSASVQNSSVAVLSVNHIKRPHSVPSSVQLPSTLSTQSACQNSVHPANKPIAPNFSAPLPFGPFSTLFENSPTSAHAFWGGSVVSSQSTPESMLSGKSSYLPNSDPLHQSDTSKAPGFRPPLQRPAPSPSGIVNMDSPYGSVTPSSTHLGNFASNISGGQMYGPGAPLGGAPAAANFNRQHFSPLSLLTPCSSASNDSSAQSVSSGVRAPSPAPSSVPLGSEKPSNVSQDRKVPVPIGTERSARIRQTGTSAPSVIGSNLSTSVGHSGIWSFEGIGGNQDKVDWCNPGMGNPMIHRPMSDPGVFSQHQAMERDSTGIVTPSGTFHQHVPAGYMDFPKVGGMPFSVYGNAMIPPVAPIPDGAGGPIFNGPHAADPSWNSLIKMVSSSTENNGPQTVWTGPWAPHMNSVHMNQLG

SEQ ID NO: 5168 - protein, 992 aa, Homo sapiens
  Payload ID: 1117;
  Gene Symbol: ANKRD18A;
  Gene Name: ankyrin repeat domain 18A;
  Uniprot ID:  Q8IVF6;
  ENSP ID: ENSP00000382610
MRKLFSFGRRLGQALLSSMDQEYAGPGYDIRDWELRKIHRAAIKGDAAEVERCLTRRFRDLDARDRKDRTVLHLACAHGRVQVVTLLLHRRCQIDICDRLNRTPLMKAVHSQEEACAIVLLECGANPNIEDIYGNTALHYAVYNKGTSLAERLLSHHANIEALNKEGNTPLLFAINSRRQHMVEFLLKNQANIHAVDNFKRTALILAVQHNLSSIVTLLLQQNIRISSQDMFGQTAEDYALCSDLRSIRQQILEHKNKMLKNHLRNDNQETAAMKPANLKKRKERAKAEHNLKVASEEKQERLQRSENKQPQDSQSYGKKKDAMYGNFMLKKDIAMLKEELYAIKNDSLRKEKKYIQEIKSITEINANFEKSVRLNEKMITKTVARYSQQLNDLKAENARLNSELEKEKHNKERLEAEVESLHSSLATAINEYNEIVERKDLELVLWRADDVSRHEKMGSNISQLTDKNELLTEQVHKARVKFNTLKGKLRETRDALREKTLALGSVQLDLRQAQHRIKEMKQMHPNGEAKESQSIGKQNSLEERIRQQELENLLLERQLEDARKEGDNKEIVINIHRDCLENGKEDLLEERNKELMKEYNYLKEKLLQCEKEKAEREVIVREFQEELVDHLKTFSISESPLEGTSHCHINLNETWTSKKKLFQVEIQPEEKHEEFRKLFELISLLNYTADQIRKKNRELEEEATGYKKCLEMTINMLNAFANEDFSCHGDLNTDQLKMDILFKKLKQKFNDLVAEKEAVSSECVNLAKDNEVLHQELLSMRNVQEKCEKLEKDKKMLEEEVLNLKTHMEKDMVELGKLQEYKSELDERAVQEIEKLEEIHLQKQAEYEKQLEQLNKDNTASLKKKELTLKDVECKFSKMKTAYEEVTTELEEFKEAFAGAVKANNSMSKKLMKSDKKIAVISTKLFTEKQRMKYFLSTLPTRPEPELPCVENLNSIELNRKYIPKTAIRIPTSNPQTSNNCKNFLTEVLLC

SEQ ID NO: 5169 - protein, 401 aa, Homo sapiens
  Payload ID: 1117;
  Gene Symbol: ANKRD18A;
  Gene Name: ankyrin repeat domain 18A;
  ENSP ID: ENSP00000473463
EKEKAEREVIVREFQEELVDHLKTFSISESPLEGTSHCHINLNETWTSKKKLFQVEIQPEEKHEEFRKLFELISLLNYTADQIRKKNRELEEEATGYKKCLEMTINMLNAFANEDFSCHGDLNTDQLKMDILFKKLKQKFNDLVAEKEAVSSECVNLAKDNEVLHQELLSMRNVQEKCEKLEKDKKMLEEEVLNLKTHMEKDMVELGKLQEYKSELDERAVQEIEKLEEIHLQKQAEYEKQLEQLNKDNTASLKKKELTLKDVECKFSKMKTAYEEVTTELEEFKEAFAGAVKANNSMSKKLMKSDKKIAVISTKLFTEKQRMKYFLSTLPTRPEPELPCVENLNSIELNRKYIPKTAIRIPTSNPQTSNNCKNFLTEMELDRVEQIITGTKKSMLPKCIN

SEQ ID NO: 5170 - protein, 1011 aa, Homo sapiens
  Payload ID: 1118;
  Gene Symbol: ANKRD18B;
  Gene Name: ankyrin repeat domain 18B;
  Uniprot ID:  A2A2Z9;
  ENSP ID: ENSP00000290943
MRKLLSFGRRLGQALLSSMDQEYAGRGYHIRDWELRKIHRAAIKGDAAEVEHCLTRRFRDLDVRDRKDRTVLHLACAHGRVQVVTLLLDRKCQINICDRLNRTPLMKAVHCQEEACAIILLKRGANPNIKDIYGNTALHYAVYNEGTSLAERLLSHHANIEALNKEGNTPLLFAINSRRQHMVEFLLKNQANIHAVDNFKRTALILAVQHNLSSIVTLLLQQNIHISSQDMFGQTAEDYAFCCDLRSIQQQILEHKNKMLKNHLRNDNQETAAMKPENLKKRKKRKKLKKRKEGAKAEHNLKVASEEKQERLERSENKQPQDSQSYGKKKDEMFGNFMLKRDIAMLKEELYAIKNDSLRKEKKYIQEIKSITEINANFEKSVRLNEEMITKKVAQYSQQLNDLKAENARLNSKLEKEKHNKERLEAEVESLHSNLATAINEYNEILERKDLELVLWRADDVSRHETMGSNISQLTDKNELLTEQVHKARVKFNTLKGKLRETRDALREKTLALESVQLDLKQAQHRIKEMKQMHPNGEAKESQSIGKQNSSEERIRQRELENLLLERQLEDARKEGDNKEIVINIHRDCLENGKEDLLEERNKELMNEYNYLKEKLLQYEKEKAEREVIVREFQEELVDHLKKFSMSESPLEGTSHCHINLDETWTSKKKLFQVEIQPEEKHEEFRKVFELISLLNYTADQIRKKNRELEEEATGYKKCLEMTINMLNAFANEDFSCHGDLNTDQLKMDILFKKLKQKFDDLMAEKEAVSSKCVNLAKDNEVLHQELLSMGKVQEKCEKLEKDKKMLEEKVLNLKTHMEKDMVELGKVQEYKSELDERAMQAIEKLEEIHLQKQAEYEKQLEQLNKDNTASLKKKELTLKDVECKFSKMKTAYEDVTTELEEYKEAFAVALKANSSMSEKITKSDKKIAVISTKLFMEKERMEYFLSTLPMRPDPELPCVENLNSIELNRKYIPKMAIRIPTSNPQTSNNCKNSLTELLLRWALAPIYFLL

SEQ ID NO: 5171 - protein, 401 aa, Homo sapiens
  Payload ID: 1118;
  Gene Symbol: ANKRD18B;
  Gene Name: ankyrin repeat domain 18B;
  ENSP ID: ENSP00000350607
EKEKAEREVIVREFQEELVDHLKKFSMSESPLEGTSHCHINLDETWTSKKKLFQVEIQPEEKHEEFRKVFELISLLNYTADQIRKKNRELEEEATGYKKCLEMTINMLNAFANEDFSCHGDLNTDQLKMDILFKKLKQKFDDLMAEKEAVSSKCVNLAKDNEVLHQELLSMGKVQEKCEKLEKDKKMLEEKVLNLKTHMEKDMVELGKVQEYKSELDERAMQAIEKLEEIHLQKQAEYEKQLEQLNKDNTASLKKKELTLKDVECKFSKMKTAYEDVTTELEEYKEAFAVALKANSSMSEKITKSDKKIAVISTKLFMEKERMEYFLSTLPMRPDPELPCVENLNSIELNRKYIPKMAIRIPTSNPQTSNNCKNSLTEMELDCAEQIITETKKSMLPKCIN

SEQ ID NO: 5172 - protein, 160 aa, Homo sapiens
  Payload ID: 1118;
  Gene Symbol: ANKRD18B;
  Gene Name: ankyrin repeat domain 18B;
  ENSP ID: ENSP00000473566
KQAEYEKQLEQLNKDNTASLKKKELTLKDVECKFSKMKTAYEDVTTELEEYKEAFAVALKANSSMSEKITKSDKKIAVISTKLFMEKERMEYFLSTLPMRPDPELPCVENLNSIELNRKYIPKMAIRIPTSNPQTSNNCKNSLTEVSYMTISLLGFISLI

SEQ ID NO: 5173 - protein, 75 aa, Homo sapiens
  Payload ID: 1118;
  Gene Symbol: ANKRD18B;
  Gene Name: ankyrin repeat domain 18B;
  ENSP ID: ENSP00000474332
  MOD_RES (1)..(1): Any amino acid
XQILEHKNKMLKNHLRNDNQETAAMKPENLKKRKKRKKLKKRKEGAKEHNLKVASEEKQERLERSENKQPQDSQS

SEQ ID NO: 5174 - protein, 327 aa, Homo sapiens
  Payload ID: 1119;
  Gene Symbol: ANKRD2;
  Gene Name: ankyrin repeat domain 2 (stretch responsive muscle);
  Uniprot ID:  Q9GZV1;
  ENSP ID: ENSP00000298808
MAKAPSWAGVGALAYKAPEALWPAEAVMDGTMEDSEAVQRATALIEQRLAQEEENEKLRGDARQKLPMDLLVLEDEKHHGAQSAALQKVKGQERVRKTSLDLRREIIDVGGIQNLIELRKKRKQKKRDALAASHEPPPEPEEITGPVDEETFLKAAVEGKMKVIEKFLADGGSADTCDQFRRTALHRASLEGHMEILEKLLDNGATVDFQDRLDCTAMHWACRGGHLEVVKLLQSHGADTNVRDKEGDTALHDAVRLNRYKIIKLLLLHGADMMTKNLAGKTPTDLVQLWQADTRHALEHPEPGAEHNGLEGPNDSGRETPQPVPAQ

SEQ ID NO: 5175 - protein, 360 aa, Homo sapiens
  Payload ID: 1119;
  Gene Symbol: ANKRD2;
  Gene Name: ankyrin repeat domain 2 (stretch responsive muscle);
  Uniprot ID:  Q9GZV1;
  ENSP ID: ENSP00000306163
MAKAPSWAGVGALAYKAPEALWPAEAVMDGTMEDSEAVQRATALIEQRLAQEEENEKLRGDARQKLPMDLLVLEDEKHHGAQSAALQKVKGQERVRKTSLDLRREIIDVGGIQNLIELRKKRKQKKRDALAASHEPPPEPEEITGPVDEETFLKAAVEGKMKVIEKFLADGGSADTCDQFRRTALHRASLEGHMEILEKLLDNGATVDFQDRLDCTAMHWACRGGHLEVVKLLQSHGADTNVRDKLLSTPLHVAVRTGQVEIVEHFLSLGLEINARDREGDTALHDAVRLNRYKIIKLLLLHGADMMTKNLAGKTPTDLVQLWQADTRHALEHPEPGAEHNGLEGPNDSGRETPQPVPAQ

SEQ ID NO: 5176 - protein, 333 aa, Homo sapiens
  Payload ID: 1119;
  Gene Symbol: ANKRD2;
  Gene Name: ankyrin repeat domain 2 (stretch responsive muscle);
  ENSP ID: ENSP00000359689
MDGTMEDSEAVQRATALIEQRLAQEEENEKLRGDARQKLPMDLLVLEDEKHHGAQSAALQKVKGQERVRKTSLDLRREIIDVGGIQNLIELRKKRKQKKRDALAASHEPPPEPEEITGPVDEETFLKAAVEGKMKVIEKFLADGGSADTCDQFRRTALHRASLEGHMEILEKLLDNGATVDFQDRLDCTAMHWACRGGHLEVVKLLQSHGADTNVRDKLLSTPLHVAVRTGQVEIVEHFLSLGLEINARDREGDTALHDAVRLNRYKIIKLLLLHGADMMTKNLAGKTPTDLVQLWQADTRHALEHPEPGAEHNGLEGPNDSGRETPQPVPAQ

SEQ ID NO: 5177 - protein, 300 aa, Homo sapiens
  Payload ID: 1119;
  Gene Symbol: ANKRD2;
  Gene Name: ankyrin repeat domain 2 (stretch responsive muscle);
  ENSP ID: ENSP00000403114
MDGTMEDSEAVQRATALIEQRLAQEEENEKLRGDARQKLPMDLLVLEDEKHHGAQSAALQKVKGQERVRKTSLDLRREIIDVGGIQNLIELRKKRKQKKRDALAASHEPPPEPEEITGPVDEETFLKAAVEGKMKVIEKFLADGGSADTCDQFRRTALHRASLEGHMEILEKLLDNGATVDFQDRLDCTAMHWACRGGHLEVVKLLQSHGADTNVRDKEGDTALHDAVRLNRYKIIKLLLLHGADMMTKNLAGKTPTDLVQLWQADTRHALEHPEPGAEHNGLEGPNDSGRETPQPVPAQ

SEQ ID NO: 5178 - protein, 823 aa, Homo sapiens
  Payload ID: 1120;
  Gene Symbol: ANKRD20A1;
  Gene Name: ankyrin repeat domain 20 family, member A1;
  Uniprot ID:  Q5TYW2;
  ENSP ID: ENSP00000477695
MKLFGFGSRRGQTAQGSIDHVYTGSGYRIRDSELQKIHRAAVKGDAAEVERCLARRSGDLDALDKQHRTALHLACTSGHVQVVTLLVNRKCQIDVCDKENRTPLIQAVHCQEEACAVILLEHGANPNLKDIYGNTALHYAVYSESTSLAEKLLSHGAHIEALDKDNNTPLLFAIICKKEKMVEFLLKKKASSHAVDRLRRSALMLAVYYDSPGIVNILLKQNIDVFAQDMCGRDAEDYAISHHLTKIQQQILEHKKKILKKEKSDVGSSDESAVSIFHELRVDSLPASDDKDLNVATKQCVPEKVSEPLPGSSHEKGNRIVNGQGEGPPAKHPSLKPSTEVEDPAVKGAVQRKNVQTLRAEQALPVASEEEQERHERSEKKQPQVKEGNNTNKSEKIQLSENICDSTSSAAAGRLTQQRKIGKTYPQQFPKKLKEEHDRCTLKQENEEKTNVNMLYKKNREELERKEKQYKKEVEAKQLEPTVQSLEMKSKTARNTPNWDFHNHEEMKGLMDENCILKADIAILRQEICTMKNDNLEKENKYLKDIKIVKETNAALEKYIKLNEEMITETAFRYQQELNDLKAENTRLNAELLKEKESKKRLEADIESYQSRLAAAISKHSESVKTERNLKLALERTRDVSVQVEMSSAISKVKAENEFLTEQLSETQIKFNALKDKFRKTRDSLRKKSLALETVQNDLSQTQQQTQEMKEMYQNAEAKVNNSTGKWNCVEERICHLQRENAWLVQQLDDVHQKEDHKEIVTNIQRGFIESGKKDLVLEEKSKKLMNECDHLKESLFQYEREKTEGVVSIKEDKYFQTSRKTI

SEQ ID NO: 5179 - protein, 185 aa, Homo sapiens
  Payload ID: 1120;
  Gene Symbol: ANKRD20A1;
  Gene Name: ankyrin repeat domain 20 family, member A1;
  ENSP ID: ENSP00000481217
MKLFGFGSRRGQTAQGSIDHVYTGSGYRIRDSELQKIHRAAVKGDAAEVERCLARRSGDLDALDKQHRTALHLACTSGHVQVVTLLVNRKCQIDVCDKENRTPLIQAVHCQEEACAVILLEHGANPNLKDIYGNTALHYAVYSESTSLAEKLLSHGAHIEALDKQCVPEKVSEPLPGSSHEKGNR

SEQ ID NO: 5180 - protein, 95 aa, Homo sapiens
  Payload ID: 1120;
  Gene Symbol: ANKRD20A1;
  Gene Name: ankyrin repeat domain 20 family, member A1;
  ENSP ID: ENSP00000483923
MKLFGFGSRRGQTAQGSIDHVYTGSGYRIRDSELQKIHRAAVKGDAAEVERCLARRSGDLDALDKQHREFFQIKSSNTLKVGKVPFSRSTSYLYT

SEQ ID NO: 5181 - protein, 823 aa, Homo sapiens
  Payload ID: 1121;
  Gene Symbol: ANKRD20A2;
  Gene Name: ankyrin repeat domain 20 family, member A2;
  Uniprot ID:  Q5SQ80;
  ENSP ID: ENSP00000366826
MKLFGFGSRRGQTAQGSIDHVYTGSGYRIRDSELQKIHRAAVKGDAAEVERCLARRSGDLDALDKQHRTALHLACASGHVQVVTLLVNRKCQIDVCDKENRTPLIQAVHCQEEACAVILLEHGANPNLKDIYGNTALHYAVYSESTSLAEKLLSHGAHIEALDKDNNTPLLFAIICKKEKMVEFLLKRKASSHAVDRLRRSALMLAVYYDSPGIVNILLKQNIDVFAQDMCGRDAEDYAISHHLTKIQQQILEHKKKILKKEKSDVGSSDESAVSIFHELRVDSLPASDDKDLNVATKQCVPEKVSEPLPGSSHEKGNRIVNGQGEGPPAKHPSLKPSTEVEDPAVKGAVQRKNVQTLRAEQALPVASEEEQERHERSEKKQPQVKEGNNTNKSEKIQLSENICDSTSSAAAGRLTQQRKIGKTYPQQFPKKLKEEHDRCTLKQENEEKTNVNMLYKKNREELERKEKQYKKEVEAKQLEPTVQSLEMKSKTARNTPNRDFHNHEEMKGLMDENCILKADIAILRQEICTMKNDNLEKENKYLKDIKIVKETNAALEKYIKLNEEMITETAFRYQQELNDLKAENTRLNAELLKEKESKKRLEADIESYQSRLAAAISKHSESVKTERNLKLALERTRDVSVQVEMSSAISKVKDENEFLTEQLSETQIKFNALKDKFRKTRDSLRKKSLALETVQNDLSQTQQQTQEMKEMYQNAEAKVNNSTGKWNCVEERICHLQRENAWLVQQLDDVHQKEDHKEIVTNIQRGFIESGKKDLVLEEKSKKLMNECDHLKESLFQYEREKTEGVVSIKEDKYFQTSRKKI

SEQ ID NO: 5182 - protein, 142 aa, Homo sapiens
  Payload ID: 1121;
  Gene Symbol: ANKRD20A2;
  Gene Name: ankyrin repeat domain 20 family, member A2;
  ENSP ID: ENSP00000484370
MKLFGFGSRRGQTAQGSIDHVYTGSGYRIRDSELQKIHRAAVKGDAAEVERCLARRSGDLDALDKQHRLSIARKRLVPLFCWNMAPIQTLRISTATLLSIMPCIVRAPHWQKNCFPMVHILKHWTRYRSINFLSKIFVLTLT

SEQ ID NO: 5183 - protein, 95 aa, Homo sapiens [sequence omitted]

SEQ ID NO: 5184 - protein, 823 aa, Homo sapiens
  Payload ID: 1122;
  Gene Symbol: ANKRD20A3;
  Gene Name: ankyrin repeat domain 20 family, member A3;
  Uniprot ID:  Q5VUR7;
  ENSP ID: ENSP00000482325
MKLFGFGSRRGQTAQGSIDHVYTGSGYRIRDSELQKIHRAAVKGDAAEVERCLARRSGDLDALDKQHRTALHLACASGHVQVVTLLVNRKCQIDVCDKENRTPLIQAVHCQEEACAVILLEHGANPNLKDIYGNTALHYAVYSESTSLAEKLLSHGAHIEALDKDNNTPLLFAIICKKEKMVEFLLKRKASSHAVDRLRRSALMLAVYYDSPGIVNILLKQNIDVFAQDMCGRDAEDYAISHHLTKIQQQILEHKKKILKKEKSDVGSSDESAVSIFHELRVDSLPASDDKDLNVATKQCVPEKVSEPLPGSSHEKGNRIVNGQGEGPPAKHPSLKPSTEVEDPAVKGAVQRKNVQTLRAEQALPVASEEEQERHERSEKKQPQVKEGNNTNKSEKIQLSENICDSTSSAAAGRLTQQRKIGKTYPQQFPKKLKEEHDRCTLKQENEEKTNVNMLYKKNREELERKEKQYKKEVEAKQLEPTVQSLEMKSKTARNTPNRDFHNHEEMKGLMDENCILKADIAILRQEICTMKNDNLEKENKYLKDIKIVKETNAALEKYIKLNEEMITETAFRYQQELNYLKAENTRLNAELLKEKESKKRLEADIESYQSRLAAAISKHSESVKTERNLKLALERTRDVSVQVEMSSAISKVKDENEFLTEQLSETQIKFNALKDKFRKTRDSLRKKSLALETVQNDLSQTQQQTQEMKEMYQNAEAKVNNSTGKWNCVEERICHLQRENAWLVQQLDDVHQKEDHKEIVTNIQRGFIESGKKDLVLEEKSKKLMNECDHLKESLFQYEREKTEGVVSIKEDKYFQTSRKTI

SEQ ID NO: 5185 - protein, 823 aa, Homo sapiens
  Payload ID: 1123;
  Gene Symbol: ANKRD20A4;
  Gene Name: ankyrin repeat domain 20 family, member A4;
  Uniprot ID:  Q4UJ75;
  ENSP ID: ENSP00000349891
MKLFGFGSRRGQTAQGSIDHVYTGSGYRIRDSELQKIHRAAVKGDAAEVERCLARRSGELDALDKQHRTALHLACASGHVQVVTLLVNRKCQIDVCDKENRTPLIQAVHCQEEACAVILLEHGANPNLKDIYGNTALHYAVYSESTSLAEKLLSHGAHIEALDKDNNTPLLFAIICKKEKMVEFLLKKKASSHAVDRLRRSALMLAVYYDSPGIVNILLKQNIDVFAQDMCGRDAEDYAISHHLTKIQQQILEHKKKILKKEKSDVGSSDESAVSIFHELRVDSLPASDDKDLNVATKQCVPEKVSEPLPGSSHEKGNRIVNGQGEGPPAKHPSLKPSTEVEDPAVKGAVQRKNVQTLRAEQALPVASEEEQQRHERSEKKQPQVKEGNNTNKSEKIQLSENICDSTSSAAAGRLTQQRKIGKTYPQQFPKKLKEEHDRCTLKQENEEKTNVNMLYKKNREELERKEKQYKKEVEAKQLEPTVQSLEMKSKTARNTPNWDFHNHEEMKGLMDENCILKADIAILRQEICTMKNDNLEKENKYLKDIKIVKETNAALEKYIKLNEEMITETAFRYQQELNDLKAENTRLNAELLKEKESKKRLEADIESYQSRLAAAISKHSESVKTERNLKLALERTQDVSVQVEMSSAISKVKDENEFLTEQLSETQIKFNALKDKFRKTRDSLRKKSLALETVQNNLSQTQQQTQEMKEMYQNAEAKVNNSTGKWNCVEERICHLQRENAWLVQQLDDVHQKEDHKEIVTNIQRGFIESGKKDFVLEEKSKKLMNECDHLKESLFQYEREKTEVVVSIKEDKYFQTSRKKI

SEQ ID NO: 5186 - protein, 142 aa, Homo sapiens
  Payload ID: 1123;
  Gene Symbol: ANKRD20A4;
  Gene Name: ankyrin repeat domain 20 family, member A4;
  ENSP ID: ENSP00000478208
MKLFGFGSRRGQTAQGSIDHVYTGSGYRIRDSELQKIHRAAVKGDAAEVERCLARRSGELDALDKQHRLSIARKRLVPLFCWNMAPIQTLRISTATLLSIMPCIVRAPHWQKNCFPMVHILKHWTRYRSINFLSKIFVLTLT

SEQ ID NO: 5187 - protein, 191 aa, Homo sapiens
  Payload ID: 1124;
  Gene Symbol: ANKRD22;
  Gene Name: ankyrin repeat domain 22;
  Uniprot ID:  Q5VYY1;
  ENSP ID: ENSP00000360998
MGILYSEPICQAAYQNDFGQVWRWVKEDSSYANVQDGFNGDTPLICACRRGHVRIVSFLLRRNANVNLKNQKERTCLHYAVKKKFTFIDYLLIILLMPVLLIGYFLMVSKTKQNEALVRMLLDAGVEVNATDCYGCTALHYACEMKNQSLIPLLLEARADPTIKNKHGESSLDIARRLKFSQIELMLRKAL

SEQ ID NO: 5188 - protein, 305 aa, Homo sapiens
  Payload ID: 1125;
  Gene Symbol: ANKRD23;
  Gene Name: ankyrin repeat domain 23;
  Uniprot ID:  Q86SG2;
  ENSP ID: ENSP00000321679
MDFISIQQLVSGERVEGKVLGFGHGVPDPGAWPSDWRRGPQEAVAREKLKLEEEKKKKLERFNSTRFNLDNLADLENLVQRRKKRLRHRVPPRKPEPLVKPQSQAQVEPVGLEMFLKAAAENQEYLIDKYLTDGGDPNAHDKLHRTALHWACLKGHSQLVNKLLVAGATVDARDLLDRTPVFWACRGGHLVILKQLLNQGARVNARDKIGSTPLHVAVRTRHPDCLEHLIECGAHLNAQDKEGDTALHEAVRHGSYKAMKLLLLYGAELGVRNAASVTPVQLARDWQRGIREALQAHVAHPRTRC

SEQ ID NO: 5189 - protein, 263 aa, Homo sapiens
  Payload ID: 1125;
  Gene Symbol: ANKRD23;
  Gene Name: ankyrin repeat domain 23;
  Uniprot ID:  Q86SG2;
  ENSP ID: ENSP00000333108
MDFISIQQLVSGERVEGKVLGFGHGVPDPGAWPSDWRRGPQEAVAREKLKLEEEKKKKLERFNSTRFNLDNLADLENLVQRRKKRLRHRVPPRKPEPLVKLHRTALHWACLKGHSQLVNKLLVAGATVDARDLLDRTPVFWACRGGHLVILKQLLNQGARVNARDKIGSTPLHVAVRTRHPDCLEHLIECGAHLNAQDKEGDTALHEAVRHGSYKAMKLLLLYGAELGVRNAASVTPVQLARDWQRGIREALQAHVAHPRTRC

SEQ ID NO: 5190 - protein, 305 aa, Homo sapiens; identical to SEQ ID NO: 5188
  Payload ID: 1125;
  Gene Symbol: ANKRD23;
  Gene Name: ankyrin repeat domain 23;
  Uniprot ID:  Q86SG2;
  ENSP ID: ENSP00000398987

SEQ ID NO: 5191 - protein, 1236 aa, Homo sapiens
  Payload ID: 1126;
  Gene Symbol: ANKRD24;
  Gene Name: ankyrin repeat domain 24;
  Uniprot ID:  Q8TF21;
  ENSP ID: ENSP00000262970
MQPAACAGEGAGPPAPRPPHPPGDKVRRGRGGAPSLSPQPPAPYLGLPIPSRGGGGWRGGQGGGGGTREGGTGRAGGAGSSGSAQPRPPAAPRGPSRPSGRRLLLEPRAPPAPRAPDAMKQLCLCAAASFASQDWGKSDERLLQAVENNDAPRVAALIARKGLVPTKLDPEGKSAFHLAAMRGAASCLEVMIAHGSNVMSADGAGYNALHLAAKYGHPQCLKQLLQASCVVDVVDSSGWTALHHAAAGGCLSCSEVLCSFKAHLNPQDRSGATPLIIAAQMCHTDLCRLLLQQGAAANDQDLQGRTALMLACEGASPETVEVLLQGGAQPGITDALGQDAAHYGALAGDKLILHLLQEAAQRPSPPSALTEDDSGEASSQNSMSSHGKQGAPKKRKAPPPPASIPMPDDRDAYEEIVRLRQERGRLLQKIRGLEQHKERRQQESPEASSLHILERQVQELQQLLVERQEEKESLGREVESLQSRLSLLENERENTSYDVTTLQDEEGELPDLPGAEVLLSRQLSPSAQEHLASLQEQVAVLTRQNQELMEKVQILENFEKDETQMEVEALAEVIPLALYDSLRAEFDQLRRQHAEALQALRQQETREVPREEGAACGESEVAGATATKNGPTHMELNGSVAPETKVNGAETIDEEAAGDETMEARTMEAEATGAEATGAEATGAKVTETKPTGAEVREMETTEEEANMETKPTGAQATDTETTGVEAMGVEATKTKAEEAEMQAYGVGAGQAEPPVTGTTNMEATGSRATGMESTGVSATGVENPGVEATVPGISAGPILHPGAAEASEKLQVELETRIRGLEEALRQREREAAAELEAALGKCEAAEAEAGRLRERVREAEGSGASGGGGGDTTQLRAALEQAREDLRDRDSRLRELEAASACLDEARASRLLAEEEARGLRAELAQREEARLEQSRELEVLREQLATARATGEQQRTAAAELGRARDAAEARVAELPAACEEARQGLAELREASEALRQSVVPASEHRRLQEEALELRGRAASLEQEVVATGKEAARLRAELERERVCSVALSEHERIVGTLQANVAQLEGQLEELGRRHEKTSAEVFQVQREALFMKSERHAAEAQLATAEQQLRGLRTEAERARQAQSRAQEALDKAKEKDKKITELSKEVFNLKEALKEQPAALATPEVEALRDQVKDLQQQLQEAARDHSSVVALYRSHLLYAIQGQMDEDVQRILSQILQMQRLQAQGR

SEQ ID NO: 5192 - protein, 1146 aa, Homo sapiens
  Payload ID: 1126;
  Gene Symbol: ANKRD24;
  Gene Name: ankyrin repeat domain 24;
  Uniprot ID:  Q8TF21;
  ENSP ID: ENSP00000321731
MKTLRARFKKTELRLSPTDLGSCPPCGPCPIPKPAARGRRQSQDWGKSDERLLQAVENNDAPRVAALIARKGLVPTKLDPEGKSAFHLAAMRGAASCLEVMIAHGSNVMSADGAGYNALHLAAKYGHPQCLKQLLQASCVVDVVDSSGWTALHHAAAGGCLSCSEVLCSFKAHLNPQDRSGATPLIIAAQMCHTDLCRLLLQQGAAANDQDLQGRTALMLACEGASPETVEVLLQGGAQPGITDALGQDAAHYGALAGDKLILHLLQEAAQRPSPPSALTEDDSGEASSQNSMSSHGKQGAPKKRKAPPPPASIPMPDDRDAYEEIVRLRQERGRLLQKIRGLEQHKERRQQESPEASSLHILERQVQELQQLLVERQEEKESLGREVESLQSRLSLLENERENTSYDVTTLQDEEGELPDLPGAEVLLSRQLSPSAQEHLASLQEQVAVLTRQNQELMEKVQILENFEKDETQMEVEALAEVIPLALYDSLRAEFDQLRRQHAEALQALRQQETREVPREEGAACGESEVAGATATKNGPTHMELNGSVAPETKVNGAETIDEEAAGDETMEARTMEAEATGAEATGAEATGAKVTETKPTGAEVREMETTEEEANMETKPTGAQATDTETTGVEAMGVEATKTKAEEAEMQAYGVGAGQAEPPVTGTTNMEATGSRATGMESTGVSATGVENPGVEATVPGISAGPILHPGAAEASEKLQVELETRIRGLEEALRQREREAAAELEAALGKCEAAEAEAGRLRERVREAEGSGASGGGGGDTTQLRAALEQAREDLRDRDSRLRELEAASACLDEARASRLLAEEEARGLRAELAQREEARLEQSRELEVLREQLATARATGEQQRTAAAELGRARDAAEARVAELPAACEEARQGLAELREASEALRQSVVPASEHRRLQEEALELRGRAASLEQEVVATGKEAARLRAELERERVCSVALSEHERIVGTLQANVAQLEGQLEELGRRHEKTSAEVFQVQREALFMKSERHAAEAQLATAEQQLRGLRTEAERARQAQSRAQEALDKAKEKDKKITELSKEVFNLKEALKEQPAALATPEVEALRDQVKDLQQQLQEAARDHSSVVALYRSHLLYAIQGQMDEDVQRILSQILQMQRLQAQGR

SEQ ID NO: 5193 - protein, 839 aa, Homo sapiens
  Payload ID: 1126;
  Gene Symbol: ANKRD24;
  Gene Name: ankyrin repeat domain 24;
  ENSP ID: ENSP00000470227
MKTLRARFKKTESQDWGKSDERLLQAVENNDAPRVAALIARKGLVPTKLDPEGKSAFHLAAMRGAASCLEVMIAHGSNVMSADGAGYNALHLAAKYGHPQCLKQLLQASCVVDVVDSSGWTALHHAAAGGCLSCSEVLCSFKAHLNPQDRSGATPLIIAAQMCHTDLCRLLLQQGAAANDQDLQGRTALMLACEGASPETVEVLLQGGAQPGITDALGQDAAHYGALAGDKLILHLLQEAAQRPSPPSALTEDDSGEASSQNSMSSHGKQGAPKKRKAPPPPASIPMPDDRDAYEEIVRLRQERGRLLQKIRGLEQHKERRQQESPEASSLHILERQVQELQQLLVERQEEKESLGREVESLQSRLSLLENERENTSYDVTTLQDEEGELPDLPGAEVLLSRQLSPSAQEHLASLQEQVAVLTRQNQELMEKVQILENFEKDETQMEVEALAEVIPLALYDSLRAEFDQLRRQHAEALQALRQQETREVPREEGAACGESEVAGATATKNGPTHMELNGSVAPETKVNGAETIDEEAAGDETMEARTMEAEATGAEATGAEATGAKVTETKPTGAEVREMETTEEEANMETKPTGAQATDTETTGVEAMGVEATKTKAEEAEMQAYGVGAGQAEPPVTGTTNMEATGSRATGMESTGVSATGVENPGVEATVPGISAGPILHPGAAEASEKLQVELETRIRGLEEALRQREREAAAELEAALGKCEAAEAEAGRLRERVREAEGSGASGGGGGDTTQLRAALEQAREDLRDRDSRLRELEAASACLDEARASRLLAEEEARGLRAELAQREEARLEQSRELEVLREQLATARATGEQQR

SEQ ID NO: 5194 - protein, 1146 aa, Homo sapiens; identical to SEQ ID NO: 5192
  Payload ID: 1126;
  Gene Symbol: ANKRD24;
  Gene Name: ankyrin repeat domain 24;
  Uniprot ID:  Q8TF21;
  ENSP ID: ENSP00000471252

SEQ ID NO: 5195 - protein, 163 aa, Homo sapiens
  Payload ID: 1126;
  Gene Symbol: ANKRD24;
  Gene Name: ankyrin repeat domain 24;
  ENSP ID: ENSP00000471346
  MOD_RES (1)..(1): Any amino acid
XPRGPSRPSGRRLLLEPRAPPAPRAPDAMKQLCLCAAASFASQDWGKSDERLLQAVENNDAPRVAALIARKGLVPTKLDPEGKSAFHLAAMRGAASCLEVMIAHGSNVMSADGAGYNALHLAAKYGHPQCLKQLLQRQGLTVLAQRLVAVSPAQRCSAPLRHI

SEQ ID NO: 5196 - protein, 1710 aa, Homo sapiens
  Payload ID: 1127;
  Gene Symbol: ANKRD26;
  Gene Name: ankyrin repeat domain 26;
  Uniprot ID:  Q9UPS8;
  ENSP ID: ENSP00000365255
MKKIFSKKGESPLGSFARRQRSSAGGGGEPGEGAYSQPGYHVRDRDLGKIHKAASAGNVAKVQQILLLRKNGLNDRDKMNRTALHLACANGHPEVVTLLVDRKCQLNVCDNENRTALMKAVQCQEEKCATILLEHGADPNLADVHGNTALHYAVYNEDISVATKLLLYDANIEAKNKDDLTPLLLAVSGKKQQMVEFLIKKKANVNAVDKLESSHQLISEYKEERIPKHSSQNSNSVDESSEDSLSRLSGKPGVDDSWPTSDDEDLNFDTKNVPKPSLAKLMTASQQSRKNLEATYGTVRTGNRTLFEDRDSDSQDEVVVESLPTTSIKVQCFSHPTYQSPDLLPKPSHKSLANPGLMKEEPTKPGIAKKENGIDIIESAPLEQTNNDNLTYVDEVHKNNRSDMMSALGLGQEEDIESPWDSESISENFPQKYVDPLAGAADGKEKNIGNEQAEDVFYIPSCMSGSRNFKMAKLEDTRNVGMPVAHMESPERYLHLKPTIEMKDSVPNKAGGMKDVQTSKAAEHDLEVASEEEQEREGSENNQPQVEEERKKHRNNEMEVSANIHDGATDDAEDDDDDDGLIQKRKSGETDHQQFPRKENKEYASSGPALQMKEVKSTEKEKRTSKESVNSPVFGKASLLTGGLLQVDDDSSLSEIDEDEGRPTKKTSNEKNKVKNQIQSMDDVDDLTQSSETASEDCELPHSSYKNFMLLIEQLGMECKDSVSLLKIQDAALSCERLLELKKNHCELLTVKIKKMEDKVNVLQRELSETKEIKSQLEHQKVEWERELCSLRFSLNQEEEKRRNADTLYEKIREQLRRKEEQYRKEVEVKQQLELSLQTLEMELRTVKSNLNQVVQERNDAQRQLSREQNARMLQDGILTNHLSKQKEIEMAQKKMNSENSHSHEEEKDLSHKNSMLQEEIAMLRLEIDTIKNQNQEKEKKCFEDLKIVKEKNEDLQKTIKQNEETLTQTISQYNGRLSVLTAENAMLNSKLENEKQSKERLEAEVESYHSRLAAAIHDRDQSETSKRELELAFQRARDECSRLQDKMNFDVSNLKDNNEILSQQLFKTESKLNSLEIEFHHTRDALREKTLGLERVQKDLSQTQCQMKEMEQKYQNEQVKVNKYIGKQESVEERLSQLQSENMLLRQQLDDAHNKADNKEKTVINIQDQFHAIVQKLQAESEKQSLLLEERNKELISECNHLKERQYQYENEKAEREVVVRQLQQELADTLKKQSMSEASLEVTSRYRINLEDETQDLKKKLGQIRNQLQEAQDRHTEAVRCAEKMQDHKQKLEKDNAKLKVTVKKQMDKIEELQKNLLNANLSEDEKEQLKKLMELKQSLECNLDQEMKKNVELEREITGFKNLLKMTRKKLNEYENGEFSFHGDLKTSQFEMDIQINKLKHKIDDLTAELETAGSKCLHLDTKNQILQEELLSMKTVQKKCEKLQKNKKKLEQEVINLRSHIERNMVELGQVKQYKQEIEERARQEIAEKLKEVNLFLQAQAASQENLEQFRENNFASMKSQMELRIKDLESELSKIKTSQEDFNKTELEKYKQLYLEELKVRKSLSSKLTKTNERLAEVNTKLLVEKQQSRSLFTTLTTRPVMEPPCVGNLNNSLDLNRKLIPRENLVISTSNPRASNNSMENYLSKMQQELEKNITRELKEAAAELESGSIASPLGSTDESNLNQDLVWKASREYVQVLKKNYMI

SEQ ID NO: 5197 - protein, 213 aa, Homo sapiens
  Payload ID: 1127;
  Gene Symbol: ANKRD26;
  Gene Name: ankyrin repeat domain 26;
  ENSP ID: ENSP00000394152
  MOD_RES (1)..(1): Any amino acid
XFRENNFASMKSQMELRIKDLESELSKIKTSQEDFNKTELEKYKQLYLEELKVRKSLSSKLTKTNERLAEVNTKLLVEKQQSRSLFTTLTTRPVMEPPCVGNLNNSLDLNRKLIPRENLVISTSNPRASNNSMENYLSKMQQELEKNITRELKEAAAELESGSIASPLGSTDESNLNQDLVWKASREYGPSDETPHDYVLMTDQCLTSRTDLQ

SEQ ID NO: 5198 - protein, 1726 aa, Homo sapiens
  Payload ID: 1127;
  Gene Symbol: ANKRD26;
  Gene Name: ankyrin repeat domain 26;
  ENSP ID: ENSP00000405112
MKKIFSKKGESPLGSFARRQRSSAGGGGEPGEGAYSQPGYHVRDRDLGKIHKAASAGNVAKVQQILLLRKNGLNDRDKMNRTALHLACANGHPEVVTLLVDRKCQLNVCDNENRTALMKAVQCQEEKCATILLEHGADPNLADVHGNTALHYAVYNEDISVATKLLLYDANIEAKNKDDLTPLLLAVSGKKQQMVEFLIKKKANVNAVDKLESSHQLISEYKEERIPKHSSQNSNSVDESSEDSLSSLFYFIFFETKSCTVAQAGVLQHDLSSLQSLLPGFTQFFCLHLPSSWDHRLSGKPGVDDSWPTSDDEDLNFDTKNVPKPSLAKLMTASQQSRKNLEATYGTVRTGNRTLFEDRDSDSQDEVVVESLPTTSIKVQCFSHPTYQSPDLLPKPSHKSLANPGLMKEEPTKPGIAKKENGIDIIESAPLEQTNNDNLTYVDEVHKNNRSDMMSALGLGQEEDIESPWDSESISENFPQKYVDPLAGAADGKEKNIGNEQAEESPERYLHLKPTIEMKDSVPNKAGGMKDVQTSKAAEHDLEVASEEEQEREGSENNQPQVEEERKKHRNNEMEVSANIHDGATDDAEDDDDDDGLIQKRKSGETDHQQFPRKENKEYASSGPALQMKEVKSTEKEKRTSKESVNSPVFGKASLLTGGLLQVDDDSSLSEIDEDEGRPTKKTSNEKNKVKNQIQSMDDVDDLTQSSETASEDCELPHSSYKNFMLLIEQLGMECKDSVSLLKIQDAALSCERLLELKKNHCELLTVKIKKMEDKVNVLQRELSETKEIKSQLEHQKVEWERELCSLRFSLNQEEEKRRNADTLYEKIREQLRRKEEQYRKEVEVKQQLELSLQTLEMELRTVKSNLNQVVQERNDAQRQLSREQNARMLQDGILTNHLSKQKEIEMAQKKMNSENSHSHEEEKDLSHKNSMLQEEIAMLRLEIDTIKNQNQEKEKKCFEDLKIVKEKNEDLQKTIKQNEETLTQTISQYNGRLSVLTAENAMLNSKLENEKQSKERLEAEVESYHSRLAAAIHDRDQSETSKRELELAFQRARDECSRLQDKMNFDVSNLKDNNEILSQQLFKTESKLNSLEIEFHHTRDALREKTLGLERVQKDLSQTQCQMKEMEQKYQNEQVKVNKYIGKQESVEERLSQLQSENMLLRQQLDDAHNKADNKEKTVINIQDQFHAIVQKLQAESEKQSLLLEERNKELISECNHLKERQYQYENEKAEREVVVRQLQQELADTLKKQSMSEASLEVTSRYRINLEDETQDLKKKLGQIRNQLQEAQDRHTEAVRCAEKMQDHKQKLEKDNAKLKVTVKKQMDKIEELQKNLLNANLSEDEKEQLKKLMELKQSLECNLDQEMKKNVELEREITGFKNLLKMTRKKLNEYENGEFSFHGDLKTSQFEMDIQINKLKHKIDDLTAELETAGSKCLHLDTKNQILQEELLSMKTVQKKCEKLQKNKKKLEQEVINLRSHIERNMVELGQVKQYKQEIEERARQEIAEKLKEVNLFLQAQAASQENLEQFRENNFASMKSQMELRIKDLESELSKIKTSQEDFNKTELEKYKQLYLEELKVRKSLSSKLTKTNERLAEVNTKLLVEKQQSRSLFTTLTTRPVMEPPCVGNLNNSLDLNRKLIPRENLVISTSNPRASNNSMENYLSKMQQELEKNITRELKEAAAELESGSIASPLGSTDESNLNQDLVWKASREYVQVLKKNYMI

SEQ ID NO: 5199 - protein, 1050 aa, Homo sapiens
  Payload ID: 1128;
  Gene Symbol: ANKRD27;
  Gene Name: ankyrin repeat domain 27 (VPS9 domain);
  Uniprot ID:  Q96NW4;
  ENSP ID: ENSP00000304292
MALYDEDLLKNPFYLALQKCRPDLCSKVAQIHGIVLVPCKGSLSSSIQSTCQFESYILIPVEEHFQTLNGKDVFIQGNRIKLGAGFACLLSVPILFEETFYNEKEESFSILCIAHPLEKRESSEEPLAPSDPFSLKTIEDVREFLGRHSERFDRNIASFHRTFRECERKSLRHHIDSANALYTKCLQQLLRDSHLKMLAKQEAQMNLMKQAVEIYVHHEIYNLIFKYVGTMEASEDAAFNKITRSLQDLQQKDIGVKPEFSFNIPRAKRELAQLNKCTSPQQKLVCLRKVVQLITQSPSQRVNLETMCADDLLSVLLYLLVKTEIPNWMANLSYIKNFRFSSLAKDELGYCLTSFEAAIEYIRQGSLSAKPPESEGFGDRLFLKQRMSLLSQMTSSPTDCLFKHIASGNQKEVERLLSQEDHDKDTVQKMCHPLCFCDDCEKLVSGRLNDPSVVTPFSRDDRGHTPLHVAAVCGQASLIDLLVSKGAMVNATDYHGATPLHLACQKGYQSVTLLLLHYKASAEVQDNNGNTPLHLACTYGHEDCVKALVYYDVESCRLDIGNEKGDTPLHIAARWGYQGVIETLLQNGASTEIQNRLKETPLKCALNSKILSVMEAYHLSFERRQKSSEAPVQSPQRSVDSISQESSTSSFSSMSASSRQEETKKDYREVEKLLRAVADGDLEMVRYLLEWTEEDLEDAEDTVSAADPEFCHPLCQCPKCAPAQKRLAKVPASGLGVNVTSQDGSSPLHVAALHGRADLIPLLLKHGANAGARNADQAVPLHLACQQGHFQVVKCLLDSNAKPNKKDLSGNTPLIYACSGGHHELVALLLQHGASINASNNKGNTALHEAVIEKHVFVVELLLLHGASVQVLNKRQRTAVDCAEQNSKIMELLQVVPSCVASLDDVAETDRKEYVTVKIRKKWNSKLYDLPDEPFTRQFYFVHSAGQFKGKTSREIMARDRSVPNLTEGSLHEPGRQSVTLRQNNLPAQSGSHAAEKGNSDWPERPGLTQTGPGHRRMLRRHTVEDAVVSQGPEAAGPLSTPQEVSASRS

SEQ ID NO: 5200 - protein, 174 aa, Homo sapiens
  Payload ID: 1128;
  Gene Symbol: ANKRD27;
  Gene Name: ankyrin repeat domain 27 (VPS9 domain);
  ENSP ID: ENSP00000464751
MCADDLLSVLLYLLVKTEIPNWMANLSYIKNFRFSSLAKDELGYCLTSFEAAIEYIRQGSLSAKPPESEGFGDRLFLKQRMSLLSQMTSSPTDCLFKHIASGNQKEVERLLSQEDHDKDTVQKMCHPLCFCDDCEKLVSGRLNDPSVVTPFSRDDRGHTPLHVAAVCGQASLID

SEQ ID NO: 5201 - protein, 75 aa, Homo sapiens
  Payload ID: 1128;
  Gene Symbol: ANKRD27;
  Gene Name: ankyrin repeat domain 27 (VPS9 domain);
  ENSP ID: ENSP00000464819
MALYDEDLLKNPFYLALQKCRPDLCSKVAQIHGIVLVPCKGSLSSSIQSTCQFESYILIPVEEHFQTLNGKDVFI

SEQ ID NO: 5202 - protein, 389 aa, Homo sapiens
  Payload ID: 1128;
  Gene Symbol: ANKRD27;
  Gene Name: ankyrin repeat domain 27 (VPS9 domain);
  ENSP ID: ENSP00000466138
MALYDEDLLKNPFYLALQKCRPDLCSKVAQIHGIVLVPCKGSLSSSIQSTCQFESYILIPVEEHFQTLNGKDVFIQGNRIKLGAGFACLLSVPILFEETFYNEKEESFSILCIAHPLEKRESSEEPLAPSDPFSLKTIEDVREFLGRHSERFDRNIASFHRTFRECERKSLRHHIDSANALYTKCLQQLLRDSHLKMLAKQEAQMNLMKQAVEIYVHHEIYNLIFKYVGTMEASEDAAFNKITRSLQDLQQKDIGVKPEFSFNIPRAKRELAQLNKCTSPQQKLVCLRKVVQLITQSPSQRVNLETMCADDLLSVLLYLLVKTEIPNWMANLSYIKNFRFSSLAKDELGYCLTSFEAAIEYIRQGSLSAKPPVRSHPCPGLPLWASWFP

SEQ ID NO: 5203 - protein, 82 aa, Homo sapiens
  Payload ID: 1128;
  Gene Symbol: ANKRD27;
  Gene Name: ankyrin repeat domain 27 (VPS9 domain);
  ENSP ID: ENSP00000466905
MALYDEDLLKNPFYLALQKCRPDLCSKVAQIHGIVLVPCKGSLSSSIQSTCQFESYILIPVEEHFQTLNGKKSLWHPQIPFP

SEQ ID NO: 5204 - protein, 30 aa, Homo sapiens
  Payload ID: 1128;
  Gene Symbol: ANKRD27;
  Gene Name: ankyrin repeat domain 27 (VPS9 domain);
  ENSP ID: ENSP00000467447
MEASEDAAFNKITRSLQDLQQKDIGVKPEF

SEQ ID NO: 5205 - protein, 150 aa, Homo sapiens
  Payload ID: 1128;
  Gene Symbol: ANKRD27;
  Gene Name: ankyrin repeat domain 27 (VPS9 domain);
  ENSP ID: ENSP00000476897
MALYDEDLLKNPFYLALQKCRPDLCSKVAQIHGIVLVPCKGSLSSSIQSTCQFESYILIPVEEHFQTLNGKDVFIQGNRIKLGAGFACLLSVPILFEETFYNEKEESFSILCIAHPLEKRESSEPLAPSDPFSLKTIEDVREFLGRHSER

SEQ ID NO: 5206 - protein, 174 aa, Homo sapiens
  Payload ID: 1128;
  Gene Symbol: ANKRD27;
  Gene Name: ankyrin repeat domain 27 (VPS9 domain);
  ENSP ID: ENSP00000480730
MALYDEDLLKNPFYLALQKCRPDLCSKVAQIHGIVLVPCKGSLSSSIQSTCQFESYILIPVEEHFQTLNGKDVFIQGNRIKLGAGFACLLSVPILFEETFYNEKEESFSILCIAHPLEKRESSEEPLAPSDPFSLKTIEDVREFLGRHSERFDRNIASFHRTFRECERKSSVTT

SEQ ID NO: 5207 - protein, 899 aa, Homo sapiens
  Payload ID: 1129;
  Gene Symbol: ANKRD28;
  Gene Name: ankyrin repeat domain 28;
  Uniprot ID:  O15084;
  ENSP ID: ENSP00000373287
MVKLLLSRGANINAFDKKDRRAIHWAAYMGHIEVVKLLVSHGAEVTCKDKKSYTPLHAAASSGMISVVKYLLDLGVDMNEPNAYGNTPLHVACYNGQDVVVNELIDCGAIVNQKNEKGFTPLHFAAASTHGALCLELLVGNGADVNMKSKDGKTPLHMTALHGRFSRSQTIIQSGAVIDCEDKNGNTPLHIAARYGHELLINTLITSGADTAKRGIHGMFPLHLAALSGFSDCCRKLLSSGFDIDTPDDFGRTCLHAAAAGGNLECLNLLLNTGADFNKKDKFGRSPLHYAAANCNYQCLFALVGSGASVNDLDERGCTPLHYAATSDTDGKCLEYLLRNDANPGIRDKQGYNAVHYSAAYGHRLCLQLIASETPLDVLMETSGTDMLSDSDNRATISPLHLAAYHGHHQALEVLVQSLLDLDVRNSSGRTPLDLAAFKGHVECVDVLINQGASILVKDYILKRTPIHAAATNGHSECLRLLIGNAEPQNAVDIQDGNGQTPLMLSVLNGHTDCVYSLLNKGANVDAKDKWGRTALHRGAVTGHEECVDALLQHGAKCLLRDSRGRTPIHLSAACGHIGVLGALLQSAASMDANPATADNHGYTALHWACYNGHETCVELLLEQEVFQKTEGNAFSPLHCAVINDNEGAAEMLIDTLGASIVNATDSKGRTPLHAAAFTDHVECLQLLLSHNAQVNSVDSTGKTPLMMAAENGQTNTVEMLVSSASAELTLQDNSKNTALHLACSKGHETSALLILEKITDRNLINATNAALQTPLHVAARNGLTMVVQELLGKGASVLAVDENGYTPALACAPNKDVADCLALILATMMPVSSSSPLSSLTFNAINRYTNTSKTVSFEALPIMRNEPSSYCSFNNIGGEQEYLYTDVDELNDSDSETY

SEQ ID NO: 5208 - protein, 1053 aa, Homo sapiens
  Payload ID: 1129;
  Gene Symbol: ANKRD28;
  Gene Name: ankyrin repeat domain 28;
  Uniprot ID:  O15084;
  ENSP ID: ENSP00000382379
MAFLKLRDQPSLVQAIFNGDPDEVRALIFKKEDVNFQDNEKRTPLHAAAYLGDAEIIELLILSGARVNAKDSKWLTPLHRAVASCSEEAVQVLLKHSADVNARDKNWQTPLHIAAANKAVKCAEALVPLLSNVNVSDRAGRTALHHAAFSGHGEMVKLLLSRGANINAFDKKDRRAIHWAAYMGHIEVVKLLVSHGAEVTCKDKKSYTPLHAAASSGMISVVKYLLDLGVDMNEPNAYGNTPLHVACYNGQDVVVNELIDCGAIVNQKNEKGFTPLHFAAASTHGALCLELLVGNGADVNMKSKDGKTPLHMTALHGRFSRSQTIIQSGAVIDCEDKNGNTPLHIAARYGHELLINTLITSGADTAKRGIHGMFPLHLAALSGFSDCCRKLLSSGFDIDTPDDFGRTCLHAAAAGGNLECLNLLLNTGADFNKKDKFGRSPLHYAAANCNYQCLFALVGSGASVNDLDERGCTPLHYAATSDTDGKCLEYLLRNDANPGIRDKQGYNAVHYSAAYGHRLCLQLIASETPLDVLMETSGTDMLSDSDNRATISPLHLAAYHGHHQALEVLVQSLLDLDVRNSSGRTPLDLAAFKGHVECVDVLINQGASILVKDYILKRTPIHAAATNGHSECLRLLIGNAEPQNAVDIQDGNGQTPLMLSVLNGHTDCVYSLLNKGANVDAKDKWGRTALHRGAVTGHEECVDALLQHGAKCLLRDSRGRTPIHLSAACGHIGVLGALLQSAASMDANPATADNHGYTALHWACYNGHETCVELLLEQEVFQKTEGNAFSPLHCAVINDNEGAAEMLIDTLGASIVNATDSKGRTPLHAAAFTDHVECLQLLLSHNAQVNSVDSTGKTPLMMAAENGQTNTVEMLVSSASAELTLQDNSKNTALHLACSKGHETSALLILEKITDRNLINATNAALQTPLHVAARNGLTMVVQELLGKGASVLAVDENGYTPALACAPNKDVADCLALILATMMPVSSSSPLSSLTFNAINRYTNTSKTVSFEALPIMRNEPSSYCSFNNIGGEQEYLYTDVDELNDSDSETY

SEQ ID NO: 5209 - protein, 14 aa, Homo sapiens
  Payload ID: 1129;
  Gene Symbol: ANKRD28;
  Gene Name: ankyrin repeat domain 28;
  ENSP ID: ENSP00000389489
MAFLKLRDQACDWN

SEQ ID NO: 5210 - protein, 722 aa, Homo sapiens
  Payload ID: 1129;
  Gene Symbol: ANKRD28;
  Gene Name: ankyrin repeat domain 28;
  ENSP ID: ENSP00000394845
MLTFRTMKSEPHCTPQLTLEMQKSLNFLFYLEAVQVLLKHSADVNARDKNWQTPLHIAAANKAVKCAEALVPLLSNVNVSDRAGRTALHHAAFSGHGEMVKLLLSRGANINAFDKKDRRAIHWAAYMGHIEVVKLLVSHGAEVTCKDKKSYTPLHAAASSGMISVVKYLLDLGVDMNEPNAYGNTPLHVACYNGQDVVVNELIDCGAIVNQKNEKGFTPLHFAAASTHGALCLELLVGNGADVNMKSKDGKTPLHMTALHGRFSRSQTIIQSGAVIDCEDKNGNTPLHIAARYGHELLINTLITSGADTAKRGIHGMFPLHLAALSGFSDCCRKLLSSGFDIDTPDDFGRTCLHAAAAGGNLECLNLLLNTGADFNKKDKFGRSPLHYAAANCNYQCLFALVGSGASVNDLDERGCTPLHYAATSDTDGKCLEYLLRNDANPGIRDKQGYNAVHYSAAYGHRLCLQLIASETPLDVLMETSGTDMLSDSDNRATISPLHLAAYHGHHQALEVLVQSLLDLDVRNSSGRTPLDLAAFKGHVECVDVLINQGASILVKDYILKRTPIHAAATNGHSECLRLLIGNAEPQNAVDIQDGNGQTPLMLSVLNGHTDCVYSLLNKGANVDAKDKWGRTALHRGAVTGHEECVDALLQHGAKCLLRDSRGRTPIHLSAACGHIGVLGALLQSAASMDANPATADNHGYTALHWACYNELLSMQPPSQTM

SEQ ID NO: 5211 - protein, 1053 aa, Homo sapiens; identical to SEQ ID NO: 5208
  Payload ID: 1129;
  Gene Symbol: ANKRD28;
  Gene Name: ankyrin repeat domain 28;
  Uniprot ID:  O15084;
  ENSP ID: ENSP00000397341

SEQ ID NO: 5212 - protein, 899 aa, Homo sapiens; identical to SEQ ID NO: 5207
  Payload ID: 1129;
  Gene Symbol: ANKRD28;
  Gene Name: ankyrin repeat domain 28;
  Uniprot ID:  O15084;
  ENSP ID: ENSP00000485421

SEQ ID NO: 5213 - protein, 268 aa, Homo sapiens
  Payload ID: 1130;
  Gene Symbol: ANKRD29;
  Gene Name: ankyrin repeat domain 29;
  Uniprot ID:  Q8N6D5;
  ENSP ID: ENSP00000323387
MCRMSFKKETPLANAAFWAARRGNLALLKLLLNSGRVDVDCRDSHGTTLLMVAAYAGHIDCVRELVLQGADINLQRESGTTALFFAAQQGHNDVVRFLFGFGASTEFRTKDGGTALLAASQYGHMQVVETLLKHGANIHDQLYDGATALFLAAQGGYLDVIRLLLASGAKVNQPRQDGTAPLWIASQMGHSEVVRVMLLRGADRDAARNDGTTALLKAANKGYNDVIKELLKFSPTLGILKANELPAELTKNERILRLLRSKEGPRKS

SEQ ID NO: 5214 - protein, 143 aa, Homo sapiens
  Payload ID: 1130;
  Gene Symbol: ANKRD29;
  Gene Name: ankyrin repeat domain 29;
  ENSP ID: ENSP00000465936
MCRMSFKKETPLANAAFWAARRGNLALLKLLLNSGRVDVDCRDSHGTTLLMVAAYAGHIDCVRELVLQGADINLQREDGGTALLAASQYGHMQVVETLLKHGANIHDQLYDGATALFLAAQGGYLDVIRLLLASGAKVNQPRQ

SEQ ID NO: 5215 - protein, 126 aa, Homo sapiens
  Payload ID: 1130;
  Gene Symbol: ANKRD29;
  Gene Name: ankyrin repeat domain 29;
  ENSP ID: ENSP00000467890
  MOD_RES (1)..(1): Any amino acid
XGGYLDVIRLLLASGAKVNQPRQDGTAPLWIASQMGHSEVVRVMLLRGADRDAARNDGTTALLKAANKGYNDVIKELLKFSPTLGILKNGTSALHAAVLSGNIKTVALLLEAGADPSLRNKVRWQN

SEQ ID NO: 5216 - protein, 301 aa, Homo sapiens
  Payload ID: 1130;
  Gene Symbol: ANKRD29;
  Gene Name: ankyrin repeat domain 29;
  Uniprot ID:  Q8N6D5;
  ENSP ID: ENSP00000468354
MCRMSFKKETPLANAAFWAARRGNLALLKLLLNSGRVDVDCRDSHGTTLLMVAAYAGHIDCVRELVLQGADINLQRESGTTALFFAAQQGHNDVVRFLFGFGASTEFRTKDGGTALLAASQYGHMQVVETLLKHGANIHDQLYDGATALFLAAQGGYLDVIRLLLASGAKVNQPRQDGTAPLWIASQMGHSEVVRVMLLRGADRDAARNDGTTALLKAANKGYNDVIKELLKFSPTLGILKNGTSALHAAVLSGNIKTVALLLEAGADPSLRNKANELPAELTKNERILRLLRSKEGPRKS

SEQ ID NO: 5217 - protein, 110 aa, Homo sapiens
  Payload ID: 1130;
  Gene Symbol: ANKRD29;
  Gene Name: ankyrin repeat domain 29;
  ENSP ID: ENSP00000477066
MCRMSFKKETPLANAAFWAARRGNLALLKLLLNSGRVDVDCRDSVRWFGRCMPSMHHCPLWAQEHLRNTFPFTMLIYFFMCLLALSFLKHPRYCGELKNMLGEVRKKRKQ

SEQ ID NO: 5218 - protein, 1341 aa, Homo sapiens
  Payload ID: 1131;
  Gene Symbol: ANKRD30A;
  Gene Name: ankyrin repeat domain 30A;
  ENSP ID: ENSP00000354432
MTKRKKTINLNIQDAQKRTALHWACVNGHEEVVTFLVDRKCQLDVLDGEHRTPLMKALQCHQEACANILIDSGADINLVDVYGNTALHYAVYSEILSVVAKLLSHGAVIEVHNKASLTPLLLSITKRSEQIVEFLLIKNANANAVNKYKCTALMLAVCHGSSEIVGMLLQQNVDVFAADICGVTAEHYAVTCGFHHIHEQIMEYIRKLSKNHQNTNPEGTSAGTPDEAAPLAERTPDTAESLVEKTPDEAAPLVERTPDTAESLVEKTPDEAASLVEGTSDKIQCLEKATSGKFEQSAEETPREITSPAKETSEKFTWPAKGRPRKIAWEKKEDTPREIMSPAKETSEKFTWAAKGRPRKIAWEKKETPVKTGCVARVTSNKTKVLEKGRSKMIACPTKESSTKASANDQRFPSESKQEEDEEYSCDSRSLFESSAKIQVCIPESIYQKVMEINREVEEPPKKPSAFKPAIEMQNSVPNKAFELKNEQTLRADPMFPPESKQKDYEENSWDSESLCETVSQKDVCLPKATHQKEIDKINGKLEESPNKDGLLKATCGMKVSIPTKALELKDMQTFKAEPPGKPSAFEPATEMQKSVPNKALELKNEQTLRADEILPSESKQKDYEENSWDTESLCETVSQKDVCLPKAAHQKEIDKINGKLEGSPVKDGLLKANCGMKVSIPTKALELMDMQTFKAEPPEKPSAFEPAIEMQKSVPNKALELKNEQTLRADEILPSESKQKDYEESSWDSESLCETVSQKDVCLPKATHQKEIDKINGKLEESPDNDGFLKAPCRMKVSIPTKALELMDMQTFKAEPPEKPSAFEPAIEMQKSVPNKALELKNEQTLRADQMFPSESKQKKVEENSWDSESLRETVSQKDVCVPKATHQKEMDKISGKLEDSTSLSKILDTVHSCERARELQKDHCEQRTGKMEQMKKKFCVLKKKLSEAKEIKSQLENQKVKWEQELCSVRLTLNQEEEKRRNADILNEKIREELGRIEEQHRKELEVKQQLEQALRIQDIELKSVESNLNQVSHTHENENYLLHENCMLKKEIAMLKLEIATLKHQYQEKENKYFEDIKILKEKNAELQMTLKLKEESLTKRASQYSGQLKVLIAENTMLTSKLKEKQDKEILEAEIESHHPRLASAVQDHDQIVTSRKSQEPAFHIAGDACLQRKMNVDVSSTIYNNEVLHQPLSEAQRKSKSLKINLNYAGDALRENTLVSEHAQRDQRETQCQMKEAEHMYQNEQDNVNKHTEQQESLDQKLFQLQSKNMWLQQQLVHAHKKADNKSKITIDIHFLERKMQHHLLKEKNEEIFNYNNHLKNRIYQYEKEKAETENS

SEQ ID NO: 5219 - protein, 1460 aa, Homo sapiens
  Payload ID: 1131;
  Gene Symbol: ANKRD30A;
  Gene Name: ankyrin repeat domain 30A;
  ENSP ID: ENSP00000363792
MTKRKKTINLNIQDAQKRTALHWACVNGHEEVVTFLVDRKCQLDVLDGEHRTPLMKALQCHQEACANILIDSGADINLVDVYGNTALHYAVYSEILSVVAKLLSHGAVIEVHNKASLTPLLLSITKRSEQIVEFLLIKNANANAVNKYKCTALMLAVCHGSSEIVGMLLQQNVDVFAADICGVTAEHYAVTCGFHHIHEQIMEYIRKLSKNHQNTNPEGTSAGTPDEAAPLAERTPDTAESLVEKTPDEAAPLVERTPDTAESLVEKTPDEAASLVEGTSDKIQCLEKATSGKFEQSAEETPREITSPAKETSEKFTWPAKGRPRKIAWEKKEDTPREIMSPAKETSEKFTWAAKGRPRKIAWEKKETPVKTGCVARVTSNKTKVLEKGRSKMIACPTKESSTKASANDQRFPSESKQEEDEEYSCDSRSLFESSAKIQVCIPESIYQKVMEINREVEEPPKKPSAFKPAIEMQNSVPNKAFELKNEQTLRADPMFPPESKQKDYEENSWDSESLCETVSQKDVCLPKATHQKEIDKINGKLEESPNKDGLLKATCGMKVSIPTKALELKDMQTFKAEPPGKPSAFEPATEMQKSVPNKALELKNEQTLRADEILPSESKQKDYEENSWDTESLCETVSQKDVCLPKAAHQKEIDKINGKLEGSPVKDGLLKANCGMKVSIPTKALELMDMQTFKAEPPEKPSAFEPAIEMQKSVPNKALELKNEQTLRADEILPSESKQKDYEESSWDSESLCETVSQKDVCLPKAAHQKEIDKINGKLEGSPVKDGLLKANCGMKVSIPTKALELMDMQTFKAEPPEKPSAFEPAIEMQKSVPNKALELKNEQTLRADEILPSESKQKDYEESSWDSESLCETVSQKDVCLPKATHQKEIDKINGKLEESPDNDGFLKAPCRMKVSIPTKALELMDMQTFKAEPPEKPSAFEPAIEMQKSVPNKALELKNEQTLRADQMFPSESKQKKVEENSWDSESLRETVSQKDVCVPKATHQKEMDKISGKLEDSTSLSKILDTVHSCERARELQKDHCEQRTGKMEQMKKKFCVLKKKLSEAKEIKSQLENQKVKWEQELCSVRLTLNQEEEKRRNADILNEKIREELGRIEEQHRKELEVKQQLEQALRIQDIELKSVESNLNQVSHTHENENYLLHENCMLKKEIAMLKLEIATLKHQYQEKENKYFEDIKILKEKNAELQMTLKLKEESLTKRASQYSGQLKVLIAENTMLTSKLKEKQDKEILEAEIESHHPRLASAVQDHDQIVTSRKSQEPAFHIAGDACLQRKMNVDVSSTIYNNEVLHQPLSEAQRKSKSLKINLNYAGDALRENTLVSEHAQRDQRETQCQMKEAEHMYQNEQDNVNKHTEQQESLDQKLFQLQSKNMWLQQQLVHAHKKADNKSKITIDIHFLERKMQHHLLKEKNEEIFNYNNHLKNRIYQYEKEKAETENS

SEQ ID NO: 5220 - protein, 1341 aa, Homo sapiens; identical to SEQ ID NO: 5218
  Payload ID: 1131;
  Gene Symbol: ANKRD30A;
  Gene Name: ankyrin repeat domain 30A;
  ENSP ID: ENSP00000473551

SEQ ID NO: 5221 - protein, 1397 aa, Homo sapiens
  Payload ID: 1131;
  Gene Symbol: ANKRD30A;
  Gene Name: ankyrin repeat domain 30A;
  Uniprot ID:  Q9BXX3;
  ENSP ID: ENSP00000477963
MEEISAAAVKVVPGPERPSPFSQLVYTSNDSYIVHSGDLRKIHKAASRGQVRKLEKMTKRKKTINLNIQDAQKRTALHWACVNGHEEVVTFLVDRKCQLDVLDGEHRTPLMKALQCHQEACANILIDSGADINLVDVYGNTALHYAVYSEILSVVAKLLSHGAVIEVHNKASLTPLLLSITKRSEQIVEFLLIKNANANAVNKYKCTALMLAVCHGSSEIVGMLLQQNVDVFAADICGVTAEHYAVTCGFHHIHEQIMEYIRKLSKNHQNTNPEGTSAGTPDEAAPLAERTPDTAESLVEKTPDEAAPLVERTPDTAESLVEKTPDEAASLVEGTSDKIQCLEKATSGKFEQSAEETPREITSPAKETSEKFTWPAKGRPRKIAWEKKEDTPREIMSPAKETSEKFTWAAKGRPRKIAWEKKETPVKTGCVARVTSNKTKVLEKGRSKMIACPTKESSTKASANDQRFPSESKQEEDEEYSCDSRSLFESSAKIQVCIPESIYQKVMEINREVEEPPKKPSAFKPAIEMQNSVPNKAFELKNEQTLRADPMFPPESKQKDYEENSWDSESLCETVSQKDVCLPKATHQKEIDKINGKLEESPNKDGLLKATCGMKVSIPTKALELKDMQTFKAEPPGKPSAFEPATEMQKSVPNKALELKNEQTLRADEILPSESKQKDYEENSWDTESLCETVSQKDVCLPKAAHQKEIDKINGKLEGSPVKDGLLKANCGMKVSIPTKALELMDMQTFKAEPPEKPSAFEPAIEMQKSVPNKALELKNEQTLRADEILPSESKQKDYEESSWDSESLCETVSQKDVCLPKATHQKEIDKINGKLEESPDNDGFLKAPCRMKVSIPTKALELMDMQTFKAEPPEKPSAFEPAIEMQKSVPNKALELKNEQTLRADQMFPSESKQKKVEENSWDSESLRETVSQKDVCVPKATHQKEMDKISGKLEDSTSLSKILDTVHSCERARELQKDHCEQRTGKMEQMKKKFCVLKKKLSEAKEIKSQLENQKVKWEQELCSVRLTLNQEEEKRRNADILNEKIREELGRIEEQHRKELEVKQQLEQALRIQDIELKSVESNLNQVSHTHENENYLLHENCMLKKEIAMLKLEIATLKHQYQEKENKYFEDIKILKEKNAELQMTLKLKEESLTKRASQYSGQLKVLIAENTMLTSKLKEKQDKEILEAEIESHHPRLASAVQDHDQIVTSRKSQEPAFHIAGDACLQRKMNVDVSSTIYNNEVLHQPLSEAQRKSKSLKINLNYAGDALRENTLVSEHAQRDQRETQCQMKEAEHMYQNEQDNVNKHTEQQESLDQKLFQLQSKNMWLQQQLVHAHKKADNKSKITIDIHFLERKMQHHLLKEKNEEIFNYNNHLKNRIYQYEKEKAETENS

SEQ ID NO: 5222 - protein, 1392 aa, Homo sapiens
  Payload ID: 1132;
  Gene Symbol: ANKRD30B;
  Gene Name: ankyrin repeat domain 30B;
  Uniprot ID:  Q9BXX2;
  ENSP ID: ENSP00000351875
MKRLLAAAGKGVRGPEPPNPFSERVYTEKDYGTIYFGDLGKIHTAASRGQVQKLEKMTVGKKPVNLNKRDMKKRTALHWACVNGHAEVVTFLVDRKCQLNVLDGEGRTPLMKALQCEREACANILIDAGADLNYVDVYGNTALHYAVYSENLLMVATLLSYGAVIEVQNKASLTPLLLAIQKRSKQTVEFLLTKNANANAFNESKCTALMLAICEGSSEIVGMLLQQNVDVFAEDIHGITAERYAAACGVNYIHQQLLEHIRKLPKNPQNTNPEGTSTGTPDEAAPLAERTPDTAESLLEKTPDEAARLVEGTSAKIQCLGKATSGKFEQSTEETPRKILRPTKETSEKFSWPAKERSRKITWEEKETSVKTECVAGVTPNKTEVLEKGTSNMIACPTKETSTKASTNVDVSSVEPIFSLFGTRTIENSQCTKVEEDFNLATKIISKSAAQNYTCLPDATYQKDIKTINHKIEDQMFPSESKREEDEEYSWDSGSLFESSAKTQVCIPESMYQKVMEINREVEELPEKPSAFKPAVEMQKTVPNKAFELKNEQTLRAAQMFPSESKQKDDEENSWDSESPCETVSQKDVYLPKATHQKEFDTLSGKLEESPVKDGLLKPTCGRKVSLPNKALELKDRETFKAESPDKDGLLKPTCGRKVSLPNKALELKDRETLKAESPDNDGLLKPTCGRKVSLPNKALELKDRETFKAAQMFPSESKQKDDEENSWDFESFLETLLQNDVCLPKATHQKEFDTLSGKLEESPDKDGLLKPTCGMKISLPNKALELKDRETFKAEDVSSVESTFSLFGKPTTENSQSTKVEEDFNLTTKEGATKTVTGQQERDIGIIERAPQDQTNKMPTSELGRKEDTKSTSDSEIISVSDTQNYECLPEATYQKEIKTTNGKIEESPEKPSHFEPATEMQNSVPNKGLEWKNKQTLRADSTTLSKILDALPSCERGRELKKDNCEQITAKMEQTKNKFCVLQKELSEAKEIKSQLENQKAKWEQELCSVRLTLNQEEEKRRNVDILKEKIRPEEQLRKKLEVKQQLEQTLRIQDIELKSVTSNLNQVSHTHESENDLFHENCMLKKEIAMLKLEVATLKHQHQVKENKYFEDIKILQEKNAELQMTLKLKQKTVTKRASQYREQLKVLTAENTMLTSKLKEKQDKEILETEIESHHPRLASALQDHDQSVTSRKNQELAFHSAGDAPLQGIMNVDVSNTIYNNEVLHQPLYEAQRKSKSPKINLNYAGDDLRENALVSEHAQRDRCETQCQMKKAEHMYQNEQDNVDKHTEQQESLEQKLFQLESKNRWLRQQLVYAHKKVNKSKVTINIQFPEMKMQRHLNEKNEEVFNYGNHLKERIDQYEKEKAEREVSIKKYKYFSNFLKESGLG

SEQ ID NO: 5223 - protein, 619 aa, Homo sapiens
  Payload ID: 1132;
  Gene Symbol: ANKRD30B;
  Gene Name: ankyrin repeat domain 30B;
  Uniprot ID:  Q9BXX2;
  ENSP ID: ENSP00000463332
MKRLLAAAGKGVRGPEPPNPFSERVYTEKDYGTIYFGDLGKIHTAASRGQVQKLEKMTVGKKPVNLNKRDMKKRTALHWACVNGHAEVVTFLVDRKCQLNVLDGEGRTPLMKALQCEREACANILIDAGADLNYVDVYGNTALHYAVYSENLLMVATLLSYGAVIEVQNKASLTPLLLAIQKRSKQTVEFLLTKNANANAFNESKCTALMLAICEGSSEIVGMLLQQNVDVFAEDIHGITAERYAAACGVNYIHQQLLEHIRKLPKNPQNTNPEGTSTGTPDEAAPLAERTPDTAESLLEKTPDEAARLVEGTSAKIQCLGKATSGKFEQSTEETPRKILRPTKETSEKFSWPAKERSRKITWEEKETSVKTECVAGVTPNKTEVLEKGTSNMIACPTKETSTKASTNVDVSSVEPIFSLFGTRTIENSQCTKVEEDFNLATKIISKSAAQNYTCLPDATYQKDIKTINHKIEDQMFPSESKREEDEEYSWDSGSLFESSAKTQVCIPESMYQKVMEINREVEELPEKPSAFKPAVEMQKTVPNKAFELKNEQTLRAAQMFPSESKQKDDEENSWDSESPCETVSQKDVYLPKATHQKEFDTLSGKLEAYLWKESFSSK

SEQ ID NO: 5224 - protein, 251 aa, Homo sapiens
  Payload ID: 1133;
  Gene Symbol: ANKRD30BL;
  Gene Name: ankyrin repeat domain 30B-like;
  Uniprot ID:  A7E2S9;
  ENSP ID: ENSP00000295181
MERLSAAPVKGQTGPERPSPFSQLVYTNNDSYVIHHGDLRKIHKAASRGQAWKLERMMKKTTMDLNIRDAKKRTALYWACANGHAEVVTLLVDRKCQLDVLDGENRTILMKALQCQREACANILIDSGADPNIVDVYGNTAVHYAVNSENLSVVAKLLSCGADIEVKNKAGHTPLLLAIRKRSEEIVEFLLTKNANANAVDKFKCTALMLAICHGSSEIVGKLLQQNVDICAEATCGMIAERYAVACGFNL

SEQ ID NO: 5225 - protein, 258 aa, Homo sapiens
  Payload ID: 1133;
  Gene Symbol: ANKRD30BL;
  Gene Name: ankyrin repeat domain 30B-like;
  Uniprot ID:  A7E2S9;
  ENSP ID: ENSP00000386398
MERLSAAPVKGQTGPERPSPFSQLVYTNNDSYVIHHGDLRKIHKAASRGQAWKLERMMKKTTMDLNIRDAKKRTALYWACANGHAEVVTLLVDRKCQLDVLDGENRTILMKALQCQREACANILIDSGADPNIVDVYGNTAVHYAVNSENLSVVAKLLSCGADIEVKNKAGHTPLLLAIRKRSEEIVEFLLTKNANANAVDKFKCVHQQLLEYKQKISKNSQNSNPEGTSEGTPDEAAPLAERTPDTAESLVERTPDE

SEQ ID NO: 5226 - protein, 1873 aa, Homo sapiens
  Payload ID: 1134;
  Gene Symbol: ANKRD31;
  Gene Name: ankyrin repeat domain 31;
  Uniprot ID:  Q8N7Z5;
  ENSP ID: ENSP00000274361
MEEGVQAPDWDSDETVIEGSVTESDLEEKELPWRRLLFDQDASLKSEFSLHPDTRGMCKGMPSPEIQLGFKLREDLQEQMNKNKMMPVLSEDTILQSQDETERNQALLQTRKNCSMFIGSFRQSGLSLNHQNIEGPEAESPEVLPHIEKELSEGRDSPEVSLLSGTAITVSDTVAVKETSLVEPEKILAAPNTFFEPRKEVTMTMTSEETKDEESSLETFVSALESLLTSPESTQEERLFELVSDFDRKELMNPLSDSLSSISIPLNSWSACHRDLLEDAKDDALPAELLEALNTLSEAKVETICHRKEGGSSLIARNECLEVEFNTSQTNEDCTQIAETLQDPNPSGLQTLAHQNITSCEPLSNKRNSNSVTNSSDQETACVLRRSSRLEKLKVSRDAKYSDHMYKMPEKILPKILGCEDLTNNNSSAQNFRMQDPALMIDGKEKNMHSARFKNGKQIRKNEQFSGKKEKMKVNKISLHSINRRNIFGENLVYKAALHDDADLVHHCIKKGGNVNQPSYAGWTALHEASVGGFYRTASELLKGGADVNIKGLYQITPLHDAVMNGHYKVAELLLLNGADPLFRNDDGKCALDEAKDLCMKRLLERYIPKHQKCLTSAQRSSIDPLDIEDVYQHKKPKFSSKSHIWHVYNENSNRQKLEHVKVNKGSKASLFINKEDVYEYYQKDPKNTKFGKSKHKQSTLDQIYSTGLRKGNLHNVKDPNTNVPKGIGRRKTQHKRTQVDDVDCNPRKILAVSPSRRINRLVTYQQHIPETHNDLPEELCEPSSLTLSSLRNGLDSSTEACSVSKEKHIQNLDLSDSQEVQCLELESVDQTEAVSFPGLLLHKEIKLPVVTTDKQPHTLQEQHHVLYKSHENSNLVPKDERFNKWENSFLSFVKENSDNDDDDDCSTSEKAITSKKVLCSTGGKKHYNFKENLTNKKEMGFQQFLLSEDHLSQENELKAVSLTTLPEQEAVNFSYSDNAVISEHVANYEQCIFGPSFDHSNGNPEQNSLACMRTLLTHEASKLTNHVELFKKPQDYIPRAPTFLMNQTDTHIVEKMAKNCDTERNYIDRDQKIIYSNEPLSIVAHSQVIETTKVEKRRQNHLESETIHNIDSHSTDNMSKELANISKLSQREKKEISHKPGMKAGRINKRNARGESQLHLAVRRGNLPLVKALIESGADVNLNDNAGWTPLHEASNEGSIDIIVELLKAGAKVNCENIDGILPLHDAVANNHLKAAEILLQNGANPNQKDQKQKSALDEADDEKMKELLRSYGAIETVNRDESDAIVNEKIPAVRSKRHKQCFCDDGKTIDSSSLSHQERSRESLSVHQTLSAILQDIEEKQEYLLEFEIRNPEDAEQYIEKMLKIKKIMDNVLAKQKAERDDLAKKYRVSIESFKHGALREQLANLAARQKSLLVVAKKQKKISLKIQNCRNVTSLPCLSLRKLPPRSEISSEKDSQELTSLENLEHPQSGSLSPVSGSMQETQLSLETWNYSQNTNICLNSEAVRRGEFSGNDMNSKQNGSDCTLDGFPKSRHSDGTEKNKLPSQPVAFIGQTEYSQKENDLTEATDKDHEFYVSSPVIGKLNISETASVLAENAAHPSNIICDQDLSNYDPKRGNRKTSSQQSPTGASESLAHQGIAVLGSDTVHQMKPYLKKSVSVVPCADDSQISSSSGSGQQDTIKKALNYSTAPKKKCIQIKDLILLGRINPGNNILEFKTQETTHKASILLNGKLKVESGQIYKNPVTWLKDLLGGNSYVTWNYAWSKVTYLGKELLRYVSEDAPILPEPNSVPQQYQPCLPEVACLDDPVQEPNKSMFEKTKFGQGTSRESMQSSPRYLQINEILLISDQEFLPCHIMDQHWKFCVECEELTP

SEQ ID NO: 5227 - protein, 1930 aa, Homo sapiens
  Payload ID: 1134;
  Gene Symbol: ANKRD31;
  Gene Name: ankyrin repeat domain 31;
  ENSP ID: ENSP00000427262
MEEGVQAPDWDSDETVIEGSVTESDLEEKELPWRRLLFDQDASLKSEFSLHPDTRGMCKGMPSPEIQLGFKLREDLQEQMNKNKMMPVLSEDTILQSQDETERNQALLQTRKNCSMFIGSFRQSGLSLNHQNIEGPEAESPEVLPHIEKELSEGRDSPEVSLLSGTAITVSDTVAVKETSLVEPEKILAAPNTFFEPRKEVTMTMTSEETKDEESSLETFVSALESLLTSPESTQEERLFELVSDFDRKELMNPLSDSLSSISIPLNSWSACHRDLLEDAKDDALPAELLEALNTLSEAKVETICHRKEGGSSLIARNECLEVEFNTSQTNEDCTQIAETLQDPNPSGLQTLAHQNITSCEPLSNKRNSNSVTNSSDQETACVLRRSSRLEKLKVSRDAKYSDHMYKMPEKILPKILGCEDLTNNNSSAQNFRMQDPALMIDGKEKNMHSARFKNGKQIRKNEQFSGKKEKMKVNKISLHSINRRNIFGENLVYKAALHDDADLVHHCIKKGGNVNQPSYAGWTALHEASVGGFYRTASELLKGGADVNIKGLYQITPLHDAVMNGHYKVAELLLLNGADPLFRNDDGKCALDEAKDLCMKRLLERYIPKHQKCLTSAQRSSIDPLDIEDVYQHKKPKFSSKSHIWHVYNENSNRQKLEHVKVNKGSKASLFINKEDVYEYYQKDPKNTKFGKSKHKQSTLDQIYSTGLRKGNLHNVKDPNTNVPKGIGRRKTQHKRTQVDDVDCNPRKILAVSPSRRINRLVTYQQHIPETHNDLPEELCEPSSLTLSSLRNGLDSSTEACSVSKEKHIQNLDLSDSQEVQCLELESVDQTEAVSFPGLLLHKEIKLPVVTTDKQPHTLQEQHHVLYKSHENSNLVPKDERFNKWENSFLSFVKENSDNDDDDDCSTSEKAITSKKVLCSTGGKKHYNFKENLTNKKEMGFQQFLLSEDHLSQENELKAVSLTTLPEQEAVNFSYSDNAVISEHVANYEQCIFGPSFDHSNGNPEQNSLACMRTLLTHEASKLTNHVELFKKPQDYIPRAPTFLMNQTDTHIVEKMAKNCDTERNYIDRDQKIIYSNEPLSIVAHSQVIETTKVEKRRQNHLESETIHNIDSHSTDNMSKELANISKLSQREKKEISHKPDEELTNNISGDEITIRNCEEIKEKTESEIHMPTNSQEHKTVQNFRKRQSFLKTTCNLGMKAGRINKRNARGESQLHLAVRRGNLPLVKALIESGADVNLNDNAGWTPLHEASNEGSIDIIVELLKAGAKVNCENIDGILPLHDAVANNHLKAAEILLQNGANPNQKDQKQKSALDEADDEKMKELLRSYGAIETVNRDESDAIVNEKIPAVRSKRHKQCFCDDGKTIDSSSLSHQERSRESLSVHQTLSAILQDIEEKQEYLLEFEIRNPEDAEQYIEKMLKIKKIMDNVLAKQKAERDDLAKKYRVSIESFKHGALREQLANLAARQKSLLVVAKKQKKISLKIQNCRNVTSLPCLSLRKLPPRSEISSEKDSQELTSLENLEHPQSGSLSPVSGSMQETQLSLETWNYSQNTNICLNSEAVRRGEFSGNDMNSKQNGSDCTLDGFPKSRHSDGTEKNKLPSQPVAFIGQTEYSQKENDLTEATDKDHEFYVSSPVIGKLNISETASVLAENAAHPSNIICDQDLSNYDPKRGNRKTSSQQSPTGASESLAHQGIAVLGSDTVHQMKPYLKKSVSVVPCADDSQISSSSGSGQQDTIKKALNYSTAPKKKCIQIKDLILLGRINPGNNILEFKTQETTHKASILLNGKLKVESGQIYKNPVTWLKDLLGGNSYVTWNYAWSKVTYLGKELLRYVSEDAPILPEPNSVPQQYQPCLPEVACLDDPVQEPNKSMFEKTKFGQGTSRESMQSSPRYLQINEILLISDQEFLPCHIMDQHWKFCVECEELTP

SEQ ID NO: 5228 - protein, 452 aa, Homo sapiens
  Payload ID: 1135;
  Gene Symbol: ANKRD33;
  Gene Name: ankyrin repeat domain 33;
  Uniprot ID:  Q7Z3H0;
  ENSP ID: ENSP00000301190
MKVQPSVTCVASWGGIVHLEAFGDPVIVLRGAWAVPRVDCLIDTLRTPNASCMRKGTHLLVPCLEEEELALHRRRLDMSEALPCPGKETPTPGCRLGALYWACVHNDPTQLQAILDGGVSPEEATQVDSNGRTGLMVACYHGFQSVVALLSHCPFLDVNQQDKGGDTALMLAAQAGHVPLVSLLLNYYVGLDLERRDQRGLTALMKAAMRNRCADLTAVDPVRGKTALEWAVLTDSFDTVWRIRQLLRRPQVEQLSQHYKPEWPALSGLVAQAQAQAQVAPSLLERLQATLSLPFAPSPQEGGVLDHLVTATTSLASPFVTTACHTLCPDHPPSLGTRSKSVPELLGTAPPPPLVPQSPPGSPQRSPWVFVPYQSPQGILSKCLQWLQPRDSTSPRPQVPKILLSKASSSSHQCQPKPSPSGHQSLALPLWRYQELRIEKRKQEEEARMAQK

SEQ ID NO: 5229 - protein, 272 aa, Homo sapiens
  Payload ID: 1135;
  Gene Symbol: ANKRD33;
  Gene Name: ankyrin repeat domain 33;
  Uniprot ID:  Q7Z3H0;
  ENSP ID: ENSP00000344690
MVACYHGFQSVVALLSHCPFLDVNQQDKGGDTALMLAAQAGHVPLVSLLLNYYVGLDLERRDQRGLTALMKAAMRNRCECVATLLMAGADLTAVDPVRGKTALEWAVLTDSFDTVWRIRQLLRRPQVEQLSQHYKPEWPALSGLVAQAQAQAQVAPSLLERLQATLSLPFAPSPQEGGVLDHLVTATTSLASPFVTTACHTLCPDHPPSLGTRSKSVPELLVPAEAQSFRTPKSGPSSLAIPGAQDREEETGGGGQNGTEVGEDGIGQAGNR

SEQ ID NO: 5230 - protein, 136 aa, Homo sapiens
  Payload ID: 1135;
  Gene Symbol: ANKRD33;
  Gene Name: ankyrin repeat domain 33;
  ENSP ID: ENSP00000448116
MKVQPSVTCVASWGGIVHLEAFGDPVIVLRGAWAVPRVDCLIDTLRTPNASCMRKGTHLLVPCLEEEELALHRRRLDMSEALPCPGKETPTPGCRLGALYWACVHNDPTQLQAILDGGVSPEEATQVDSNGRATCL

SEQ ID NO: 5231 - protein, 494 aa, Homo sapiens
  Payload ID: 1136;
  Gene Symbol: ANKRD33B;
  Gene Name: ankyrin repeat domain 33B;
  Uniprot ID:  A6NCL7;
  ENSP ID: ENSP00000296657
MVLLAGTGPEGGGARCMTPPPPSPPRGAQVEEDPADYEEFEDFSSLPDTRSIASDDSFYPFEDEEEHGVESAESVPEGVPESVPETATLLRAACANNVGLLRTLVRRGVSVEEAQETDRNGRTGLIVACYHGFVDTVVALAECPHVDVNWQDSEGNTALITAAQAGHAIITNYLLNYFPGLDLERRNAFGFTALMKAAMQGRTDCIRALMLAGADVHARDPRRGMSPQEWATYTGRVDAVRLMQRLLERPCPEQFWEKYRPELPPPPEAARKPAGSKNCLQRLTDCVLSVLTPRSVRGPEDGGVLDHMVRMTTSLYSPAVAIVCQTVCPESPPSVGKRRLAVQEILAARAARGPQAQEEDEVGGAGQRGRTGQEDADSREGSPRAGLPPALGSRGPAAPAPRKASLLPLQRLRRRSVRPGVVVPRVRVSKAPAPTFQPERPARKGSTKDSGHLQIPKWRYKEAKEEKRKAEEAEKKRQAEAQKERRTAPWKKRT

SEQ ID NO: 5232 - protein, 198 aa, Homo sapiens
  Payload ID: 1136;
  Gene Symbol: ANKRD33B;
  Gene Name: ankyrin repeat domain 33B;
  ENSP ID: ENSP00000422195
MVLLAGTGPEGGGARCMTPPPPSPPRGAQVEEDPADYEEFEDFSSLPDTRSIASDDSFYPFEDEEEHGVESAESVPEGVPESVPETATLLRAACANNVGLLRTLVRRGVSVEEAQETDRNGRTGLIVACYHGFVDTVVALAECPHVDVNWQDSEGNTALITAAQAGAAPVPMGIVSLDTGSQSCASGVSITWAGSCEH

SEQ ID NO: 5233 - protein, 496 aa, Homo sapiens
  Payload ID: 1137;
  Gene Symbol: ANKRD34A;
  Gene Name: ankyrin repeat domain 34A;
  Uniprot ID:  Q69YU3;
  ENSP ID: ENSP00000475189
MLHTEGHALLRAVGQGKLRLARLLLEGGAYVNEGDAQGETALMAACRARYDDPQNKARMVRYLLEQGADPNIADRLGRTALMHACAGGGGAAVASLLLAHGADPSVRDHAGASALVHALDRGDRETLATLLDACKAKGTEVIIITTDTSPSGTKKTRQYLNSPPSPGVEDPAPASPSPGFCTSPSEIQLQTAGGGGRGMLSPRAQEEEEKRDVFEFPLPKPPDDPSPSEPLPKPPRHPPKPLKRLNSEPWGLVAPPQPVPPTEGRPGIERLTAEFNGLTLTGRPRLSRRHSTEGPEDPPPWAEKVTSGGPLSRRNTAPEAQESGPPSGLRQKLSRMEPVELDTPGHLCPDSPESSRLSLERRRYSASPLTLPPAGSAPSPRQSQESLPGAVSPLSGRRRSPGLLERRGSGTLLLDHISQTRPGFLPPLNVSPHPPIPDIRPQPGGRAPSLPAPPYAGAPGSPRTKRKLVRRHSMQTEQIRLLGGFQSLGGPGEPGR

SEQ ID NO: 5234 - protein, 118 aa, Homo sapiens
  Payload ID: 1137;
  Gene Symbol: ANKRD34A;
  Gene Name: ankyrin repeat domain 34A;
  ENSP ID: ENSP00000478172
MLHTEGHALLRAVGQGKLRLARLLLEGGAYVNEGDAQGETALMAACRARYDDPQNKARMVRYLLEQGADPNIADRLGRTALMHACAGGGGAAVASLLLAHGADPSVRDHAGASALVHA

SEQ ID NO: 5235 - protein, 103 aa, Homo sapiens
  Payload ID: 1137;
  Gene Symbol: ANKRD34A;
  Gene Name: ankyrin repeat domain 34A;
  ENSP ID: ENSP00000484224
MLHTEGHALLRAVGQGKLRLARLLLEGGAYVNEGDAQGETALMAACRARYDDPQNKARMVRYLLEQGADPNIADRLGRTALMHACAGGGGAAVASLLLAHGAD

SEQ ID NO: 5236 - protein, 514 aa, Homo sapiens
  Payload ID: 1138;
  Gene Symbol: ANKRD34B;
  Gene Name: ankyrin repeat domain 34B;
  Uniprot ID:  A5PLL1;
  ENSP ID: ENSP00000339802
MDEGMEISSEGNSLIKAVHQSRLRLTRLLLEGGAYINESNDRGETPLMIACKTKHVDHQSVSKAKMVKYLLENNADPNIQDKSGKTALMHACLEKAGPEVVSLLLKSGADLSLQDHSSYSALVYAINSEDTETLKVLLSACKAKGKEVIIITTAKLPCGKHTTKQYLNMPPVDIDGCHSPATCTTPSEIDIKTASSPLSHSSETELTLFGFKDLELAGSNDDTWDPGSPVRKPALAPKGPKLPHAPPWVKSPPLLMHQNRVASLQEELQDITPEEELSYKTNGLALSKRFITRHQSIDVKDTAHLLRAFDQASSRKMSYDEINCQSYLSEGNQQCIEVPVDQDPDSNQTIFASTLRSIVQKRNLGANHYSSDSQLSAGLTPPTSEDGKALIGKKKILSPSPSQLSESKELLENIPPGPLSRRNHAVLERRGSGAFPLDHSVTQTRQGFLPPLNVNSHPPISDINVNNKICSLLSCGQKVLMPTVPIFPKEFKSKKMLLRRQSLQTEQIKQLVNF

SEQ ID NO: 5237 - protein, 17 aa, Homo sapiens
  Payload ID: 1138;
  Gene Symbol: ANKRD34B;
  Gene Name: ankyrin repeat domain 34B;
  ENSP ID: ENSP00000426198
MDEGMEISSEGNSLIKA

SEQ ID NO: 5238 - protein, 535 aa, Homo sapiens
  Payload ID: 1139;
  Gene Symbol: ANKRD34C;
  Gene Name: ankyrin repeat domain 34C;
  Uniprot ID:  P0C6C1;
  ENSP ID: ENSP00000401089
MMDDDTELRTDGNSLLKAVWLGRLRLTRLLLEGGAYINESNDKGETALMVACITKHVDQQSISKSKMVKYLLDNRADPNIQDKSGKTALIHACIRRAGGEVVSLLLENGADPSLEDRTGASALVYAINADDKDALKHLLDACKAKGKEVIIITTDKSSSGTKTTKQYLNVPPSPKVEDRHSPPLCASPSDIELKALGLDSPLTEKEDDFFSLQAGHPSSCNTSKAVNEPGSPTRKVSNLKRARLPQLKRLQSEPWGLIAPSVLAASTRQDETHGASTDNEVIKSISDISFPKRGPLSRTNSIDSKDPTLFHTVTEQVLKIPVSSAPASWKAAYEKGQAPHPRLARRGTLPVDQEKCGMGPSGPSALKEPASLKWLENDLYDLDIQPGPDPPNSISLESGKGPLDRKKLNSSHLSLFHGSRESLDTVPSTSPSSARRRPPHLLERRGSGTLLLDRISHTRPGFLPPLNVNLNPPIPDIRSSSKPSCSLASGLKSMVPVAPSSPKRVDLRSKKKLLRRHSMQIEQMKQLSDFEEIMT

SEQ ID NO: 5239 - protein, 1001 aa, Homo sapiens
  Payload ID: 1140;
  Gene Symbol: ANKRD35;
  Gene Name: ankyrin repeat domain 35;
  Uniprot ID:  Q8N283;
  ENSP ID: ENSP00000347802
MKRIFSCSSTQVAVERWNRHDQKLLEAVHRGDVGRVAALASRKSARPTKLDSNGQSPFHLAASKGLTECLTILLANGADINSKNEDGSTALHLATISCQPQCVKVLLQHGANEDAVDAENRSPLHWAASSGCASSVLLLCDHEAFLDVLDNDGRTPLMIASLGGHAAICSQLLQRGARVNVTDKNDKSALILACEKGSAEVAELLLSHGADAGAVDSTGHDALHYALHTQDKALWRHLQQALSRRRRGGQRLVQHPDLASQASPSEPQAGSPPKSSWRAEPEEEQEEKEDEDPCSEEWRWKYEEERRKVVRLEQELVQKTEECKTQAAAYLDLENQIREQAQELGVLLSWEPRASGKQGSSLRPGGDGMEQGCPKDLLAESTQELKKQQQAAATVNPVLAPKKAEDSAPGKIQYEVHGRSQPEEQGPPQSPASETIRKATGQQLTTNGAQTFGPDHADQLPAGQKESSQVLGVEPGGTVAEPVGPAAMNQLLLQLREELAAVWREKDAARGALSRPVMEGALGTPRAEAAAAAWEKMEARLERVLARLEWAKAGLQVKPEVPSQESREGALKAAPGSIKQDEEKEKRVPGAQGEPLGALGGEKALGGLAKGQLEKEMSVLRLSNSNLLEELGELGRERQRLQRELQSLSQRLQREFVPKPQAQVQLQQLRQSVGLLTNELAMEKEATEKLRKLLASQSSGLRGLWDCLPADLVGERSAQSKAAESLEELRACISTLVDRHREAQQVLARLQEENQQLRGSLSPCREPGTSLKAPASPQVAALEQDLGKLEEELRAVQATMSGKSQEIGKLKQLLYQATEEVAELRAREAASLRQHEKTRGSLVAQAQAWGQELKALLEKYNTACREVGRLREAVAEERRRSGDLAAQAAEQERQASEMRGRSEQFEKTAELLKEKMEHLIGACRDKEAKIKELLKKLEQLSEEVLAIRGENARLALQLQDSQKNHEEIISTYRNHLLNAARGYMEHEVYNILLQILSMEEE

SEQ ID NO: 5240 - protein, 911 aa, Homo sapiens
  Payload ID: 1140;
  Gene Symbol: ANKRD35;
  Gene Name: ankyrin repeat domain 35;
  ENSP ID: ENSP00000442671
MKRIFSCSSTQCVKVLLQHGANEDAVDAENRSPLHWAASSGCASSVLLLCDHEAFLDVLDNDGRTPLMIASLGGHAAICSQLLQRGARVNVTDKNDKSALILACEKGSAEVAELLLSHGADAGAVDSTGHDALHYALHTQDKALWRHLQQALSRRRRGGQRLVQHPDLASQASPSEPQAGSPPKSSWRAEPEEEQEEKEDEDPCSEEWRWKYEEERRKVVRLEQELVQKTEECKTQAAAYLDLENQIREQAQELGVLLSWEPRASGKQGSSLRPGGDGMEQGCPKDLLAESTQELKKQQQAAATVNPVLAPKKAEDSAPGKIQYEVHGRSQPEEQGPPQSPASETIRKATGQQLTTNGAQTFGPDHADQLPAGQKESSQVLGVEPGGTVAEPVGPAAMNQLLLQLREELAAVWREKDAARGALSRPVMEGALGTPRAEAAAAAWEKMEARLERVLARLEWAKAGLQVKPEVPSQESREGALKAAPGSIKQDEEKEKRVPGAQGEPLGALGGEKALGGLAKGQLEKEMSVLRLSNSNLLEELGELGRERQRLQRELQSLSQRLQREFVPKPQAQVQLQQLRQSVGLLTNELAMEKEATEKLRKLLASQSSGLRGLWDCLPADLVGERSAQSKAAESLEELRACISTLVDRHREAQQVLARLQEENQQLRGSLSPCREPGTSLKAPASPQVAALEQDLGKLEEELRAVQATMSGKSQEIGKLKQLLYQATEEVAELRAREAASLRQHEKTRGSLVAQAQAWGQELKALLEKYNTACREVGRLREAVAEERRRSGDLAAQAAEQERQASEMRGRSEQFEKTAELLKEKMEHLIGACRDKEAKIKELLKKLEQLSEEVLAIRGENARLALQLQDSQKNHEEIISTYRNHLLNAARGYMEHEVYNILLQILSMEEE

SEQ ID NO: 5241 - protein, 1941 aa, Homo sapiens
  Payload ID: 1141;
  Gene Symbol: ANKRD36;
  Gene Name: ankyrin repeat domain 36;
  Uniprot ID:  A6QL64;
  ENSP ID: ENSP00000391950
MEDGKRERWPTLMERLCSDGFAFPQYPIKPYHLKRIHRAVLHGNLEKLKYLLLTYYDANKRDRKERTALHLACATGQPEMVHLLVSRRCELNLCDREDRTPLIKAVQLRQEACATLLLQNGANPNITDFFGRTALHYAVYNEDTSMIEKLLSHGTNIEECSKCEYQPLLFAVSRRKVKMVEFLLKKKANVNAIDYLGRSALIHAVTLGEKDIVILLLQHNIDVLSRDAFRKIAGDYAIEAKNRVIFDLIYEYERKRYEDLPINSNPVSSQKQPALKATSGKEDSISNIATEIKDGQKSGTVSSQKQPALKDTSDKDDSVSNTATEIKDEQKSGTVLPAVEQCLNRSLYRPDAVAQPVTENEFSLESEIISKLYIPKRKIISPRSIKDVLPPVEEAVDRCLYLLDRFAQPVTKDKFALESENISEPYFTNRRTISQQSAENLDAACGIDKTENGNMFEDQNVDKEGKALPATGQKANVSPEQPPLFTHTVKDRDHISTRFLGGMDSLTSSEESSERPPLSTLTLKEADPSSKAAMRRKDSPPPGKVSSQKQPAEKATSDDKDSVSNIATEIKEGPISGTVSSQKQPAEKATSDEKDSVSNIATEIKKGQQSGTVSPQKQSAWKVIFKKKVSLLNIATRIMGGGKSGTVSSQKQPASKATSDKTDSALNIATEIKDGLQCGTVSSQKQPALKATTDEEDSVSNIATEIKDGEKSGTVSSQKQPALKATTDEEDSVSNIATEIKDGEKSGTVSSQKQPALKATTDEKDSVSNIATEIKDGEKSGTVSSQKPPALTATSDEEGSVLSIARENKDGEKSRTVSSRKKPALKATSDEKDSFSNITRGKKDGEISRKVSSQKPPTLKGTSDEEDSVLGIARENKDGEKSRTVSSEKPPGLKASSAEKDSVLNIARGKKDGEKTKRVSSRKKPSLEATSDEKDSFSNITREKKDGEISRKVSSQKPPALKGTSDEEDSVLGIARENKDGEKSRTVSSEKPPGLKATSDEKDSVLNIARGKKDGEKTRTVSSQKPPTLKATSDEEDSVLSIARENKDGEKSRTVSSEKPSGLKATSAEKDSVLNIARGKKYGEKTKRVSSRKKPALKATSDEKDSVLYIAREKKDGEKSRTVSSPKQPALKAICDKEDSVPNMATEKKDEQISGTVSCQKQPALKATSDKKDSVSNIPTEIKDGQQSGTVSSQKQPAWKATSVKKDSVSNIATEIKDGQIRGTGILEYTFNVMFDQIEEKFTSLNKSAGVSPQKQSAQKVIFKKKVSLLNIATRITGGWKSGTEYPENLPTLKATIENKNSVLNTATKMKDVQTSTPAEQDLEMASEGEQKRLEEYENNQPQVKNQIHSRDDLDDIIQSSQTVSEDGDSLCCNCKNVILLIDQHEMKCKDCVHLLKIKNTFCLWKRLIKLKDNHCEQLRVKIRKLKNKASVLQKRISEKEEIKSQLKHEILELEKELCSLRFAIQQEKKKRRNVEEVHQKVREKLRITEEQYRIEADVTKPIKPALKSAEVELKTGGNNSNQVSETDEKEDLLHENRLMQDEIARLRLEKDTIKNQNLEKKYLKDFEIVKRKHEDLQKALKRNGETLAKTIACYSGQLAALTDENTTLRSKLEKQRESRQRLETEMQSYHCRLNAARCDHDQSHSSKRDQELAFQGTVDKCRHLQENLNSHVLILSLQLSKAESKSRVLKTELHYTGEALKEKALVFEHVQSELKQKQSQMKDIEKMYKSGYNTMEKCIEKQERFCQLKKQNMLLQQQLDDARNKADNQEKAILNIQARCDARVQNLQAECRKHRLLLEEDNKMLVNELNHSKEKECQYEKEKAEREVAVRQLQQKRDDVLNKGSATKALLDASSRHCTYLENGMQDSRKKLDQMRSQFQEIQDQLTATIRCTKEMEGDTQKLEVEHVMMRKIIKKQDDQIERLEKILQHSSLMLQVFES

SEQ ID NO: 5242 - protein, 1941 aa, Homo sapiens; identical to SEQ ID NO: 5241
  Payload ID: 1141;
  Gene Symbol: ANKRD36;
  Gene Name: ankyrin repeat domain 36;
  Uniprot ID:  A6QL64;
  ENSP ID: ENSP00000419530

SEQ ID NO: 5243 - protein, 309 aa, Homo sapiens [sequence omitted]

SEQ ID NO: 5244 - protein, 1353 aa, Homo sapiens
  Payload ID: 1142;
  Gene Symbol: ANKRD36B;
  Gene Name: ankyrin repeat domain 36B;
  Uniprot ID:  Q8N2N9;
  ENSP ID: ENSP00000477778
MERLCSDGFAFPHYYIKPYHLKRIHRAVLRGNLEKLKYLLLTYYDANKRDRKERTALHLACATGQPEMVHLLVSRRCELNLCDREDRTPLIKAVQLRQEACATLLLQNGADPNITDVFGRTALHYAVYNEDTSMIEKLLSHGTNIEECSKNEYQPLLLAVSRRKVKMVEFLLKKKANVNAIDYLGRSALILAVTLGEKDIVILLLQHNIDVFSRDVYGKLAEDYASEAENRVIFDLIYEYKRKRYEDLPINSNPVSPQKQRAEKATSDDKDSVSNIATEIKEGPISGTVSSQKQPAEKATSDEKDSVSNIATEIKEGQQSGTVSPQKQSAQKVIFKKKVSLLNIATRIMGGGKSGTVSSQKQPASKTASDKTDSALNTATEIKDGLQCGTVSSQKQQALKATTDEEGSVSNIATEIKDGEKSGTVSSQKKPALKATSDEKDSFSNITREKKDGEISRTVSSQKPPALKATSVKEDSVLNIAREKKDGEKSRTVSFEQPPGLKATRDEKDSLLNIARGKKDGEKTRRVSSHKQPSLKATSDKEDSVPNMATETKDEQISGTVSCQKQPALKATSDKKDSVSNIPTEIKDGQQSGTVSSQKQPAWKATSVKKDSVSNIATEIKDGQIRGTVSSQRRPALKTTGDEKDSVSNIAREIKDGEKSGTVSPQKQSAQKVIFKKKVSLLNIATRITGGGKSGTEYPENLRTLKATIENKDSVLNTATKMKEVQTSTPAEQDLEMASEGEQKRLEEYENNQPQVKNQIHSRDDLDDIIQSSQTVSEDGDSLCCNCKNVILLIDQHEMKCKDCVHLLKIKNTFCLWKRLIKLKDNHCEQLRVKIRKLKNKASVLQKRISEKEEIKSQLKHEILELEKELCSLRFAIQQEKKKRRNVEELHQKVREKLRITEEQYRIEADVTKPIKPALKSAEVELKTGGNNSNQVSETDEKEDLLHENRLMQDEIARLRLEKDTIKNQNLEKKYLKDFEIVKRKHEDLQKALKRNGETLAKTIACYSGQLAALTDENTTLRSKLEKQRESRQRLETEMQSYRCRLNAARCDHDQSHSSKRDQELAFQGTVDKCRHLQENLNSHVLILSLQLSKAESKSRVLKTELHYTGEALKEKALVFEHVQSELKQKQSQMKDIEKMYKSGYNTMEKCIEKQERFCQLKKQNMLLQQQLDDARNKADNQEKAILNIQARCDARVQNLQAECRKHRLLLEEDNKMLVNELNHSKEKECQYEKEKAEREVAVRQLQQKRDDVLNKGSATKALLDASSRHCTYLENGMQDSRKKLDQMRSQFQEIQDQLTATIRCTKEMEGDTQKLEVEHVMMRKIIKKQDDQIERLEKILQHSSLMLQVFES

SEQ ID NO: 5245 - protein, 171 aa, Homo sapiens
  Payload ID: 1142;
  Gene Symbol: ANKRD36B;
  Gene Name: ankyrin repeat domain 36B;
  ENSP ID: ENSP00000480812
MERLCSDGFAFPHYYIKPYHLKRIHRAVLRGNLEKLKYLLLTYYDANKRDRKERTALHLACATGQPEMVHLLVSRRCELNLCDREDRTPLIKAVQLRQEACATLLLQNGADPNITDVFGRTALHYAVYNEDTSMIEKLLSHGTNIEECSKCLLRNNELRRLQVTTKILFQI

SEQ ID NO: 5246 - protein, 1353 aa, Homo sapiens; identical to SEQ ID NO: 5244
  Payload ID: 1142;
  Gene Symbol: ANKRD36B;
  Gene Name: ankyrin repeat domain 36B;
  Uniprot ID:  Q8N2N9;
  ENSP ID: ENSP00000481149

SEQ ID NO: 5247 - protein, 137 aa, Homo sapiens
  Payload ID: 1142;
  Gene Symbol: ANKRD36B;
  Gene Name: ankyrin repeat domain 36B;
  ENSP ID: ENSP00000481806
MLVNELNHSKEKECQYEKEKAEREVAVRQLQQKRDDVLNKGSATKALLDASSRHCTYLENGMQDSRKKLDQMRSQFQEIQDQLTATIRCTKEMEGDTQKLEVEHVMMRKIIKKQDDQIERLEKILQHSSLMLQVFES

SEQ ID NO: 5248 - protein, 239 aa, Homo sapiens
  Payload ID: 1142;
  Gene Symbol: ANKRD36B;
  Gene Name: ankyrin repeat domain 36B;
  Uniprot ID:  Q8N2N9;
  ENSP ID: ENSP00000482644
MERLCSDGFAFPHYYIKPYHLKRIHRAVLRGNLEKLKYLLLTYYDANKRDRKERTALHLACATGQPEMVHLLVSRRCELNLCDREDRTPLIKAVQLRQEACATLLLQNGADPNITDVFGRTALHYAVYNEDTSMIEKLLSHGTNIEECSKNEYQPLLLAVSRRKVKMVEFLLKKKANVNAIDYLGRSALILAVTLGEKDIVILLLQHNIDVFSRDVYGKLAEDYASEAENRVVSSETTS

SEQ ID NO: 5249 - protein, 1032 aa, Homo sapiens
  Payload ID: 1142;
  Gene Symbol: ANKRD36B;
  Gene Name: ankyrin repeat domain 36B;
  ENSP ID: ENSP00000484402
MGGGKSGTVSSQKQPASKTASDKTDSALNTATEIKDGLQCGTVSSQKQQALKATTDEEGSVSNIATEIKDGEKSGTVSSQKKPALKATSDEKDSFSNITREKKDGEISRTVSSQKPPALKATSVKEDSVLNIAREKKDGEKSRTVSFEQPPGLKATRDEKDSLLNIARGKKDGEKTRRVRVDKKFSSLNKSAGGSLKLHILIQHKGGRRKRGMSSHKQPSLKATSDKEDSVPNMATETKDEQISGTVSCQKQPALKATSDKKDSVSNIPTEIKDGQQSGTVSSQKQPAWKATSVKKDSVSNIATEIKDGQIRGTGILEYTFNVMFDQIEEKFTSPNKSAGGVSPQKQSAQKVIFKKKVSLLNIATRITGGGKSGTEYPENLRTLKATIENKDSVLNTATKMKEVQTSTPAEQDLEMASEGEQKRLEEYENNQPQVKNQIHSRDDLDDIIQSSQTVSEDGDSLCCNCKNVILLIDQHEMKCKDCVHLLKIKNTFCLWKRLIKLKDNHCEQLRVKIRKLKNKASVLQKRISEKEEIKSQLKHEILELEKELCSLRFAIQQEKKKRRNVEELHQKVREKLRITEEQYRIEADVTKPIKPALKSAEVELKTGGNNSNQVSETDEKEDLLHENRLMQDEIARLRLEKDTIKNQNLEKKYLKDFEIVKRKHEDLQKALKRNGETLAKTIACYSGQLAALTDENTTLRSKLEKQRESRQRLETEMQSYRCRLNAARCDHDQSHSSKRDQELAFQGTVDKCRHLQENLNSHVLILSLQLSKAESKSRVLKTELHYTGEALKEKALVFEHVQSELKQKQSQMKDIEKMYKSGYNTMEKCIEKQERFCQLKKQNMLLQQQLDDARNKADNQEKAILNIQARCDARVQNLQAECRKHRLLLEEDNKMLVNELNHSKEKECQYEKEKAEREVAVRQLQQKRDDVLNKGSATKALLDASSRHCTYLENGMQDSRKKLDQMRSQFQEIQDQLTATIRCTKEMEGDTQKLEVEHVMMRKIIKKQDDQIERLEKILQHSSLMLQVFES

SEQ ID NO: 5250 - protein, 618 aa, Homo sapiens
  Payload ID: 1143;
  Gene Symbol: ANKRD36C;
  Gene Name: ankyrin repeat domain 36C;
  Uniprot ID:  Q5JPF3;
  ENSP ID: ENSP00000295246
MRRKDSPPPGKVSSQKQPAEKATSDDKDSVSNIATEIKEGPISGTVSSQKQPAEKATSDEKDSVSNIATEIKEGQQSGTVSPQKQSAWKVIFKKKVSLLNIATRITGGGKSGTVSSQKQPPSKATSDKTDSALNIATEIKDGLQCGTVSSQKQPALKATTDEEDSVSNIATEIKDGEKSGTVSSQKQPALKATTDEEDSVSIIATEIKDGEKSGTVSSRKKPALKATSDEKDSFSNITREKKDGEISRTVTSEKPAGLKATSDEEDSVLNIARGKEDGEKTRRVSSRKKPALKATSDEKDSFSNITREKKDGETSRTVSSQKPPALKATSDEEDSVLNIAREKKDGEKSRTVSSEKPSGLKATSDEKDSVLNIARGKKHGEKTRRVSSHKQPALKATSDKENSVPNMATETKDEQISGTVSSQKQPALKATSDKKDSVSNIPTEIKDGQQSGTVSSQKQLAWKATSVKKDSVSNIATEIKDGQIRGTVSSQRQPALKATGDEKDSVSNIAREIKDGEKSGTVSPQKQSAQKVIFKKKVSLLNIATRITGGWKSGTEYPENLPTLKATIENKNSVLNTATKMKDVQTSTPEQDLEMASEGEQKRLEEYENNQPQIVFTY

SEQ ID NO: 5251 - protein, 1778 aa, Homo sapiens
  Payload ID: 1143;
  Gene Symbol: ANKRD36C;
  Gene Name: ankyrin repeat domain 36C;
  Uniprot ID:  Q5JPF3;
  ENSP ID: ENSP00000403302
MDDKEPKRWPTLRDRLCSDGFLFPQYPIKPYHLKGIHRAVFYRDLEELKFVLLTRYDINKRDRKERTALHLACATGQPEMVHLLVSRRCELNLCDREDRTPLIKAVQLRQEACATLLLQNGADPNITDVFGRTALHYAVYNEDTSMIEKLLSYGANIEECSEDEYPPLFLAVSQRKVKMVEFLLKKKANINAVDYLGRSALIHAVTLGEKDIVILLLQHNIDVFSRDVYGKLAEDYASEAKNRVIFELIYEYERKKHEELSINSNPVSSQKQPALKATSGKEDSISNIATEIKDGQKSGTVSSQKQPALKGTSDKNDSVSNTATEIKDEQKSGTVSSQKQPALKDTSDKNDSVSNTATEIKDEQKSGTVLPAVEQCLNRSLYRPDAVAQPVTEDEFALESEIISKLYIPKRKIISPRSIEDVLPPVEEAVDRCLYLLDRFAQAVTKDKFALESENISEPYFTNRRTISQQSAEKLDAACGIDKTENGTLFEDQNVDKEGKALPATGQKANVSPEQPPLFTHTVKDSDHISTRFLGSMDSLTSSEESSERPPLSTLTLKEADPSSKAAMRRKDSPPPGKVSSQKQPAEKATSDDKDSVSNIATEIKEGPISGTVSSQKQPAEKATSDEKDSVSNIATEIKEGQQSGTVSPQKQSAWKVIFKKKVSLLNIATRITGGGKSGTVSSQKQPPSKATSDKTDSALNIATEIKDGLQCGTVSSQKQPALKATTDEEDSVSNIATEIKDGEKSGTVSSQKQPALKATTDEEDSVSIIATEIKDGEKSGTVSSRKKPALKATSDEKDSFSNITREKKDGEISRTVTSEKPAGLKATSDEEDSVLNIARGKEDGEKTRRVSSRKKPALKATSDEKDSFSNITREKKDGETSRTVSSQKPPALKATSDEEDSVLNIAREKKDGEKSRTVSSEKPSGLKATSDEKDSVLNIARGKKHGEKTRRVSSHKQPALKATSDKENSVPNMATETKDEQISGTVSSQKQPALKATSDKKDSVSNIPTEIKDGQQSGTVSSQKQLAWKATSVKKDSVSNIATEIKDGQIRGTVSSQRQPALKATGDEKDSVSNIAREIKDGEKSGTVSPQKQSAQKVIFKKKVSLLNIATRITGGWKSGTEYPENLPTLKATIENKNSVLNTATKMKDVQTSTPEQDLEMASEGEQKRLEEYENNQPQVKNQIHSRDDLDDIIQSSQTVSEDGDSLCCNCKNVILLIDQHEMKCKDCVHLLKIKKTFCLCKRLTELKDNHCEQLRVKIRKLKNKASVLQKRLSEKEEIKSQLKHETLELEKELCSLRFAIQQEKKKRRNVEELHQKVREKLRITEEQYRIEADVTKPIKPALKSAEVELKTGGNNSNQVSETDEKEDLLHENRLMQDEIARLRLEKDTIKNQNLEKKYLKDFEIVKRKHEDLQKALKRNEETLAETIACYSGQLAALTDENTTLRSKLEKQRESGQRLETEMQSYRCRLNAALCDHDQSHSSKRDQELAFQGTVDKCCHLQENLNSHVLILSLQLSKAESKFRVLETELHYTGEALKEKALVFEHVQSELKQKQSQMKDIEKMYKSGYNTMEKCIEKQERFCQLKKQNMLLQQQLDDARNKADNQEKAILNIQARCDARVENLQAECRKHRLLLEEDNKMLVNELNHSKEKKCQYEKEKAEREVAVRQLQQKQDDVLNKRSATKALLDASSRHCIYLENGMQDSRKKLDQMRSQFQEIQDQLTATIRCTKEMEGDAQKLEVENVMMRKIIKKQDEQIERFEKILQHSSLMLQVFES

SEQ ID NO: 5252 - protein, 532 aa, Homo sapiens
  Payload ID: 1143;
  Gene Symbol: ANKRD36C;
  Gene Name: ankyrin repeat domain 36C;
  ENSP ID: ENSP00000431824
MDDKEPKRWPTLRDRLCSDGFLFPQYPIKPYHLKGIHRAVFYRDLEELKFVLLTRYDINKRDRKERTALHLACATGQPEMVHLLVSRRCELNLCDREDRTPLIKAVQLRQEACATLLLQNGADPNITDVFGRTALHYAVYNEDTSMIEKLLSYGANIEECSEDEYPPLFLAVSQRKVKMVEFLLKKKANINAVDYLGRSALIHAVTLGEKDIVILLLQHNIDVFSRDVYGKLAEDYASEAKNRVIFELIYEYERKKHEELSINSNPVSSQKQPALKATSGKEDSISNIATEIKDGQKSGTVSSQKQPALKGTSDKNDSVSNTATEIKDEQKSGTVSSQKQPALKDTSDKNDSVSNTATEIKDEQKSGTVLPAVEQCLNRSLYRPDAVAQPVTEDEFALESEIISKLYIPKRKIISPRSIEDVLPPVEEAVDRCLYLLDRFAQAVTKDKFALESENISEPYFTNRRTISQQSAEKLDAACGIDKTENGTLFEDQNVDKEGKALPATGQKANVSPEQPPLFTNLLSDLLYPRLL

SEQ ID NO: 5253 - protein, 61 aa, Homo sapiens
  Payload ID: 1143;
  Gene Symbol: ANKRD36C;
  Gene Name: ankyrin repeat domain 36C;
  ENSP ID: ENSP00000433685
  MOD_RES (1)..(1): Any amino acid
XEKLDAACGIDKTENGTLFEDQNVDKEGKALPATGQKANVSPEQPPLFTNLLSDLLYPRLL

SEQ ID NO: 5254 - protein, 163 aa, Homo sapiens
  Payload ID: 1143;
  Gene Symbol: ANKRD36C;
  Gene Name: ankyrin repeat domain 36C;
  ENSP ID: ENSP00000482131
MDDKEPKRWPTLRDRLCSDGFLFPQYPIKPYHLKGIHRAVFYRDLEELKFVLLTRYDINKRDRKERTALHLACATGQPEMVHLLVSRRCELNLCDREDRTPLIKAVQLRQEACATLLLQNGADPNITDVFGRTALHYAVYNEDTSMIEKLLSYGANIEECSEV

SEQ ID NO: 5255 - protein, 137 aa, Homo sapiens
  Payload ID: 1143;
  Gene Symbol: ANKRD36C;
  Gene Name: ankyrin repeat domain 36C;
  ENSP ID: ENSP00000485004
MLVNELNHSKEKKCQYEKEKAEREVAVRQLQQKQDDVLNKRSATKALLDASSRHCIYLENGMQDSRKKLDQMRSQFQEIQDQLTATIRCTKEMEGDAQKLEVENVMMRKIIKKQDEQIERFEKILQHSSLMLQVFES

SEQ ID NO: 5256 - protein, 158 aa, Homo sapiens
  Payload ID: 1144;
  Gene Symbol: ANKRD37;
  Gene Name: ankyrin repeat domain 37;
  Uniprot ID:  Q7Z713;
  ENSP ID: ENSP00000335147
MLLLDCNPEVDGLKHLLETGASVNAPPDPCKQSPVHLAAGSGLACFLLWQLQTGADLNQQDVLGEAPLHKAAKVGSLECLSLLVASDAQIDLCNKNGQTAEDLAWSCGFPDCAKFLTTIKCMQTIKASEHPDRNDCVAVLRQKRSLGSVENTSGKRKC

SEQ ID NO: 5257 - protein, 44 aa, Homo sapiens
  Payload ID: 1144;
  Gene Symbol: ANKRD37;
  Gene Name: ankyrin repeat domain 37;
  ENSP ID: ENSP00000421529
MLLLDCNPEVDGLKHLLETGASVNAPPDPCKQSPVHLAAGSGLA

SEQ ID NO: 5258 - protein, 183 aa, Homo sapiens
  Payload ID: 1145;
  Gene Symbol: ANKRD39;
  Gene Name: ankyrin repeat domain 39;
  Uniprot ID:  Q53RE8;
  ENSP ID: ENSP00000377170
MATPRPCADGPCCSHPSAVLGVQQTLEEMDFERGIWSAALNGDLGRVKHLIQKAEDPSQPDSAGYTALHYASRNGHYAVCQFLLESGAKCDAQTHGGATALHRASYCGHTEIARLLLSHGSNPRVVDDDGMTSLHKAAERGHGDICSLLLQHSPALKAIRDRKARLACDLLPCNSDLRDLLSS

SEQ ID NO: 5259 - protein, 183 aa, Homo sapiens; identical to SEQ ID NO: 5258
  Payload ID: 1145;
  Gene Symbol: ANKRD39;
  Gene Name: ankyrin repeat domain 39;
  Uniprot ID:  Q53RE8;
  ENSP ID: ENSP00000398321

SEQ ID NO: 5260 - protein, 368 aa, Homo sapiens
  Payload ID: 1146;
  Gene Symbol: ANKRD40;
  Gene Name: ankyrin repeat domain 40;
  Uniprot ID:  Q6AI12;
  ENSP ID: ENSP00000285243
MNALLEQKEQQERLREAAALGDIREVQKLVESGVDVNSQNEVNGWTCLHWACKRNHGQVVSYLLKSGADKEILTTKGEMPVQLTSRREIRKIMGVEEEDDDDDDDDNLPQLKKESELPFVPNYLANPAFPFIYTPTAEDSAQMQNGGPSTPPASPPADGSPPLLPPGEPPLLGTFPRDHTSLALVQNGDVSAPSAILRTPESTKPGPVCQPPVSQSRSLFSSVPSKPPMSLEPQNGTYAGPAPAFQPFFFTGAFPFNMQELVLKVRIQNPSLRENDFIEIELDRQELTYQELLRVCCCELGVNPDQVEKIRKLPNTLLRKDKDVARLQDFQELELVLMISENNFLFRNAASTLTERPCYNRRASKLTY

SEQ ID NO: 5261 - protein, 122 aa, Homo sapiens
  Payload ID: 1146;
  Gene Symbol: ANKRD40;
  Gene Name: ankyrin repeat domain 40;
  ENSP ID: ENSP00000468442
MPVQLTSRREIRKIMGVEEEDDDDDDDDNLPQLKKESELPFVPNYLANPAFPFIYTPTAEDSAQMQNGGPSTPPASPPADGSPPLLPPGEPPLLGTFPRDHTSLALVQNGDVSAPSAILRTP

SEQ ID NO: 5262 - protein, 517 aa, Homo sapiens
  Payload ID: 1147;
  Gene Symbol: ANKRD42;
  Gene Name: ankyrin repeat domain 42;
  ENSP ID: ENSP00000260047
MPGVANSGPSTSSRETANPCSRKKVHFGSIHDAVRAGDVKQLSEIVVRGASINELDVLHKFTPLHWAAHSGSLECLHWLLWHGADITHVTTRGWTASHIAAIRGQDACVQALIMNGANLTAQDDRGCTPLHLAATHGHSFTLQIMLRSGDPSVTDKREWRPVHYAAFHGRLGCLQLLVKWGCSIEDVDYNGNLPVHLAAMEGHLHCFKFLVSRMSSATQVLKAFNDNGENVLDLAQRFFKQNILQFIQGAEYEGKDLEDQETLAFPGHVAAFKGDLGMLKKLVEDGVININERADNGSTPMHKAAGQGHIECLQWLIKMGADSNITNKAGERPSDVAKRFAHLAAVKLLEELQKYDIDDENEIDENDVKYFIRHGVEGSTDAKDDLCLSDLDKTDARMRAYKKIVELRHLLEIAESNYKHLGGITEEDLKQKKEQLESEKTIKELQGQLEYERLRREKLECQLDEYRAEVDQLRETLEKIQVPNFVAMEDSASCESNKEKRRVKKKVSSGGVFVRRY

SEQ ID NO: 5263 - protein, 198 aa, Homo sapiens
  Payload ID: 1147;
  Gene Symbol: ANKRD42;
  Gene Name: ankyrin repeat domain 42;
  Uniprot ID:  Q8N9B4;
  ENSP ID: ENSP00000377049
MPGVANSGPSTSSRETANPCSRKKVHFGSIHDAVRAGDVKQLSEIVVRGASINELDVLHKFTPLHWAAHSGSLECLHWLLWHGADITHVTTRGWTASHIAAIRGQDACVQALIMNGANLTAQDDRGCTPLHLAATHGHSFTLQIMLRSGVDPSVTDKREWRPVHYAAFHGRLGCLQLLVKWGCSIEDVDYNGNLPEPP

SEQ ID NO: 5264 - protein, 389 aa, Homo sapiens
  Payload ID: 1147;
  Gene Symbol: ANKRD42;
  Gene Name: ankyrin repeat domain 42;
  Uniprot ID:  Q8N9B4;
  ENSP ID: ENSP00000377051
MPGVANSGPSTSSRETANPCSRKKVHFGSIHDAVRAGDVKQLSEIVCLHWLLWHGADITHVTTRGWTASHIAAIRGQDACVQALIMNGANLTAQDDRGCTPLHLAATHGHSFTLQIMLRSGVDPSVTDKREWRPVHYAAFHGRLGCLQLLVKWGCSIEDVDYNGNLPVHLAAMEGHLHCFKFLVSRMSSATQVLKAFNDNGENVLDLAQRFFKQNILQFIQGAEYEGKDLEDQETLAFPGHVAAFKGDLGMLKKLVEDGVININERADNGSTPMHKAAGQGHIECLQWLIKMGADSNITNKAGERPSDVAKRFAHLAAVKLLEELQKYDIDDENEIDENDVKYFIRHGVEGSTDAKDDLCLSDLDKTDARRPSKNCRASWSMNDYVEKN

SEQ ID NO: 5265 - protein, 85 aa, Homo sapiens
  Payload ID: 1147;
  Gene Symbol: ANKRD42;
  Gene Name: ankyrin repeat domain 42;
  ENSP ID: ENSP00000432375
MNGANLTAQDDRGCTPLHLAATHGHSFTLQIMLRSGVDPSVTDKREWRPVHYAAFHGRLGCLQLLVKWGCSIEDVDYNGNLPEPP

SEQ ID NO: 5266 - protein, 230 aa, Homo sapiens
  Payload ID: 1147;
  Gene Symbol: ANKRD42;
  Gene Name: ankyrin repeat domain 42;
  ENSP ID: ENSP00000433585
MPGVANSGPSTSSRETANPCSRKKVHFGSIHDAVRAGDVKQLSEIVVRGASINELDVLHKFTPLHWAAHSGSLECLHWLLWHGADITHVTTRGWTASHIAAIRGQDACVQALIMNGANLTAQDDRGCTPLHLAATHGHSFTLQIMLRSGVDPSVTDKREWRPVHYAAFHGRLGCLQLLVKWGCSIEDVDYNGNLPGGSHLLLSIMATLRPLVKPRIIKKRTKKFFRHQTD

SEQ ID NO: 5267 - protein, 502 aa, Homo sapiens
  Payload ID: 1147;
  Gene Symbol: ANKRD42;
  Gene Name: ankyrin repeat domain 42;
  ENSP ID: ENSP00000434666
MPGVANSGPSTSSRETANPCSRKKVHFGSIHDAVRAGDVKQLSEIVVRGASINELDVLHKFTPLHWAAHSGSLECLHWLLWHGADITHVTTRGWTASHIAAIRGQDACVQALIMNGANLTAQDDRGCTPLHLAATHGHSFTLQIMLRSGVDPSVTDKREWRPVHYAAFHGRLGCLQLLVKWGCSIEDVDYNGNLPVHLAAMEGHLHCFKFLVSRMSSATQVLKAFNDNGENVLDLAQRFFKQNILQFIQGAEYEGKDLEDQETLAFPGHVAAFKGDLGMLKKLVEDGVININERADNGSTPMHKAAGQGHIECLQWLIKMGADSNITNKAGERPSDVAKRFAHLAAVKLLEELQKYDIDDENEIDENDVKYFIRHGVEGSTDAKDDLCLSDLDKTDARMRAYKKIVELRHLLEIAESNYKHLGGITEEDLKQKKEQLESEKTIKELQGQLEYERLRREKLECQLDEYRAEVDQLRETLEKIQVPNFVAMTALLVSQTKRRGE

SEQ ID NO: 5268 - protein, 142 aa, Homo sapiens
  Payload ID: 1147;
  Gene Symbol: ANKRD42;
  Gene Name: ankyrin repeat domain 42;
  ENSP ID: ENSP00000435197
DLGMLKKLVEDGVININERADNGSTPMHKAAGQGHIECLQWLIKMGADSNITNKAGERPSDVAKRTIKELQGQLEYERLRREKLECQLDEYRAEVDQLRETLEKIQVPNFVAMEDSASCESNKEKRRVKKKVSSGGVFVRRY

SEQ ID NO: 5269 - protein, 527 aa, Homo sapiens
  Payload ID: 1147;
  Gene Symbol: ANKRD42;
  Gene Name: ankyrin repeat domain 42;
  ENSP ID: ENSP00000435790
MPGVANSGPSTSSRETANPCSRKKVHFGSIHDAVRAGDVKQLSEIVVRGASINELDVLHKFTPLHWAAHSGSLECLHWLLWHGADITHVTTRGWTASHIAAIRGQDACVQALIMNGANLTAQDDRGCTPLHLAATHGHSFTLQIMLRSGVDPSVTDKREWRPVHYAAFHGRLGCLQLLVKWGCSIEDVDYNGNLPVHLAAMEGHLHCFKFLVSRMSSATQVLKAFNDNGENVLDLAQRFFKQNILQFIQGAEYEGKDLEDQETLAFPGHVAAFKGDLGMLKKLVEDGVININERADNGSTPMHKAAGQGHIECLQWLIKMGADSNITNKAGERPSDVAKRFAHLAAVKLLEELQKYDIDDENEIDENDVKYFIRHGVEGSTDAKDDLCLSDLDKTDARMRAYKKIVELRHLLEIAESNYKHLGGITEEDLKQKKEQLESEKTIKELQGQLEYERLRREKLECQLDEYRAEVDQLRETLEKIQVPNFVAMVGVLFNTFIFLKKYIQEWPRVQALGWGSLDLNPGYSLF

SEQ ID NO: 5270 - protein, 993 aa, Homo sapiens
  Payload ID: 1148;
  Gene Symbol: ANKRD44;
  Gene Name: ankyrin repeat domain 44;
  Uniprot ID:  Q8N8A2;
  ENSP ID: ENSP00000282272
MAVLKLTDQPPLVQAIFSGDPEEIRMLIHKTEDVNTLDSEKRTPLHVAAFLGDAEIIELLILSGARVNAKDNMWLTPLHRAVASRSEEAVQVLIKHSADVNARDKNWQTPLHVAAANKAVKCAEVIIPLLSSVNVSDRGGRTALHHAALNGHVEMVNLLLAKGANINAFDKKDRRALHWAAYMGHLDVVALLINHGAEVTCKDKKGYTPLHAAASNGQINVVKHLLNLGVEIDEINVYGNTALHIACYNGQDAVVNELIDYGANVNQPNNNGFTPLHFAAASTHGALCLELLVNNGADVNIQSKDGKSPLHMTAVHGRFTRSQTLIQNGGEIDCVDKDGNTPLHVAARYGHELLINTLITSGADTAKCGIHSMFPLHLAALNAHSDCCRKLLSSGFEIDTPDKFGRTCLHAAAAGGNVECIKLLQSSGADFHKKDKCGRTPLHYAAANCHFHCIETLVTTGANVNETDDWGRTALHYAAASDMDRNKTILGNAHDNSEELERARELKEKEATLCLEFLLQNDANPSIRDKEGYNSIHYAAAYGHRQCLELLLERTNSGFEESDSGATKSPLHLAAYNGHHQALEVLLQSLVDLDIRDEKGRTALDLAAFKGHTECVEALINQGASIFVKDNVTKRTPLHASVINGHTLCLRLLLEIADNPEAVDVKDAKGQTPLMLAVAYGHIDAVSLLLEKEANVDTVDILGCTALHRGIMTGHEECVQMLLEQEVSILCKDSRGRTPLHYAAARGHATWLSELLQMALSEEDCCFKDNQGYTPLHWACYNGNENCIEVLLEQKCFRKFIGNPFTPLHCAIINDHGNCASLLLGAIDSSIVSCRDDKGRTPLHAAAFADHVECLQLLLRHSAPVNAVDNSGKTALMMAAENGQAGAVDILVNSAQADLTVKDKDLNTPLHLACSKGHEKCALLILDKIQDESLINEKNNALQTPLHVAARNGLKVVVEELLAKGACVLAVDENASRSNGPRSTPGTAVQKEE

SEQ ID NO: 5271 - protein, 919 aa, Homo sapiens
  Payload ID: 1148;
  Gene Symbol: ANKRD44;
  Gene Name: ankyrin repeat domain 44;
  Uniprot ID:  Q8N8A2;
  ENSP ID: ENSP00000331516
MLIHKTEDVNTLDSEKRTPLHVAAFLGDAEIIELLILSGARVNAKDNMWLTPLHRAVASRSEEAVQVLIKHSADVNARDKNWQTPLHVAAANKAVKCAEVIIPLLSSVNVSDRGGRTALHHAALNGHVEMVNLLLAKGANINAFDKKDRRALHWAAYMGHLDVVALLINHGAEVTCKDKKGYTPLHAAASNGQINVVKHLLNLGVEIDEINVYGNTALHIACYNGQDAVVNELIDYGANVNQPNNNGFTPLHFAAASTHGALCLELLVNNGADVNIQSKDGKSPLHMTAVHGRFTRSQTLIQNGGEIDCVDKDGNTPLHVAARYGHELLINTLITSGADTAKCGIHSMFPLHLAALNAHSDCCRKLLSSGFEIDTPDKFGRTCLHAAAAGGNVECIKLLQSSGADFHKKDKCGRTPLHYAAANCHFHCIETLVTTGANVNETDDWGRTALHYAAASDMDRNKTILGNAHDNSEELERARELKEKEATLCLEFLLQNDANPSIRDKEGYNSIHYAAAYGHRQCLELLLERTNSGFEESDSGATKSPLHLAAYNGHHQALEVLLQSLVDLDIRDEKGRTALDLAAFKGHTECVEALINQGASIFVKDNVTKRTPLHASVINGHTLCLRLLLEIADNPEAVDVKDAKGQTPLMLAVAYGHIDAVSLLLEKEANVDTVDILGCTALHRGIMTGHEECVQMLLEQEVSILCKDSRGRTPLHYAAARGHATWLSELLQMALSEEDCCFKDNQGYTPLHWACYNGNENCIEVLLEQKCFRKFIGNPFTPLHCAIINDHGNCASLLLGAIDSSIVSCRDDKGRTPLHAAAFADHVECLQLLLRHSAPVNAVDNSGKTALMMAAENGQAGAVDILVNSAQADLTVKDKDLNTPLHLACSKGHEKCALLILDKIQDESLINEKNNALQT

SEQ ID NO: 5272 - protein, 579 aa, Homo sapiens
  Payload ID: 1148;
  Gene Symbol: ANKRD44;
  Gene Name: ankyrin repeat domain 44;
  Uniprot ID:  Q8N8A2;
  ENSP ID: ENSP00000387141
MAVLKLTDQPPLVQAIFSGDPEEIRMLIHKTEDVNTLDSEKRTPLHVAAFLGDAEIIELLILSGARVNAKDNMWLTPLHRAVASRSEEAVQVLIKHSADVNARDKNWQTPLHVAAANKAVKCAEVIIPLLSSVNVSDRGGRTALHHAALNGHVEMVNLLLAKGANINAFDKKDRRALHWAAYMGHLDVVALLINHGAEVTCKDKKGYTPLHAAASNGQINVVKHLLNLGVEIDEINVYGNTALHIACYNGQDAVVNELIDYGANVNQPNNNGFTPLHFAAASTHGALCLELLVNNGADVNIQSKDGKSPLHMTAVHGRFTRSQTLIQNGGEIDCVDKDGNTPLHVAARYGHELLINTLITSGADTAKCGIHSMFPLHLAALNAHSDCCRKLLSSGFEIDTPDKFGRTCLHAAAAGGNVECIKLLQSSGADFHKKDKCGRTPLHYAAANCHFHCIETLVTTGANVNETDDWGRTALHYAAASDMDRNKTILGNAHDNSEELERARELKEKEATLCLEFLLQNDANPSIRDKEGYNSIHYAAAYGHRQCLELVSCFVLFSLTHTHTHTPNHRGINCFFPEL

SEQ ID NO: 5273 - protein, 367 aa, Homo sapiens
  Payload ID: 1148;
  Gene Symbol: ANKRD44;
  Gene Name: ankyrin repeat domain 44;
  Uniprot ID:  Q8N8A2;
  ENSP ID: ENSP00000387233
MAVLKLTDQPPLVQAIFSGDPEEIRMLIHKTEDVNTLDSEKRTPLHVAAFLGDAEIIELLILSGARVNAKDNMWLTPLHRAVASRSEEAVQVLIKHSADVNARDKNWQTPLHVAAANKAVKCAEVIIPLLSSVNVSDRGGRTALHHAALNGHVEMVNLLLAKGANINAFDKKDRRALHWAAYMGHLDVVALLINHGAEVTCKDKKGYTPLHAAASNGQINVVKHLLNLGVEIDEINVYGNTALHIACYNGQDAVVNELIDYGANVNQPNNNGFTPLHFAAASTHGALCLELLVNNGADVNIQSKDGKSPLHMTAVHGRFTRSQTLIQNGGEIDCVDKDGNTPLHVAARYGHELLINTLITSGADTAK

SEQ ID NO: 5274 - protein, 76 aa, Homo sapiens
  Payload ID: 1148;
  Gene Symbol: ANKRD44;
  Gene Name: ankyrin repeat domain 44;
  ENSP ID: ENSP00000399895
MLIHKTEDVNTLDSEKRTPLHVAAFLGDAEIIELLILSGARVNAKDNMWLTPLHRAVASRSEEAVQVLIKHSADVN

SEQ ID NO: 5275 - protein, 791 aa, Homo sapiens
  Payload ID: 1148;
  Gene Symbol: ANKRD44;
  Gene Name: ankyrin repeat domain 44;
  ENSP ID: ENSP00000403415
KKGYTPLHAAASNGQINVVKHLLNLGVEIDEINVYGNTALHIACYNGQDAVVNELIDYGANVNQPNNNGFTPLHFAAASTHGALCLELLVNNGADVNIQSKDGKSPLHMTAVHGRFTRSQTLIQNGGEIDCVDKDGNTPLHVAARYGHELLINTLITSGADTAKCGIHSMFPLHLAALNAHSDCCRKLLSSGQKYSIVSLFSNEHVLSAGFEIDTPDKFGRTCLHAAAAGGNVECIKLLQSSGADFHKKDKCGRTPLHYAAANCHFHCIETLVTTGANVNETDDWGRTALHYAAASDMDRNKTILGNAHDNSEELERARELKEKEATLCLEFLLQNDANPSIRDKEGYNSIHYAAAYGHRQCLELLLERTNSGFEESDSGATKSPLHLAAYNGHHQALEVLLQSLVDLDIRDEKGRTALDLAAFKGHTECVEALINQGASIFVKDNVTKRTPLHASVINGHTLCLRLLLEIADNPEAVDVKDAKGQTPLMLAVAYGHIDAVSLLLEKEANVDTVDILGCTALHRGIMTGHEECVQMLLEQEVSILCKDSRGRTPLHYAAARGHATWLSELLQMALSEEDCCFKDNQGYTPLHWACYNGNENCIEVLLEQKCFRKFIGNPFTPLHCAIINDHGNCASLLLGAIDSSIVSCRDDKGRTPLHAAAFADHVECLQLLLRHSAPVNAVDNSGKTALMMAAENGQAGAVDILVNSAQADLTVKDKDLNTPLHLACSKGHEKCALLILDKIQDESLINEKNNALQTPLHVAARNGLKVVVEELLAKGACVLAVDENGC

SEQ ID NO: 5276 - protein, 40 aa, Homo sapiens
  Payload ID: 1148;
  Gene Symbol: ANKRD44;
  Gene Name: ankyrin repeat domain 44;
  ENSP ID: ENSP00000405983
MAVLKLTDQPPLVQAIFSGDPEEIRMLIHKTEDVNTLELV

SEQ ID NO: 5277 - protein, 182 aa, Homo sapiens
  Payload ID: 1148;
  Gene Symbol: ANKRD44;
  Gene Name: ankyrin repeat domain 44;
  ENSP ID: ENSP00000413091
  MOD_RES (1)..(1): Any amino acid
XINDHGNCASLLLGAIDSSIVSCRDDKGRTPLHAAAFADHVECLQLLLRHSAPVNAVDNSGKTALMMAAENGQAGAVDILVNSAQADLTVKDKDLNTPLHLACSKGHEKCALLILDKIQDESLINEKNNALQTPLHVAARNGLKVVVEELLAKGACVLAVDENASRSNGPRSTPGTAVQKEE

SEQ ID NO: 5278 - protein, 316 aa, Homo sapiens
  Payload ID: 1148;
  Gene Symbol: ANKRD44;
  Gene Name: ankyrin repeat domain 44;
  ENSP ID: ENSP00000416319
SKDGKSPLHMTAVHGRFTRSQTLIQNGGEIDCVDKDGNTPLHVAARYGHELLINTLITSGADTAKCGIHSMFPLHLAALNAHSDCCRKLLSSGFEIDTPDKFGRTCLHAAAAGGTPLHYAAANCHFHCIETLVTTGANVNETDDWGRTALHYAAASDMDRNKTILGNAHDNSEELERARELKEKEATLCLEFLLQNDANPSIRDKEGYNSIHYAAAYGHRQCLELLLERTNSGFEESDSGATKSPLHLAAYNGHHQALEVLLQSLVDLDIRDEKGRTALDLAAFKGHTECVEALINQGASIFVKDNVTKRTPLHAS

SEQ ID NO: 5279 - protein, 266 aa, Homo sapiens
  Payload ID: 1149;
  Gene Symbol: ANKRD45;
  Gene Name: ankyrin repeat domain 45;
  Uniprot ID:  Q5TZF3;
  ENSP ID: ENSP00000331268
MESEGPPESESSEFFSQQEEENEEEEAQEPEETGPKNPLLQPALTGDVEGLQKIFEDPENPHHEQAMQLLLEEDIVGRNLLYAACMAGQSDVIRALAKYGVNLNEKTTRGYTLLHCAAAWGRLETLKALVELDVDIEALNFREERARDVAARYSQTECVEFLDWADARLTLKKYIAKVSLAVTDTEKGSGKLLKEDKNTILSACRAKNEWLETHTEASINELFEQRQQLEDIVTPIFTKMTTPCQVKSAKSVTSHDQKRSQDDTSN

SEQ ID NO: 5280 - protein, 228 aa, Homo sapiens
  Payload ID: 1150;
  Gene Symbol: ANKRD46;
  Gene Name: ankyrin repeat domain 46;
  Uniprot ID:  Q86W74;
  ENSP ID: ENSP00000335287
MSYVFVNDSSQTNVPLLQACIDGDFNYSKRLLESGFDPNIRDSRGRTGLHLAAARGNVDICQLLHKFGADLLATDYQGNTALHLCGHVDTIQFLVSNGLKIDICNHQGATPLVLAKRRGVNKDVIRLLESLEEQEVKGFNRGTHSKLETMQTAESESAMESHSLLNPNLQQGEGVLSSFRTTWQEFVEDLGFWRVLLLIFVIALLSLGIAYYVSGVLPFVENQPELVH

SEQ ID NO: 5281 - protein, 195 aa, Homo sapiens
  Payload ID: 1150;
  Gene Symbol: ANKRD46;
  Gene Name: ankyrin repeat domain 46;
  ENSP ID: ENSP00000351881
MSYVFVNDSSQTNVPLLQACIDGDFNYSKRLLESGFDPNIRDSRGRTGLHLAAARGNVDICQLLHKFGADLLATDYQGNTALHLCGHVDTIQFLVSNGLKIDICNHQGATPLVLAKRRGVNKDVIRLLESLEEQEVKGFNRGTHSKLETMQTAESESAMESHSLLNPNLQQGEGVLSSFRTTWQEFVEDLGFWRV

SEQ ID NO: 5282 - protein, 228 aa, Homo sapiens; identical to SEQ ID NO: 5280
  Payload ID: 1150;
  Gene Symbol: ANKRD46;
  Gene Name: ankyrin repeat domain 46;
  Uniprot ID:  Q86W74;
  ENSP ID: ENSP00000428388

SEQ ID NO: 5283 - protein, 232 aa, Homo sapiens
  Payload ID: 1150;
  Gene Symbol: ANKRD46;
  Gene Name: ankyrin repeat domain 46;
  Uniprot ID:  Q86W74;
  ENSP ID: ENSP00000429015
MSYVFVNDSSQTNVPLLQACIDGDFNYSKRLLESGFDPNIRDSRGRTGLHLAAARGNVDICQLLHKFGADLLATDYQGNTALHLCGHVDTIQFLVSNGLKIDICNHQGATPLVLAKRRGVNKDVIRLLESLEEQEVKGFNRGTHSKLETMQTAESESAMESHSLLNPNLQQGEGVLSSFRTTWQEFVEDLGFWRVLLLIFVIALLSLGIAYYRRTLRLGSFARQDRSRIQAI

SEQ ID NO: 5284 - protein, 82 aa, Homo sapiens
  Payload ID: 1150;
  Gene Symbol: ANKRD46;
  Gene Name: ankyrin repeat domain 46;
  ENSP ID: ENSP00000429647
MSYVFVNDSSQTNVPLLQACIDGDFNYSKRLLESGFDPNIRDSRGRTGLHLAAARGNVDICQLLHKFGADLLATDYQGNTAL

SEQ ID NO: 5285 - protein, 228 aa, Homo sapiens; identical to SEQ ID NO: 5280
  Payload ID: 1150;
  Gene Symbol: ANKRD46;
  Gene Name: ankyrin repeat domain 46;
  Uniprot ID:  Q86W74;
  ENSP ID: ENSP00000430056

SEQ ID NO: 5286 - protein, 103 aa, Homo sapiens
  Payload ID: 1150;
  Gene Symbol: ANKRD46;
  Gene Name: ankyrin repeat domain 46;
  ENSP ID: ENSP00000430357
MSYVFVNDSSQTNVPLLQACIDGDFNYSKRLLESGFDPNIRDSRGRTGLHLAAARGNVDICQLLHKFGADLLATDYQGNTALHLCGHVDTIQFLVSNGLKIDI

SEQ ID NO: 5287 - protein, 85 aa, Homo sapiens
  Payload ID: 1150;
  Gene Symbol: ANKRD46;
  Gene Name: ankyrin repeat domain 46;
  ENSP ID: ENSP00000430800
MSYVFVNDSSQTNVPLLQACIDGDFNYSKRLLESGFDPNIRDSRGRTGLHLAAARGNVDICQLLHKFGADLLATDYQGNTALHLC

SEQ ID NO: 5288 - protein, 175 aa, Homo sapiens
  Payload ID: 1150;
  Gene Symbol: ANKRD46;
  Gene Name: ankyrin repeat domain 46;
  ENSP ID: ENSP00000430827
MSYVFVNDSSQTNVPLLQACIDGDFNYSKRLLESGFDPNIRDSRGRTGLHLAAARGNVDICQLLHKFGADLLATDYQGNTALHLCGHVDTIQFLVSNGLKIDICAMESHSLLNPNLQQGEGVLSSFRTTWQEFVEDLGFWRVLLLIFVIALLSLGIAYYVSGVLPFVENQPELVH

SEQ ID NO: 5289 - protein, 239 aa, Homo sapiens
  Payload ID: 1151;
  Gene Symbol: ANKRD49;
  Gene Name: ankyrin repeat domain 49;
  Uniprot ID:  Q8WVL7;
  ENSP ID: ENSP00000303518
MEKEKGNDDGIPDQENSLDFSEHFNQLELLETHGHLIPTGTQSLWVGNSDEDEEQDDKNEEWYRLQEKKMEKDPSRLLLWAAEKNRLTTVRRLLSEKATHVNTRDEDEYTPLHRAAYSGHLDIVQELIAQGADVHAVTVDGWTPLHSACKWNNTRVASFLLQHDADINAQTKGLLTPLHLAAGNRDSKDTLELLLMNRYVKPGLKNNLEETAFDIARRTSIYHYLFEIVEGCTNSSPQS

SEQ ID NO: 5290 - protein, 125 aa, Homo sapiens
  Payload ID: 1151;
  Gene Symbol: ANKRD49;
  Gene Name: ankyrin repeat domain 49;
  ENSP ID: ENSP00000438506
MEKEKGNDDGIPDQENSLDFSEHFNQLELLETHGHLIPTGTQSLWVGNSDEDEEQDDKNEEWYRLQEKKMEKDPSRLLLWAAEKNRVKKKITEGSVTVGKALGSSQKTCLYCYGHHTYLLIVRTK

SEQ ID NO: 5291 - protein, 111 aa, Homo sapiens
  Payload ID: 1151;
  Gene Symbol: ANKRD49;
  Gene Name: ankyrin repeat domain 49;
  ENSP ID: ENSP00000439200
MEKEKGNDDGIPDQENSLDFSEHFNQLELLETHGHLIPTGTQSLWVGNSDEDEEQDDKNEEWYRLQEKKMEKDPSRLLLWAAEKNRVKKKITEGSVTVGKALGSSQKTCLY

SEQ ID NO: 5292 - protein, 239 aa, Homo sapiens; identical to SEQ ID NO: 5289
  Payload ID: 1151;
  Gene Symbol: ANKRD49;
  Gene Name: ankyrin repeat domain 49;
  Uniprot ID:  Q8WVL7;
  ENSP ID: ENSP00000440396

SEQ ID NO: 5293 - protein, 146 aa, Homo sapiens
  Payload ID: 1151;
  Gene Symbol: ANKRD49;
  Gene Name: ankyrin repeat domain 49;
  ENSP ID: ENSP00000441877
MEKEKGNDDGIPDQENSLDFSEHFNQLELLETHGHLIPTGTQSLWVGNSDEDEEQDDKNEEWYRLQEKKMEKDPSRLLLWAAEKNRVKKKITEGSVTVGKALGSSQKTCLYCYGHHTYLLILTTVRRLLSEKATHVNTRDEDEYTP

SEQ ID NO: 5294 - protein, 130 aa, Homo sapiens
  Payload ID: 1151;
  Gene Symbol: ANKRD49;
  Gene Name: ankyrin repeat domain 49;
  ENSP ID: ENSP00000442449
MEKEKGNDDGIPDQENSLDFSEHFNQLELLETHGHLIPTGTQSLWLTTVRRLLSEKATHVNTRDEDEYTPLHRAAYSGHLDIVQELIAQGADVHAVTVDGWTPLHSACKWNNTRVASFLLQHDADINAQT

SEQ ID NO: 5295 - protein, 125 aa, Homo sapiens; identical to SEQ ID NO: 5290
  Payload ID: 1151;
  Gene Symbol: ANKRD49;
  Gene Name: ankyrin repeat domain 49;
  ENSP ID: ENSP00000444030

SEQ ID NO: 5296 - protein, 86 aa, Homo sapiens
  Payload ID: 1151;
  Gene Symbol: ANKRD49;
  Gene Name: ankyrin repeat domain 49;
  ENSP ID: ENSP00000445597
MEKEKGNDDGIPDQENSLDFSEHFNQLELLETHGHLIPTGTQSLWVGNSDEDEEQDDKNEEWYRLQEKKMEKDPSRLLLWAAEKNR

SEQ ID NO: 5297 - protein, 125 aa, Homo sapiens; identical to SEQ ID NO: 5290
  Payload ID: 1151;
  Gene Symbol: ANKRD49;
  Gene Name: ankyrin repeat domain 49;
  ENSP ID: ENSP00000446433

SEQ ID NO: 5298 - protein, 1250 aa, Homo sapiens
  Payload ID: 1152;
  Gene Symbol: ANKRD50;
  Gene Name: ankyrin repeat domain 50;
  Uniprot ID:  Q9ULJ7;
  ENSP ID: ENSP00000425355
MKPPQQSLYLLVDSVDEGCNITEGEQTSTSLSGTVAALLAGHHEFFPPWLLLLCSARKQSKAVTKMFTGFRKISLDDLRKAYIVKDVQQYILHRLDQEEALRQHLTKETAEMLNQLHIKSSGCFLYLERVLDGVVENFIMLREIRDIPGTLNGLYLWLCQRLFVRKQFAKVQPILNVILAACRPLTITELYHAVWTKNMSLTLEDFQRKLDILSKLLVDGLGNTKILFHYSFAEWLLDVKHCTQKYLCNAAEGHRMLAMSYTCQAKNLTPLEAQEFALHLINSNLQLETAELALWMIWNGTPVRDSLSTLIPKEQEVLQLLVKAGAHVNSEDDRTSCIVRQALEREDSIRTLLDNGASVNQCDSNGRTLLANAAYSGSLDVVNLLVSRGADLEIEDAHGHTPLTLAARQGHTKVVNCLIGCGANINHTDQDGWTALRSAAWGGHTEVVSALLYAGVKVDCADADSRTALRAAAWGGHEDIVLNLLQHGAEVNKADNEGRTALIAAAYMGHREIVEHLLDHGAEVNHEDVDGRTALSVAALCVPASKGHASVVSLLIDRGAEVDHCDKDGMTPLLVAAYEGHVDVVDLLLEGGADVDHTDNNGRTPLLAAASMGHASVVNTLLFWGAAVDSIDSEGRTVLSIASAQGNVEVVRTLLDRGLDENHRDDAGWTPLHMAAFEGHRLICEALIEQGARTNEIDNDGRIPFILASQEGHYDCVQILLENKSNIDQRGYDGRNALRVAALEGHRDIVELLFSHGADVNCKDADGRPTLYILALENQLTMAEYFLENGANVEASDAEGRTALHVSCWQGHMEMVQVLIAYHADVNAADNEKRSALQSAAWQGHVKVVQLLIEHGAVVDHTCNQGATALCIAAQEGHIDVVQVLLEHGADPNHADQFGRTAMRVAAKNGHSQIIKLLEKYGASSLNGCSPSPVHTMEQKPLQSLSSKVQSLTIKSNSSGSTGGGDMQPSLRGLPNGPTHAFSSPSESPDSTVDRQKSSLSNNSLKSSKNSSLRTTSSTATAQTVPIDSFHNLSFTEQIQQHSLPRSRSRQSIVSPSSTTQSLGQSHNSPSSEFEWSQVKPSLKSTKASKGGKSENSAKSGSAGKKAKQSNSSQPKVLEYEMTQFDRRGPIAKSGTAAPPKQMPAESQCKIMIPSAQQEIGRSQQQFLIHQQSGEQKKRNGIMTNPNYHLQSNQVFLGRVSVPRTMQDRGHQEVLEGYPSSETELSLKQALKLQIEGSDPSFNYKKETPL

SEQ ID NO: 5299 - protein, 1429 aa, Homo sapiens
  Payload ID: 1152;
  Gene Symbol: ANKRD50;
  Gene Name: ankyrin repeat domain 50;
  Uniprot ID:  Q9ULJ7;
  ENSP ID: ENSP00000425658
MTNPWEEKVCKMAQTSLLQGKQFYCREWVFHKLQHCLQEKSNCCNSAVNAPSLVMNSGNNASGVSGKGAAWGVLLVGGPGSGKTALCTELLWPSSPASLQRGLHRQALAFHFCKAQDSDTLCVGGFIRGLVAQICRSGLLQGYEDKLRDPAVQSLLQPGECERNPAEAFKRCVLLPLLGMKPPQQSLYLLVDSVDEGCNITEGEQTSTSLSGTVAALLAGHHEFFPPWLLLLCSARKQSKAVTKMFTGFRKISLDDLRKAYIVKDVQQYILHRLDQEEALRQHLTKETAEMLNQLHIKSSGCFLYLERVLDGVVENFIMLREIRDIPGTLNGLYLWLCQRLFVRKQFAKVQPILNVILAACRPLTITELYHAVWTKNMSLTLEDFQRKLDILSKLLVDGLGNTKILFHYSFAEWLLDVKHCTQKYLCNAAEGHRMLAMSYTCQAKNLTPLEAQEFALHLINSNLQLETAELALWMIWNGTPVRDSLSTLIPKEQEVLQLLVKAGAHVNSEDDRTSCIVRQALEREDSIRTLLDNGASVNQCDSNGRTLLANAAYSGSLDVVNLLVSRGADLEIEDAHGHTPLTLAARQGHTKVVNCLIGCGANINHTDQDGWTALRSAAWGGHTEVVSALLYAGVKVDCADADSRTALRAAAWGGHEDIVLNLLQHGAEVNKADNEGRTALIAAAYMGHREIVEHLLDHGAEVNHEDVDGRTALSVAALCVPASKGHASVVSLLIDRGAEVDHCDKDGMTPLLVAAYEGHVDVVDLLLEGGADVDHTDNNGRTPLLAAASMGHASVVNTLLFWGAAVDSIDSEGRTVLSIASAQGNVEVVRTLLDRGLDENHRDDAGWTPLHMAAFEGHRLICEALIEQGARTNEIDNDGRIPFILASQEGHYDCVQILLENKSNIDQRGYDGRNALRVAALEGHRDIVELLFSHGADVNCKDADGRPTLYILALENQLTMAEYFLENGANVEASDAEGRTALHVSCWQGHMEMVQVLIAYHADVNAADNEKRSALQSAAWQGHVKVVQLLIEHGAVVDHTCNQGATALCIAAQEGHIDVVQVLLEHGADPNHADQFGRTAMRVAAKNGHSQIIKLLEKYGASSLNGCSPSPVHTMEQKPLQSLSSKVQSLTIKSNSSGSTGGGDMQPSLRGLPNGPTHAFSSPSESPDSTVDRQKSSLSNNSLKSSKNSSLRTTSSTATAQTVPIDSFHNLSFTEQIQQHSLPRSRSRQSIVSPSSTTQSLGQSHNSPSSEFEWSQVKPSLKSTKASKGGKSENSAKSGSAGKKAKQSNSSQPKVLEYEMTQFDRRGPIAKSGTAAPPKQMPAESQCKIMIPSAQQEIGRSQQQFLIHQQSGEQKKRNGIMTNPNYHLQSNQVFLGRVSVPRTMQDRGHQEVLEGYPSSETELSLKQALKLQIEGSDPSFNYKKETPL

SEQ ID NO: 5300 - protein, 1076 aa, Homo sapiens
  Payload ID: 1153;
  Gene Symbol: ANKRD52;
  Gene Name: ankyrin repeat domain 52;
  Uniprot ID:  Q8NB46;
  ENSP ID: ENSP00000267116
MGILSITDQPPLVQAIFSRDVEEVRSLLSQKENINVLDQERRTPLHAAAYVGDVPILQLLLMSGANVNAKDTLWLTPLHRAAASRNEKVLGLLLAHSADVNARDKLWQTPLHVAAANRATKCAEALAPLLSSLNVADRSGRSALHHAVHSGHLETVNLLLNKGASLNVCDKKERQPLHWAAFLGHLEVLKLLVARGADLGCKDRKGYGLLHTAAASGQIEVVKYLLRMGAEIDEPNAFGNTALHIACYLGQDAVAIELVNAGANVNQPNDKGFTPLHVAAVSTNGALCLELLVNNGADVNYQSKEGKSPLHMAAIHGRFTRSQILIQNGSEIDCADKFGNTPLHVAARYGHELLISTLMTNGADTARRGIHDMFPLHLAVLFGFSDCCRKLLSSGQLYSIVSSLSNEHVLSAGFDINTPDNLGRTCLHAAASGGNVECLNLLLSSGADLRRRDKFGRTPLHYAAANGSYQCAVTLVTAGAGVNEADCKGCSPLHYAAASDTYRRAEPHTPSSHDAEEDEPLKESRRKEAFFCLEFLLDNGADPSLRDRQGYTAVHYAAAYGNRQNLELLLEMSFNCLEDVESTIPVSPLHLAAYNGHCEALKTLAETLVNLDVRDHKGRTALFLATERGSTECVEVLTAHGASALIKERKRKWTPLHAAAASGHTDSLHLLIDSGERADITDVMDAYGQTPLMLAIMNGHVDCVHLLLEKGSTADAADLRGRTALHRGAVTGCEDCLAALLDHDAFVLCRDFKGRTPIHLASACGHTAVLRTLLQAALSTDPLDAGVDYSGYSPMHWASYTGHEDCLELLLEHSPFSYLEGNPFTPLHCAVINNQDSTTEMLLGALGAKIVNSRDAKGRTPLHAAAFADNVSGLRMLLQHQAEVNATDHTGRTALMTAAENGQTAAVEFLLYRGKADLTVLDENKNTALHLACSKGHEKCALMILAETQDLGLINATNSALQMPLHIAARNGLASVVQALLSHGATVLAVDEEGHTPALACAPNKDVADCLALILSTMKPFPPKDAVSPFSFSLLKNCSIAAAKTVGGCGALPHGASCPYSQERPGAIGLDGCYSE

SEQ ID NO: 5301 - protein, 343 aa, Homo sapiens
  Payload ID: 1154;
  Gene Symbol: ANKRD53;
  Gene Name: ankyrin repeat domain 53;
  Uniprot ID:  Q8N9V6;
  ENSP ID: ENSP00000272421
MASAGSTARRAGSGSWHSERGEGRGARPQPTPSGSMQQANKVSLKATWTDAESKQPSQPLPDLADHLSAQATALARPRRPASLTPPRADPSPSKESDQTAIDQTAIGSYYQLFAAAVGNVEWLRFCLNQSLREIPTDDKGFTAIHFAAQWGKLACLQVLVEEYKFPVDLLTNNSQTPLHLVIHRDNTTVALPCIYYLLEKGADLNAQTCNGSTPLHLAARDGLLDCVKVLVQSGANVHAQDAMGYKPIDFCKIWNHRACARFLKDAMWKKDKKDFAREMTKMKMFKSQLTLMEHNYLIEYQGQGCSVHFPFAFSPITPETLLWQDISLLSDCGFLWRRRELSF

SEQ ID NO: 5302 - protein, 530 aa, Homo sapiens
  Payload ID: 1154;
  Gene Symbol: ANKRD53;
  Gene Name: ankyrin repeat domain 53;
  Uniprot ID:  Q8N9V6;
  ENSP ID: ENSP00000353796
MASAGSTARRAGSGSWHSERGEGRGARPQPTPSGSMQQANKVSLKATWTDAESKQPSQPLPDLADHLSAQATALARPRRPASLTPPRADPSPSKESDQTAIDQTAIGSYYQLFAAAVGNVEWLRFCLNQSLREIPTDDKGFTAIHFAAQWGKLACLQVLVEEYKFPVDLLTNNSQTPLHLVIHRDNTTVALPCIYYLLEKGADLNAQTCNGSTPLHLAARDGLLDCVKVLVQSGANVHAQDAMGYKPIDFCKIWNHRACARFLKDAMWKKDKKDFAREMTKMKMFKSQLTLMEHNYLIEYQKEHKILREAAIRKWLHGKLHPGHSLVSNTKQARATALSKTPEQRESQRSRSFHPSVDARLQCIPQPTEMPKPIYRKPTVKRPTMWNVSNNPARPPTTQISHSQGIRLGVHPDPTPEHDFSSFLEVRPDGHGGARLHTVDGHWVAPVPRLPFEVLLRMLYPRVWPYRMKVPQGFYPISMREVPRKRHLGDNTFWTDTLAMNLRDTFDEAFLAAVRSHQGLPTLPSPQTNP

SEQ ID NO: 5303 - protein, 254 aa, Homo sapiens
  Payload ID: 1154;
  Gene Symbol: ANKRD53;
  Gene Name: ankyrin repeat domain 53;
  ENSP ID: ENSP00000388883
MASAGSTARRAGSGSWHSERGEGRGARPQPTPSGSMQQANKVSLKATWTDAESKQPSPSKESDQTAIDQTAIGSYYQLFAAAVGNVEWLRFCLNQSLREIPTDDKGFTAIHFAAQWGKLACLQVLVEEYKFPVDLLTNNSQTPLHLVIHRDNTTVALPCIYYLLEKGADLNAFLKDAMWKKDKKDFAREMTKMKMFKSQLTLMEHNYLIEYQGQGCSVHFPFAFSPITPETLLWQDISLLSDCGFLWRRRELSF

SEQ ID NO: 5304 - protein, 496 aa, Homo sapiens
  Payload ID: 1154;
  Gene Symbol: ANKRD53;
  Gene Name: ankyrin repeat domain 53;
  ENSP ID: ENSP00000407004
MASAGSTARRAGSGSWHSERGEGRGARPQPTPSGSMQQANKVSLKATWTDAESKQPSPSKESDQTAIDQTAIGSYYQLFAAAVGNVEWLRFCLNQSLREIPTDDKGFTAIHFAAQWGKLACLQVLVEEYKFPVDLLTNNSQTPLHLVIHRDNTTVALPCIYYLLEKGADLNAQTCNGSTPLHLAARDGLLDCVKVLVQSGANVHAQDAMGYKPIDFCKIWNHRACARFLKDAMWKKDKKDFAREMTKMKMFKSQLTLMEHNYLIEYQKEHKILREAAIRKWLHGKLHPGHSLVSNTKQARATALSKTPEQRESQRSRSFHPSVDARLQCIPQPTEMPKPIYRKPTVKRPTMWNVSNNPARPPTTQISHSQGIRLGVHPDPTPEHDFSSFLEVRPDGHGGARLHTVDGHWVAPVPRLPFEVLLRMLYPRVWPYRMKVPQGFYPISMREVPRKRHLGDNTFWTDTLAMNLRDTFDEAFLAAVRSHQGLPTLPSPQTNP

SEQ ID NO: 5305 - protein, 300 aa, Homo sapiens
  Payload ID: 1155;
  Gene Symbol: ANKRD54;
  Gene Name: ankyrin repeat domain 54;
  Uniprot ID:  Q6NXT1;
  ENSP ID: ENSP00000215941
MAAAAGDADDEPRSGHSSSEGECAVAPEPLTDAEGLFSFADFGSALGGGGAGLSGRASGGAQSPLRYLHVLWQQDAEPRDELRCKIPAGRLRRAARPHRRLGPTGKEVHALKRLRDSANANDVETVQQLLEDGADPCAADDKGRTALHFASCNGNDQIVQLLLDHGADPNQRDGLGNTPLHLAACTNHVPVITTLLRGGARVDALDRAGRTPLHLAKSKLNILQEGHAQCLEAVRLEVKQIIHMLREYLERLGQHEQRERLDDLCTRLQMTSTKEQVDEVTDLLASFTSLSLQMQSMEKR

SEQ ID NO: 5306 - protein, 180 aa, Homo sapiens
  Payload ID: 1155;
  Gene Symbol: ANKRD54;
  Gene Name: ankyrin repeat domain 54;
  ENSP ID: ENSP00000384392
MPMMWKQQLLEDGADPCAADDKGRTALHFASCNGNDQIVQLLLDHGADPNQRDGLGNTPLHLAACTNHVPVITTLLRGGARVDALDRAGRTPLHLAKSKLNILQEGHAQCLEAVRLEVKQIIHMLREYLERLGQHEQRERLDDLCTRLQMTSTKEQVDEVTDLLASFTSLSLQMQSMEKR

SEQ ID NO: 5307 - protein, 156 aa, Homo sapiens
  Payload ID: 1155;
  Gene Symbol: ANKRD54;
  Gene Name: ankyrin repeat domain 54;
  ENSP ID: ENSP00000385180
MARIPVQLMTRAAQLYTLPHAMAMTRLLLLDHGADPNQRDGLGNTPLHLAACTNHVPVITTLLRGGARVDALDRAGRTPLHLAKSKLNILQEGHAQCLEAVRLEVKQIIHMLREYLERLGQHEQRERLDDLCTRLQMTSTKEQVDEVTDLLASFTS

SEQ ID NO: 5308 - protein, 216 aa, Homo sapiens
  Payload ID: 1155;
  Gene Symbol: ANKRD54;
  Gene Name: ankyrin repeat domain 54;
  ENSP ID: ENSP00000387507
MAAAAGDADDEPRSGHSSSEGECAVAPEPLTDAEGLFSFADFGSALGGGGAGLSGRASGGAQSPLRYLHVLWQQDAEPRDELRCKIPAGRLRRAARPHRRLGPTGKEVHALKRLRDSANANDVETVQQLLEDGADPCAADDKGRTALHFASCNGNDQIVQLLLDHGADPNQRDGLGNTPLHLAACTNHVPVITTLLRGAGTCRGPCRCPGPSWSHT

SEQ ID NO: 5309 - protein, 178 aa, Homo sapiens
  Payload ID: 1155;
  Gene Symbol: ANKRD54;
  Gene Name: ankyrin repeat domain 54;
  ENSP ID: ENSP00000391744
  MOD_RES (1)..(1): Any amino acid
XRLRRPGPRGAVAMAAAAGDADDEPRSGHSSSEGECAVAPEPLTDAEGLFSFADFGSALGGGGAGLSGRASGGAQSPLRYLHVLWQQDAEPRDELRCKIPAGRLRRAARPHRRLGPTGKEVHALKRLRDSANANDVETVQQLLEDGADPCAADDKGRTALHFASCNGNDQIAAPGPWC

SEQ ID NO: 5310 - protein, 90 aa, Homo sapiens
  Payload ID: 1155;
  Gene Symbol: ANKRD54;
  Gene Name: ankyrin repeat domain 54;
  ENSP ID: ENSP00000393035
MARIPVQLMTRAAQLYTLPHAMAMTRLLLLDHGADPNQRDGLGNTPLHLAACTNHVPVITTLLRGGARVDALDRAGRTPLHLAKSKLNIL

SEQ ID NO: 5311 - protein, 284 aa, Homo sapiens
  Payload ID: 1155;
  Gene Symbol: ANKRD54;
  Gene Name: ankyrin repeat domain 54;
  ENSP ID: ENSP00000405782
MAAAAGDADDEPRSGHSSSEGECAVAPEPLTDAEGLFSFADFGSALGGGGAGLSGRASGGAQSPLRYLHVLWQQDAEPRDELRCKIPAGRLRRAARPHRRLGPTGKEVHVQQLLEDGADPCAADDKGRTALHFASCNGNDQIVQLLLDHGADPNQRDGLGNTPLHLAACTNHVPVITTLLRGGARVDALDRAGRTPLHLAKSKLNILQEGHAQCLEAVRLEVKQIIHMLREYLERLGQHEQRERLDDLCTRLQMTSTKEQVDEVTDLLASFTSLSLQMQSMEKR

SEQ ID NO: 5312 - protein, 208 aa, Homo sapiens
  Payload ID: 1155;
  Gene Symbol: ANKRD54;
  Gene Name: ankyrin repeat domain 54;
  ENSP ID: ENSP00000412534
  MOD_RES (1)..(1): Any amino acid
XRDELRCKIPAGRLRRAARPHRRLGPTGKEVHALKRLRDSANANDVETVQQLLEDGADPCAADDKGRTALHFASCNGNDQIVQLLLDHGADPNQRDGLGNTPLHLECSPQLVPAGARVDALDRAGRTPLHLAKSKLNILQEGHAQCLEAVRLEVKQIIHMLREYLERLGQHEQRERLDDLCTRLQMTSTKEQVDEVTDLLASFTSLSL

SEQ ID NO: 5313 - protein, 107 aa, Homo sapiens
  Payload ID: 1155;
  Gene Symbol: ANKRD54;
  Gene Name: ankyrin repeat domain 54;
  ENSP ID: ENSP00000477088
MPMMWKQCSCSWTMVLILTSEMGWGTRHCTWRPAPTTFLSSPHCYEEIIHMLREYLERLGQHEQRERLDDLCTRLQMTSTKEQVDEVTDLLASFTSLSLQMQSMEKR

SEQ ID NO: 5314 - protein, 614 aa, Homo sapiens
  Payload ID: 1156;
  Gene Symbol: ANKRD55;
  Gene Name: ankyrin repeat domain 55;
  Uniprot ID:  Q3KP44;
  ENSP ID: ENSP00000342295
MMRQATMDFSTPSVFDQQRGDSSEEVDLTMVYQAASNGDVNALTAVIREDPSILECCDSEGCTPLMHAVSGRQADTVKLLLKMGANINMQDAYGRTSLCLATYLGWLEGCVSLLRNGAKHNIPDKNGRLPLHAATAEPDMRLLTVLLQQSNISEINHQDNEGMTPLHWAAFHNQPQHTQMLLKKGADPTLVDKDFKTALHWAVQSGNRILCSIILSHHQGPSIINYDDESGKTCVHIAAAAGFSDIIHELARVPECNLQALDVDDRTPLHWAAAAGKAECVQSLLELGMDSNLRDINESTPLAYALYCGHTACVKLLSQESRTEPTRPPPSQSSRPQKKERRFNVLNQIFCKNKKEEQRAHQKDPSRDRYREEDTSEVNDIITTFDSIVGTNCQEQPGDQVAMVEFKKKTSDNSKYLLPEKKPLARKGLPPIRTQSLPPITLGNNFLTASHRATSHAGLSSAPHHMAQRSQKSRSEQDLLNNRTGCQMLLDNPWKSDSNQVFSYKVWTVSSSDKLLDRLLSVRPGHQEVSVPPHLRHLHNPSSGQNFQHLSPNRHKIRDLPFTRNNLAPLPDQKFLSGEPLRTNRVLPAIPSQRRHSTAAEESEHSANPTSDEN

SEQ ID NO: 5315 - protein, 178 aa, Homo sapiens
  Payload ID: 1156;
  Gene Symbol: ANKRD55;
  Gene Name: ankyrin repeat domain 55;
  ENSP ID: ENSP00000423507
MVYQAASNGDVNALTAVIREDPSILECCDSEGCTPLMHAVSGRQADTVKLLLKMGANINMQDAYGRTSLCLATYLGWLEGCVSLLRNGAKHNIPDKNGRLPLHAATAEPDMRLLTVLLQQSNISEINHQDNEGMTPLHWAAFHNQPQHTQMLLKKGADPTLVDKDFKTALHWAVQVRN

SEQ ID NO: 5316 - protein, 571 aa, Homo sapiens
  Payload ID: 1156;
  Gene Symbol: ANKRD55;
  Gene Name: ankyrin repeat domain 55;
  ENSP ID: ENSP00000424230
MMRQATMDFSTPSVFDQQRGDSSEEVDLTMVYQAASNGDVNALTAVIREDPSILECCDSEGCTPLMHAVSGRQADTVKLLLKMGANINMQDAYGRTSLCLATYLGWLEGCVSLLRNGAKHNIPDKNGRLPLHAATAEPDMRLLTVLLQQSNISEINHQDNESGNRILCSIILSHHQGPSIINYDDESGKTCVHIAAAAGFSDIIHELARVPECNLQALDVDDRTPLHWAAAAGKAECVQSLLELGMDSNLRDINESTPLAYALYCGHTACVKLLSQESRTEPTRPPPSQSSRPQKKERRFNVLNQIFCKNKKEEQRAHQKDPSRDRYREEDTSEVNDIITTFDSIVGTNCQEQPGDQVAMVEFKKKTSDNSKYLLPEKKPLARKGLPPIRTQSLPPITLGNNFLTASHRATSHAGLSSAPHHMAQRSQKSRSEQDLLNNRTGCQMLLDNPWKSDSNQVFSYKVWTVSSSDKLLDRLLSVRPGHQEVSVPPHLRHLHNPSSGQNFQHLSPNRHKIRDLPFTRNNLAPLPDQKFLSGEPLRTNRVLPAIPSQRRHSTAAEESEHSANPTSDEN

SEQ ID NO: 5317 - protein, 326 aa, Homo sapiens
  Payload ID: 1156;
  Gene Symbol: ANKRD55;
  Gene Name: ankyrin repeat domain 55;
  Uniprot ID:  Q3KP44;
  ENSP ID: ENSP00000429421
MDSNLRDINESTPLAYALYCGHTACVKLLSQESRTEPTRPPPSQSSRPQKKERRFNVLNQIFCKNKKEEQRAHQKDPSRDRYREEDTSEVNDIITTFDSIVGTNCQEQPGDQVAMVEFKKKTSDNSKYLLPEKKPLARKGLPPIRTQSLPPITLGNNFLTASHRATSHAGLSSAPHHMAQRSQKSRSEQDLLNNRTGCQMLLDNPWKSDSNQVFSYKVWTVSSSDKLLDRLLSVRPGHQEVSVPPHLRHLHNPSSGQNFQHLSPNRHKIRDLPFTRNNLAPLPDQKFLSGEPLRTNRVLPAIPSQRRHSTAAEESEHSANPTSDEN

SEQ ID NO: 5318 - protein, 727 aa, Homo sapiens
  Payload ID: 1157;
  Gene Symbol: ANKRD6;
  Gene Name: ankyrin repeat domain 6;
  Uniprot ID:  Q9Y2G4;
  ENSP ID: ENSP00000345767
MSQQDAVAALSERLLVAAYKGQTENVVQLINKGARVAVTKHGRTPLHLAANKGHLPVVQILLKAGCDLDVQDDGDQTALHRATVVGNTEIIAALIHEGCALDRQDKDGNTALHEASWHGFSQSAKLLIKAGANVLAKNKAGNTALHLACQNSHSQSTRVLLLAGSRADLKNNAGDTCLHVAARYNHLSIIRLLLTAFCSVHEKNQAGDTALHVAAALNHKKVAKILLEAGADTTIVNNAGQTPLETARYHNNPEVALLLTKAPQVLRFSRGRSLRKKRERLKEERRAQSVPRDEVAQSKGSVSAGDTPSSEQAVARKEEAREEFLSASPEPRAKDDRRRKSRPKVSAFSDPTPPADQQPGHQKNLHAHNHPKKRNRHRCSSPPPPHEFRAYQLYTLYRGKDGKVMQAPINGCRCEPLINKLENQLEATVEEIKAELGSVQDKMNTKLGQMENKTQHQMRVLDKLMVERLSAERTECLNRLQQHSDTEKHEGEKRQISLVDELKTWCMLKIQNLEQKLSGDSRACRAKSTPSTCESSTGVDQLVVTAGPAAASDSSPPVVRPKEKALNSTATQRLQQELSSSDCTGSRLRNVKVQTALLPMNEAARSDQQAGPCVNRGTQTKKSGKSGPTRHRAQQPAASSTCGQPPPATGSEQTGPHIRDTSQALELTQYFFEAVSTQMEKWYERKIEEARSQANQKAQQDKATLKEHIKSLEEELAKLRTRVQKEN

SEQ ID NO: 5319 - protein, 692 aa, Homo sapiens
  Payload ID: 1157;
  Gene Symbol: ANKRD6;
  Gene Name: ankyrin repeat domain 6;
  Uniprot ID:  Q9Y2G4;
  ENSP ID: ENSP00000358416
MSQQDAVAALSERLLVAAYKGQTENVVQLINKGARVAVTKHGRTPLHLAANKGHLPVVQILLKAGCDLDVQDDGDQTALHRATVVGNTEIIAALIHEGCALDRQDKDGNTALHEASWHGFSQSAKLLIKAGANVLAKNKAGNTALHLACQNSHSQSTRVLLLAGSRADLKNNAGDTCLHVAARYNHLSIIRLLLTAFCSVHEKNQAGDTALHVAAALNHKKVAKILLEAGADTTIVNNAGQTPLETARYHNNPEVALLLTKAPQGSVSAGDTPSSEQAVARKEEAREEFLSASPEPRAKDDRRRKSRPKVSAFSDPTPPADQQPGHQKNLHAHNHPKKRNRHRCSSPPPPHEFRAYQLYTLYRGKDGKVMQAPINGCRCEPLINKLENQLEATVEEIKAELGSVQDKMNTKLGQMENKTQHQMRVLDKLMVERLSAERTECLNRLQQHSDTEKHEGEKRQISLVDELKTWCMLKIQNLEQKLSGDSRACRAKSTPSTCESSTGVDQLVVTAGPAAASDSSPPVVRPKEKALNSTATQRLQQELSSSDCTGSRLRNVKVQTALLPMNEAARSDQQAGPCVNRGTQTKKSGKSGPTRHRAQQPAASSTCGQPPPATGSEQTGPHIRDTSQALELTQYFFEAVSTQMEKWYERKIEEARSQANQKAQQDKATLKEHIKSLEEELAKLRTRVQKEN

SEQ ID NO: 5320 - protein, 722 aa, Homo sapiens
  Payload ID: 1157;
  Gene Symbol: ANKRD6;
  Gene Name: ankyrin repeat domain 6;
  Uniprot ID:  Q9Y2G4;
  ENSP ID: ENSP00000396771
MSQQDAVAALSERLLVAAYKGQTENVVQLINKGARVAVTKHGRTPLHLAANKGHLPVVQILLKAGCDLDVQDDGDQTALHRATVVGNTEIIAALIHEGCALDRQDKDGNTALHEASWHGFSQSAKLLIKAGANVLAKNKAGNTALHLACQNSHSQSTRVLLLAGSRADLKNNAGDTCLHVAARYNHLSIIRLLLTAFCSVHEKNQAGDTALHVAAALNHKKVAKILLEAGADTTIVNNAGQTPLETARYHNNPEVALLLTKAPQVLRFSRGRSLRKKRERLKEERRAQSVPRDEVAQSKGSVSAGDTPSSEQAVARKEEAREEFLSASPEPRAKDDRRRKSRPKVSAFSDPTPPADQQPGHQKNLHAHNHPKKRNRHRCSSPPPPHEFRAYQLYTLYRGKDGKVMQAPINGCRCEPLINKLENQLEATVEEIKAELGSVQDKMNTKLGQMENKTQHQMRVLDKLMVERLSAERTECLNRLQQHSDTEKHEGEKRQISLVDELKTWCMLKIQNLEQKLSGDSRACRAKSTPSTCVDQLVVTAGPAAASDSSPPVVRPKEKALNSTATQRLQQELSSSDCTGSRLRNVKVQTALLPMNEAARSDQQAGPCVNRGTQTKKSGKSGPTRHRAQQPAASSTCGQPPPATGSEQTGPHIRDTSQALELTQYFFEAVSTQMEKWYERKIEEARSQANQKAQQDKATLKEHIKSLEEELAKLRTRVQKEN

SEQ ID NO: 5321 - protein, 118 aa, Homo sapiens
  Payload ID: 1157;
  Gene Symbol: ANKRD6;
  Gene Name: ankyrin repeat domain 6;
  ENSP ID: ENSP00000428309
MSQQDAVAALSERLLVAAYKGQTENVVQLINKGARVAVTKHGRTPLHLAANKGHLPVVQILLKAGCDLDVQDDGDQTALHRATVVGNTEIIAALIHEGCALDRQDKDGNTALHEASWH

SEQ ID NO: 5322 - protein, 102 aa, Homo sapiens
  Payload ID: 1157;
  Gene Symbol: ANKRD6;
  Gene Name: ankyrin repeat domain 6;
  ENSP ID: ENSP00000428377
MSQQDAVAALSERLLVAAYKGQTENVVQLINKGARVAVTKHGRTPLHLAANKGHLPVVQILLKAGCDLDVQDDGDQTALHRATVVGNTEIIAALIHEGCALD

SEQ ID NO: 5323 - protein, 230 aa, Homo sapiens
  Payload ID: 1157;
  Gene Symbol: ANKRD6;
  Gene Name: ankyrin repeat domain 6;
  ENSP ID: ENSP00000429235
MSQQDAVAALSERLLVAAYKGQTENVVQLINKGARVAVTKGSVSAGDTPSSEQAVARKEEAREEFLSASPEPRAKDDRRRKSRPKVSAFSDPTPPADQQPGHQKNLHAHNHPKKRNRHRCSSPPPPHEFRAYQLYTLYRGKDGKVMQAPINGCRCEPLINKLENQLEATVEEIKAELGSVQDKMNTKLGQMENKTQHQMRVLDKLMVERLSAERTECLNRLQQHSDTEKH

SEQ ID NO: 5324 - protein, 54 aa, Homo sapiens
  Payload ID: 1157;
  Gene Symbol: ANKRD6;
  Gene Name: ankyrin repeat domain 6;
  ENSP ID: ENSP00000429337
MSQQDAVAALSERLLVAAYKGQTENVVQLINKGARVAVTKGDQTALHRATVVGN

SEQ ID NO: 5325 - protein, 175 aa, Homo sapiens
  Payload ID: 1157;
  Gene Symbol: ANKRD6;
  Gene Name: ankyrin repeat domain 6;
  ENSP ID: ENSP00000429431
MSQQDAVAALSERLLVAAYKGQTENVVQLINKGARVAVTKHGRTPLHLAANKGHLPVVQILLKAGCDLDVQDDGDQTALHRATVVGNTEIIAALIHEGCALDRQDKDGNTALHEASWHGFSQSAKLLIKAGANVLAKNKAGNTALHLACQNSHSQSTRVLLLAGSRADLKNNAGD

SEQ ID NO: 5326 - protein, 76 aa, Homo sapiens
  Payload ID: 1157;
  Gene Symbol: ANKRD6;
  Gene Name: ankyrin repeat domain 6;
  ENSP ID: ENSP00000429456
  MOD_RES (1)..(1): Any amino acid
XGDTCLHVAARYNHLSIIRLLLTAFCSVHEKNQAGDTALHVAAALNHKKVAKILLEAGADTTIVNNLPDCSEHNLA

SEQ ID NO: 5327 - protein, 152 aa, Homo sapiens
  Payload ID: 1157;
  Gene Symbol: ANKRD6;
  Gene Name: ankyrin repeat domain 6;
  ENSP ID: ENSP00000429531
  MOD_RES (1)..(1): Any amino acid
XHRCSSPPPPHEFRAYQLYTLYRGKDGKVMQMRVLDKLMVERLSAERTECLNRLQQHSDTEKHEGEKRQISLVDELKTWCMLKIQNLEQKLSGDSRACRAKSTPSTCESSTGVDQLVVTAGPAAASDSSPPVVRPKEKALNSTATQRLQQEL

SEQ ID NO: 5328 - protein, 663 aa, Homo sapiens
  Payload ID: 1157;
  Gene Symbol: ANKRD6;
  Gene Name: ankyrin repeat domain 6;
  Uniprot ID:  Q9Y2G4;
  ENSP ID: ENSP00000429782
MSQQDAVAALSERLLVAAYKGQTENVVQLINKGARVAVTKHGRTPLHLAANKGHLPVVQILLKAGCDLDVQDDGDQTALHRATVVGNTEIIAALIHEGCALDRQDKAGNTALHLACQNSHSQSTRVLLLAGSRADLKNNAGDTCLHVAARYNHLSIIRLLLTAFCSVHEKNQAGDTALHVAAALNHKKVAKILLEAGADTTIVNNVLRFSRGRSLRKKRERLKEERRAQSVPRDEVAQSKGSVSAGDTPSSEQAVARKEEAREEFLSASPEPRAKDDRRRKSRPKVSAFSDPTPPADQQPGHQKNLHAHNHPKKRNRHRCSSPPPPHEFRAYQLYTLYRGKDGKVMQAPINGCRCEPLINKLENQLEATVEEIKAELGSVQDKMNTKLGQMENKTQHQMRVLDKLMVERLSAERTECLNRLQQHSDTEKHEGEKRQISLVDELKTWCMLKIQNLEQKLSGDSRACRAKSTPSTCVDQLVVTAGPAAASDSSPPVVRPKEKALNSTATQRLQQELSSSDCTGSRLRNVKVQTALLPMNEAARSDQQAGPCVNRGTQTKKSGKSGPTRHRAQQPAASSTCGQPPPATGSEQTGPHIRDTSQALELTQYFFEAVSTQMEKWYERKIEEARSQANQKAQQDKATLKEHIKSLEEELAKLRTRVQKEN

SEQ ID NO: 5329 - protein, 130 aa, Homo sapiens
  Payload ID: 1157;
  Gene Symbol: ANKRD6;
  Gene Name: ankyrin repeat domain 6;
  ENSP ID: ENSP00000430452
KLGQMENKTQHQMRVLDKLMVERLSAERTECLNRLQQHSDTEKHEGEKRQISLVDELKTWCMLKIQNLEQKLSGDSRACRAKSTPSTCESSTGNPHTESPFVQKEHDQQLLYSPALKGSTYARAVGNTGW

SEQ ID NO: 5330 - protein, 307 aa, Homo sapiens
  Payload ID: 1157;
  Gene Symbol: ANKRD6;
  Gene Name: ankyrin repeat domain 6;
  ENSP ID: ENSP00000430954
MSQQDAVAALSERLLVAAYKGQTENVVQLINKGARVAVTKHGRTPLHLAANKGHLPVVQILLKAGCDLDVQDDGDQTALHRATVVGNTEIIAALIHEGCALDRQDKDGNTALHEASWHGFSQSAKLLIKAGANVLAKNKAGNTALHLACQNSHSQSTRVLLLAGSRADLKNNAGDTCLHVAARYNHLSIIRLLLTAFCSVHEKNQAGDTALHVAAALNHKKVAKILLEAGADTTIVNNAGQTPLETARYHNNPEVALLLTKAPQVGFTALSMVLIMRDYKVVGTPGCNLLKPLQTNLNMECNQAVEV

SEQ ID NO: 5331 - protein, 727 aa, Homo sapiens; identical to SEQ ID NO: 5318
  Payload ID: 1157;
  Gene Symbol: ANKRD6;
  Gene Name: ankyrin repeat domain 6;
  Uniprot ID:  Q9Y2G4;
  ENSP ID: ENSP00000430985

SEQ ID NO: 5332 - protein, 80 aa, Homo sapiens
  Payload ID: 1157;
  Gene Symbol: ANKRD6;
  Gene Name: ankyrin repeat domain 6;
  ENSP ID: ENSP00000431061
MSQQDAVAALSERLLVAAYKGQTENVVQLINKGARVAVTKHGRTPLHLAANKGHLPVVQILLKAGCDLDVQDDGDQTALH

SEQ ID NO: 5333 - protein, 345 aa, Homo sapiens
  Payload ID: 1158;
  Gene Symbol: ANKRD60;
  Gene Name: ankyrin repeat domain 60;
  Uniprot ID:  Q9BZ19;
  ENSP ID: ENSP00000396747
MTRGRAWGMRRAAAGAGGARAAGPTGGASRLHPNAGRRSGARAGAQGCGGPRVGSADSRALPAQPLACARGRSQRLVCDPKAASALPDLAPDVFVLRVRLEETGEMFRVANCRGDMTVRELKEELDLMVGIPFNLQRLQYLDEGVLMDDTTLKFHDVVPGGIISLCIWHHDGWTELVLAAVEGDPSKLSCLGLTEDSFYRTANSEHFEGEKWKHWTSQRAFVALYVASHRGHFDAVQYLLEHGASCLSRSPLGRTPLHVAAAMGRSDCIILLLQHGASIHDRDAKGETPISIAHRLNHTLSERQMVLLHRIAKSGIRDLNDLVMKNALQRVKSGFRSEKMTMTPH

SEQ ID NO: 5334 - protein, 418 aa, Homo sapiens
  Payload ID: 1159;
  Gene Symbol: ANKRD61;
  Gene Name: ankyrin repeat domain 61;
  Uniprot ID:  A6NGH8;
  ENSP ID: ENSP00000386502
MGNITRKGSRDLVVDSAKSLEDGPSAALHSKLYEAIMREDCTTIEVLLRNHPVNQPITILPNSASNRLLLTQPTESIIPIHLAAKYHKAQSLLCLLRHGADPEVRDTTGLTTLNLMLLHWPVTSTTWAKPGNRTHRILTDIQNSSITCLRILCAHGAQVNTQGEISNKRSPLHLAIAYGCYPVLSILTQNGADVNAINEASMTPLHMAANMLNKEMMETLIAYGANVNCAVSSTGNTPLKLAVCTASSKAGRLLGAGVSCIRLLLTHGAKVNAQDYKGQTAIHEACFGGREAIINLLLEFEANVNILTRNGESPIYMYLQRSCNVRDTALLARLLYHTYPLRMTNNQGILPAGIMLPEFRLLRDTLIKQSQKPLSLQGICKRNIRNIYGEKYKQHLKQFLPVTIWNSVYCCYDLAYTS

SEQ ID NO: 5335 - protein, 917 aa, Homo sapiens
  Payload ID: 1160;
  Gene Symbol: ANKRD62;
  Gene Name: ankyrin repeat domain 62;
  Uniprot ID:  A6NC57;
  ENSP ID: ENSP00000467740
MEVRGSFLAACRRRMATWRKNRDKDGFSNPGYRVRQKDLGMIHKAAIAGDVNKVMESILLRLNDLNDRDKKNRTALLLACAHGRPGVVADLVARKCQLNLTDSENRTALIKAVQCQEEVCASILLEHGANPNVRDMYGNTALHYAIDNENISMARKLLAYGADIEARSQDGHTSLLLAVNRKKEQMVAFLLKKKPDLTAIDNFGRTALILAARNGSTSVVYQLLQHNIDVFCQDISGWTAEDYAVASKFQAIRGMISEYKANKRCKSLQNSNSEQDLEMTSEGEQERLEGCESSQPQVEEKMKKCRNKKMEVSRNVHADDSDNYNDDVDELIHKIKNRKPDNHQSPGKENGEFDRLARKTSNEKSKVKSQIYFTDDLNDISGSSEKTSEDDELPYSDDENFMLLIEQSGMECKDFVSLSKSKNATAACGRSIEDQKCYCERLKVKFQKMKNNISVLQKVLSETDKTKSQSEHQNLQGKKKLCNLRFILQQQEEERIKAEELYEKDIEELKIMEEQYRTQTEVKKQSKLTLKSLEVELKTVRSNSNQNFHTHERERDLWQENHLMRDEIARLRLEIDTIKHQNQETENKYFKDIEIIKENNEDLEKTLKRNEEALTKTITRYSKELNVLMDENTMLNSELQKEKQSMSRLETEMESYRCRLAAALCDHDQRQSSKRDLQLAFQSTVNEWCHLQEDTNSHIQILSQQLSKAESTSSGLETELHYEREALKEKTLHIEHMQGVLSRTQRRLEDIEHMYQNDQPILEKYVRKQQSVEDGLFQLQSQNLLYQQQCNDARKKADNQEKTIINIQVKCEDTVEKLQAECRKLEENNKGLMKECTLLKERQCQYEKEKEEREVVRRQLQREVDDALNKQLLLEAMLEISSERRINLEDEAQSLKKKLGQMRSQVCMKLSMSTVTL

SEQ ID NO: 5336 - protein, 380 aa, Homo sapiens
  Payload ID: 1161;
  Gene Symbol: ANKRD63;
  Gene Name: ankyrin repeat domain 63;
  Uniprot ID:  C9JTQ0;
  ENSP ID: ENSP00000399547
MLKPKDLCPRAGTRTFLEAMQAGKVHLARFVLDALDRSIIDCRAEQGRTPLMVAVGLPDPALRARFVRLLLEQGAAVNLRDERGRTALSLACERGHLDAVQLLVQFSGDPEAADSAGNSPVMWAAACGHGAVLEFLVRSFRRLGLRLDRTNRAGLTALQLAAARGHGTCVQALTGPWGRAAAAAAARGSNSDSPPGRPAPAASPEHRRPSPRRLPRPLLARFARAAGGHGGEAGSAGKNSGRHRAQGSERPELGRSMSLALGAVTEEEAARLRAGALMALPNSPQSSGTGRWRSQEVLEGAPPTLAQAPIGLSPHPEGGPGSGRLGLRRRSTAPDIPSLVGEAPGPESGPELEANALSVSVPGPNPWQAGTEAVVLRAQR

SEQ ID NO: 5337 - protein, 174 aa, Homo sapiens
  Payload ID: 1162;
  Gene Symbol: ANKRD65;
  Gene Name: ankyrin repeat domain 65;
  Uniprot ID:  E5RJM6;
  ENSP ID: ENSP00000428201
MDSQRPEPREEEEEEQELRWMELDSEEALGTRTEGPSVVQGWGHLLQAVWRGPAGLVTQLLRQGASVEERTLRCCWATGQTQASGTGMAALRCTGLPPEDTCLPSSCWSPRGPRWMRGTPWASHPCITPLGKATWRLPAACWTGVPRWMLPAGSERPPYTWLQSEGMGLPWGFC

SEQ ID NO: 5338 - protein, 174 aa, Homo sapiens; identical to SEQ ID NO: 5337
  Payload ID: 1162;
  Gene Symbol: ANKRD65;
  Gene Name: ankyrin repeat domain 65;
  Uniprot ID:  E5RJM6;
  ENSP ID: ENSP00000428419

SEQ ID NO: 5339 - protein, 65 aa, Homo sapiens
  Payload ID: 1162;
  Gene Symbol: ANKRD65;
  Gene Name: ankyrin repeat domain 65;
  Uniprot ID:  E5RJM6;
  ENSP ID: ENSP00000429035
MDSQRPEPREEEEEEQELRWMELDSEEALGTRTEGPSVVQGWGHLLQAVWRGPAGLVTQLLRQGH

SEQ ID NO: 5340 - protein, 399 aa, Homo sapiens
  Payload ID: 1162;
  Gene Symbol: ANKRD65;
  Gene Name: ankyrin repeat domain 65;
  Uniprot ID:  E5RJM6;
  ENSP ID: ENSP00000445688
MDSQRPEPREEEEEEQELRWMELDSEEALGTRTEGPSVVQGWGHLLQAVWRGPAGLVTQLLRQGASVEERDHAGRTPLHLAVLRGHAPLVRLLLQRGAPVGAVDRAGRTALHEAAWHGHSRVAELLLQRGASAAARSGTGLTPLHWAAALGHTLLAARLLEAPGPGPAAAEAEDARGWTAAHWAAAGGRLAVLELLAAGGAGLDGALLVAAAAGRGAALRFLLARGARVDARDGAGATALGLAAALGRSQDIEVLLGHGADPGIRDRHGRSALHRAAARGHLLAVQLLVTQGAEVDARDTLGLTPLHHASREGHVEVAGCLLDRGAQVDATGWLRKTPLHLAAERGHGPTVGLLLSRGASPTLRTQWAEVAQMPEGDLPQALPELGGGEKECEGIESTG

SEQ ID NO: 5341 - protein, 399 aa, Homo sapiens; identical to SEQ ID NO: 5340
  Payload ID: 1162;
  Gene Symbol: ANKRD65;
  Gene Name: ankyrin repeat domain 65;
  Uniprot ID:  E5RJM6;
  ENSP ID: ENSP00000482314

SEQ ID NO: 5342 - protein, 251 aa, Homo sapiens
  Payload ID: 1163;
  Gene Symbol: ANKRD66;
  Gene Name: ankyrin repeat domain 66;
  Uniprot ID:  B4E2M5;
  ENSP ID: ENSP00000454770
MDTTLRMVRTACQHRAPQISHKTGCSHISMHSPGGLTTTKMAGPLPRVSDSLFSAMELAKMSDMTKLHQAVAAGDYSLVKKILKKGLCDPNYKDVDWNDRTPLHWAAIKGQMEVIRLLIEYGARPCLVTSVGWTPAHFAAEAGHLNILKTLHALHAAIDAPDFFGDTPKRIAQIYGQKACVAFLEKAEPECQDHRCAAQQKGLPLDERDEDWDAKKRELELSLPSLNQNMNKKNKKSRGPTRPSNTKGRRV

SEQ ID NO: 5343 - protein, 73 aa, Homo sapiens
  Payload ID: 1163;
  Gene Symbol: ANKRD66;
  Gene Name: ankyrin repeat domain 66;
  ENSP ID: ENSP00000457147
  MOD_RES (1)..(1): Any amino acid
XIEYGARPCLVTSVGWTPAHFAAEAGHLNILKTLHALHAAIDAPDFFGDTPKRIAQIYGQKACVAFLEKGIEF

SEQ ID NO: 5344 - protein, 254 aa, Homo sapiens
  Payload ID: 1164;
  Gene Symbol: ANKRD7;
  Gene Name: ankyrin repeat domain 7;
  Uniprot ID:  Q92527;
  ENSP ID: ENSP00000265224
MNKLFSFWKRKNETRSQGYNLREKDLKKLHRAASVGDLKKLKEYLQIKKYDVNMQDKKYRTPLHLACANGHTDVVLFLIEQQCKINVRDSENKSPLIKAVQCQNEDCATILLNFGADPDLRDIRYNTVLHYAVCGQSLSLVEKLLEYEADLEAKNKDGYTPLLVAVINNNPKMVKFLLEKGADVNASDNYQRTALILAVSGEPPCLVKLLLQQGVELCYEGIVDSQLRNMFISMVLLHRYPQFTASHGKKKHAK

SEQ ID NO: 5345 - protein, 263 aa, Homo sapiens
  Payload ID: 1164;
  Gene Symbol: ANKRD7;
  Gene Name: ankyrin repeat domain 7;
  ENSP ID: ENSP00000395595
MNKLFSFWKRKNETRSQGYNLREKDLKKLHRAASVGDLKKLKEYLQIKKYDVNMQDKKYRTPLHLACANGHTDVVLFLIEQQCKINVRDSENKSPLIKAVQCQNEDCATILLNFGADPDLRDIRYNTVLHYAVCGQSLSLVEKLLEYEADLEAKNKDGYTPLLVAVINNNPKMVKFLLEKGADVNASDNYQRTALILAVSGEPPCLVKLLLQQGVELCYEGIVDSQLRNMFISMVLLHTHNSLRAMERRNMLNRHLILGTTCD

SEQ ID NO: 5346 - protein, 104 aa, Homo sapiens
  Payload ID: 1164;
  Gene Symbol: ANKRD7;
  Gene Name: ankyrin repeat domain 7;
  ENSP ID: ENSP00000417353
MNKLFSFWKRKNETRSQGYNLREKDLKKLHRAASVGDLKKLKEYLQIKKYDVNMQDKKYSVVQSSRWLLSYTTPLNDFIRTPLHLACANGHTDVVLFLIEQQCK

SEQ ID NO: 5347 - protein, 150 aa, Homo sapiens
  Payload ID: 1164;
  Gene Symbol: ANKRD7;
  Gene Name: ankyrin repeat domain 7;
  ENSP ID: ENSP00000482875
MRIVTILLNFGADPDLRDIRYNTVLHYAVCGQSLSLVEKLLEYEADLEAKNKDGYTPLLVAVINNNPKMVKFLLEKGADVNASDNYQRTALILAVSGEPPCLVKLLLQQGVELCYEGIVDSQLRNMFISMVLLHRYPQFTASHGKKKHAK

SEQ ID NO: 5348 - protein, 82 aa, Homo sapiens
  Payload ID: 1164;
  Gene Symbol: ANKRD7;
  Gene Name: ankyrin repeat domain 7;
  ENSP ID: ENSP00000489121
MVKFLLEKGADVNASDNYQRTALILAVSGEPPCLVKLLLQQGVELCYEGIVDSQLRNMFISMVLLHRYPQFTASHGKKKHAK

SEQ ID NO: 5349 - protein, 317 aa, Homo sapiens
  Payload ID: 1165;
  Gene Symbol: ANKRD9;
  Gene Name: ankyrin repeat domain 9;
  Uniprot ID:  Q96BM1;
  ENSP ID: ENSP00000286918
MPWDARRPGGGADGGPEASGAARSRAQKQCRKSSFAFYQAVRDLLPVWLLEDMRASEAFHWDERGRAAAYSPSEALLYALVHDHQAYAHYLLATFPRRALAPPSAGFRCCAAPGPHVALAVRYNRVGILRRILRTLRDFPAEERARVLDRRGCSRVEGGGTSLHVACELARPECLFLLLGHGASPGLRDGGGLTPLELLLRQLGRDAGATPSAAGAPASAPGEPRQRRLLLLDLLALYTPVGAAGSARQELLGDRPRWQRLLGEDKFQWLAGLAPPSLFARAMQVLVTAISPGRFPEALDELPLPPFLQPLDLTGKG

SEQ ID NO: 5350 - protein, 259 aa, Homo sapiens
  Payload ID: 1165;
  Gene Symbol: ANKRD9;
  Gene Name: ankyrin repeat domain 9;
  ENSP ID: ENSP00000453417
MPWDARRPGGGADGGPEASGAARSRAQKQCRKSSFAFYQAVRDLLPVWLLEDMRASEAFHWDERGRAAAYSPSEALLYALVHDHQAYAHYLLATFPRRALAPPSAGFRCCAAPGPHVALAVRYNRVGILRRILRTLRDFPAEERARVLDRRGCSRVEGGGTSLHVACELARPECLFLLLGHGASPGLRDGGGLTPLELLLRQLGRDAGATPSAAGAPASAPGEPRQRRLLLLDLLALYTPVGAAGSARQELLGDRPRWQ

SEQ ID NO: 5351 - protein, 317 aa, Homo sapiens; identical to SEQ ID NO: 5349
  Payload ID: 1165;
  Gene Symbol: ANKRD9;
  Gene Name: ankyrin repeat domain 9;
  Uniprot ID:  Q96BM1;
  ENSP ID: ENSP00000453650

SEQ ID NO: 5352 - protein, 105 aa, Homo sapiens
  Payload ID: 1165;
  Gene Symbol: ANKRD9;
  Gene Name: ankyrin repeat domain 9;
  ENSP ID: ENSP00000454080
MPWDARRPGGGADGGPEASGAARSRAQKQCRKSSFAFYQAVRDLLPVWLLEDMRASEAFHWDERGRAAAYSPSEALLYALVHDHQAYAHYLLATFPRRALAPPSA

SEQ ID NO: 5353 - protein, 317 aa, Homo sapiens; identical to SEQ ID NO: 5349
  Payload ID: 1165;
  Gene Symbol: ANKRD9;
  Gene Name: ankyrin repeat domain 9;
  Uniprot ID:  Q96BM1;
  ENSP ID: ENSP00000454100

SEQ ID NO: 5354 - protein, 313 aa, Homo sapiens
  Payload ID: 1166;
  Gene Symbol: ANKRA2;
  Gene Name: ankyrin repeat, family A (RFXANK-like), 2;
  Uniprot ID:  Q9H9E1;
  ENSP ID: ENSP00000296785
MDTSTNLDIGAQLIVEECPSTYSLTGMPDIKIEHPLDPNSEEGSAQGVAMGMKFILPNRFDMNVCSRFVKSLNEEDSKNIQDQVNSDLEVASVLFKAECNIHTSPSPGIQVRHVYTPSTTKHFSPIKQSTTLTNKHRGNEVSTTPLLANSLSVHQLAAQGEMLYLATRIEQENVINHTDEEGFTPLMWAAAHGQIAVVEFLLQNGADPQLLGKGRESALSLACSKGYTDIVKMLLDCGVDVNEYDWNGGTPLLYAVHGNHVKCVKMLLESGADPTIETDSGYNSMDLAVALGYRSVQQVIESHLLKLLQNIKE

SEQ ID NO: 5355 - protein, 177 aa, Homo sapiens
  Payload ID: 1166;
  Gene Symbol: ANKRA2;
  Gene Name: ankyrin repeat, family A (RFXANK-like), 2;
  ENSP ID: ENSP00000422643
MDTSTNLDIGAQLIVEECPSTYSLTGMPDIKIEHPLDPNSEEGSAQGVAMGMKFILPNRFDMNVCSRFVKSLNEEDSKNIQDQVNSDLEVASVLFKALSVHQLAAQGEMLYLATRIEQENVINHTDEEGFTPLMWAAAHGQIAVVEFLLQNGADPQLLGKGRESALSLACSKGYTDI

SEQ ID NO: 5356 - protein, 475 aa, Homo sapiens
  Payload ID: 1167;
  Gene Symbol: ASZ1;
  Gene Name: ankyrin repeat, SAM and basic leu zipper domain containing 1;
  Uniprot ID:  Q8WWH4;
  ENSP ID: ENSP00000284629
MAASALRGLPVAGGGESSESEDDGWEIGYLDRTSQKLKRLLPIEEKKEKFKKAMTIGDVSLVQELLDSGISVDSNFQYGWTPLMYAASVANAELVRVLLDRGANASFEKDKQSILITACSAHGSEEQILKCVELLLSRNADPNVACRRLMTPIMYAARDGHTQVVALLVAHGAEVNTQDENGYTALTWAARQGHKNIVLKLLELGANKMLQTKDGKMPSEIAKRNKHHEIFNLLSFTLNPLEGKLQQLTKEDTICKILTTDSDREKDHIFSSYTAFGDLEVFLHGLGLEHMTDLLKERDITLRHLLTMREDEFTKNGITSKDQQKILAALKELQVEEIQFGELSEETKLEISGDEFLNFLLKLNKQCGHLITAVQNVITELPVNSQKITLEWASPQNFTSVCEELVNNVEDLSEKVCKLKDLIQKLQNERENDPTHIQLREEVSTWNSRILKRTAITICGFGFLLFICKLTFQRK

SEQ ID NO: 5357 - protein, 148 aa, Homo sapiens
  Payload ID: 1167;
  Gene Symbol: ASZ1;
  Gene Name: ankyrin repeat, SAM and basic leu zipper domain containing 1;
  ENSP ID: ENSP00000389791
MAASALRGLPVAGGGESSESEDDGWEIGYLDRTSQKLKRLLPIEEKKEKFKKAMTIGDVSLVQELLDSGISVDSNFQYGWTPLMYAASVANAELVRVLLDRGANASFEKDKQSILITACSAHGSEEQILKCVELLLSRNADPNVACRL

SEQ ID NO: 5358 - protein, 44 aa, Homo sapiens
  Payload ID: 1167;
  Gene Symbol: ASZ1;
  Gene Name: ankyrin repeat, SAM and basic leu zipper domain containing 1;
  ENSP ID: ENSP00000402919
MTIGDVSLVQELLDSGISVDSNFQYGWTPLMYAASVANAELVRV

SEQ ID NO: 5359 - protein, 763 aa, Homo sapiens
  Payload ID: 1168;
  Gene Symbol: ANKFN1;
  Gene Name: ankyrin-repeat and fibronectin type III domain containing 1;
  Uniprot ID:  Q8N957;
  ENSP ID: ENSP00000321627
MEASLTRRLLFKDRHFTCSKIIGRRFACFAQRLSHRRKQSQCDLLNESTGQLPTTCSSAASNSINWNCRVKMTQQMQNLHLCQSKKHSAPSSPNAAKRLYRNLSEKLKGSHSSFDEAYFRTRTDRLSLRKTSVNFQGNEAMFEAVEQQDMDAVQILLYQYTPEELDLNTPNSEGLTPLDIAIMTNNVPIARILLRTGARESPHFVSLESRAMHLNTLVQEAQERVSELSAQVENEGFTLDNTEKEKQLKAWEWRYRLYRRMKTGFEHARAPEMPTNVCLMVTSSTSLTVSFQEPLSVNAAVVTRYKVEWSMSEDFSPLAGEIIMDNLQTLRCTITGLTMGQQYFVQVSAYNMKGWGPAQTTTPACASPSNWKDYDDREPRHKGQSEVLEGLLQQVRALHQHYSCRESTKLQTTGRKQSVSRSLKHLFHSSNKFVKTLKRGLYIAVIFYYKDNILVTNEDQVPIVEIDDSHTSSITQDFLWFTKLSCMWEDIRWLRQSIPISSSSSTVLQTRQKMLAATAQLQNLLGTHNLGRVYYEPIKDRHGNILIVTIREVEMLYSFFNGKWMQISKLQSQRKSLSTPEEPTALDILLITIQDILSYHKRSHQRLFPGLYLGYLKLCSSVDQIKVLVTQKLPNILCHVKIRENNNISREEWEWIQKLSGSESMESVDHTSDCPMQLFFYELQMAVKALLQQINIPLHQARNFRLYTQEVLEMGHNVSFLLLLPASDDVCTAPGQNNPYTPHSGFLNLPLQMFELGIVACFT

SEQ ID NO: 5360 - protein, 1149 aa, Homo sapiens
  Payload ID: 1168;
  Gene Symbol: ANKFN1;
  Gene Name: ankyrin-repeat and fibronectin type III domain containing 1;
  ENSP ID: ENSP00000454224
MEASLTRRLLFKDRHFTCSKIIGRRFACFAQRLSHRRKQSQCDLLNESTGQLPTTCSSAASNSINWNCRVKMTQQMQNLHLCQSKKHSAPSSPNAAKRLYRNLSEKLKGSHSSFDEAYFRTRTDRLSLRKTSVNFQGNEAMFEAVEQQDMDAVQILLYQYTPEELDLNTPNSEGLTPLDIAIMTNNVPIARILLRTGARESPHFVSLESRAMHLNTLVQEAQERVSELSAQVENEGFTLDNTEKEKQLKAWEWRYRLYRRMKTGFEHARAPEMPTNVCLMVTSSTSLTVSFQEPLSVNAAVVTRYKVEWSMSEDFSPLAGEIIMDNLQTLRCTITGLTMGQQYFVQVSAYNMKGWGPAQTTTPACASPSNWKDYDDREPRHKGQSEVLEGLLQQVRALHQHYSCRESTKLQTTGRKQSVSRSLKHLFHSSNKFVKTLKRGLYIAVIFYYKDNILVTNEDQVPIVEIDDSHTSSITQDFLWFTKLSCMWEDIRWLRQSIPISSSSSTVLQTRQKMLAATAQLQNLLGTHNLGRVYYEPIKDRHGNILIVTIREVEMLYSFFNGKWMQISKLQSQRKSLSTPEEPTALDILLITIQDILSYHKRSHQRLFPGLYLGYLKLCSSVDQIKVLVTQKLPNILCHVKIRENNNISREEWEWIQKLSGSESMESVDHTSDCPMQLFFYELQMAVKALLQQINIPLHQARNFRLYTQEVLEMGHNVSFLLLLPASDDVCTAPGQNNPYTPHSGFLNLPLQMFELVHFCSYREKFISLYCRLSAVVELDSLNTQQSLREAISDSEVAAAKQRHQQVLDFIQQIDEVWREMRWIMDALQYARYKQPVSGLPITKLIDPSDEQSLKKINSTSSSHIDCLPSPPPSPEMHRRKTVSDSQPCSDEEACSEVFLPTNSDYDSSDALSPRDLDLVYLSSHDIAQQTLSGLSGSAPDVLQVHDVKTPLGPGQDPQGEGPNPDHSCAEFLHSLTLTGFTPKNHAKTVSGGRPPLGFLGKRKPGKHPHYGGFSRHHRWLRIHSETQSLSLSEGIYTQHLSQACGLAQEPKEAKRAGPALDDPRGLTLAHAASLPEERNSSLQDARPSVRRLYVEPYAAAVVAQDEKPWASLSPPSGGRITLPSPTGPDVSQEGPTASPMSEILSSML

SEQ ID NO: 5361 - protein, 173 aa, Homo sapiens
  Payload ID: 1168;
  Gene Symbol: ANKFN1;
  Gene Name: ankyrin-repeat and fibronectin type III domain containing 1;
  ENSP ID: ENSP00000458227
MPPGIPTKCAKQPHSGTAGLEEGAEAERLLFKDRHFTCSKIIGRRFACFAQRLSHRRKQSQCDLLNESTGQLPTTCSSAASNSINWNCRVKMTQQMQNLHLCQSKKHSAPSSPNAAKRLYRNLSEKLKGSHSSFDEAYFRTRTDRLSLRKTSVNFQGNEAMFEAVEQQDMDAV

SEQ ID NO: 5362 - protein, 346 aa, Homo sapiens
  Payload ID: 1169;
  Gene Symbol: ANXA1;
  Gene Name: annexin A1;
  Uniprot ID:  P04083;
  ENSP ID: ENSP00000257497
MAMVSEFLKQAWFIENEEQEYVQTVKSSKGGPGSAVSPYPTFNPSSDVAALHKAIMVKGVDEATIIDILTKRNNAQRQQIKAAYLQETGKPLDETLKKALTGHLEEVVLALLKTPAQFDADELRAAMKGLGTDEDTLIEILASRTNKEIRDINRVYREELKRDLAKDITSDTSGDFRNALLSLAKGDRSEDFGVNEDLADSDARALYEAGERRKGTDVNVFNTILTTRSYPQLRRVFQKYTKYSKHDMNKVLDLELKGDIEKCLTAIVKCATSKPAFFAEKLHQAMKGVGTRHKALIRIMVSRSEIDMNDIKAFYQKMYGISLCQAILDETKGDYEKILVALCGGN

SEQ ID NO: 5363 - protein, 346 aa, Homo sapiens; identical to SEQ ID NO: 5362
  Payload ID: 1169;
  Gene Symbol: ANXA1;
  Gene Name: annexin A1;
  Uniprot ID:  P04083;
  ENSP ID: ENSP00000366109

SEQ ID NO: 5364 - protein, 204 aa, Homo sapiens
  Payload ID: 1169;
  Gene Symbol: ANXA1;
  Gene Name: annexin A1;
  ENSP ID: ENSP00000412489
MNLILRYTFSKMAMVSEFLKQAWFIENEEQEYVQTVKSSKGGPGSAVSPYPTFNPSSDVAALHKAIMVKGVDEATIIDILTKRNNAQRQQIKAAYLQETGKPLDETLKKALTGHLEEVVLALLKTPAQFDADELRAAMKGLGTDEDTLIEILASRTNKEIRDINRVYREELKRDLAKDITSDTSGDFRNALLSLAKGDRSEDFG

SEQ ID NO: 5365 - protein, 115 aa, Homo sapiens
  Payload ID: 1169;
  Gene Symbol: ANXA1;
  Gene Name: annexin A1;
  ENSP ID: ENSP00000414013
MAMVSEFLKQAWFIENEEQEYVQTVKSSKGGPGSAVSPYPTFNPSSDVAALHKAIMVKGVDEATIIDILTKRNNAQRQQIKAAYLQETGKPLDETLKKALTGHLEEVVLALLKTP

SEQ ID NO: 5366 - protein, 324 aa, Homo sapiens
  Payload ID: 1170;
  Gene Symbol: ANXA10;
  Gene Name: annexin A10;
  Uniprot ID:  Q9UJ72;
  ENSP ID: ENSP00000352248
MFCGDYVQGTIFPAPNFNPIMDAQMLGGALQGFDCDKDMLINILTQRCNAQRMMIAEAYQSMYGRDLIGDMREQLSDHFKDVMAGLMYPPPLYDAHELWHAMKGVGTDENCLIEILASRTNGEIFQMREAYCLQYSNNLQEDIYSETSGHFRDTLMNLVQGTREEGYTDPAMAAQDAMVLWEACQQKTGEHKTMLQMILCNKSYQQLRLVFQEFQNISGQDMVDAINECYDGYFQELLVAIVLCVRDKPAYFAYRLYSAIHDFGFHNKTVIRILIARSEIDLLTIRKRYKERYGKSLFHDIRNFASGHYKKALLAICAGDAEDY

SEQ ID NO: 5367 - protein, 323 aa, Homo sapiens
  Payload ID: 1170;
  Gene Symbol: ANXA10;
  Gene Name: annexin A10;
  ENSP ID: ENSP00000483710
MFCGDYVQGTIFPAPNFNPIMDAQMLGGALQGFDCDKDMLINILTQRCNAQRMMIAEAYQSMYGRDLIGDMRAAFGSLQRCDGWLMYPPPLYDAHELWHAMKGVGTDENCLIEILASRTNGEIFQMREAYCLQYSNNLQEDIYSETSGHFRDTLMNLVQGTREEGYTDPAMAAQDAMVLWEACQQKTGEHKTMLQMILCNKSYQQLRLVFQEFQNISGQDMVDAINECYDGYFQELLVAIVLCVRDKPAYFAYRLYSAIHDFGFHNKTVIRILIARSEIDLLTIRKRYKERYGKSLFHDIRNFASGHYKKALLAICAGDAEDY

SEQ ID NO: 5368 - protein, 472 aa, Homo sapiens
  Payload ID: 1171;
  Gene Symbol: ANXA11;
  Gene Name: annexin A11;
  Uniprot ID:  P50995;
  ENSP ID: ENSP00000265447
MPPIGLDNVATYAGQFNQDYLSGMAANMSGTFGGANMPNLYPGAPGAGYPPVPPGGFGQPPSAQQPVPPYGMYPPPGGNPPSRMPSYPPYPGAPVPGQPMPPPGQQPPGAYPGQPPVTYPGQPPVPLPGQQQPVPSYPGYPGSGTVTPAVPPTQFGSRGTITDAPGFDPLRDAEVLRKAMKGFGTDEQAIIDCLGSRSNKQRQQILLSFKTAYGKDLIKDLKSELSGNFEKTILALMKTPVLFDIYEIKEAIKGVGTDEACLIEILASRSNEHIRELNRAYKAEFKKTLEEAIRSDTSGHFQRLLISLSQGNRDESTNVDMSLAQRDAQELYAAGENRLGTDESKFNAVLCSRSRAHLVAVFNEYQRMTGRDIEKSICREMSGDLEEGMLAVVKCLKNTPAFFAERLNKAMRGAGTKDRTLIRIMVSRSETDLLDIRSEYKRMYGKSLYHDISGDTSGDYRKILLKICGGND

SEQ ID NO: 5369 - protein, 505 aa, Homo sapiens
  Payload ID: 1171;
  Gene Symbol: ANXA11;
  Gene Name: annexin A11;
  Uniprot ID:  P50995;
  ENSP ID: ENSP00000361305
MSYPGYPPPPGGYPPAAPGGGPWGGAAYPPPPSMPPIGLDNVATYAGQFNQDYLSGMAANMSGTFGGANMPNLYPGAPGAGYPPVPPGGFGQPPSAQQPVPPYGMYPPPGGNPPSRMPSYPPYPGAPVPGQPMPPPGQQPPGAYPGQPPVTYPGQPPVPLPGQQQPVPSYPGYPGSGTVTPAVPPTQFGSRGTITDAPGFDPLRDAEVLRKAMKGFGTDEQAIIDCLGSRSNKQRQQILLSFKTAYGKDLIKDLKSELSGNFEKTILALMKTPVLFDIYEIKEAIKGVGTDEACLIEILASRSNEHIRELNRAYKAEFKKTLEEAIRSDTSGHFQRLLISLSQGNRDESTNVDMSLAQRDAQELYAAGENRLGTDESKFNAVLCSRSRAHLVAVFNEYQRMTGRDIEKSICREMSGDLEEGMLAVVKCLKNTPAFFAERLNKAMRGAGTKDRTLIRIMVSRSETDLLDIRSEYKRMYGKSLYHDISGDTSGDYRKILLKICGGND

SEQ ID NO: 5370 - protein, 505 aa, Homo sapiens; identical to SEQ ID NO: 5369
  Payload ID: 1171;
  Gene Symbol: ANXA11;
  Gene Name: annexin A11;
  Uniprot ID:  P50995;
  ENSP ID: ENSP00000398610

SEQ ID NO: 5371 - protein, 505 aa, Homo sapiens; identical to SEQ ID NO: 5369
  Payload ID: 1171;
  Gene Symbol: ANXA11;
  Gene Name: annexin A11;
  Uniprot ID:  P50995;
  ENSP ID: ENSP00000404412

SEQ ID NO: 5372 - protein, 148 aa, Homo sapiens
  Payload ID: 1171;
  Gene Symbol: ANXA11;
  Gene Name: annexin A11;
  ENSP ID: ENSP00000405009
  MOD_RES (1)..(1): Any amino acid
XENRLGTDESKFNAVLCSRSRAHLVAVFNEYQRMTGRDIEKSICREMSGDLEEGMLAVVKCLKNTPAFFAERLNKAMRGAGTKDRTLIRIMVSRSETDLLDIRSEYKRMYGKSLYHDISSISCMPASYGHLEEATCLALKLLRVEGND

SEQ ID NO: 5373 - protein, 150 aa, Homo sapiens
  Payload ID: 1171;
  Gene Symbol: ANXA11;
  Gene Name: annexin A11;
  ENSP ID: ENSP00000414642
MSYPGYPPPPGGYPPAAPGGGPWGGAAYPPPPSMPPIGLDNVATYAGQFNQDYLSGMAANMSGTFGGANMPNLYPGAPGAGYPPVPPGGFGQPPSAQQPVPPYGMYPPPGGNPPSRMPSYPPYPGAPVPGQPMPPPGQQPPGAYPGQPPV

SEQ ID NO: 5374 - protein, 357 aa, Homo sapiens
  Payload ID: 1172;
  Gene Symbol: ANXA13;
  Gene Name: annexin A13;
  Uniprot ID:  P27216;
  ENSP ID: ENSP00000262219
MGNRHSQSYTLSEGSQQLPKGDSQPSTVVQPLSHPSRNGEPEAPQPAKASSPQGFDVDRDAKKLNKACKGMGTNEAAIIEILSGRTSDERQQIKQKYKATYGKELEEVLKSELSGNFEKTALALLDRPSEYAARQLQKAMKGLGTDESVLIEVLCTRTNKEIIAIKEAYQRLFDRSLESDVKGDTSGNLKKILVSLLQANRNEGDDVDKDLAGQDAKDLYDAGEGRWGTDELAFNEVLAKRSYKQLRATFQAYQILIGKDIEEAIEEETSGDLQKAYLTLVRCAQDCEDYFAERLYKSMKGAGTDEETLIRIVVTRAEVDLQGIKAKFQEKYQKSLSDMVRSDTSGDFRKLLVALLH

SEQ ID NO: 5375 - protein, 316 aa, Homo sapiens
  Payload ID: 1172;
  Gene Symbol: ANXA13;
  Gene Name: annexin A13;
  Uniprot ID:  P27216;
  ENSP ID: ENSP00000390809
MGNRHAKASSPQGFDVDRDAKKLNKACKGMGTNEAAIIEILSGRTSDERQQIKQKYKATYGKELEEVLKSELSGNFEKTALALLDRPSEYAARQLQKAMKGLGTDESVLIEVLCTRTNKEIIAIKEAYQRLFDRSLESDVKGDTSGNLKKILVSLLQANRNEGDDVDKDLAGQDAKDLYDAGEGRWGTDELAFNEVLAKRSYKQLRATFQAYQILIGKDIEEAIEEETSGDLQKAYLTLVRCAQDCEDYFAERLYKSMKGAGTDEETLIRIVVTRAEVDLQGIKAKFQEKYQKSLSDMVRSDTSGDFRKLLVALLH

SEQ ID NO: 5376 - protein, 113 aa, Homo sapiens
  Payload ID: 1172;
  Gene Symbol: ANXA13;
  Gene Name: annexin A13;
  ENSP ID: ENSP00000429358
MGTNEAAIIEILSGRTSDERQQIKQKYKATYGKELEEVLKSELSGNFEKTALALLDRPSEYAARQLQKAMKGLGTDESVLIEVLCTRTNKEIIAIKEAYQRLFDRSLESDVKG

SEQ ID NO: 5377 - protein, 357 aa, Homo sapiens
  Payload ID: 1173;
  Gene Symbol: ANXA2;
  Gene Name: annexin A2;
  Uniprot ID:  P07355;
  ENSP ID: ENSP00000346032
MGRQLAGCGDAGKKASFKMSTVHEILCKLSLEGDHSTPPSAYGSVKAYTNFDAERDALNIETAIKTKGVDEVTIVNILTNRSNAQRQDIAFAYQRRTKKELASALKSALSGHLETVILGLLKTPAQYDASELKASMKGLGTDEDSLIEIICSRTNQELQEINRVYKEMYKTDLEKDIISDTSGDFRKLMVALAKGRRAEDGSVIDYELIDQDARDLYDAGVKRKGTDVPKWISIMTERSVPHLQKVFDRYKSYSPYDMLESIRKEVKGDLENAFLNLVQCIQNKPLYFADRLYDSMKGKGTRDKVLIRIMVSRSEVDMLKIRSEFKRKYGKSLYYYIQQDTKGDYQKALLYLCGGDD

SEQ ID NO: 5378 - protein, 339 aa, Homo sapiens
  Payload ID: 1173;
  Gene Symbol: ANXA2;
  Gene Name: annexin A2;
  Uniprot ID:  P07355;
  ENSP ID: ENSP00000379342
MSTVHEILCKLSLEGDHSTPPSAYGSVKAYTNFDAERDALNIETAIKTKGVDEVTIVNILTNRSNAQRQDIAFAYQRRTKKELASALKSALSGHLETVILGLLKTPAQYDASELKASMKGLGTDEDSLIEIICSRTNQELQEINRVYKEMYKTDLEKDIISDTSGDFRKLMVALAKGRRAEDGSVIDYELIDQDARDLYDAGVKRKGTDVPKWISIMTERSVPHLQKVFDRYKSYSPYDMLESIRKEVKGDLENAFLNLVQCIQNKPLYFADRLYDSMKGKGTRDKVLIRIMVSRSEVDMLKIRSEFKRKYGKSLYYYIQQDTKGDYQKALLYLCGGDD

SEQ ID NO: 5379 - protein, 339 aa, Homo sapiens; identical to SEQ ID NO: 5378
  Payload ID: 1173;
  Gene Symbol: ANXA2;
  Gene Name: annexin A2;
  Uniprot ID:  P07355;
  ENSP ID: ENSP00000387545

SEQ ID NO: 5380 - protein, 339 aa, Homo sapiens; identical to SEQ ID NO: 5378
  Payload ID: 1173;
  Gene Symbol: ANXA2;
  Gene Name: annexin A2;
  Uniprot ID:  P07355;
  ENSP ID: ENSP00000411352

SEQ ID NO: 5381 - protein, 110 aa, Homo sapiens
  Payload ID: 1173;
  Gene Symbol: ANXA2;
  Gene Name: annexin A2;
  ENSP ID: ENSP00000452858
MSTVHEILCKLSLEGDHSTPPSAYGSVKAYTNFDAERDALNIETAIKTKGVDEVTIVNILTNRSNAQRQDIAFAYQRRTKKELASALKSALSGHLETVILGLLKTPAQYD

SEQ ID NO: 5382 - protein, 69 aa, Homo sapiens
  Payload ID: 1173;
  Gene Symbol: ANXA2;
  Gene Name: annexin A2;
  ENSP ID: ENSP00000452876
MSTVHEILCKLSLEGDHSTPPSAYGSVKAYTNFDAERDALNIETAIKTKGARPEPRSYQTLEKESLVPF

SEQ ID NO: 5383 - protein, 176 aa, Homo sapiens
  Payload ID: 1173;
  Gene Symbol: ANXA2;
  Gene Name: annexin A2;
  ENSP ID: ENSP00000452895
MSTVHEILCKLSLEGDHSTPPSAYGSVKAYTNFDAERDALNIETAIKTKGVDEVTIVNILTNRSNAQRQDIAFAYQRRTKKELASALKSALSGHLETVILGLLKTPAQYDASELKASMKGLGTDEDSLIEIICSRTNQELQEINRVYKEMYKTDLEKDIISDTSGDFRKLMVALAK

SEQ ID NO: 5384 - protein, 176 aa, Homo sapiens; identical to SEQ ID NO: 5383
  Payload ID: 1173;
  Gene Symbol: ANXA2;
  Gene Name: annexin A2;
  ENSP ID: ENSP00000452921

SEQ ID NO: 5385 - protein, 81 aa, Homo sapiens
  Payload ID: 1173;
  Gene Symbol: ANXA2;
  Gene Name: annexin A2;
  ENSP ID: ENSP00000452958
MSTVHEILCKLSLEGDHSTPPSAYGSVKAYTNFDAERDALNIETAIKTKGVDEVTIVNILTNRSNAQRQDIAFAYQRRTKK

SEQ ID NO: 5386 - protein, 134 aa, Homo sapiens
  Payload ID: 1173;
  Gene Symbol: ANXA2;
  Gene Name: annexin A2;
  ENSP ID: ENSP00000452981
MSTVHEILCKLSLEGDHSTPPSAYGSVKAYTNFDAERDALNIETAIKTKGVDEVTIVNILTNRSNAQRQDIAFAYQRRTKKELASALKSALSGHLETVILGLLKTPAQYDASELKASMKGLGTDEDSLIEIICS

SEQ ID NO: 5387 - protein, 119 aa, Homo sapiens
  Payload ID: 1173;
  Gene Symbol: ANXA2;
  Gene Name: annexin A2;
  ENSP ID: ENSP00000453000
MSTVHEILCKLSLEGDHSTPPSAYGSVKAYTNFDAERDALNIETAIKTKGVDEVTIVNILTNRSNAQRQDIAFAYQRRTKKELASALKSALSGHLETVILGLLKTPAQYDASELKASMK

SEQ ID NO: 5388 - protein, 142 aa, Homo sapiens
  Payload ID: 1173;
  Gene Symbol: ANXA2;
  Gene Name: annexin A2;
  ENSP ID: ENSP00000453039
MKGLGTDEDSLIEIICSRTNQELQEINRVYKEMYKTDLEKDIISDTSGDFRKLMVALAKGRRAEDGSVIDYELIDQDARDLYDAGVKRKGTDVPKWISIMTERSVPHLQKVFDRYKSYSPYDMLESIRKEVKGDLENAFLNL

SEQ ID NO: 5389 - protein, 45 aa, Homo sapiens
  Payload ID: 1173;
  Gene Symbol: ANXA2;
  Gene Name: annexin A2;
  ENSP ID: ENSP00000453174
MKGLGTDEDSLIEIICSRTNQELQEINRVYKEMYKTDLEKDIISD

SEQ ID NO: 5390 - protein, 132 aa, Homo sapiens
  Payload ID: 1173;
  Gene Symbol: ANXA2;
  Gene Name: annexin A2;
  ENSP ID: ENSP00000453356
MSTVHEILCKLSLEGDHSTPPSAYGSVKAYTNFDAERDALNIETAIKTKGVDEVTIVNILTNRSNAQRQDIAFAYQRRTKKELASALKSALSGHLETVILGLLKTPAQYDASELKASMKVNAWAGNRRGLSH

SEQ ID NO: 5391 - protein, 248 aa, Homo sapiens
  Payload ID: 1173;
  Gene Symbol: ANXA2;
  Gene Name: annexin A2;
  ENSP ID: ENSP00000453464
  MOD_RES (1)..(1): Any amino acid
XNQILIWCQQCQENSPISSVDEVTIVNILTNRSNAQRQDIAFAYQRRTKKELASALKSALSGHLETVILGLLKTPAQYDASELKASMKGLGTDEDSLIEIICSRTNQELQEINRVYKEMYKTDLEKDIISDTSGDFRKLMVALAKGRRAEDGSVIDYELIDQDARDLYDAGVKRKGTDVPKWISIMTERSVPHLQKVFDRYKSYSPYDMLESIRKEVKGDLENAFLNLVQCIQNKPLYFADRLYDSMK

SEQ ID NO: 5392 - protein, 227 aa, Homo sapiens
  Payload ID: 1173;
  Gene Symbol: ANXA2;
  Gene Name: annexin A2;
  ENSP ID: ENSP00000453556
MSTVHEILCKLSLEGDHSTPPSAYGSVKAYTNFDAERDALNIETAIKTKGVDEVTIVNILTNRSNAQRQDIAFAYQRRTKKELASALKSALSGHLETVILGLLKTPAQYDASELKASMKGLGTDEDSLIEIICSRTNQELQEINRVYKEMYKTDLEKDIISDTSGDFRKLMVALAKGRRAEDGSVIDYELIDQDARDLYDAGVKRKGTDVPKWISIMTERSVPHLQK

SEQ ID NO: 5393 - protein, 65 aa, Homo sapiens
  Payload ID: 1173;
  Gene Symbol: ANXA2;
  Gene Name: annexin A2;
  ENSP ID: ENSP00000453566
MSTVHEILCKLSLEGDHSTPPSAYGSVKAYTNFDAERDALNIETAIKTKGVDEVTIVNILTNRSN

SEQ ID NO: 5394 - protein, 176 aa, Homo sapiens; identical to SEQ ID NO: 5383
  Payload ID: 1173;
  Gene Symbol: ANXA2;
  Gene Name: annexin A2;
  ENSP ID: ENSP00000453579

SEQ ID NO: 5395 - protein, 149 aa, Homo sapiens
  Payload ID: 1173;
  Gene Symbol: ANXA2;
  Gene Name: annexin A2;
  ENSP ID: ENSP00000453663
MSTVHEILCKLSLEGDHSTPPSAYGSVKAYTNFDAERDALNIETAIKTKGVDEVTIVNILTNRSNAQRQDIAFAYQRRTKKELASALKSALSGHLETVILGLLKTPAQYDASELKASMKGLGTDEDSLIEIICSRTNQELQEINRVYKE

SEQ ID NO: 5396 - protein, 119 aa, Homo sapiens; identical to SEQ ID NO: 5387
  Payload ID: 1173;
  Gene Symbol: ANXA2;
  Gene Name: annexin A2;
  ENSP ID: ENSP00000453694

SEQ ID NO: 5397 - protein, 133 aa, Homo sapiens
  Payload ID: 1173;
  Gene Symbol: ANXA2;
  Gene Name: annexin A2;
  ENSP ID: ENSP00000453739
MSTVHEILCKLSLEGDHSTPPSAYGSVKAYTNFDAERDALNIETAIKTKGVDEVTIVNILTNRSNAQRQDIAFAYQRRTKKELASALKSALSGHLETVILGLLKTPAQYDASELKASMKGLGTDEDSLIEIIC

SEQ ID NO: 5398 - protein, 4 aa, Homo sapiens
  Payload ID: 1173;
  Gene Symbol: ANXA2;
  Gene Name: annexin A2;
  ENSP ID: ENSP00000453742
MSWP

SEQ ID NO: 5399 - protein, 230 aa, Homo sapiens
  Payload ID: 1173;
  Gene Symbol: ANXA2;
  Gene Name: annexin A2;
  ENSP ID: ENSP00000453754
MSTVHEILCKLSLEGDHSTPPSAYGSVKAYTNFDAERDALNIETAIKTKGVDEVTIVNILTNRSNAQRQDIAFAYQRRTKKELASALKSALSGHLETVILGLLKTPAQYDASELKASMKGLGTDEDSLIEIICSRTNQELQEINRVYKEMYKTDLEKDIISDTSGDFRKLMVALAKGRRAEDGSVIDYELIDQDARDLYDAGVKRKGTDVPKWISIMTERSVPHLQKGGI

SEQ ID NO: 5400 - protein, 146 aa, Homo sapiens
  Payload ID: 1173;
  Gene Symbol: ANXA2;
  Gene Name: annexin A2;
  ENSP ID: ENSP00000453770
MSWPCDSVINQDHKTKEKNICFQKASFKMSTVHEILCKLSLEGDHSTPPSAYGSVKAYTNFDAERDALNIETAIKTKGVDEVTIVNILTNRSNAQRQDIAFAYQRRTKKELASALKSALSGHLETVILGLLKTPAQYDASELKASM

SEQ ID NO: 5401 - protein, 139 aa, Homo sapiens
  Payload ID: 1173;
  Gene Symbol: ANXA2;
  Gene Name: annexin A2;
  ENSP ID: ENSP00000453841
MKGLGTDEDSLIEIICSRTNQELQEINRVYKEMYKTDLEKDIISDTSGDFRKLMVALAKGRRAEDGSVIDYELIDQDARDLYDAGVKRKGTDVPKWISIMTERSVPHLQKVFDRYKSYSPYDMLESIRKEVKGDLENAF

SEQ ID NO: 5402 - protein, 256 aa, Homo sapiens
  Payload ID: 1173;
  Gene Symbol: ANXA2;
  Gene Name: annexin A2;
  ENSP ID: ENSP00000453859
MSTVHEILCKLSLEGDHSTPPSAYGSVKAYTNFDAERDALNIETAIKTKGVDEVTIVNILTNRSNAQRQDIAFAYQRRTKKELASALKSALSGHLETVILGLLKTPAQYDASELKASMKGLGTDEDSLIEIICSRTNQELQEINRVYKEMYKTDLEKDIISDTSGDFRKLMVALAKGRRAEDGSVIDYELIDQDARDLYDAGVKRKGTDVPKWISIMTERSVPHLQKVFDRYKSYSPYDMLESIRKEVKGDLENAF

SEQ ID NO: 5403 - protein, 59 aa, Homo sapiens
  Payload ID: 1173;
  Gene Symbol: ANXA2;
  Gene Name: annexin A2;
  ENSP ID: ENSP00000453869
MKGLGTDEDSLIEIICSRTNQELQEINRVYKEMYKTDLEKDIISDTSGDFRKLMVALAK

SEQ ID NO: 5404 - protein, 79 aa, Homo sapiens
  Payload ID: 1173;
  Gene Symbol: ANXA2;
  Gene Name: annexin A2;
  ENSP ID: ENSP00000453925
MKGLGTDEDSLIEIICSRTNQELQEINRVYKEMYKTDLEKDIISDTSGDFRKLMVALAKGRRAEDGSVIDYELIDQDAR

SEQ ID NO: 5405 - protein, 47 aa, Homo sapiens
  Payload ID: 1173;
  Gene Symbol: ANXA2;
  Gene Name: annexin A2;
  ENSP ID: ENSP00000453945
MSTVHEILCKLSLEGDHSTPPSAYGSVKAYTNFDAERDALNIETAIK

SEQ ID NO: 5406 - protein, 175 aa, Homo sapiens
  Payload ID: 1173;
  Gene Symbol: ANXA2;
  Gene Name: annexin A2;
  ENSP ID: ENSP00000454096
MSTVHEILCKLSLEGDELASALKSALSGHLETVILGLLKTPAQYDASELKASMKGLGTDEDSLIEIICSRTNQELQEINRVYKEMYKTDLEKDIISDTSGDFRKLMVALAKGRRAEDGSVIDYELIDQDARDLYDAGVKRKGTDVPKWISIMTERSVPHLQKVFDRYKSYSPYDM

SEQ ID NO: 5407 - protein, 193 aa, Homo sapiens
  Payload ID: 1174;
  Gene Symbol: ANXA2R;
  Gene Name: annexin A2 receptor;
  Uniprot ID:  Q3ZCQ2;
  ENSP ID: ENSP00000315915
MEQHFLGCVKRAWDSAEVAPEPQPPPIVSSEDRGPWPLPLYPVLGEYSLDSCDLGLLSSPCWRLPGVYWQNGLSPGVQSTLEPSTAKPTEFSWPGTQKQQEAPVEEVGQAEEPDRLRLQQLPWSSPLHPWDRQQDTEVCDSGCLLERRHPPALQPWRHLPGFSDCLEWILRVGFAAFSVLWACCSRICGAKQP

SEQ ID NO: 5408 - protein, 193 aa, Homo sapiens; identical to SEQ ID NO: 5407
  Payload ID: 1174;
  Gene Symbol: ANXA2R;
  Gene Name: annexin A2 receptor;
  Uniprot ID:  Q3ZCQ2;
  ENSP ID: ENSP00000479862

SEQ ID NO: 5409 - protein, 323 aa, Homo sapiens
  Payload ID: 1175;
  Gene Symbol: ANXA3;
  Gene Name: annexin A3;
  Uniprot ID:  P12429;
  ENSP ID: ENSP00000264908
MASIWVGHRGTVRDYPDFSPSVDAEAIQKAIRGIGTDEKMLISILTERSNAQRQLIVKEYQAAYGKELKDDLKGDLSGHFEHLMVALVTPPAVFDAKQLKKSMKGAGTNEDALIEILTTRTSRQMKDISQAYYTVYKKSLGDDISSETSGDFRKALLTLADGRRDESLKVDEHLAKQDAQILYKAGENRWGTDEDKFTEILCLRSFPQLKLTFDEYRNISQKDIVDSIKGELSGHFEDLLLAIVNCVRNTPAFLAERLHRALKGIGTDEFTLNRIMVSRSEIDLLDIRTEFKKHYGYSLYSAIKSDTSGDYEITLLKICGGDD

SEQ ID NO: 5410 - protein, 284 aa, Homo sapiens
  Payload ID: 1175;
  Gene Symbol: ANXA3;
  Gene Name: annexin A3;
  ENSP ID: ENSP00000421015
MLISILTERSNAQRQLIVKEYQAAYGKELKDDLKGDLSGHFEHLMVALVTPPAVFDAKQLKKSMKGAGTNEDALIEILTTRTSRQMKDISQAYYTVYKKSLGDDISSETSGDFRKALLTLADGRRDESLKVDEHLAKQDAQILYKAGENRWGTDEDKFTEILCLRSFPQLKLTFDEYRNISQKDIVDSIKGELSGHFEDLLLAIVNCVRNTPAFLAERLHRALKGIGTDEFTLNRIMVSRSEIDLLDIRTEFKKHYGYSLYSAIKSDTSGDYEITLLKICGGDD

SEQ ID NO: 5411 - protein, 154 aa, Homo sapiens
  Payload ID: 1175;
  Gene Symbol: ANXA3;
  Gene Name: annexin A3;
  ENSP ID: ENSP00000421512
MASIWVGHRGTVRDYPDFSPSVDAEAIQKAIRGIGTDEKMLISILTERSNAQRQLIVKEYQAAYGKELKDDLKGDLSGHFEHLMVALVTPPAVFDAKQLKKSMKGAGTNEDALIEILTTRTSRQMKDISQAYYTVYKKSLGDDISSETSGDFRK

SEQ ID NO: 5412 - protein, 134 aa, Homo sapiens
  Payload ID: 1175;
  Gene Symbol: ANXA3;
  Gene Name: annexin A3;
  ENSP ID: ENSP00000422281
MASIWVGHRGTVRDYPDFSPSVDAEAIQKAIRGIGTDEKMLISILTERSNAQRQLIVKEYQAAYGKELKDDLKGDLSGHFEHLMVALVTPPAVFDAKQLKKSMKGAGTNEDALIEILTTRTSRQMKDISQAYYT

SEQ ID NO: 5413 - protein, 284 aa, Homo sapiens; identical to SEQ ID NO: 5410
  Payload ID: 1175;
  Gene Symbol: ANXA3;
  Gene Name: annexin A3;
  ENSP ID: ENSP00000423068

SEQ ID NO: 5414 - protein, 104 aa, Homo sapiens
  Payload ID: 1175;
  Gene Symbol: ANXA3;
  Gene Name: annexin A3;
  ENSP ID: ENSP00000424584
MASIWVGHRGTVRDYPDFSPSVDAEAIQKAIRGIGTDEKMLISILTERSNAQRQLIVKEYQAAYGKELKDDLKGDLSGHFEHLMVALVTPPAVFDAKQLKKSMK

SEQ ID NO: 5415 - protein, 55 aa, Homo sapiens
  Payload ID: 1175;
  Gene Symbol: ANXA3;
  Gene Name: annexin A3;
  ENSP ID: ENSP00000426591
MASIWGRRDESLKVDEHLAKQDAQILYKAGENRWGTDEDKFTEILCLRSFPQLKL

SEQ ID NO: 5416 - protein, 321 aa, Homo sapiens
  Payload ID: 1176;
  Gene Symbol: ANXA4;
  Gene Name: annexin A4;
  Uniprot ID:  P09525;
  ENSP ID: ENSP00000377833
MAMATKGGTVKAASGFNAMEDAQTLRKAMKGLGTDEDAIISVLAYRNTAQRQEIRTAYKSTIGRDLIDDLKSELSGNFEQVIVGMMTPTVLYDVQELRRAMKGAGTDEGCLIEILASRTPEEIRRISQTYQQQYGRSLEDDIRSDTSFMFQRVLVSLSAGGRDEGNYLDDALVRQDAQDLYEAGEKKWGTDEVKFLTVLCSRNRNHLLHVFDEYKRISQKDIEQSIKSETSGSFEDALLAIVKCMRNKSAYFAEKLYKSMKGLGTDDNTLIRVMVSRAEIDMLDIRAHFKRLYGKSLYSFIKGDTSGDYRKVLLVLCGGDD

SEQ ID NO: 5417 - protein, 299 aa, Homo sapiens
  Payload ID: 1176;
  Gene Symbol: ANXA4;
  Gene Name: annexin A4;
  ENSP ID: ENSP00000386756
MAMATKGGTVKAASGFNAMEDAQTLRKAMKGLGTDEDAIISVLAYRNTAQRQEIRTAYKSTIGRDLIDDLKSELSGNFEQGAGTDEGCLIEILASRTPEEIRRISQTYQQQYGRSLEDDIRSDTSFMFQRVLVSLSAGGRDEGNYLDDALVRQDAQDLYEAGEKKWGTDEVKFLTVLCSRNRNHLLHVFDEYKRISQKDIEQSIKSETSGSFEDALLAIVKCMRNKSAYFAEKLYKSMKGLGTDDNTLIRVMVSRAEIDMLDIRAHFKRLYGKSLYSFIKGDTSGDYRKVLLVLCGGDD

SEQ ID NO: 5418 - protein, 142 aa, Homo sapiens
  Payload ID: 1176;
  Gene Symbol: ANXA4;
  Gene Name: annexin A4;
  ENSP ID: ENSP00000489316
MAMATKGGTVKAASGFNAMEDAQTLRKAMKGLGTDEDAIISVLAYRNTAQRQEIRTAYKSTIGRDLIDDLKSELSGNFEQGAGTDEGCLIEILASRTPEEIRRISQTYQQQYGRSLEDDIRSDTSFMFQRVLVSLSAVSDCF

SEQ ID NO: 5419 - protein, 7 aa, Homo sapiens
  Payload ID: 1176;
  Gene Symbol: ANXA4;
  Gene Name: annexin A4;
  ENSP ID: ENSP00000489464
  MOD_RES (1)..(1): Any amino acid
XTYQQRT

SEQ ID NO: 5420 - protein, 8 aa, Homo sapiens
  Payload ID: 1176;
  Gene Symbol: ANXA4;
  Gene Name: annexin A4;
  ENSP ID: ENSP00000489490
SQTYQQRT

SEQ ID NO: 5421 - protein, 320 aa, Homo sapiens
  Payload ID: 1177;
  Gene Symbol: ANXA5;
  Gene Name: annexin A5;
  Uniprot ID:  P08758;
  ENSP ID: ENSP00000296511
MAQVLRGTVTDFPGFDERADAETLRKAMKGLGTDEESILTLLTSRSNAQRQEISAAFKTLFGRDLLDDLKSELTGKFEKLIVALMKPSRLYDAYELKHALKGAGTNEKVLTEIIASRTPEELRAIKQVYEEEYGSSLEDDVVGDTSGYYQRMLVVLLQANRDPDAGIDEAQVEQDAQALFQAGELKWGTDEEKFITIFGTRSVSHLRKVFDKYMTISGFQIEETIDRETSGNLEQLLLAVVKSIRSIPAYLAETLYYAMKGAGTDDHTLIRVMVSRSEIDLFNIRKEFRKNFATSLYSMIKGDTSGDYKKALLLLCGEDD

SEQ ID NO: 5422 - protein, 163 aa, Homo sapiens
  Payload ID: 1177;
  Gene Symbol: ANXA5;
  Gene Name: annexin A5;
  ENSP ID: ENSP00000421421
MAQVLRGTVTDFPGFDERADAETLRKAMKGLGTDEESILTLLTSRSNAQRQEISAAFKTLFGRDLLDDLKSELTGKFEKLIVALMKPSRLYDAYELKHALKGAGTNEKVLTEIIASRTPEELRAIKQVYEEEYGSSLEDDVVGDTSGYYQRMLVVLLQVLRGD

SEQ ID NO: 5423 - protein, 260 aa, Homo sapiens
  Payload ID: 1177;
  Gene Symbol: ANXA5;
  Gene Name: annexin A5;
  ENSP ID: ENSP00000424106
MAQDLLDDLKSELTGKFEKLIVALMKPSRLYDAYELKHALKGAGTNEKVLTEIIASRTPEELRAIKQVYEEEYGSSLEDDVVGDTSGYYQRMLVVLLQANRDPDAGIDEAQVEQDAQALFQAGELKWGTDEEKFITIFGTRSVSHLRKVFDKYMTISGFQIEETIDRETSGNLEQLLLAVVKSIRSIPAYLAETLYYAMKGAGTDDHTLIRVMVSRSEIDLFNIRKEFRKNFATSLYSMIKGDTSGDYKKALLLLCGEDD

SEQ ID NO: 5424 - protein, 220 aa, Homo sapiens
  Payload ID: 1177;
  Gene Symbol: ANXA5;
  Gene Name: annexin A5;
  ENSP ID: ENSP00000424199
MAQVLRGTVTDFPGFDERADAETLRKAMKGLEYGSSLEDDVVGDTSGYYQRMLVVLLQANRDPDAGIDEAQVEQDAQALFQAGELKWGTDEEKFITIFGTRSVSHLRKVFDKYMTISGFQIEETIDRETSGNLEQLLLAVVKSIRSIPAYLAETLYYAMKGAGTDDHTLIRVMVSRSEIDLFNIRKEFRKNFATSLYSMIKGDTSGDYKKALLLLCGEDD

SEQ ID NO: 5425 - protein, 35 aa, Homo sapiens
  Payload ID: 1177;
  Gene Symbol: ANXA5;
  Gene Name: annexin A5;
  ENSP ID: ENSP00000427135
MAQVLRGTVTDFPGFDERADAETLRKAMKGLGSSG

SEQ ID NO: 5426 - protein, 673 aa, Homo sapiens
  Payload ID: 1178;
  Gene Symbol: ANXA6;
  Gene Name: annexin A6;
  Uniprot ID:  P08133;
  ENSP ID: ENSP00000346550
MAKPAQGAKYRGSIHDFPGFDPNQDAEALYTAMKGFGSDKEAILDIITSRSNRQRQEVCQSYKSLYGKDLIADLKYELTGKFERLIVGLMRPPAYCDAKEIKDAISGIGTDEKCLIEILASRTNEQMHQLVAAYKDAYERDLEADIIGDTSGHFQKMLVVLLQGTREEDDVVSEDLVQQDVQDLYEAGELKWGTDEAQFIYILGNRSKQHLRLVFDEYLKTTGKPIEASIRGELSGDFEKLMLAVVKCIRSTPEYFAERLFKAMKGLGTRDNTLIRIMVSRSELDMLDIREIFRTKYEKSLYSMIKNDTSGEYKKTLLKLSGGDDDAAGQFFPEAAQVAYQMWELSAVARVELKGTVRPANDFNPDADAKALRKAMKGLGTDEDTIIDIITHRSNVQRQQIRQTFKSHFGRDLMTDLKSEISGDLARLILGLMMPPAHYDAKQLKKAMEGAGTDEKALIEILATRTNAEIRAINEAYKEDYHKSLEDALSSDTSGHFRRILISLATGHREEGGENLDQAREDAQVAAEILEIADTPSGDKTSLETRFMTILCTRSYPHLRRVFQEFIKMTNYDVEHTIKKEMSGDVRDAFVAIVQSVKNKPLFFADKLYKSMKGAGTDEKTLTRIMVSRSEIDLLNIRREFIEKYDKSLHQAIEGDTSGDFLKALLALCGGED

SEQ ID NO: 5427 - protein, 330 aa, Homo sapiens
  Payload ID: 1178;
  Gene Symbol: ANXA6;
  Gene Name: annexin A6;
  ENSP ID: ENSP00000366980
MAKPAQGAKYRGSIHDFPGFDPNQDAEALYTAMKGFGSDKEAILDIITSRSNRQRQEVCQSYKSLYGKDLMTDLKSEISGDLARLILGLMMPPAHYDAKQLKKAMEGAGTDEKALIEILATRTNAEIRAINEAYKEDYHKSLEDALSSDTSGHFRRILISLATGHREEGGENLDQAREDAQVAAEILEIADTPSGDKTSLETRFMTILCTRSYPHLRRVFQEFIKMTNYDVEHTIKKEMSGDVRDAFVAIVQSVKNKPLFFADKLYKSMKGAGTDEKTLTRIMVSRSEIDLLNIRREFIEKYDKSLHQAIEGDTSGDFLKALLALCGGED

SEQ ID NO: 5428 - protein, 156 aa, Homo sapiens
  Payload ID: 1178;
  Gene Symbol: ANXA6;
  Gene Name: annexin A6;
  ENSP ID: ENSP00000428916
MAKPAQGAKYRGSIHDFPGFDPNQDAEALYTAMKGFGSDKEAILDIITSRSNRQRQEVCQSYKSLYGKDLIADLKYELTGKFERLIVGLMRPPAYCDAKEIKDAISGAGTDEKTLTRIMVSRSEIDLLNIRREFIEKYDKSLHQAIEGDTSGDFLK

SEQ ID NO: 5429 - protein, 460 aa, Homo sapiens
  Payload ID: 1178;
  Gene Symbol: ANXA6;
  Gene Name: annexin A6;
  ENSP ID: ENSP00000430420
MAKPAQGAKYRGSIHDFPGFDPNQDAEALYTAMKGFGSDKEAILDIITSRSNRQRQEVCQSYKSLYGKDLIADLNELDMLDIREIFRTKYEKSLYSMIKNDTSGEYKKTLLKLSGGDDDAAGQFFPEAAQVAYQMWELSAVARVELKGTVRPANDFNPDADAKALRKAMKGLGTDEDTIIDIITHRSNVQRQQIRQTFKSHFGRDLMTDLKSEISGDLARLILGLMMPPAHYDAKQLKKAMEGAGTDEKALIEILATRTNAEIRAINEAYKEDYHKSLEDALSSDTSGHFRRILISLATGHREEGGENLDQAREDAQEIADTPSGDKTSLETRFMTILCTRSYPHLRRVFQEFIKMTNYDVEHTIKKEMSGDVRDAFVAIVQSVKNKPLFFADKLYKSMKGAGTDEKTLTRIMVSRSEIDLLNIRREFIEKYDKSLHQAIEGDTSGDFLKALLALCGGED

SEQ ID NO: 5430 - protein, 150 aa, Homo sapiens
  Payload ID: 1178;
  Gene Symbol: ANXA6;
  Gene Name: annexin A6;
  ENSP ID: ENSP00000430429
MKGFGSDKEAILDIITSRSNRQRQEVCQSYKSLYGKDLIADLKYELTGKFERLIVGLMRPPAYCDAKEIKDAISGIGTDEKCLIEILASRTNEQMHQLVAAYKDAYERDLEADIIGDTSGHFQKMLVVLLQGTREEDDVVSEDLVQQDVQ

SEQ ID NO: 5431 - protein, 641 aa, Homo sapiens
  Payload ID: 1178;
  Gene Symbol: ANXA6;
  Gene Name: annexin A6;
  Uniprot ID:  P08133;
  ENSP ID: ENSP00000430517
MKGFGSDKEAILDIITSRSNRQRQEVCQSYKSLYGKDLIADLKYELTGKFERLIVGLMRPPAYCDAKEIKDAISGIGTDEKCLIEILASRTNEQMHQLVAAYKDAYERDLEADIIGDTSGHFQKMLVVLLQGTREEDDVVSEDLVQQDVQDLYEAGELKWGTDEAQFIYILGNRSKQHLRLVFDEYLKTTGKPIEASIRGELSGDFEKLMLAVVKCIRSTPEYFAERLFKAMKGLGTRDNTLIRIMVSRSELDMLDIREIFRTKYEKSLYSMIKNDTSGEYKKTLLKLSGGDDDAAGQFFPEAAQVAYQMWELSAVARVELKGTVRPANDFNPDADAKALRKAMKGLGTDEDTIIDIITHRSNVQRQQIRQTFKSHFGRDLMTDLKSEISGDLARLILGLMMPPAHYDAKQLKKAMEGAGTDEKALIEILATRTNAEIRAINEAYKEDYHKSLEDALSSDTSGHFRRILISLATGHREEGGENLDQAREDAQVAAEILEIADTPSGDKTSLETRFMTILCTRSYPHLRRVFQEFIKMTNYDVEHTIKKEMSGDVRDAFVAIVQSVKNKPLFFADKLYKSMKGAGTDEKTLTRIMVSRSEIDLLNIRREFIEKYDKSLHQAIEGDTSGDFLKALLALCGGED

SEQ ID NO: 5432 - protein, 129 aa, Homo sapiens
  Payload ID: 1178;
  Gene Symbol: ANXA6;
  Gene Name: annexin A6;
  ENSP ID: ENSP00000430572
MKGFGSDKEAILDIITSRSNRQRQEVCQSYKSLYGKDLIADLKYELTGKFERLIVGLMRPPAYCDAKEIKDAISGIGTDEKCLIEILASRTNEQMHQLVAAYKDAYERDLEADIIGDTSGHFQKMLVVL

SEQ ID NO: 5433 - protein, 95 aa, Homo sapiens
  Payload ID: 1178;
  Gene Symbol: ANXA6;
  Gene Name: annexin A6;
  ENSP ID: ENSP00000430663
MAKPAQGAKYRGSIHDFPGFDPNQDAEALYTAMKGFGSDKEAILDIITSRSNRQRQEVCQSYKSLYGKDLIADLKYELTGKFERLIVGGLSDVGT

SEQ ID NO: 5434 - protein, 129 aa, Homo sapiens
  Payload ID: 1178;
  Gene Symbol: ANXA6;
  Gene Name: annexin A6;
  ENSP ID: ENSP00000430826
MAKPAQGAKYRGSIHDFPGFDPNQDAEALYTAMKGFGSDKEAILDIITSRSNRQRQEVCQSYKSLYGKDLIADLKYELTGKFERLIVGLMRPPAYCDAKEIKDAISGIGTDEKCLIEILASRTYTRQGN

SEQ ID NO: 5435 - protein, 110 aa, Homo sapiens
  Payload ID: 1178;
  Gene Symbol: ANXA6;
  Gene Name: annexin A6;
  ENSP ID: ENSP00000431078
MAKPAQGAKYRGSIHDFPGFDPNQDAEALYTAMKGFGSDKEAILDIITSRSNRQRQEVCQSYKSLYGKDLIADLKYELTGKFERLIVGLMRPPAYCDAKEIKDAISGIGT

SEQ ID NO: 5436 - protein, 91 aa, Homo sapiens
  Payload ID: 1178;
  Gene Symbol: ANXA6;
  Gene Name: annexin A6;
  ENSP ID: ENSP00000431086
  MOD_RES (1)..(1): Any amino acid
XADKLYKSMKGAGTDEKTLTRIMVSRSEIDLLNIRREFIEKYDKSLHQAIEGDTSGDFLKALLALCGGRARVLDQEFGCLGSNLHLPCTCF

SEQ ID NO: 5437 - protein, 488 aa, Homo sapiens
  Payload ID: 1179;
  Gene Symbol: ANXA7;
  Gene Name: annexin A7;
  Uniprot ID:  P20073;
  ENSP ID: ENSP00000362010
MSYPGYPPTGYPPFPGYPPAGQESSFPPSGQYPYPSGFPPMGGGAYPQVPSSGYPGAGGYPAPGGYPAPGGYPGAPQPGGAPSYPGVPPGQGFGVPPGGAGFSGYPQPPSQSYGGGPAQVPLPGGFPGGQMPSQYPGGQPTYPSQINTDSFSSYPVFSPVSLDYSSEPATVTQVTQGTIRPAANFDAIRDAEILRKAMKGFGTDEQAIVDVVANRSNDQRQKIKAAFKTSYGKDLIKDLKSELSGNMEELILALFMPPTYYDAWSLRKAMQGAGTQERVLIEILCTRTNQEIREIVRCYQSEFGRDLEKDIRSDTSGHFERLLVSMCQGNRDENQSINHQMAQEDAQRLYQAGEGRLGTDESCFNMILATRSFPQLRATMEAYSRMANRDLLSSVSREFSGYVESGLKTILQCALNRPAFFAERLYYAMKGAGTDDSTLVRIVVTRSEIDLVQIKQMFAQMYQKTLGTMIAGDTSGDYRRLLLAIVGQ

SEQ ID NO: 5438 - protein, 466 aa, Homo sapiens
  Payload ID: 1179;
  Gene Symbol: ANXA7;
  Gene Name: annexin A7;
  Uniprot ID:  P20073;
  ENSP ID: ENSP00000362012
MSYPGYPPTGYPPFPGYPPAGQESSFPPSGQYPYPSGFPPMGGGAYPQVPSSGYPGAGGYPAPGGYPAPGGYPGAPQPGGAPSYPGVPPGQGFGVPPGGAGFSGYPQPPSQSYGGGPAQVPLPGGFPGGQMPSQYPGGQPTYPSQPATVTQVTQGTIRPAANFDAIRDAEILRKAMKGFGTDEQAIVDVVANRSNDQRQKIKAAFKTSYGKDLIKDLKSELSGNMEELILALFMPPTYYDAWSLRKAMQGAGTQERVLIEILCTRTNQEIREIVRCYQSEFGRDLEKDIRSDTSGHFERLLVSMCQGNRDENQSINHQMAQEDAQRLYQAGEGRLGTDESCFNMILATRSFPQLRATMEAYSRMANRDLLSSVSREFSGYVESGLKTILQCALNRPAFFAERLYYAMKGAGTDDSTLVRIVVTRSEIDLVQIKQMFAQMYQKTLGTMIAGDTSGDYRRLLLAIVGQ

SEQ ID NO: 5439 - protein, 144 aa, Homo sapiens
  Payload ID: 1179;
  Gene Symbol: ANXA7;
  Gene Name: annexin A7;
  ENSP ID: ENSP00000378317
MSYPGYPPTGYPPFPGYPPAGQESSFPPSGQYPYPSGFPPMGGGAYPQVPSSGYPGAGGYPAPGGYPAPGGYPGAPQPGGAPSYPGVPPGQGFGVPPGGAGFSGYPQPPSQSYGGGPAQVPLPGGFPGGQMPSQYPGGQPTYPS

SEQ ID NO: 5440 - protein, 21 aa, Homo sapiens
  Payload ID: 1180;
  Gene Symbol: ANXA8;
  Gene Name: annexin A8;
  ENSP ID: ENSP00000462181
MAWWKSWDSGILPLRNALLLG

SEQ ID NO: 5441 - protein, 327 aa, Homo sapiens
  Payload ID: 1180;
  Gene Symbol: ANXA8;
  Gene Name: annexin A8;
  Uniprot ID:  P13928;
  ENSP ID: ENSP00000462880
MAWWKSWIEQEGVTVKSSSHFNPDPDAETLYKAMKGIGTNEQAIIDVLTKRSNTQRQQIAKSFKAQFGKDLTETLKSELSGKFERLIVALMYPPYRYEAKELHDAMKGLGTKEGVIIEILASRTKNQLREIMKAYEEDYGSSLEEDIQADTSGYLERILVCLLQGSRDDVSSFVDPGLALQDAQDLYAAGEKIRGTDEMKFITILCTRSATHLLRVFEEYEKIANKSIEDSIKSETHGSLEEAMLTVVKCTQNLHSYFAERLYYAMKGAGTRDGTLIRNIVSRSEIDLNLIKCHFKKMYGKTLSSMIMEDTSGDYKNALLSLVGSDP

SEQ ID NO: 5442 - protein, 265 aa, Homo sapiens
  Payload ID: 1180;
  Gene Symbol: ANXA8;
  Gene Name: annexin A8;
  Uniprot ID:  P13928;
  ENSP ID: ENSP00000463091
MAWWKSWDLTETLKSELSGKFERLIVALMYPPYRYEAKELHDAMKGLGTKEGVIIEILASRTKNQLREIMKAYEEDYGSSLEEDIQADTSGYLERILVCLLQGSRDDVSSFVDPGLALQDAQDLYAAGEKIRGTDEMKFITILCTRSATHLLRVFEEYEKIANKSIEDSIKSETHGSLEEAMLTVVKCTQNLHSYFAERLYYAMKGAGTRDGTLIRNIVSRSEIDLNLIKCHFKKMYGKTLSSMIMEDTSGDYKNALLSLVGSDP

SEQ ID NO: 5443 - protein, 141 aa, Homo sapiens
  Payload ID: 1180;
  Gene Symbol: ANXA8;
  Gene Name: annexin A8;
  Uniprot ID:  P13928;
  ENSP ID: ENSP00000463244
MAWWKSWIEQEGVTVKSSSHFNPDPDAETLYKAMKGIGTNEQAIIDVLTKRSNTQRQQIAKSFKAQFGKDLTETLKSELSGKFERLIVALMYPPYRYEAKELHDAMKGLGTKEGVIIEILASRTKNQLREIMKAYEEGQQG

SEQ ID NO: 5444 - protein, 276 aa, Homo sapiens
  Payload ID: 1180;
  Gene Symbol: ANXA8;
  Gene Name: annexin A8;
  ENSP ID: ENSP00000464486
MAWWKSWIEQEGVTVKSSSHFNPDPDAETLYKAMKGIGVGSQLLSHQAAAFAFPSSALTSVSPWGQQGHLCCNPAGTNEQAIIDVLTKRSNTQRQQIAKSFKAQFGKDLTETLKSELSGKFERLIVALMYPPYRYEAKELHDAMKGSRDDVSSFVDPGLALQDAQDLYAAGEKIRGTDEMKFITILCTRSATHLLRVKCTQNLHSYFAERLYYAMKGAGTRDGTLIRNIVSRSEIDLNLIKCHFKKMYGKTLSSMIMEDTSGDYKNALLSLVGSDP

SEQ ID NO: 5445 - protein, 365 aa, Homo sapiens
  Payload ID: 1180;
  Gene Symbol: ANXA8;
  Gene Name: annexin A8;
  ENSP ID: ENSP00000478026
MAWWKSWIEQEGVTVKSSSHFNPDPDAETLYKAMKGIGVGSQLLSHQAAAFAFPSSALTSVSPWGQQGHLCCNPAGTNEQAIIDVLTKRSNTQRQQIAKSFKAQFGKDLTETLKSELSGKFERLIVALMYPPYRYEAKELHDAMKGLGTKEGVIIEILASRTKNQLREIMKAYEEDYGSSLEEDIQADTSGYLERILVCLLQGSRDDVSSFVDPGLALQDAQDLYAAGEKIRGTDEMKFITILCTRSATHLLRVFEEYEKIANKSIEDSIKSETHGSLEEAMLTVVKCTQNLHSYFAERLYYAMKGAGTRDGTLIRNIVSRSEIDLNLIKCHFKKMYGKTLSSMIMEDTSGDYKNALLSLVGSDP

SEQ ID NO: 5446 - protein, 365 aa, Homo sapiens
  Payload ID: 1181;
  Gene Symbol: ANXA8L1;
  Gene Name: annexin A8-like 1;
  ENSP ID: ENSP00000462716
MAWWKAWIEQEGVTVKSSSHFNPDPDAETLYKAMKGIGVGSQLLSHQAAAFAFPSSALTSVSPWGQQGHLCCNPAGTNEQAIIDVLTKRSNTQRQQIAKSFKAQFGKDLTETLKSELSGKFERLIVALMYPPYRYEAKELHDAMKGLGTKEGVIIEILASRTKNQLREIMKAYEEDYGSSLEEDIQADTSGYLERILVCLLQGSRDDVSSFVDPALALQDAQDLYAAGEKIRGTDEMKFITILCTRSATHLLRVFEEYEKIANKSIEDSIKSETHGSLEEAMLTVVKCTQNLHSYFAERLYYAMKGAGTRDGTLIRNIVSRSEIDLNLIKCHFKKMYGKTLSSMIMEDTSGDYKNALLSLVGSDP

SEQ ID NO: 5447 - protein, 265 aa, Homo sapiens
  Payload ID: 1181;
  Gene Symbol: ANXA8L1;
  Gene Name: annexin A8-like 1;
  ENSP ID: ENSP00000478808
MAWWKAWDLTETLKSELSGKFERLIVALMYPPYRYEAKELHDAMKGLGTKEGVIIEILASRTKNQLREIMKAYEEDYGSSLEEDIQADTSGYLERILVCLLQGSRDDVSSFVDPALALQDAQDLYAAGEKIRGTDEMKFITILCTRSATHLLRVFEEYEKIANKSIEDSIKSETHGSLEEAMLTVVKCTQNLHSYFAERLYYAMKGAGTRDGTLIRNIVSRSEIDLNLIKCHFKKMYGKTLSSMIMEDTSGDYKNALLSLVGSDP

SEQ ID NO: 5448 - protein, 327 aa, Homo sapiens
  Payload ID: 1181;
  Gene Symbol: ANXA8L1;
  Gene Name: annexin A8-like 1;
  Uniprot ID:  Q5VT79;
  ENSP ID: ENSP00000480221
MAWWKAWIEQEGVTVKSSSHFNPDPDAETLYKAMKGIGTNEQAIIDVLTKRSNTQRQQIAKSFKAQFGKDLTETLKSELSGKFERLIVALMYPPYRYEAKELHDAMKGLGTKEGVIIEILASRTKNQLREIMKAYEEDYGSSLEEDIQADTSGYLERILVCLLQGSRDDVSSFVDPALALQDAQDLYAAGEKIRGTDEMKFITILCTRSATHLLRVFEEYEKIANKSIEDSIKSETHGSLEEAMLTVVKCTQNLHSYFAERLYYAMKGAGTRDGTLIRNIVSRSEIDLNLIKCHFKKMYGKTLSSMIMEDTSGDYKNALLSLVGSDP

SEQ ID NO: 5449 - protein, 276 aa, Homo sapiens
  Payload ID: 1181;
  Gene Symbol: ANXA8L1;
  Gene Name: annexin A8-like 1;
  Uniprot ID:  Q5VT79;
  ENSP ID: ENSP00000483608
MAWWKAWIEQEGVTVKSSSHFNPDPDAETLYKAMKGIGVGSQLLSHQAAAFAFPSSALTSVSPWGQQGHLCCNPAGTNEQAIIDVLTKRSNTQRQQIAKSFKAQFGKDLTETLKSELSGKFERLIVALMYPPYRYEAKELHDAMKGSRDDVSSFVDPALALQDAQDLYAAGEKIRGTDEMKFITILCTRSATHLLRVKCTQNLHSYFAERLYYAMKGAGTRDGTLIRNIVSRSEIDLNLIKCHFKKMYGKTLSSMIMEDTSGDYKNALLSLVGSDP

SEQ ID NO: 5450 - protein, 270 aa, Homo sapiens
  Payload ID: 1181;
  Gene Symbol: ANXA8L1;
  Gene Name: annexin A8-like 1;
  ENSP ID: ENSP00000484310
MAWWKAWIEQEGVTVKSSSHFNPDPDAETLYKAMKGIGTNEQAIIDVLTKRSNTQRQQIAKSFKAQFGKDLTETLKSELSGKFERLIVALMYPPYRYEAKELHDAMKGSRDDVSSFVDPALALQDAQDLYAAGEKIRGTDEMKFITILCTRSATHLLRVFEEYEKIANKSIEDSIKSETHGSLEEAMLTVVKCTQNLHSYFAERLYYAMKGAGTRDGTLIRNIVSRSEIDLNLIKCHFKKMYGKTLSSMIMEDTSGDYKNALLSLVGSDP

SEQ ID NO: 5451 - protein, 345 aa, Homo sapiens
  Payload ID: 1182;
  Gene Symbol: ANXA9;
  Gene Name: annexin A9;
  Uniprot ID:  O76027;
  ENSP ID: ENSP00000357943
MSVTGGKMAPSLTQEILSHLGLASKTAAWGTLGTLRTFLNFSVDKDAQRLLRAITGQGVDRSAIVDVLTNRSREQRQLISRNFQERTQQDLMKSLQAALSGNLERIVMALLQPTAQFDAQELRTALKASDSAVDVAIEILATRTPPQLQECLAVYKHNFQVEAVDDITSETSGILQDLLLALAKGGRDSYSGIIDYNLAEQDVQALQRAEGPSREETWVPVFTQRNPEHLIRVFDQYQRSTGQELEEAVQNRFHGDAQVALLGLASVIKNTPLYFADKLHQALQETEPNYQVLIRILISRCETDLLSIRAEFRKKFGKSLYSSLQDAVKGDCQSALLALCRAEDM

SEQ ID NO: 5452 - protein, 642 aa, Homo sapiens
  Payload ID: 1183;
  Gene Symbol: ANO1;
  Gene Name: anoctamin 1, calcium activated chloride channel;
  Uniprot ID:  Q5XXA6;
  ENSP ID: ENSP00000319477
MLTRPSQVLLNSLSVDPDAECKYGLYFRDGRRKVDYILVYHHKRPSGNRTLVRRVQHSDTPSGARSVKQDHPLPGKGASLDAGSGEPPMDYHEDDKRFRREEYEGNLLEAGLELERDEDTKIHGVGFVKIHAPWNVLCREAEFLKLKMPTKKMYHINETRGLLKKINSVLQKITDPIQPKVAEHRPQTMKRLSYPFSREKQHLFDLSDKDSFFDSKTRSTIVYEILKRTTCTKAKYSMGITSLLANGVYAAAYPLHDGDYNGENVEFNDRKLLYEEWARYGVFYKYQPIDLVRKYFGEKIGLYFAWLGVYTQMLIPASIVGIIVFLYGCATMDENIPSMEMCDQRHNITMCPLCDKTCSYWKMSSACATARASHLFDNPATVFFSVFMALWAATFMEHWKRKQMRLNYRWDLTGFEEEEDHPRAEYEARVLEKSLKKESRNKETDKVKLTWRDRFPAYLTNLVSIIFMIAVTFAIVLGVIIYRISMAAALAMNSSPSVRSNIRVTVTATAVIINLVVIILLDEVYGCIARWLTKIEVPKTEKSFEERLIFKAFLLKFVNSYTPIFYVAFFKGRFVGRPGDYVYIFRSFRMEEVTEILFISGSPFCLAYDLSTPCTWEKQLQHICSAKSSRFLSFLLETFLFP

SEQ ID NO: 5453 - protein, 986 aa, Homo sapiens
  Payload ID: 1183;
  Gene Symbol: ANO1;
  Gene Name: anoctamin 1, calcium activated chloride channel;
  Uniprot ID:  Q5XXA6;
  ENSP ID: ENSP00000347454
MRVNEKYSTLPAEDRSVHIINICAIEDIGYLPSEGTLLNSLSVDPDAECKYGLYFRDGRRKVDYILVYHHKRPSGNRTLVRRVQHSDTPSGARSVKQDHPLPGKGASLDAGSGEPPMDYHEDDKRFRREEYEGNLLEAGLELERDEDTKIHGVGFVKIHAPWNVLCREAEFLKLKMPTKKMYHINETRGLLKKINSVLQKITDPIQPKVAEHRPQTMKRLSYPFSREKQHLFDLSDKDSFFDSKTRSTIVYEILKRTTCTKAKYSMGITSLLANGVYAAAYPLHDGDYNGENVEFNDRKLLYEEWARYGVFYKYQPIDLVRKYFGEKIGLYFAWLGVYTQMLIPASIVGIIVFLYGCATMDENIPSMEMCDQRHNITMCPLCDKTCSYWKMSSACATARASHLFDNPATVFFSVFMALWAATFMEHWKRKQMRLNYRWDLTGFEEEEEAVKDHPRAEYEARVLEKSLKKESRNKEKRRHIPEESTNKWKQRVKTAMAGVKLTDKVKLTWRDRFPAYLTNLVSIIFMIAVTFAIVLGVIIYRISMAAALAMNSSPSVRSNIRVTVTATAVIINLVVIILLDEVYGCIARWLTKIEVPKTEKSFEERLIFKAFLLKFVNSYTPIFYVAFFKGRFVGRPGDYVYIFRSFRMEECAPGGCLMELCIQLSIIMLGKQLIQNNLFEIGIPKMKKLIRYLKLKQQSPPDHEECVKRKQRYEVDYNLEPFAGLTPEYMEMIIQFGFVTLFVASFPLAPLFALLNNIIEIRLDAKKFVTELRRPVAVRAKDIGIWYNILRGIGKLAVIINAFVISFTSDFIPRLVYLYMYSKNGTMHGFVNHTLSSFNVSDFQNGTAPNDPLDLGYEVQICRYKDYREPPWSENKYDISKDFWAVLAARLAFVIVFQNLVMFMSDFVDWVIPDIPKDISQQIHKEKVLMVELFMREEQDKQQLLETWMEKERQKDEPPCNHHNTKACPDSLGSPAPSHAYHGGVL

SEQ ID NO: 5454 - protein, 695 aa, Homo sapiens
  Payload ID: 1183;
  Gene Symbol: ANO1;
  Gene Name: anoctamin 1, calcium activated chloride channel;
  ENSP ID: ENSP00000432843
MGITSLLANGVYAAAYPLHDGDYNGENVEFNDRKLLYEEWARYGVFYKYQPIDLVRKYFGEKIGLYFAWLGVYTQMLIPASIVGIIVFLYGCATMDENIPSMEMCDQRHNITMCPLCDKTCSYWKMSSACATARASHLFDNPATVFFSVFMALWAATFMEHWKRKQMRLNYRWDLTGFEEEEEAVKDHPRAEYEARVLEKSLKKESRNKETDKVKLTWRDRFPAYLTNLVSIIFMIAVTFAIVLGVIIYRISMAAALAMNSSPSVRSNIRVTVTATAVIINLVVIILLDEVYGCIARWLTKIEVPKTEKSFEERLIFKAFLLKFVNSYTPIFYVAFFKGRFVGRPGDYVYIFRSFRMEECAPGGCLMELCIQLSIIMLGKQLIQNNLFEIGIPKMKKLIRYLKLKQQSPPDHEECVKRKQRYEVDYNLEPFAGLTPEYMEMIIQFGFVTLFVASFPLAPLFALLNNIIEIRLDAKKFVTELRRPVAVRAKDIGIWYNILRGIGKLAVIINAFVISFTSDFIPRLVYLYMYSKNGTMHGFVNHTLSSFNVSDFQNGTAPNDPLDLGYEVQICRYKDYREPPWSENKYDISKDFWAVLAARLAFVIVFQNLVMFMSDFVDWVIPDIPKDISQQIHKEKVLMVELFMREEQDKQQLLETWMEKERQKDEPPCNHHNTKACPDSLGSPAPSHAYHGGVL

SEQ ID NO: 5455 - protein, 269 aa, Homo sapiens
  Payload ID: 1183;
  Gene Symbol: ANO1;
  Gene Name: anoctamin 1, calcium activated chloride channel;
  ENSP ID: ENSP00000433445
  MOD_RES (1)..(1): Any amino acid
XHAPWNVLCREAEFLKLKMPTKKMYHINETRGLLKKINSVLQKITDPIQPKVAEHRPQTMKRLSYPFSREKQHLFDLSDKDSFFDSKTRSTIVYEILKRTTCTKAKYSMGQGEGRKKDSALLSKRRKCGKYGITSLLANGVYAAAYPLHDGDYNGENVEFNDRKLLYEEWARYGVFYKYQPIDLVRKYFGEKIGLYFAWLGVYTQMLIPASIVGIIVFLYGCATMDENIPSMEMCDQRHNITMCPLCDKTCSYWKMSSACATARASHLF

SEQ ID NO: 5456 - protein, 840 aa, Homo sapiens
  Payload ID: 1183;
  Gene Symbol: ANO1;
  Gene Name: anoctamin 1, calcium activated chloride channel;
  Uniprot ID:  Q5XXA6;
  ENSP ID: ENSP00000435797
MDYHEDDKRFRREEYEGNLLEAGLELERDEDTKIHGVGFVKIHAPWNVLCREAEFLKLKMPTKKMYHINETRGLLKKINSVLQKITDPIQPKVAEHRPQTMKRLSYPFSREKQHLFDLSDKDSFFDSKTRSTIVYEILKRTTCTKAKYSMGITSLLANGVYAAAYPLHDGDYNGENVEFNDRKLLYEEWARYGVFYKYQPIDLVRKYFGEKIGLYFAWLGVYTQMLIPASIVGIIVFLYGCATMDENIPSMEMCDQRHNITMCPLCDKTCSYWKMSSACATARASHLFDNPATVFFSVFMALWAATFMEHWKRKQMRLNYRWDLTGFEEEEDHPRAEYEARVLEKSLKKESRNKETDKVKLTWRDRFPAYLTNLVSIIFMIAVTFAIVLGVIIYRISMAAALAMNSSPSVRSNIRVTVTATAVIINLVVIILLDEVYGCIARWLTKIEVPKTEKSFEERLIFKAFLLKFVNSYTPIFYVAFFKGRFVGRPGDYVYIFRSFRMEECAPGGCLMELCIQLSIIMLGKQLIQNNLFEIGIPKMKKLIRYLKLKQQSPPDHEECVKRKQRYEVDYNLEPFAGLTPEYMEMIIQFGFVTLFVASFPLAPLFALLNNIIEIRLDAKKFVTELRRPVAVRAKDIGIWYNILRGIGKLAVIINAFVISFTSDFIPRLVYLYMYSKNGTMHGFVNHTLSSFNVSDFQNGTAPNDPLDLGYEVQICRYKDYREPPWSENKYDISKDFWAVLAARLAFVIVFQNLVMFMSDFVDWVIPDIPKDISQQIHKEKVLMVELFMREEQDKQQLLETWMEKERQKDEPPCNHHNTKACPDSLGSPAPSHAYHGGVL

SEQ ID NO: 5457 - protein, 151 aa, Homo sapiens
  Payload ID: 1183;
  Gene Symbol: ANO1;
  Gene Name: anoctamin 1, calcium activated chloride channel;
  ENSP ID: ENSP00000435868
MEHWKRKQMRLNYRWDLTGFEEEEEAVKDHPRAEYEARVLEKSLKKESRNKETDKVKLTWRDRFPAYLTNLVSIIFMIAVTFAIVLGVIIYRISMAAALAMNSSPSVRSNIRVTVTATAVIINLVVIILLDEVYGCIARWLTKIEVPKTEK

SEQ ID NO: 5458 - protein, 251 aa, Homo sapiens
  Payload ID: 1183;
  Gene Symbol: ANO1;
  Gene Name: anoctamin 1, calcium activated chloride channel;
  ENSP ID: ENSP00000436392
MRVNEKYSTLPAEDRSVHIINICAIEDIGYLPSEGTLLNSLSVDPDAECKYGLYFRDGRRKVDYILVYHHKRPSGNRTLVRRVQHSDTPSGARSVKQDHPLPGKGASLDAGSGEPPMDYHEDDKRFRREEYEGNLLEAGLELERDEDMYHINETRGLLKKINSVLQKITDPIQPKVAEHRPQTMKRLSYPFSREKQHLFDLSDKDSFFDSKTRSTIVYEILKRTTCTKAKYSMGITSLLANGVYAAAYPLH

SEQ ID NO: 5459 - protein, 660 aa, Homo sapiens
  Payload ID: 1184;
  Gene Symbol: ANO10;
  Gene Name: anoctamin 10;
  Uniprot ID:  Q9NW15;
  ENSP ID: ENSP00000292246
MKVTLSALDTSESSFTPLVVIELAQDVKEETKEWLKNRIIAKKKDGGAQLLFRPLLNKYEQETLENQNLYLVGASKIRMLLGAEAVGLVKECNDNTMRAFTYRTRQNFKGFDDNNDDFLTMAECQFIIKHELENLRAKDEKMIPGYPQAKLYPGKSLLRRLLTSGIVIQVFPLHDSEALKKLEDTWYTRFALKYQPIDSIRGYFGETIALYFGFLEYFTFALIPMAVIGLPYYLFVWEDYDKYVIFASFNLIWSTVILELWKRGCANMTYRWGTLLMKRKFEEPRPGFHGVLGINSITGKEEPLYPSYKRQLRIYLVSLPFVCLCLYFSLYVMMIYFDMEVWALGLHENSGSEWTSVLLYVPSIIYAIVIEIMNRLYRYAAEFLTSWENHRLESAYQNHLILKVLVFNFLNCFASLFYIAFVLKDMKLLRQSLATLLITSQILNQIMESFLPYWLQRKHGVRVKRKVQALKADIDATLYEQVILEKEMGTYLGTFDDYLELFLQFGYVSLFSCVYPLAAAFAVLNNFTEVNSDALKMCRVFKRPFSEPSANIGVWQLAFETMSVISVVTNCALIGMSPQVNAVFPESKADLILIVVAVEHALLALKFILAFAIPDKPRHIQMKLARLEFESLEALKQQQMKLVTENLKEEPMESGKEKAT

SEQ ID NO: 5460 - protein, 470 aa, Homo sapiens
  Payload ID: 1184;
  Gene Symbol: ANO10;
  Gene Name: anoctamin 10;
  Uniprot ID:  Q9NW15;
  ENSP ID: ENSP00000327767
MKVTLSALDTSESSFTPLVVIELAQDVKEETKEWLKNRIIAKKKDGGAQLLFRPLLNKYEQETLENQNLYLVGASKIRMLLGAEAVGLVKECNDNTMRAFTYRTRQNFKGFDDNNDDFLTMAECQFIIKHELENLRAKDEKMIPGYPQAKLYPGKSLLRRLLTSGIVIQVFPLHDSEALKKLEDTWYTRFALKYQPIENHRLESAYQNHLILKVLVFNFLNCFASLFYIAFVLKDMKLLRQSLATLLITSQILNQIMESFLPYWLQRKHGVRVKRKVQALKADIDATLYEQVILEKEMGTYLGTFDDYLELFLQFGYVSLFSCVYPLAAAFAVLNNFTEVNSDALKMCRVFKRPFSEPSANIGVWQLAFETMSVISVVTNCALIGMSPQVNAVFPESKADLILIVVAVEHALLALKFILAFAIPDKPRHIQMKLARLEFESLEALKQQQMKLVTENLKEEPMESGKEKAT

SEQ ID NO: 5461 - protein, 594 aa, Homo sapiens
  Payload ID: 1184;
  Gene Symbol: ANO10;
  Gene Name: anoctamin 10;
  Uniprot ID:  Q9NW15;
  ENSP ID: ENSP00000379398
MKVTLSALDTSESSFTPLVVIELAQDVKEETKEWLKNRIIAKKKDGDNNDDFLTMAECQFIIKHELENLRAKDEKMIPGYPQAKLYPGKSLLRRLLTSGIVIQVFPLHDSEALKKLEDTWYTRFALKYQPIDSIRGYFGETIALYFGFLEYFTFALIPMAVIGLPYYLFVWEDYDKYVIFASFNLIWSTVILELWKRGCANMTYRWGTLLMKRKFEEPRPGFHGVLGINSITGKEEPLYPSYKRQLRIYLVSLPFVCLCLYFSLYVMMIYFDMEVWALGLHENSGSEWTSVLLYVPSIIYAIVIEIMNRLYRYAAEFLTSWENHRLESAYQNHLILKVLVFNFLNCFASLFYIAFVLKDMKLLRQSLATLLITSQILNQIMESFLPYWLQRKHGVRVKRKVQALKADIDATLYEQVILEKEMGTYLGTFDDYLELFLQFGYVSLFSCVYPLAAAFAVLNNFTEVNSDALKMCRVFKRPFSEPSANIGVWQLAFETMSVISVVTNCALIGMSPQVNAVFPESKADLILIVVAVEHALLALKFILAFAIPDKPRHIQMKLARLEFESLEALKQQQMKLVTENLKEEPMESGKEKAT

SEQ ID NO: 5462 - protein, 549 aa, Homo sapiens
  Payload ID: 1184;
  Gene Symbol: ANO10;
  Gene Name: anoctamin 10;
  Uniprot ID:  Q9NW15;
  ENSP ID: ENSP00000394119
MKVTLSALDTSESSFTPLVVIELAQDVKEETKEWLKNRIIAKKKDGVRRLLTSGIVIQVFPLHDSEALKKLEDTWYTRFALKYQPIDSIRGYFGETIALYFGFLEYFTFALIPMAVIGLPYYLFVWEDYDKYVIFASFNLIWSTVILELWKRGCANMTYRWGTLLMKRKFEEPRPGFHGVLGINSITGKEEPLYPSYKRQLRIYLVSLPFVCLCLYFSLYVMMIYFDMEVWALGLHENSGSEWTSVLLYVPSIIYAIVIEIMNRLYRYAAEFLTSWENHRLESAYQNHLILKVLVFNFLNCFASLFYIAFVLKDMKLLRQSLATLLITSQILNQIMESFLPYWLQRKHGVRVKRKVQALKADIDATLYEQVILEKEMGTYLGTFDDYLELFLQFGYVSLFSCVYPLAAAFAVLNNFTEVNSDALKMCRVFKRPFSEPSANIGVWQLAFETMSVISVVTNCALIGMSPQVNAVFPESKADLILIVVAVEHALLALKFILAFAIPDKPRHIQMKLARLEFESLEALKQQQMKLVTENLKEEPMESGKEKAT

SEQ ID NO: 5463 - protein, 627 aa, Homo sapiens
  Payload ID: 1184;
  Gene Symbol: ANO10;
  Gene Name: anoctamin 10;
  Uniprot ID:  Q9NW15;
  ENSP ID: ENSP00000396990
MKVTLSALDTSESSFTPLVVIELAQDVKEETKEWLKNRIIAKKKDGGAQLLFRPLLNKYEQETLENQNLYLVGASKIRMLLGAEAVGLVKECNDNTMRAFTYRTRQNFKGFDDNNDDFLTMAECQFIIKHELENLRAKDEKMIPGYPQAKLYPGKSLLRRLLTSGIVIQVFPLHDSEALKKLEDTWYTRFALKYQPIDSIRGYFGETIALYFGFLEYFTFALIPMAVIGLPYYLFVWEDYDKYVIFASFNLIWSTVILELWKRGCANMTYRWGTLLMKRKFEEPRPGFHGVLGINSITGKEEPLYPSYKRQLRIYLVSLPFVCLCLYFSLYVMMIYFDMEVWALGLHENSGSEWTSVLLYVPSIIYAIVIEIMNRLYRYAAEFLTSWENHRLESAYQNHLILKVLVFNFLNCFASLFYIAFVLKDMKLLRQSLATLLITSQILNQIMESFLPYWLQRKHGVRVKRKVQALKADIDATLYEQVILEKEMGTYLGTFDDYLELFLQFGYVSLFSCVYPLAAAFAVLNNFTEVNSDALKMCRVFKRPFSEPSANIGVWQLAFETMSVISVVTNCALIGMSPQVNAVFPESKADLILIVVAVEAASCKLVSLPRYSWSTNSVPGTVIGPGV

SEQ ID NO: 5464 - protein, 134 aa, Homo sapiens
  Payload ID: 1184;
  Gene Symbol: ANO10;
  Gene Name: anoctamin 10;
  ENSP ID: ENSP00000397360
MKVTLSALDTSESSFTPLVVIELAQDVKEETKEWLKNRIIAKKKDGGAQLLFRPLLNKYEQETLENQNLYLVGASKIRMLLGAEAVGLVKECNDNTMRAFTYRTRQNFKGFDDNNDDFLTMAECQFIIKHELEN

SEQ ID NO: 5465 - protein, 140 aa, Homo sapiens
  Payload ID: 1184;
  Gene Symbol: ANO10;
  Gene Name: anoctamin 10;
  ENSP ID: ENSP00000399103
MKVTLSALDTSESSFTPLVVIELAQDVKEETKEWLKNRIIAKKKDGGAQLLFRPLLNKYEQETLENQNLYLVGASKIRMLLGAEAVGLVKECNDNTMRAFTYRTRQNFKGFDDNNDDFLTMAECQFIIKHELENLRAKDE

SEQ ID NO: 5466 - protein, 146 aa, Homo sapiens
  Payload ID: 1184;
  Gene Symbol: ANO10;
  Gene Name: anoctamin 10;
  ENSP ID: ENSP00000402010
MKVTLSALDTSESSFTPLVVIELAQDVKEETKEWLKNRIIAKKKDGGAQLLFRPLLNKYEQETLENQNLYLVGASKIRMLLGAEAVGLVKECNDNTMRAFTYRTRQNFKGFDDNNDDFLTMAECQFIIKHELENLRAKDEKMIPGY

SEQ ID NO: 5467 - protein, 141 aa, Homo sapiens
  Payload ID: 1184;
  Gene Symbol: ANO10;
  Gene Name: anoctamin 10;
  ENSP ID: ENSP00000402845
MKVTLSALDTSESSFTPLVVIELAQDVKEETKEWLKNRIIAKKKDGGAQLLFRPLLNKYEQETLENQNLYLVGASKIRMLLGAEAVGLVKECNDNTMRAFTYRTRQNFKGFDDNNDDFLTMAECQFIIKHELENLRAKDEK

SEQ ID NO: 5468 - protein, 38 aa, Homo sapiens
  Payload ID: 1184;
  Gene Symbol: ANO10;
  Gene Name: anoctamin 10;
  ENSP ID: ENSP00000404988
MKVTLSALDTSESSFTPLVVIELAQDVKEETKEWLKNR

SEQ ID NO: 5469 - protein, 192 aa, Homo sapiens
  Payload ID: 1184;
  Gene Symbol: ANO10;
  Gene Name: anoctamin 10;
  ENSP ID: ENSP00000406432
MKVTLSALDTSESSFTPLVVIELAQDVKEETKEWLKNRIIAKKKDGGAQLLFRPLLNKYEQETLENQNLYLVGASKIRMLLGAEAVGLVKECNDNTMRAFTYRTRQNFKGFDDNNDDFLTMAECQFIIKHELENLRAKDEKMIPGYPQAKLYPGKSLFQLPQLLCLTLLYCLCLERYEAFAPELGHSPNYLP

SEQ ID NO: 5470 - protein, 112 aa, Homo sapiens
  Payload ID: 1184;
  Gene Symbol: ANO10;
  Gene Name: anoctamin 10;
  ENSP ID: ENSP00000406712
MKVTLSALDTSESSFTPLVVIELAQDVKEETKEWLKNRIIAKKKDGGAQLLFRPLLNKYEQETLENQNLYLVGASKIRMLLGAEAVGLVKECNDNTMRAFTYRTRQNFKGFD

SEQ ID NO: 5471 - protein, 188 aa, Homo sapiens
  Payload ID: 1184;
  Gene Symbol: ANO10;
  Gene Name: anoctamin 10;
  ENSP ID: ENSP00000412997
  MOD_RES (1)..(1): Any amino acid
XCVYPLAAAFAVLNNFTEVNSDALKMCRVFKRPFSEPSANIGVWQIIFCLDTGVKRGLNCKVMRNLLGEMEMSCVLFVVVVVSQLAFETMSVISVVTNCALIGMSPQVNAVFPESKADLILIVVAVEHALLALKFILAFAIPDKPRHIQMKLARLEFESLEALKQQQMKLVTENLKEEPMESGKEKAT

SEQ ID NO: 5472 - protein, 162 aa, Homo sapiens
  Payload ID: 1184;
  Gene Symbol: ANO10;
  Gene Name: anoctamin 10;
  ENSP ID: ENSP00000416266
MKVTLSALDTSESSFTPLVVIELAQDVKEETKEWLKNRIIAKKKDGVRRLLTSGIVIQVFPLHDSEALKKLEDTWYTRFALKYQPIDSIRGYFGETIALYFGFLEYFTFALIPMAVIGLPYYLFVWEDYDKYVIFASFNLIWSTVILELWKRGCANMTYRWG

SEQ ID NO: 5473 - protein, 999 aa, Homo sapiens
  Payload ID: 1185;
  Gene Symbol: ANO2;
  Gene Name: anoctamin 2, calcium activated chloride channel;
  Uniprot ID:  Q9NQ90;
  ENSP ID: ENSP00000314048
MPEDIPLLPGSPRRLSPQAGSRGGQGPKHGQQCLKMPGPRAPGLQGGSNRDPGQPCGGESTRSSSVINNYLDANEPVSLEARLSRMHFHDSQRKVDYVLAYHYRKRGVHLAQGFPGHSLAIVSNGETGKEPHAGGPGDIELGPLDALEEERKEQREEFEHNLMEAGLELEKDLENKSQGSIFVRIHAPWQVLAREAEFLKIKVPTKKEMYEIKAGGSIAKKFSAALQKLSSHLQPRVPEHSNNKMKNLSYPFSREKMYLYNIQEKDTFFDNATRSRIVHEILKRTACSRANNTMGINSLIANNIYEAAYPLHDGEYDSPEDDMNDRKLLYQEWARYGVFYKFQPIDLIRKYFGEKIGLYFAWLGLYTSFLIPSSVIGVIVFLYGCATIEEDIPSREMCDQQNAFTMCPLCDKSCDYWNLSSACGTAQASHLFDNPATVFFSIFMALWATMFLENWKRLQMRLGYFWDLTGIEEEEERAQEHSRPEYETKVREKMLKESNQSAVQKLETNTTECGDEDDEDKLTWKDRFPGYLMNFASILFMIALTFSIVFGVIVYRITTAAALSLNKATRSNVRVTVTATAVIINLVVILILDEIYGAVAKWLTKIEVPKTEQTFEERLILKAFLLKFVNAYSPIFYVAFFKGRFVGRPGSYVYVFDGYRMEECAPGGCLMELCIQLSIIMLGKQLIQNNIFEIGVPKLKKLFRKLKDETEAGETDSAHSKHPEQWDLDYSLEPYTGLTPEYMEMIIQFGFVTLFVASFPLAPVFALLNNVIEVRLDAKKFVTELRRPDAVRTKDIGIWFDILSGIGKFSVISNAFVIAITSDFIPRLVYQYSYSHNGTLHGFVNHTLSFFNVSQLKEGTQPENSQFDQEVQFCRFKDYREPPWAPNPYEFSKQYWFILSARLAFVIIFQNLVMFLSVLVDWMIPDIPTDISDQIKKEKSLLVDFFLKEEHEKLKLMDEPALRSPGGGDRSRSRAASSAPSGQSQLGSMMSSGSQHTNV

SEQ ID NO: 5474 - protein, 999 aa, Homo sapiens; identical to SEQ ID NO: 5473
  Payload ID: 1185;
  Gene Symbol: ANO2;
  Gene Name: anoctamin 2, calcium activated chloride channel;
  Uniprot ID:  Q9NQ90;
  ENSP ID: ENSP00000348453

SEQ ID NO: 5475 - protein, 1003 aa, Homo sapiens
  Payload ID: 1185;
  Gene Symbol: ANO2;
  Gene Name: anoctamin 2, calcium activated chloride channel;
  ENSP ID: ENSP00000440981
MATPGPRDIPLLPGSPRRLSPQAGSRGGQGPKHGQQCLKMPGPRAPGLQGGSNRDPGQPCGGESTRSSSVINNYLDANEPVSLEARLSRMHFHDSQRKVDYVLAYHYRKRGVHLAQGFPGHSLAIVSNGETGKEPHAGGPGDIELGPLDALEEERKEQREEFEHNLMEAGLELEKDLENKSQGSIFVRIHAPWQVLAREAEFLKIKVPTKKEMYEIKAGGSIAKKFSAALQKLSSHLQPRVPEHSNNKMKNLSYPFSREKMYLYNIQEKDTFFDNATRSRIVHEILKRTACSRANNTMGINSLIANNIYEAAYPLHDGEYDSPEDDMNDRKLLYQEWARYGVFYKFQPIDLIRKYFGEKIGLYFAWLGLYTSFLIPSSVIGVIVFLYGCATIEEDIPSREMCDQQNAFTMCPLCDKSCDYWNLSSACGTAQASHLFDNPATVFFSIFMALWATMFLENWKRLQMRLGYFWDLTGIEEEEVSSQEHSRPEYETKVREKMLKESNQSAVQKLETNTTECGDEDDEDKLTWKDRFPGYLMNFASILFMIALTFSIVFGVIVYRITTAAALSLNKATRSNVRVTVTATAVIINLVVILILDEIYGAVAKWLTKIEVPKTEQTFEERLILKAFLLKFVNAYSPIFYVAFFKGRFVGRPGSYVYVFDGYRMEECAPGGCLMELCIQLSIIMLGKQLIQNNIFEIGVPKLKKLFRKLKDETEAGETDSAHSKHPEQWDLDYSLEPYTGLTPEYMEMIIQFGFVTLFVASFPLAPVFALLNNVIEVRLDAKKFVTELRRPDAVRTKDIGIWFDILSGIGKFSVISNAFVIAITSDFIPRLVYQYSYSHNGTLHGFVNHTLSFFNVSQLKEGTQPENSQFDQEVQFCRFKDYREPPWAPNPYEFSKQYWFILSARLAFVIIFQNLVMFLSVLVDWMIPDIPTDISDQIKKEKSLLVDFFLKEEHEKLKLMDEPALRSPGGGDRSRSRAASSAPSGQSQLGSMMSSGSQHTNV

SEQ ID NO: 5476 - protein, 203 aa, Homo sapiens
  Payload ID: 1185;
  Gene Symbol: ANO2;
  Gene Name: anoctamin 2, calcium activated chloride channel;
  ENSP ID: ENSP00000443813
MGWKAESLESATMFLENWKRLQMRLGYFWDLTGIEEEEEHSRPEYETKVREKMLKESNQSAVQKLETNTTECGDEDDEDKLTWKDRFPGYLMNFASILFMIALTFSIVFGVIVYRITTAAALSLNKATRSNVRVTVTATAVIINLVVILILDEIYGAVAKWLTKIEVPKTEQTFEERLILKAFLLKFVNAYSPIFYVAFFKGR

SEQ ID NO: 5477 - protein, 86 aa, Homo sapiens
  Payload ID: 1185;
  Gene Symbol: ANO2;
  Gene Name: anoctamin 2, calcium activated chloride channel;
  ENSP ID: ENSP00000481449
MFLSVLVDWMIPDIPTDISDQIKKEKSLLVDFFLKEEHEKLKLMDEPALRSPGGGDRSRSRAASSAPSGQSQLGSMMSSGSQHTNV

SEQ ID NO: 5478 - protein, 981 aa, Homo sapiens
  Payload ID: 1186;
  Gene Symbol: ANO3;
  Gene Name: anoctamin 3;
  Uniprot ID:  Q9BYT9;
  ENSP ID: ENSP00000256737
MVHHSGSIQSFKQQKGMNISKSEITKETSLKPSRRSLPCLAQSYAYSKSLSQSTSLFQSTESESQAPTSITLISTDKAEQVNTEENKNDSVLRCSFADLSDFCLALGKDKDYTDESEHATYDRSRLINDFVIKDKSEFKTKLSKNDMNYIASSGPLFKDGKKRIDYILVYRKTNIQYDKRNTFEKNLRAEGLMLEKEPAIASPDIMFIKIHIPWDTLCKYAERLNIRMPFRKKCYYTDGRSKSMGRMQTYFRRIKNWMAQNPMVLDKSAFPDLEESDCYTGPFSRARIHHFIINNKDTFFSNATRSRIVYHMLERTKYENGISKVGIRKLINNGSYIAAFPPHEGAYKSSQPIKTHGPQNNRHLLYERWARWGMWYKHQPLDLIRLYFGEKIGLYFAWLGWYTGMLIPAAIVGLCVFFYGLFTMNNSQVSQEICKATEVFMCPLCDKNCSLQRLNDSCIYAKVTYLFDNGGTVFFAIFMAIWATVFLEFWKRRRSILTYTWDLIEWEEEEETLRPQFEAKYYKMEIVNPITGKPEPHQPSSDKVTRLLVSVSGIFFMISLVITAVFGVVVYRLVVMEQFASFKWNFIKQYWQFATSAAAVCINFIIIMLLNLAYEKIAYLLTNLEYPRTESEWENSFALKMFLFQFVNLNSSIFYIAFFLGRFVGHPGKYNKLFDRWRLEECHPSGCLIDLCLQMGVIMFLKQIWNNFMELGYPLIQNWWSRHKIKRGIHDASIPQWENDWNLQPMNLHGLMDEYLEMVLQFGFTTIFVAAFPLAPLLALLNNIIEIRLDAYKFVTQWRRPLPARATDIGIWLGILEGIGILAVITNAFVIAITSDYIPRFVYEYKYGPCANHVEPSENCLKGYVNNSLSFFDLSELGMGKSGYCRYRDYRGPPWSSKPYEFTLQYWHILAARLAFIIVFEHLVFGIKSFIAYLIPDVPKGLHDRIRREKYLVQEMMYEAELEHLQQQRRKSGQPVHHEWP

SEQ ID NO: 5479 - protein, 835 aa, Homo sapiens
  Payload ID: 1186;
  Gene Symbol: ANO3;
  Gene Name: anoctamin 3;
  Uniprot ID:  Q9BYT9;
  ENSP ID: ENSP00000432394
MNYIASSGPLFKDGKKRIDYILVYRKTNIQYDKRNTFEKNLRAEGLMLEKEPAIASPDIMFIKIHIPWDTLCKYAERLNIRMPFRKKCYYTDGRSKSMGRMQTYFRRIKNWMAQNPMVLDKSAFPDLEESDCYTGPFSRARIHHFIINNKDTFFSNATRSRIVYHMLERTKYENGISKVGIRKLINNGSYIAAFPPHEGAYKSSQPIKTHGPQNNRHLLYERWARWGMWYKHQPLDLIRLYFGEKIGLYFAWLGWYTGMLIPAAIVGLCVFFYGLFTMNNSQVSQEICKATEVFMCPLCDKNCSLQRLNDSCIYAKVTYLFDNGGTVFFAIFMAIWATVFLEFWKRRRSILTYTWDLIEWEEEEETLRPQFEAKYYKMEIVNPITGKPEPHQPSSDKVTRLLVSVSGIFFMISLVITAVFGVVVYRLVVMEQFASFKWNFIKQYWQFATSAAAVCINFIIIMLLNLAYEKIAYLLTNLEYPRTESEWENSFALKMFLFQFVNLNSSIFYIAFFLGRFVGHPGKYNKLFDRWRLEECHPSGCLIDLCLQMGVIMFLKQIWNNFMELGYPLIQNWWSRHKIKRGIHDASIPQWENDWNLQPMNLHGLMDEYLEMVLQFGFTTIFVAAFPLAPLLALLNNIIEIRLDAYKFVTQWRRPLPARATDIGIWLGILEGIGILAVITNAFVIAITSDYIPRFVYEYKYGPCANHVEPSENCLKGYVNNSLSFFDLSELGMGKSGYCRYRDYRGPPWSSKPYEFTLQYWHILAARLAFIIVFEHLVFGIKSFIAYLIPDVPKGLHDRIRREKYLVQEMMYEAELEHLQQQRRKSGQPVHHEWP

SEQ ID NO: 5480 - protein, 965 aa, Homo sapiens
  Payload ID: 1186;
  Gene Symbol: ANO3;
  Gene Name: anoctamin 3;
  ENSP ID: ENSP00000432576
MNISKSEITKETSLKPSRRSLPCLAQSYAYSKSLSQSTSLFQSTESESQAPTSITLISTDKAEQVNTEENKNDSVLRCSFADLSDFCLALGKDKDYTDESEHATYDRSRLINDFVIKDKSEFKTKLSKNDMNYIASSGPLFKDGKKRIDYILVYRKTNIQYDKRNTFEKNLRAEGLMLEKEPAIASPDIMFIKIHIPWDTLCKYAERLNIRMPFRKKCYYTDGRSKSMGRMQTYFRRIKNWMAQNPMVLDKSAFPDLEESDCYTGPFSRARIHHFIINNKDTFFSNATRSRIVYHMLERTKYENGISKVGIRKLINNGSYIAAFPPHEGAYKSSQPIKTHGPQNNRHLLYERWARWGMWYKHQPLDLIRLYFGEKIGLYFAWLGWYTGMLIPAAIVGLCVFFYGLFTMNNSQVSQEICKATEVFMCPLCDKNCSLQRLNDSCIYAKVTYLFDNGGTVFFAIFMAIWATVFLEFWKRRRSILTYTWDLIEWEEEEETLRPQFEAKYYKMEIVNPITGKPEPHQPSSDKVTRLLVSVSGIFFMISLVITAVFGVVVYRLVVMEQFASFKWNFIKQYWQFATSAAAVCINFIIIMLLNLAYEKIAYLLTNLEYPRTESEWENSFALKMFLFQFVNLNSSIFYIAFFLGRFVGHPGKYNKLFDRWRLEECHPSGCLIDLCLQMGVIMFLKQIWNNFMELGYPLIQNWWSRHKIKRGIHDASIPQWENDWNLQPMNLHGLMDEYLEMVLQFGFTTIFVAAFPLAPLLALLNNIIEIRLDAYKFVTQWRRPLPARATDIGIWLGILEGIGILAVITNAFVIAITSDYIPRFVYEYKYGPCANHVEPSENCLKGYVNNSLSFFDLSELGMGKSGYCRYRDYRGPPWSSKPYEFTLQYWHILAARLAFIIVFEHLVFGIKSFIAYLIPDVPKGLHDRIRREKYLVQEMMYEAELEHLQQQRRKSGQPVHHEWP

SEQ ID NO: 5481 - protein, 206 aa, Homo sapiens
  Payload ID: 1186;
  Gene Symbol: ANO3;
  Gene Name: anoctamin 3;
  ENSP ID: ENSP00000435275
MVHHSGSIQSFKQQKGMNISKSEITKETSLKPSRRSLPCLAQSYAYSKSLSQSTSLFQSTESESQAPTSITLISTDKAEQVNTEENKNDSVLRCSFADLSDFCLALGKDKDYTDESEHATYDRSRLINDFVIKDKSEFKTKLSKNDMNYIASSGPLFKDGKKRIDYILVYRKTNIQYDKRNTFEKNLRAEGLMLEKEVGALLLLVM

SEQ ID NO: 5482 - protein, 955 aa, Homo sapiens
  Payload ID: 1187;
  Gene Symbol: ANO4;
  Gene Name: anoctamin 4;
  Uniprot ID:  Q32M45;
  ENSP ID: ENSP00000376703
MEASSSGITNGKTKVFHPEGGVDLQGYQLDMQILPDGPKSDVDFSEILNAIQEMAKDVNILFDELEAVSSPCKDDDSLLHPGNLTSTSDDASRLEAGGETVPERNKSNGLYFRDGKCRIDYILVYRKSNPQTEKREVFERNIRAEGLQMEKESSLINSDIIFVKLHAPWEVLGRYAEQMNVRMPFRRKIYYLPRRYKFMSRIDKQISRFRRWLPKKPMRLDKETLPDLEENDCYTAPFSQQRIHHFIIHNKETFFNNATRSRIVHHILQRIKYEEGKNKIGLNRLLTNGSYEAAFPLHEGSYRSKNSIRTHGAENHRHLLYECWASWGVWYKYQPLDLVRRYFGEKIGLYFAWLGWYTGMLFPAAFIGLFVFLYGVTTLDHSQVSKEVCQATDIIMCPVCDKYCPFMRLSDSCVYAKVTHLFDNGATVFFAVFMAVWATVFLEFWKRRRAVIAYDWDLIDWEEEEEEIRPQFEAKYSKKERMNPISGKPEPYQAFTDKCSRLIVSASGIFFMICVVIAAVFGIVIYRVVTVSTFAAFKWALIRNNSQVATTGTAVCINFCIIMLLNVLYEKVALLLTNLEQPRTESEWENSFTLKMFLFQFVNLNSSTFYIAFFLGRFTGHPGAYLRLINRWRLEECHPSGCLIDLCMQMGIIMVLKQTWNNFMELGYPLIQNWWTRRKVRQEHGPERKISFPQWEKDYNLQPMNAYGLFDEYLEMILQFGFTTIFVAAFPLAPLLALLNNIIEIRLDAYKFVTQWRRPLASRAKDIGIWYGILEGIGILSVITNAFVIAITSDFIPRLVYAYKYGPCAGQGEAGQKCMVGYVNASLSVFRISDFENRSEPESDGSEFSGTPLKYCRYRDYRDPPHSLVPYGYTLQFWHVLAARLAFIIVFEHLVFCIKHLISYLIPDLPKDLRDRMRREKYLIQEMMYEAELERLQKERKERKKNGKAHHNEWP

SEQ ID NO: 5483 - protein, 920 aa, Homo sapiens
  Payload ID: 1187;
  Gene Symbol: ANO4;
  Gene Name: anoctamin 4;
  Uniprot ID:  Q32M45;
  ENSP ID: ENSP00000376705
MEASSSGITNGKTKVFHPVAKDVNILFDELEAVSSPCKDDDSLLHPGNLTSTSDDASRLEAGGETVPERNKSNGLYFRDGKCRIDYILVYRKSNPQTEKREVFERNIRAEGLQMEKESSLINSDIIFVKLHAPWEVLGRYAEQMNVRMPFRRKIYYLPRRYKFMSRIDKQISRFRRWLPKKPMRLDKETLPDLEENDCYTAPFSQQRIHHFIIHNKETFFNNATRSRIVHHILQRIKYEEGKNKIGLNRLLTNGSYEAAFPLHEGSYRSKNSIRTHGAENHRHLLYECWASWGVWYKYQPLDLVRRYFGEKIGLYFAWLGWYTGMLFPAAFIGLFVFLYGVTTLDHSQVSKEVCQATDIIMCPVCDKYCPFMRLSDSCVYAKVTHLFDNGATVFFAVFMAVWATVFLEFWKRRRAVIAYDWDLIDWEEEEEEIRPQFEAKYSKKERMNPISGKPEPYQAFTDKCSRLIVSASGIFFMICVVIAAVFGIVIYRVVTVSTFAAFKWALIRNNSQVATTGTAVCINFCIIMLLNVLYEKVALLLTNLEQPRTESEWENSFTLKMFLFQFVNLNSSTFYIAFFLGRFTGHPGAYLRLINRWRLEECHPSGCLIDLCMQMGIIMVLKQTWNNFMELGYPLIQNWWTRRKVRQEHGPERKISFPQWEKDYNLQPMNAYGLFDEYLEMILQFGFTTIFVAAFPLAPLLALLNNIIEIRLDAYKFVTQWRRPLASRAKDIGIWYGILEGIGILSVITNAFVIAITSDFIPRLVYAYKYGPCAGQGEAGQKCMVGYVNASLSVFRISDFENRSEPESDGSEFSGTPLKYCRYRDYRDPPHSLVPYGYTLQFWHVLAARLAFIIVFEHLVFCIKHLISYLIPDLPKDLRDRMRREKYLIQEMMYEAELERLQKERKERKKNGKAHHNEWP

SEQ ID NO: 5484 - protein, 11 aa, Homo sapiens
  Payload ID: 1187;
  Gene Symbol: ANO4;
  Gene Name: anoctamin 4;
  ENSP ID: ENSP00000447867
MEASSSGITNG

SEQ ID NO: 5485 - protein, 190 aa, Homo sapiens
  Payload ID: 1187;
  Gene Symbol: ANO4;
  Gene Name: anoctamin 4;
  ENSP ID: ENSP00000449116
MEASSSGITNGKTKVFHPEGGVDLQGYQLDMQILPDGPKSDVDFSEILNAIQEMAKDVNILFDELEAVSSPCKDDDSLLHPGNLTSTSDDASRLEAGGETVPERNKSNGLYFRDGKCRIDYILVYRKSNPQTEKREVFERNIRAEGLQMEKESSLINSDIIFVKLHAPWEVLGRYAEQMNVRMPFSSNCN

SEQ ID NO: 5486 - protein, 475 aa, Homo sapiens
  Payload ID: 1187;
  Gene Symbol: ANO4;
  Gene Name: anoctamin 4;
  Uniprot ID:  Q32M45;
  ENSP ID: ENSP00000450192
MAVWATVFLEFWKRRRAVIAYDWDLIDWEEEEICVVIAAVFGIVIYRVVTVSTFAAFKWALIRNNSQVATTGTAVCINFCIIMLLNVLYEKVALLLTNLEQPRTESEWENSFTLKMFLFQFVNLNSSTFYIAFFLGRFTGHPGAYLRLINRWRLEECHPSGCLIDLCMQMGIIMVLKQTWNNFMELGYPLIQNWWTRRKVRQEHGPERKISFPQWEKDYNLQPMNAYGLFDEYLEMILQFGFTTIFVAAFPLAPLLALLNNIIEIRLDAYKFVTQWRRPLASRAKDIGIWYGILEGIGILSVITNAFVIAITSDFIPRLVYAYKYGPCAGQGEAGQKCMVGYVNASLSVFRISDFENRSEPESDGSEFSGTPLKYCRYRDYRDPPHSLVPYGYTLQFWHVLAARLAFIIVFEHLVFCIKHLISYLIPDLPKDLRDRMRREKYLIQEMMYEAELERLQKERKERKKNGKAHHNEWP

SEQ ID NO: 5487 - protein, 176 aa, Homo sapiens
  Payload ID: 1187;
  Gene Symbol: ANO4;
  Gene Name: anoctamin 4;
  Uniprot ID:  Q32M45;
  ENSP ID: ENSP00000469449
  MOD_RES (1)..(1): Any amino acid
XSVITNAFVIAITSDFIPRLVYAYKYGPCAGQGEAGQKCMVGYVNASLSVFRISDFENRSEPESDGSEFSGTPLKYCRYRDYRDPPHSLVPYGYTLQFWHVLAARLAFIIVFEHLVFCIKHLISYLIPDLPKDLRDRMRREKYLIQEMMYEAELERLQKERKERKKNGKAHHNEWP

SEQ ID NO: 5488 - protein, 176 aa, Homo sapiens; identical to SEQ ID NO: 5487
  Payload ID: 1187;
  Gene Symbol: ANO4;
  Gene Name: anoctamin 4;
  Uniprot ID:  Q32M45;
  ENSP ID: ENSP00000470039
  MOD_RES (1)..(1): Any amino acid

SEQ ID NO: 5489 - protein, 176 aa, Homo sapiens; identical to SEQ ID NO: 5487
  Payload ID: 1187;
  Gene Symbol: ANO4;
  Gene Name: anoctamin 4;
  Uniprot ID:  Q32M45;
  ENSP ID: ENSP00000471431
  MOD_RES (1)..(1): Any amino acid

SEQ ID NO: 5490 - protein, 913 aa, Homo sapiens
  Payload ID: 1188;
  Gene Symbol: ANO5;
  Gene Name: anoctamin 5;
  Uniprot ID:  Q75V66;
  ENSP ID: ENSP00000315371
MGDPDLLEVLAEEGEKVNKHIDYSFQMSEQSLSSRETSFLINEETMPAKRFNLFLRRRLMFQKNQQSKDSIFFRDGIRQIDFVLSYVDDVKKDAELKAERRKEFETNLRKTGLELEIEDKRDSEDGRTYFVKIHAPWEVLVTYAEVLGIKMPIKESDIPRPKHTPISYVLGPVRLPLSVKYPHPEYFTAQFSRHRQELFLIEDQATFFPSSSRNRIVYYILSRCPFGIEDGKKRFGIERLLNSNTYSSAYPLHDGQYWKPSEPPNPTNERYTLHQNWARFSYFYKEQPLDLIKNYYGEKIGIYFVFLGFYTEMLFFAAVVGLACFIYGLLSMEHNTSSTEICDPEIGGQMIMCPLCDQVCDYWRLNSTCLASKFSHLFDNESTVFFAIFMGIWVTLFLEFWKQRQARLEYEWDLVDFEEEQQQLQLRPEFEAMCKHRKLNAVTKEMEPYMPLYTRIPWYFLSGATVTLWMSLVVTSMVAVIVYRLSVFATFASFMESDASLKQVKSFLTPQITTSLTGSCLNFIVILILNFFYEKISAWITKMEIPRTYQEYESSLTLKMFLFQFVNFYSSCFYVAFFKGKFVGYPGKYTYLFNEWRSEECDPGGCLIELTTQLTIIMTGKQIFGNIKEAIYPLALNWWRRRKARTNSEKLYSRWEQDHDLESFGPLGLFYEYLETVTQFGFVTLFVASFPLAPLLALINNIVEIRVDAWKLTTQYRRTVASKAHSIGVWQDILYGMAVLSVATNAFIVAFTSDIIPRLVYYYAYSTNATQPMTGYVNNSLSVFLIADFPNHTAPSEKRDFITCRYRDYRYPPDDENKYFHNMQFWHVLAAKMTFIIVMEHVVFLVKFLLAWMIPDVPKDVVERIKREKLMTIKILHDFELNKLKENLGINSNEFAKHVMIEENKAQLAKSTL

SEQ ID NO: 5491 - protein, 910 aa, Homo sapiens
  Payload ID: 1189;
  Gene Symbol: ANO6;
  Gene Name: anoctamin 6;
  Uniprot ID:  Q4KMQ2;
  ENSP ID: ENSP00000320087
MKKMSRNVLLQMEEEEDDDDGDIVLENLGQTIVPDLGSLESQHDFRTPEFEEFNGKPDSLFFNDGQRRIDFVLVYEDESRKETNKKGTNEKQRRKRQAYESNLICHGLQLEATRSVLDDKLVFVKVHAPWEVLCTYAEIMHIKLPLKPNDLKNRSSAFGTLNWFTKVLSVDESIIKPEQEFFTAPFEKNRMNDFYIVDRDAFFNPATRSRIVYFILSRVKYQVINNVSKFGINRLVNSGIYKAAFPLHDCKFRRQSEDPSCPNERYLLYREWAHPRSIYKKQPLDLIRKYYGEKIGIYFAWLGYYTQMLLLAAVVGVACFLYGYLNQDNCTWSKEVCHPDIGGKIIMCPQCDRLCPFWKLNITCESSKKLCIFDSFGTLVFAVFMGVWVTLFLEFWKRRQAELEYEWDTVELQQEEQARPEYEARCTHVVINEITQEEERIPFTAWGKCIRITLCASAVFFWILLIIASVIGIIVYRLSVFIVFSAKLPKNINGTDPIQKYLTPQTATSITASIISFIIIMILNTIYEKVAIMITNFELPRTQTDYENSLTMKMFLFQFVNYYSSCFYIAFFKGKFVGYPGDPVYWLGKYRNEECDPGGCLLELTTQLTIIMGGKAIWNNIQEVLLPWIMNLIGRFHRVSGSEKITPRWEQDYHLQPMGKLGLFYEYLEMIIQFGFVTLFVASFPLAPLLALVNNILEIRVDAWKLTTQFRRLVPEKAQDIGAWQPIMQGIAILAVVTNAMIIAFTSDMIPRLVYYWSFSVPPYGDHTSYTMEGYINNTLSIFKVADFKNKSKGNPYSDLGNHTTCRYRDFRYPPGHPQEYKHNIYYWHVIAAKLAFIIVMEHVIYSVKFFISYAIPDVSKRTKSKIQREKYLTQKLLHENHLKDMTKNMGVIAERMIEAVDNNLRPKSE

SEQ ID NO: 5492 - protein, 929 aa, Homo sapiens
  Payload ID: 1189;
  Gene Symbol: ANO6;
  Gene Name: anoctamin 6;
  Uniprot ID:  Q4KMQ2;
  ENSP ID: ENSP00000391417
MKKMSRNVLLQMEEEEDDDDGDIVLENLGQTIVPDLGSLESQHDFRTPEFEEFNGKPDSLFFNDGQRRIDFVLVYEDESRKETNKKGTNEKQRRKRQAYESNLICHGLQLEATRSVLDDKLVFVKVHAPWEVLCTYAEIMHIKLPLKPNDLKNRSSAFGTLNWFTKVLSVDESIIKPEQEFFTAPFEKNRMNDFYIVDRDAFFNPATRSRIVYFILSRVKYQVINNVSKFGINRLVNSGIYKAAFPLHDCKFRRQSEDPSCPNERYLLYREWAHPRSIYKKQPLDLIRKYYGEKIGIYFAWLGYYTQMLLLAAVVGVACFLYGYLNQDNCTWSKEVCHPDIGGKIIMCPQCDRLCPFWKLNITCESSKKLCIFDSFGTLVFAVFMGVWVTLFLEFWKRRQAELEYEWDTVELQQEEQARPEYEARCTHVVINEITQEEERIPFTAWGKCIRITLCASAVFFWILLIIASVIGIIVYRLSVFIVFSAKLPKNINGTDPIQKYLTPQTATSITASIISFIIIMILNTIYEKVAIMITNFELPRTQTDYENSLTMKMFLFQFVNYYSSCFYIAFFKGKFVGYPGDPVYWLGKYRNEECDPGGCLLELTTQLTIIMGGKAIWNNIQEVLLPWIMNLIGRFHRVSGSEKITPRWEQDYHLQPMGKLGLFYEYLEMIIQFGFVTLFVASFPLAPLLALVNNILEIRVDAWKLTTQFRRLVPEKAQDIGAWQPIMQGIAILAVVTNAMIIAFTSDMIPRLVYYWSFSVPPYGDHTSYTMEGYINNTLSIFKVADFKNKSKGNPYSDLGNHTTCRYRDFRYPPGHPQEYKHNIYYWHVIAAKLAFIIVMEYLALLPRLGHSGMILAHCNLRLPVDCCMCYRFVDEIRLLEQLTSDFIDSLYYIFSISIISIFFSVTFFFLLLSLGPTPCFSVSNFLS

SEQ ID NO: 5493 - protein, 931 aa, Homo sapiens
  Payload ID: 1189;
  Gene Symbol: ANO6;
  Gene Name: anoctamin 6;
  Uniprot ID:  Q4KMQ2;
  ENSP ID: ENSP00000409126
MKKMSRNVLLQMEEEEDDDDGDIGDVPASRRPFLTPHTHLPSSLVLENLGQTIVPDLGSLESQHDFRTPEFEEFNGKPDSLFFNDGQRRIDFVLVYEDESRKETNKKGTNEKQRRKRQAYESNLICHGLQLEATRSVLDDKLVFVKVHAPWEVLCTYAEIMHIKLPLKPNDLKNRSSAFGTLNWFTKVLSVDESIIKPEQEFFTAPFEKNRMNDFYIVDRDAFFNPATRSRIVYFILSRVKYQVINNVSKFGINRLVNSGIYKAAFPLHDCKFRRQSEDPSCPNERYLLYREWAHPRSIYKKQPLDLIRKYYGEKIGIYFAWLGYYTQMLLLAAVVGVACFLYGYLNQDNCTWSKEVCHPDIGGKIIMCPQCDRLCPFWKLNITCESSKKLCIFDSFGTLVFAVFMGVWVTLFLEFWKRRQAELEYEWDTVELQQEEQARPEYEARCTHVVINEITQEEERIPFTAWGKCIRITLCASAVFFWILLIIASVIGIIVYRLSVFIVFSAKLPKNINGTDPIQKYLTPQTATSITASIISFIIIMILNTIYEKVAIMITNFELPRTQTDYENSLTMKMFLFQFVNYYSSCFYIAFFKGKFVGYPGDPVYWLGKYRNEECDPGGCLLELTTQLTIIMGGKAIWNNIQEVLLPWIMNLIGRFHRVSGSEKITPRWEQDYHLQPMGKLGLFYEYLEMIIQFGFVTLFVASFPLAPLLALVNNILEIRVDAWKLTTQFRRLVPEKAQDIGAWQPIMQGIAILAVVTNAMIIAFTSDMIPRLVYYWSFSVPPYGDHTSYTMEGYINNTLSIFKVADFKNKSKGNPYSDLGNHTTCRYRDFRYPPGHPQEYKHNIYYWHVIAAKLAFIIVMEHVIYSVKFFISYAIPDVSKRTKSKIQREKYLTQKLLHENHLKDMTKNMGVIAERMIEAVDNNLRPKSE

SEQ ID NO: 5494 - protein, 892 aa, Homo sapiens
  Payload ID: 1189;
  Gene Symbol: ANO6;
  Gene Name: anoctamin 6;
  Uniprot ID:  Q4KMQ2;
  ENSP ID: ENSP00000413137
MFCAAVLENLGQTIVPDLGSLESQHDFRTPEFEEFNGKPDSLFFNDGQRRIDFVLVYEDESRKETNKKGTNEKQRRKRQAYESNLICHGLQLEATRSVLDDKLVFVKVHAPWEVLCTYAEIMHIKLPLKPNDLKNRSSAFGTLNWFTKVLSVDESIIKPEQEFFTAPFEKNRMNDFYIVDRDAFFNPATRSRIVYFILSRVKYQVINNVSKFGINRLVNSGIYKAAFPLHDCKFRRQSEDPSCPNERYLLYREWAHPRSIYKKQPLDLIRKYYGEKIGIYFAWLGYYTQMLLLAAVVGVACFLYGYLNQDNCTWSKEVCHPDIGGKIIMCPQCDRLCPFWKLNITCESSKKLCIFDSFGTLVFAVFMGVWVTLFLEFWKRRQAELEYEWDTVELQQEEQARPEYEARCTHVVINEITQEEERIPFTAWGKCIRITLCASAVFFWILLIIASVIGIIVYRLSVFIVFSAKLPKNINGTDPIQKYLTPQTATSITASIISFIIIMILNTIYEKVAIMITNFELPRTQTDYENSLTMKMFLFQFVNYYSSCFYIAFFKGKFVGYPGDPVYWLGKYRNEECDPGGCLLELTTQLTIIMGGKAIWNNIQEVLLPWIMNLIGRFHRVSGSEKITPRWEQDYHLQPMGKLGLFYEYLEMIIQFGFVTLFVASFPLAPLLALVNNILEIRVDAWKLTTQFRRLVPEKAQDIGAWQPIMQGIAILAVVTNAMIIAFTSDMIPRLVYYWSFSVPPYGDHTSYTMEGYINNTLSIFKVADFKNKSKGNPYSDLGNHTTCRYRDFRYPPGHPQEYKHNIYYWHVIAAKLAFIIVMEHVIYSVKFFISYAIPDVSKRTKSKIQREKYLTQKLLHENHLKDMTKNMGVIAERMIEAVDNNLRPKSE

SEQ ID NO: 5495 - protein, 45 aa, Homo sapiens
  Payload ID: 1189;
  Gene Symbol: ANO6;
  Gene Name: anoctamin 6;
  ENSP ID: ENSP00000449423
MKKMSRNVLLQMEEEEDDDDGDIGLKCSSGVAQSWLTVALTPRLN

SEQ ID NO: 5496 - protein, 933 aa, Homo sapiens
  Payload ID: 1190;
  Gene Symbol: ANO7;
  Gene Name: anoctamin 7;
  Uniprot ID:  Q6IWH7;
  ENSP ID: ENSP00000274979
MRMAATAWAGLQGPPLPTLCPAVRTGLYCRDQAHAERWAMTSETSSGSHCARSRMLRRRAQEEDSTVLIDVSPPEAEKRGSYGSTAHASEPGGQQAAACRAGSPAKPRIADFVLVWEEDLKLDRQQDSAARDRTDMHRTWRETFLDNLRAAGLCVDQQDVQDGNTTVHYALLSASWAVLCYYAEDLRLKLPLQELPNQASNWSAGLLAWLGIPNVLLEVVPDVPPEYYSCRFRVNKLPRFLGSDNQDTFFTSTKRHQILFEILAKTPYGHEKKNLLGIHQLLAEGVLSAAFPLHDGPFKTPPEGPQAPRLNQRQVLFQHWARWGKWNKYQPLDHVRRYFGEKVALYFAWLGFYTGWLLPAAVVGTLVFLVGCFLVFSDIPTQELCGSKDSFEMCPLCLDCPFWLLSSACALAQAGRLFDHGGTVFFSLFMALWAVLLLEYWKRKSATLAYRWDCSDYEDTEERPRPQFAASAPMTAPNPITGEDEPYFPERSRARRMLAGSVVIVVMVAVVVMCLVSIILYRAIMAIVVSRSGNTLLAAWASRIASLTGSVVNLVFILILSKIYVSLAHVLTRWEMHRTQTKFEDAFTLKVFIFQFVNFYSSPVYIAFFKGRFVGYPGNYHTLFGVRNEECAAGGCLIELAQELLVIMVGKQVINNMQEVLIPKLKGWWQKFRLRSKKRKAGASAGASQGPWEDDYELVPCEGLFDEYLEMVLQFGFVTIFVAACPLAPLFALLNNWVEIRLDARKFVCEYRRPVAERAQDIGIWFHILAGLTHLAVISNAFLLAFSSDFLPRAYYRWTRAHDLRGFLNFTLARAPSSFAAAHNRTCRYRAFRDDDGHYSQTYWNLLAIRLAFVIVFEHVVFSVGRLLDLLVPDIPESVEIKVKREYYLAKQALAENEVLFGTNGTKDEQPEGSELSSHWTPFTVPKASQLQQ

SEQ ID NO: 5497 - protein, 179 aa, Homo sapiens
  Payload ID: 1190;
  Gene Symbol: ANO7;
  Gene Name: anoctamin 7;
  Uniprot ID:  Q6IWH7;
  ENSP ID: ENSP00000383985
MRMAATAWAGLQGPPLPTLCPAVRTGLYCRDQAHAERWAMTSETSSGSHCARSRMLRRRAQEEDSTVLIDVSPPEAEKRGSYGSTAHASEPGGQQAAACRAGSPAKPRIDFVLVWEEDLKLDRQQDSAARDRTDMHRTWRETFLDNLRAAGLCVDQVRGGCHGQGPRPCIHSVTHDLAA

SEQ ID NO: 5498 - protein, 883 aa, Homo sapiens
  Payload ID: 1190;
  Gene Symbol: ANO7;
  Gene Name: anoctamin 7;
  Uniprot ID:  Q6IWH7;
  ENSP ID: ENSP00000385418
MRMAATAWAGLQGPPLPTLCPAVRTGLYCRDQAHAERWAMTSETSSGSHCARSRMLRRRAQEEDSTVLIDVSPPEAEKRGSYGSTAHASEPGGQQAAACRAGSPAKPRIDFVLVWEEDLKLDRQQDSAARDRTDMHRTWRETFLDNLRAAGLCVDQQDVQDGNTTVHYALLSASWAVLCYYAEDLRLKLPLQELPNQASNWSAGLLAWLGIPNVLLEVVPDVPPEYYSCRFRVNKLPRFLGSDNQDTFFTSTKRHQILFEILAKTPYGHEKKNLLGIHQLLAEGVLSAAFPLHDGPFKTPPEGPQAPRLNQRQVLFQHWARWGKWNKYQPLDHVRRYFGEKVALYFAWLGFYTGWLLPAAVVGTLVFLVGCFLVFSDIPTQELCGSKDSFEMCPLCLDCPFWLLSSACALAQAGRLFDHGGTVFFSLFMALWAVLLLEYWKRKSATLAYRWDCSDYEDTEERPRPQFAASAPMTAPNPITGEDEPYFPERSRARRMLAGSVVIVVMVAVVVMCLVSIILYRAIMAIVVSRSGNTLLAAWASRIASLTGSVVNLVFILILSKIYVSLAHVLTRWEMHRTQTKFEDAFTLKVFIFQFVNFYSSPVYIAFFKGRFVGYPGNYHTLFGVRNEECAAGGCLIELAQELLVIMVGKQVINNMQEVLIPKLKGWWQKFRLRSKKRKAGASAGASQGPWEDDYELVPCEGLFDEYLEMVLQFGFVTIFVAACPLAPLFALLNNWVEIRLDARKFVCEYRRPVAERAQDIGIWFHILAGLTHLAVISNAFLLAFSSDFLPRAYYRWTRAHDLRGFLNFTLARAPSSFAAAHNRTCRYRAFRDDDGHYSQTYWNLLAIRLAFVIVFEVAEAPAGSPIHGMRPRPCALPNSSTW

SEQ ID NO: 5499 - protein, 185 aa, Homo sapiens
  Payload ID: 1190;
  Gene Symbol: ANO7;
  Gene Name: anoctamin 7;
  ENSP ID: ENSP00000403625
  MOD_RES (1)..(1): Any amino acid
XAGGAFRGLRADGGGEPGRDPLPAVLQFGFVTIFVAACPLAPLFALLNNWVEIRLDARKFVCEYRRPVAERAQDIGIWFHILAGLTHLAVISNAFLLAFSSDFLPRAYYRWTRAHDLRGFLNFTLARAPSSFAAAHNRTCRYRAFRDDDGHYSQTYWNLLAIRLAFVIVFEHVVFSVGRLLDLLV

SEQ ID NO: 5500 - protein, 1232 aa, Homo sapiens
  Payload ID: 1191;
  Gene Symbol: ANO8;
  Gene Name: anoctamin 8;
  Uniprot ID:  Q9HCE9;
  ENSP ID: ENSP00000159087
MAEAASGAGGTSLEGERGKRPPPEGEPAAPASGVLDKLFGKRLLQAGRYLVSHKAWMKTVPTENCDVLMTFPDTTDDHTLLWLLNHIRVGIPELIVQVRHHRHTRAYAFFVTATYESLLRGADELGLRKAVKAEFGGGTRGFSCEEDFIYENVESELRFFTSQERQSIIRFWLQNLRAKQGEALHNVRFLEDQPIIPELAARGIIQQVFPVHEQRILNRLMKSWVQAVCENQPLDDICDYFGVKIAMYFAWLGFYTSAMVYPAVFGSVLYTFTEADQTSRDVSCVVFALFNVIWSTLFLEEWKRRGAELAYKWGTLDSPGEAVEEPRPQFRGVRRISPITRAEEFYYPPWKRLLFQLLVSLPLCLACLVCVFLLMLGCFQLQELVLSVKGLPRLARFLPKVMLALLVSVSAEGYKKLAIWLNDMENYRLESAYEKHLIIKVVLFQFVNSYLSLFYIGFYLKDMERLKEMLATLLITRQFLQNVREVLQPHLYRRLGRGELGLRAVWELARALLGLLSLRRPAPRRLEPQADEGGGGGSGGGGRRCLSGGCGAPEEEEEAALVERRRAGEGGEEGDGPPGGKEEDEDDEEEEDEEEEEDEEEGEEGGLLDCGLRLKKVSFAERGAGRRRPGPSPEALLEEGSPTMVEKGLEPGVFTLAEEDDEAEGAPGSPEREPPAILFRRAGGEGRDQGPDGGPDPEPGSNSDSTRRQRRQNRSSWIDPPEEEHSPQLTQAELESCMKKYEDTFQDYQEMFVQFGYVVLFSSAFPLAALCALVNNLIEIRSDAFKLCTGLQRPFGQRVESIGQWQKVMEAMGVLAIVVNCYLIGQCGQLQRLFPWLSPEAAIVSVVVLEHFALLLKYLIHVAIPDIPGWVAEEMAKLEYQRREAFKRHERQAQHRYQQQQRRRREEEERQRHAEHHARREHDSGGREEARAEGSGLDPATSSEKASAKAKGSTAGGHGPERPKRPGSLLAPNNVMKLKQIIPLQGKFLSSGATSSLAAAGAGATTRPPPAQSPTGSDTRLPAFLSFKFLKSPETRRDSERSHSPPKAFHAGKLFPFGGTRAEPGSNGAGGQARPDGTPSSGSSRVQRSGPVDEALAEELEAPRPEEEGSGTALAPVGAPALRTRRSRSPAPPPPMPLPRPPTPPAGCWQWDGPWGCGGEGAAPRQALAAAECPPCAMAGPPPAPQPLPGDASFYSLPPPPLPPTSDPLETPAPSPSPSPSPQAVCWPSGWH

SEQ ID NO: 5501 - protein, 581 aa, Homo sapiens
  Payload ID: 1191;
  Gene Symbol: ANO8;
  Gene Name: anoctamin 8;
  ENSP ID: ENSP00000469751
MAEAASGAGGTSLEGERGKRPPPEGEPAAPASGVLDKLFGKRLLQAGRYLVSHKAWMKTVPTENCDVLMTFPDTTDDHTLLWLLNHIRVGIPELIVQVRHHRHTRAYAFFVTATYESLLRGADELGLRKAVKAEFGGGTRGFSCEEDFIYENVESELRFFTSQERQSIIRFWLQNLRAKQGEALHNVRFLEDQPIIPELAARGIIQQVFPVHEQRILNRLMKSWVQAVCENQPLDDICDYFGVKIAMYFAWLGFYTSAMVYPAVFGSVLYTFTEADQTSRDVSCVVFALFNVIWSTLFLEEWKRRGAELAYKWGTLDSPGEAVEEPRPQFRGVRRISPITRAEEFYYPPWKRLLFQLLVSLPLCLACLVCVFLLMLGCFQLQELVLSVKGLPRLARFLPKVMLALLVSVSAEGYKKLAIWLNDMENYRLESAYEKHLIIKVVLFQFVNSYLSLFYIGFYLKDMERLKELLLVLSLSQSLERQLQAVLVPLAALRFRLLLLSLRGLLLAARAKVRAGGEPVGPRRGGQRGCAGGLARRAEGACAEGIWGRGRPASRCRRLGAHAAQCTDRARGGVETRWACP

SEQ ID NO: 5502 - protein, 581 aa, Homo sapiens; identical to SEQ ID NO: 5501
  Payload ID: 1191;
  Gene Symbol: ANO8;
  Gene Name: anoctamin 8;
  ENSP ID: ENSP00000486865

SEQ ID NO: 5503 - protein, 782 aa, Homo sapiens
  Payload ID: 1192;
  Gene Symbol: ANO9;
  Gene Name: anoctamin 9;
  Uniprot ID:  A1A5B4;
  ENSP ID: ENSP00000332788
MQGEESLRILVEPEGDSFPLMEISTCETEASEQWDYVLVAQRHTQRDPRQARQQQFLEELRRKGFHIKVIRDQKQVFFGIRADNSVFGLYRTLLLEPEGPAPHAELAAPTTIPVTTSLRIRIVNFVVMNNKTSAGETFEDLMKDGVFEARFPLHKGEGRLKKTWARWRHMFREQPVDEIRNYFGEKVALYFVWLGWYTYMLVPAALTGLLVFLSGFSLFEASQISKEICEAHDILMCPLGDHSRRYQRLSETCTFAKLTHLFDNDGTVVFAIFMALWATVFLEIWKRQRARVVLHWDLYVWDEEQEEMALQLINCPDYKLRPYQHSYLRSTVILVLTLLMICLMIGMAHVLVVYRVLASALFSSSAVPFLEEQVTTAVVVTGALVHYVTIIIMTKINRCVALKLCDFEMPRTFSERESRFTIRFFTLQFFTHFSSLIYIAFILGRINGHPGKSTRLAGLWKLEECHASGCMMDLFVQMAIIMGLKQTLSNCVEYLVPWVTHKCRSLRASESGHLPRDPELRDWRRNYLLNPVNTFSLFDEFMEMMIQYGFTTIFVAAFPLAPLLALFSNLVEIRLDAIKMVWLQRRLVPRKAKDIGTWLQVLETIGVLAVIANGMVIAFTSEFIPRVVYKYRYSPCLKEGNSTVDCLKGYVNHSLSVFHTKDFQDPDGIEGSENVTLCRYRDYRNPPDYNFSEQFWFLLAIRLAFVILFEHVALCIKLIAAWFVPDIPQSVKNKVLEVKYQRLREKMWHGRQRLGGVGAGSRPPMPAHPTPASIFSARSTDV

SEQ ID NO: 5504 - protein, 379 aa, Homo sapiens
  Payload ID: 1193;
  Gene Symbol: ANHX;
  Gene Name: anomalous homeobox;
  Uniprot ID:  E9PGG2;
  ENSP ID: ENSP00000409950
MQSFLTLLKEHEDTCAPPAELVTLAGRLCRDFQDDLAQLQPLVTAILDSQLRLHLLDNADVALACARVLDQQEQQQAACRLLEGCQVPGGSQELVQLWNDIHYRLVMRRLGVAALTPVQKFRCRKRNPPPPSLCPEGLKSRNFPREVREKLHNFAVGVNTNPSKAERENLALETSLTPEQVYNWFANYRRRQRALPQHMKPAQQATAEDPGARERGPDLLQPSGNPRVDSGFVDRPQWSEEREEKGPPQSPQTTQGPWEPLALAPDFPADETVSKPLDVSGHPQSVQLEEGLGTSSGRTELRVGSFLVTQPPLQAPEFILTQSPPELAPAPSAFPGPVSAMELSQALPSSQVQCSDSQASGDAFWGARMLLEFSGSSLG

SEQ ID NO: 5505 - protein, 379 aa, Homo sapiens; identical to SEQ ID NO: 5504
  Payload ID: 1193;
  Gene Symbol: ANHX;
  Gene Name: anomalous homeobox;
  Uniprot ID:  E9PGG2;
  ENSP ID: ENSP00000439513

SEQ ID NO: 5506 - protein, 680 aa, Homo sapiens
  Payload ID: 1194;
  Gene Symbol: ANOS1;
  Gene Name: anosmin 1;
  Uniprot ID:  P23352;
  ENSP ID: ENSP00000262648
MVPGVPGAVLTLCLWLAASSGCLAAGPGAAAARRLDESLSAGSVQRARCASRCLSLQITRISAFFQHFQNNGSLVWCQNHKQCSKCLEPCKESGDLRKHQCQSFCEPLFPKKSYECLTSCEFLKYILLVKQGDCPAPEKASGFAAACVESCEVDNECSGVKKCCSNGCGHTCQVPKTLYKGVPLKPRKELRFTELQSGQLEVKWSSKFNISIEPVIYVVQRRWNYGIHPSEDDATHWQTVAQTTDERVQLTDIRPSRWYQFRVAAVNVHGTRGFTAPSKHFRSSKDPSAPPAPANLRLANSTVNSDGSVTVTIVWDLPEEPDIPVHHYKVFWSWMVSSKSLVPTKKKRRKTTDGFQNSVILEKLQPDCDYVVELQAITYWGQTRLKSAKVSLHFTSTHATNNKEQLVKTRKGGIQTQLPFQRRRPTRPLEVGAPFYQDGQLQVKVYWKKTEDPTVNRYHVRWFPEACAHNRTTGSEASSGMTHENYIILQDLSFSCKYKVTVQPIRPKSHSKAEAVFFTTPPCSALKGKSHKPVGCLGEAGHVLSKVLAKPENLSASFIVQDVNITGHFSWKMAKANLYQPMTGFQVTWAEVTTESRQNSLPNSIISQSQILPSDHYVLTVPNLRPSTLYRLEVQVLTPGGEGPATIKTFRTPELPPSSAHRSHLKHRHPHHYKPSPERY

SEQ ID NO: 5507 - protein, 679 aa, Homo sapiens
  Payload ID: 1194;
  Gene Symbol: ANOS1;
  Gene Name: anosmin 1;
  ENSP ID: ENSP00000478734
MVPGVPGAVLTLCLWLAASSGAWRPAPARLCAAAGRVAVCRERPARSCASRCLSLQITRISAFFQHFQNNGSLVWCQNHKQCSKCLEPCKESGDLRKHQCQSFCEPLFPKKSYECLTSCEFLKYILLVKQGDCPAPEKASGFAAACVESCEVDNECSGVKKCCSNGCGHTCQVPKTLYKGVPLKPRKELRFTELQSGQLEVKWSSKFNISIEPVIYVVQRRWNYGIHPSEDDATHWQTVAQTTDERVQLTDIRPSRWYQFRVAAVNVHGTRGFTAPSKHFRSSKDPSAPPAPANLRLANSTVNSDGSVTVTIVWDLPEEPDIPVHHYKVFWSWMVSSKSLVPTKKKRRKTTDGFQNSVILEKLQPDCDYVVELQAITYWGQTRLKSAKVSLHFTSTHATNNKEQLVKTRKGGIQTQLPFQRRRPTRPLEVGAPFYQDGQLQVKVYWKKTEDPTVNRYHVRWFPEACAHNRTTGSEASSGMTHENYIILQDLSFSCKYKVTVQPIRPKSHSKAEAVFFTTPPCSALKGKSHKPVGCLGEAGHVLSKVLAKPENLSASFIVQDVNITGHFSWKMAKANLYQPMTGFQVTWAEVTTESRQNSLPNSIISQSQILPSDHYVLTVPNLRPSTLYRLEVQVLTPGGEGPATIKTFRTPELPPSSAHRSHLKHRHPHHYKPSPERY

SEQ ID NO: 5508 - protein, 258 aa, Homo sapiens [sequence omitted]

SEQ ID NO: 5509 - protein, 98 aa, Homo sapiens
  Payload ID: 1195;
  Gene Symbol: AMN1;
  Gene Name: antagonist of mitotic exit network 1 homolog;
  ENSP ID: ENSP00000396145
MKNISRYLTDIKPLPPNIKDRLIKIMSMQGQITDSNISEGHAPLPRLEYSGAISAHCNLRCLDLETGFHHVAQAGLELRSSSDPSASASQNAGITDFT

SEQ ID NO: 5510 - protein, 216 aa, Homo sapiens
  Payload ID: 1195;
  Gene Symbol: AMN1;
  Gene Name: antagonist of mitotic exit network 1 homolog;
  ENSP ID: ENSP00000438990
MKNISRYLTDIKPLPPNIKDRLIKIMSMQGQITDSNISEILHPEVQTLDLRSCDISDAALLHLSNCRKLKKLNLNASKGNRVSVTSEGIKAVASSCSYLHEASLKRCCNLTDEGVVALALNCQLLKIIDLGGCLSITDVSLHALGKNCPFLQCVDFSATQVSDSGVIALVSGPCAKKLEEIHMGHCVNLTDGAVEAVLTYCPQIRILLFHGCPLIT

SEQ ID NO: 5511 - protein, 58 aa, Homo sapiens
  Payload ID: 1195;
  Gene Symbol: AMN1;
  Gene Name: antagonist of mitotic exit network 1 homolog;
  ENSP ID: ENSP00000439171
MGHCVNLTDGAVEAVLTYCPQIRILLFHGCPLITDHSREVLEQLVGPNKLKQVTWTVY

SEQ ID NO: 5512 - protein, 105 aa, Homo sapiens
  Payload ID: 1195;
  Gene Symbol: AMN1;
  Gene Name: antagonist of mitotic exit network 1 homolog;
  ENSP ID: ENSP00000439438
MKNISRYLTDIKPLPPNIKDRLIKIMSMQGQITDSNISEGHAPLPRLEYSGAISAHCNLRCLDLVQTLDLRSCDISDAALLHLSNCRKLKKLNLNASKGNRVSVT

SEQ ID NO: 5513 - protein, 240 aa, Homo sapiens
  Payload ID: 1195;
  Gene Symbol: AMN1;
  Gene Name: antagonist of mitotic exit network 1 homolog;
  Uniprot ID:  Q8IY45;
  ENSP ID: ENSP00000440967
MKNISRYLTDIKPLPPNIKDRLIKIMSMQGQITDSNISEILHPEVQTLDLRSCDISDAALLHLSNCRKLKKLNLNASKGNRVSVTSEGIKAVASSCSYLHEASLKRCCNLTDEGVVALALNCQLLKIIDLGGCLSITDVSLHALGKNCPFLQCVDFSATQVSDSGVIALVSGPCAKKLEEIHMGHCVNLTDGAVEAVLTYCPQIRILLFHGCPLITDHSREVLEQLVGPNKLKQVTWTVY

SEQ ID NO: 5514 - protein, 240 aa, Homo sapiens; identical to SEQ ID NO: 5513
  Payload ID: 1195;
  Gene Symbol: AMN1;
  Gene Name: antagonist of mitotic exit network 1 homolog;
  Uniprot ID:  Q8IY45;
  ENSP ID: ENSP00000441419

SEQ ID NO: 5515 - protein, 87 aa, Homo sapiens
  Payload ID: 1195;
  Gene Symbol: AMN1;
  Gene Name: antagonist of mitotic exit network 1 homolog;
  ENSP ID: ENSP00000441846
MKNISRYLTDIKPLPPNIKDRLIKIMSMQGQITDSNISEILHPEVQTLDLRSCDISDAALLHLSNCRKLKKLNLNASKGNRVSVTSE

SEQ ID NO: 5516 - protein, 35 aa, Homo sapiens
  Payload ID: 1195;
  Gene Symbol: AMN1;
  Gene Name: antagonist of mitotic exit network 1 homolog;
  ENSP ID: ENSP00000442272
MGHCVNLTDGAVEAVLTYCPQIRILLFHGCPLITG

SEQ ID NO: 5517 - protein, 188 aa, Homo sapiens
  Payload ID: 1196;
  Gene Symbol: AGR2;
  Gene Name: anterior gradient 2, prt disulphide isomerase family member;
  ENSP ID: ENSP00000386025
MEKIPVSAFLLLVALSYTLARDTTVKPGAKKDTKDSRPKLPQTLSRGWGDQLIWTQTYEEALYKSKTSNKPLMIIHHLDECPHSQALKKVFAENKEIQKLAEQFVLLNLVYETTDKHLSPDGQYVPRIMFVDPSLTVRADITGRYSNRLYAYEPADTALCKCDLQFGCCPRVEHLYCCSDGTRGCMVR

SEQ ID NO: 5518 - protein, 175 aa, Homo sapiens
  Payload ID: 1196;
  Gene Symbol: AGR2;
  Gene Name: anterior gradient 2, prt disulphide isomerase family member;
  Uniprot ID:  O95994;
  ENSP ID: ENSP00000391490
MEKIPVSAFLLLVALSYTLARDTTVKPGAKKDTKDSRPKLPQTLSRGWGDQLIWTQTYEEALYKSKTSNKPLMIIHHLDECPHSQALKKVFAENKEIQKLAEQFVLLNLVYETTDKHLSPDGQYVPRIMFVDPSLTVRADITGRYSNRLYAYEPADTALLLDNMKKALKLLKTEL

SEQ ID NO: 5519 - protein, 131 aa, Homo sapiens
  Payload ID: 1196;
  Gene Symbol: AGR2;
  Gene Name: anterior gradient 2, prt disulphide isomerase family member;
  ENSP ID: ENSP00000411969
MEKIPVSAFLLLVALSYTLARDTTVKPGAKKDTKDSRPKLPQTLSRGWGDQLIWTQTYEEALYKSKTSNKPLMIIHHLDECPHSQALKKVFAENKEIQKLAEQFVLLNLVYETTDKHLSPDGQYVPRIMFV

SEQ ID NO: 5520 - protein, 119 aa, Homo sapiens
  Payload ID: 1196;
  Gene Symbol: AGR2;
  Gene Name: anterior gradient 2, prt disulphide isomerase family member;
  ENSP ID: ENSP00000414806
PLMIIHHLDECPHSQALKKVFAENKEIQKLAEQFVLLNLVYETTDKHLSPDGQYVPRIMFVDPSLTVRADITGRYSNRLYAYEPADTALCKCDLQFGCCPRVEHLYCCSDGTRGCMVSA

SEQ ID NO: 5521 - protein, 166 aa, Homo sapiens
  Payload ID: 1197;
  Gene Symbol: AGR3;
  Gene Name: anterior gradient 3, prt disulphide isomerase family member;
  Uniprot ID:  Q8TD06;
  ENSP ID: ENSP00000308606
MMLHSALGLCLLLVTVSSNLAIAIKKEKRPPQTLSRGWGDDITWVQTYEEGLFYAQKSKKPLMVIHHLEDCQYSQALKKVFAQNEEIQEMAQNKFIMLNLMHETTDKNLSPDGQYVPRIMFVDPSLTVRADIAGRYSNRLYTYEPRDLPLLIENMKKALRLIQSEL

SEQ ID NO: 5522 - protein, 163 aa, Homo sapiens
  Payload ID: 1197;
  Gene Symbol: AGR3;
  Gene Name: anterior gradient 3, prt disulphide isomerase family member;
  ENSP ID: ENSP00000386016
MMLHSALGLCLLLVTVSSNLAIAIKKEKRPPQTLSRGWGDDITWVQTYEEGLFYAQKSKKPLMVIHHLEDCQYSQALKKVFAQNEEIQEMAQNKFIMLNLMHETTDKNLSPDGQYVPRIMFVDPSLTVRADIAGRYSNRLYTYEPRDLPLCKYSQMISNSGHS

SEQ ID NO: 5523 - protein, 129 aa, Homo sapiens
  Payload ID: 1197;
  Gene Symbol: AGR3;
  Gene Name: anterior gradient 3, prt disulphide isomerase family member;
  ENSP ID: ENSP00000392818
  MOD_RES (1)..(1): Any amino acid
XNIQNTFPTRALAKSGWGDDITWVQTYEEGLFYAQKSKKPLMVIHHLEDCQYSQALKKVFAQNEEIQEMAQNKFIMLNLMHETTDKNLSPDGQYVPRIMFVDPSLTVRADIAGRYSNRLYTYEPRDLPL

SEQ ID NO: 5524 - protein, 564 aa, Homo sapiens
  Payload ID: 1198;
  Gene Symbol: ANTXR1;
  Gene Name: anthrax toxin receptor 1;
  Uniprot ID:  Q9H6X2;
  ENSP ID: ENSP00000301945
MATAERRALGIGFQWLSLATLVLICAGQGGRREDGGPACYGGFDLYFILDKSGSVLHHWNEIYYFVEQLAHKFISPQLRMSFIVFSTRGTTLMKLTEDREQIRQGLEELQKVLPGGDTYMHEGFERASEQIYYENRQGYRTASVIIALTDGELHEDLFFYSEREANRSRDLGAIVYCVGVKDFNETQLARIADSKDHVFPVNDGFQALQGIIHSILKKSCIEILAAEPSTICAGESFQVVVRGNGFRHARNVDRVLCSFKINDSVTLNEKPFSVEDTYLLCPAPILKEVGMKAALQVSMNDGLSFISSSVIITTTHCSDGSILAIALLILFLLLALALLWWFWPLCCTVIIKEVPPPPAEESEEEDDDGLPKKKWPTVDASYYGGRGVGGIKRMEVRWGEKGSTEEGAKLEKAKNARVKMPEQEYEFPEPRNLNNNMRRPSSPRKWYSPIKGKLDALWVLLRKGYDRVSVMRPQPGDTGRCINFTRVKNNQPAKYPLNNAYHTSSPPPAPIYTPPPPAPHCPPPPPSAPTPPIPSPPSTLPPPPQAPPPNRAPPPSRPPPRPSV

SEQ ID NO: 5525 - protein, 368 aa, Homo sapiens
  Payload ID: 1198;
  Gene Symbol: ANTXR1;
  Gene Name: anthrax toxin receptor 1;
  Uniprot ID:  Q9H6X2;
  ENSP ID: ENSP00000386494
MATAERRALGIGFQWLSLATLVLICAGQGGRREDGGPACYGGFDLYFILDKSGSVLHHWNEIYYFVEQLAHKFISPQLRMSFIVFSTRGTTLMKLTEDREQIRQGLEELQKVLPGGDTYMHEGFERASEQIYYENRQGYRTASVIIALTDGELHEDLFFYSEREANRSRDLGAIVYCVGVKDFNETQLARIADSKDHVFPVNDGFQALQGIIHSILKKSCIEILAAEPSTICAGESFQVVVRGNGFRHARNVDRVLCSFKINDSVTLNEKPFSVEDTYLLCPAPILKEVGMKAALQVSMNDGLSFISSSVIITTTHCSDGSILAIALLILFLLLALALLWWFWPLCCTVIIKEVPPPPAEESEENKIK

SEQ ID NO: 5526 - protein, 333 aa, Homo sapiens
  Payload ID: 1198;
  Gene Symbol: ANTXR1;
  Gene Name: anthrax toxin receptor 1;
  Uniprot ID:  Q9H6X2;
  ENSP ID: ENSP00000387058
MATAERRALGIGFQWLSLATLVLICAGQGGRREDGGPACYGGFDLYFILDKSGSVLHHWNEIYYFVEQLAHKFISPQLRMSFIVFSTRGTTLMKLTEDREQIRQGLEELQKVLPGGDTYMHEGFERASEQIYYENRQGYRTASVIIALTDGELHEDLFFYSEREANRSRDLGAIVYCVGVKDFNETQLARIADSKDHVFPVNDGFQALQGIIHSILKKSCIEILAAEPSTICAGESFQVVVRGNGFRHARNVDRVLCSFKINDSVTLNEKPFSVEDTYLLCPAPILKEVGMKAALQVSMNDGLSFISSSVIITTTHCSLHKIASGPTTAACME

SEQ ID NO: 5527 - protein, 179 aa, Homo sapiens
  Payload ID: 1198;
  Gene Symbol: ANTXR1;
  Gene Name: anthrax toxin receptor 1;
  ENSP ID: ENSP00000430776
  MOD_RES (1)..(1): Any amino acid
XDLGAIVYCVGVKDFNETQLARIADSKDHVFPVNDGFQALQGIIHSILKKSCIEILAAEPSTICAGESFQVVVRGNGFRHARNVDRVLCSFKINDSVTLNEKPFSVEDTYLLCPAPILKEVGMKAALQVSMNDGLSFISSSVIITTTHCDGLWFYIQSLETVKDHRNIRVRNSDLKYCL

SEQ ID NO: 5528 - protein, 489 aa, Homo sapiens
  Payload ID: 1199;
  Gene Symbol: ANTXR2;
  Gene Name: anthrax toxin receptor 2;
  Uniprot ID:  P58335;
  ENSP ID: ENSP00000306185
MVAERSPARSPGSWLFPGLWLLVLSGPGGLLRAQEQPSCRRAFDLYFVLDKSGSVANNWIEIYNFVQQLAERFVSPEMRLSFIVFSSQATIILPLTGDRGKISKGLEDLKRVSPVGETYIHEGLKLANEQIQKAGGLKTSSIIIALTDGKLDGLVPSYAEKEAKISRSLGASVYCVGVLDFEQAQLERIADSKEQVFPVKGGFQALKGIINSILAQSCTEILELQPSSVCVGEEFQIVLSGRGFMLGSRNGSVLCTYTVNETYTTSVKPVSVQLNSMLCPAPILNKAGETLDVSVSFNGGKSVISGSLIVTATECSNGIAAIIVILVLLLLLGIGLMWWFWPLCCKVVIKDPPPPPAPAPKEEEEEPLPTKKWPTVDASYYGGRGVGGIKRMEVRWGDKGSTEEGARLEKAKNAVVKIPEETEEPIRPRPPRPKPTHQPPQTKWYTPIKGRLDALWALLRRQYDRVSLMRPQEGDEVCIWECIEKELTA

SEQ ID NO: 5529 - protein, 386 aa, Homo sapiens
  Payload ID: 1199;
  Gene Symbol: ANTXR2;
  Gene Name: anthrax toxin receptor 2;
  Uniprot ID:  P58335;
  ENSP ID: ENSP00000314883
MVAERSPARSPGSWLFPGLWLLVLSGPGGLLRAQEQPSCRRAFDLYFVLDKSGSVANNWIEIYNFVQQLAERFVSPEMRLSFIVFSSQATIILPLTGDRGKISKGLEDLKRVSPVGETYIHEGLKLANEQIQKAGGLKTSSIIIALTDGKLDGLVPSYAEKEAKISRSLGASVYCVGVLDFEQAQLERIADSKEQVFPVKGGFQALKGIINSSNGIAAIIVILVLLLLLGIGLMWWFWPLCCKVVIKDPPPPPAPAPKEEEEEPLPTKKWPTVDASYYGGRGVGGIKRMEVRWGDKGSTEEGARLEKAKNAVVKIPEETEEPIRPRPPRPKPTHQPPQTKWYTPIKGRLDALWALLRRQYDRVSLMRPQEGDEVCIWECIEKELTA

SEQ ID NO: 5530 - protein, 411 aa, Homo sapiens
  Payload ID: 1199;
  Gene Symbol: ANTXR2;
  Gene Name: anthrax toxin receptor 2;
  ENSP ID: ENSP00000384028
MRLSFIVFSSQATIILPLTGDRGKISKGLEDLKRVSPVGETYIHEGLKLANEQIQKAGGLKTSSIIIALTDGKLDGLVPSYAEKEAKISRSLGASVYCVGVLDFEQAQLERIADSKEQVFPVKGGFQALKGIINSILAQSCTEILELQPSSVCVGEEFQIVLSGRGFMLGSRNGSVLCTYTVNETYTTSVKPVSVQLNSMLCPAPILNKAGETLDVSVSFNGGKSVISGSLIVTATECSNGIAAIIVILVLLLLLGIGLMWWFWPLCCKVVIKDPPPPPAPAPKEEEEEPLPTKKWPTVDASYYGGRGVGGIKRMEVRWGDKGSTEEGARLEKAKNAVVKIPEETEEPIRPRPPRPKPTHQPPQTKWYTPIKGRLDALWALLRRQYDRVSLMRPQEGDEGRCINFSRVPSQ

SEQ ID NO: 5531 - protein, 488 aa, Homo sapiens
  Payload ID: 1199;
  Gene Symbol: ANTXR2;
  Gene Name: anthrax toxin receptor 2;
  Uniprot ID:  P58335;
  ENSP ID: ENSP00000385575
MVAERSPARSPGSWLFPGLWLLVLSGPGGLLRAQEQPSCRRAFDLYFVLDKSGSVANNWIEIYNFVQQLAERFVSPEMRLSFIVFSSQATIILPLTGDRGKISKGLEDLKRVSPVGETYIHEGLKLANEQIQKAGGLKTSSIIIALTDGKLDGLVPSYAEKEAKISRSLGASVYCVGVLDFEQAQLERIADSKEQVFPVKGGFQALKGIINSILAQSCTEILELQPSSVCVGEEFQIVLSGRGFMLGSRNGSVLCTYTVNETYTTSVKPVSVQLNSMLCPAPILNKAGETLDVSVSFNGGKSVISGSLIVTATECSNGIAAIIVILVLLLLLGIGLMWWFWPLCCKVVIKDPPPPPAPAPKEEEEEPLPTKKWPTVDASYYGGRGVGGIKRMEVRWGDKGSTEEGARLEKAKNAVVKIPEETEEPIRPRPPRPKPTHQPPQTKWYTPIKGRLDALWALLRRQYDRVSLMRPQEGDEGRCINFSRVPSQ

SEQ ID NO: 5532 - protein, 245 aa, Homo sapiens
  Payload ID: 1199;
  Gene Symbol: ANTXR2;
  Gene Name: anthrax toxin receptor 2;
  ENSP ID: ENSP00000413700
MRLSFIVFSSQATIILPLTGDRGKISKGLEDLKRVSPVGETYIHEGLKLANEQIQKAGGLKTSSIIIALTDGKLDGLVPSYAEKEAKISRSLGASVYCVGVLDFEQAQLERIADSKEQVFPVKGGFQALKGIINSILAQSCTEILELQPSSVCVGEEFQIVLSGRGFMLGSRNGSVLCTYTVNETYTTSVKPVSVQLNSMLCPAPILNKAGEWGLTVTQAGVKWHDLTHCTFGLSGSGDPPTSAS

SEQ ID NO: 5533 - protein, 112 aa, Homo sapiens
  Payload ID: 1200;
  Gene Symbol: ANTXRL;
  Gene Name: anthrax toxin receptor-like;
  ENSP ID: ENSP00000479364
  MOD_RES (1)..(1): Any amino acid
XAQKARKLGANVYTLGVADYNLDQITAIADSPGHVFAVENGFKALRSTIDALTSKVCLDVTSVEPSSECVGEPYHVVIHGNGFQNLKKRDEVICRFIFNESTIIGSTLLKSA

SEQ ID NO: 5534 - protein, 565 aa, Homo sapiens [sequence omitted]

SEQ ID NO: 5535 - protein, 61 aa, Homo sapiens
  Payload ID: 1200;
  Gene Symbol: ANTXRL;
  Gene Name: anthrax toxin receptor-like;
  ENSP ID: ENSP00000479836
MWVEETVARFQSPNIRMCFITYSTDGQTVLPLTSDKNRIKNGLDQLQKIVPDGHTFMQAGF

SEQ ID NO: 5536 - protein, 631 aa, Homo sapiens
  Payload ID: 1200;
  Gene Symbol: ANTXRL;
  Gene Name: anthrax toxin receptor-like;
  Uniprot ID:  A6NF34;
  ENSP ID: ENSP00000480615
MGSHESLGPYFLVFLLLLLLPPPLFRAGSLRYHGPDWRIFHRLALGSRRAHHHHGPGWRQHWRQGQAGHRCQGSFDLYFILDKSGSVNNNWIDLYMWVEETVARFQSPNIRMCFITYSTDGQTVLPLTSDKNRIKNGLDQLQKIVPDGHTFMQAGFRKAIQQIESFNSGNKVPSMIIAMTDGELVAHAFQDTLREAQKARKLGANVYTLGVADYNLDQITAIADSPGHVFAVENGFKALRSTIDALTSKVCLDVTSVEPSSECVGEPYHVVIHGNGFQNLKKRDEVICRFIFNESTIIDEKPTSIDNNSMNCPGPKLEKPGEEYSIEVSLNKGKTFFKSNVSITSTTCGIFRNWLYFVPLLLLVPLLLCCVWRLCRKQTVKEPPPVQKPEKEPEQEKPPSPPPPPPPPPPPLPPPPPAPVNTCPTVIICCCGCQGVGGMRRIEGNLDTFCDLSHASCHQVPWMCCQSRDQGRYLSLALAQSQYAQAPCCPRICFPHSQECLSLPQAPCSPRMCLRHSRECLALKQARCSPNICLRHSQHSRECLARKQAPCSPRICLRHSPEYFSQAQTLCNPKSCLQPSRECLPLTCSSRCRLPPARCLRPPSRMLPLLSPLLRHTAEPPLSLPPSEPNF

SEQ ID NO: 5537 - protein, 257 aa, Homo sapiens
  Payload ID: 1200;
  Gene Symbol: ANTXRL;
  Gene Name: anthrax toxin receptor-like;
  ENSP ID: ENSP00000481410
MWVEETVARFQSPNIRMCFITYSTDGQTVLPLTSDKNRIKNGLDQLQKIVPDGHTFMQAGFRKAIQQIESFNSGNKVPSMIIAMTDGELVAHAFQDTLREAQKARKLGANVYTLGVADYNLDQITAIADSPGHVFAVENGFKALRSTIDALTSKVCLDVTSVEPSSECVGEPYHVVIHGNGFQNLKKRDEVICRFIFNESTIIDEKPTSIDNNSMNCPGPKLEKPGEEYSIEVSLNKGKTFFKSNVSITSTTCPSLK

SEQ ID NO: 5538 - protein, 738 aa, Homo sapiens
  Payload ID: 1201;
  Gene Symbol: MFI2;
  Gene Name: antigen p97 (melanoma associated) identified by monoclonal antibodies 133.2 and 96.5;
  Uniprot ID:  P08582;
  ENSP ID: ENSP00000296350
MRGPSGALWLLLALRTVLGGMEVRWCATSDPEQHKCGNMSEAFREAGIQPSLLCVRGTSADHCVQLIAAQEADAITLDGGAIYEAGKEHGLKPVVGEVYDQEVGTSYYAVAVVRRSSHVTIDTLKGVKSCHTGINRTVGWNVPVGYLVESGRLSVMGCDVLKAVSDYFGGSCVPGAGETSYSESLCRLCRGDSSGEGVCDKSPLERYYDYSGAFRCLAEGAGDVAFVKHSTVLENTDGKTLPSWGQALLSQDFELLCRDGSRADVTEWRQCHLARVPAHAVVVRADTDGGLIFRLLNEGQRLFSHEGSSFQMFSSEAYGQKDLLFKDSTSELVPIATQTYEAWLGHEYLHAMKGLLCDPNRLPPYLRWCVLSTPEIQKCGDMAVAFRRQRLKPEIQCVSAKSPQHCMERIQAEQVDAVTLSGEDIYTAGKTYGLVPAAGEHYAPEDSSNSYYVVAVVRRDSSHAFTLDELRGKRSCHAGFGSPAGWDVPVGALIQRGFIRPKDCDVLTAVSEFFNASCVPVNNPKNYPSSLCALCVGDEQGRNKCVGNSQERYYGYRGAFRCLVENAGDVAFVRHTTVFDNTNGHNSEPWAAELRSEDYELLCPNGARAEVSQFAACNLAQIPPHAVMVRPDTNIFTVYGLLDKAQDLFGDDHNKNGFKMFDSSNYHGQDLLFKDATVRAVPVGEKTTYRGWLGLDYVAALEGMSSQQCSGAAAPAPGAPLLPLLLPALAARLLPPAL

SEQ ID NO: 5539 - protein, 302 aa, Homo sapiens
  Payload ID: 1201;
  Gene Symbol: MFI2;
  Gene Name: antigen p97 (melanoma associated) identified by monoclonal antibodies 133.2 and 96.5;
  Uniprot ID:  P08582;
  ENSP ID: ENSP00000296351
MRGPSGALWLLLALRTVLGGMEVRWCATSDPEQHKCGNMSEAFREAGIQPSLLCVRGTSADHCVQLIAAQEADAITLDGGAIYEAGKEHGLKPVVGEVYDQEVGTSYYAVAVVRRSSHVTIDTLKGVKSCHTGINRTVGWNVPVGYLVESGRLSVMGCDVLKAVSDYFGGSCVPGAGETSYSESLCRLCRGDSSGEGVCDKSPLERYYDYSGAFRCLAEGAGDVAFVKHSTVLENTDESPSRRQTWTRSEEEEGECPAHEEARRTMRSSAGQAWKWAPVHRPQDESDKGEFGKRAKSRDMLG

SEQ ID NO: 5540 - protein, 181 aa, Homo sapiens
  Payload ID: 1201;
  Gene Symbol: MFI2;
  Gene Name: antigen p97 (melanoma associated) identified by monoclonal antibodies 133.2 and 96.5;
  ENSP ID: ENSP00000393439
MRGPSGALWLLLALRTVLGGMEVRWCATSDPEQHKCGNMSEAFREAGIQPSLLCVRGTSADHCVQLIAAQEADAITLDGGAIYEAGKEHGLKPVVGEVYDQEVGTSYYAVAVVRRSSHVTIDTLKGVKSCHTGINRTVGWNVPVGYLVESGRLSVMGCDVLKGPKRGADLHPESSQVAHQP

SEQ ID NO: 5541 - protein, 560 aa, Homo sapiens
  Payload ID: 1202;
  Gene Symbol: AMH;
  Gene Name: anti-Mullerian hormone;
  Uniprot ID:  P03971;
  ENSP ID: ENSP00000221496
MRDLPLTSLALVLSALGALLGTEALRAEEPAVGTSGLIFREDLDWPPGSPQEPLCLVALGGDSNGSSSPLRVVGALSAYEQAFLGAVQRARWGPRDLATFGVCNTGDRQAALPSLRRLGAWLRDPGGQRLVVLHLEEVTWEPTPSLRFQEPPPGGAGPPELALLVLYPGPGPEVTVTRAGLPGAQSLCPSRDTRYLVLAVDRPAGAWRGSGLALTLQPRGEDSRLSTARLQALLFGDDHRCFTRMTPALLLLPRSEPAPLPAHGQLDTVPFPPPRPSAELEESPPSADPFLETLTRLVRALRVPPARASAPRLALDPDALAGFPQGLVNLSDPAALERLLDGEEPLLLLLRPTAATTGDPAPLHDPTSAPWATALARRVAAELQAAAAELRSLPGLPPATAPLLARLLALCPGGPGGLGDPLRALLLLKALQGLRVEWRGRDPRGPGRAQRSAGATAADGPCALRELSVDLRAERSVLIPETYQANNCQGVCGWPQSDRNPRYGNHVVLLLKMQVRGAALARPPCCVPTAYAGKLLISLSEERISAHHVPNMVATECGCR

SEQ ID NO: 5542 - protein, 573 aa, Homo sapiens
  Payload ID: 1203;
  Gene Symbol: AMHR2;
  Gene Name: anti-Mullerian hormone receptor, type II;
  Uniprot ID:  Q16671;
  ENSP ID: ENSP00000257863
MLGSLGLWALLPTAVEAPPNRRTCVFFEAPGVRGSTKTLGELLDTGTELPRAIRCLYSRCCFGIWNLTQDRAQVEMQGCRDSDEPGCESLHCDPSPRAHPSPGSTLFTCSCGTDFCNANYSHLPPPGSPGTPGSQGPQAAPGESIWMALVLLGLFLLLLLLLGSIILALLQRKNYRVRGEPVPEPRPDSGRDWSVELQELPELCFSQVIREGGHAVVWAGQLQGKLVAIKAFPPRSVAQFQAERALYELPGLQHDHIVRFITASRGGPGRLLSGPLLVLELHPKGSLCHYLTQYTSDWGSSLRMALSLAQGLAFLHEERWQNGQYKPGIAHRDLSSQNVLIREDGSCAIGDLGLALVLPGLTQPPAWTPTQPQGPAAIMEAGTQRYMAPELLDKTLDLQDWGMALRRADIYSLALLLWEILSRCPDLRPDSSPPPFQLAYEAELGNTPTSDELWALAVQERRRPYIPSTWRCFATDPDGLRELLEDCWDADPEARLTAECVQQRLAALAHPQESHPFPESCPRGCPPLCPEDCTSIPAPTILPCRPQRSACHFSVQQGPCSRNPQPACTLSPV

SEQ ID NO: 5543 - protein, 478 aa, Homo sapiens
  Payload ID: 1203;
  Gene Symbol: AMHR2;
  Gene Name: anti-Mullerian hormone receptor, type II;
  Uniprot ID:  Q16671;
  ENSP ID: ENSP00000369117
MLGSLGLWALLPTAVEAPPNRRTCVFFEAPGVRGSTKTLGELLDTGTELPRAIRCLYSRCCFGIWNLTQDRAQVEMQGCRDSDEPGCESLHCDPSPRAHPSPGSTLFTCSCGTDFCNANYSHLPPPGSPGTPGSQGPQAAPGESIWMALVLLGLFLLLLLLLGSIILALLQRKNYRVRGEPVPEPRPDSGRDWSVELQELPELCFSQVIREGGHAVVWAGQLQGKLVAIKAFPPRSVAQFQAERALYELPGLQHDHIVRFITASRGGPGRLLSGPLLVLELHPKGSLCHYLTQYTSDWGSSLRMALSLAQGLAFLHEERWQNGQYKPGIAHRDLSSQNVLIREDGSCAIGDLGLALVLPGLTQPPAWTPTQPQGPAAIMEDPDGLRELLEDCWDADPEARLTAECVQQRLAALAHPQESHPFPESCPRGCPPLCPEDCTSIPAPTILPCRPQRSACHFSVQQGPCSRNPQPACTLSPV

SEQ ID NO: 5544 - protein, 478 aa, Homo sapiens
  Payload ID: 1203;
  Gene Symbol: AMHR2;
  Gene Name: anti-Mullerian hormone receptor, type II;
  Uniprot ID:  Q16671;
  ENSP ID: ENSP00000446661
MLGSLGLWALLPTAVEAPPNRRTCVFFEAPGVRGSTKTLGELLDTGTELPRAIRCLYSRCCFGIWNLTQDRAQVEMQGCRDSDEPGCESLHCDPSPRAHPSPGSTLFTCSCGTDFCNANYSHLPPPGSPGTPGSQGPQAAPGESIWMALVLLGLFLLLLLLLGSIILALLQRKNYRVRGEPVPEPRPDSGRDWSVELQELPELCFSQVIREGGHAVVWAGQLQGKLVAIKAFPPRSVAQFQAERALYELPGLQHDHIVRFITASRGGPGRLLSGPLLVLELHPKGSLCHYLTQYTSDWGSSLRMALSLAQGLAFLHEERWQNGQYKPGIAHRDLSSQNVLIREDGSCAIGDLGLALVLPGLTQPPAWTPTQPQGPAAIMEAGTQRYMAPELLDKTLDLQDWGMALRRADIYSLALLLWEILSRCPDLRPAVHHPSNWPMRQNWAIPLPLMSYGPWQCRRGGVPTSHPPGAALPQTLMG

SEQ ID NO: 5545 - protein, 172 aa, Homo sapiens
  Payload ID: 1203;
  Gene Symbol: AMHR2;
  Gene Name: anti-Mullerian hormone receptor, type II;
  ENSP ID: ENSP00000455338
MALSLAQGLAFLHEERWQNGQYKPGIAHRDLSSQNVLIREDGSCAIGDLGLALVLPGLTQPPAWTPTQPQGPAAIMEAGTQRYMAPELLDKTLDLQDWGMALRRADIYSLALLLWEILSRCPDLRPDSSPPPFQLAYEAELGNTPTSDELWALAVQERRRPYIPSTWRCFAT

SEQ ID NO: 5546 - protein, 68 aa, Homo sapiens
  Payload ID: 1204;
  Gene Symbol: ATOX1;
  Gene Name: antioxidant 1 copper chaperone;
  Uniprot ID:  O00244;
  ENSP ID: ENSP00000316854
MPKHEFSVDMTCGGCAEAVSRVLNKLGGVKYDIDLPNKKVCIESEHSMDTLLATLKKTGKTVSYLGLE

SEQ ID NO: 5547 - protein, 73 aa, Homo sapiens
  Payload ID: 1204;
  Gene Symbol: ATOX1;
  Gene Name: antioxidant 1 copper chaperone;
  ENSP ID: ENSP00000429366
MKAESPGKHEFSVDMTCGGCAEAVSRVLNKLGGVKYDIDLPNKKVCIESEHSMDTLLATLKKTGKTVSYLGLE

SEQ ID NO: 5548 - protein, 68 aa, Homo sapiens; identical to SEQ ID NO: 5546
  Payload ID: 1204;
  Gene Symbol: ATOX1;
  Gene Name: antioxidant 1 copper chaperone;
  Uniprot ID:  O00244;
  ENSP ID: ENSP00000429814

SEQ ID NO: 5549 - protein, 59 aa, Homo sapiens
  Payload ID: 1204;
  Gene Symbol: ATOX1;
  Gene Name: antioxidant 1 copper chaperone;
  ENSP ID: ENSP00000429982
MTCGGCAEAVSRVLNKLGGVKYDIDLPNKKVCIESEHSMDTLLATLKKTGKTVSYLGLE

SEQ ID NO: 5550 - protein, 59 aa, Homo sapiens; identical to SEQ ID NO: 5549
  Payload ID: 1204;
  Gene Symbol: ATOX1;
  Gene Name: antioxidant 1 copper chaperone;
  ENSP ID: ENSP00000430028

SEQ ID NO: 5551 - protein, 68 aa, Homo sapiens; identical to SEQ ID NO: 5546
  Payload ID: 1204;
  Gene Symbol: ATOX1;
  Gene Name: antioxidant 1 copper chaperone;
  Uniprot ID:  O00244;
  ENSP ID: ENSP00000430598

SEQ ID NO: 5552 - protein, 204 aa, Homo sapiens
  Payload ID: 1205;
  Gene Symbol: ASF1A;
  Gene Name: anti-silencing function 1A histone chaperone;
  Uniprot ID:  Q9Y294;
  ENSP ID: ENSP00000229595
MAKVQVNNVVVLDNPSPFYNPFQFEITFECIEDLSEDLEWKIIYVGSAESEEYDQVLDSVLVGPVPAGRHMFVFQADAPNPGLIPDADAVGVTVVLITCTYRGQEFIRVGYYVNNEYTETELRENPPVKPDFSKLQRNILASNPRVTRFHINWEDNTEKLEDAESSNPNLQSLLSTDALPSASKGWSTSENSLNVMLESHMDCM

SEQ ID NO: 5553 - protein, 202 aa, Homo sapiens
  Payload ID: 1206;
  Gene Symbol: ASF1B;
  Gene Name: anti-silencing function 1B histone chaperone;
  Uniprot ID:  Q9NVP2;
  ENSP ID: ENSP00000263382
MAKVSVLNVAVLENPSPFHSPFRFEISFECSEALADDLEWKIIYVGSAESEEFDQILDSVLVGPVPAGRHMFVFQADAPNPSLIPETDAVGVTVVLITCTYHGQEFIRVGYYVNNEYLNPELRENPPMKPDFSQLQRNILASNPRVTRFHINWDNNMDRLEAIETQDPSLGCGLPLNCTPIKGLGLPGCIPGLLPENSMDCI

SEQ ID NO: 5554 - protein, 81 aa, Homo sapiens
  Payload ID: 1206;
  Gene Symbol: ASF1B;
  Gene Name: anti-silencing function 1B histone chaperone;
  ENSP ID: ENSP00000464802
MAKVSVLNVAVLENPSPFHSPFRFEISFECSEALADDLEWKIIYVGSAESEEFDQILDSVLVGPVPAGRHMFVFQRLMPWV

SEQ ID NO: 5555 - protein, 165 aa, Homo sapiens
  Payload ID: 1206;
  Gene Symbol: ASF1B;
  Gene Name: anti-silencing function 1B histone chaperone;
  ENSP ID: ENSP00000466257
MAKVSVLNVAVLENPSPFHSPFRFEISFECSEALADDLEWKIIYVGSAESEEFDQILDSVLVGPVPAGRHMFVFQADAPNPSLIPETDAVGVTVVLITCTYHGQEFIRVGYYVNNEYLNPELRENPPMKPDFSQVGPVSTSCFPQGRSLYLGGVQPFKLRVKVTS

SEQ ID NO: 5556 - protein, 48 aa, Homo sapiens
  Payload ID: 1206;
  Gene Symbol: ASF1B;
  Gene Name: anti-silencing function 1B histone chaperone;
  ENSP ID: ENSP00000466409
MAKVSVLNVAVLENPSPFHSPFRFEISFECSEALADGRRPQPIPHPRD

SEQ ID NO: 5557 - protein, 143 aa, Homo sapiens
  Payload ID: 1206;
  Gene Symbol: ASF1B;
  Gene Name: anti-silencing function 1B histone chaperone;
  ENSP ID: ENSP00000468513
MAKVSVLNVAVLENPSPFHSPFRFEISFECSEALADDLEWKIIYVGSAESEEFDQILDSVLVGPVPAGRHMFVFQLQRNILASNPRVTRFHINWDNNMDRLEAIETQDPSLGCGLPLNCTPIKGLGLPGCIPGLLPENSMDCI

SEQ ID NO: 5558 - protein, 448 aa, Homo sapiens
  Payload ID: 1207;
  Gene Symbol: AZIN1;
  Gene Name: antizyme inhibitor 1;
  Uniprot ID:  O14977;
  ENSP ID: ENSP00000321507
MKGFIDDANYSVGLLDEGTNLGNVIDNYVYEHTLTGKNAFFVGDLGKIVKKHSQWQNVVAQIKPFYTVKCNSAPAVLEILAALGTGFACSSKNEMALVQELGVPPENIIYISPCKQVSQIKYAAKVGVNILTCDNEIELKKIARNHPNAKVLLHIATEDNIGGEEGNMKFGTTLKNCRHLLECAKELDVQIIGVKFHVSSACKESQVYVHALSDARCVFDMAGEIGFTMNMLDIGGGFTGTEFQLEEVNHVISPLLDIYFPEGSGVKIISEPGSYYVSSAFTLAVNIIAKKVVENDKFPSGVEKTGSDEPAFMYYMNDGVYGSFASKLSEDLNTIPEVHKKYKEDEPLFTSSLWGPSCDELDQIVESCLLPELNVGDWLIFDNMGADSFHEPSAFNDFQRPAIYYMMSFSDWYEMQDAGITSDSMMKNFFFVPSCIQLSQEDSFSAEA

SEQ ID NO: 5559 - protein, 448 aa, Homo sapiens; identical to SEQ ID NO: 5558
  Payload ID: 1207;
  Gene Symbol: AZIN1;
  Gene Name: antizyme inhibitor 1;
  Uniprot ID:  O14977;
  ENSP ID: ENSP00000337180

SEQ ID NO: 5560 - protein, 33 aa, Homo sapiens
  Payload ID: 1207;
  Gene Symbol: AZIN1;
  Gene Name: antizyme inhibitor 1;
  ENSP ID: ENSP00000429215
MKGFIDDANYSVGLLDEGTNLGNVIDNYVYEHT

SEQ ID NO: 5561 - protein, 97 aa, Homo sapiens
  Payload ID: 1207;
  Gene Symbol: AZIN1;
  Gene Name: antizyme inhibitor 1;
  ENSP ID: ENSP00000429449
MKGFIDDANYSVGLLDEGTNLGNVIDNYVYEHTLTGKNAFFVGDLGKIVKKHSQWQNVVAQIKPFYTVKCNSAPAVLEILAALGTGFACSSKNEMAL

SEQ ID NO: 5562 - protein, 165 aa, Homo sapiens
  Payload ID: 1207;
  Gene Symbol: AZIN1;
  Gene Name: antizyme inhibitor 1;
  ENSP ID: ENSP00000475919
MKGFIDDANYSVGLLDEGTNLGNVIDNYVYEHTLNEMALVQELGVPPENIIYISPCKQVSQIKYAAKVGVNILTCDNEIELKKIARNHPNAKVLLHIATEDNIGGEEGNMKFGTTLKNCRHLLECAKELDVQIIGVKFHVSSACKESQVYVHALSDARCVFDMAG

SEQ ID NO: 5563 - protein, 460 aa, Homo sapiens
  Payload ID: 1208;
  Gene Symbol: AZIN2;
  Gene Name: antizyme inhibitor 2;
  Uniprot ID:  Q96A70;
  ENSP ID: ENSP00000294517
MAGYLSESDFVMVEEGFSTRDLLKELTLGASQATTDEVAAFFVADLGAIVRKHFCFLKCLPRVRPFYAVKCNSSPGVLKVLAQLGLGFSCANKAEMELVQHIGIPASKIICANPCKQIAQIKYAAKHGIQLLSFDNEMELAKVVKSHPSAKMVLCIATDDSHSLSCLSLKFGVSLKSCRHLLENAKKHHVEVVGVSFHIGSGCPDPQAYAQSIADARLVFEMGTELGHKMHVLDLGGGFPGTEGAKVRFEEIASVINSALDLYFPEGCGVDIFAELGRYYVTSAFTVAVSIIAKKEVLLDQPGREEENGSTSKTIVYHLDEGVYGIFNSVLFDNICPTPILQKKPSTEQPLYSSSLWGPAVDGCDCVAEGLWLPQLHVGDWLVFDNMGAYTVGMGSPFWGTQACHITYAMSRVAWEALRRQLMAAEQEDDVEGVCKPLSCGWEITDTLCVGPVFTPASIM

SEQ ID NO: 5564 - protein, 204 aa, Homo sapiens
  Payload ID: 1208;
  Gene Symbol: AZIN2;
  Gene Name: antizyme inhibitor 2;
  Uniprot ID:  Q96A70;
  ENSP ID: ENSP00000362539
MAGYLSESDFVMVEEGFSTRDLLKELTLGASQATTDEVAAFFVADLGAIVRKHFCFLKCLPRVRPFYAVKCNSSPGVLKVLAQLGLGFSCANKIASVINSALDLYFPEGCGVDIFAELGRYYVTSAFTVAVSIIAKKEVLLDQPGREEENGSTSKTIVYHLDEGVYGIFNSVLFDNICPTPILQKSKNHSPCYMSLESIHFIAV

SEQ ID NO: 5565 - protein, 480 aa, Homo sapiens
  Payload ID: 1208;
  Gene Symbol: AZIN2;
  Gene Name: antizyme inhibitor 2;
  Uniprot ID:  Q96A70;
  ENSP ID: ENSP00000362540
MAGYLSESDFVMVEEGFSTRDLLKELTLGASQATTDEVAAFFVADLGAIVRKHFCFLKCLPRVRPFYAVKCNSSPGVLKVLAQLGLGFSCANKAEMELVQHIGIPASKIICANPCKQIAQIKYAAKHGIQLLSFDNEMELAKVVKSHPSAKMVLCIATDDSHSLSCLSLKFGVSLKSCRHLLENAKKHHVEVVGVSFHIGSGCPDPQAYAQSIADARLVFEMGTELGHKMHVLDLGGGFPGTEGAKVRFEEIASVINSALDLYFPEGCGVDIFAELGRYYVTSAFTVAVSIIAKKEVLLDQPGREAPLPPPHIATCAASEPSPPAEENGSTSKTIVYHLDEGVYGIFNSVLFDNICPTPILQKKPSTEQPLYSSSLWGPAVDGCDCVAEGLWLPQLHVGDWLVFDNMGAYTVGMGSPFWGTQACHITYAMSRVAWEALRRQLMAAEQEDDVEGVCKPLSCGWEITDTLCVGPVFTPASIM

SEQ ID NO: 5566 - protein, 460 aa, Homo sapiens; identical to SEQ ID NO: 5563
  Payload ID: 1208;
  Gene Symbol: AZIN2;
  Gene Name: antizyme inhibitor 2;
  Uniprot ID:  Q96A70;
  ENSP ID: ENSP00000362542

SEQ ID NO: 5567 - protein, 297 aa, Homo sapiens
  Payload ID: 1209;
  Gene Symbol:;
  Gene Name: AP000275.65;
  ENSP ID: ENSP00000391771
  MOD_RES (1)..(1): Any amino acid
XVYNGRLKVQRLCSEMEELAEHGIFLPPNMQGLTDDQIEELKLKDEWGEKCVPSGGAVFKKDDIGRRNGQAPNEKMKQVLKKTIEEAKAIISKKQVEAGVCVTMEMVKDALDQLRGAVMIVYPMGLPPYDPIRMEFENKEDLSGTQAGLNVIKEAEAQLWWAAKELRRTKKLSDYVGKNEKTKIIAKIQQRGQGAPAREPIISSEEQKQLMLYYHRRQEELKPLQQQIIRLHQELGRQKSLWADVHGKLRSHIDALREQNMELREKLRALQLQRWKARKKSAASPHAGQESHTLALE

SEQ ID NO: 5568 - protein, 297 aa, Homo sapiens
  Payload ID: 1209;
  Gene Symbol:;
  Gene Name: AP000275.65;
  ENSP ID: ENSP00000446874
MVLLHVKRGDESQFLLQAPGSTELEELTVQVARVYNGRLKVQRLCSEMEELAEHGIFLPPNMQGLTDDQIEELKLKDEWGEKCVPSGGAVFKKDDIGRRNGQAPNEKMKQVLKKTIEEAKAIISKKQVEAGVCVTMEMVKDALDQLRGAVMIVYPMGLPPYDPIRMEFENKEDLSGTQAGLNVIKEAEAQLWWAAKELRRTKKLSDYVGKNEKTKIIAKIQQPLQQQIIRLHQELGRQKSLWADVHGKLRSHIDALREQNMELREKLRALQLQRWKARKKSAASPHAGQESHTLALE

SEQ ID NO: 5569 - protein, 333 aa, Homo sapiens
  Payload ID: 1210;
  Gene Symbol:;
  Gene Name: AP000295.9;
  ENSP ID: ENSP00000388223
  MOD_RES (1)..(1): Any amino acid
XDLTDEWRSTHEAYVTVLEGFSGNTTLFSCSHNFWLAIDMSFEPPEFEIVGFTNHINVMVKFPSIVEEELQFDLSLVIEEQSEGIVKKHKPEIKGNMSGNFTYIIDKLIPNTNYCVSVYLEHSDEQAVIKSPLKCTLLPPGQESALGMVPPPENVRMNSVNFKNILQWESPAFAKGNLTFTAQYLSYRIFQDKCMNTTLTECDFSSLSKYGDHTLRVRAEFADEHSDWVNITFCPVDDTIIGPPGMQVEVLADSLHMRFLAPKIENEYETWTMKNVYNSWTYNVQYWKNGTDEKFQITPQYDFEVLRNLEPWTTYCVQVRGFLPDRNKAGEWS

SEQ ID NO: 5570 - protein, 112 aa, Homo sapiens
  Payload ID: 1210;
  Gene Symbol:;
  Gene Name: AP000295.9;
  ENSP ID: ENSP00000413946
  MOD_RES (1)..(1): Any amino acid
XEPPEFEIVGFTNHINVMVKFPSIVEEELQFDLSLVIEEQSEGIVKKHKPEIKGNMSGNFTYIIDKLIPNTNYCVSVYLEHSDEQAVIKSPLKCTLLPPGQESVIGYSKINA

SEQ ID NO: 5571 - protein, 242 aa, Homo sapiens
  Payload ID: 1211;
  Gene Symbol:;
  Gene Name: AP000304.12;
  ENSP ID: ENSP00000394107
MAAPAVSGLSRQVRCFSTSVVRPFAKLVRPPVQVYGIEGRYATALYSAASKQNKLEQVEKELLRVAQILKEPKVAASVLNPYVKRSIKVKSLNDITAKERFSPLTTNLINLLAENGRLSNTQGVVSAFSTMMSVHRGEVPCTVTSASTSHVSFSEPDIPSSKSTELPVDWSIKTRLLFTSSQPFTWADHLKAQEEAQGLVQHCRATEVTLPKSIQDPKLSSELRCTFQQSLIYWLHPALSWL

SEQ ID NO: 5572 - protein, 139 aa, Homo sapiens
  Payload ID: 1212;
  Gene Symbol:;
  Gene Name: AP000322.53;
  Uniprot ID:  A8MWV9;
  ENSP ID: ENSP00000397039
MEWAKWTPHEASNQTQASTLLGLLLGDHTEGRNDTNSTRALKVPDGTSAAWYILTIIGIYAVIFVFRLASNILRKNDKSLEDVYYSNLTSELKMTGLQGKVAKCSTLSISNRAVLQPCQAHLGAKGGSSGPQTATPETP

SEQ ID NO: 5573 - protein, 249 aa, Homo sapiens
  Payload ID: 1213;
  Gene Symbol:;
  Gene Name: AP000349.1;
  ENSP ID: ENSP00000469183
MGPQHPCFSASPWKEPHNRDTARTLQFPQSCHGATLRDRDGDRAARFARTCIAGPRLPFLLSHAKASLPSLRQSLAGDHDLRGPPGSCHGGCTPPHPPEETWAQSHAWCPQPQRWPWVSSLIFVAWQGSAPLRASKPWSEESVGRLGTAKEVRTHETGEAFQSLHLHRVKLPVEAAAQEVGIAISILEGSVDLRGHPSPVSGCGARDCLHAGCWGGNASSPCLGRSRSCSSRDPRPRQHGPGTSPGPAR

SEQ ID NO: 5574 - protein, 249 aa, Homo sapiens; identical to SEQ ID NO: 5573
  Payload ID: 1214;
  Gene Symbol:;
  Gene Name: AP000349.2;
  ENSP ID: ENSP00000485053

SEQ ID NO: 5575 - protein, 209 aa, Homo sapiens
  Payload ID: 1215;
  Gene Symbol:;
  Gene Name: AP000350.10;
  ENSP ID: ENSP00000400325
NAPTLHIQEFTNETWQARTGEPLPDHLVLLMWSLIVSLYPLGGLFGALLAGPLAITLGRKKSLLVNNIFVVSAAILFGFSRKAGSFEMIMLGRLLVGVNAGVSMNIQPMYLGESAPKELRGAVAMSSAIFTALGIVMGQVVGLSTSRCTWSRTSSWPSAAPASRARSAACTASARSAARRTAPTASCCAACWPSACASARTGSTSTITT

SEQ ID NO: 5576 - protein, 209 aa, Homo sapiens; identical to SEQ ID NO: 5575
  Payload ID: 1215;
  Gene Symbol:;
  Gene Name: AP000350.10;
  ENSP ID: ENSP00000487472

SEQ ID NO: 5577 - protein, 36 aa, Homo sapiens
  Payload ID: 1216;
  Gene Symbol:;
  Gene Name: AP000351.1;
  ENSP ID: ENSP00000483993
QVAFGQDYCTTVPSPEYYSKTQSEHSIPANSLKPST

SEQ ID NO: 5578 - protein, 124 aa, Homo sapiens
  Payload ID: 1217;
  Gene Symbol:;
  Gene Name: AP000687.1;
  ENSP ID: ENSP00000485343
MTLNEHAAFKHLFNKAHLAPPLIHLTLSGHSTCFREHRVGGKVTDQQDPKAEEFFLVQNKIKSLPCLLLSTQTQQPSDFSIFSPPFPSFDSTKPPLSSWPVLNELLGTPPRRGGGRAEGLLTSQ

SEQ ID NO: 5579 - protein, 164 aa, Homo sapiens
  Payload ID: 1218;
  Gene Symbol:;
  Gene Name: AP000721.4;
  ENSP ID: ENSP00000475957
MSVLTPLLLRGLTGSARRLPVPRAKIHSLPPEGKLGIMGKENGIGSRRICNHHRELWEAGKMEPNQCVGWRCGSGAAGLSYRSQVRRPGVPAPATGLEAHSLTTPKGIPLLGLLPRRGNEEGLASGRTAIGNPEAVGSAALFKDGGGGTSAAEAGAAGQRLRRC

SEQ ID NO: 5580 - protein, 67 aa, Homo sapiens [sequence omitted]

SEQ ID NO: 5581 - protein, 14 aa, Homo sapiens
  Payload ID: 1220;
  Gene Symbol:;
  Gene Name: AP001888.1;
  ENSP ID: ENSP00000487309
LSIRQWKSLDTPPG

SEQ ID NO: 5582 - protein, 140 aa, Homo sapiens
  Payload ID: 1221;
  Gene Symbol:;
  Gene Name: AP002884.2;
  ENSP ID: ENSP00000456434
MAVLWRLSAVCGALGGRALLLRTPVVRPAHISAFLQDRPIPEWCGVQHIHLSPSHHSGSKAASLHWTSERVVSVLLLGLLPAAYLNPCSAMDYSLAAALTLHGHCLQCQIVHSCPLLENQIHLSLKFPDYFIKMKPWRKI

SEQ ID NO: 5583 - protein, 140 aa, Homo sapiens; identical to SEQ ID NO: 5582
  Payload ID: 1221;
  Gene Symbol:;
  Gene Name: AP002884.2;
  ENSP ID: ENSP00000456957

SEQ ID NO: 5584 - protein, 313 aa, Homo sapiens
  Payload ID: 1222;
  Gene Symbol:;
  Gene Name: AP002962.1;
  ENSP ID: ENSP00000485529
MQEADASIKTAETKGRTWKYQNIEPGGGPQTSGKGGFGSLVLVFLGQRVGCNETGSMNLEKLQTRPNMTIFTRNNIATNFSSSSSSSYFSPPPPPVLLPLLLLLPQLFSSSSSSFFFSFSPSTSPLVSPCFFSSSSSFCFSVSLLPSSSPTSMTKFPKAVTTKIKTDKRDLIKLKGFCTAKETINRTNRQPIEWEKIFTNYASNKGLISRIYKELGQSDKQRPNNPIKKWAKDMNRHFSKEDIQVANKHEKMLSTSLIIGKMQIKTTVRYHLMPARKATIKKSENNRCWQGCRGKGTFTHCWSKCKLKCKCKM

SEQ ID NO: 5585 - protein, 80 aa, Homo sapiens
  Payload ID: 1223;
  Gene Symbol:;
  Gene Name: AP003419.11;
  ENSP ID: ENSP00000480527
MDLRAGEEPQPRDEEEAELELLRQFDLAWQYGPCTGITRLQRWCRAKQMGLEPPPEVWQVLKTHPGDPRFQCSLWHLYPL

SEQ ID NO: 5586 - protein, 62 aa, Homo sapiens
  Payload ID: 1224;
  Gene Symbol:;
  Gene Name: AP005242.1;
  ENSP ID: ENSP00000485358
MLKIAVMEVPQSAWKTVWMEVAWPHCHVPLSLKKRHICLWARQYIHLVYVYTLVYAFCYLTF

SEQ ID NO: 5587 - protein, 198 aa, Homo sapiens; identical to SEQ ID NO: 1160
  Payload ID: 1225;
  Gene Symbol:;
  Gene Name: AP006285.1;
  ENSP ID: ENSP00000483175

SEQ ID NO: 5588 - protein, 198 aa, Homo sapiens; identical to SEQ ID NO: 1160
  Payload ID: 1226;
  Gene Symbol:;
  Gene Name: AP006285.2;
  ENSP ID: ENSP00000485085

SEQ ID NO: 5589 - protein, 863 aa, Homo sapiens
  Payload ID: 1227;
  Gene Symbol: AAK1;
  Gene Name: AP2 associated kinase 1;
  Uniprot ID:  Q2M2I8;
  ENSP ID: ENSP00000385181
MKKFFDSRREQGGSGLGSGSSGGGGSTSGLGSGYIGRVFGIGRQQVTVDEVLAEGGFAIVFLVRTSNGMKCALKRMFVNNEHDLQVCKREIQIMRDLSGHKNIVGYIDSSINNVSSGDVWEVLILMDFCRGGQVVNLMNQRLQTGFTENEVLQIFCDTCEAVARLHQCKTPIIHRDLKVENILLHDRGHYVLCDFGSATNKFQNPQTEGVNAVEDEIKKYTTLSYRAPEMVNLYSGKIITTKADIWALGCLLYKLCYFTLPFGESQVAICDGNFTIPDNSRYSQDMHCLIRYMLEPDPDKRPDIYQVSYFSFKLLKKECPIPNVQNSPIPAKLPEPVKASEAAAKKTQPKARLTDPIPTTETSIAPRQRPKAGQTQPNPGILPIQPALTPRKRATVQPPPQAAGSSNQPGLLASVPQPKPQAPPSQPLPQTQAKQPQAPPTPQQTPSTQAQGLPAQAQATPQHQQQLFLKQQQQQQQPPPAQQQPAGTFYQQQQAQTQQFQAVHPATQKPAIAQFPVVSQGGSQQQLMQNFYQQQQQQQQQQQQQQLATALHQQQLMTQQAALQQKPTMAAGQQPQPQPAAAPQPAPAQEPAIQAPVRQQPKVQTTPPPAVQGQKVGSLTPPSSPKTQRAGHRRILSDVTHSAVFGVPASKSTQLLQAAAAEASLNKSKSATTTPSGSPRTSQQNVYNPSEGSTWNPFDDDNFSKLTAEELLNKDFAKLGEGKHPEKLGGSAESLIPGFQSTQGDAFATTSFSAGTAEKRKGGQTVDSGLPLLSVSDPFIPLQVPDAPEKLIEGLKSPDTSLLLPDLLPMTDPFGSTSDAVIGKVIISVSSVMHDMCACFKNDKYLVNQSLGNSPATPEAKAI

SEQ ID NO: 5590 - protein, 674 aa, Homo sapiens
  Payload ID: 1227;
  Gene Symbol: AAK1;
  Gene Name: AP2 associated kinase 1;
  ENSP ID: ENSP00000386342
MKKFFDSRREQGGSGLGSGSSGGGGSTSGLGSGYIGRVFGIGRQQVTVDEVLAEGGFAIVFLVRTSNGMKCALKRMFVNNEHDLQVCKREIQIMRDLSGHKNIVGYIDSSINNVSSGDVWEVLILMDFCRGGQVVNLMNQRLQTGFTENEVLQIFCDTCEAVARLHQCKTPIIHRDLKVENILLHDRGHYVLCDFGSATNKFQNPQTEGVNAVEDEIKKYTTLSYRAPEMVNLYSGKIITTKADIWALGCLLYKLCYFTLPFGESQVAICDGNFTIPDNSRYSQDMHCLIRYMLEPDPDKRPDIYQVSYFSFKLLKKECPIPNVQNSPIPAKLPEPVKASEAAAKKTQPKARLTDPIPTTETSIAPRQRPKAGQTQPNPGILPIQPALTPRKRATVQPPPQAAGSSNQPGLLASVPQPKPQAPPSQPLPQTQAKQPQAPPTPQQTPSTQAQGLPAQAQATPQHQQQLFLKQQQQQQQPPPAQQQPAGTFYQQQQAQTQQFQAVHPATQKPAIAQFPVVSQGGSQQQLMQNFYQQQQQQQQQQQQQQLATALHQQQLMTQQAALQQKPTMAAGQQPQPQPAAAPQPAPAQEPAIQAPVRQQPKVQTTPPPAVQGQKVGSLTPPSSPKTQRAGHRRILSDVTHSAVFGVPASKSTQLLQAAAAEAELLDPGRQTLQ

SEQ ID NO: 5591 - protein, 961 aa, Homo sapiens
  Payload ID: 1227;
  Gene Symbol: AAK1;
  Gene Name: AP2 associated kinase 1;
  Uniprot ID:  Q2M2I8;
  ENSP ID: ENSP00000386456
MKKFFDSRREQGGSGLGSGSSGGGGSTSGLGSGYIGRVFGIGRQQVTVDEVLAEGGFAIVFLVRTSNGMKCALKRMFVNNEHDLQVCKREIQIMRDLSGHKNIVGYIDSSINNVSSGDVWEVLILMDFCRGGQVVNLMNQRLQTGFTENEVLQIFCDTCEAVARLHQCKTPIIHRDLKVENILLHDRGHYVLCDFGSATNKFQNPQTEGVNAVEDEIKKYTTLSYRAPEMVNLYSGKIITTKADIWALGCLLYKLCYFTLPFGESQVAICDGNFTIPDNSRYSQDMHCLIRYMLEPDPDKRPDIYQVSYFSFKLLKKECPIPNVQNSPIPAKLPEPVKASEAAAKKTQPKARLTDPIPTTETSIAPRQRPKAGQTQPNPGILPIQPALTPRKRATVQPPPQAAGSSNQPGLLASVPQPKPQAPPSQPLPQTQAKQPQAPPTPQQTPSTQAQGLPAQAQATPQHQQQLFLKQQQQQQQPPPAQQQPAGTFYQQQQAQTQQFQAVHPATQKPAIAQFPVVSQGGSQQQLMQNFYQQQQQQQQQQQQQQLATALHQQQLMTQQAALQQKPTMAAGQQPQPQPAAAPQPAPAQEPAIQAPVRQQPKVQTTPPPAVQGQKVGSLTPPSSPKTQRAGHRRILSDVTHSAVFGVPASKSTQLLQAAAAEASLNKSKSATTTPSGSPRTSQQNVYNPSEGSTWNPFDDDNFSKLTAEELLNKDFAKLGEGKHPEKLGGSAESLIPGFQSTQGDAFATTSFSAGTAEKRKGGQTVDSGLPLLSVSDPFIPLQVPDAPEKLIEGLKSPDTSLLLPDLLPMTDPFGSTSDAVIEKADVAVESLIPGLEPPVPQRLPSQTESVTSNRTDSLTGEDSLLDCSLLSNPTTDLLEEFAPTAISAPVHKAAEDSNLISGFDVPEGSDKVAEDEFDPIPVLITKNPQGGHSRNSSGSSESSLPNLARSLLLVDQLIDL

SEQ ID NO: 5592 - protein, 339 aa, Homo sapiens
  Payload ID: 1227;
  Gene Symbol: AAK1;
  Gene Name: AP2 associated kinase 1;
  ENSP ID: ENSP00000485296
TQLLQAAAAEASLNKSKSATTTPSGSPRTSQQNVYNPSEGSTWNPFDDDNFSKLTAEELLNKDFAKLGEGKHPEKLGGSAESLIPGFQSTQGDAFATTSFSAGTDLQRESNPCPVITVEHFKESLGVKGLPLYPDPSRVPGTKTQNNLESDYLARDGPSSNSSFHSSEEEGTDLEGDMLDCSGSRPLLMESEEEDESCRPPPGKLGGAVPFAPPEVSPEQAKTVQGGRKNQFQAFTQPATDGLSEPDVFAIAPFRSSRVPNDDMDIFSKAPFVSKSSMAPSQPEESDVFLRAPFTKKKSMEELTVIQCTSQELPAQTGLLSQTGDVPLPAGRERAVYTS

SEQ ID NO: 5593 - protein, 511 aa, Homo sapiens
  Payload ID: 1227;
  Gene Symbol: AAK1;
  Gene Name: AP2 associated kinase 1;
  ENSP ID: ENSP00000485350
TQLLQAAAAEASLNKSKSATTTPSGSPRTSQQNVYNPSEGSTWNPFDDDNFSKLTAEELLNKDFAKLGEGKHPEKLGGSAESLIPGFQSTQGDAFATTSFSAGTAEKRKGGQTVDSGLPLLSVSDPFIPLQVPDAPDLQRESNPCPVITVEHFKESLGVKGLPLYPDPSRVPGTKTQNNLESDYLARDGPSSNSSFHSSEEEGTDLEGDMLDCSGSRPLLMESEEEDESCRPPPGKLGGAVPFAPPEVSPEQAKTVQGGRKNQFQAFTQPATDGLSEPDVFAIAPFRSSRVPNDDMDIFSKAPFVSKSSMAPSQPEESDVFLRAPFTKKKSMEELTVIQCTSQELPAQTGLLSQTGDVPLPAGRERAVYTSVQAQYSTAGFVQQSNLLSHSVQAADHLDSISPRGSCLESGGHSNDRNKGPQLQKEAVSGPMAGKPFRPQSLSKYSRHYSPEDEPSPEAQPIAAYKIVSQTNKQSIAGSVSITSLSSRTTELPAADPFALAPFPSKSGKKP

SEQ ID NO: 5594 - protein, 99 aa, Homo sapiens
  Payload ID: 1227;
  Gene Symbol: AAK1;
  Gene Name: AP2 associated kinase 1;
  ENSP ID: ENSP00000485409
AAAEASLNKSKSATTTPSGSPRTSQQNVYNPSEGSTWNPFDDDNFSKLTAEELLNKDFAKLGEGKHPEKLGGSAESLIPGFQSTQGDAFATTSFSAGTV

SEQ ID NO: 5595 - protein, 242 aa, Homo sapiens
  Payload ID: 1228;
  Gene Symbol: APIP;
  Gene Name: APAF1 interacting prt;
  Uniprot ID:  Q96GX9;
  ENSP ID: ENSP00000379133
MSGCDAREGDCCSRRCGAQDKEHPRYLIPELCKQFYHLGWVTGTGGGISLKHGDEIYIAPSGVQKERIQPEDMFVCDINEKDISGPSPSKKLKKSQCTPLFMNAYTMRGAGAVIHTHSKAAVMATLLFPGREFKITHQEMIKGIKKCTSGGYYRYDDMLVVPIIENTPEEKDLKDRMAHAMNEYPDSCAVLVRRHGVYVWGETWEKAKTMCECYDYLFDIAVSMKKVGLDPSQLPVGENGIV

SEQ ID NO: 5596 - protein, 195 aa, Homo sapiens
  Payload ID: 1228;
  Gene Symbol: APIP;
  Gene Name: APAF1 interacting prt;
  ENSP ID: ENSP00000474191
MFCVASDEIYIAPSGVQKERIQPEDMFVCDINEKDISGPSPSKKLKKSQCTPLFMNAYTMRGAGAVIHTHSKAAVMATLLFPGREFKITHQEMIKGIKKCTSGGYYRYDDMLVVPIIENTPEEKDLKDRMAHAMNEYPDSCAVLVRRHGVYVWGETWEKAKTMCECYDYLFDIAVSMKKVGLDPSQLPVGENGIV

SEQ ID NO: 5597 - protein, 1135 aa, Homo sapiens
  Payload ID: 1229;
  Gene Symbol: AMER1;
  Gene Name: APC membrane recruitment prt 1;
  Uniprot ID:  Q5JTC6;
  ENSP ID: ENSP00000329117
METQKDEAAQAKGAAASGSTREQTAEKGAKNKAAEATEGPTSEPSSSGPGRLKKTAMKLFGGKKGICTLPSFFGGGRSKGSGKGSSKKGLSKSKTHDGLSEAAHGPEDVVSEGTGFSLPLPELPCQFPSSQSAHGALETGSRCKTSVAGATEKAVAEKFPSMPKPKKGLKGFFSSIRRHRKSKVTGAEQSEPGAKGPERVRARPHEHVSSAPQVPCFEETFQAPRKENANPQDAPGPKVSPTPEPSPPATEKMACKDPEKPMEACASAHVQPKPAPEASSLEEPHSPETGEKVVAGEVNPPNGPVGDPLSLLFGDVTSLKSFDSLTGCGDIIAEQDMDSMTDSMASGGQRANRDGTKRSSCLVTYQGGGEEMALPDDDDEEEEEEEEVELEEEEEEVKEEEEDDDLEYLWETAQMYPRPNMNLGYHPTTSPGHHGYMLLDPVRSYPGLAPGELLTPQSDQQESAPNSDEGYYDSTTPGFEDDSGEALGLVRRDCLPRDSYSGDALYEFYEPDDSLENSPPGDDCLYDLHGRSSEMFDPFLNFEPFLSSRPPGAMETEEERLVTIQKQLLYWELRREQLEAQEARAREAHAREAHAREAYTREAYGREAYAREAHTWEAHGREARTREAQAREVRCRETQVRETQARQEKPVLEYQMRPLGPSVMGLAAGVSGTSQISHRGITSAFPTTASSEPDWRDFRPLEKRYEGTCSKKDQSTCLMQLFQSDAMFEPDMQEANFGGSPRRAYPTYSPPEDPEEEEVEKEGNATVSFSQALVEFTSNGNLFSSMSCSSDSDSSFTQNLPELPPMVTFDIADVERDGEGKCEENPEFHNDEDLAASLEAFELGYYHKHAFNNYHSRFYQGLPWGVSSLPRYLGLPGLHPRPPPAAMALNRRSRSLDTAETLEMELSNSHLVQGYLESDELQAQQEDSDEEDEEEEEGEWSRDSPLSLYTEPPGAYDWPAWAPCPLPVGPGPAWISPNQLDRPSSQSPYRQATCCIPPMTMSISLSVPESRAPGESGPQLARPSHLHLPMGPCYNLQPQASQSMRARPRDVLLPVDEPSCSSSSGGFSPSPLPQAKPVGITHGIPQLPRVRPEHPQPQPTHYGPSSLDLSKERAEQGASLATSYSSTAMNGNLAK

SEQ ID NO: 5598 - protein, 804 aa, Homo sapiens
  Payload ID: 1229;
  Gene Symbol: AMER1;
  Gene Name: APC membrane recruitment prt 1;
  Uniprot ID:  Q5JTC6;
  ENSP ID: ENSP00000364003
METQKDEAAQAKGAAASGSTREQTAEKGAKNKAAEATEGPTSEPSSSGPGRLKKTAMKLFGGKKGICTLPSFFGGGRSKGSGKGSSKKGLSKSKTHDGLSEAAHGPEDVVSEGTGFSLPLPELPCQFPSSQSAHGALETGSRCKTSVAGATEKAVAEKFPSMPKPKKGLKGFFSSIRRHRKSKVTGAEQSEPGAKGPERVRARPHEHVSSAPQVPCFEETFQAPRKENANPQDAPGPKVSPTPEPSPPATEKMACKDPEKPMEACASAHVQPKPAPEASSLEEPHSPETGEKVVAGEVNPPNGPVGDPLSLLFGDVTSLKSFDSLTGCGDIIAEQDMDSMTDSMASGGQRANRDGTKRSSCLVTYQGGGEEMALPDDDDEEEEEEEEVELEEEEEEVKEEEEDDDLEYLWETAQMYPRPNMNLGYHPTTSPGHHGYMLLDPVRSYPGLAPGELLTPQSDQQESAPNSDEGYYDSTTPGFEDDSGEALGLVRRDCLPRDSYSGDALYEFYEPDDSLENSPPGDDCLYDLHGRSSEMFDPFLNFEPFLSSRPPGAMETEEERLVTIQKQLLYWELRREQLEAQEARAREAHAREAHAREAYTREAYGREAYAREAHTWEAHGREARTREAQAREVRCRETQVRETQARQEKPVLEYQMRPLGPSVMGLAAGVSGTSQISHRGITSAFPTTASSEPDWRDFRPLEKRYEGTCSKKDQSTCLMQLFQSDAMFEPDMQEANFGGSPRRAYPTYSPPEDPEEEEVEKEGNATVSFSQALVEFTSNGNLFSSIRCPGTEDKRQVTQACGTW

SEQ ID NO: 5599 - protein, 552 aa, Homo sapiens
  Payload ID: 1230;
  Gene Symbol: AMER2;
  Gene Name: APC membrane recruitment prt 2;
  Uniprot ID:  Q8N7J2;
  ENSP ID: ENSP00000350469
METSRSRGGGGAVSERGGAGASVGVCRRKAEAGAGTGTLAADMDLHCDCAAETPAAEPPSGKINKAAFKLFKKRKSGGTMPSIFGVKNKGDGKSSGPTGLVRSRTHDGLAEVLVLESGRKEEPRGGGDSGGGGGGRPNPGPPRAAGPGGGSLASSSVAKSHSFFSLLKKNGRSENGKGEPVDASKAGGKQKRGLRGLFSGMRWHRKDKRAKAEAAEGRAPGGGLILPGSLTASLECVKEETPRAAREPEEPSQDAPRDPAGCGDIIADQEEEAGPSCDKHVPGPGKPALSKKNPGVVAYQGGGEEMASPDEVDDTYLQEFWDMLSQTEEQGPEPQEGAAKVAAALETKVVPETPKDTRCVEAAKDASSVKRRRLNRIPIEPHPKEEPKHPEKEQQEGVPNSDEGYWDSTTPGPEEDSSSSGKKAGIPRDSYSGDALYDLYADPDGSPATLPGGKDNEETSSLSRLKPVSPGTITCPLRTPGSLLKDSKIPISIKHLTNLPSSHPVVHQQPSRSEMPRTKIPVSKVLVRRVSNRGLAGTTIRATACHDSAKKL

SEQ ID NO: 5600 - protein, 671 aa, Homo sapiens
  Payload ID: 1230;
  Gene Symbol: AMER2;
  Gene Name: APC membrane recruitment prt 2;
  Uniprot ID:  Q8N7J2;
  ENSP ID: ENSP00000426528
METSRSRGGGGAVSERGGAGASVGVCRRKAEAGAGTGTLAADMDLHCDCAAETPAAEPPSGKINKAAFKLFKKRKSGGTMPSIFGVKNKGDGKSSGPTGLVRSRTHDGLAEVLVLESGRKEEPRGGGDSGGGGGGRPNPGPPRAAGPGGGSLASSSVAKSHSFFSLLKKNGRSENGKGEPVDASKAGGKQKRGLRGLFSGMRWHRKDKRAKAEAAEGRAPGGGLILPGSLTASLECVKEETPRAAREPEEPSQDAPRDPAGEPAGGEEVPAPADRAPARSCREAEGLAHPGDTGARGEDAAGHRRAEPGPGEVRTAEDASRTGAVPVKTVPLVDSEGGSGRAPAAPDPASVDPPSDPSADRICLMFSDVTSLKSFDSLTGCGDIIADQEEEAGPSCDKHVPGPGKPALSKKNPGVVAYQGGGEEMASPDEVDDTYLQEFWDMLSQTEEQGPEPQEGAAKVAAALETKVVPETPKDTRCVEAAKDASSVKRRRLNRIPIEPHPKEEPKHPEKEQQEGVPNSDEGYWDSTTPGPEEDSSSSGKKAGIPRDSYSGDALYDLYADPDGSPATLPGGKDNEETSSLSRLKPVSPGTITCPLRTPGSLLKDSKIPISIKHLTNLPSSHPVVHQQPSRSEMPRTKIPVSKVLVRRVSNRGLAGTTIRATACHDSAKKL

SEQ ID NO: 5601 - protein, 861 aa, Homo sapiens
  Payload ID: 1231;
  Gene Symbol: AMER3;
  Gene Name: APC membrane recruitment prt 3;
  Uniprot ID:  Q8N944;
  ENSP ID: ENSP00000314914
MELKRGKTFIKSSLQVSHEKPPDPAAVAAAREGTGPWSVLPGGQQRPHSEKGPQASPSAQEYDRCPNKGAQLDPKGGPAALCGATFKPVRKCKTHDSMSGAGRATAATGQLVGSASFPGSPGSRRMIDYRHFVPQMPFVPAVAKSIPRKRISLKRPKKCFRNLFHIRRNKTEDLASLAAEGKSLPSPGDPSDPGGRRSKAFLPPGEGPGLDGLCQDLLDSELLADASFGLCRALCEDVASLQSFDSLTGCGEVFADESSVPSLELNEGPESPTQAAQGLESKVPRGPLQGSVEQLASPAQNEASDFTRFWDSVNRSVRQQQRALLGPWLSGPQGTDRDQSRLDTAGLAELPLCPCRDPRSGSKASSIDTGTPKSEQPESVSTSDEGYYDSFSPGLEEDKKEAESPGTPAATFPRDSYSGDALYELFHDPSEGPLGPSPDDDLCVSESLSGPALGTPLSICSFRVGAEENLAPAPGPDLLSQGFLQSSWKGKECLLKLCDTELAITMGIVSWLRRGPTPRAPPTPGQPAAPPGSQGAPRAPTEKLGGREGLASDAGGATVCSAPSRQELWAHPGTTGLLAGESKALGGATQGTGTLSRDASREEETRGHSEGLFSSMESAATSTTDTSGKNKAPVPSTWPCSQKEPGPPGVLGCFRGPWRPGHGGDTLDAEPMLAGCVARVAALKISSNEQPPAAWPPRQDMGSGLFGQRWARGPDMLEQKQSSSSPSMTTIHGLPYSASTQDQRCRDRVQDLSWLRVEPTGLGVQAWASVEDQPLQLSTEAVEQVAHGSQLDSEPRSAPAARWSSQGHHPESLGLTLNSQQEGGVSASAPECRCSLLAREGLLCGQPEVGASGPAMAEPHL

SEQ ID NO: 5602 - protein, 180 aa, Homo sapiens
  Payload ID: 1231;
  Gene Symbol: AMER3;
  Gene Name: APC membrane recruitment prt 3;
  ENSP ID: ENSP00000389242
MELKRGKTFIKSSLQVSHEKPPDPAAVAAAREGTGPWSVLPGGQQRPHSEKGPQASPSAQEYDRCPNKGAQLDPKGGPAALCGATFKPVRKCKTHDSMSGAGRATAATGQLVGSASFPGSPGSRRMIDYRHFVPQMPFVPAVAKSIPRKRISLKRPKKCFRNLFHIRRNKTEDLASLAAE

SEQ ID NO: 5603 - protein, 861 aa, Homo sapiens; identical to SEQ ID NO: 5601
  Payload ID: 1231;
  Gene Symbol: AMER3;
  Gene Name: APC membrane recruitment prt 3;
  Uniprot ID:  Q8N944;
  ENSP ID: ENSP00000392700

SEQ ID NO: 5604 - protein, 141 aa, Homo sapiens
  Payload ID: 1231;
  Gene Symbol: AMER3;
  Gene Name: APC membrane recruitment prt 3;
  ENSP ID: ENSP00000410421
MELKRGKTFIKSSLQVSHEKPPDPAAVAAAREGTGPWSVLPGGQQRPHSEKGPQASPSAQEYDRCPNKGAQLDPKGGPAALCGATFKPVRKCKTHDSMSGAGRATAATGQLVGSASFPGSPGSRRMIDYRHFVPQMPFVPA

SEQ ID NO: 5605 - protein, 77 aa, Homo sapiens
  Payload ID: 1232;
  Gene Symbol: APLN;
  Gene Name: apelin;
  Uniprot ID:  Q9ULZ1;
  ENSP ID: ENSP00000391800
MNLRLCVQALLLLWLSLTAVCGGSLMPLPDGNGLEDGNVRHLVQPRGSRNGPGPWQGGRRKFRRQRPRLSHKGPMPF

SEQ ID NO: 5606 - protein, 380 aa, Homo sapiens
  Payload ID: 1233;
  Gene Symbol: APLNR;
  Gene Name: apelin receptor;
  Uniprot ID:  P35414;
  ENSP ID: ENSP00000257254
MEEGGDFDNYYGADNQSECEYTDWKSSGALIPAIYMLVFLLGTTGNGLVLWTVFRSSREKRRSADIFIASLAVADLTFVVTLPLWATYTYRDYDWPFGTFFCKLSSYLIFVNMYASVFCLTGLSFDRYLAIVRPVANARLRLRVSGAVATAVLWVLAALLAMPVMVLRTTGDLENTTKVQCYMDYSMVATVSSEWAWEVGLGVSSTTVGFVVPFTIMLTCYFFIAQTIAGHFRKERIEGLRKRRRLLSIIVVLVVTFALCWMPYHLVKTLYMLGSLLHWPCDFDLFLMNIFPYCTCISYVNSCLNPFLYAFFDPRFRQACTSMLCCGQSRCAGTSHSSSGEKSASYSSGHSQGPGPNMGKGGEQMHEKSIPYSQETLVVD

SEQ ID NO: 5607 - protein, 380 aa, Homo sapiens; identical to SEQ ID NO: 5606
  Payload ID: 1233;
  Gene Symbol: APLNR;
  Gene Name: apelin receptor;
  Uniprot ID:  P35414;
  ENSP ID: ENSP00000475344

SEQ ID NO: 5608 - protein, 380 aa, Homo sapiens; identical to SEQ ID NO: 5606
  Payload ID: 1233;
  Gene Symbol: APLNR;
  Gene Name: apelin receptor;
  Uniprot ID:  P35414;
  ENSP ID: ENSP00000477818

SEQ ID NO: 5609 - protein, 54 aa, Homo sapiens
  Payload ID: 1234;
  Gene Symbol: APELA;
  Gene Name: apelin receptor early endogenous ligand;
  Uniprot ID:  P0DMC3;
  ENSP ID: ENSP00000478306
MRFQQFLFAFFIFIMSLLLISGQRPVNLTMRRKLRKHNCLQRRCMPLHSRVPFP

SEQ ID NO: 5610 - protein, 54 aa, Homo sapiens; identical to SEQ ID NO: 5609
  Payload ID: 1234;
  Gene Symbol: APELA;
  Gene Name: apelin receptor early endogenous ligand;
  Uniprot ID:  P0DMC3;
  ENSP ID: ENSP00000480045

SEQ ID NO: 5611 - protein, 54 aa, Homo sapiens; identical to SEQ ID NO: 5609
  Payload ID: 1234;
  Gene Symbol: APELA;
  Gene Name: apelin receptor early endogenous ligand;
  Uniprot ID:  P0DMC3;
  ENSP ID: ENSP00000484618

SEQ ID NO: 5612 - protein, 518 aa, Homo sapiens
  Payload ID: 1235;
  Gene Symbol: APEX2;
  Gene Name: APEX nuclease (apurinic/apyrimidinic endonuclease) 2;
  Uniprot ID:  Q9UBZ4;
  ENSP ID: ENSP00000364126
MLRVVSWNINGIRRPLQGVANQEPSNCAAVAVGRILDELDADIVCLQETKVTRDALTEPLAIVEGYNSYFSFSRNRSGYSGVATFCKDNATPVAAEEGLSGLFATQNGDVGCYGNMDEFTQEELRALDSEGRALLTQHKIRTWEGKEKTLTLINVYCPHADPGRPERLVFKMRFYRLLQIRAEALLAAGSHVIILGDLNTAHRPIDHWDAVNLECFEEDPGRKWMDSLLSNLGCQSASHVGPFIDSYRCFQPKQEGAFTCWSAVTGARHLNYGSRLDYVLGDRTLVIDTFQASFLLPEVMGSDHCPVGAVLSVSSVPAKQCPPLCTRFLPEFAGTQLKILRFLVPLEQSPVLEQSTLQHNNQTRVQTCQNKAQVRSTRPQPSQVGSSRGQKNLKSYFQPSPSCPQASPDIELPSLPLMSALMTPKTPEEKAVAKVVKGQAKTSEAKDEKELRTSFWKSVLAGPLRTPLCGGHREPCVMRTVKKPGPNLGRRFYMCARPRGPPTDPSSRCNFFLWSRPS

SEQ ID NO: 5613 - protein, 318 aa, Homo sapiens
  Payload ID: 1236;
  Gene Symbol: APEX1;
  Gene Name: APEX nuclease (multifunctional DNA repair enzyme) 1;
  Uniprot ID:  P27695;
  ENSP ID: ENSP00000216714
MPKRGKKGAVAEDGDELRTEPEAKKSKTAAKKNDKEAAGEGPALYEDPPDQKTSPSGKPATLKICSWNVDGLRAWIKKKGLDWVKEEAPDILCLQETKCSENKLPAELQELPGLSHQYWSAPSDKEGYSGVGLLSRQCPLKVSYGIGDEEHDQEGRVIVAEFDSFVLVTAYVPNAGRGLVRLEYRQRWDEAFRKFLKGLASRKPLVLCGDLNVAHEEIDLRNPKGNKKNAGFTPQERQGFGELLQAVPLADSFRHLYPNTPYAYTFWTYMMNARSKNVGWRLDYFLLSHSLLPALCDSKIRSKALGSDHCPITLYLAL

SEQ ID NO: 5614 - protein, 318 aa, Homo sapiens; identical to SEQ ID NO: 5613
  Payload ID: 1236;
  Gene Symbol: APEX1;
  Gene Name: APEX nuclease (multifunctional DNA repair enzyme) 1;
  Uniprot ID:  P27695;
  ENSP ID: ENSP00000381111

SEQ ID NO: 5615 - protein, 150 aa, Homo sapiens
  Payload ID: 1236;
  Gene Symbol: APEX1;
  Gene Name: APEX nuclease (multifunctional DNA repair enzyme) 1;
  ENSP ID: ENSP00000416414
  MOD_RES (1)..(1): Any amino acid
XKTSPSGKPATLKICSWNVDGLRAWIKKKGLDWVKEEAPDILCLQETKCSENKLPAELQELPGLSHQYWSAPSDKEGYSGVGLLSRQCPLKVSYGIAYVPNAGRGLVRLEYRQRWDEAFRKFLKGLASRKPLVLCGDLNVAHEEIDLRNP

SEQ ID NO: 5616 - protein, 49 aa, Homo sapiens
  Payload ID: 1236;
  Gene Symbol: APEX1;
  Gene Name: APEX nuclease (multifunctional DNA repair enzyme) 1;
  ENSP ID: ENSP00000450604
MPKRGKKGAVAEDGDELRTGKGMKSALLPRSCGGGVCHSLDVRARGQEE

SEQ ID NO: 5617 - protein, 172 aa, Homo sapiens
  Payload ID: 1236;
  Gene Symbol: APEX1;
  Gene Name: APEX nuclease (multifunctional DNA repair enzyme) 1;
  ENSP ID: ENSP00000451060
MYEPEAKKSKTAAKKNDKEAAGEGPALYEDPPDQKTSPSGKPATLKICSWNVDGLRAWIKKKGLDWVKEEAPDILCLQETKCSENKLPAELQELPGLSHQYWSAPSDKEGYSGVGLLSRQCPLKVSYGIGDEEHDQEGRVIVAEFDSFVLVTAYVPNAGRGLVRLEYRQRWD

SEQ ID NO: 5618 - protein, 174 aa, Homo sapiens
  Payload ID: 1236;
  Gene Symbol: APEX1;
  Gene Name: APEX nuclease (multifunctional DNA repair enzyme) 1;
  ENSP ID: ENSP00000451170
MPKRGKKGAVAEDGDELRTEPEAKKSKTAAKKNDKEAAGEGPALYEDPPDQKTSPSGKPATLKICSWNVDGLRAWIKKKGLDWVKEEAPDILCLQETKCSENKLPAELQELPGLSHQYWSAPSDKEGYSGVGLLSRQCPLKVSYGIGDEEHDQEGRVIVAEFDSFVLVTAYVPN

SEQ ID NO: 5619 - protein, 263 aa, Homo sapiens
  Payload ID: 1236;
  Gene Symbol: APEX1;
  Gene Name: APEX nuclease (multifunctional DNA repair enzyme) 1;
  ENSP ID: ENSP00000451327
MPKRGKKGAVAEDGDELRTEPEAKKSKTAAKKNDKEAAGEGPALYEDPPDQKTSPSGKPATLKICSWNVDGLRAWIKKKGLDWVKEEAPDILCLQETKCSENKLPAELQELPGLSHQYWSAPSDKEGYSGVGLLSRQCPLKVSYGIGDEEHDQEGRVIVAEFDSFVLVTAYVPNAGRGLVRLEYRQRWDEAFRKFLKGLASRKPLVLCGDLNVAHEEIDLRNPKGNKKNAGFTPQERQGFGELLQAVPLADSFRHLYPNTPYA

SEQ ID NO: 5620 - protein, 41 aa, Homo sapiens
  Payload ID: 1236;
  Gene Symbol: APEX1;
  Gene Name: APEX nuclease (multifunctional DNA repair enzyme) 1;
  ENSP ID: ENSP00000451491
MYEPEAKKSKTAAKKNDKEAAGEGPALYEDPPDQKTSPSGK

SEQ ID NO: 5621 - protein, 318 aa, Homo sapiens; identical to SEQ ID NO: 5613
  Payload ID: 1236;
  Gene Symbol: APEX1;
  Gene Name: APEX nuclease (multifunctional DNA repair enzyme) 1;
  Uniprot ID:  P27695;
  ENSP ID: ENSP00000451979

SEQ ID NO: 5622 - protein, 146 aa, Homo sapiens
  Payload ID: 1236;
  Gene Symbol: APEX1;
  Gene Name: APEX nuclease (multifunctional DNA repair enzyme) 1;
  ENSP ID: ENSP00000452137
MPKRGKKGAVAEDGDELRTEPEAKKSKTAAKKNDKEAAGEGPALYEDPPDQKTSPSGKPATLKICSWNVDGLRAWIKKKGLDWVKEEAPDILCLQETKCSENKLPAELQELPGLSHQYWSAPSDKEGYSGVGLLSRQCPLKVSYGI

SEQ ID NO: 5623 - protein, 14 aa, Homo sapiens
  Payload ID: 1236;
  Gene Symbol: APEX1;
  Gene Name: APEX nuclease (multifunctional DNA repair enzyme) 1;
  ENSP ID: ENSP00000452212
MPKRGKKGAPFASS

SEQ ID NO: 5624 - protein, 107 aa, Homo sapiens
  Payload ID: 1236;
  Gene Symbol: APEX1;
  Gene Name: APEX nuclease (multifunctional DNA repair enzyme) 1;
  ENSP ID: ENSP00000452304
MPKRGKKGAVAEDGDELRTEPEAKKSKTAAKKNDKEAAGEGPALYEDPPDQKTSPSGKPATLKICSWNVDGLRAWIKKKGLDWVKEEAPDILCLQETKCSENKLPAE

SEQ ID NO: 5625 - protein, 162 aa, Homo sapiens
  Payload ID: 1236;
  Gene Symbol: APEX1;
  Gene Name: APEX nuclease (multifunctional DNA repair enzyme) 1;
  ENSP ID: ENSP00000452418
MYEPEAKKSKTAAKKNDKEAAGEGPALYEDPPDQKTSPSGKPATLKICSWNVDGLRAWIKKKGLDWVKEEAPDILCLQETKCSENKLPAELQELPGLSHQYWSAPSDKEGYSGVGLLSRQCPLKVSYGIGDEEHDQEGRVIVAEFDSFVLVTAYVPNAGRGL

SEQ ID NO: 5626 - protein, 242 aa, Homo sapiens
  Payload ID: 1236;
  Gene Symbol: APEX1;
  Gene Name: APEX nuclease (multifunctional DNA repair enzyme) 1;
  ENSP ID: ENSP00000452460
MPKRGKKGAVAEDGDELRTEPEAKKSKTAAKKNDKEAAGEGPALYEDPPDQKTSPSGKPATLKICSWNVDGLRAWIKKKGLDWVKEEAPDILCLQETKCSENKLPAELQELPGLSHQYWSAPSDKEGYSGVGLLSRQCPLKVSYGIGRGLVRLEYRQRWDEAFRKFLKGLASRKPLVLCGDLNVAHEEIDLRNPKGNKKNAGFTPQERQGFGELLQAVPLADSFRHLYPNTPYAYTFWTYMM

SEQ ID NO: 5627 - protein, 150 aa, Homo sapiens
  Payload ID: 1237;
  Gene Symbol: APH1A;
  Gene Name: APH1A gamma secretase subunit;
  ENSP ID: ENSP00000236017
MGAAVFFGCTFVAFGPAFALFLITVAGDPLRVIILVAGKADEGLASLSEDGRSPISIRQMAYVSGLSFGIISGVFSVINILADALGPGVVGIHGDSPYYFLTSAFLTAAIILLHTFWGVVFFDACERRRYWALGLVVGSHLLTSGLTFLN

SEQ ID NO: 5628 - protein, 247 aa, Homo sapiens
  Payload ID: 1237;
  Gene Symbol: APH1A;
  Gene Name: APH1A gamma secretase subunit;
  Uniprot ID:  Q96BI3;
  ENSP ID: ENSP00000353380
MGAAVFFGCTFVAFGPAFALFLITVAGDPLRVIILVAGAFFWLVSLLLASVVWFILVHVTDRSDARLQYGLLIFGAAVSVLLQEVFRFAYYKLLKKADEGLASLSEDGRSPISIRQMAYVSGLSFGIISGVFSVINILADALGPGVVGIHGDSPYYFLTSAFLTAAIILLHTFWGVVFFDACERRRYWALGLVVGSHLLTSGLTFLNPWYEASLLPIYAVTVSMGLWAFITAGGSLRSIQRSLLCKD

SEQ ID NO: 5629 - protein, 265 aa, Homo sapiens
  Payload ID: 1237;
  Gene Symbol: APH1A;
  Gene Name: APH1A gamma secretase subunit;
  Uniprot ID:  Q96BI3;
  ENSP ID: ENSP00000358105
MGAAVFFGCTFVAFGPAFALFLITVAGDPLRVIILVAGAFFWLVSLLLASVVWFILVHVTDRSDARLQYGLLIFGAAVSVLLQEVFRFAYYKLLKKADEGLASLSEDGRSPISIRQMAYVSGLSFGIISGVFSVINILADALGPGVVGIHGDSPYYFLTSAFLTAAIILLHTFWGVVFFDACERRRYWALGLVVGSHLLTSGLTFLNPWYEASLLPIYAVTVSMGLWAFITAGGSLRSIQRSLLCRRQEDSRVMVYSALRIPPED

SEQ ID NO: 5630 - protein, 195 aa, Homo sapiens
  Payload ID: 1237;
  Gene Symbol: APH1A;
  Gene Name: APH1A gamma secretase subunit;
  Uniprot ID:  Q96BI3;
  ENSP ID: ENSP00000397473
MGAAVFFGCTFVAFGPAFALFLITVAGDPLRVIILVAGRCSALPTTSCLISGLSFGIISGVFSVINILADALGPGVVGIHGDSPYYFLTSAFLTAAIILLHTFWGVVFFDACERRRYWALGLVVGSHLLTSGLTFLNPWYEASLLPIYAVTVSMGLWAFITAGGSLRSIQRSLLCRRQEDSRVMVYSALRIPPED

SEQ ID NO: 5631 - protein, 257 aa, Homo sapiens
  Payload ID: 1238;
  Gene Symbol: APH1B;
  Gene Name: APH1B gamma secretase subunit;
  Uniprot ID:  Q8WW43;
  ENSP ID: ENSP00000261879
MTAAVFFGCAFIAFGPALALYVFTIATEPLRIIFLIAGAFFWLVSLLISSLVWFMARVIIDNKDGPTQKYLLIFGAFVSVYIQEMFRFAYYKLLKKASEGLKSINPGETAPSMRLLAYVSGLGFGIMSGVFSFVNTLSDSLGPGTVGIHGDSPQFFLYSAFMTLVIILLHVFWGIVFFDGCEKKKWGILLIVLLTHLLVSAQTFISSYYGINLASAFIILVLMGTWAFLAAGGSCRSLKLCLLCQDKNFLLYNQRSR

SEQ ID NO: 5632 - protein, 81 aa, Homo sapiens
  Payload ID: 1238;
  Gene Symbol: APH1B;
  Gene Name: APH1B gamma secretase subunit;
  ENSP ID: ENSP00000369697
MTAAVFFGCAFIAFGPALALYVFTIATEPLRIIFLIAGRRVETCKNTEAPDCASPSGSLSFLLVGVSTDFVPCLVHGKSHY

SEQ ID NO: 5633 - protein, 216 aa, Homo sapiens
  Payload ID: 1238;
  Gene Symbol: APH1B;
  Gene Name: APH1B gamma secretase subunit;
  Uniprot ID:  Q8WW43;
  ENSP ID: ENSP00000369700
MTAAVFFGCAFIAFGPALALYVFTIATEPLRIIFLIAGAFFWLVSLLISSLVWFMARVIIDNKDGPTQKYLLIFGAFVSVYIQEMFRFAYYKLLKKASEGLKSINPGETAPSMRLLAYAFMTLVIILLHVFWGIVFFDGCEKKKWGILLIVLLTHLLVSAQTFISSYYGINLASAFIILVLMGTWAFLAAGGSCRSLKLCLLCQDKNFLLYNQRSR

SEQ ID NO: 5634 - protein, 188 aa, Homo sapiens
  Payload ID: 1238;
  Gene Symbol: APH1B;
  Gene Name: APH1B gamma secretase subunit;
  ENSP ID: ENSP00000453002
MARVIIDNKDGPTQKYLLIFGAFVSVYIQEMFRFAYYKLLKKASEGLKSINPGETAPSMRLLAYVSGLGFGIMSGVFSFVNTLSDSLGPGTVGIHGDSPQFFLYSAFMTLVIILLHVFWGIVFFDGCEKKKWGILLIVLLTHLLVSAQTFISSYYGINLASAFIILVLMGTWAFLAAGGSCRSLKLCL

SEQ ID NO: 5635 - protein, 222 aa, Homo sapiens
  Payload ID: 1238;
  Gene Symbol: APH1B;
  Gene Name: APH1B gamma secretase subunit;
  ENSP ID: ENSP00000453327
MTAAVFFGCAFIAFGPALALYVFTIATEPLRIIFLIAGAFFWLVSLLISSLVWFMARVIIDNKDGPTQKYLLIFGAFVSVYIQEMFRFAYYKLLKKASEGLKSINPGETAPSMRLLAYVSGLGFGIMSGVFSFVNTLSDSLGPGTVGIHGDSPQFFLYSDLHKFLLWNKPGVSIYNPGAHGHLGILSCGRQLPKPETLPALPRQELSSLQPALQITSGNQHF

SEQ ID NO: 5636 - protein, 19 aa, Homo sapiens
  Payload ID: 1238;
  Gene Symbol: APH1B;
  Gene Name: APH1B gamma secretase subunit;
  ENSP ID: ENSP00000453516
LYVFTIATEPLRIIFLIAG

SEQ ID NO: 5637 - protein, 164 aa, Homo sapiens
  Payload ID: 1239;
  Gene Symbol: APITD1-CORT;
  Gene Name: APITD1-CORT readthrough;
  ENSP ID: ENSP00000383692
MEEEAETEEQQRFSYQQRLKAAVHYTVGCLCEEVALDKEMQFSKQTIAAISELTFRQCENFAKDLEMFARHAKRTTINTEDVKLLARRSNSLHMQEAAGIRKSSLLTFLAWWFEWTSQASAGPLIGEEAREVARRQEGAPPQQSARRDRMPCRNFFWKTFSSCK

SEQ ID NO: 5638 - protein, 77 aa, Homo sapiens
  Payload ID: 1239;
  Gene Symbol: APITD1-CORT;
  Gene Name: APITD1-CORT readthrough;
  ENSP ID: ENSP00000433615
MEEEAETEEQQRFSYQQRLKAAVHYTVGCLCEEVALDKEMQFSKQTIAAISELTFRQCENFAKDLEMFASICRKRQE

SEQ ID NO: 5639 - protein, 143 aa, Homo sapiens
  Payload ID: 1239;
  Gene Symbol: APITD1-CORT;
  Gene Name: APITD1-CORT readthrough;
  ENSP ID: ENSP00000473401
MSSRRGSFLSTKLHCSSCLPCPLSFEKFKPSEKLQEHENFAKDLEMFARHAKRTTINTEDVKLLARRSNSLHMQEAAGIRKSSLLTFLAWWFEWTSQASAGPLIGEEAREVARRQEGAPPQQSARRDRMPCRNFFWKTFSSCK

SEQ ID NO: 5640 - protein, 138 aa, Homo sapiens
  Payload ID: 1239;
  Gene Symbol: APITD1-CORT;
  Gene Name: APITD1-CORT readthrough;
  ENSP ID: ENSP00000473509
MEEEAETEEQQRFSYQQRLKAAVHYTVGCLCEEVALDKEMQFSKQTIAAISELTFRQCENFAKDLEMFARHAKRTTINTEDVKLLARRSNSLLKYITDKSEEIAQINLERKAQKKKKSEDGSKNSRQPAEAGVVESEN

SEQ ID NO: 5641 - protein, 49 aa, Homo sapiens
  Payload ID: 1239;
  Gene Symbol: APITD1-CORT;
  Gene Name: APITD1-CORT readthrough;
  ENSP ID: ENSP00000489060
MSSRRGSFLSTKLHCSSCLPCPLSFEKFKPSEKLQEHDMRKEPQLTLKM

SEQ ID NO: 5642 - protein, 586 aa, Homo sapiens
  Payload ID: 1240;
  Gene Symbol: A1CF;
  Gene Name: APOBEC1 complementation factor;
  Uniprot ID:  Q9NQ94;
  ENSP ID: ENSP00000282641
MESNHKSGDGLSGTQKEAALRALVQRTGYSLVQENGQRKYGGPPPGWDAAPPERGCEIFIGKLPRDLFEDELIPLCEKIGKIYEMRMMMDFNGNNRGYAFVTFSNKVEAKNAIKQLNNYEIRNGRLLGVCASVDNCRLFVGGIPKTKKREEILSEMKKVTEGVVDVIVYPSAADKTKNRGFAFVEYESHRAAAMARRKLLPGRIQLWGHGIAVDWAEPEVEVDEDTMSSVKILYVRNLMLSTSEEMIEKEFNNIKPGAVERVKKIRDYAFVHFSNREDAVEAMKALNGKVLDGSPIEVTLAKPVDKDSYVRYTRGTGGRGTMLQGEYTYSLGQVYDPTTTYLGAPVFYAPQTYAAIPSLHFPATKGHLSNRAIIRAPSVRGAAGVRGLGGRGYLAYTGLGRGYQVKGDKREDKLYDILPGMELTPMNPVTLKPQGIKLAPQILEEICQKNNWGQPVYQLHSAIGQDQRQLFLYKITIPALASQNPAIHPFTPPKLSAFVDEAKTYAAEYTLQTLGIPTDGGDGTMATAAAAATAFPGYAVPNATAPVSAAQLKQAVTLGQDLAAYTTYEVYPTFAVTARGDGYGTF

SEQ ID NO: 5643 - protein, 594 aa, Homo sapiens
  Payload ID: 1240;
  Gene Symbol: A1CF;
  Gene Name: APOBEC1 complementation factor;
  Uniprot ID:  Q9NQ94;
  ENSP ID: ENSP00000363105
MESNHKSGDGLSGTQKEAALRALVQRTGYSLVQENGQRKYGGPPPGWDAAPPERGCEIFIGKLPRDLFEDELIPLCEKIGKIYEMRMMMDFNGNNRGYAFVTFSNKVEAKNAIKQLNNYEIRNGRLLGVCASVDNCRLFVGGIPKTKKREEILSEMKKVTEGVVDVIVYPSAADKTKNRGFAFVEYESHRAAAMARRKLLPGRIQLWGHGIAVDWAEPEVEVDEDTMSSVKILYVRNLMLSTSEEMIEKEFNNIKPGAVERVKKIRDYAFVHFSNREDAVEAMKALNGKVLDGSPIEVTLAKPVDKDSYVRYTRGTGGRGTMLQGEYTYSLGQVYDPTTTYLGAPVFYAPQTYAAIPSLHFPATKGHLSNRAIIRAPSVREIYMNVPVGAAGVRGLGGRGYLAYTGLGRGYQVKGDKREDKLYDILPGMELTPMNPVTLKPQGIKLAPQILEEICQKNNWGQPVYQLHSAIGQDQRQLFLYKITIPALASQNPAIHPFTPPKLSAFVDEAKTYAAEYTLQTLGIPTDGGDGTMATAAAAATAFPGYAVPNATAPVSAAQLKQAVTLGQDLAAYTTYEVYPTFAVTARGDGYGTF

SEQ ID NO: 5644 - protein, 594 aa, Homo sapiens
  Payload ID: 1240;
  Gene Symbol: A1CF;
  Gene Name: APOBEC1 complementation factor;
  Uniprot ID:  Q9NQ94;
  ENSP ID: ENSP00000363107
MEAVCLGTCPEPEASMSTAIPGLKKGNNALQSIILQTLLEKENGQRKYGGPPPGWDAAPPERGCEIFIGKLPRDLFEDELIPLCEKIGKIYEMRMMMDFNGNNRGYAFVTFSNKVEAKNAIKQLNNYEIRNGRLLGVCASVDNCRLFVGGIPKTKKREEILSEMKKVTEGVVDVIVYPSAADKTKNRGFAFVEYESHRAAAMARRKLLPGRIQLWGHGIAVDWAEPEVEVDEDTMSSVKILYVRNLMLSTSEEMIEKEFNNIKPGAVERVKKIRDYAFVHFSNREDAVEAMKALNGKVLDGSPIEVTLAKPVDKDSYVRYTRGTGGRGTMLQGEYTYSLGQVYDPTTTYLGAPVFYAPQTYAAIPSLHFPATKGHLSNRAIIRAPSVRGAAGVRGLGGRGYLAYTGLGRGYQVKGDKREDKLYDILPGMELTPMNPVTLKPQGIKLAPQILEEICQKNNWGQPVYQLHSAIGQDQRQLFLYKITIPALASQNPAIHPFTPPKLSAFVDEAKTYAAEYTLQTLGIPTDGGDGTMATAAAAATAFPGYAVPNATAPVSAAQLKQAVTLGQDLAAYTTYEVYPTFAVTARGDGYGTF

SEQ ID NO: 5645 - protein, 586 aa, Homo sapiens; identical to SEQ ID NO: 5642
  Payload ID: 1240;
  Gene Symbol: A1CF;
  Gene Name: APOBEC1 complementation factor;
  Uniprot ID:  Q9NQ94;
  ENSP ID: ENSP00000363109

SEQ ID NO: 5646 - protein, 586 aa, Homo sapiens; identical to SEQ ID NO: 5642
  Payload ID: 1240;
  Gene Symbol: A1CF;
  Gene Name: APOBEC1 complementation factor;
  Uniprot ID:  Q9NQ94;
  ENSP ID: ENSP00000363113

SEQ ID NO: 5647 - protein, 602 aa, Homo sapiens
  Payload ID: 1240;
  Gene Symbol: A1CF;
  Gene Name: APOBEC1 complementation factor;
  ENSP ID: ENSP00000378868
MEAVCLGTCPEPEASMSTAIPGLKKGNNALQSIILQTLLEKENGQRKYGGPPPGWDAAPPERGCEIFIGKLPRDLFEDELIPLCEKIGKIYEMRMMMDFNGNNRGYAFVTFSNKVEAKNAIKQLNNYEIRNGRLLGVCASVDNCRLFVGGIPKTKKREEILSEMKKVTEGVVDVIVYPSAADKTKNRGFAFVEYESHRAAAMARRKLLPGRIQLWGHGIAVDWAEPEVEVDEDTMSSVKILYVRNLMLSTSEEMIEKEFNNIKPGAVERVKKIRDYAFVHFSNREDAVEAMKALNGKVLDGSPIEVTLAKPVDKDSYVRYTRGTGGRGTMLQGEYTYSLGQVYDPTTTYLGAPVFYAPQTYAAIPSLHFPATKGHLSNRAIIRAPSVREIYMNVPVGAAGVRGLGGRGYLAYTGLGRGYQVKGDKREDKLYDILPGMELTPMNPVTLKPQGIKLAPQILEEICQKNNWGQPVYQLHSAIGQDQRQLFLYKITIPALASQNPAIHPFTPPKLSAFVDEAKTYAAEYTLQTLGIPTDGGDGTMATAAAAATAFPGYAVPNATAPVSAAQLKQAVTLGQDLAAYTTYEVYPTFAVTARGDGYGTF

SEQ ID NO: 5648 - protein, 594 aa, Homo sapiens; identical to SEQ ID NO: 5644
  Payload ID: 1240;
  Gene Symbol: A1CF;
  Gene Name: APOBEC1 complementation factor;
  Uniprot ID:  Q9NQ94;
  ENSP ID: ENSP00000378873

SEQ ID NO: 5649 - protein, 201 aa, Homo sapiens
  Payload ID: 1240;
  Gene Symbol: A1CF;
  Gene Name: APOBEC1 complementation factor;
  ENSP ID: ENSP00000397953
MESNHKSGDGLSGTQKEAALRALVQRTGYSLVQENGQRKYGGPPPGWDAAPPERGCEIFIGKLPRDLFEDELIPLCEKIGKIYEMRMMMDFNGNNRGYAFVTFSNKVEAKNAIKQLNNYEIRNGRLLGVCASVDNCRLFVGGIPKTKKREEILSEMKKVTEGVVDVIVYPSAADKTKNRGFAFVEYESHRAAAMARRKLLP

SEQ ID NO: 5650 - protein, 101 aa, Homo sapiens
  Payload ID: 1241;
  Gene Symbol: APOC4-APOC2;
  Gene Name: APOC4-APOC2 readthrough (NMD candidate);
  ENSP ID: ENSP00000252490
MGTRLLPALFLVLLVLGFEVQGTQQPQQDEMPSPTFLTQVKESLSSYWESAKTAAQNLYEKTYLPAVDEKLRDLYSKSTAAMSTYTGIFTDQVLSVLKGEE

SEQ ID NO: 5651 - protein, 127 aa, Homo sapiens
  Payload ID: 1241;
  Gene Symbol: APOC4-APOC2;
  Gene Name: APOC4-APOC2 readthrough (NMD candidate);
  ENSP ID: ENSP00000467185
MSLLRNRLQALPALCLCVLVLACIGACQPEAQEGTLSPPPKLKMSRWSLVRGRMKELLETVVNRTRDGWQWFWSPSTFRGFMQTYYDDHLRDLGPLTKAWFLESKDSLLKKTHSLCPRLVCGDKDQG

SEQ ID NO: 5652 - protein, 178 aa, Homo sapiens
  Payload ID: 1241;
  Gene Symbol: APOC4-APOC2;
  Gene Name: APOC4-APOC2 readthrough (NMD candidate);
  ENSP ID: ENSP00000468139
MSLLRNRLQALPALCLCVLVLACIGACQPEAQEGTLSPPPKLKMSRWSLVRGRMKELLETVVNRTRDGWQWFWSLDTMGTRLLPALFLVLLVLGFEVQGTQQPQQDEMPSPTFLTQVKESLSSYWESAKTAAQNLYEKTYLPAVDEKLRDLYSKSTAAMSTYTGIFTDQVLSVLKGEE

SEQ ID NO: 5653 - protein, 267 aa, Homo sapiens
  Payload ID: 1242;
  Gene Symbol: APOA1;
  Gene Name: apolipoprt A-I;
  Uniprot ID:  P02647;
  ENSP ID: ENSP00000236850
MKAAVLTLAVLFLTGSQARHFWQQDEPPQSPWDRVKDLATVYVDVLKDSGRDYVSQFEGSALGKQLNLKLLDNWDSVTSTFSKLREQLGPVTQEFWDNLEKETEGLRQEMSKDLEEVKAKVQPYLDDFQKKWQEEMELYRQKVEPLRAELQEGARQKLHELQEKLSPLGEEMRDRARAHVDALRTHLAPYSDELRQRLAARLEALKENGGARLAEYHAKATEHLSTLSEKAKPALEDLRQGLLPVLESFKVSFLSALEEYTKKLNTQ

SEQ ID NO: 5654 - protein, 267 aa, Homo sapiens; identical to SEQ ID NO: 5653
  Payload ID: 1242;
  Gene Symbol: APOA1;
  Gene Name: apolipoprt A-I;
  Uniprot ID:  P02647;
  ENSP ID: ENSP00000352471

SEQ ID NO: 5655 - protein, 267 aa, Homo sapiens; identical to SEQ ID NO: 5653
  Payload ID: 1242;
  Gene Symbol: APOA1;
  Gene Name: apolipoprt A-I;
  Uniprot ID:  P02647;
  ENSP ID: ENSP00000364469

SEQ ID NO: 5656 - protein, 267 aa, Homo sapiens; identical to SEQ ID NO: 5653
  Payload ID: 1242;
  Gene Symbol: APOA1;
  Gene Name: apolipoprt A-I;
  Uniprot ID:  P02647;
  ENSP ID: ENSP00000364472

SEQ ID NO: 5657 - protein, 245 aa, Homo sapiens
  Payload ID: 1242;
  Gene Symbol: APOA1;
  Gene Name: apolipoprt A-I;
  ENSP ID: ENSP00000364478
MSGGARGFCMLKAPHSARPFFSSRSPTALQDESCGADLGRALPDGLKLLDNWDSVTSTFSKLREQLGPVTQEFWDNLEKETEGLRQEMSKDLEEVKAKVQPYLDDFQKKWQEEMELYRQKVEPLRAELQEGARQKLHELQEKLSPLGEEMRDRARAHVDALRTHLAPYSDELRQRLAARLEALKENGGARLAEYHAKATEHLSTLSEKAKPALEDLRQGLLPVLESFKVSFLSALEEYTKKLNTQ

SEQ ID NO: 5658 - protein, 245 aa, Homo sapiens
  Payload ID: 1243;
  Gene Symbol: APOA1BP;
  Gene Name: apolipoprt A-I binding prt;
  ENSP ID: ENSP00000357216
MSRLRALLGLGLLVAGSRVPRIKSQTIACRSGPTWWGPQRLNSGGRWDSEVMASTVVKYLSQEEAQAVDQELFNEYQFSVDQLMELAGLSCATAIAKAYPPTSMSRSPPTVLVICGPGNNGGDGLVCARHLKLFGYEPTIYYPKRPNKPLFTALVTQCQKMDIPFLGEMPAEPMTIDELYELVVDAIFGFSFKGDVREPFHSILSVLKGLTVPIASIDIPSGAGIQKVGWGRLGPYPPDSCPHQV

SEQ ID NO: 5659 - protein, 260 aa, Homo sapiens
  Payload ID: 1243;
  Gene Symbol: APOA1BP;
  Gene Name: apolipoprt A-I binding prt;
  ENSP ID: ENSP00000357217
MSRLRALLGLGLLVAGSRVPRIKSQTIACRSGPTWWGPQRLNSGGRWDSEVMASTVVKYLSQEEAQAVDQELFNEYQFSVDQLMELAGLSCATAIAKAYPPTSMSRSPPTVLVICGPGNNGGDGLVCARHLKLFGYEPTIYYPKRPNKPLFTALVTQCQKMDIPFLGEMPAELQGRCSGTVPQHPECPEGTHCAHCQHRHSLRMGRGEGKCWRDPARLAHIPHSPQKICNPVYRSLPLPGGSFCATCSGEEVPAEPATLP

SEQ ID NO: 5660 - protein, 288 aa, Homo sapiens
  Payload ID: 1243;
  Gene Symbol: APOA1BP;
  Gene Name: apolipoprt A-I binding prt;
  Uniprot ID:  Q8NCW5;
  ENSP ID: ENSP00000357218
MSRLRALLGLGLLVAGSRVPRIKSQTIACRSGPTWWGPQRLNSGGRWDSEVMASTVVKYLSQEEAQAVDQELFNEYQFSVDQLMELAGLSCATAIAKAYPPTSMSRSPPTVLVICGPGNNGGDGLVCARHLKLFGYEPTIYYPKRPNKPLFTALVTQCQKMDIPFLGEMPAEPMTIDELYELVVDAIFGFSFKGDVREPFHSILSVLKGLTVPIASIDIPSGWDVEKGNAGGIQPDLLISLTAPKKSATQFTGRYHYLGGRFVPPALEKKYQLNLPPYPDTECVYRLQ

SEQ ID NO: 5661 - protein, 100 aa, Homo sapiens
  Payload ID: 1244;
  Gene Symbol: APOA2;
  Gene Name: apolipoprt A-II;
  Uniprot ID:  P02652;
  ENSP ID: ENSP00000356969
MKLLAATVLLLTICSLEGALVRRQAKEPCVESLVSQYFQTVTDYGKDLMEKVKSPELQAEAKSYFEKSKEQLTPLIKKAGTELVNFLSYFVELGTQPATQ

SEQ ID NO: 5662 - protein, 66 aa, Homo sapiens
  Payload ID: 1244;
  Gene Symbol: APOA2;
  Gene Name: apolipoprt A-II;
  ENSP ID: ENSP00000476605
MKLLAATVLLLTICSLEGALVRRQAKEPCVESLVSQYFQTVTDYGKDLMEKVKSPELQAEAKSYFE

SEQ ID NO: 5663 - protein, 52 aa, Homo sapiens
  Payload ID: 1244;
  Gene Symbol: APOA2;
  Gene Name: apolipoprt A-II;
  ENSP ID: ENSP00000476662
MEKVKSPELQAEAKSYFEKSKEQLTPLIKKAGTELVNFLSYFVELGTQPATQ

SEQ ID NO: 5664 - protein, 95 aa, Homo sapiens
  Payload ID: 1244;
  Gene Symbol: APOA2;
  Gene Name: apolipoprt A-II;
  ENSP ID: ENSP00000476740
MKLLAATVLLLTICSLEGALVRRQAKEPCVESLVSQYFQTVTDYGKDLMEKVKSPELQAEAKSYFEKSKEQLTPLIKKAGTELVNFLSYFVELGT

SEQ ID NO: 5665 - protein, 52 aa, Homo sapiens; identical to SEQ ID NO: 5663
  Payload ID: 1244;
  Gene Symbol: APOA2;
  Gene Name: apolipoprt A-II;
  ENSP ID: ENSP00000476890

SEQ ID NO: 5666 - protein, 133 aa, Homo sapiens
  Payload ID: 1244;
  Gene Symbol: APOA2;
  Gene Name: apolipoprt A-II;
  ENSP ID: ENSP00000476911
MCEQHPKRPGLQLWRGREPGWNGQQAALPTVTNMKLLAATVLLLTICSLEGALVRRQAKEPCVESLVSQYFQTVTDYGKDLMEKVKSPELQAEAKSYFEKSKEQLTPLIKKAGTELVNFLSYFVELGTQPATQ

SEQ ID NO: 5667 - protein, 82 aa, Homo sapiens
  Payload ID: 1244;
  Gene Symbol: APOA2;
  Gene Name: apolipoprt A-II;
  ENSP ID: ENSP00000477031
MKLLAATVLLLTICSLEGALVRRQAKEPCVESLVSQYFQTVTDYGKDLMEKVKSPELQAEAKSYFENFLSYFVELGTQPATQ

SEQ ID NO: 5668 - protein, 72 aa, Homo sapiens
  Payload ID: 1244;
  Gene Symbol: APOA2;
  Gene Name: apolipoprt A-II;
  ENSP ID: ENSP00000477054
MKLLAATVLLLTICSLEGLATKGLKRKIIPSLKPRKPIQRSGWIPFWGGGRELGWVLAEVWQEARIHCCGPS

SEQ ID NO: 5669 - protein, 27 aa, Homo sapiens
  Payload ID: 1244;
  Gene Symbol: APOA2;
  Gene Name: apolipoprt A-II;
  ENSP ID: ENSP00000477353
MKLLAATVLLLTICSLEGLTLKSQRSS

SEQ ID NO: 5670 - protein, 396 aa, Homo sapiens
  Payload ID: 1245;
  Gene Symbol: APOA4;
  Gene Name: apolipoprt A-IV;
  Uniprot ID:  P06727;
  ENSP ID: ENSP00000350425
MFLKAVVLTLALVAVAGARAEVSADQVATVMWDYFSQLSNNAKEAVEHLQKSELTQQLNALFQDKLGEVNTYAGDLQKKLVPFATELHERLAKDSEKLKEEIGKELEELRARLLPHANEVSQKIGDNLRELQQRLEPYADQLRTQVSTQAEQLRRQLTPYAQRMERVLRENADSLQASLRPHADELKAKIDQNVEELKGRLTPYADEFKVKIDQTVEELRRSLAPYAQDTQEKLNHQLEGLTFQMKKNAEELKARISASAEELRQRLAPLAEDVRGNLRGNTEGLQKSLAELGGHLDQQVEEFRRRVEPYGENFNKALVQQMEQLRQKLGPHAGDVEGHLSFLEKDLRDKVNSFFSTFKEKESQDKTLSLPELEQQQEQQQEQQQEQVQMLAPLES

SEQ ID NO: 5671 - protein, 366 aa, Homo sapiens
  Payload ID: 1246;
  Gene Symbol: APOA5;
  Gene Name: apolipoprt A-V;
  Uniprot ID:  Q6Q788;
  ENSP ID: ENSP00000227665
MASMAAVLTWALALLSAFSATQARKGFWDYFSQTSGDKGRVEQIHQQKMAREPATLKDSLEQDLNNMNKFLEKLRPLSGSEAPRLPQDPVGMRRQLQEELEEVKARLQPYMAEAHELVGWNLEGLRQQLKPYTMDLMEQVALRVQELQEQLRVVGEDTKAQLLGGVDEAWALLQGLQSRVVHHTGRFKELFHPYAESLVSGIGRHVQELHRSVAPHAPASPARLSRCVQVLSRKLTLKAKALHARIQQNLDQLREELSRAFAGTGTEEGAGPDPQMLSEEVRQRLQAFRQDTYLQIAAFTRAIDQETEEVQQQLAPPPPGHSAFAPEFQQTDSGKVLSKLQARLDDLWEDITHSLHDQGHSHLGDP

SEQ ID NO: 5672 - protein, 162 aa, Homo sapiens
  Payload ID: 1246;
  Gene Symbol: APOA5;
  Gene Name: apolipoprt A-V;
  ENSP ID: ENSP00000399701
MASMAAVLTWALALLSAFSATQARKGFWDYFSQTSGDKGRVEQIHQQKMAREPATLKDSLEQDLNNMNKFLEKLRPLSGSEAPRLPQDPVGMRRQLQEELEEVKARLQPYMAEAHELVGWNLEGLRQQLKPYTMDLMEQVALRVQELQEQLRVVGEDTKAQL

SEQ ID NO: 5673 - protein, 366 aa, Homo sapiens; identical to SEQ ID NO: 5671
  Payload ID: 1246;
  Gene Symbol: APOA5;
  Gene Name: apolipoprt A-V;
  Uniprot ID:  Q6Q788;
  ENSP ID: ENSP00000445002

SEQ ID NO: 5674 - protein, 4563 aa, Homo sapiens
  Payload ID: 1247;
  Gene Symbol: APOB;
  Gene Name: apolipoprt B;
  Uniprot ID:  P04114;
  ENSP ID: ENSP00000233242
MDPPRPALLALLALPALLLLLLAGARAEEEMLENVSLVCPKDATRFKHLRKYTYNYEAESSSGVPGTADSRSATRINCKVELEVPQLCSFILKTSQCTLKEVYGFNPEGKALLKKTKNSEEFAAAMSRYELKLAIPEGKQVFLYPEKDEPTYILNIKRGIISALLVPPETEEAKQVLFLDTVYGNCSTHFTVKTRKGNVATEISTERDLGQCDRFKPIRTGISPLALIKGMTRPLSTLISSSQSCQYTLDAKRKHVAEAICKEQHLFLPFSYKNKYGMVAQVTQTLKLEDTPKINSRFFGEGTKKMGLAFESTKSTSPPKQAEAVLKTLQELKKLTISEQNIQRANLFNKLVTELRGLSDEAVTSLLPQLIEVSSPITLQALVQCGQPQCSTHILQWLKRVHANPLLIDVVTYLVALIPEPSAQQLREIFNMARDQRSRATLYALSHAVNNYHKTNPTGTQELLDIANYLMEQIQDDCTGDEDYTYLILRVIGNMGQTMEQLTPELKSSILKCVQSTKPSLMIQKAAIQALRKMEPKDKDQEVLLQTFLDDASPGDKRLAAYLMLMRSPSQADINKIVQILPWEQNEQVKNFVASHIANILNSEELDIQDLKKLVKEALKESQLPTVMDFRKFSRNYQLYKSVSLPSLDPASAKIEGNLIFDPNNYLPKESMLKTTLTAFGFASADLIEIGLEGKGFEPTLEALFGKQGFFPDSVNKALYWVNGQVPDGVSKVLVDHFGYTKDDKHEQDMVNGIMLSVEKLIKDLKSKEVPEARAYLRILGEELGFASLHDLQLLGKLLLMGARTLQGIPQMIGEVIRKGSKNDFFLHYIFMENAFELPTGAGLQLQISSSGVIAPGAKAGVKLEVANMQAELVAKPSVSVEFVTNMGIIIPDFARSGVQMNTNFFHESGLEAHVALKAGKLKFIIPSPKRPVKLLSGGNTLHLVSTTKTEVIPPLIENRQSWSVCKQVFPGLNYCTSGAYSNASSTDSASYYPLTGDTRLELELRPTGEIEQYSVSATYELQREDRALVDTLKFVTQAEGAKQTEATMTFKYNRQSMTLSSEVQIPDFDVDLGTILRVNDESTEGKTSYRLTLDIQNKKITEVALMGHLSCDTKEERKIKGVISIPRLQAEARSEILAHWSPAKLLLQMDSSATAYGSTVSKRVAWHYDEEKIEFEWNTGTNVDTKKMTSNFPVDLSDYPKSLHMYANRLLDHRVPQTDMTFRHVGSKLIVAMSSWLQKASGSLPYTQTLQDHLNSLKEFNLQNMGLPDFHIPENLFLKSDGRVKYTLNKNSLKIEIPLPFGGKSSRDLKMLETVRTPALHFKSVGFHLPSREFQVPTFTIPKLYQLQVPLLGVLDLSTNVYSNLYNWSASYSGGNTSTDHFSLRARYHMKADSVVDLLSYNVQGSGETTYDHKNTFTLSCDGSLRHKFLDSNIKFSHVEKLGNNPVSKGLLIFDASSSWGPQMSASVHLDSKKKQHLFVKEVKIDGQFRVSSFYAKGTYGLSCQRDPNTGRLNGESNLRFNSSYLQGTNQITGRYEDGTLSLTSTSDLQSGIIKNTASLKYENYELTLKSDTNGKYKNFATSNKMDMTFSKQNALLRSEYQADYESLRFFSLLSGSLNSHGLELNADILGTDKINSGAHKATLRIGQDGISTSATTNLKCSLLVLENELNAELGLSGASMKLTTNGRFREHNAKFSLDGKAALTELSLGSAYQAMILGVDSKNIFNFKVSQEGLKLSNDMMGSYAEMKFDHTNSLNIAGLSLDFSSKLDNIYSSDKFYKQTVNLQLQPYSLVTTLNSDLKYNALDLTNNGKLRLEPLKLHVAGNLKGAYQNNEIKHIYAISSAALSASYKADTVAKVQGVEFSHRLNTDIAGLASAIDMSTNYNSDSLHFSNVFRSVMAPFTMTIDAHTNGNGKLALWGEHTGQLYSKFLLKAEPLAFTFSHDYKGSTSHHLVSRKSISAALEHKVSALLTPAEQTGTWKLKTQFNNNEYSQDLDAYNTKDKIGVELTGRTLADLTLLDSPIKVPLLLSEPINIIDALEMRDAVEKPQEFTIVAFVKYDKNQDVHSINLPFFETLQEYFERNRQTIIVVLENVQRNLKHINIDQFVRKYRAALGKLPQQANDYLNSFNWERQVSHAKEKLTALTKKYRITENDIQIALDDAKINFNEKLSQLQTYMIQFDQYIKDSYDLHDLKIAIANIIDEIIEKLKSLDEHYHIRVNLVKTIHDLHLFIENIDFNKSGSSTASWIQNVDTKYQIRIQIQEKLQQLKRHIQNIDIQHLAGKLKQHIEAIDVRVLLDQLGTTISFERINDILEHVKHFVINLIGDFEVAEKINAFRAKVHELIERYEVDQQIQVLMDKLVELAHQYKLKETIQKLSNVLQQVKIKDYFEKLVGFIDDAVKKLNELSFKTFIEDVNKFLDMLIKKLKSFDYHQFVDETNDKIREVTQRLNGEIQALELPQKAEALKLFLEETKATVAVYLESLQDTKITLIINWLQEALSSASLAHMKAKFRETLEDTRDRMYQMDIQQELQRYLSLVGQVYSTLVTYISDWWTLAAKNLTDFAEQYSIQDWAKRMKALVEQGFTVPEIKTILGTMPAFEVSLQALQKATFQTPDFIVPLTDLRIPSVQINFKDLKNIKIPSRFSTPEFTILNTFHIPSFTIDFVEMKVKIIRTIDQMLNSELQWPVPDIYLRDLKVEDIPLARITLPDFRLPEIAIPEFIIPTLNLNDFQVPDLHIPEFQLPHISHTIEVPTFGKLYSILKIQSPLFTLDANADIGNGTTSANEAGIAASITAKGESKLEVLNFDFQANAQLSNPKINPLALKESVKFSSKYLRTEHGSEMLFFGNAIEGKSNTVASLHTEKNTLELSNGVIVKINNQLTLDSNTKYFHKLNIPKLDFSSQADLRNEIKTLLKAGHIAWTSSGKGSWKWACPRFSDEGTHESQISFTIEGPLTSFGLSNKINSKHLRVNQNLVYESGSLNFSKLEIQSQVDSQHVGHSVLTAKGMALFGEGKAEFTGRHDAHLNGKVIGTLKNSLFFSAQPFEITASTNNEGNLKVRFPLRLTGKIDFLNNYALFLSPSAQQASWQVSARFNQYKYNQNFSAGNNENIMEAHVGINGEANLDFLNIPLTIPEMRLPYTIITTPPLKDFSLWEKTGLKEFLKTTKQSFDLSVKAQYKKNKHRHSITNPLAVLCEFISQSIKSFDRHFEKNRNNALDFVTKSYNETKIKFDKYKAEKSHDELPRTFQIPGYTVPVVNVEVSPFTIEMSAFGYVFPKAVSMPSFSILGSDVRVPSYTLILPSLELPVLHVPRNLKLSLPDFKELCTISHIFIPAMGNITYDFSFKSSVITLNTNAELFNQSDIVAHLLSSSSSVIDALQYKLEGTTRLTRKRGLKLATALSLSNKFVEGSHNSTVSLTTKNMEVSVATTTKAQIPILRMNFKQELNGNTKSKPTVSSSMEFKYDFNSSMLYSTAKGAVDHKLSLESLTSYFSIESSTKGDVKGSVLSREYSGTIASEANTYLNSKSTRSSVKLQGTSKIDDIWNLEVKENFAGEATLQRIYSLWEHSTKNHLQLEGLFFTNGEHTSKATLELSPWQMSALVQVHASQPSSFHDFPDLGQEVALNANTKNQKIRWKNEVRIHSGSFQSQVELSNDQEKAHLDIAGSLEGHLRFLKNIILPVYDKSLWDFLKLDVTTSIGRRQHLRVSTAFVYTKNPNGYSFSIPVKVLADKFIIPGLKLNDLNSVLVMPTFHVPFTDLQVPSCKLDFREIQIYKKLRTSSFALNLPTLPEVKFPEVDVLTKYSQPEDSLIPFFEITVPESQLTVSQFTLPKSVSDGIAALDLNAVANKIADFELPTIIVPEQTIEIPSIKFSVPAGIVIPSFQALTARFEVDSPVYNATWSASLKNKADYVETVLDSTCSSTVQFLEYELNVLGTHKIEDGTLASKTKGTFAHRDFSAEYEEDGKYEGLQEWEGKAHLNIKSPAFTDLHLRYQKDKKGISTSAASPAVGTVGMDMDEDDDFSKWNFYYSPQSSPDKKLTIFKTELRVRESDEETQIKVNWEEEAASGLLTSLKDNVPKATGVLYDYVNKYHWEHTGLTLREVSSKLRRNLQNNAEWVYQGAIRQIDDIDVRFQKAASGTTGTYQEWKDKAQNLYQELLTQEGQASFQGLKDNVFDGLVRVTQEFHMKVKHLIDSLIDFLNFPRFQFPGKPGIYTREELCTMFIREVGTVLSQVYSKVHNGSEILFSYFQDLVITLPFELRKHKLIDVISMYRELLKDLSKEAQEVFKAIQSLKTTEVLRNLQDLLQFIFQLIEDNIKQLKEMKFTYLINYIQDEINTIFSDYIPYVFKLLKENLCLNLHKFNEFIQNELQEASQELQQIHQYIMALREEYFDPSIVGWTVKYYELEEKIVSLIKNLLVALKDFHSEYIVSASNFTSQLSSQVEQFLHRNIQEYLSILTDPDGKGKEKIAELSATAQEIIKSQAIATKKIISDYHQQFRYKLQDFSDQLSDYYEKFIAESKRLIDLSIQNYHTFLIYITELLKKLQSTTVMNPYMKLAPGELTIIL

SEQ ID NO: 5675 - protein, 828 aa, Homo sapiens
  Payload ID: 1247;
  Gene Symbol: APOB;
  Gene Name: apolipoprt B;
  ENSP ID: ENSP00000382200
MDPPRPALLALLALPALLLLLLAGARAEEEMLENVSLVCPKDATRFKHLRKYTYNYEAESSSGVPGTADSRSATRINCKVELEVPQLCSFILKTSQCTLKEVYGFNPEGKALLKKTKNSEEFAAAMSRYELKLAIPEGKQVFLYPEKDEPTYILNIKRGIISALLVPPETEEAKQVLFLDTVYGNCSTHFTVKTRKGNVATEISTERDLGQCDRFKPIRTGISPLALIKGMTRPLSTLISSSQSCQYTLDAKRKHVAEAICKEQHLFLPFSYKNKYGMVAQVTQTLKLEDTPKINSRFFGEGTKKMGLAFESTKSTSPPKQAEAVLKTLQELKKLTISEQNIQRANLFNKLVTELRGLSDEAVTSLLPQLIEVSSPITLQALVQCGQPQCSTHILQWLKRVHANPLLIDVVTYLVALIPEPSAQQLREIFNMARDQRSRATLYALSHAVNNYHKTNPTGTQELLDIANYLMEQIQDDCTGDEDYTYLILRVIGNMGQTMEQLTPELKSSILKCVQSTKPSLMIQKAAIQALRKMEPKDKDQEVLLQTFLDDASPGDKRLAAYLMLMRSPSQADINKIVQILPWEQNEQVKNFVASHIANILNSEELDIQDLKKLVKEALKESQLPTVMDFRKFSRNYQLYKSVSLPSLDPASAKIEGNLIFDPNNYLPKESMLKTTLTAFGFASADLIEIGLEGKGFEPTLEALFGKQGFFPDSVNKALYWVNGQVPDGVSKVLVDHFGYTKDDKHEQDMVNGIMLSVEKLIKDLKSKEVPEARAYLRILGEELGFASLHDLQLLGKLLLMDRPDSLTIPAAQARKDACTFFRDGGLP

SEQ ID NO: 5676 - protein, 4344 aa, Homo sapiens
  Payload ID: 1247;
  Gene Symbol: APOB;
  Gene Name: apolipoprt B;
  ENSP ID: ENSP00000477990
MDPPRPALLALLALPALLLLLLAGARAEEEMLENVSLVCPKDATRFKHLRKYTYNYEAESSSGVPGTADSRSATRINCKVELEVPQLCSFILKTSQCTLKEVYGFNPEGKALLKKTKNSEEFAAAMSRYELKLAIPEGKQVFLYPEKDEPTYILNIKRGIISALLVPPETEEAKQVLFLDTVYGNCSTHFTVKTRKGNVATEISTERDLGQCDRFKPIRTGISPLALIKGMTRPLSTLISSSQSCQYTLDAKRKHVAEAICKEQHLFLPFSYKNKYGMVAQVTQTLKLEDTPKINSRFFGEGTKKMGLAFESTKSTSPPKQAEAVLKTLQELKKLTISEQNIQRANLFNKLVTELRGLSDEAVTSLLPQLIEVSSPITLQALVQCGQPQCSTHILQWLKRVHANPLLIDVVTYLVALIPEPSAQQLREIFNMARDQRSRATLYALSHAVNNYHKTNPTGTQELLDIANYLMEQIQDDCTGDEDYTYLILRVIGNMGQTMEQLTPELKSSILKCVQSTKPSLMIQKAAIQALRKMEPKDKDQEVLLQTFLDDASPGDKRLAAYLMLMRSPSQADINKIVQILPWEQNEQVKNFVASHIANILNSEELDIQDLKKLVKEALKESQLPTVMDFRKFSRNYQLYKSVSLPSLDPASAKIEGNLIFDPNNYLPKESMLKTTLTAFGFASADLIEIGLEGKGFEPTLEALFGKQGFFPDSVNKALYWVNGQVPDGVSKVLVDHFGYTKDDKHEQDMVNGIMLSVEKLIKDLKSKEVPEARAYLRILGEELGFASLHDLQLLGKLLLMGARTLQGIPQMIGEVIRKGSKNDFFLHYIFMENAFELPTGAGLQLQISSSGVIAPGAKAGVKLEVANMQAELVAKPSVSVEFVTNMGIIIPDFARSGVQMNTNFFHESGLEAHVALKAGKLKFIIPSPKRPVKLLSGGNTLHLVSTTKTEVIPPLIENRQSWSVCKQVFPGLNYCTSGAYSNASSTDSASYYPLTGDTRLELELRPTGEIEQYSVSATYELQREDRALVDTLKFVTQAEGAKQTEATMTFKYNRQSMTLSSEVQIPDFDVDLGTILRVNDESTEGKTSYRLTLDIQNKKITEVALMGHLSCDTKEERKIKGVISIPRLQAEARSEILAHWSPAKLLLQMDSSATAYGSTVSKRVAWHYDEEKIEFEWNTGTNVDTKKMTSNFPVDLSDYPKSLHMYANRLLDHRVPQTDMTFRHVGSKLIVAMSSWLQKASGSLPYTQTLQDHLNSLKEFNLQNMGLPDFHIPENLFLKSDGRVKYTLNKNSLKIEIPLPFGGKSSRDLKMLETVRTPALHFKSVGFHLPSREFQVPTFTIPKLYQLQVPLLGVLDLSTNVYSNLYNWSASYSGGNTSTDHFSLRARYHMKADSVVDLLSYNVQGSGETTYDHKNTFTLSCDGSLRHKFLDSNIKFSHVEKLGNNPVSKGLLIFDASSSWGPQMSASVHLDSKKKQHLFVKEVKIDGQFRVSSFYAKGTYGLSCQRDPNTGRLNGESNLRFNSSYLQGTNQITGRYEDGTLSLTSTSDLQSGIIKNTASLKYENYELTLKSDTNGKYKNFATSNKMDMTFSKQNALLRSEYQADYESLRFFSLLSGSLNSHGLELNADILGTDKINSGAHKATLRIGQDGISTSATTNLKCSLLVLENELNAELGLSGASMKLTTNGRFREHNAKFSLDGKAALTELSLGSAYQAMILGVDSKNIFNFKVSQEGLKLSNDMMGSYAEMKFDHTNSLNIAGLSLDFSSKLDNIYSSDKFYKQTVNLQLQPYSLVTTLNSDLKYNALDLTNNGKLRLEPLKLHVAGNLKGAYQNNEIKHIYAISSAALSASYKADTVAKVQGVEFSHRLNTDIAGLASAIDMSTNYNSDSLHFSNVFRSVMAPFTMTIDAHTNGNGKLALWGEHTGQLYSKFLLKAEPLAFTFSHDYKGSTSHHLVSRKSISAALEHKVSALLTPAEQTGTWKLKTQFNNNEYSQDLDAYNTKDKIGVELTGRTLADLTLLDSPIKVPLLLSEPINIIDALEMRDAVEKPQEFTIVAFVKYDKNQDVHSINLPFFETLQEYFERNRQTIIVVLENVQRNLKHINIDQFVRKYRAALGKLPQQANDYLNSFNWERQVSHAKEKLTALTKKYRITENDIQIALDDAKINFNEKLSQLQTYMIQFDQYIKDSYDLHDLKIAIANIIDEIIEKLKSLDEHYHIRVNLVKTIHDLHLFIENIDFNKSGSSTASWIQNVDTKYQIRIQIQEKLQQLKRHIQNIDIQHLAGKLKQHIEAIDVRVLLDQLGTTISFERINDILEHVKHFVINLIGDFEVAEKINAFRAKVHELIERYEVDQQIQVLMDKLVELAHQYKLKETIQKLSNVLQQVKIKDYFEKLVGFIDDAVKKLNELSFKTFIEDVNKFLDMLIKKLKSFDYHQFVDETNDKIREVTQRLNGEIQALELPQKAEALKLFLEETKATVAVYLESLQDTKITLIINWLQEALSSASLAHMKAKFRETLEDTRDRMYQMDIQQELQRYLSLVGQVYSTLVTYISDWWTLAAKNLTDFAEQYSIQDWAKRMKALVEQGFTVPEIKTILGTMPAFEVSLQALQKATFQTPDFIVPLTDLRIPSVQINFKDLKNIKIPSRFSTPEFTILNTFHIPSFTIDFVEMKVKIIRTIDQMLNSELQWPVPDIYLRDLKVEDIPLARITLPDFRLPEIAIPEFIIPTLNLNDFQVPDLHIPEFQLPHISHTIEVPTFGKLYSILKIQSPLFTLDANADIGNGTTSANEAGIAASITAKGESKLEVLNFDFQANAQLSNPKINPLALKESVKFSSKYLRTEHGSEMLFFGNAIEGKSNTVASLHTEKNTLELSNGVIVKINNQLTLDSNTKYFHKLNIPKLDFSSQADLRNEIKTLLKAGHIAWTSSGKGSWKWACPRFSDEGTHESQISFTIEGPLTSFGLSNKINSKHLRVNQNLVYESGSLNFSKLEIQSQVDSQHVGHSVLTAKGMALFGEGKAEFTGRHDAHLNGKVIGTLKNSLFFSAQPFEITASTNNEGNLKVRFPLRLTGKIDFLNNYALFLSPSAQQASWQVSARFNQYKYNQNFSAGNNENIMEAHVGINGEANLDFLNIPLTIPEMRLPYTIITTPPLKDFSLWEKTGLKEFLKTTKQSFDLSVKAQYKKNKHRHSITNPLAVLCEFISQSIKSFDRHFEKNRNNALDFVTKSYNETKIKFDKYKAEKSHDELPRTFQIPGYTVPVVNVEVSPFTIEMSAFGYVFPKAVSMPSFSILGSDVRVPSYTLILPSLELPVLHVPRNLKLSLPDFKELCTISHIFIPAMGNITYDFSFKSSVITLNTNAELFNQSDIVAHLLSSSSSVIDALQYKLEGTTRLTRKRGLKLATALSLSNKFVEGSHNSTVSLTTKNMEVSVATTTKAQIPILRMNFKQELNGNTKSKPTVSSSMEFKYDFNSSMLYSTAKGAVDHKLSLESLTSYFSIESSTKGDVKGSVLSREYSGTIASEANTYLNSKSTRSSVKLQGTSKIDDIWNLEVKENFAGEATLQRIYSLWEHSTKNHLQLEGLFFTNGEHTSKATLELSPWQMSALVQVHASQPSSFHDFPDLGQEVALNANTKNQKIRWKNEVRIHSGSFQSQVELSNDQEKAHLDIAGSLEGHLRFLKNIILPVYDKSLWDFLKLDVTTSIGRRQHLRVSTAFVYTKNPNGYSFSIPVKVLADKFIIPGLKLNDLNSVLVMPTFHVPFTDLQVPSCKLDFREIQIYKKLRTSSFALNLPTLPEVKFPEVDVLTKYSQPEDSLIPFFEITVPESQLTVSQFTLPKSVSDGIAALDLNAVANKIADFELPTIIVPEQTIEIPSIKFSVPAGIVIPSFQALTARFEVDSPVYNATWSASLKNKADYVETVLDSTCSSTVQFLEYELNVLGTHKIEDGTLASKTKGTFAHRDFSAEYEEDGKYEGLQEWEGKAHLNIKSPAFTDLHLRYQKDKKGISTSAASPAVGTVGMDMDEDDDFSKWNFYYSPQSSPDKKLTIFKTELRVRESDEETQIKVNWEEEAASGLLTSLKDNVPKATGVLYDYVNKYHWEHTGLTLREVSSKLRRNLQNNAEWVYQGAIRQIDDIDVRFQKAASGTTGTYQEWKDKAQNLYQELLTQEGQASFQGLKDNVFDGLVRVTQEFHMKVKHLIDSLIDFLNFPRFQFPGKPGIYTREELCTMFIREVGTVLSQVYSKVHNGSEILFSYFQDLVITLPFELRKHKLIDVISMYRELLKDLSKEAQEVFKAIQSLKTTEVLRNLQDLLQFIFQLIEDNIKQLKEMKFTYLINYIQDEINTIFSDYIPCF

SEQ ID NO: 5677 - protein, 236 aa, Homo sapiens
  Payload ID: 1248;
  Gene Symbol: APOBEC1;
  Gene Name: apolipoprt B mRNA editing enzyme, catalytic polypeptide 1;
  Uniprot ID:  P41238;
  ENSP ID: ENSP00000229304
MTSEKGPSTGDPTLRRRIEPWEFDVFYDPRELRKEACLLYEIKWGMSRKIWRSSGKNTTNHVEVNFIKKFTSERDFHPSMSCSITWFLSWSPCWECSQAIREFLSRHPGVTLVIYVARLFWHMDQQNRQGLRDLVNSGVTIQIMRASEYYHCWRNFVNYPPGDEAHWPQYPPLWMMLYALELHCIILSLPPCLKISRRWQNHLTFFRLHLQNCHYQTIPPHILLATGLIHPSVAWR

SEQ ID NO: 5678 - protein, 36 aa, Homo sapiens
  Payload ID: 1248;
  Gene Symbol: APOBEC1;
  Gene Name: apolipoprt B mRNA editing enzyme, catalytic polypeptide 1;
  ENSP ID: ENSP00000436415
MTSEKGEESNPGSLTSSMTPENFVKRPVCSTKSSGA

SEQ ID NO: 5679 - protein, 224 aa, Homo sapiens
  Payload ID: 1249;
  Gene Symbol: APOBEC2;
  Gene Name: apolipoprt B mRNA editing enzyme, catalytic polypeptide-like 2;
  Uniprot ID:  Q9Y235;
  ENSP ID: ENSP00000244669
MAQKEEAAVATEAASQNGEDLENLDDPEKLKELIELPPFEIVTGERLPANFFKFQFRNVEYSSGRNKTFLCYVVEAQGKGGQVQASRGYLEDEHAAAHAEEAFFNTILPAFDPALRYNVTWYVSSSPCAACADRIIKTLSKTKNLRLLILVGRLFMWEEPEIQAALKKLKEAGCKLRIMKPQDFEYVWQNFVEQEEGESKAFQPWEDIQENFLYYEEKLADILK

SEQ ID NO: 5680 - protein, 199 aa, Homo sapiens
  Payload ID: 1250;
  Gene Symbol: APOBEC3A;
  Gene Name: apolipoprt B mRNA editing enzyme, catalytic polypeptide-like 3A;
  Uniprot ID:  P31941;
  ENSP ID: ENSP00000249116
MEASPASGPRHLMDPHIFTSNFNNGIGRHKTYLCYEVERLDNGTSVKMDQHRGFLHNQAKNLLCGFYGRHAELRFLDLVPSLQLDPAQIYRVTWFISWSPCFSWGCAGEVRAFLQENTHVRLRIFAARIYDYDPLYKEALQMLRDAGAQVSIMTYDEFKHCWDTFVDHQGCPFQPWDGLDEHSQALSGRLRAILQNQGN

SEQ ID NO: 5681 - protein, 199 aa, Homo sapiens; identical to SEQ ID NO: 5680
  Payload ID: 1250;
  Gene Symbol: APOBEC3A;
  Gene Name: apolipoprt B mRNA editing enzyme, catalytic polypeptide-like 3A;
  Uniprot ID:  P31941;
  ENSP ID: ENSP00000384359

SEQ ID NO: 5682 - protein, 199 aa, Homo sapiens; identical to SEQ ID NO: 5680
  Payload ID: 1250;
  Gene Symbol: APOBEC3A;
  Gene Name: apolipoprt B mRNA editing enzyme, catalytic polypeptide-like 3A;
  Uniprot ID:  P31941;
  ENSP ID: ENSP00000461288

SEQ ID NO: 5683 - protein, 199 aa, Homo sapiens; identical to SEQ ID NO: 5680
  Payload ID: 1250;
  Gene Symbol: APOBEC3A;
  Gene Name: apolipoprt B mRNA editing enzyme, catalytic polypeptide-like 3A;
  Uniprot ID:  P31941;
  ENSP ID: ENSP00000481904

SEQ ID NO: 5684 - protein, 199 aa, Homo sapiens; identical to SEQ ID NO: 5680
  Payload ID: 1250;
  Gene Symbol: APOBEC3A;
  Gene Name: apolipoprt B mRNA editing enzyme, catalytic polypeptide-like 3A;
  Uniprot ID:  P31941;
  ENSP ID: ENSP00000485234

SEQ ID NO: 5685 - protein, 382 aa, Homo sapiens
  Payload ID: 1251;
  Gene Symbol: APOBEC3B;
  Gene Name: apolipoprt B mRNA editing enzyme, catalytic polypeptide-like 3B;
  Uniprot ID:  Q9UH17;
  ENSP ID: ENSP00000327459
MNPQIRNPMERMYRDTFYDNFENEPILYGRSYTWLCYEVKIKRGRSNLLWDTGVFRGQVYFKPQYHAEMCFLSWFCGNQLPAYKCFQITWFVSWTPCPDCVAKLAEFLSEHPNVTLTISAARLYYYWERDYRRALCRLSQAGARVTIMDYEEFAYCWENFVYNEGQQFMPWYKFDENYAFLHRTLKEILRYLMDPDTFTFNFNNDPLVLRRRQTYLCYEVERLDNGTWVLMDQHMGFLCNEAKNLLCGFYGRHAELRFLDLVPSLQLDPAQIYRVTWFISWSPCFSWGCAGEVRAFLQENTHVRLRIFAARIYDYDPLYKEALQMLRDAGAQVSIMTYDEFEYCWDTFVYRQGCPFQPWDGLEEHSQALSGRLRAILQNQGN

SEQ ID NO: 5686 - protein, 251 aa, Homo sapiens
  Payload ID: 1251;
  Gene Symbol: APOBEC3B;
  Gene Name: apolipoprt B mRNA editing enzyme, catalytic polypeptide-like 3B;
  Uniprot ID:  Q9UH17;
  ENSP ID: ENSP00000338897
MNPQIRNPMERMYRDTFYDNFENEPILYGRSYTWLCYEVKIKRGRSNLLWDTGVFRGQVYFKPQYHAEMCFLSWFCGNQLPAYKCFQITWFVSWTPCPDCVAKLAEFLSEHPNVTLTISAARLYYYWERDYRRALCRLSQAGARVTIMDYEEFAYCWENFVYNEGQQFMPWYKFDENYAFLHRTLKEILRLRIFSVAFTAAMRSCASWTWFLLCSWTRPRSTGSLGSSPGAPASPGAVPGKCVRSFRRTHT

SEQ ID NO: 5687 - protein, 490 aa, Homo sapiens
  Payload ID: 1251;
  Gene Symbol: APOBEC3B;
  Gene Name: apolipoprt B mRNA editing enzyme, catalytic polypeptide-like 3B;
  ENSP ID: ENSP00000385060
MNPQIRNPMERMYRDTFYDNFENEPILYGRSYTWLCYEVKIKRGRSNLLWDTGVFRGQVYFKPQYHAEMCFLSWFCGNQLPAYKCFQITWFVSWTPCPDCVAKLAEFLSEHPNVTLTISAARLYYYWERDYRRALCRLSQAGARVTIMDYEEFAYCWENFVYNEGQQFMPWYKFDENYAFLHRTLKEILRYLMDPDTFTFNFNNDPLVLRRRQTYLCYEVERLDNGTWVLMDQHMGFLCNEAKNLLCGFYGRHAELRFLDLVPSLQLDPAQIYRVTWFISWSPCFSWGCAGEVRAFLQENTHVRLRIFAARIYDYDPLYKEALQMLRDAGAQVSIMTYDEFEYCWDTFVYRQGCPFQPWDGLEEHSQALSGRLRAILQVRASSLCLVPHRPPPPPRSPVPCLPLCSEPPLGSLLPTGRPAPSLPFLLTASFSFPPPASLPPLPSLSLSPGHLPVPSFHSLTSCSIQPPCSSRIRETEGWASVSKEGRDLG

SEQ ID NO: 5688 - protein, 357 aa, Homo sapiens
  Payload ID: 1251;
  Gene Symbol: APOBEC3B;
  Gene Name: apolipoprt B mRNA editing enzyme, catalytic polypeptide-like 3B;
  Uniprot ID:  Q9UH17;
  ENSP ID: ENSP00000385068
MNPQIRNPMERMYRDTFYDNFENEPILYGRSYTWLCYEVKIKRGRSNLLWDTGVFRGQVYFKPQYHAEMCFLSWFCGNQLPAYKCFQITWFVSWTPCPDCVAKLAEFLSEHPNVTLTISAARLYYYWERDYRRALCRLSQAGARVTIMDYEEFAYCWENFVYNEGQQFMPWYKFDENYAFLHRTLKEILRYLMDPDTFTFNFNNDPLVLRRRQTYLCYEVERLDNGTWVLMDQHMGFLCNELDPAQIYRVTWFISWSPCFSWGCAGEVRAFLQENTHVRLRIFAARIYDYDPLYKEALQMLRDAGAQVSIMTYDEFEYCWDTFVYRQGCPFQPWDGLEEHSQALSGRLRAILQNQGN

SEQ ID NO: 5689 - protein, 190 aa, Homo sapiens
  Payload ID: 1252;
  Gene Symbol: APOBEC3C;
  Gene Name: apolipoprt B mRNA editing enzyme, catalytic polypeptide-like 3C;
  Uniprot ID:  Q9NRW3;
  ENSP ID: ENSP00000355340
MNPQIRNPMKAMYPGTFYFQFKNLWEANDRNETWLCFTVEGIKRRSVVSWKTGVFRNQVDSETHCHAERCFLSWFCDDILSPNTKYQVTWYTSWSPCPDCAGEVAEFLARHSNVNLTIFTARLYYFQYPCYQEGLRSLSQEGVAVEIMDYEDFKYCWENFVYNDNEPFKPWKGLKTNFRLLKRRLRESLQ

SEQ ID NO: 5690 - protein, 61 aa, Homo sapiens
  Payload ID: 1252;
  Gene Symbol: APOBEC3C;
  Gene Name: apolipoprt B mRNA editing enzyme, catalytic polypeptide-like 3C;
  ENSP ID: ENSP00000390855
MNPQIRWILRPIVMQKGASSLGSATTYCLLTQSTRSPGTHLGALAQTVQGRWPSSWPGTAT

SEQ ID NO: 5691 - protein, 386 aa, Homo sapiens
  Payload ID: 1253;
  Gene Symbol: APOBEC3D;
  Gene Name: apolipoprt B mRNA editing enzyme, catalytic polypeptide-like 3D;
  Uniprot ID:  Q96AK3;
  ENSP ID: ENSP00000216099
MNPQIRNPMERMYRDTFYDNFENEPILYGRSYTWLCYEVKIKRGRSNLLWDTGVFRGPVLPKRQSNHRQEVYFRFENHAEMCFLSWFCGNRLPANRRFQITWFVSWNPCLPCVVKVTKFLAEHPNVTLTISAARLYYYRDRDWRWVLLRLHKAGARVKIMDYEDFAYCWENFVCNEGQPFMPWYKFDDNYASLHRTLKEILRNPMEAMYPHIFYFHFKNLLKACGRNESWLCFTMEVTKHHSAVFRKRGVFRNQVDPETHCHAERCFLSWFCDDILSPNTNYEVTWYTSWSPCPECAGEVAEFLARHSNVNLTIFTARLCYFWDTDYQEGLCSLSQEGASVKIMGYKDFVSCWKNFVYSDDEPFKPWKGLQTNFRLLKRRLREILQ

SEQ ID NO: 5692 - protein, 386 aa, Homo sapiens; identical to SEQ ID NO: 5691
  Payload ID: 1253;
  Gene Symbol: APOBEC3D;
  Gene Name: apolipoprt B mRNA editing enzyme, catalytic polypeptide-like 3D;
  Uniprot ID:  Q96AK3;
  ENSP ID: ENSP00000370980

SEQ ID NO: 5693 - protein, 202 aa, Homo sapiens
  Payload ID: 1253;
  Gene Symbol: APOBEC3D;
  Gene Name: apolipoprt B mRNA editing enzyme, catalytic polypeptide-like 3D;
  ENSP ID: ENSP00000388017
MNPQIRNPMERMYRDTFYDNFENEPILYGRSYTWLCYEVKIKRGRSNLLWDTGVFRGPVLPKRQSNHRQEVDPETHCHAERCFLSWFCDDILSPNTNYEVTWYTSWSPCPECAGEVAEFLARHSNVNLTIFTARLCYFWDTDYQEGLCSLSQEGASVKIMGYKDFVSCWKNFVYSDDEPFKPWKGLQTNFRLLKRRLREILQ

SEQ ID NO: 5694 - protein, 190 aa, Homo sapiens
  Payload ID: 1253;
  Gene Symbol: APOBEC3D;
  Gene Name: apolipoprt B mRNA editing enzyme, catalytic polypeptide-like 3D;
  ENSP ID: ENSP00000480718
MNPQIRNPMEAMYPHIFYFHFKNLLKACGRNESWLCFTMEVTKHHSAVFRKRGVFRNQVDPETHCHAERCFLSWFCDDILSPNTNYEVTWYTSWSPCPECAGEVAEFLARHSNVNLTIFTARLCYFWDTDYQEGLCSLSQEGASVKIMGYKDFVSCWKNFVYSDDEPFKPWKGLQTNFRLLKRRLREILQ

SEQ ID NO: 5695 - protein, 373 aa, Homo sapiens
  Payload ID: 1254;
  Gene Symbol: APOBEC3F;
  Gene Name: apolipoprt B mRNA editing enzyme, catalytic polypeptide-like 3F;
  Uniprot ID:  Q8IUX4;
  ENSP ID: ENSP00000309749
MKPHFRNTVERMYRDTFSYNFYNRPILSRRNTVWLCYEVKTKGPSRPRLDAKIFRGQVYSQPEHHAEMCFLSWFCGNQLPAYKCFQITWFVSWTPCPDCVAKLAEFLAEHPNVTLTISAARLYYYWERDYRRALCRLSQAGARVKIMDDEEFAYCWENFVYSEGQPFMPWYKFDDNYAFLHRTLKEILRNPMEAMYPHIFYFHFKNLRKAYGRNESWLCFTMEVVKHHSPVSWKRGVFRNQVDPETHCHAERCFLSWFCDDILSPNTNYEVTWYTSWSPCPECAGEVAEFLARHSNVNLTIFTARLYYFWDTDYQEGLRSLSQEGASVEIMGYKDFKYCWENFVYNDDEPFKPWKGLKYNFLFLDSKLQEILE

SEQ ID NO: 5696 - protein, 101 aa, Homo sapiens
  Payload ID: 1254;
  Gene Symbol: APOBEC3F;
  Gene Name: apolipoprt B mRNA editing enzyme, catalytic polypeptide-like 3F;
  Uniprot ID:  Q8IUX4;
  ENSP ID: ENSP00000370977
MKPHFRNTVERMYRDTFSYNFYNRPILSRRNTVWLCYEVKTKGPSRPRLDAKIFRGQVPRSFIRAPFQVLSSPFGQCAPPHGTAQVQWPPQLTAGREQGRP

SEQ ID NO: 5697 - protein, 384 aa, Homo sapiens
  Payload ID: 1255;
  Gene Symbol: APOBEC3G;
  Gene Name: apolipoprt B mRNA editing enzyme, catalytic polypeptide-like 3G;
  Uniprot ID:  Q9HC16;
  ENSP ID: ENSP00000385057
MKPHFRNTVERMYRDTFSYNFYNRPILSRRNTVWLCYEVKTKGPSRPPLDAKIFRGQVYSELKYHPEMRFFHWFSKWRKLHRDQEYEVTWYISWSPCTKCTRDMATFLAEDPKVTLTIFVARLYYFWDPDYQEALRSLCQKRDGPRATMKIMNYDEFQHCWSKFVYSQRELFEPWNNLPKYYILLHIMLGEILRHSMDPPTFTFNFNNEPWVRGRHETYLCYEVERMHNDTWVLLNQRRGFLCNQAPHKHGFLEGRHAELCFLDVIPFWKLDLDQDYRVTCFTSWSPCFSCAQEMAKFISKNKHVSLCIFTARIYDDQGRCQEGLRTLAEAGAKISIMTYSEFKHCWDTFVDHQGCPFQPWDGLDEHSQDLSGRLRAILQNQEN

SEQ ID NO: 5698 - protein, 384 aa, Homo sapiens; identical to SEQ ID NO: 5697
  Payload ID: 1255;
  Gene Symbol: APOBEC3G;
  Gene Name: apolipoprt B mRNA editing enzyme, catalytic polypeptide-like 3G;
  Uniprot ID:  Q9HC16;
  ENSP ID: ENSP00000413376

SEQ ID NO: 5699 - protein, 182 aa, Homo sapiens
  Payload ID: 1256;
  Gene Symbol: APOBEC3H;
  Gene Name: apolipoprt B mRNA editing enzyme, catalytic polypeptide-like 3H;
  Uniprot ID:  Q6NTF7;
  ENSP ID: ENSP00000216123
MALLTAETFRLQFNNKRRLRRPYYPRKALLCYQLTPQNGSTPTRGYFENKKKCHAEICFINEIKSMGLDETQCYQVTCYLTWSPCSSCAWELVDFIKAHDHLNLGIFASRLYYHWCKPQQKGLRLLCGSQVPVEVMGFPEFADCWENFVDHEKPLSFNPYKMLEELDKNSRAIKRRLERIKS

SEQ ID NO: 5700 - protein, 200 aa, Homo sapiens
  Payload ID: 1256;
  Gene Symbol: APOBEC3H;
  Gene Name: apolipoprt B mRNA editing enzyme, catalytic polypeptide-like 3H;
  Uniprot ID:  Q6NTF7;
  ENSP ID: ENSP00000385741
MALLTAETFRLQFNNKRRLRRPYYPRKALLCYQLTPQNGSTPTRGYFENKKKCHAEICFINEIKSMGLDETQCYQVTCYLTWSPCSSCAWELVDFIKAHDHLNLGIFASRLYYHWCKPQQKGLRLLCGSQVPVEVMGFPEFADCWENFVDHEKPLSFNPYKMLEELDKNSRAIKRRLERIKIPGVRAQGRYMDILCDAEV

SEQ ID NO: 5701 - protein, 154 aa, Homo sapiens
  Payload ID: 1256;
  Gene Symbol: APOBEC3H;
  Gene Name: apolipoprt B mRNA editing enzyme, catalytic polypeptide-like 3H;
  Uniprot ID:  Q6NTF7;
  ENSP ID: ENSP00000393520
MALLTAETFRLQFNNKRRLRRPYYPRKALLCYQLTPQNGSTPTRGYFENKKKCHAEICFINEIKSMGLDETQCYQVTCYLTWSPCSSCAWELVDFIKAHDHLNLGIFASRLYYHWCKPQQKGLRLLCGSQVPVEVMGFPDSRGTCAGSLHGYIV

SEQ ID NO: 5702 - protein, 183 aa, Homo sapiens
  Payload ID: 1256;
  Gene Symbol: APOBEC3H;
  Gene Name: apolipoprt B mRNA editing enzyme, catalytic polypeptide-like 3H;
  Uniprot ID:  Q6NTF7;
  ENSP ID: ENSP00000411754
MALLTAETFRLQFNNKRRLRRPYYPRKALLCYQLTPQNGSTPTRGYFENKKKCHAEICFINEIKSMGLDETQCYQVTCYLTWSPCSSCAWELVDFIKAHDHLNLGIFASRLYYHWCKPQQKGLRLLCGSQVPVEVMGFPEFADCWENFVDHEKPLSFNPYKMLEELDKNSRAIKRRLERIKQS

SEQ ID NO: 5703 - protein, 154 aa, Homo sapiens; identical to SEQ ID NO: 5701
  Payload ID: 1256;
  Gene Symbol: APOBEC3H;
  Gene Name: apolipoprt B mRNA editing enzyme, catalytic polypeptide-like 3H;
  ENSP ID: ENSP00000482682

SEQ ID NO: 5704 - protein, 200 aa, Homo sapiens; identical to SEQ ID NO: 5700
  Payload ID: 1256;
  Gene Symbol: APOBEC3H;
  Gene Name: apolipoprt B mRNA editing enzyme, catalytic polypeptide-like 3H;
  ENSP ID: ENSP00000483689

SEQ ID NO: 5705 - protein, 367 aa, Homo sapiens
  Payload ID: 1257;
  Gene Symbol: APOBEC4;
  Gene Name: apolipoprt B mRNA editing enzyme, catalytic polypeptide-like 4 (putative);
  Uniprot ID:  Q8WW27;
  ENSP ID: ENSP00000310622
MEPIYEEYLANHGTIVKPYYWLSFSLDCSNCPYHIRTGEEARVSLTEFCQIFGFPYGTTFPQTKHLTFYELKTSSGSLVQKGHASSCTGNYIHPESMLFEMNGYLDSAIYNNDSIRHIILYSNNSPCNEANHCCISKMYNFLITYPGITLSIYFSQLYHTEMDFPASAWNREALRSLASLWPRVVLSPISGGIWHSVLHSFISGVSGSHVFQPILTGRALADRHNAYEINAITGVKPYFTDVLLQTKRNPNTKAQEALESYPLNNAFPGQFFQMPSGQLQPNLPPDLRAPVVFVLVPLRDLPPMHMGQNPNKPRNIVRHLNMPQMSFQETKDLGRLPTGRSVEIVEITEQFASSKEADEKKKKKGKK

SEQ ID NO: 5706 - protein, 1088 aa, Homo sapiens
  Payload ID: 1258;
  Gene Symbol: APOBR;
  Gene Name: apolipoprt B receptor;
  Uniprot ID:  Q0VD83;
  ENSP ID: ENSP00000416094
MDFLRLYLPGLHQALRGALDSLGTFVSYLLGDAVPTVEREAQAAEELGVVAVGKTGKIVEEEAQEDLEGLRGSQNEGAGRLRGPGDDRRHEVGSSAVEQTWGWGDGSSHGSQAERQDSGAGETAKAARCQEPSAHLEARKKSKAGSGACQDRSGQAQERQESHEQEVNREERLRSWEQEEEEEEVRAREPGMARGAESEWTWHGETEGKAGAVGPKAAGDNREMEQGVREADAGETEEPGAEGAGKGEEVVVVEKACESTRAWGTWGPGAEPEDWGILGREEARTTPGREEARAILDGEEARTISGGEEAETASGGEEAETASGGEEAGTASGGEEAGIASGGEAGTASGGEEAGTASGGDEAWTTSGKEEADLLGVRQTEYGAVPGERLLEATGKVWVLEEEGDEEREAEVSPFPKQPQVLGTERTEEAAESQTAGREAVGGQEAGESFEGQVDLRGKEAEMRQDLGIRADRARMEELVQAEEAQEERGSSRDPVAELPSDGEAEGTADLEATPEARPEEELTGEESEAAQTSCGLLGVEWGGLTHSVTKGQGPELMGGAQTPTKQPEEREAGEVELMGVLALSKEEQERSLEAGPRHAGSVKPEASEAFPGAWENRTRKDMERGNTQEDAADGEQREEEETAGGQTLAAEAEGDRESELSEVPEAGGEGLTTQDAGCGTEEGEASVSENQELDGSTGADAGPCPSLGEAYARETEDEEAEADRTSRRGWRLQAVAVGLPDREDAQTGSVAAGIMGGDVVPHISAAGAGEALEGVLGQGWDSKEKEEAAAGEHAGGQEFGLEGSAEEEVTGRGSQVEAFESREGGPWGGRVEAEESAGAEDSCGLDPAGSQTARAEGMGAMVEAGGLLEKWTLLEEEAVGWQEREQREDSEGRCGDYHPEGEAPRLLDAEGLMVTGGRRAEAKETEPESLEHVRGQEEQPTHQAPAEAAPESVGEAETAEAMGSARGGAANSWSEAPLPGSLLDVSVPRSRVHLSRSSSQRRSRPSFRRTPAWEQQEEPPAPNPPEEELSAPEQRPLQLEEPLEPSPLRHDGTPVPARRRPLGHGFGLAHPGMMQELQARLGRPKPQ

SEQ ID NO: 5707 - protein, 1097 aa, Homo sapiens
  Payload ID: 1258;
  Gene Symbol: APOBR;
  Gene Name: apolipoprt B receptor;
  Uniprot ID:  Q0VD83;
  ENSP ID: ENSP00000457539
MDFLRLYLPGLHQALRGALDSLGTFVSYLLGDAVPTVEREAQAAEELGVVAVGKTGKIVEEEAQEDLEGLRGSQNEGAGRLRGPGDDRRHEVGSSAVEQTWGWGDGSSHGSQAERQDSGAGETAKAARCQEPSAHLEARKKSKAGSGACQDRSGQAQERQESHEQEVNREERLRSWEQEEEEEEVRAREPGMARGAESEWTWHGETEGKAGAVGPKAAGDNREMEQGVREADAGETEEPGAEGAGKGEEVVVVEKACESTRAWGTWGPGAEPEDWGILGREEARTTPGREEARAILDGEEARTISGGEEAETASGGEEAETASGGEEAGTASGGEEAGIASGGEAGTASGGEEAGTASGGEEAGTASGGDEAWTTSGKEEADLLGVRQTEYGAVPGERLLEATGKVWVLEEEGDEEREAEVSPFPKQPQVLGTERTEEAAESQTAGREAVGGQEAGESFEGQVDLRGKEAEMRQDLGIRADRARMEELVQAEEAQEERGSSRDPVAELPSDGEAEGTADLEATPEARPEEELTGEESEAAQTSCGLLGVEWGGLTHSVTKGQGPELMGGAQTPTKQPEEREAGEVELMGVLALSKEEQERSLEAGPRHAGSVKPEASEAFPGAWENRTRKDMERGNTQEDAADGEQREEEETAGGQTLAAEAEGDRESELSEVPEAGGEGLTTQDAGCGTEEGEASVSENQELDGSTGADAGPCPSLGEAYARETEDEEAEADRTSRRGWRLQAVAVGLPDREDAQTGSVAAGIMGGDVVPHISAAGAGEALEGVLGQGWDSKEKEEAAAGEHAGGQEFGLEGSAEEEVTGRGSQVEAFESREGGPWGGRVEAEESAGAEDSCGLDPAGSQTARAEGMGAMVEAGGLLEKWTLLEEEAVGWQEREQREDSEGRCGDYHPEGEAPRLLDAEGLMVTGGRRAEAKETEPESLEHVRGQEEQPTHQAPAEAAPESVGEAETAEAMGSARGGAANSWSEAPLPGSLLDVSVPRSRVHLSRSSSQRRSRPSFRRTPAWEQQEEPPAPNPPEEELSAPEQRPLQLEEPLEPSPLRHDGTPVPARRRPLGHGFGLAHPGMMQELQARLGRPKPQ

SEQ ID NO: 5708 - protein, 83 aa, Homo sapiens
  Payload ID: 1259;
  Gene Symbol: APOC1;
  Gene Name: apolipoprt C-I;
  ENSP ID: ENSP00000465190
MRLFLSLPVLVVVLSIVLEGPAPAQGTPDVSSALDKLKEFGNTLEDKARELISRIKQSELSAKMREDDISPCCPGWSRTPDLK

SEQ ID NO: 5709 - protein, 83 aa, Homo sapiens
  Payload ID: 1259;
  Gene Symbol: APOC1;
  Gene Name: apolipoprt C-I;
  Uniprot ID:  P02654;
  ENSP ID: ENSP00000465356
MRLFLSLPVLVVVLSIVLEGPAPAQGTPDVSSALDKLKEFGNTLEDKARELISRIKQSELSAKMREWFSETFQKVKEKLKIDS

SEQ ID NO: 5710 - protein, 53 aa, Homo sapiens
  Payload ID: 1259;
  Gene Symbol: APOC1;
  Gene Name: apolipoprt C-I;
  ENSP ID: ENSP00000465710
MRLFLSLPVLVVVLSIVLEGPAPAQGTPDVSSALDKLKEFGNTLEDKARELIS

SEQ ID NO: 5711 - protein, 92 aa, Homo sapiens
  Payload ID: 1259;
  Gene Symbol: APOC1;
  Gene Name: apolipoprt C-I;
  ENSP ID: ENSP00000466146
MRLFLSLPVLVVVLSIVLEGPAPAQGTPDVSSALDKLKEFGNTLEDKARELISRIKQSELSAKMRLEPFPGHGRAGGVVFRDISESEGETQD

SEQ ID NO: 5712 - protein, 39 aa, Homo sapiens
  Payload ID: 1259;
  Gene Symbol: APOC1;
  Gene Name: apolipoprt C-I;
  ENSP ID: ENSP00000466227
MRLFLSLPVLVVVLSIVLEGSPRLSPAGAKSAQESTSNR

SEQ ID NO: 5713 - protein, 129 aa, Homo sapiens
  Payload ID: 1259;
  Gene Symbol: APOC1;
  Gene Name: apolipoprt C-I;
  ENSP ID: ENSP00000467368
MRLFLSLPVLVVVLSIVLEGPAPAQGTPDVSSALDKLKEFGNTLEDKARELISRIKQSELSAKMRLEPFPGHGRAGVCFWVEPWQMVQDEQIEKKTSPGEADNIPLVTQLDLKGVVFRDISESEGETQD

SEQ ID NO: 5714 - protein, 29 aa, Homo sapiens
  Payload ID: 1259;
  Gene Symbol: APOC1;
  Gene Name: apolipoprt C-I;
  ENSP ID: ENSP00000467504
MRLFLSLPVLVVVLSIVLEGSGFQRHFRK

SEQ ID NO: 5715 - protein, 83 aa, Homo sapiens; identical to SEQ ID NO: 5709
  Payload ID: 1259;
  Gene Symbol: APOC1;
  Gene Name: apolipoprt C-I;
  Uniprot ID:  P02654;
  ENSP ID: ENSP00000468029

SEQ ID NO: 5716 - protein, 77 aa, Homo sapiens
  Payload ID: 1259;
  Gene Symbol: APOC1;
  Gene Name: apolipoprt C-I;
  ENSP ID: ENSP00000468276
MRLFLSLPVLVVVLSIVLEGPAPAQGTPDVSSALDKLKEFGNTLEDKARELISRIKQSELSAKMREWFSETFQKVKE

SEQ ID NO: 5717 - protein, 72 aa, Homo sapiens
  Payload ID: 1260;
  Gene Symbol: APOC2;
  Gene Name: apolipoprt C-II;
  ENSP ID: ENSP00000465001
MGTRLLPALFLVLLVLGFEVQGTQQPQQDEMPSPTFLTQVKESLSSYWESAKTAAQNLYEKTYLPAVDEKLR

SEQ ID NO: 5718 - protein, 101 aa, Homo sapiens; identical to SEQ ID NO: 5650
  Payload ID: 1260;
  Gene Symbol: APOC2;
  Gene Name: apolipoprt C-II;
  Uniprot ID:  P02655;
  ENSP ID: ENSP00000466775

SEQ ID NO: 5719 - protein, 87 aa, Homo sapiens
  Payload ID: 1260;
  Gene Symbol: APOC2;
  Gene Name: apolipoprt C-II;
  ENSP ID: ENSP00000476835
MGTRLLPALFLVLLVLGFEVQGTQQPQQDEMPSPTFLTQVKESLSSYWESAKTAAQNLDLYSKSTAAMSTYTGIFTDQVLSVLKGEE

SEQ ID NO: 5720 - protein, 47 aa, Homo sapiens
  Payload ID: 1260;
  Gene Symbol: APOC2;
  Gene Name: apolipoprt C-II;
  ENSP ID: ENSP00000477261
MGTRLLPALFLVLLVLGFGEGISLQLLGVSKDSRPEPVREDIPARCR

SEQ ID NO: 5721 - protein, 99 aa, Homo sapiens
  Payload ID: 1261;
  Gene Symbol: APOC3;
  Gene Name: apolipoprt C-III;
  Uniprot ID:  P02656;
  ENSP ID: ENSP00000227667
MQPRVLLVVALLALLASARASEAEDASLLSFMQGYMKHATKTAKDALSSVQESQVAQQARGWVTDGFSSLKDYWSTVKDKFSEFWDLDPEVRPTSAVAA

SEQ ID NO: 5722 - protein, 117 aa, Homo sapiens
  Payload ID: 1261;
  Gene Symbol: APOC3;
  Gene Name: apolipoprt C-III;
  ENSP ID: ENSP00000364494
MGTWGAPHRTLPCRNRGAMQPRVLLVVALLALLASARASEAEDASLLSFMQGYMKHATKTAKDALSSVQESQVAQQARGWVTDGFSSLKDYWSTVKDKFSEFWDLDPEVRPTSAVAA

SEQ ID NO: 5723 - protein, 55 aa, Homo sapiens
  Payload ID: 1261;
  Gene Symbol: APOC3;
  Gene Name: apolipoprt C-III;
  ENSP ID: ENSP00000410614
MQPRVLLVVALLALLASARASEAEDASLLSFMQGYMKHATKTAKDALSSVQESQV

SEQ ID NO: 5724 - protein, 117 aa, Homo sapiens; identical to SEQ ID NO: 5722
  Payload ID: 1261;
  Gene Symbol: APOC3;
  Gene Name: apolipoprt C-III;
  ENSP ID: ENSP00000486182

SEQ ID NO: 5725 - protein, 73 aa, Homo sapiens
  Payload ID: 1262;
  Gene Symbol: APOC4;
  Gene Name: apolipoprt C-IV;
  ENSP ID: ENSP00000466444
MSLLRNRLQALPALCLCVLVLACIGACQPEAQEGTLSPPPKLKMSRWSLVRGRMKELLETVVNRTRDGWQWFW

SEQ ID NO: 5726 - protein, 127 aa, Homo sapiens; identical to SEQ ID NO: 5651
  Payload ID: 1262;
  Gene Symbol: APOC4;
  Gene Name: apolipoprt C-IV;
  Uniprot ID:  P55056;
  ENSP ID: ENSP00000468236

SEQ ID NO: 5727 - protein, 189 aa, Homo sapiens
  Payload ID: 1263;
  Gene Symbol: APOD;
  Gene Name: apolipoprt D;
  Uniprot ID:  P05090;
  ENSP ID: ENSP00000345179
MVMLLLLLSALAGLFGAAEGQAFHLGKCPNPPVQENFDVNKYLGRWYEIEKIPTTFENGRCIQANYSLMENGKIKVLNQELRADGTVNQIEGEATPVNLTEPAKLEVKFSWFMPSAPYWILATDYENYALVYSCTCIIQLFHVDFAWILARNPNLPPETVDSLKNILTSNNIDVKKMTVTDQVNCPKLS

SEQ ID NO: 5728 - protein, 108 aa, Homo sapiens
  Payload ID: 1263;
  Gene Symbol: APOD;
  Gene Name: apolipoprt D;
  ENSP ID: ENSP00000391597
MVMLLLLLSALAGLFGAAEGQAFHLGKCPNPPVQENFDVNKTESHFVTQGGVQHHHLGSLQPPPPGFKQFSCLSLPSSWDYSISEDGTKLRRSQQPLRMDAASRPTTH

SEQ ID NO: 5729 - protein, 149 aa, Homo sapiens
  Payload ID: 1263;
  Gene Symbol: APOD;
  Gene Name: apolipoprt D;
  ENSP ID: ENSP00000393076
MVMLLLLLSALAGLFGAAEGQAFHLGKCPNPPVQENFDVNKYLGRWYEIEKIPTTFENGRCIQANYSLMENGKIKVLNQELRADGTVNQIEGEATPVNLTEPAKLEVKFSWFMPSAPYWILATDYENYALVYSCTCIIQLFHVDFAWIL

SEQ ID NO: 5730 - protein, 215 aa, Homo sapiens
  Payload ID: 1263;
  Gene Symbol: APOD;
  Gene Name: apolipoprt D;
  ENSP ID: ENSP00000415235
MFKQLSCISLPSSCDYSSRSLLQPPSPKMVMLLLLLSALAGLFGAAEGQAFHLGKCPNPPVQENFDVNKYLGRWYEIEKIPTTFENGRCIQANYSLMENGKIKVLNQELRADGTVNQIEGEATPVNLTEPAKLEVKFSWFMPSAPYWILATDYENYALVYSCTCIIQLFHVDFAWILARNPNLPPETVDSLKNILTSNNIDVKKMTVTDQVNCPK

SEQ ID NO: 5731 - protein, 317 aa, Homo sapiens [sequence omitted]

SEQ ID NO: 5732 - protein, 219 aa, Homo sapiens
  Payload ID: 1264;
  Gene Symbol: APOE;
  Gene Name: apolipoprt E;
  ENSP ID: ENSP00000410423
MKVLWAALLVTFLAGCQAKVEQAVETEPEPELRQQTEWQSGQRWELALGRFWDYLRWVQTLSEQVQEELLSSQVTQELRALMDETMKELKAYKSELEEQLTPVAEETRARLSKELQAAQARLGADMEDVCGRLVQYRGEVQAMLGQSTEELRVRLASHLRKLRKRLLRDADDLQKRLAVYQAGAREGAERGLSAIRERLGPLVEQGRVRAATVGSLAGQ

SEQ ID NO: 5733 - protein, 216 aa, Homo sapiens
  Payload ID: 1264;
  Gene Symbol: APOE;
  Gene Name: apolipoprt E;
  ENSP ID: ENSP00000413135
MKVLWAALLVTFLAGCQAKVEQAVETEPEPELRQQTEWQSGQRWELALGRFWDYLRWVQTLSEQVQEELLSSQVTQELRALMDETMKELKAYKSELEEQLTPVAEETRARLSKELQAAQARLGADMEDVCGRLVQYRGEVQAMLGQSTEELRVRLASHLRKLRKRLLRDADDLQKRLAVYQAGAREGAERGLSAIRERLGPLVEQGRVRAATVGSL

SEQ ID NO: 5734 - protein, 269 aa, Homo sapiens
  Payload ID: 1264;
  Gene Symbol: APOE;
  Gene Name: apolipoprt E;
  ENSP ID: ENSP00000413653
MSSGASRKSWDPGNPWPPDWPITGRKMKVLWAALLVTFLAGCQAKVEQAVETEPEPELRQQTEWQSGQRWELALGRFWDYLRWVQTLSEQVQEELLSSQVTQELRALMDETMKELKAYKSELEEQLTPVAEETRARLSKELQAAQARLGADMEDVCGRLVQYRGEVQAMLGQSTEELRVRLASHLRKLRKRLLRDADDLQKRLAVYQAGAREGAERGLSAIRERLGPLVEQGRVRAATVGSLAGQPLQERAQAWGERLRARMEEMGSRT

SEQ ID NO: 5735 - protein, 326 aa, Homo sapiens
  Payload ID: 1265;
  Gene Symbol: APOF;
  Gene Name: apolipoprt F;
  Uniprot ID:  Q13790;
  ENSP ID: ENSP00000381250
MTGLCGYSAPDMRGLRLIMIPVELLLCYLLLHPVDATSYGKQTNVLMHFPLSLESQTPSSDPLSCQFLHPKSLPGFSHMAPLPKFLVSLALRNALEEAGCQADVWALQLQLYRQGGVNATQVLIQHLRGLQKGRSTERNVSVEALASALQLLAREQQSTGRVGRSLPTEDCENEKEQAVHNVVQLLPGVGTFYNLGTALYYATQNCLGKARERGRDGAIDLGYDLLMTMAGMSGGPMGLAISAALKPALRSGVQQLIQYYQDQKDANISQPETTKEGLRAISDVSDLEETTTLASFISEVVSSAPYWGWAIIKSYDLDPGAGSLEI

SEQ ID NO: 5736 - protein, 345 aa, Homo sapiens
  Payload ID: 1266;
  Gene Symbol: APOH;
  Gene Name: apolipoprt H (beta-2-glycoprt I);
  Uniprot ID:  P02749;
  ENSP ID: ENSP00000205948
MISPVLILFSSFLCHVAIAGRTCPKPDDLPFSTVVPLKTFYEPGEEITYSCKPGYVSRGGMRKFICPLTGLWPINTLKCTPRVCPFAGILENGAVRYTTFEYPNTISFSCNTGFYLNGADSAKCTEEGKWSPELPVCAPIICPPPSIPTFATLRVYKPSAGNNSLYRDTAVFECLPQHAMFGNDTITCTTHGNWTKLPECREVKCPFPSRPDNGFVNYPAKPTLYYKDKATFGCHDGYSLDGPEEIECTKLGNWSAMPSCKASCKVPVKKATVVYQGERVKIQEKFKNGMLHGDKVSFFCKNKEKKCSYTEDAQCIDGTIEVPKCFKEHSSLAFWKTDASDVKPC

SEQ ID NO: 5737 - protein, 104 aa, Homo sapiens
  Payload ID: 1266;
  Gene Symbol: APOH;
  Gene Name: apolipoprt H (beta-2-glycoprt I);
  ENSP ID: ENSP00000462260
  MOD_RES (1)..(1): Any amino acid
XQHAMFGNDTITCTTHGNWTKLPECREVKCPFPSRPDNGFVNYPAKPTLYYKDKATFGCHDGYSLDGPEEIECTKLGNWSAMPSCKEHSSLAFWKTDASDVKPC

SEQ ID NO: 5738 - protein, 200 aa, Homo sapiens
  Payload ID: 1266;
  Gene Symbol: APOH;
  Gene Name: apolipoprt H (beta-2-glycoprt I);
  ENSP ID: ENSP00000463553
MRKFICPLTGLWPINTLKCTPRVCPFAGILENGAVRYTTFEYPNTISFSCNTGFYLNGADSAKCTEEGKWSPELPVCAPIICPPPSIPTFATLRVYKPSAGNNSLYRDTAVFECLPQHAMFGNDTITCTTHGNWTKLPECREVKCPFPSRPDNGFVNYPAKPTLYYKDKATFGCHDGYSLDGPEEIECTKLGNWSAMPSC

SEQ ID NO: 5739 - protein, 181 aa, Homo sapiens
  Payload ID: 1266;
  Gene Symbol: APOH;
  Gene Name: apolipoprt H (beta-2-glycoprt I);
  ENSP ID: ENSP00000464301
MISPVLILFSSFLCHVAIAGRTCPKPDDLPFSTVVPLKTFYEPGEEITYSCKPGYVSRGGMRKFICPLTGLWPINTLKCTPRVCPFAGILENGAVRYTTFEYPNTISFSCNTGFYLNGADSAKCTEEGKWSPELPVCAPIICPPPSIPTFATLRVYKPSAGNNSLYRDTAVFECLPQHAMF

SEQ ID NO: 5740 - protein, 279 aa, Homo sapiens
  Payload ID: 1267;
  Gene Symbol: APOLD1;
  Gene Name: apolipoprt L domain containing 1;
  Uniprot ID:  Q96LR9;
  ENSP ID: ENSP00000324277
MFRAPCHRLRARGTRKARAGAWRGCTFPCLGKGMERPAAREPHGPDALRRFQGLLLDRRGRLHGQVLRLREVARRLERLRRRSLVANVAGSSLSATGALAAIVGLSLSPVTLGTSLLVSAVGLGVATAGGAVTITSDLSLIFCNSRELRRVQEIAATCQDQMREILSCLEFFCRWQGCGDRQLLQCGRNASIALYNSVYFIVFFGSRGFLIPRRAEGDTKVSQAVLKAKIQKLAESLESCTGALDELSEQLESRVQLCTKSSRGHDLKISADQRAGLFF

SEQ ID NO: 5741 - protein, 248 aa, Homo sapiens
  Payload ID: 1267;
  Gene Symbol: APOLD1;
  Gene Name: apolipoprt L domain containing 1;
  Uniprot ID:  Q96LR9;
  ENSP ID: ENSP00000348998
MGMERPAAREPHGPDALRRFQGLLLDRRGRLHGQVLRLREVARRLERLRRRSLVANVAGSSLSATGALAAIVGLSLSPVTLGTSLLVSAVGLGVATAGGAVTITSDLSLIFCNSRELRRVQEIAATCQDQMREILSCLEFFCRWQGCGDRQLLQCGRNASIALYNSVYFIVFFGSRGFLIPRRAEGDTKVSQAVLKAKIQKLAESLESCTGALDELSEQLESRVQLCTKSSRGHDLKISADQRAGLFF

SEQ ID NO: 5742 - protein, 40 aa, Homo sapiens
  Payload ID: 1267;
  Gene Symbol: APOLD1;
  Gene Name: apolipoprt L domain containing 1;
  ENSP ID: ENSP00000454511
MFRAPCHRLRARGTRKARAGAWRGCTFPCLGKSVFAGGIC

SEQ ID NO: 5743 - protein, 40 aa, Homo sapiens; identical to SEQ ID NO: 5742
  Payload ID: 1267;
  Gene Symbol: APOLD1;
  Gene Name: apolipoprt L domain containing 1;
  ENSP ID: ENSP00000456719

SEQ ID NO: 5744 - protein, 414 aa, Homo sapiens
  Payload ID: 1268;
  Gene Symbol: APOL1;
  Gene Name: apolipoprt L, 1;
  Uniprot ID:  O14791;
  ENSP ID: ENSP00000317674
MRFKSHTVELRRPCSDMEGAALLRVSVLCIWMSALFLGVGVRAEEAGARVQQNVPSGTDTGDPQSKPLGDWAAGTMDPESSIFIEDAIKYFKEKVSTQNLLLLLTDNEAWNGFVAAAELPRNEADELRKALDNLARQMIMKDKNWHDKGQQYRNWFLKEFPRLKSELEDNIRRLRALADGVQKVHKGTTIANVVSGSLSISSGILTLVGMGLAPFTEGGSLVLLEPGMELGITAALTGITSSTMDYGKKWWTQAQAHDLVIKSLDKLKEVREFLGENISNFLSLAGNTYQLTRGIGKDIRALRRARANLQSVPHASASRPRVTEPISAESGEQVERVNEPSILEMSRGVKLTDVAPVSFFLVLDVVYLVYESKHLHEGAKSETAEELKKVAQELEEKLNILNNNYKILQADQEL

SEQ ID NO: 5745 - protein, 398 aa, Homo sapiens
  Payload ID: 1268;
  Gene Symbol: APOL1;
  Gene Name: apolipoprt L, 1;
  Uniprot ID:  O14791;
  ENSP ID: ENSP00000380448
MEGAALLRVSVLCIWMSALFLGVGVRAEEAGARVQQNVPSGTDTGDPQSKPLGDWAAGTMDPESSIFIEDAIKYFKEKVSTQNLLLLLTDNEAWNGFVAAAELPRNEADELRKALDNLARQMIMKDKNWHDKGQQYRNWFLKEFPRLKSELEDNIRRLRALADGVQKVHKGTTIANVVSGSLSISSGILTLVGMGLAPFTEGGSLVLLEPGMELGITAALTGITSSTMDYGKKWWTQAQAHDLVIKSLDKLKEVREFLGENISNFLSLAGNTYQLTRGIGKDIRALRRARANLQSVPHASASRPRVTEPISAESGEQVERVNEPSILEMSRGVKLTDVAPVSFFLVLDVVYLVYESKHLHEGAKSETAEELKKVAQELEEKLNILNNNYKILQADQEL

SEQ ID NO: 5746 - protein, 398 aa, Homo sapiens; identical to SEQ ID NO: 5745
  Payload ID: 1268;
  Gene Symbol: APOL1;
  Gene Name: apolipoprt L, 1;
  Uniprot ID:  O14791;
  ENSP ID: ENSP00000380449

SEQ ID NO: 5747 - protein, 380 aa, Homo sapiens
  Payload ID: 1268;
  Gene Symbol: APOL1;
  Gene Name: apolipoprt L, 1;
  Uniprot ID:  O14791;
  ENSP ID: ENSP00000388477
MEGAALLRVSVLCIWVQQNVPSGTDTGDPQSKPLGDWAAGTMDPESSIFIEDAIKYFKEKVSTQNLLLLLTDNEAWNGFVAAAELPRNEADELRKALDNLARQMIMKDKNWHDKGQQYRNWFLKEFPRLKSELEDNIRRLRALADGVQKVHKGTTIANVVSGSLSISSGILTLVGMGLAPFTEGGSLVLLEPGMELGITAALTGITSSTMDYGKKWWTQAQAHDLVIKSLDKLKEVREFLGENISNFLSLAGNTYQLTRGIGKDIRALRRARANLQSVPHASASRPRVTEPISAESGEQVERVNEPSILEMSRGVKLTDVAPVSFFLVLDVVYLVYESKHLHEGAKSETAEELKKVAQELEEKLNILNNNYKILQADQEL

SEQ ID NO: 5748 - protein, 141 aa, Homo sapiens
  Payload ID: 1268;
  Gene Symbol: APOL1;
  Gene Name: apolipoprt L, 1;
  ENSP ID: ENSP00000391206
MEGAALLRVSVLCIWMSALFLGVGVRAEEAGARVQQNVPSGTDTGDPQSKPLGDWAAGTMDPGPAGSRGDSGEPCTLRPACRGQRQHGGASRISAEGPAPMPRRRTPSTAHLRVPKTSRRNLLCMRAVSLLRMPLSISRKK

SEQ ID NO: 5749 - protein, 159 aa, Homo sapiens
  Payload ID: 1268;
  Gene Symbol: APOL1;
  Gene Name: apolipoprt L, 1;
  ENSP ID: ENSP00000391302
MEGAALLRVSVLCIWMSALFLGVGVRAEEAGARVQQNVPSGTDTGDPQSKPLGDWAAGTMDPESSIFIEDAIKYFKEKVSTQNLLLLLTDNEAWNGFVAAAELPRNEADELRKALDNLARQMIMKDKNWHDKGQQYRNWFLKEFPRLKSELEDNIRRLR

SEQ ID NO: 5750 - protein, 141 aa, Homo sapiens; identical to SEQ ID NO: 5748
  Payload ID: 1268;
  Gene Symbol: APOL1;
  Gene Name: apolipoprt L, 1;
  ENSP ID: ENSP00000392514

SEQ ID NO: 5751 - protein, 142 aa, Homo sapiens
  Payload ID: 1268;
  Gene Symbol: APOL1;
  Gene Name: apolipoprt L, 1;
  ENSP ID: ENSP00000392857
MEGAALLRVSVLCIWMSALFLGVGVRAEEAGARVQQNVPSGTDTGDPQSKPLGDWAAGTMDPGPAGSRGDSGEPCTLRPACRGQRQHGGASRISAEGPAPMPRRRTPSTAHLRVPKTSRRNLLCMVVVLNAVEFETLFLNFK

SEQ ID NO: 5752 - protein, 123 aa, Homo sapiens
  Payload ID: 1268;
  Gene Symbol: APOL1;
  Gene Name: apolipoprt L, 1;
  ENSP ID: ENSP00000397141
MEGAALLRVSVLCIWVQQNVPSGTDTGDPQSKPLGDWAAGTMDPGPAGSRGDSGEPCTLRPACRGQRQHGGASRISAEGPAPMPRRRTPSTAHLRVPKTSRRNLLCMRAVSLLRMPLSISRKK

SEQ ID NO: 5753 - protein, 118 aa, Homo sapiens
  Payload ID: 1268;
  Gene Symbol: APOL1;
  Gene Name: apolipoprt L, 1;
  ENSP ID: ENSP00000404525
MRFKSHTVELRSTLSQPLFSCSRRRPCSDMEGAALLRVSVLCIWMSALFLGVGVRAEEAGARVQQNVPSGTDTGDPQSKPLGDWAAGTMDPESSIFIEDAIKYFKEKVSTQNLLLLLT

SEQ ID NO: 5754 - protein, 398 aa, Homo sapiens; identical to SEQ ID NO: 5745
  Payload ID: 1268;
  Gene Symbol: APOL1;
  Gene Name: apolipoprt L, 1;
  Uniprot ID:  O14791;
  ENSP ID: ENSP00000411507

SEQ ID NO: 5755 - protein, 337 aa, Homo sapiens
  Payload ID: 1269;
  Gene Symbol: APOL2;
  Gene Name: apolipoprt L, 2;
  Uniprot ID:  Q9BQE5;
  ENSP ID: ENSP00000249066
MNPESSIFIEDYLKYFQDQVSRENLLQLLTDDEAWNGFVAAAELPRDEADELRKALNKLASHMVMKDKNRHDKDQQHRQWFLKEFPRLKRELEDHIRKLRALAEEVEQVHRGTTIANVVSNSVGTTSGILTLLGLGLAPFTEGISFVLLDTGMGLGAAAAVAGITCSVVELVNKLRARAQARNLDQSGTNVAKVMKEFVGGNTPNVLTLVDNWYQVTQGIGRNIRAIRRARANPQLGAYAPPPHVIGRISAEGGEQVERVVEGPAQAMSRGTMIVGAATGGILLLLDVVSLAYESKHLLEGAKSESAEELKKRAQELEGKLNFLTKIHEMLQPGQDQ

SEQ ID NO: 5756 - protein, 337 aa, Homo sapiens; identical to SEQ ID NO: 5755
  Payload ID: 1269;
  Gene Symbol: APOL2;
  Gene Name: apolipoprt L, 2;
  Uniprot ID:  Q9BQE5;
  ENSP ID: ENSP00000351292

SEQ ID NO: 5757 - protein, 74 aa, Homo sapiens
  Payload ID: 1269;
  Gene Symbol: APOL2;
  Gene Name: apolipoprt L, 2;
  ENSP ID: ENSP00000400486
MNPESSIFIEDYLKYFQDQVSRENLLQLLTDDEAWNGFVAAAELPRDEADELRKALNKLASHMVMKDKNRHDKD

SEQ ID NO: 5758 - protein, 449 aa, Homo sapiens
  Payload ID: 1269;
  Gene Symbol: APOL2;
  Gene Name: apolipoprt L, 2;
  ENSP ID: ENSP00000403153
MHSWTWDPHSSEQLDLAQSLSEEDPLSSLRGSIQPQPPAEAPDKGGSQANNDPGGWDPGCSSSQVLGRTRGPCLGVRVREEEAGTRVKENLPVWTVTGELQGKPLGNPAAGTMNPESSIFIEDYLKYFQDQVSRENLLQLLTDDEAWNGFVAAAELPRDEADELRKALNKLASHMVMKDKNRHDKDQQHRQWFLKEFPRLKRELEDHIRKLRALAEEVEQVHRGTTIANVVSNSVGTTSGILTLLGLGLAPFTEGISFVLLDTGMGLGAAAAVAGITCSVVELVNKLRARAQARNLDQSGTNVAKVMKEFVGGNTPNVLTLVDNWYQVTQGIGRNIRAIRRARANPQLGAYAPPPHVIGRISAEGGEQVERVVEGPAQAMSRGTMIVGAATGGILLLLDVVSLAYESKHLLEGAKSESAEELKKRAQELEGKLNFLTKIHEMLQPGQDQ

SEQ ID NO: 5759 - protein, 128 aa, Homo sapiens
  Payload ID: 1269;
  Gene Symbol: APOL2;
  Gene Name: apolipoprt L, 2;
  ENSP ID: ENSP00000431231
MNPESSIFIEDYLKYFQDQVSRENLLQLLTDDEAWNGFVAAAELPRDEADELRKALNKLASHMVMKDKNRHDKDQQHRQWFLKEFPRLKRELEDHIRKLRALAEEVEQVHRGTTIANVVSNSVGTTSG

SEQ ID NO: 5760 - protein, 402 aa, Homo sapiens
  Payload ID: 1270;
  Gene Symbol: APOL3;
  Gene Name: apolipoprt L, 3;
  Uniprot ID:  O95236;
  ENSP ID: ENSP00000344577
MGLGQGWGWEASCFACLIRSCCQVVTFTFPFGFQGISQSLENVSGYYADARLEVGSTQLRTAGSCSHSFKRSFLEKKRFTEEATKYFRERVSPVHLQILLTNNEAWKRFVTAAELPRDEADALYEALKKLRTYAAIEDEYVQQKDEQFREWFLKEFPQVKRKIQESIEKLRALANGIEEVHRGCTISNVVSSSTGAASGIMSLAGLVLAPFTAGTSLALTAAGVGLGAASAVTGITTSIVEHSYTSSAEAEASRLTATSIDRLKVFKEVMRDITPNLLSLLNNYYEATQTIGSEIRAIRQARARARLPVTTWRISAGSGGQAERTIAGTTRAVSRGARILSATTSGIFLALDVVNLVYESKHLHEGAKSASAEELRRQAQELEENLMELTQIYQRLNPCHTH

SEQ ID NO: 5761 - protein, 202 aa, Homo sapiens
  Payload ID: 1270;
  Gene Symbol: APOL3;
  Gene Name: apolipoprt L, 3;
  Uniprot ID:  O95236;
  ENSP ID: ENSP00000355164
MSLAGLVLAPFTAGTSLALTAAGVGLGAASAVTGITTSIVEHSYTSSAEAEASRLTATSIDRLKVFKEVMRDITPNLLSLLNNYYEATQTIGSEIRAIRQARARARLPVTTWRISAGSGGQAERTIAGTTRAVSRGARILSATTSGIFLALDVVNLVYESKHLHEGAKSASAEELRRQAQELEENLMELTQIYQRLNPCHTH

SEQ ID NO: 5762 - protein, 202 aa, Homo sapiens; identical to SEQ ID NO: 5761
  Payload ID: 1270;
  Gene Symbol: APOL3;
  Gene Name: apolipoprt L, 3;
  Uniprot ID:  O95236;
  ENSP ID: ENSP00000380456

SEQ ID NO: 5763 - protein, 97 aa, Homo sapiens
  Payload ID: 1270;
  Gene Symbol: APOL3;
  Gene Name: apolipoprt L, 3;
  ENSP ID: ENSP00000380457
MGLGQGWGWEASCFACLIRSCCQVVTFTFPFGFQGISQSLENVSGYYADARLEVGSTQLRTAGSCSHSFKRSFLGLRKKTNPSSQVSDWRAPWKVSQ

SEQ ID NO: 5764 - protein, 202 aa, Homo sapiens; identical to SEQ ID NO: 5761
  Payload ID: 1270;
  Gene Symbol: APOL3;
  Gene Name: apolipoprt L, 3;
  Uniprot ID:  O95236;
  ENSP ID: ENSP00000380461

SEQ ID NO: 5765 - protein, 52 aa, Homo sapiens
  Payload ID: 1270;
  Gene Symbol: APOL3;
  Gene Name: apolipoprt L, 3;
  ENSP ID: ENSP00000391174
  MOD_RES (1)..(1): Any amino acid
XYADARLEVGSTQLRTAGSCSHSFKRSFLGLRKKTNPSSQVSDWRAPWKVSQ

SEQ ID NO: 5766 - protein, 82 aa, Homo sapiens
  Payload ID: 1270;
  Gene Symbol: APOL3;
  Gene Name: apolipoprt L, 3;
  ENSP ID: ENSP00000409345
MGLGQGWGWEASCFACLIRSCCQVVTFTFPFGFQGISQSLENVSGYYADARLEVGSTQLRTAGSCSHSFKRSFLGQKDPALV

SEQ ID NO: 5767 - protein, 331 aa, Homo sapiens
  Payload ID: 1270;
  Gene Symbol: APOL3;
  Gene Name: apolipoprt L, 3;
  Uniprot ID:  O95236;
  ENSP ID: ENSP00000415779
MDSEKKRFTEEATKYFRERVSPVHLQILLTNNEAWKRFVTAAELPRDEADALYEALKKLRTYAAIEDEYVQQKDEQFREWFLKEFPQVKRKIQESIEKLRALANGIEEVHRGCTISNVVSSSTGAASGIMSLAGLVLAPFTAGTSLALTAAGVGLGAASAVTGITTSIVEHSYTSSAEAEASRLTATSIDRLKVFKEVMRDITPNLLSLLNNYYEATQTIGSEIRAIRQARARARLPVTTWRISAGSGGQAERTIAGTTRAVSRGARILSATTSGIFLALDVVNLVYESKHLHEGAKSASAEELRRQAQELEENLMELTQIYQRLNPCHTH

SEQ ID NO: 5768 - protein, 82 aa, Homo sapiens; identical to SEQ ID NO: 5766
  Payload ID: 1270;
  Gene Symbol: APOL3;
  Gene Name: apolipoprt L, 3;
  ENSP ID: ENSP00000416732

SEQ ID NO: 5769 - protein, 40 aa, Homo sapiens
  Payload ID: 1270;
  Gene Symbol: APOL3;
  Gene Name: apolipoprt L, 3;
  ENSP ID: ENSP00000432271
SQSLENVSGYYADARLEVGSTQLRTAGSCSHSFKRSFLGE

SEQ ID NO: 5770 - protein, 86 aa, Homo sapiens
  Payload ID: 1270;
  Gene Symbol: APOL3;
  Gene Name: apolipoprt L, 3;
  ENSP ID: ENSP00000432868
  MOD_RES (1)..(1): Any amino acid
XYADARLEVGSTQLRTAGSCSHSFKRSFLAWWYVPVGTTTWEVEAEASLAARTYRQKQGGQRVSSTAPVNSPRQTLGHRVQDTDLE

SEQ ID NO: 5771 - protein, 33 aa, Homo sapiens
  Payload ID: 1270;
  Gene Symbol: APOL3;
  Gene Name: apolipoprt L, 3;
  ENSP ID: ENSP00000433618
  MOD_RES (1)..(1): Any amino acid
XYADARLEVGSTQLRTAGSCSHSFKRSFLEMSI

SEQ ID NO: 5772 - protein, 52 aa, Homo sapiens; identical to SEQ ID NO: 5765
  Payload ID: 1270;
  Gene Symbol: APOL3;
  Gene Name: apolipoprt L, 3;
  ENSP ID: ENSP00000434449
  MOD_RES (1)..(1): Any amino acid

SEQ ID NO: 5773 - protein, 37 aa, Homo sapiens
  Payload ID: 1270;
  Gene Symbol: APOL3;
  Gene Name: apolipoprt L, 3;
  ENSP ID: ENSP00000435958
  MOD_RES (1)..(1): Any amino acid
XYADARLEVGSTQLRTAGSCSHSFKRSFLGQKDPALV

SEQ ID NO: 5774 - protein, 39 aa, Homo sapiens
  Payload ID: 1270;
  Gene Symbol: APOL3;
  Gene Name: apolipoprt L, 3;
  ENSP ID: ENSP00000436331
  MOD_RES (1)..(1): Any amino acid
XYADARLEVGSTQLRTAGSCSHSFKRSFLAWLPQPPRFL

SEQ ID NO: 5775 - protein, 107 aa, Homo sapiens
  Payload ID: 1271;
  Gene Symbol: APOL4;
  Gene Name: apolipoprt L, 4;
  ENSP ID: ENSP00000331089
MGSWVQLITSVGTSGLFLGVRVREEGAGMRCSKTIQAGQWLDSSKGPLGPSPPPVPTAGYSSSFCVHYVNLLPGVLVLSVTSQYPHLSMALCQLAAHDWPRLSCVCV

SEQ ID NO: 5776 - protein, 348 aa, Homo sapiens
  Payload ID: 1271;
  Gene Symbol: APOL4;
  Gene Name: apolipoprt L, 4;
  Uniprot ID:  Q9BPW4;
  ENSP ID: ENSP00000333229
MGSWVQLITSVGVQQNHPGWTVAGQFQEKKRFTEEVIEYFQKKVSPVHLKILLTSDEAWKRFVRVAELPREEADALYEALKNLTPYVAIEDKDMQQKEQQFREWFLKEFPQIRWKIQESIERLRVIANEIEKVHRGCVIANVVSGSTGILSVIGVMLAPFTAGLSLSITAAGVGLGIASATAGIASSIVENTYTRSAELTASRLTATSTDQLEALRDILRDITPNVLSFALDFDEATKMIANDVHTLRRSKATVGRPLIAWRYVPINVVETLRTRGAPTRIVRKVARNLGKATSGVLVVLDVVNLVQDSLDLHKGAKSESAESLRQWAQELEENLNELTHIHQSLKAG

SEQ ID NO: 5777 - protein, 351 aa, Homo sapiens
  Payload ID: 1271;
  Gene Symbol: APOL4;
  Gene Name: apolipoprt L, 4;
  Uniprot ID:  Q9BPW4;
  ENSP ID: ENSP00000338260
MEGAALLKIFVVCIWVQQNHPGWTVAGQFQEKKRFTEEVIEYFQKKVSPVHLKILLTSDEAWKRFVRVAELPREEADALYEALKNLTPYVAIEDKDMQQKEQQFREWFLKEFPQIRWKIQESIERLRVIANEIEKVHRGCVIANVVSGSTGILSVIGVMLAPFTAGLSLSITAAGVGLGIASATAGIASSIVENTYTRSAELTASRLTATSTDQLEALRDILRDITPNVLSFALDFDEATKMIANDVHTLRRSKATVGRPLIAWRYVPINVVETLRTRGAPTRIVRKVARNLGKATSGVLVVLDVVNLVQDSLDLHKGAKSESAESLRQWAQELEENLNELTHIHQSLKAG

SEQ ID NO: 5778 - protein, 107 aa, Homo sapiens; identical to SEQ ID NO: 5775
  Payload ID: 1271;
  Gene Symbol: APOL4;
  Gene Name: apolipoprt L, 4;
  ENSP ID: ENSP00000380445

SEQ ID NO: 5779 - protein, 25 aa, Homo sapiens
  Payload ID: 1271;
  Gene Symbol: APOL4;
  Gene Name: apolipoprt L, 4;
  ENSP ID: ENSP00000393096
MGSWVQLITSVGVQQNHPGWTVAGQ

SEQ ID NO: 5780 - protein, 64 aa, Homo sapiens
  Payload ID: 1271;
  Gene Symbol: APOL4;
  Gene Name: apolipoprt L, 4;
  ENSP ID: ENSP00000395548
MGSWVQLITSVGVQQNHPGWTVAGQFQEKKRFTEEVIEYFQKKVSPVHLKILLTSDEAWKRFVR

SEQ ID NO: 5781 - protein, 72 aa, Homo sapiens
  Payload ID: 1271;
  Gene Symbol: APOL4;
  Gene Name: apolipoprt L, 4;
  ENSP ID: ENSP00000409085
MGSWVQLITSVGVQQNHPGWTVAGQFQEKKRFTEEVIEYFQKKVSPVHLKILLTSDEAWKRFVRVAELPREE

SEQ ID NO: 5782 - protein, 70 aa, Homo sapiens
  Payload ID: 1271;
  Gene Symbol: APOL4;
  Gene Name: apolipoprt L, 4;
  ENSP ID: ENSP00000432133
MGSWVQLITSVGVQQNHPGWTVAGQFQEKKRFTEEVIEYFQKKVSPVHLKILLTSDEAWKRFVRVAELPR

SEQ ID NO: 5783 - protein, 348 aa, Homo sapiens; identical to SEQ ID NO: 5776
  Payload ID: 1271;
  Gene Symbol: APOL4;
  Gene Name: apolipoprt L, 4;
  Uniprot ID:  Q9BPW4;
  ENSP ID: ENSP00000483497

SEQ ID NO: 5784 - protein, 433 aa, Homo sapiens
  Payload ID: 1272;
  Gene Symbol: APOL5;
  Gene Name: apolipoprt L, 5;
  Uniprot ID:  Q9BWW9;
  ENSP ID: ENSP00000249044
MPCGKQGNLQVPGSKVLPGLGEGCKEMWLRKVIYGGEVWGKSPEPEFPSLVNLCQSWKINNLMSTVHSDEAGMLSYFLFEELMRCDKDSMPDGNLSEEEKLFLSYFPLHKFELEQNIKELNTLADQVDTTHELLTKTSLVASSSGAVSGVMNILGLALAPVTAGGSLMLSATGTGLGAAAAITNIVTNVLENRSNSAARDKASRLGPLTTSHEAFGGINWSEIEAAGFCVNKCVKAIQGIKDLHAYQMAKSNSGFMAMVKNFVAKRHIPFWTARGVQRAFEGTTLAMTNGAWVMGAAGAGFLLMKDMSSFLQSWKHLEDGARTETAEELRALAKKLEQELDRLTQHHRHLPQKASQTCSSSRGRAVRGSRVVKPEGSRSPLPWPVVEHQPRLGPGVALRTPKRTVSAPRMLGHQPAPPAPARKGRQAPGRHRQ

SEQ ID NO: 5785 - protein, 433 aa, Homo sapiens
  Payload ID: 1272;
  Gene Symbol: APOL5;
  Gene Name: apolipoprt L, 5;
  ENSP ID: ENSP00000479050
MPCGKQGNLQVPGSKVLPGLGEGCKEMWLRKVIYGGEVWGKSPEPEFPSLVNLCQSWKINNLMSTVHSDEAGMLSYFLFEELMRCDKDSMPDGNLSEEEKLFLSYFPLHKFELEQNIKELNTLADQVDTTHELLTKTSLVASSSGAVSGVMNILGLALAPVTAGGSLMLSATGTGLGAAAAITNIVTNVLENRSNSAARDKASRLGPLTTSHEAFGGINWSEIEAAGFCVNKCVKAIQGIKDLHAYQMAKSNSGFMAMVKNFVAKRHIPFWMARGVQRAFEGTTLAMTNGAWVMGAAGAGFLLMKDMSSFLQSWKHLEDGARTETAEELRALAKKLEQELDRLTQHHRHLPQKASQTCSSSRGRAVRGSRVVKPEGSRSPLPWPVVEHQPRLGPGVALRTPKRTVCAPRMLGHQPAPPAPARKGRQAPGRHRQ

SEQ ID NO: 5786 - protein, 343 aa, Homo sapiens
  Payload ID: 1273;
  Gene Symbol: APOL6;
  Gene Name: apolipoprt L, 6;
  Uniprot ID:  Q9BWW8;
  ENSP ID: ENSP00000386280
MDNQAERESEAGVGLQRDEDDAPLCEDVELQDGDLSPEEKIFLREFPRLKEDLKGNIDKLRALADDIDKTHKKFTKANMVATSTAVISGVMSLLGLALAPATGGGSLLLSTAGQGLATAAGVTSIVSGTLERSKNKEAQARAEDILPTYDQEDREDEEEKADYVTAAGKIIYNLRNTLKYAKKNVRAFWKLRANPRLANATKRLLTTGQVSSRSRVQVQKAFAGTTLAMTKNARVLGGVMSAFSLGYDLATLSKEWKHLKEGARTKFAEELRAKALELERKLTELTQLYKSLQQKVRSRARGVGKDLTGTCETEAYWKELREHVWMWLWLCVCLCVCVYVQFT

SEQ ID NO: 5787 - protein, 188 aa, Homo sapiens
  Payload ID: 1274;
  Gene Symbol: APOM;
  Gene Name: apolipoprt M;
  Uniprot ID:  O95445;
  ENSP ID: ENSP00000365081
MFHQIWAALLYFYGIILNSIYQCPEHSQLTTLGVDGKEFPEVHLGQWYFIAGAAPTKEELATFDPVDNIVFNMAAGSAPMQLHLRATIRMKDGLCVPRKWIYHLTEGSTDLRTEGRPDMKTELFSSSCPGGIMLNETGQGYQRFLLYNRSPHPPEKCVEEFKSLTSCLDSKAFLLTPRNQEACELSNN

SEQ ID NO: 5788 - protein, 129 aa, Homo sapiens
  Payload ID: 1274;
  Gene Symbol: APOM;
  Gene Name: apolipoprt M;
  ENSP ID: ENSP00000365083
MAAGSAPMQLHLRATIRMKDGLCVPRKWIYHLTEGSTDLRTEGRPDMKTELFSSSCPGGIMLNETGQGYQRFLLYNRSPHPPEKCVEEFKSLTSCLDSKAFLLTPRNQGKGLKSHKTGLGLTKSSGVTG

SEQ ID NO: 5789 - protein, 116 aa, Homo sapiens
  Payload ID: 1274;
  Gene Symbol: APOM;
  Gene Name: apolipoprt M;
  Uniprot ID:  O95445;
  ENSP ID: ENSP00000365085
MAAGSAPMQLHLRATIRMKDGLCVPRKWIYHLTEGSTDLRTEGRPDMKTELFSSSCPGGIMLNETGQGYQRFLLYNRSPHPPEKCVEEFKSLTSCLDSKAFLLTPRNQEACELSNN

SEQ ID NO: 5790 - protein, 188 aa, Homo sapiens; identical to SEQ ID NO: 5787
  Payload ID: 1274;
  Gene Symbol: APOM;
  Gene Name: apolipoprt M;
  Uniprot ID:  O95445;
  ENSP ID: ENSP00000372930

SEQ ID NO: 5791 - protein, 116 aa, Homo sapiens; identical to SEQ ID NO: 5789
  Payload ID: 1274;
  Gene Symbol: APOM;
  Gene Name: apolipoprt M;
  Uniprot ID:  O95445;
  ENSP ID: ENSP00000383021

SEQ ID NO: 5792 - protein, 188 aa, Homo sapiens; identical to SEQ ID NO: 5787
  Payload ID: 1274;
  Gene Symbol: APOM;
  Gene Name: apolipoprt M;
  Uniprot ID:  O95445;
  ENSP ID: ENSP00000389591

SEQ ID NO: 5793 - protein, 116 aa, Homo sapiens; identical to SEQ ID NO: 5789
  Payload ID: 1274;
  Gene Symbol: APOM;
  Gene Name: apolipoprt M;
  Uniprot ID:  O95445;
  ENSP ID: ENSP00000392021

SEQ ID NO: 5794 - protein, 129 aa, Homo sapiens; identical to SEQ ID NO: 5788
  Payload ID: 1274;
  Gene Symbol: APOM;
  Gene Name: apolipoprt M;
  ENSP ID: ENSP00000392489

SEQ ID NO: 5795 - protein, 116 aa, Homo sapiens; identical to SEQ ID NO: 5789
  Payload ID: 1274;
  Gene Symbol: APOM;
  Gene Name: apolipoprt M;
  Uniprot ID:  O95445;
  ENSP ID: ENSP00000393581

SEQ ID NO: 5796 - protein, 188 aa, Homo sapiens; identical to SEQ ID NO: 5787
  Payload ID: 1274;
  Gene Symbol: APOM;
  Gene Name: apolipoprt M;
  Uniprot ID:  O95445;
  ENSP ID: ENSP00000394610

SEQ ID NO: 5797 - protein, 129 aa, Homo sapiens; identical to SEQ ID NO: 5788
  Payload ID: 1274;
  Gene Symbol: APOM;
  Gene Name: apolipoprt M;
  ENSP ID: ENSP00000395189

SEQ ID NO: 5798 - protein, 129 aa, Homo sapiens; identical to SEQ ID NO: 5788
  Payload ID: 1274;
  Gene Symbol: APOM;
  Gene Name: apolipoprt M;
  ENSP ID: ENSP00000397018

SEQ ID NO: 5799 - protein, 188 aa, Homo sapiens; identical to SEQ ID NO: 5787
  Payload ID: 1274;
  Gene Symbol: APOM;
  Gene Name: apolipoprt M;
  Uniprot ID:  O95445;
  ENSP ID: ENSP00000398944

SEQ ID NO: 5800 - protein, 188 aa, Homo sapiens; identical to SEQ ID NO: 5787
  Payload ID: 1274;
  Gene Symbol: APOM;
  Gene Name: apolipoprt M;
  Uniprot ID:  O95445;
  ENSP ID: ENSP00000401684

SEQ ID NO: 5801 - protein, 116 aa, Homo sapiens; identical to SEQ ID NO: 5789
  Payload ID: 1274;
  Gene Symbol: APOM;
  Gene Name: apolipoprt M;
  Uniprot ID:  O95445;
  ENSP ID: ENSP00000403062

SEQ ID NO: 5802 - protein, 188 aa, Homo sapiens; identical to SEQ ID NO: 5787
  Payload ID: 1274;
  Gene Symbol: APOM;
  Gene Name: apolipoprt M;
  Uniprot ID:  O95445;
  ENSP ID: ENSP00000405730

SEQ ID NO: 5803 - protein, 129 aa, Homo sapiens; identical to SEQ ID NO: 5788
  Payload ID: 1274;
  Gene Symbol: APOM;
  Gene Name: apolipoprt M;
  ENSP ID: ENSP00000412182

SEQ ID NO: 5804 - protein, 129 aa, Homo sapiens; identical to SEQ ID NO: 5788
  Payload ID: 1274;
  Gene Symbol: APOM;
  Gene Name: apolipoprt M;
  ENSP ID: ENSP00000413055

SEQ ID NO: 5805 - protein, 116 aa, Homo sapiens; identical to SEQ ID NO: 5789
  Payload ID: 1274;
  Gene Symbol: APOM;
  Gene Name: apolipoprt M;
  Uniprot ID:  O95445;
  ENSP ID: ENSP00000413446

SEQ ID NO: 5806 - protein, 129 aa, Homo sapiens; identical to SEQ ID NO: 5788
  Payload ID: 1274;
  Gene Symbol: APOM;
  Gene Name: apolipoprt M;
  ENSP ID: ENSP00000414574

SEQ ID NO: 5807 - protein, 116 aa, Homo sapiens; identical to SEQ ID NO: 5789
  Payload ID: 1274;
  Gene Symbol: APOM;
  Gene Name: apolipoprt M;
  Uniprot ID:  O95445;
  ENSP ID: ENSP00000416335

SEQ ID NO: 5808 - protein, 198 aa, Homo sapiens
  Payload ID: 1275;
  Gene Symbol: APOO;
  Gene Name: apolipoprt O;
  Uniprot ID:  Q9BUR5;
  ENSP ID: ENSP00000368528
MFKVIQRSVGPASLSLLTFKVYAAPKKDSPPKNSVKVDELSLYSVPEGQSKYVEEARSQLEESISQLRHYCEPYTTWCQETYSQTKPKMQSLVQWGLDSYDYLQNAPPGFFPRLGVIGFAGLIGLLLARGSKIKKLVYPPGFMGLAASLYYPQQAIVFAQVSGERLYDWGLRGYIVIEDLWKENFQKPGNVKNSPGTK

SEQ ID NO: 5809 - protein, 178 aa, Homo sapiens
  Payload ID: 1275;
  Gene Symbol: APOO;
  Gene Name: apolipoprt O;
  ENSP ID: ENSP00000402557
VYAAPKKDSPPKNSVKVDELSLYSVPEGQSKYVEEARSQLEESISQLRHYCEPYTTWCQETYSQTKPKMQSLVQWGLDSYDYLQNAPPGFFPRLGVIGFAGLIGLLLARGSKIKKLVYPPGFMGLAASLYYPQQAIVFAQVSGERLYDWGLRGYIVIEDLWKENFQKPGNVKNSPGTK

SEQ ID NO: 5810 - protein, 114 aa, Homo sapiens
  Payload ID: 1275;
  Gene Symbol: APOO;
  Gene Name: apolipoprt O;
  ENSP ID: ENSP00000434341
MFKVIQRSVGPASLSLLTFKVYAAPKKDSPPKNSVKVDELSLYSVPEGQSKYVEEARSQLEESISQLRHYCEPYTTWCQTAMTISKMHLLDFFRDLVLLVLLALLDSFWLEVQK

SEQ ID NO: 5811 - protein, 90 aa, Homo sapiens
  Payload ID: 1275;
  Gene Symbol: APOO;
  Gene Name: apolipoprt O;
  ENSP ID: ENSP00000488146
  MOD_RES (1)..(1): Any amino acid
XFFPRLGVIGFAGLIGLLLARGSKIKKLVYPPGFMGLAASLYYPQQAIVFAQVSGERLYDWGLRGYIVIEDLWKENFQKPGNVKNSPGTK

SEQ ID NO: 5812 - protein, 81 aa, Homo sapiens
  Payload ID: 1275;
  Gene Symbol: APOO;
  Gene Name: apolipoprt O;
  ENSP ID: ENSP00000488524
MQSLVQWGLDSYDYLQNAPPGFFPRLGVIGFAGLIGLLLARGSKIKKLVYPPGFMGLAASLYYPQQAIVFAQVSGERLYDW

SEQ ID NO: 5813 - protein, 49 aa, Homo sapiens
  Payload ID: 1275;
  Gene Symbol: APOO;
  Gene Name: apolipoprt O;
  ENSP ID: ENSP00000488538
  MOD_RES (1)..(1): Any amino acid
XGLLLARGSKIKKLVYPPGFMGLAASLYYPQQAIVFAQPGNVKNSPGTK

SEQ ID NO: 5814 - protein, 268 aa, Homo sapiens
  Payload ID: 1276;
  Gene Symbol: APOOL;
  Gene Name: apolipoprt O-like;
  Uniprot ID:  Q6UXV4;
  ENSP ID: ENSP00000362268
MAAIRMGKLTTMPAGLIYASVSVHAAKQEESKKQLVKPEQLPIYTAPPLQSKYVEEQPGHLQMGFASIRTATGCYIGWCKGVYVFVKNGIMDTVQFGKDAYVYLKNPPRDFLPKMGVITVSGLAGLVSARKGSKFKKITYPLGLATLGATVCYPVQSVIIAKVTAKKVYATSQQIFGAVKSLWTKSSKEESLPKPKEKTKLGSSSEIEVPAKTTHVLKHSVPLPTELSSEAKTKSESTSGATQFMPDPKLMDHGQSHPEDIDMYSTRS

SEQ ID NO: 5815 - protein, 263 aa, Homo sapiens [sequence omitted]

SEQ ID NO: 5816 - protein, 268 aa, Homo sapiens [sequence omitted]

SEQ ID NO: 5817 - protein, 206 aa, Homo sapiens
  Payload ID: 1277;
  Gene Symbol: APOPT1;
  Gene Name: apoptogenic 1, mitochondrial;
  Uniprot ID:  Q96IL0;
  ENSP ID: ENSP00000386485
MLPCAAGARGRGAMVVLRAGKKTFLPPLCRAFACRGCQLAPERGAERRDTAPSGVSRFCPPRKSCHDWIGPPDKYSNLRPVHFYIPENESPLEQKLRKLRQETQEWNQQFWANQNLTFSKEKEEFIHSRLKTKGLGLRTESGQKATLNAEEMADFYKEFLSKNFQKHMYYNRDWYKRNFAITFFMGKVALERIWNKLKQKQKKRSN

SEQ ID NO: 5818 - protein, 118 aa, Homo sapiens
  Payload ID: 1277;
  Gene Symbol: APOPT1;
  Gene Name: apoptogenic 1, mitochondrial;
  ENSP ID: ENSP00000388067
AAVRRGSQGAWGHGGLAGGEEDLSPPSLPRLRLPRLSTRSGARRRAQGYGAQRGQKATLNAEEMADFYKEFLSKNFQKHMYYNRDWYKRNFAITFFMGKVALERIWNKLKQKQKKRSN

SEQ ID NO: 5819 - protein, 120 aa, Homo sapiens
  Payload ID: 1277;
  Gene Symbol: APOPT1;
  Gene Name: apoptogenic 1, mitochondrial;
  ENSP ID: ENSP00000408525
  MOD_RES (1)..(1): Any amino acid
XGARGRGAMVVLRAGKKTFLPPLCRAFACRGCQLAPERGAERRDTAPSGVSRFCPPRKSCHDWIGPPDKYSNLRPVHFYIPENESPLEQKLRKLRQETQEWNQQFWANQNLTFSKVRKQH

SEQ ID NO: 5820 - protein, 57 aa, Homo sapiens
  Payload ID: 1277;
  Gene Symbol: APOPT1;
  Gene Name: apoptogenic 1, mitochondrial;
  ENSP ID: ENSP00000450756
  MOD_RES (1)..(1): Any amino acid
XLRQETQEWNQQFWANQNLTFSKMESHSVTQAGVQWHDLGSLQTLPPGSSDSPASAF

SEQ ID NO: 5821 - protein, 108 aa, Homo sapiens
  Payload ID: 1277;
  Gene Symbol: APOPT1;
  Gene Name: apoptogenic 1, mitochondrial;
  ENSP ID: ENSP00000451703
LAPERGAERRDTAPSGVSRFCPPRKSCHDWIGPPDKYSNLRPVHFYIPENESPLEQKLRKLRQETQEWNQQFWANQNLTFSKEKEEFIHSRLKTKGLGLRTESGGYDG

SEQ ID NO: 5822 - protein, 72 aa, Homo sapiens
  Payload ID: 1277;
  Gene Symbol: APOPT1;
  Gene Name: apoptogenic 1, mitochondrial;
  ENSP ID: ENSP00000451788
AFACRGCQLAPERGAERRDTAPSGPPQAFVQVLSRPIPNSPAAPRLPHQRPQSDGTEGAAATTPGTVDSQNL

SEQ ID NO: 5823 - protein, 177 aa, Homo sapiens
  Payload ID: 1277;
  Gene Symbol: APOPT1;
  Gene Name: apoptogenic 1, mitochondrial;
  ENSP ID: ENSP00000451874
MVVLRAGKKTFLPPLCRAFACRGCQLAPERGAERRDTAPSGVSRFCPPRKSCHDWIGPPDKYSNLRPVHFYIPENESPLEQKLRKLRQETQEWNQQFWANQNLTFSKEKEEFIHSRLKTKGLGLRTESDPTLPRVTETMERKTMDGGDSCAAAISLTQSESNIECRRNGGLLQGIFK

SEQ ID NO: 5824 - protein, 76 aa, Homo sapiens
  Payload ID: 1277;
  Gene Symbol: APOPT1;
  Gene Name: apoptogenic 1, mitochondrial;
  ENSP ID: ENSP00000489047
MADFYKEFLSKNFQKHMYYNRLDTVARTWNPMTLGGQEIGTSAILPSPSSWEKWPWKGFGTSLNRNKRRGATRSPL

SEQ ID NO: 5825 - protein, 55 aa, Homo sapiens
  Payload ID: 1277;
  Gene Symbol: APOPT1;
  Gene Name: apoptogenic 1, mitochondrial;
  ENSP ID: ENSP00000489152
MADFYKEFLSKNFQKHMYYNRDWYKRNFAITFFMGKVALERIWNKLKQKQKKRSN

SEQ ID NO: 5826 - protein, 132 aa, Homo sapiens
  Payload ID: 1277;
  Gene Symbol: APOPT1;
  Gene Name: apoptogenic 1, mitochondrial;
  ENSP ID: ENSP00000489308
GPPDKYSNLRPVHFYIPENESPLEQKLRKLRQETQEWNQQFWANQNLTFSKEKEEFIHSRLKTKGLGLRTESDGVSLCHPGWSAVARSRLTANSASWFKRFSCLSLLSSWDYRSESNIECRRNGGLLQGIFK

SEQ ID NO: 5827 - protein, 55 aa, Homo sapiens; identical to SEQ ID NO: 5825
  Payload ID: 1277;
  Gene Symbol: APOPT1;
  Gene Name: apoptogenic 1, mitochondrial;
  ENSP ID: ENSP00000489380

SEQ ID NO: 5828 - protein, 55 aa, Homo sapiens; identical to SEQ ID NO: 5825
  Payload ID: 1277;
  Gene Symbol: APOPT1;
  Gene Name: apoptogenic 1, mitochondrial;
  ENSP ID: ENSP00000489557

SEQ ID NO: 5829 - protein, 560 aa, Homo sapiens
  Payload ID: 1278;
  Gene Symbol: AATF;
  Gene Name: apoptosis antagonizing transcription factor;
  Uniprot ID:  Q9NY61;
  ENSP ID: ENSP00000477848
MAGPQPLALQLEQLLNPRPSEADPEADPEEATAARVIDRFDEGEDGEGDFLVVGSIRKLASASLLDTDKRYCGKTTSRKAWNEDHWEQTLPGSSDEEISDEEGSGDEDSEGLGLEEYDEDDLGAAEEQECGDHRESKKSRSHSAKTPGFSVQSISDFEKFTKGMDDLGSSEEEEDEESGMEEGDDAEDSQGESEEDRAGDRNSEDDGVVMTFSSVKVSEEVEKGRAVKNQIALWDQLLEGRIKLQKALLTTNQLPQPDVFPLFKDKGGPEFSSALKNSHKALKALLRSLVGLQEELLFQYPDTRYLVDGTKPNAGSEEISSEDDELVEEKKQQRRRVPAKRKLEMEDYPSFMAKRFADFTVYRNRTLQKWHDKTKLASGKLGKGFGAFERSILTQIDHILMDKERLLRRTQTKRSVYRVLGKPEPAAQPVPESLPGEPEILPQAPANAHLKDLDEEIFDDDDFYHQLLRELIERKTSSLDPNDQVAMGRQWLAIQKLRSKIHKKVDRKASKGRKLRFHVLSKLLSFMAPIDHTTMNDDARTELYRSLFGQLHPPDEGHGD

SEQ ID NO: 5830 - protein, 98 aa, Homo sapiens
  Payload ID: 1278;
  Gene Symbol: AATF;
  Gene Name: apoptosis antagonizing transcription factor;
  ENSP ID: ENSP00000477881
  MOD_RES (1)..(1): Any amino acid
XILPQAPANAHLKDLDEEIFDDDDFYHQLLRELIERKTSSLDPNDQVAMGRQWLAIQKLRSKIHKKVDRKASKGRKLRTELYRSLFGQLHPPDEGHGD

SEQ ID NO: 5831 - protein, 55 aa, Homo sapiens
  Payload ID: 1278;
  Gene Symbol: AATF;
  Gene Name: apoptosis antagonizing transcription factor;
  ENSP ID: ENSP00000479926
MAGPQPLALQLEQLLNPRPSEADPEADPEEATAARVIDRFDEGEDGEGSNYKKLC

SEQ ID NO: 5832 - protein, 154 aa, Homo sapiens
  Payload ID: 1278;
  Gene Symbol: AATF;
  Gene Name: apoptosis antagonizing transcription factor;
  ENSP ID: ENSP00000480472
RNRTLQKWHDKTKLASGKLGKGFGAFERSILTQIDHILMDKERLLRRTQTKRSVYRVLGKPEPAAQPVPESLPGEPEILPQAPANAHLKDLDEEIFDDDDFYHQLLRELIERKTSSLDPNDQVAMGRQWLAIQKLRSKIHKKVDRKASKGRKLR

SEQ ID NO: 5833 - protein, 560 aa, Homo sapiens; identical to SEQ ID NO: 5829
  Payload ID: 1278;
  Gene Symbol: AATF;
  Gene Name: apoptosis antagonizing transcription factor;
  Uniprot ID:  Q9NY61;
  ENSP ID: ENSP00000481894

SEQ ID NO: 5834 - protein, 98 aa, Homo sapiens; identical to SEQ ID NO: 5830
  Payload ID: 1278;
  Gene Symbol: AATF;
  Gene Name: apoptosis antagonizing transcription factor;
  ENSP ID: ENSP00000487925
  MOD_RES (1)..(1): Any amino acid

SEQ ID NO: 5835 - protein, 154 aa, Homo sapiens; identical to SEQ ID NO: 5832
  Payload ID: 1278;
  Gene Symbol: AATF;
  Gene Name: apoptosis antagonizing transcription factor;
  ENSP ID: ENSP00000488221

SEQ ID NO: 5836 - protein, 55 aa, Homo sapiens; identical to SEQ ID NO: 5831
  Payload ID: 1278;
  Gene Symbol: AATF;
  Gene Name: apoptosis antagonizing transcription factor;
  ENSP ID: ENSP00000488862

SEQ ID NO: 5837 - protein, 325 aa, Homo sapiens
  Payload ID: 1279;
  Gene Symbol: AEN;
  Gene Name: apoptosis enhancing nuclease;
  Uniprot ID:  Q8WTP8;
  ENSP ID: ENSP00000331944
MVPREAPESAQCLCPSLTIPNAKDVLRKRHKRRSRQHQRFMARKALLQEQGLLSMPPEPGSSPLPTPFGAATATEAASSGKQCLRAGSGSAPCSRRPAPGKASGPLPSKCVAIDCEMVGTGPRGRVSELARCSIVSYHGNVLYDKYIRPEMPIADYRTRWSGITRQHMRKAVPFQVAQKEILKLLKGKVVVGHALHNDFQALKYVHPRSQTRDTTYVPNFLSEPGLHTRARVSLKDLALQLLHKKIQVGQHGHSSVEDATTAMELYRLVEVQWEQQEARSLWTCPEDREPDSSTDMEQYMEDQYWPDDLAHGSRGGAREAQDRRN

SEQ ID NO: 5838 - protein, 179 aa, Homo sapiens
  Payload ID: 1279;
  Gene Symbol: AEN;
  Gene Name: apoptosis enhancing nuclease;
  ENSP ID: ENSP00000453631
MVPREAPESAQCLCPSLTIPNAKDVLRKRHKRRSRQHQRFMARKALLQEQGLLSMPPEPGSSPLPTPFGAATATEAASSGKQCLRAGSGSAPCSRRPAPGKASGPLPSKCVAIDCEMVGTGPRGRVSELARCSIVSYHGNVLYDKYIRPEMPIADYRTRWSGITRQHMRKAVPFQVAQK

SEQ ID NO: 5839 - protein, 504 aa, Homo sapiens
  Payload ID: 1280;
  Gene Symbol: API5;
  Gene Name: apoptosis inhibitor 5;
  Uniprot ID:  Q9BZZ5;
  ENSP ID: ENSP00000368129
MPTVEELYRNYGILADATEQVGQHKDAYQVILDGVKGGTKEKRLAAQFIPKFFKHFPELADSAINAQLDLCEDEDVSIRRQAIKELPQFATGENLPRVADILTQLLQTDDSAEFNLVNNALLSIFKMDAKGTLGGLFSQILQGEDIVRERAIKFLSTKLKTLPDEVLTKEVEELILTESKKVLEDVTGEEFVLFMKILSGLKSLQTVSGRQQLVELVAEQADLEQTFNPSDPDCVDRLLQCTRQAVPLFSKNVHSTRFVTYFCEQVLPNLGTLTTPVEGLDIQLEVLKLLAEMSSFCGDMEKLETNLRKLFDKLLEYMPLPPEEAENGENAGNEEPKLQFSYVECLLYSFHQLGRKLPDFLTAKLNAEKLKDFKIRLQYFARGLQVYIRQLRLALQGKTGEALKTEENKIKVVALKITNNINVLIKDLFHIPPSYKSTVTLSWKPVQKVEIGQKRASEDTTSGSPPKKSSAGPKRDARQIYNPPSGKYSSNLGNFNYERSLQGK

SEQ ID NO: 5840 - protein, 513 aa, Homo sapiens
  Payload ID: 1280;
  Gene Symbol: API5;
  Gene Name: apoptosis inhibitor 5;
  Uniprot ID:  Q9BZZ5;
  ENSP ID: ENSP00000399341
MKQRWRENGIGKHKDAYQVILDGVKGGTKEKRLAAQFIPKFFKHFPELADSAINAQLDLCEDEDVSIRRQAIKELPQFATGENLPRVADILTQLLQTDDSAEFNLVNNALLSIFKMDAKGTLGGLFSQILQGEDIVRERAIKFLSTKLKTLPDEVLTKEVEELILTESKKVLEDVTGEEFVLFMKILSGLKSLQTVSGRQQLVELVAEQADLEQTFNPSDPDCVDRLLQCTRQAVPLFSKNVHSTRFVTYFCEQVLPNLGTLTTPVEGLDIQLEVLKLLAEMSSFCGDMEKLETNLRKLFDKLLEYMPLPPEEAENGENAGNEEPKLQFSYVECLLYSFHQLGRKLPDFLTAKLNAEKLKDFKIRLQYFARGLQVYIRQLRLALQGKTGEALKTEENKIKVVALKITNNINVLIKDLFHIPPSYKSTVTLSWKPVQKVEIGQKRASEDTTSGSPPKKSSAGPKRDARQIYNPPSGKYSSNLGNFNYEQRGAFRGSRGGRGWGTRGNRSRGRLY

SEQ ID NO: 5841 - protein, 450 aa, Homo sapiens
  Payload ID: 1280;
  Gene Symbol: API5;
  Gene Name: apoptosis inhibitor 5;
  Uniprot ID:  Q9BZZ5;
  ENSP ID: ENSP00000402540
MPTVEELYRNYGILADATEQVGQIRRQAIKELPQFATGENLPRVADILTQLLQTDDSAEFNLVNNALLSIFKMDAKGTLGGLFSQILQGEDIVRERAIKFLSTKLKTLPDEVLTKEVEELILTESKKVLEDVTGEEFVLFMKILSGLKSLQTVSGRQQLVELVAEQADLEQTFNPSDPDCVDRLLQCTRQAVPLFSKNVHSTRFVTYFCEQVLPNLGTLTTPVEGLDIQLEVLKLLAEMSSFCGDMEKLETNLRKLFDKLLEYMPLPPEEAENGENAGNEEPKLQFSYVECLLYSFHQLGRKLPDFLTAKLNAEKLKDFKIRLQYFARGLQVYIRQLRLALQGKTGEALKTEENKIKVVALKITNNINVLIKDLFHIPPSYKSTVTLSWKPVQKVEIGQKRASEDTTSGSPPKKSSAGPKRDARQIYNPPSGKYSSNLGNFNYERSLQGK

SEQ ID NO: 5842 - protein, 524 aa, Homo sapiens
  Payload ID: 1280;
  Gene Symbol: API5;
  Gene Name: apoptosis inhibitor 5;
  Uniprot ID:  Q9BZZ5;
  ENSP ID: ENSP00000431391
MPTVEELYRNYGILADATEQVGQHKDAYQVILDGVKGGTKEKRLAAQFIPKFFKHFPELADSAINAQLDLCEDEDVSIRRQAIKELPQFATGENLPRVADILTQLLQTDDSAEFNLVNNALLSIFKMDAKGTLGGLFSQILQGEDIVRERAIKFLSTKLKTLPDEVLTKEVEELILTESKKVLEDVTGEEFVLFMKILSGLKSLQTVSGRQQLVELVAEQADLEQTFNPSDPDCVDRLLQCTRQAVPLFSKNVHSTRFVTYFCEQVLPNLGTLTTPVEGLDIQLEVLKLLAEMSSFCGDMEKLETNLRKLFDKLLEYMPLPPEEAENGENAGNEEPKLQFSYVECLLYSFHQLGRKLPDFLTAKLNAEKLKDFKIRLQYFARGLQVYIRQLRLALQGKTGEALKTEENKIKVVALKITNNINVLIKDLFHIPPSYKSTVTLSWKPVQKVEIGQKRASEDTTSGSPPKKSSAGPKRDARQIYNPPSGKYSSNLGNFNYEQRGAFRGSRGGRGWGTRGNRSRGRLY

SEQ ID NO: 5843 - protein, 510 aa, Homo sapiens
  Payload ID: 1280;
  Gene Symbol: API5;
  Gene Name: apoptosis inhibitor 5;
  ENSP ID: ENSP00000434462
MPTVEELYRNYGILADATEQVGQHKDAYQVILDGVKGGTKEKRLAAQFIPKFFKHFPELADSAINAQLDLCEDEDVSIRRQAIKELPQFATGENLPRVADILTQLLQTDDSAEFNLVNNALLSIFKMDAKGTLGGLFSQILQGEDIVRERAIKFLSTKLKTLPDEVLTKEVEELILTESKKVLEDVTGEEFVLFMKILSGLKSLQTVSGRQQLVELVAEQADLEQTFNPSDPDCVDRLLQCTRQAVPLFSKNVHSTRFVTYFCEQVLPNLGTLTTPVEGLDIQLEVLKLLAEMSSFCGDMEKLETNLRKLFDKLLEYMPLPPEEAENGENAGNEEPKLQFSYVECLLYSFHQLGRKLPDFLTAKLNAEKLKDFKIRLQYFARGLQVYIRQLRLALQGKTGEALKTEENKIKVVALKITNNINVLIKDLFHIPPSYKSTVTLSWKPVQKVEIGQKRASEDTTSGSPPKKSSAGPKRDARQIYNPPSGKYSSNLGNFNYGERFRLGTRNMRD

SEQ ID NO: 5844 - protein, 123 aa, Homo sapiens
  Payload ID: 1280;
  Gene Symbol: API5;
  Gene Name: apoptosis inhibitor 5;
  ENSP ID: ENSP00000436189
MPTVEELYRNYGILADATEQVGQHKDAYQVILDGVKGGTKEKRLAAQFIPKFFKHFPELADSAINAQLDLCEDEDVSKTSAFFSIVMSLIYLNSTTHWIAGDVPLNRLLPSAKNLMFFIPLYV

SEQ ID NO: 5845 - protein, 294 aa, Homo sapiens
  Payload ID: 1280;
  Gene Symbol: API5;
  Gene Name: apoptosis inhibitor 5;
  ENSP ID: ENSP00000436436
AIKFLSTKLKTLPDEVLTKEVEELILTESKKVLEDVTGEEFVLFMKILSGLKSLQTVSGRQQLVELVAEQADLEQTFNPSDPDCVDRLLQCTRQAVPLFSVLKLLAEMSSFCGDMEKLETNLRKLFDKLLEYMPLPPEEAENGENAGNEEPKLQFSYVECLLYSFHQLGRKLPDFLTAKLNAEKLKDFKIRLQYFARGLQVYIRQLRLALQGKTGEALKTEENKIKVVALKITNNINVLIKDLFHIPPSYKSTVTLSWKPVQKVEIGQKRASEDTTSGSPPKKSSAGPKRDARQ

SEQ ID NO: 5846 - protein, 823 aa, Homo sapiens
  Payload ID: 1281;
  Gene Symbol: AREL1;
  Gene Name: apoptosis resistant E3 ubiquitin prt ligase 1;
  Uniprot ID:  O15033;
  ENSP ID: ENSP00000348714
MFYVIGGITVSVVAFFFTIKFLFELAARVVSFLQNEDRERRGDRTIYDYVRGNYLDPRSCKVSWDWKDPYEVGHSMAFRVHLFYKNGQPFPAHRPVGLRVHISHVELAVEIPVTQEVLQEPNSNVVKVAFTVRKAGRYEITVKLGGLNVAYSPYYKIFQPGMVVPSKTKIVCHFSTLVLTCGQPHTLQIVPRDEYDNPTNNSMSLRDEHNYTLSIHELGPQEEESTGVSFEKSVTSNRQTFQVFLRLTLHSRGCFHACISYQNQPINNGEFDIIVLSEDEKNIVERNVSTSGVSIYFEAYLYNATNCSSTPWHLPPMHMTSSQRRPSTAVDEEDEDSPSECHTPEKVKKPKKVYCYVSPKQFSVKEFYLKIIPWRLYTFRVCPGTKFSYLGPDPVHKLLTLVVDDGIQPPVELSCKERNILAATFIRSLHKNIGGSETFQDKVNFFQRELRQVHMKRPHSKVTLKVSRHALLESSLKATRNFSISDWSKNFEVVFQDEEALDWGGPRREWFELICKALFDTTNQLFTRFSDNNQALVHPNPNRPAHLRLKMYEFAGRLVGKCLYESSLGGAYKQLVRARFTRSFLAQIIGLRMHYKYFETDDPEFYKSKVCFILNNDMSEMELVFAEEKYNKSGQLDKVVELMTGGAQTPVTNANKIFYLNLLAQYRLASQVKEEVEHFLKGLNELVPENLLAIFDENELELLMCGTGDISVSDFKAHAVVVGGSWHFREKVMRWFWTVVSSLTQEELARLLQFTTGSSQLPPGGFAALCPSFQIIAAPTHSTLPTAHTCFNQLCLPTYDSYEEVHRMLQLAISEGCEGFGML

SEQ ID NO: 5847 - protein, 129 aa, Homo sapiens
  Payload ID: 1281;
  Gene Symbol: AREL1;
  Gene Name: apoptosis resistant E3 ubiquitin prt ligase 1;
  ENSP ID: ENSP00000450458
MFYVIGGITVSVVAFFFTIKFLFELAARVVSFLQNEDRERRGDRTIYDYVRGNYLDPRSCKVSWDWKDPYEVGHSMAFRVHLFYKNGQPFPAHRPVGLRVHISHVELAVEIPVTQEVLQEPNSNVVKVA

SEQ ID NO: 5848 - protein, 504 aa, Homo sapiens
  Payload ID: 1281;
  Gene Symbol: AREL1;
  Gene Name: apoptosis resistant E3 ubiquitin prt ligase 1;
  ENSP ID: ENSP00000450557
MFYVIGGITVSVVAFFFTIKFLFELAARVVSFLQNEDRERRGDRTIYDYVRGNYLDPRSCKVSWDWKDPYEVGHSMAFRVHLFYKNGQPFPAHRPVGLRVHISHVELAVEIPVTQEVLQEPNSNVVKVAFTVRKAGRYEITVKLGGLNVAYSPYYKIFQPGMVVPSKTKIVCHFSTLVLTCGQPHTLQIVPRDEYDNPTNNSMSLRDEHNYTLSIHELGPQEEESTGVSFEKSVTSNRQTFQVFLRLTLHSRGCFHACISYQNQPINNGEFDIIVLSEDEKNIVERNVSTSGVSIYFEAYLYNATNCSSTPWHLPPMHMTSSQRRPSTAVDEEDEDSPSECHTPEKVKKPKKVYCYVSPKQFSVKEFYLKIIPWRLYTFRVCPGTKFSYLGPDPVHKLLTLVVDDGIQPPVELSCKERNILAATFIRSLHKNIGGSETFQDKVNFFQRELRQVHMKRPHSKVTLKVSRHALLESSLKATRNFSISDWSKNFEVVFQDEEGASQP

SEQ ID NO: 5849 - protein, 89 aa, Homo sapiens
  Payload ID: 1281;
  Gene Symbol: AREL1;
  Gene Name: apoptosis resistant E3 ubiquitin prt ligase 1;
  ENSP ID: ENSP00000450901
WFWTVVSSLTQEELARLLQFTTGSSQLPPGGFAALCPSFQIIAAPTHSTLPTAHTCFNQLCLPTYDSYEEVHRMLQLAISEGCEGFGML

SEQ ID NO: 5850 - protein, 119 aa, Homo sapiens
  Payload ID: 1281;
  Gene Symbol: AREL1;
  Gene Name: apoptosis resistant E3 ubiquitin prt ligase 1;
  ENSP ID: ENSP00000450912
  MOD_RES (1)..(1): Any amino acid
XSPKQFSVKEFYLKIIPWRLYTFRVCPGTKFSYLGPDPVHKLLTLVVDDGIQPPVELSCKERNILAATFIRSLHKNIGGSETFQDKVNFFQRELRQVHMKRPHSKVTLKVSRHALLESE

SEQ ID NO: 5851 - protein, 81 aa, Homo sapiens
  Payload ID: 1281;
  Gene Symbol: AREL1;
  Gene Name: apoptosis resistant E3 ubiquitin prt ligase 1;
  ENSP ID: ENSP00000451375
VAFTVRKAGRYEITVKLGGLNVAYSPYYKIFQPGIGSHYVAQGGLELLDSSNLPALAFQSVGITGVSQVTQPDYCSSYNKS

SEQ ID NO: 5852 - protein, 131 aa, Homo sapiens
  Payload ID: 1281;
  Gene Symbol: AREL1;
  Gene Name: apoptosis resistant E3 ubiquitin prt ligase 1;
  ENSP ID: ENSP00000451710
  MOD_RES (1)..(1): Any amino acid
XCFHACISYQNQPINNGEFDIIVLSEDEKNIVERNVSTSGVSIYFEAYLYNATNCSSTPWHLPPMHMTSSQRRPSTAVDEEDEDSPSECHTPEKQFSVKEFYLKIIPWRLYTFRVCPGTKFSYLGPDPVHK

SEQ ID NO: 5853 - protein, 631 aa, Homo sapiens
  Payload ID: 1281;
  Gene Symbol: AREL1;
  Gene Name: apoptosis resistant E3 ubiquitin prt ligase 1;
  ENSP ID: ENSP00000452101
MVVPSKTKIVCHFSTLVLTCGQPHTLQIVPRDEYDNPTNNSMSLRDEHNYTLSIHELGPQEEESTGVSFEKSVTSNRQTFQVFLRLTLHSRGCFHACISYQNQPINNGEFDIIVLSEDEKNIVERNVSTSGVSIYFEAYLYNATNCSSTPWHLPPMHMTSSQRRPSTAVDEEDEDSPSECHTPEKVKKPKKVYCYVSPKQFSVKEFYLKIIPWRLYTFRVCPGTKFSYLGPDPVHKLLTLVVDDGIQPPVELSCKERNILAATFIRSLHKNIGGSETFQDKVNFFQRELRQVHMKRPHSKVTLKVSRHALLESSLKATRNFSISDWSKNFEVVFQDEEALDWGGPRREWFELICKALFDTTNQLFTRFSDNNQALVHPNPNRPAHLRLKMYEFAGRLVGKCLYESSLGGAYKQLVRARFTRSFLAQIIGLRMHYKYFETDDPEFYKSKVCFILNNDMSEMELVFAEEKYNKSGQLDKVVELMTGGAQTPVTNANKIFYLNLLAQYRLASQVKEEVEHFLKGLNELVPENLLAIFDENELELLMCGTGDISVSDFKAHAVVVGGSWHFREKVMRWFWTVVSSLTQEELARLLQFTTGSSQLPPGGFAALCPSFQIIAAPTHSTLPTAHTCFN

SEQ ID NO: 5854 - protein, 99 aa, Homo sapiens
  Payload ID: 1281;
  Gene Symbol: AREL1;
  Gene Name: apoptosis resistant E3 ubiquitin prt ligase 1;
  ENSP ID: ENSP00000452456
MFYVIGGITVSVVAFFFTIKFLFELAARVVSFLQNEDRERRGDRTIYDYVRGNYLDPRSCKVSWDWKDPYEVGHSMAFRVHEWWFLLRPKLCATFLLLY

SEQ ID NO: 5855 - protein, 362 aa, Homo sapiens
  Payload ID: 1282;
  Gene Symbol: AVEN;
  Gene Name: apoptosis, caspase activation inhibitor;
  Uniprot ID:  Q9NQS1;
  ENSP ID: ENSP00000306822
MQAERGARGGRGRRPGRGRPGGDRHSERPGAAAAVARGGGGGGGGDGGGRRGRGRGRGFRGARGGRGGGGAPRGSRREPGGWGAGASAPVEDDSDAETYGEENDEQGNYSKRKIVSNWDRYQDIEKEVNNESGESQRGTDFSVLLSSAGDSFSQFRFAEEKEWDSEASCPKQNSAFYVDSELLVRALQELPLCLRLNVAAELVQGTVPLEVPQVKPKRTDDGKGLGMQLKGPLGPGGRGPIFELKSVAAGCPVLLGKDNPSPGPSRDSQKPTSPLQSAGDHLEEELDLLLNLDAPIKEGDNILPDQTSQDLKSKEDGEVVQEEEVCAKPSVTEEKNMEPEQPSTSKNVTEEELEDWLDSMIS

SEQ ID NO: 5856 - protein, 59 aa, Homo sapiens
  Payload ID: 1282;
  Gene Symbol: AVEN;
  Gene Name: apoptosis, caspase activation inhibitor;
  ENSP ID: ENSP00000452906
  MOD_RES (1)..(1): Any amino acid
XDSFSQFRFAEEKEWDSEASCPKQNSAFYVDSELLVRALQELPLCLRLNVAAELVQMHL

SEQ ID NO: 5857 - protein, 1374 aa, Homo sapiens
  Payload ID: 1283;
  Gene Symbol: AATK;
  Gene Name: apoptosis-associated tyr kinase;
  Uniprot ID:  Q6ZMQ8;
  ENSP ID: ENSP00000324196
MSSSFFNPSFAFSSHFDPDGAPLSELSWPSSLAVVAVSFSGLFAVIVLMLACLCCKKGGIGFKEFENAEGDEYAADLAQGSPATAAQNGPDVYVLPLTEVSLPMAKQPGRSVQLLKSTDVGRHSLLYLKEIGRGWFGKVFLGEVNSGISSAQVVVKELQASASVQEQMQFLEEVQPYRALKHSNLLQCLAQCAEVTPYLLVMEFCPLGDLKGYLRSCRVAESMAPDPRTLQRMACEVACGVLHLHRNNFVHSDLALRNCLLTADLTVKIGDYGLAHCKYREDYFVTADQLWVPLRWIAPELVDEVHSNLLVVDQTKSGNVWSLGVTIWELFELGTQPYPQHSDQQVLAYTVREQQLKLPKPQLQLTLSDRWYEVMQFCWLQPEQRPTAEEVHLLLSYLCAKGATEAEEEFERRWRSLRPGGGGVGPGPGAAGPMLGGVVELAAASSFPLLEQFAGDGFHADGDDVLTVTETSRGLNFEYKWEAGRGAEAFPATLSPGRTARLQELCAPDGAPPGVVPVLSAHSPSLGSEYFIRLEEAAPAAGHDPDCAGCAPSPPATADQDDDSDGSTAASLAMEPLLGHGPPVDVPWGRGDHYPRRSLARDPLCPSRSPSPSAGPLSLAEGGAEDADWGVAAFCPAFFEDPLGTSPLGSSGAPPLPLTGEDELEEVGARRAAQRGHWRSNVSANNNSGSRCPESWDPVSAGGHAEGCPSPKQTPRASPEPGYPGEPLLGLQAASAQEPGCCPGLPHLCSAQGLAPAPCLVTPSWTETASSGGDHPQAEPKLATEAEGTTGPRLPLPSVPSPSQEGAPLPSEEASAPDAPDALPDSPTPATGGEVSAIKLASALNGSSSSPEVEAPSSEDEDTAEATSGIFTDTSSDGLQARRPDVVPAFRSLQKQVGTPDSLDSLDIPSSASDGGYEVFSPSATGPSGGQPRALDSGYDTENYESPEFVLKEAQEGCEPQAFAELASEGEGPGPETRLSTSLSGLNEKNPYRDSAYFSDLEAEAEATSGPEKKCGGDRAPGPELGLPSTGQPSEQVCLRPGVSGEAQGSGPGEVLPPLLQLEGSSPEPSTCPSGLVPEPPEPQGPAKVRPGPSPSCSQFFLLTPVPLRSEGNSSEFQGPPGLLSGPAPQKRMGGPGTPRAPLRLALPGLPAALEGRPEEEEEDSEDSDESDEELRCYSVQEPSEDSEEEAPAVPVVVAESQSARNLRSLLKMPSLLSETFCEDLERKKKAVSFFDDVTVYLFDQESPTRELGEPFPGAKESPPTFLRGSPGSPSAPNRPQQADGSPNGSTAEEGGGFAWDDDFPLMTAKAAFAMALDPAAPAPAAPTPTPAPFSRFTVSPAPTSRFSITHVSDSDAESKRGPEAGAGGESKEA

SEQ ID NO: 5858 - protein, 879 aa, Homo sapiens
  Payload ID: 1283;
  Gene Symbol: AATK;
  Gene Name: apoptosis-associated tyr kinase;
  Uniprot ID:  Q6ZMQ8;
  ENSP ID: ENSP00000363924
MSSSFFNPSFAFSSHFDPDGAPLSELSWPSSLAVVAVSFSGLFAVIVLMLACLCCKKGGIGFKEFENAEGDEYAADLAQGSPATAAQNGPDVYVLPLTEVSLPMAKQPGRSVQLLKSTDVGRHSLLYLKEIGRGWFGKVFLGEVNSGISSAQVVVKELQASASVQEQMQFLEEVQPYRALKHSNLLQCLAQCAEVTPYLLVMEFCPLGDLKGYLRSCRVAESMAPDPRTLQRMACEVACGVLHLHRNNFVHSDLALRNCLLTADLTVKIGDYGLAHCKYREDYFVTADQLWVPLRWIAPELVDEVHSNLLVVDQTKSGNVWSLGVTIWELFELGTQPYPQHSDQQVLAYTVREQQLKLPKPQLQLTLSDRWYEVMQFCWLQPEQRPTAEEVHLLLSYLCAKGATEAEEEFERRWRSLRPGGGGVGPGPGAAGPMLGGVVELAAASSFPLLEQFAGDGFHADGDDVLTELCAPDGAPPGVVPVLSAHSPSLGSEYFIRLEEAAPAAGHDPDCAGCAPSPPATADQDDDSDGSTAASLAMEPLLGHGPPVDVPWGRGDHYPRRSLARDPLCPSRSPSPSAGPLSLAEGGAEDADWGVAAFCPAFFEDPLGTSPLGSSGAPPLPLTGEDELEEVGARRAAQRGHWRSNVSANNNSGSRCPESWDPVSAGGHAEGCPSPKQTPRASPEPGYPGEPLLGLQAASAQEPGCCPGLPHLCSAQGLAPAPCLVTPSWTETASSGGDHPQAEPKLATEAEGTTGPRLPLPSVPSPSQEGAPLPSEEASAPDAPDALPDSPTPATGGEVSAIKLASALNGSSSSPEVEAPSSEDEDTAEATSGIFTDTSSDGLQARRPDVVPAFRSLQKQWPQREESLPRLCLLLRPRG

SEQ ID NO: 5859 - protein, 1271 aa, Homo sapiens
  Payload ID: 1283;
  Gene Symbol: AATK;
  Gene Name: apoptosis-associated tyr kinase;
  ENSP ID: ENSP00000398796
MAKQPGRSVQLLKSTDVGRHSLLYLKEIGRGWFGKVFLGEVNSGISSAQVVVKELQASASVQEQMQFLEEVQPYRALKHSNLLQCLAQCAEVTPYLLVMEFCPLGDLKGYLRSCRVAESMAPDPRTLQRMACEVACGVLHLHRNNFVHSDLALRNCLLTADLTVKIGDYGLAHCKYREDYFVTADQLWVPLRWIAPELVDEVHSNLLVVDQTKSGNVWSLGVTIWELFELGTQPYPQHSDQQVLAYTVREQQLKLPKPQLQLTLSDRWYEVMQFCWLQPEQRPTAEEVHLLLSYLCAKGATEAEEEFERRWRSLRPGGGGVGPGPGAAGPMLGGVVELAAASSFPLLEQFAGDGFHADGDDVLTVTETSRGLNFEYKWEAGRGAEAFPATLSPGRTARLQELCAPDGAPPGVVPVLSAHSPSLGSEYFIRLEEAAPAAGHDPDCAGCAPSPPATADQDDDSDGSTAASLAMEPLLGHGPPVDVPWGRGDHYPRRSLARDPLCPSRSPSPSAGPLSLAEGGAEDADWGVAAFCPAFFEDPLGTSPLGSSGAPPLPLTGEDELEEVGARRAAQRGHWRSNVSANNNSGSRCPESWDPVSAGGHAEGCPSPKQTPRASPEPGYPGEPLLGLQAASAQEPGCCPGLPHLCSAQGLAPAPCLVTPSWTETASSGGDHPQAEPKLATEAEGTTGPRLPLPSVPSPSQEGAPLPSEEASAPDAPDALPDSPTPATGGEVSAIKLASALNGSSSSPEVEAPSSEDEDTAEATSGIFTDTSSDGLQARRPDVVPAFRSLQKQVGTPDSLDSLDIPSSASDGGYEVFSPSATGPSGGQPRALDSGYDTENYESPEFVLKEAQEGCEPQAFAELASEGEGPGPETRLSTSLSGLNEKNPYRDSAYFSDLEAEAEATSGPEKKCGGDRAPGPELGLPSTGQPSEQVCLRPGVSGEAQGSGPGEVLPPLLQLEGSSPEPSTCPSGLVPEPPEPQGPAKVRPGPSPSCSQFFLLTPVPLRSEGNSSEFQGPPGLLSGPAPQKRMGGPGTPRAPLRLALPGLPAALEGRPEEEEEDSEDSDESDEELRCYSVQEPSEDSEEEAPAVPVVVAESQSARNLRSLLKMPSLLSETFCEDLERKKKAVSFFDDVTVYLFDQESPTRELGEPFPGAKESPPTFLRGSPGSPSAPNRPQQADGSPNGSTAEEGGGFAWDDDFPLMTAKAAFAMALDPAAPAPAAPTPTPAPFSRFTVSPAPTSRFSITHVSDSDAESKRGPEAGAGGESKEA

SEQ ID NO: 5860 - protein, 116 aa, Homo sapiens
  Payload ID: 1283;
  Gene Symbol: AATK;
  Gene Name: apoptosis-associated tyr kinase;
  ENSP ID: ENSP00000460202
MLTLCYLIARCIGRTRLAPGQQEFENAEGDEYAADLAQGSPATAAQNGPDVYVLPLTEVSLPMAKQPGRSVQLLKSTDVGRHSLLYLKEIGRGWFGKVFLGEVNSGISSAQVVVKE

SEQ ID NO: 5861 - protein, 105 aa, Homo sapiens
  Payload ID: 1283;
  Gene Symbol: AATK;
  Gene Name: apoptosis-associated tyr kinase;
  ENSP ID: ENSP00000460986
SEEASAPDAPDALPDSPTPATGGEVSAIKLASALNGSSSSPEVEAPSSEDEDTAEATSGIFTDTSSDGLQARRPDVVPAFRSLQKQWPQREESLPRLCLLLRPRG

SEQ ID NO: 5862 - protein, 613 aa, Homo sapiens
  Payload ID: 1284;
  Gene Symbol: AIFM1;
  Gene Name: apoptosis-inducing factor, mitochondrion-associated, 1;
  Uniprot ID:  O95831;
  ENSP ID: ENSP00000287295
MFRCGGLAAGALKQKLVPLVRTVCVRSPRQRNRLPGNLFQRWHVPLELQMTRQMASSGASGGKIDNSVLVLIVGLSTVGAGAYAYKTMKEDEKRYNERISGLGLTPEQKQKKAALSASEGEEVPQDKAPSHVPFLLIGGGTAAFAAARSIRARDPGARVLIVSEDPELPYMRPPLSKELWFSDDPNVTKTLRFKQWNGKERSIYFQPPSFYVSAQDLPHIENGGVAVLTGKKVVQLDVRDNMVKLNDGSQITYEKCLIATGGTPRSLSAIDRAGAEVKSRTTLFRKIGDFRSLEKISREVKSITIIGGGFLGSELACALGRKARALGTEVIQLFPEKGNMGKILPEYLSNWTMEKVRREGVKVMPNAIVQSVGVSSGKLLIKLKDGRKVETDHIVAAVGLEPNVELAKTGGLEIDSDFGGFRVNAELQARSNIWVAGDAACFYDIKLGRRRVEHHDHAVVSGRLAGENMTGAAKPYWHQSMFWSDLGPDVGYEAIGLVDSSLPTVGVFAKATAQDNPKSATEQSGTGIRSESETESEASEITIPPSTPAVPQAPVQGEDYGKGVIFYLRDKVVVGIVLWNIFNRMPIARKIIKDGEQHEDLNEVAKLFNIHED

SEQ ID NO: 5863 - protein, 609 aa, Homo sapiens
  Payload ID: 1284;
  Gene Symbol: AIFM1;
  Gene Name: apoptosis-inducing factor, mitochondrion-associated, 1;
  Uniprot ID:  O95831;
  ENSP ID: ENSP00000315122
MFRCGGLAAGALKQKLVPLVRTVCVRSPRQRNRLPVVQSHHLGSPSRSLASTGASGKDGSNLVYFLIVGATVTGAGVYYAYKTMKEDEKRYNERISGLGLTPEQKQKKAALSASEGEEVPQDKAPSHVPFLLIGGGTAAFAAARSIRARDPGARVLIVSEDPELPYMRPPLSKELWFSDDPNVTKTLRFKQWNGKERSIYFQPPSFYVSAQDLPHIENGGVAVLTGKKVVQLDVRDNMVKLNDGSQITYEKCLIATGGTPRSLSAIDRAGAEVKSRTTLFRKIGDFRSLEKISREVKSITIIGGGFLGSELACALGRKARALGTEVIQLFPEKGNMGKILPEYLSNWTMEKVRREGVKVMPNAIVQSVGVSSGKLLIKLKDGRKVETDHIVAAVGLEPNVELAKTGGLEIDSDFGGFRVNAELQARSNIWVAGDAACFYDIKLGRRRVEHHDHAVVSGRLAGENMTGAAKPYWHQSMFWSDLGPDVGYEAIGLVDSSLPTVGVFAKATAQDNPKSATEQSGTGIRSESETESEASEITIPPSTPAVPQAPVQGEDYGKGVIFYLRDKVVVGIVLWNIFNRMPIARKIIKDGEQHEDLNEVAKLFNIHED

SEQ ID NO: 5864 - protein, 326 aa, Homo sapiens
  Payload ID: 1284;
  Gene Symbol: AIFM1;
  Gene Name: apoptosis-inducing factor, mitochondrion-associated, 1;
  Uniprot ID:  O95831;
  ENSP ID: ENSP00000316320
MFRCGGLAAGALKQKLVPLVRTVCVRSPRQRNRLPARALGTEVIQLFPEKGNMGKILPEYLSNWTMEKVRREGVKVMPNAIVQSVGVSSGKLLIKLKDGRKVETDHIVAAVGLEPNVELAKTGGLEIDSDFGGFRVNAELQARSNIWVAGDAACFYDIKLGRRRVEHHDHAVVSGRLAGENMTGAAKPYWHQSMFWSDLGPDVGYEAIGLVDSSLPTVGVFAKATAQDNPKSATEQSGTGIRSESETESEASEITIPPSTPAVPQAPVQGEDYGKGVIFYLRDKVVVGIVLWNIFNRMPIARKIIKDGEQHEDLNEVAKLFNIHED

SEQ ID NO: 5865 - protein, 324 aa, Homo sapiens
  Payload ID: 1284;
  Gene Symbol: AIFM1;
  Gene Name: apoptosis-inducing factor, mitochondrion-associated, 1;
  Uniprot ID:  O95831;
  ENSP ID: ENSP00000402535
MFRCGGLAAGALKQKLVPLVRTVCVRSPRQRNRLPGNLFQRWHVPLELQMTRQMASSGASGGKIDNSVLVLIVGLSTVGAGAYAYKTMKEDEKRYNERISGLGLTPEQKQKKAALSASEGEEVPQDKAPSHVPFLLIGGGTAAFAAARSIRARDPGARVLIVSEDPELPYMRPPLSKELWFSDDPNVTKTLRFKQWNGKERSIYFQPPSFYVSAQDLPHIENGGVAVLTGKKVVQLDVRDNMVKLNDGSQITYEKCLIATGGTPRSLSAIDRAGAEVKSRTTLFRKIGDFRSLEKISREVKSITIIGGGFLGSELACALGRKDI

SEQ ID NO: 5866 - protein, 274 aa, Homo sapiens
  Payload ID: 1284;
  Gene Symbol: AIFM1;
  Gene Name: apoptosis-inducing factor, mitochondrion-associated, 1;
  ENSP ID: ENSP00000431222
MGKILPEYLSNWTMEKVRREGVKVMPNAIVQSVGVSSGKLLIKLKDGRKVETDHIVAAVGLEPNVELAKTGGLEIDSDFGGFRVNAELQARSNIWVAGDAACFYDIKLGRRRVEHHDHAVVSGRLAGENMTGAAKPYWHQSMFWSDLGPDVGYEAIGLVDSSLPTVGVFAKATAQDNPKSATEQSGTGIRSESETESEASEITIPPSTPAVPQAPVQGEDYGKGVIFYLRDKVVVGIVLWNIFNRMPIARKIIKDGEQHEDLNEVAKLFNIHED

SEQ ID NO: 5867 - protein, 89 aa, Homo sapiens
  Payload ID: 1284;
  Gene Symbol: AIFM1;
  Gene Name: apoptosis-inducing factor, mitochondrion-associated, 1;
  ENSP ID: ENSP00000432998
MFRCGGLAAGALKQKLVPLVRTVCVRSPRQRNRLPGNLFQRWHVPLELQMTRQMASSGASGGKIDNSVLVLIVGLSTVGAGAYLCSLIT

SEQ ID NO: 5868 - protein, 43 aa, Homo sapiens
  Payload ID: 1284;
  Gene Symbol: AIFM1;
  Gene Name: apoptosis-inducing factor, mitochondrion-associated, 1;
  ENSP ID: ENSP00000435955
MFRCGGLAAGALKQKLVPLVRTVCVRSPRQRNRLPGLQDYERG

SEQ ID NO: 5869 - protein, 324 aa, Homo sapiens; identical to SEQ ID NO: 5865
  Payload ID: 1284;
  Gene Symbol: AIFM1;
  Gene Name: apoptosis-inducing factor, mitochondrion-associated, 1;
  Uniprot ID:  O95831;
  ENSP ID: ENSP00000446113

SEQ ID NO: 5870 - protein, 373 aa, Homo sapiens
  Payload ID: 1285;
  Gene Symbol: AIFM2;
  Gene Name: apoptosis-inducing factor, mitochondrion-associated, 2;
  Uniprot ID:  Q9BRQ8;
  ENSP ID: ENSP00000312370
MGSQVSVESGALHVVIVGGGFGGIAAASQLQALNVPFMLVDMKDSFHHNVAALRASVETGFAKKTFISYSVTFKDNFRQGLVVGIDLKNQMVLLQGGEALPFSHLILATGSTGPFPGKFNEVSSQQAAIQAYEDMVRQVQRSRFIVVVGGGSAGVEMAAEIKTEYPEKEVTLIHSQVALADKELLPSVRQEVKEILLRKGVQLLLSERVSNLEELPLNEYREYIKVQTDKGTEVATNLVILCTGIKINSSAYRKAFESRLASSGALRVNEHLQVEGHSNVYAIGDCADVRTPKMAYLAGLHANIAVANIVNSVKQRPLQAYKPGALTFLLSMGRNDGVGQISGFYVGRLMVRLTKSRDLFVSTSWKTMRQSPP

SEQ ID NO: 5871 - protein, 373 aa, Homo sapiens; identical to SEQ ID NO: 5870
  Payload ID: 1285;
  Gene Symbol: AIFM2;
  Gene Name: apoptosis-inducing factor, mitochondrion-associated, 2;
  Uniprot ID:  Q9BRQ8;
  ENSP ID: ENSP00000362345

SEQ ID NO: 5872 - protein, 373 aa, Homo sapiens; identical to SEQ ID NO: 5870
  Payload ID: 1285;
  Gene Symbol: AIFM2;
  Gene Name: apoptosis-inducing factor, mitochondrion-associated, 2;
  Uniprot ID:  Q9BRQ8;
  ENSP ID: ENSP00000478931

SEQ ID NO: 5873 - protein, 598 aa, Homo sapiens
  Payload ID: 1286;
  Gene Symbol: AIFM3;
  Gene Name: apoptosis-inducing factor, mitochondrion-associated, 3;
  Uniprot ID:  Q96NN9;
  ENSP ID: ENSP00000382116
MGGCFSKPKPVELKIEVVLPEKERGKEELSASGKGSPRAYQGNGTARHFHTEERLSTPHPYPSPQDCVEAAVCHVKDLENGQMREVELGWGKVLLVKDNGEFHALGHKCPHYGAPLVKGVLSRGRVRCPWHGACFNISTGDLEDFPGLDSLHKFQVKIEKEKVYVRASKQALQLQRRTKVMAKCISPSAGYSSSTNVLIVGAGAAGLVCAETLRQEGFSDRIVLCTLDRHLPYDRPKLSKSLDTQPEQLALRPKEFFRAYGIEVLTEAQVVTVDVRTKKVVFKDGFKLEYSKLLLAPGSSPKTLSCKGKEVENVFTIRTPEDANRVVRLARGRNVVVVGAGFLGMEVAAYLTEKAHSVSVVELEETPFRRFLGERVGRALMKMFENNRVKFYMQTEVSELRGQEGKLKEVVLKSSKVVRADVCVVGIGAVPATGFLRQSGIGLDSRGFIPVNKMMQTNVPGVFAAGDAVTFPLAWRNNRKVNIPHWQMAHAQGRVAAQNMLAQEAEMSTVPYLWTAMFGKSLRYAGYGEGFDDVIIQGDLEELKFVAFYTKGDEVIAVASMNYDPIVSKVAEVLASGRAIRKREVETGDMSWLTGKGS

SEQ ID NO: 5874 - protein, 605 aa, Homo sapiens
  Payload ID: 1286;
  Gene Symbol: AIFM3;
  Gene Name: apoptosis-inducing factor, mitochondrion-associated, 3;
  Uniprot ID:  Q96NN9;
  ENSP ID: ENSP00000382120
MGGCFSKPKPVELKIEVVLPEKERGKEELSASGKGSPRAYQGNGTARHFHTEERLSTPHPYPSPQDCVEAAVCHVKDLENGQMREVELGWGKVLLVKDNGEFHALGHKCPHYGAPLVKGVLSRGRVRCPWHGACFNISTGDLEDFPGLDSLHKFQVKIEKEKVYVRASKQALQLQRRTKVMAKCISPSAGYSSSTNVLIVGAGAAGLVCAETLRQEGFSDRIVLCTLDRHLPYDRPKLSKSLDTQPEQLALRPKEFFRAYGIEVLTEAQVVTVDVRTKKVVFKDGFKLEYSKLLLAPGSSPKTLSCKGKEVENVFTIRTPEDANRVVRLARGRNVVVVGAGFLGMEVAAYLTEKAHSVSVVELEETPFRRFLGERVGRALMKMFENNRVKFYMQTEVSELRGQEGKLKEVVLKSSKVVRADVCVVGIGAVPATGFLRQSGIGLDSRGFIPVNKMMQTNVPGVFAAGDAVTFPLAWRNNRKVNIPHWQMAHAQGRVAAQNMLAQEAEMSTVPYLWTAMFGKSLRYAGYGEGFDDVIIQGDLEELKFVAFYTKGDEVIAVASMNYDPIVSKVAEVLASGRAIRKREVELFVLHSKTGDMSWLTGKGS

SEQ ID NO: 5875 - protein, 604 aa, Homo sapiens
  Payload ID: 1286;
  Gene Symbol: AIFM3;
  Gene Name: apoptosis-inducing factor, mitochondrion-associated, 3;
  Uniprot ID:  Q96NN9;
  ENSP ID: ENSP00000385800
MGGCFSKPKPGAALPTVELKIEVVLPEKERGKEELSASGKGSPRAYQGNGTARHFHTEERLSTPHPYPSPQDCVEAAVCHVKDLENGQMREVELGWGKVLLVKDNGEFHALGHKCPHYGAPLVKGVLSRGRVRCPWHGACFNISTGDLEDFPGLDSLHKFQVKIEKEKVYVRASKQALQLQRRTKVMAKCISPSAGYSSSTNVLIVGAGAAGLVCAETLRQEGFSDRIVLCTLDRHLPYDRPKLSKSLDTQPEQLALRPKEFFRAYGIEVLTEAQVVTVDVRTKKVVFKDGFKLEYSKLLLAPGSSPKTLSCKGKEVENVFTIRTPEDANRVVRLARGRNVVVVGAGFLGMEVAAYLTEKAHSVSVVELEETPFRRFLGERVGRALMKMFENNRVKFYMQTEVSELRGQEGKLKEVVLKSSKVVRADVCVVGIGAVPATGFLRQSGIGLDSRGFIPVNKMMQTNVPGVFAAGDAVTFPLAWRNNRKVNIPHWQMAHAQGRVAAQNMLAQEAEMSTVPYLWTAMFGKSLRYAGYGEGFDDVIIQGDLEELKFVAFYTKGDEVIAVASMNYDPIVSKVAEVLASGRAIRKREVETGDMSWLTGKGS

SEQ ID NO: 5876 - protein, 605 aa, Homo sapiens; identical to SEQ ID NO: 5874
  Payload ID: 1286;
  Gene Symbol: AIFM3;
  Gene Name: apoptosis-inducing factor, mitochondrion-associated, 3;
  Uniprot ID:  Q96NN9;
  ENSP ID: ENSP00000390798

SEQ ID NO: 5877 - protein, 269 aa, Homo sapiens
  Payload ID: 1286;
  Gene Symbol: AIFM3;
  Gene Name: apoptosis-inducing factor, mitochondrion-associated, 3;
  ENSP ID: ENSP00000399657
MGGCFSKPKPVELKIEVVLPEKERGKEELSASGKGSPRAYQGNGTARHFHTEERLSTPHPYPSPQDCVEAAVCHVKDLENGQMREVELGWGKVLLVKDNGEFHALGHKCPHYGAPLVKGVLSRGRVRCPWHGACFNISTGDLEDFPGLDSLHKFQVKIEKEKVYVRASKQALQLQRRTKVMAKCISPSAGYSSSTNVLIVGAGAAGLVCAETLRQEGFSDRIVLCTLDRHLPYDRPKLSKSLDTQPEQLALRPKEFFRAYGIEVLTEAQ

SEQ ID NO: 5878 - protein, 129 aa, Homo sapiens
  Payload ID: 1286;
  Gene Symbol: AIFM3;
  Gene Name: apoptosis-inducing factor, mitochondrion-associated, 3;
  ENSP ID: ENSP00000402067
MGGCFSKPKPVELKIEVVLPEKERGKEELSASGKGSPRAYQGNGTARHFHTEERLSTPHPYPSPQDCVEAAVCHVKDLENGQMREVELGWGKVLLVKDNGEFHALGHKCPHYGAPLVKGVLSRGRVRCP

SEQ ID NO: 5879 - protein, 74 aa, Homo sapiens
  Payload ID: 1286;
  Gene Symbol: AIFM3;
  Gene Name: apoptosis-inducing factor, mitochondrion-associated, 3;
  ENSP ID: ENSP00000406989
MGGCFSKPKPVGRAAPGPTRAMARPATSTRRSACPPLTPTPALRIAWRLLSATSRTSRMARCGKWSWAGGRCCW

SEQ ID NO: 5880 - protein, 121 aa, Homo sapiens
  Payload ID: 1286;
  Gene Symbol: AIFM3;
  Gene Name: apoptosis-inducing factor, mitochondrion-associated, 3;
  ENSP ID: ENSP00000412973
MGGCFSKPKPVELKIEVVLPEKERGKEELSASGKGSPRAYQGNGTARHFHTEERLSTPHPYPSPQDCVEAAVCHVKDLENGQRSVPWSGALPLARRLLQHQHWGPGGLPWPGQSTQVPGED

SEQ ID NO: 5881 - protein, 138 aa, Homo sapiens; identical to SEQ ID NO: 5640
  Payload ID: 1287;
  Gene Symbol: APITD1;
  Gene Name: apoptosis-inducing, TAF9-like domain 1;
  Uniprot ID:  Q8N2Z9;
  ENSP ID: ENSP00000308583

SEQ ID NO: 5882 - protein, 78 aa, Homo sapiens
  Payload ID: 1287;
  Gene Symbol: APITD1;
  Gene Name: apoptosis-inducing, TAF9-like domain 1;
  ENSP ID: ENSP00000468629
MSSRRGSFLSTKLHCSSCLPCPLSFEKFKPSEKLQEHEAKGSSSLYCGLSLRGSCIGQRDAVQQTDHCGHFGADFPTV

SEQ ID NO: 5883 - protein, 49 aa, Homo sapiens; identical to SEQ ID NO: 5641
  Payload ID: 1287;
  Gene Symbol: APITD1;
  Gene Name: apoptosis-inducing, TAF9-like domain 1;
  ENSP ID: ENSP00000489524

SEQ ID NO: 5884 - protein, 1341 aa, Homo sapiens
  Payload ID: 1288;
  Gene Symbol: ACIN1;
  Gene Name: apoptotic chromatin condensation inducer 1;
  Uniprot ID:  Q9UKV3;
  ENSP ID: ENSP00000262710
MWRRKHPRTSGGTRGVLSGNRGVEYGSGRGHLGTFEGRWRKLPKMPEAVGTDPSTSRKMAELEEVTLDGKPLQALRVTDLKAALEQRGLAKSGQKSALVKRLKGALMLENLQKHSTPHAAFQPNSQIGEEMSQNSFIKQYLEKQQELLRQRLEREAREAAELEEASAESEDEMIHPEGVASLLPPDFQSSLERPELELSRHSPRKSSSISEEKGDSDDEKPRKGERRSSRVRQARAAKLSEGSQPAEEEEDQETPSRNLRVRADRNLKTEEEEEEEEEEEEDDEEEEGDDEGQKSREAPILKEFKEEGEEIPRVKPEEMMDERPKTRSQEQEVLERGGRFTRSQEEARKSHLARQQQEKEMKTTSPLEEEEREIKSSQGLKEKSKSPSPPRLTEDRKKASLVALPEQTASEEETPPPLLTKEASSPPPHPQLHSEEEIEPMEGPAPAVLIQLSPPNTDADTRELLVSQHTVQLVGGLSPLSSPSDTKAESPAEKVPEESVLPLVQKSTLADYSAQKDLEPESDRSAQPLPLKIEELALAKGITEECLKQPSLEQKEGRRASHTLLPSHRLKQSADSSSSRSSSSSSSSSRSRSRSPDSSGSRSHSPLRSKQRDVAQARTHANPRGRPKMGSRSTSESRSRSRSRSRSASSNSRKSLSPGVSRDSSTSYTETKDPSSGQEVATPPVPQLQVCEPKERTSTSSSSVQARRLSQPESAEKHVTQRLQPERGSPKKCEAEEAEPPAATQPQTSETQTSHLPESERIHHTVEEKEEVTMDTSENRPENDVPEPPMPIADQVSNDDRPEGSVEDEEKKESSLPKSFKRKISVVSATKGVPAGNSDTEGGQPGRKRRWGASTATTQKKPSISITTESLKSLIPDIKPLAGQEAVVDLHADDSRISEDETERNGDDGTHDKGLKICRTVTQVVPAEGQENGQREEEEEEKEPEAEPPVPPQVSVEVALPPPAEHEVKKVTLGDTLTRRSISQQKSGVSITIDDPVRTAQVPSPPRGKISNIVHISNLVRPFTLGQLKELLGRTGTLVEEAFWIDKIKSHCFVTYSTVEEAVATRTALHGVKWPQSNPKFLCADYAEQDELDYHRGLLVDRPSETKTEEQGIPRPLHPPPPPPVQPPQHPRAEQREQERAVREQWAEREREMERRERTRSEREWDRDKVREGPRSRSRSRDRRRKERAKSKEKKSEKKEKAQEEPPAKLLDDLFRKTKAAPCIYWLPLTDSQIVQKEAERAERAKEREKRRKEQEEEEQKEREKEAERERNRQLEREKRREHSRERDRERERERERDRGDRDRDRERDRERGRERDRRDTKRHSRSRSRSTPVRDRGGRR

SEQ ID NO: 5885 - protein, 614 aa, Homo sapiens
  Payload ID: 1288;
  Gene Symbol: ACIN1;
  Gene Name: apoptotic chromatin condensation inducer 1;
  Uniprot ID:  Q9UKV3;
  ENSP ID: ENSP00000345541
MSPADRCRSANTIEPATTSSLALFLLLQRDQSSRTRGLPEEKEEVTMDTSENRPENDVPEPPMPIADQVSNDDRPEGSVEDEEKKESSLPKSFKRKISVVSATKGVPAGNSDTEGGQPGRKRRWGASTATTQKKPSISITTESLKSLIPDIKPLAGQEAVVDLHADDSRISEDETERNGDDGTHDKGLKICRTVTQVVPAEGQENGQREEEEEEKEPEAEPPVPPQVSVEVALPPPAEHEVKKVTLGDTLTRRSISQQKSGVSITIDDPVRTAQVPSPPRGKISNIVHISNLVRPFTLGQLKELLGRTGTLVEEAFWIDKIKSHCFVTYSTVEEAVATRTALHGVKWPQSNPKFLCADYAEQDELDYHRGLLVDRPSETKTEEQGIPRPLHPPPPPPVQPPQHPRAEQREQERAVREQWAEREREMERRERTRSEREWDRDKVREGPRSRSRSRDRRRKERAKSKEKKSEKKEKAQEEPPAKLLDDLFRKTKAAPCIYWLPLTDSQIVQKEAERAERAKEREKRRKEQEEEEQKEREKEAERERNRQLEREKRREHSRERDRERERERERDRGDRDRDRERDRERGRERDRRDTKRHSRSRSRSTPVRDRGGRR

SEQ ID NO: 5886 - protein, 583 aa, Homo sapiens
  Payload ID: 1288;
  Gene Symbol: ACIN1;
  Gene Name: apoptotic chromatin condensation inducer 1;
  Uniprot ID:  Q9UKV3;
  ENSP ID: ENSP00000350073
MLSESKEGEEKEEVTMDTSENRPENDVPEPPMPIADQVSNDDRPEGSVEDEEKKESSLPKSFKRKISVVSATKGVPAGNSDTEGGQPGRKRRWGASTATTQKKPSISITTESLKSLIPDIKPLAGQEAVVDLHADDSRISEDETERNGDDGTHDKGLKICRTVTQVVPAEGQENGQREEEEEEKEPEAEPPVPPQVSVEVALPPPAEHEVKKVTLGDTLTRRSISQQKSGVSITIDDPVRTAQVPSPPRGKISNIVHISNLVRPFTLGQLKELLGRTGTLVEEAFWIDKIKSHCFVTYSTVEEAVATRTALHGVKWPQSNPKFLCADYAEQDELDYHRGLLVDRPSETKTEEQGIPRPLHPPPPPPVQPPQHPRAEQREQERAVREQWAEREREMERRERTRSEREWDRDKVREGPRSRSRSRDRRRKERAKSKEKKSEKKEKAQEEPPAKLLDDLFRKTKAAPCIYWLPLTDSQIVQKEAERAERAKEREKRRKEQEEEEQKEREKEAERERNRQLEREKRREHSRERDRERERERERDRGDRDRDRERDRERGRERDRRDTKRHSRSRSRSTPVRDRGGRR

SEQ ID NO: 5887 - protein, 583 aa, Homo sapiens; identical to SEQ ID NO: 5886
  Payload ID: 1288;
  Gene Symbol: ACIN1;
  Gene Name: apoptotic chromatin condensation inducer 1;
  Uniprot ID:  Q9UKV3;
  ENSP ID: ENSP00000380502

SEQ ID NO: 5888 - protein, 1301 aa, Homo sapiens
  Payload ID: 1288;
  Gene Symbol: ACIN1;
  Gene Name: apoptotic chromatin condensation inducer 1;
  ENSP ID: ENSP00000405677
MWRRKHPRTSGGTRGVLSGNRGVEYGSGRGHLGTFEGRWRKLPKMPEAVGTDPSTSRKMAELEEVTLDGKPLQALRVTDLKAALEQRGLAKSGQKSALVKRLKGALMLENLQKHSTPHAAFQPNSQIGEEMSQNSFIKQYLEKQQELLRQRLEREAREAAELEGKSSSISEEKGDSDDEKPRKGERRSSRVRQARAAKLSEGSQPAEEEEDQETPSRNLRVRADRNLKTEEEEEEEEEEEEDDEEEEGDDEGQKSREAPILKEFKEEGEEIPRVKPEEMMDERPKTRSQEQEVLERGGRFTRSQEEARKSHLARQQQEKEMKTTSPLEEEEREIKSSQGLKEKSKSPSPPRLTEDRKKASLVALPEQTASEEETPPPLLTKEASSPPPHPQLHSEEEIEPMEGPAPAVLIQLSPPNTDADTRELLVSQHTVQLVGGLSPLSSPSDTKAESPAEKVPEESVLPLVQKSTLADYSAQKDLEPESDRSAQPLPLKIEELALAKGITEECLKQPSLEQKEGRRASHTLLPSHRLKQSADSSSSRSSSSSSSSSRSRSRSPDSSGSRSHSPLRSKQRDVAQARTHANPRGRPKMGSRSTSESRSRSRSRSRSASSNSRKSLSPGVSRDSSTSYTETKDPSSGQEVATPPVPQLQVCEPKERTSTSSSSVQARRLSQPESAEKHVTQRLQPERGSPKKCEAEEAEPPAATQPQTSETQTSHLPESERIHHTVEEKEEVTMDTSENRPENDVPEPPMPIADQVSNDDRPEGSVEDEEKKESSLPKSFKRKISVVSATKGVPAGNSDTEGGQPGRKRRWGASTATTQKKPSISITTESLKSLIPDIKPLAGQEAVVDLHADDSRISEDETERNGDDGTHDKGLKICRTVTQVVPAEGQENGQREEEEEEKEPEAEPPVPPQVSVEVALPPPAEHEVKKVTLGDTLTRRSISQQKSGVSITIDDPVRTAQVPSPPRGKISNIVHISNLVRPFTLGQLKELLGRTGTLVEEAFWIDKIKSHCFVTYSTVEEAVATRTALHGVKWPQSNPKFLCADYAEQDELDYHRGLLVDRPSETKTEEQGIPRPLHPPPPPPVQPPQHPRAEQREQERAVREQWAEREREMERRERTRSEREWDRDKVREGPRSRSRSRDRRRKERAKSKEKKSEKKEKAQEEPPAKLLDDLFRKTKAAPCIYWLPLTDSQIVQKEAERAERAKEREKRRKEQEEEEQKEREKEAERERNRQLEREKRREHSRERDRERERERERDRGDRDRDRERDRERGRERDRRDTKRHSRSRSRSTPVRDRGGRR

SEQ ID NO: 5889 - protein, 582 aa, Homo sapiens
  Payload ID: 1288;
  Gene Symbol: ACIN1;
  Gene Name: apoptotic chromatin condensation inducer 1;
  ENSP ID: ENSP00000451138
MLSESKEGEEKEEVTMDTSENRPENDVPEPPMPIADQVSNDDRPEGSVEDEEKKESSLPKSFKRKISVVSTKGVPAGNSDTEGGQPGRKRRWGASTATTQKKPSISITTESLKSLIPDIKPLAGQEAVVDLHADDSRISEDETERNGDDGTHDKGLKICRTVTQVVPAEGQENGQREEEEEEKEPEAEPPVPPQVSVEVALPPPAEHEVKKVTLGDTLTRRSISQQKSGVSITIDDPVRTAQVPSPPRGKISNIVHISNLVRPFTLGQLKELLGRTGTLVEEAFWIDKIKSHCFVTYSTVEEAVATRTALHGVKWPQSNPKFLCADYAEQDELDYHRGLLVDRPSETKTEEQGIPRPLHPPPPPPVQPPQHPRAEQREQERAVREQWAEREREMERRERTRSEREWDRDKVREGPRSRSRSRDRRRKERAKSKEKKSEKKEKAQEEPPAKLLDDLFRKTKAAPCIYWLPLTDSQIVQKEAERAERAKEREKRRKEQEEEEQKEREKEAERERNRQLEREKRREHSRERDRERERERERDRGDRDRDRERDRERGRERDRRDTKRHSRSRSRSTPVRDRGGRR

SEQ ID NO: 5890 - protein, 1328 aa, Homo sapiens
  Payload ID: 1288;
  Gene Symbol: ACIN1;
  Gene Name: apoptotic chromatin condensation inducer 1;
  Uniprot ID:  Q9UKV3;
  ENSP ID: ENSP00000451328
MWRRKHPRTSGGTRGVLSGNRGVEYGSGRGHLGTFEGRWRKLPKMPEAVGTDPSTSRKMAELEEVTLDGKPLQALRVTDLKAALEQRGLAKSGQKSALVKRLKGALMLENLQKHSTPHAAFQPNSQIGEEMSQNSFIKQYLEKQQELLRQRLEREAREAAELEEASAESEDEMIHPEGVASLLPPDFQSSLERPELELSRHSPRKSSSISEEKGDSDDEKPRKGERRSSRVRQARAAKLSEGSQPAEEEEDQETPSRNLRVRADRNLKTEEEEEEEEEEEEDDEEEEGDDEGQKSREAPILKEFKEEGEEIPRVKPEEMMDERPKTRSQEQEVLERGGRFTRSQEEARKSHLARQQQEKEMKTTSPLEEEEREIKSSQGLKEKSKSPSPPRLTEDRKKASLVALPEQTASEEETPPPLLTKEASSPPPHPQLHSEEEIEPMEGPAPAVLIQLSPPNTDADTRELLVSQHTVQLVGGLSPLSSPSDTKAESPAEKVPEESVLPLVQKSTLADYSAQKDLEPESDRSAQPLPLKIEELALAKGITEECLKQPSLEQKEGRRASHTLLPSHRLKQSADSSSSRSSSSSSSSSRSRSRSPDSSGSRSHSPLRSKQRDVAQARTHANPRGRPKMGSRSTSESRSRSRSRSRSASSNSRKSLSPGVSRDSSTSYTETKDPSSGQEVATPPVPQLQVCEPKERTSTSSSSVQARRLSQPESAEKHVTQRLQPERGSPKKCEAEEAEPPAATQPQTSETQTSHLPESERIHHTVEEKEEVTMDTSENRPENDVPEPPMPIADQVSNDDRPEGSVEDEEKKESSLPKSFKRKISVVSTKGVPAGNSDTEGGQPGRKRRWGASTATTQKKPSISITTESLKEAVVDLHADDSRISEDETERNGDDGTHDKGLKICRTVTQVVPAEGQENGQREEEEEEKEPEAEPPVPPQVSVEVALPPPAEHEVKKVTLGDTLTRRSISQQKSGVSITIDDPVRTAQVPSPPRGKISNIVHISNLVRPFTLGQLKELLGRTGTLVEEAFWIDKIKSHCFVTYSTVEEAVATRTALHGVKWPQSNPKFLCADYAEQDELDYHRGLLVDRPSETKTEEQGIPRPLHPPPPPPVQPPQHPRAEQREQERAVREQWAEREREMERRERTRSEREWDRDKVREGPRSRSRSRDRRRKERAKSKEKKSEKKEKAQEEPPAKLLDDLFRKTKAAPCIYWLPLTDSQIVQKEAERAERAKEREKRRKEQEEEEQKEREKEAERERNRQLEREKRREHSRERDRERERERERDRGDRDRDRERDRERGRERDRRDTKRHSRSRSRSTPVRDRGGRR

SEQ ID NO: 5891 - protein, 194 aa, Homo sapiens
  Payload ID: 1288;
  Gene Symbol: ACIN1;
  Gene Name: apoptotic chromatin condensation inducer 1;
  ENSP ID: ENSP00000451410
MLSESKEGEEKEEVTMDTSENRPENDVPEPPMPIADQVSNDDRPEGSVEDEEKKESSLPKSFKRKISVVSATKGVPAGNSDTEGGQPGRKRRWGASTATTQKKPSISITTESLKEAVVDLHADDSRISEDETERNGDDGTHDKGLKICRTVTQVVPAEGQENGQREEEEEEKEPEAEPPVPPQVSVEVALPPPA

SEQ ID NO: 5892 - protein, 1283 aa, Homo sapiens
  Payload ID: 1288;
  Gene Symbol: ACIN1;
  Gene Name: apoptotic chromatin condensation inducer 1;
  ENSP ID: ENSP00000474349
MAELEEVTLDGKPLQALRVTDLKAALEQRGLAKSGQKSALVKRLKGALMLENLQKHSTPHAAFQPNSQIGEEMSQNSFIKQYLEKQQELLRQRLEREAREAAELEEASAESEDEMIHPEGVASLLPPDFQSSLERPELELSRHSPRKSSSISEEKGDSDDEKPRKGERRSSRVRQARAAKLSEGSQPAEEEEDQETPSRNLRVRADRNLKTEEEEEEEEEEEEDDEEEEGDDEGQKSREAPILKEFKEEGEEIPRVKPEEMMDERPKTRSQEQEVLERGGRFTRSQEEARKSHLARQQQEKEMKTTSPLEEEEREIKSSQGLKEKSKSPSPPRLTEDRKKASLVALPEQTASEEETPPPLLTKEASSPPPHPQLHSEEEIEPMEGPAPAVLIQLSPPNTDADTRELLVSQHTVQLVGGLSPLSSPSDTKAESPAEKVPEESVLPLVQKSTLADYSAQKDLEPESDRSAQPLPLKIEELALAKGITEECLKQPSLEQKEGRRASHTLLPSHRLKQSADSSSSRSSSSSSSSSRSRSRSPDSSGSRSHSPLRSKQRDVAQARTHANPRGRPKMGSRSTSESRSRSRSRSRSASSNSRKSLSPGVSRDSSTSYTETKDPSSGQEVATPPVPQLQVCEPKERTSTSSSSVQARRLSQPESAEKHVTQRLQPERGSPKKCEAEEAEPPAATQPQTSETQTSHLPESERIHHTVEEKEEVTMDTSENRPENDVPEPPMPIADQVSNDDRPEGSVEDEEKKESSLPKSFKRKISVVSATKGVPAGNSDTEGGQPGRKRRWGASTATTQKKPSISITTESLKSLIPDIKPLAGQEAVVDLHADDSRISEDETERNGDDGTHDKGLKICRTVTQVVPAEGQENGQREEEEEEKEPEAEPPVPPQVSVEVALPPPAEHEVKKVTLGDTLTRRSISQQKSGVSITIDDPVRTAQVPSPPRGKISNIVHISNLVRPFTLGQLKELLGRTGTLVEEAFWIDKIKSHCFVTYSTVEEAVATRTALHGVKWPQSNPKFLCADYAEQDELDYHRGLLVDRPSETKTEEQGIPRPLHPPPPPPVQPPQHPRAEQREQERAVREQWAEREREMERRERTRSEREWDRDKVREGPRSRSRSRDRRRKERAKSKEKKSEKKEKAQEEPPAKLLDDLFRKTKAAPCIYWLPLTDSQIVQKEAERAERAKEREKRRKEQEEEEQKEREKEAERERNRQLEREKRREHSRERDRERERERERDRGDRDRDRERDRERGRERDRRDTKRHSRSRSRSTPVRDRGGRR

SEQ ID NO: 5893 - protein, 82 aa, Homo sapiens
  Payload ID: 1288;
  Gene Symbol: ACIN1;
  Gene Name: apoptotic chromatin condensation inducer 1;
  ENSP ID: ENSP00000481955
QPESAEKHVTQRLQPERGSPKKCEAEEAEPPAATQPQTSETQTSHLPESERIHHTVFFSGHSHASPGHMKLGVIEFPVPPLQ

SEQ ID NO: 5894 - protein, 36 aa, Homo sapiens
  Payload ID: 1288;
  Gene Symbol: ACIN1;
  Gene Name: apoptotic chromatin condensation inducer 1;
  ENSP ID: ENSP00000483298
  MOD_RES (1)..(1): Any amino acid
XNDDRPEGSVEDEEKKEYLMYGNPPVKYNPAQLANR

SEQ ID NO: 5895 - protein, 338 aa, Homo sapiens
  Payload ID: 1289;
  Gene Symbol: APAF1;
  Gene Name: apoptotic peptidase activating  factor 1;
  Uniprot ID:  O14727;
  ENSP ID: ENSP00000334558
MDAKARNCLLQHREALEKDIKTSYIMDHMISDGFLTISEEEKVRNEPTQQQRAAMLIKMILKKDNDSYVSFYNALLHEGYKDLAALLHDGIPVVSSSSGKDSVSGITSYVRTVLCEGGVPQRPVVFVTRKKLVNAIQQKLSKLKGEPGWVTIHGMAGCGKSVLAAEAVRDHSLLEGCFPGGVHWVSVGKQDKSGLLMKLQNLCTRLDQDESFSQRLPLNIEEAKDRLRILMLRKHPRSLLILDDVWDSWVLKAFDSQCQILLTTRDKSVTDSVMGPKYVVPVESSLGKEKGLEILSLFVNMKKADLPEQAHSIIKECKVVERCHWGILTDLLHKWNQS

SEQ ID NO: 5896 - protein, 1205 aa, Homo sapiens
  Payload ID: 1289;
  Gene Symbol: APAF1;
  Gene Name: apoptotic peptidase activating  factor 1;
  Uniprot ID:  O14727;
  ENSP ID: ENSP00000349862
MDAKARNCLLQHREALEKDIKTSYIMDHMISDGFLTISEEEKVRNEPTQQQRAAMLIKMILKKDNDSYVSFYNALLHEGYKDLAALLHDGIPVVSSSSGKDSVSGITSYVRTVLCEGGVPQRPVVFVTRKKLVNAIQQKLSKLKGEPGWVTIHGMAGCGKSVLAAEAVRDHSLLEGCFPGGVHWVSVGKQDKSGLLMKLQNLCTRLDQDESFSQRLPLNIEEAKDRLRILMLRKHPRSLLILDDVWDSWVLKAFDSQCQILLTTRDKSVTDSVMGPKYVVPVESSLGKEKGLEILSLFVNMKKADLPEQAHSIIKECKGSPLVVSLIGALLRDFPNRWEYYLKQLQNKQFKRIRKSSSYDYEALDEAMSISVEMLREDIKDYYTDLSILQKDVKVPTKVLCILWDMETEEVEDILQEFVNKSLLFCDRNGKSFRYYLHDLQVDFLTEKNCSQLQDLHKKIITQFQRYHQPHTLSPDQEDCMYWYNFLAYHMASAKMHKELCALMFSLDWIKAKTELVGPAHLIHEFVEYRHILDEKDCAVSENFQEFLSLNGHLLGRQPFPNIVQLGLCEPETSEVYQQAKLQAKQEVDNGMLYLEWINKKNITNLSRLVVRPHTDAVYHACFSEDGQRIASCGADKTLQVFKAETGEKLLEIKAHEDEVLCCAFSTDDRFIATCSVDKKVKIWNSMTGELVHTYDEHSEQVNCCHFTNSSHHLLLATGSSDCFLKLWDLNQKECRNTMFGHTNSVNHCRFSPDDKLLASCSADGTLKLWDATSANERKSINVKQFFLNLEDPQEDMEVIVKCCSWSADGARIMVAAKNKIFLWNTDSRSKVADCRGHLSWVHGVMFSPDGSSFLTSSDDQTIRLWETKKVCKNSAVMLKQEVDVVFQENEVMVLAVDHIRRLQLINGRTGQIDYLTEAQVSCCCLSPHLQYIAFGDENGAIEILELVNNRIFQSRFQHKKTVWHIQFTADEKTLISSSDDAEIQVWNWQLDKCIFLRGHQETVKDFRLLKNSRLLSWSFDGTVKVWNIITGNKEKDFVCHQGTVLSCDISHDATKFSSTSADKTAKIWSFDLLLPLHELRGHNGCVRCSAFSVDSTLLATGDDNGEIRIWNVSNGELLHLCAPLSEEGAATHGGWVTDLCFSPDGKMLISAGGYIKWWNVVTGESSQTFYTNGTNLKKIHVSPDFKTYVTVDNLGILYILQTLE

SEQ ID NO: 5897 - protein, 1194 aa, Homo sapiens
  Payload ID: 1289;
  Gene Symbol: APAF1;
  Gene Name: apoptotic peptidase activating  factor 1;
  Uniprot ID:  O14727;
  ENSP ID: ENSP00000353059
MDAKARNCLLQHREALEKDIKTSYIMDHMISDGFLTISEEEKVRNEPTQQQRAAMLIKMILKKDNDSYVSFYNALLHEGYKDLAALLHDGIPVVSSSSVRTVLCEGGVPQRPVVFVTRKKLVNAIQQKLSKLKGEPGWVTIHGMAGCGKSVLAAEAVRDHSLLEGCFPGGVHWVSVGKQDKSGLLMKLQNLCTRLDQDESFSQRLPLNIEEAKDRLRILMLRKHPRSLLILDDVWDSWVLKAFDSQCQILLTTRDKSVTDSVMGPKYVVPVESSLGKEKGLEILSLFVNMKKADLPEQAHSIIKECKGSPLVVSLIGALLRDFPNRWEYYLKQLQNKQFKRIRKSSSYDYEALDEAMSISVEMLREDIKDYYTDLSILQKDVKVPTKVLCILWDMETEEVEDILQEFVNKSLLFCDRNGKSFRYYLHDLQVDFLTEKNCSQLQDLHKKIITQFQRYHQPHTLSPDQEDCMYWYNFLAYHMASAKMHKELCALMFSLDWIKAKTELVGPAHLIHEFVEYRHILDEKDCAVSENFQEFLSLNGHLLGRQPFPNIVQLGLCEPETSEVYQQAKLQAKQEVDNGMLYLEWINKKNITNLSRLVVRPHTDAVYHACFSEDGQRIASCGADKTLQVFKAETGEKLLEIKAHEDEVLCCAFSTDDRFIATCSVDKKVKIWNSMTGELVHTYDEHSEQVNCCHFTNSSHHLLLATGSSDCFLKLWDLNQKECRNTMFGHTNSVNHCRFSPDDKLLASCSADGTLKLWDATSANERKSINVKQFFLNLEDPQEDMEVIVKCCSWSADGARIMVAAKNKIFLWNTDSRSKVADCRGHLSWVHGVMFSPDGSSFLTSSDDQTIRLWETKKVCKNSAVMLKQEVDVVFQENEVMVLAVDHIRRLQLINGRTGQIDYLTEAQVSCCCLSPHLQYIAFGDENGAIEILELVNNRIFQSRFQHKKTVWHIQFTADEKTLISSSDDAEIQVWNWQLDKCIFLRGHQETVKDFRLLKNSRLLSWSFDGTVKVWNIITGNKEKDFVCHQGTVLSCDISHDATKFSSTSADKTAKIWSFDLLLPLHELRGHNGCVRCSAFSVDSTLLATGDDNGEIRIWNVSNGELLHLCAPLSEEGAATHGGWVTDLCFSPDGKMLISAGGYIKWWNVVTGESSQTFYTNGTNLKKIHVSPDFKTYVTVDNLGILYILQTLE

SEQ ID NO: 5898 - protein, 1163 aa, Homo sapiens
  Payload ID: 1289;
  Gene Symbol: APAF1;
  Gene Name: apoptotic peptidase activating  factor 1;
  ENSP ID: ENSP00000448161
MDAKARNCLLQHREALEKDIKTSYIMDHMISDGFLTISEEEKVRNEPTQQQRAAMLIKMILKKDNDSYVSFYNALLHEGYKDLAALLHDGIPVVSSSSGKDSVSGITSYVRTVLCEGGVPQRPVVFVTRKKLVNAIQQKLSKLKGEPGWVTIHGMAGCGKSVLAAEAVRDHSLLEGCFPGGVHWVSVGKQDKSGLLMKLQNLCTRLDQDESFSQRLPLNIEEAKDRLRILMLRKHPRSLLILDDVWDSWVLKAFDSQCQILLTTRDKSVTDSVMGPKYVVPVESSLGKEKGLEILSLFVNMKKADLPEQAHSIIKECKGSPLVVSLIGALLRDFPNRWEYYLKQLQNKQFKRIRKSSSYDYEALDEAMSISVEMLREDIKDYYTDLSILQKDVKVPTKVLCILWDMETEEVEDILQEFVNKSLLFCDRNGKSFRYYLHDLQVDFLTEKNCSQLQDLHKKIITQFQRYHQPHTLSPDQEDCMYWYNFLAYHMASAKMHKELCALMFSLDWIKAKTELVGPAHLIHEFVEYRHILDEKDCAVSENFQEFLSLNGHLLGRQPFPNIVQLGLCEPETSEVYQQAKLQAKQEVDNGMLYLEWINKKNITNLSRLVVRPHTDAVYHACFSEDGQRIASCGADKTLQVFKAETGEKLLEIKAHEDEVLCCAFSTDDRFIATCSVDKKVKIWNSMTGELVHTYDEHSEQVNCCHFTNSSHHLLLATGSSDCFLKLWDLNQKECRNTMFGHTNSVNHCRFSPDDKLLASCSADGTLKLWDATSANERKSINVKQFFLNLEDPQEDMEVIVKCCSWSADGARIMVAAKNKIFLWNTDSRSKVADCRGHLSWVHGVMFSPDGSSFLTSSDDQTIRLWETKKVCKNSAVMLKQEVDVVFQENEVMVLAVDHIRRLQLINGRTGQIDYLTEAQVSCCCLSPHLQYIAFGDENGAIEILELVNNRIFQSRFQHKKTVWHIQFTADEKTLISSSDDAEIQVWNWQLDKCIFLRGHQETVKDFRLLKNSRLLSWSFDGTVKVWNIITGNKEKDFVCHQGTVLSCDISHDATKFSSTSADKTAKIWNVSNGELLHLCAPLSEEGAATHGGWVTDLCFSPDGKMLISAGGYIKWWNVVTGESSQTFYTNGTNLKKIHVSPDFKTYVTVDNLGILYILQTLE

SEQ ID NO: 5899 - protein, 1248 aa, Homo sapiens
  Payload ID: 1289;
  Gene Symbol: APAF1;
  Gene Name: apoptotic peptidase activating  factor 1;
  Uniprot ID:  O14727;
  ENSP ID: ENSP00000448165
MDAKARNCLLQHREALEKDIKTSYIMDHMISDGFLTISEEEKVRNEPTQQQRAAMLIKMILKKDNDSYVSFYNALLHEGYKDLAALLHDGIPVVSSSSGKDSVSGITSYVRTVLCEGGVPQRPVVFVTRKKLVNAIQQKLSKLKGEPGWVTIHGMAGCGKSVLAAEAVRDHSLLEGCFPGGVHWVSVGKQDKSGLLMKLQNLCTRLDQDESFSQRLPLNIEEAKDRLRILMLRKHPRSLLILDDVWDSWVLKAFDSQCQILLTTRDKSVTDSVMGPKYVVPVESSLGKEKGLEILSLFVNMKKADLPEQAHSIIKECKGSPLVVSLIGALLRDFPNRWEYYLKQLQNKQFKRIRKSSSYDYEALDEAMSISVEMLREDIKDYYTDLSILQKDVKVPTKVLCILWDMETEEVEDILQEFVNKSLLFCDRNGKSFRYYLHDLQVDFLTEKNCSQLQDLHKKIITQFQRYHQPHTLSPDQEDCMYWYNFLAYHMASAKMHKELCALMFSLDWIKAKTELVGPAHLIHEFVEYRHILDEKDCAVSENFQEFLSLNGHLLGRQPFPNIVQLGLCEPETSEVYQQAKLQAKQEVDNGMLYLEWINKKNITNLSRLVVRPHTDAVYHACFSEDGQRIASCGADKTLQVFKAETGEKLLEIKAHEDEVLCCAFSTDDRFIATCSVDKKVKIWNSMTGELVHTYDEHSEQVNCCHFTNSSHHLLLATGSSDCFLKLWDLNQKECRNTMFGHTNSVNHCRFSPDDKLLASCSADGTLKLWDATSANERKSINVKQFFLNLEDPQEDMEVIVKCCSWSADGARIMVAAKNKIFLFDIHTSGLLGEIHTGHHSTIQYCDFSPQNHLAVVALSQYCVELWNTDSRSKVADCRGHLSWVHGVMFSPDGSSFLTSSDDQTIRLWETKKVCKNSAVMLKQEVDVVFQENEVMVLAVDHIRRLQLINGRTGQIDYLTEAQVSCCCLSPHLQYIAFGDENGAIEILELVNNRIFQSRFQHKKTVWHIQFTADEKTLISSSDDAEIQVWNWQLDKCIFLRGHQETVKDFRLLKNSRLLSWSFDGTVKVWNIITGNKEKDFVCHQGTVLSCDISHDATKFSSTSADKTAKIWSFDLLLPLHELRGHNGCVRCSAFSVDSTLLATGDDNGEIRIWNVSNGELLHLCAPLSEEGAATHGGWVTDLCFSPDGKMLISAGGYIKWWNVVTGESSQTFYTNGTNLKKIHVSPDFKTYVTVDNLGILYILQTLE

SEQ ID NO: 5900 - protein, 1237 aa, Homo sapiens
  Payload ID: 1289;
  Gene Symbol: APAF1;
  Gene Name: apoptotic peptidase activating  factor 1;
  Uniprot ID:  O14727;
  ENSP ID: ENSP00000448449
MDAKARNCLLQHREALEKDIKTSYIMDHMISDGFLTISEEEKVRNEPTQQQRAAMLIKMILKKDNDSYVSFYNALLHEGYKDLAALLHDGIPVVSSSSVRTVLCEGGVPQRPVVFVTRKKLVNAIQQKLSKLKGEPGWVTIHGMAGCGKSVLAAEAVRDHSLLEGCFPGGVHWVSVGKQDKSGLLMKLQNLCTRLDQDESFSQRLPLNIEEAKDRLRILMLRKHPRSLLILDDVWDSWVLKAFDSQCQILLTTRDKSVTDSVMGPKYVVPVESSLGKEKGLEILSLFVNMKKADLPEQAHSIIKECKGSPLVVSLIGALLRDFPNRWEYYLKQLQNKQFKRIRKSSSYDYEALDEAMSISVEMLREDIKDYYTDLSILQKDVKVPTKVLCILWDMETEEVEDILQEFVNKSLLFCDRNGKSFRYYLHDLQVDFLTEKNCSQLQDLHKKIITQFQRYHQPHTLSPDQEDCMYWYNFLAYHMASAKMHKELCALMFSLDWIKAKTELVGPAHLIHEFVEYRHILDEKDCAVSENFQEFLSLNGHLLGRQPFPNIVQLGLCEPETSEVYQQAKLQAKQEVDNGMLYLEWINKKNITNLSRLVVRPHTDAVYHACFSEDGQRIASCGADKTLQVFKAETGEKLLEIKAHEDEVLCCAFSTDDRFIATCSVDKKVKIWNSMTGELVHTYDEHSEQVNCCHFTNSSHHLLLATGSSDCFLKLWDLNQKECRNTMFGHTNSVNHCRFSPDDKLLASCSADGTLKLWDATSANERKSINVKQFFLNLEDPQEDMEVIVKCCSWSADGARIMVAAKNKIFLFDIHTSGLLGEIHTGHHSTIQYCDFSPQNHLAVVALSQYCVELWNTDSRSKVADCRGHLSWVHGVMFSPDGSSFLTSSDDQTIRLWETKKVCKNSAVMLKQEVDVVFQENEVMVLAVDHIRRLQLINGRTGQIDYLTEAQVSCCCLSPHLQYIAFGDENGAIEILELVNNRIFQSRFQHKKTVWHIQFTADEKTLISSSDDAEIQVWNWQLDKCIFLRGHQETVKDFRLLKNSRLLSWSFDGTVKVWNIITGNKEKDFVCHQGTVLSCDISHDATKFSSTSADKTAKIWSFDLLLPLHELRGHNGCVRCSAFSVDSTLLATGDDNGEIRIWNVSNGELLHLCAPLSEEGAATHGGWVTDLCFSPDGKMLISAGGYIKWWNVVTGESSQTFYTNGTNLKKIHVSPDFKTYVTVDNLGILYILQTLE

SEQ ID NO: 5901 - protein, 338 aa, Homo sapiens; identical to SEQ ID NO: 5895
  Payload ID: 1289;
  Gene Symbol: APAF1;
  Gene Name: apoptotic peptidase activating  factor 1;
  Uniprot ID:  O14727;
  ENSP ID: ENSP00000448826

SEQ ID NO: 5902 - protein, 1205 aa, Homo sapiens; identical to SEQ ID NO: 5896
  Payload ID: 1289;
  Gene Symbol: APAF1;
  Gene Name: apoptotic peptidase activating  factor 1;
  Uniprot ID:  O14727;
  ENSP ID: ENSP00000449791

SEQ ID NO: 5903 - protein, 130 aa, Homo sapiens
  Payload ID: 1289;
  Gene Symbol: APAF1;
  Gene Name: apoptotic peptidase activating  factor 1;
  ENSP ID: ENSP00000450175
MDAKARNCLLQHREALEKDIKTSYIMDHMISDGFLTISEEEKVRNEPTQQQRAAMLIKMILKKDNDSYVSFYNALLHEGYKDLAALLHDGIPVVSSSSGKDSVSGITSYGLYPLYLLSLCYQNCFGFVLL

SEQ ID NO: 5904 - protein, 288 aa, Homo sapiens
  Payload ID: 1290;
  Gene Symbol: APTX;
  Gene Name: aprataxin;
  Uniprot ID:  Q7Z2E3;
  ENSP ID: ENSP00000311547
MMRVCWLVRQDSRHQRIRLPHLEAVVIGRGPETKITDKKCSRQQEFEEEAKNPGLETHRKRKRSGNSDSIERDAAQEAEAGTGLEPGSNSGQCSVPLKKGKDAPIKKESLGHWSQGLKISMQDPKMQVYKDEQVVVIKDKYPKARYHWLVLPWTSISSLKAVAREHLELLKHMHTVGEKVIVDFAGSSKLRFRLGYHAIPSMSHVHLHVISQDFDSPCLKNKKHWNSFNTEYFLESQAVIEMVQEAGRVTVRDGMPELLKLPLRCHECQQLLPSIPQLKEHLRKHWTQ

SEQ ID NO: 5905 - protein, 198 aa, Homo sapiens
  Payload ID: 1290;
  Gene Symbol: APTX;
  Gene Name: aprataxin;
  ENSP ID: ENSP00000369140
MSNVNLSVSDFWRVMMRVCWLVRQDSRHQRIRLPHLEAVVIGRGPETKITDKKCSRQQVQLKAECNKGYVKVKQVGVNPTSIDSVVIGKDQEVKLQPGQVLHMESLGHWSQGLKISMQDPKMQVYKDEQVVVIKDKYPKARYHWLVLPWTSISSLKAVAREHLELLKHMHTVGEKVIVDFAGSSKLRFRLGYHAIPSM

SEQ ID NO: 5906 - protein, 336 aa, Homo sapiens
  Payload ID: 1290;
  Gene Symbol: APTX;
  Gene Name: aprataxin;
  ENSP ID: ENSP00000369141
MSNVNLSVSDFWRVMMRVCWLVRQDSRHQRIRLPHLEAVVIGRGPETKITDKKCSRQQVQLKAECNKGYVKVKQVGVNPTSIDSVVIGKDQEVKLQPGQVLHMVNELYPYIVEFEEEAKNPGLETHRKRKRSGNSDSIERDAAQEAEAGTGLEPGSNSGQCSVPLKKGKDAPIKKVYKDEQVVVIKDKYPKARYHWLVLPWTSISSLKAVAREHLELLKHMHTVGEKVIVDFAGSSKLRFRLGYHAIPSMSHVHLHVISQDFDSPCLKNKKHWNSFNTEYFLESQAVIEMVQEAGRVTVRDGMPELLKLPLRCHECQQLLPSIPQLKEHLRKHWTQ

SEQ ID NO: 5907 - protein, 342 aa, Homo sapiens
  Payload ID: 1290;
  Gene Symbol: APTX;
  Gene Name: aprataxin;
  Uniprot ID:  Q7Z2E3;
  ENSP ID: ENSP00000369145
MMRVCWLVRQDSRHQRIRLPHLEAVVIGRGPETKITDKKCSRQQVQLKAECNKGYVKVKQVGVNPTSIDSVVIGKDQEVKLQPGQVLHMVNELYPYIVEFEEEAKNPGLETHRKRKRSGNSDSIERDAAQEAEAGTGLEPGSNSGQCSVPLKKGKDAPIKKESLGHWSQGLKISMQDPKMQVYKDEQVVVIKDKYPKARYHWLVLPWTSISSLKAVAREHLELLKHMHTVGEKVIVDFAGSSKLRFRLGYHAIPSMSHVHLHVISQDFDSPCLKNKKHWNSFNTEYFLESQAVIEMVQEAGRVTVRDGMPELLKLPLRCHECQQLLPSIPQLKEHLRKHWTQ

SEQ ID NO: 5908 - protein, 356 aa, Homo sapiens
  Payload ID: 1290;
  Gene Symbol: APTX;
  Gene Name: aprataxin;
  Uniprot ID:  Q7Z2E3;
  ENSP ID: ENSP00000369147
MSNVNLSVSDFWRVMMRVCWLVRQDSRHQRIRLPHLEAVVIGRGPETKITDKKCSRQQVQLKAECNKGYVKVKQVGVNPTSIDSVVIGKDQEVKLQPGQVLHMVNELYPYIVEFEEEAKNPGLETHRKRKRSGNSDSIERDAAQEAEAGTGLEPGSNSGQCSVPLKKGKDAPIKKESLGHWSQGLKISMQDPKMQVYKDEQVVVIKDKYPKARYHWLVLPWTSISSLKAVAREHLELLKHMHTVGEKVIVDFAGSSKLRFRLGYHAIPSMSHVHLHVISQDFDSPCLKNKKHWNSFNTEYFLESQAVIEMVQEAGRVTVRDGMPELLKLPLRCHECQQLLPSIPQLKEHLRKHWTQ

SEQ ID NO: 5909 - protein, 306 aa, Homo sapiens
  Payload ID: 1290;
  Gene Symbol: APTX;
  Gene Name: aprataxin;
  Uniprot ID:  Q7Z2E3;
  ENSP ID: ENSP00000369153
MSNVNLSVSDFWRVMMRVCWLVRQDSRHQRIRLPHLEAVVIGRGPETKITDKKCSRQQVQLKAECNKGYVKVKQVGVNPTSIDSVVIGKDQEVKLQPGQVLHMVNELYPYIVEFEEEAKNPGLETHRKRKRSGNSDSIERDAAQEAEAGTGLEPGSNSGQCSVPLKKGKDAPIKKESLGHWSQGLKISMQDPKMQVYKDEQVVVIKDKYPKARYHWLVLPWTSISSLKAVAREHLELLKHMHTVGEKVIVDFAGSSKLRFRLGYHAIPSMSHVHLHVISQDFDSPCLKNKKHWNSFNTEYFLESQE

SEQ ID NO: 5910 - protein, 284 aa, Homo sapiens
  Payload ID: 1290;
  Gene Symbol: APTX;
  Gene Name: aprataxin;
  Uniprot ID:  Q7Z2E3;
  ENSP ID: ENSP00000380357
MSNVNLSVSDFWRVMMRVCWLVRQDSRHQRIRLPHLEAVVIGRGPETKITDKKCSRQQVQLKAECNKGYVKVKQVGVNPTSIDSVVIGKDQEVKLQPGQVLHMESLGHWSQGLKISMQDPKMQVYKDEQVVVIKDKYPKARYHWLVLPWTSISSLKAVAREHLELLKHMHTVGEKVIVDFAGSSKLRFRLGYHAIPSMSHVHLHVISQDFDSPCLKNKKHWNSFNTEYFLESQAVIEMVQEAGRVTVRDGMPELLKLPLRCHECQQLLPSIPQLKEHLRKHWTQ

SEQ ID NO: 5911 - protein, 342 aa, Homo sapiens; identical to SEQ ID NO: 5907
  Payload ID: 1290;
  Gene Symbol: APTX;
  Gene Name: aprataxin;
  Uniprot ID:  Q7Z2E3;
  ENSP ID: ENSP00000400806

SEQ ID NO: 5912 - protein, 49 aa, Homo sapiens
  Payload ID: 1290;
  Gene Symbol: APTX;
  Gene Name: aprataxin;
  Uniprot ID:  Q7Z2E3;
  ENSP ID: ENSP00000417634
MMRVCWLVRQDSRHQRIRLPHLEAVVIGRGPETKITDKKCSRQQVESRV

SEQ ID NO: 5913 - protein, 155 aa, Homo sapiens
  Payload ID: 1290;
  Gene Symbol: APTX;
  Gene Name: aprataxin;
  ENSP ID: ENSP00000417649
MMRVCWLVRQDSRHQRIRLPHLEAVVIGRGPETKITDKKCSRQQEFEEEAKNPGLETHRKRKRSGNSDSIERDAAQEAEAGTGLEPGSNSGQCSVPLKKGKDAPIKKESLGHWSQGLKISMQDPKMQVYKDEQVVVIKDKYPKARYHWLVLPWTS

SEQ ID NO: 5914 - protein, 52 aa, Homo sapiens
  Payload ID: 1290;
  Gene Symbol: APTX;
  Gene Name: aprataxin;
  ENSP ID: ENSP00000417684
MMRVCWLVRQDSRHQRIRLPHLEAVVIGRGPETKITDKKCSRQQGRSQSHQH

SEQ ID NO: 5915 - protein, 74 aa, Homo sapiens
  Payload ID: 1290;
  Gene Symbol: APTX;
  Gene Name: aprataxin;
  ENSP ID: ENSP00000417750
  MOD_RES (1)..(1): Any amino acid
XDFWRVMMRVCWLVRQDSRHQRIRLPHLEAVVIGRGPETKITDKKCSRQQGIPGPLESRLEDFYAGPQNAGLQR

SEQ ID NO: 5916 - protein, 49 aa, Homo sapiens; identical to SEQ ID NO: 5912
  Payload ID: 1290;
  Gene Symbol: APTX;
  Gene Name: aprataxin;
  Uniprot ID:  Q7Z2E3;
  ENSP ID: ENSP00000417804

SEQ ID NO: 5917 - protein, 63 aa, Homo sapiens
  Payload ID: 1290;
  Gene Symbol: APTX;
  Gene Name: aprataxin;
  ENSP ID: ENSP00000418069
MSNVNLSVSDFWRVMMRVCWLVRQDSRHQRIRLPHLEAVVIGRGPETKITDKKCSRQQVESRV

SEQ ID NO: 5918 - protein, 49 aa, Homo sapiens; identical to SEQ ID NO: 5912
  Payload ID: 1290;
  Gene Symbol: APTX;
  Gene Name: aprataxin;
  Uniprot ID:  Q7Z2E3;
  ENSP ID: ENSP00000418144

SEQ ID NO: 5919 - protein, 49 aa, Homo sapiens; identical to SEQ ID NO: 5912
  Payload ID: 1290;
  Gene Symbol: APTX;
  Gene Name: aprataxin;
  Uniprot ID:  Q7Z2E3;
  ENSP ID: ENSP00000418311

SEQ ID NO: 5920 - protein, 49 aa, Homo sapiens; identical to SEQ ID NO: 5912
  Payload ID: 1290;
  Gene Symbol: APTX;
  Gene Name: aprataxin;
  Uniprot ID:  Q7Z2E3;
  ENSP ID: ENSP00000418733

SEQ ID NO: 5921 - protein, 216 aa, Homo sapiens
  Payload ID: 1290;
  Gene Symbol: APTX;
  Gene Name: aprataxin;
  ENSP ID: ENSP00000419020
MSNVNLSVSDFWRVMMRVCWLVRQDSRHQRIRLPHLEAVVIGRGPETKITDKKCSRQQEFEEEAKNPGLETHRKRKRSGNSDSIERDAAQEAEAGTGLEPGSNSGQCSVPLKKGKDAPIKKESLGHWSQGLKISMQDPKMQVYKDEQVVVIKDKYPKARYHWLVLPWTSISSLKAVAREHLELLKHMHTVGEKVIVDFAGSSKLRFRLGYHAIPSM

SEQ ID NO: 5922 - protein, 302 aa, Homo sapiens
  Payload ID: 1290;
  Gene Symbol: APTX;
  Gene Name: aprataxin;
  Uniprot ID:  Q7Z2E3;
  ENSP ID: ENSP00000419042
MSNVNLSVSDFWRVMMRVCWLVRQDSRHQRIRLPHLEAVVIGRGPETKITDKKCSRQQEFEEEAKNPGLETHRKRKRSGNSDSIERDAAQEAEAGTGLEPGSNSGQCSVPLKKGKDAPIKKESLGHWSQGLKISMQDPKMQVYKDEQVVVIKDKYPKARYHWLVLPWTSISSLKAVAREHLELLKHMHTVGEKVIVDFAGSSKLRFRLGYHAIPSMSHVHLHVISQDFDSPCLKNKKHWNSFNTEYFLESQAVIEMVQEAGRVTVRDGMPELLKLPLRCHECQQLLPSIPQLKEHLRKHWTQ

SEQ ID NO: 5923 - protein, 192 aa, Homo sapiens
  Payload ID: 1290;
  Gene Symbol: APTX;
  Gene Name: aprataxin;
  Uniprot ID:  Q7Z2E3;
  ENSP ID: ENSP00000419289
MMRVCWLVRQDSRHQRIRLPHLEAVVIGRGPETKITDKKCSRQQVQLKAECNKGYVKVKQVGVNPTSIDSVVIGKDQEVKLQPGQVLHMVNELYPYIVEFEEEAKNPGLETHRKRKRSGNSDSIERDAAQEAEAGTGLEPGSNSGQCSVPLKKGKDAPIKKESLGHWSQGLKISMQDPKMQPCTSSCDQPGF

SEQ ID NO: 5924 - protein, 85 aa, Homo sapiens
  Payload ID: 1290;
  Gene Symbol: APTX;
  Gene Name: aprataxin;
  ENSP ID: ENSP00000419430
MMRVCWLVRQDSRHQRIRLPHLEAVVIGRGPETKITDKKCSRQQVQLKAECNKGYVKVKQSLRKRQRTLAWKHTGRERDQATVIL

SEQ ID NO: 5925 - protein, 99 aa, Homo sapiens
  Payload ID: 1290;
  Gene Symbol: APTX;
  Gene Name: aprataxin;
  ENSP ID: ENSP00000419597
MSNVNLSVSDFWRVMMRVCWLVRQDSRHQRIRLPHLEAVVIGRGPETKITDKKCSRQQVQLKAECNKGYVKVKQSLRKRQRTLAWKHTGRERDQATVIL

SEQ ID NO: 5926 - protein, 49 aa, Homo sapiens; identical to SEQ ID NO: 5912
  Payload ID: 1290;
  Gene Symbol: APTX;
  Gene Name: aprataxin;
  Uniprot ID:  Q7Z2E3;
  ENSP ID: ENSP00000419623

SEQ ID NO: 5927 - protein, 85 aa, Homo sapiens; identical to SEQ ID NO: 5924
  Payload ID: 1290;
  Gene Symbol: APTX;
  Gene Name: aprataxin;
  ENSP ID: ENSP00000419723

SEQ ID NO: 5928 - protein, 342 aa, Homo sapiens; identical to SEQ ID NO: 5907
  Payload ID: 1290;
  Gene Symbol: APTX;
  Gene Name: aprataxin;
  Uniprot ID:  Q7Z2E3;
  ENSP ID: ENSP00000419846

SEQ ID NO: 5929 - protein, 49 aa, Homo sapiens; identical to SEQ ID NO: 5912
  Payload ID: 1290;
  Gene Symbol: APTX;
  Gene Name: aprataxin;
  Uniprot ID:  Q7Z2E3;
  ENSP ID: ENSP00000420071

SEQ ID NO: 5930 - protein, 342 aa, Homo sapiens; identical to SEQ ID NO: 5907
  Payload ID: 1290;
  Gene Symbol: APTX;
  Gene Name: aprataxin;
  Uniprot ID:  Q7Z2E3;
  ENSP ID: ENSP00000420263

SEQ ID NO: 5931 - protein, 511 aa, Homo sapiens
  Payload ID: 1291;
  Gene Symbol: APLF;
  Gene Name: aprataxin and PNKP like factor;
  Uniprot ID:  Q8IW19;
  ENSP ID: ENSP00000307004
MSGGFELQPRDGGPRVALAPGETVIGRGPLLGITDKRVSRRHAILEVAGGQLRIKPIHTNPCFYQSSEKSQLLPLKPNLWCYLNPGDSFSLLVDKYIFRILSIPSEVEMQCTLRNSQVLDEDNILNETPKSPVINLPHETTGASQLEGSTEIAKTQMTPTNSVSFLGENRDCNKQQPILAERKRILPTWMLAEHLSDQNLSVPAISGGNVIQGSGKEEICKDKSQLNTTQQGRRQLISSGSSENTSAEQDTGEECKNTDQEESTISSKEMPQSFSAITLSNTEMNNIKTNAQRNKLPIEELGKVSKHKIATKRTPHKEDEAMSCSENCSSAQGDSLQDESQGSHSESSSNPSNPETLHAKATDSVLQGSEGNKVKRTSCMYGANCYRKNPVHFQHFSHPGDSDYGGVQIVGQDETDDRPECPYGPSCYRKNPQHKIEYRHNTLPVRNVLDEDNDNVGQPNEYDLNDSFLDDEEEDYEPTDEDSDWEPGKEDEEKEDVEELLKEAKRFMKRK

SEQ ID NO: 5932 - protein, 393 aa, Homo sapiens
  Payload ID: 1291;
  Gene Symbol: APLF;
  Gene Name: aprataxin and PNKP like factor;
  ENSP ID: ENSP00000377874
METTMGFMDDNATNTSTSFLSVLNPHGAHATSFPFNFSYSDYDMPLDEDEDVTNSRTFFAAKIVIGMALVGIMLVCGIGNFIFIAALVRYKKLRNLTNLLIANLAISDFLVAIVCCPFEMDYYVVRQLSWEHGHVLCTSVNYLRTVSLYVSTNALLAIAIDRYLAIVHPLRPRMKCQTATGLIALVWTVSILIAIPSAYFTTETVLVIVKSQEKIFCGQIWPVDQQLYYKSYFLFIFGIEFVGPVVTMTLCYARISRELWFKAVPGFQTEQIRKRLRCRRKTVLVLMCILTAYVLCWAPFYGFTIVRDFFPTVFVKEKHYLTAFYIVECIAMSNSMINTLCFVTVKNDTVKYFKKIMLLHWKASYNGGKSSADLDLKTIGMPATEEVDCIRLK

SEQ ID NO: 5933 - protein, 280 aa, Homo sapiens
  Payload ID: 1291;
  Gene Symbol: APLF;
  Gene Name: aprataxin and PNKP like factor;
  ENSP ID: ENSP00000393403
MSGGFELQPRDGGPRVALAPGETVIGRGPLLGITDKRVSRRHAILEVAGGQLRIKPIHTNPCFYQSSEKSQLLPLKPNLWCYLNPGDSFSLLVDKYIFRILSIPSEVEMQCTLRNSQVLDEDNILNETPKSPVINLPHETTGASQLEGSTEIAKTQMTPTNSVSFLGENRDCNKQQPILAERKRILPTWMLAEHLSDQNLSVPAISGGNVIQGSGKEEICKDKSQLNTTQQGRRQLISSGSSENTSAEQDTGEECKNTDQEESTISSKMLIVKNGSIRSI

SEQ ID NO: 5934 - protein, 185 aa, Homo sapiens
  Payload ID: 1291;
  Gene Symbol: APLF;
  Gene Name: aprataxin and PNKP like factor;
  ENSP ID: ENSP00000432297
MSGGFELQPRDGGPRVALAPGETVIGRGPLLGIHTNPCFYQSSEKSQLLPLKPNLWCYLNPGDSFSLLVDKYIFRILSIPSEVEMQCTLRNSQVLDEDNILNETPKSPVINLPHETTGASQLEGSTEIAKTQMTPTNSVSFLGENRDCNKQQPILAERKRILPTWMLAEHLSDQNLSVPAISGGR

SEQ ID NO: 5935 - protein, 269 aa, Homo sapiens
  Payload ID: 1292;
  Gene Symbol: AQP1;
  Gene Name: aquaporin 1 (Colton blood group);
  Uniprot ID:  P29972;
  ENSP ID: ENSP00000311165
MASEFKKKLFWRAVVAEFLATTLFVFISIGSALGFKYPVGNNQTAVQDNVKVSLAFGLSIATLAQSVGHISGAHLNPAVTLGLLLSCQISIFRALMYIIAQCVGAIVATAILSGITSSLTGNSLGRNDLADGVNSGQGLGIEIIGTLQLVLCVLATTDRRRRDLGGSAPLAIGLSVALGHLLAIDYTGCGINPARSFGSAVITHNFSNHWIFWVGPFIGGALAVLIYDFILAPRSSDLTDRVKVWTSGQVEEYDLDADDINSRVEMKPK

SEQ ID NO: 5936 - protein, 154 aa, Homo sapiens
  Payload ID: 1292;
  Gene Symbol: AQP1;
  Gene Name: aquaporin 1 (Colton blood group);
  Uniprot ID:  P29972;
  ENSP ID: ENSP00000386712
MQSGMGWNVLDFWLADGVNSGQGLGIEIIGTLQLVLCVLATTDRRRRDLGGSAPLAIGLSVALGHLLAIDYTGCGINPARSFGSAVITHNFSNHWIFWVGPFIGGALAVLIYDFILAPRSSDLTDRVKVWTSGQVEEYDLDADDINSRVEMKPK

SEQ ID NO: 5937 - protein, 218 aa, Homo sapiens
  Payload ID: 1292;
  Gene Symbol: AQP1;
  Gene Name: aquaporin 1 (Colton blood group);
  Uniprot ID:  P29972;
  ENSP ID: ENSP00000387178
MFWTFGYEAVSPAGPSHLFASLLLGVLLTITFMPGARPLPLVLVPQNTLAWMQLDAKAPAHPRPLQLLGRVGPGSRQLADGVNSGQGLGIEIIGTLQLVLCVLATTDRRRRDLGGSAPLAIGLSVALGHLLAIDYTGCGINPARSFGSAVITHNFSNHWIFWVGPFIGGALAVLIYDFILAPRSSDLTDRVKVWTSGQVEEYDLDADDINSRVEMKPK

SEQ ID NO: 5938 - protein, 186 aa, Homo sapiens
  Payload ID: 1292;
  Gene Symbol: AQP1;
  Gene Name: aquaporin 1 (Colton blood group);
  Uniprot ID:  P29972;
  ENSP ID: ENSP00000405698
MPGARPLPLVLVPQNTLAWMQLDAKAPAHPRPLQLLGRVGPGSRQLADGVNSGQGLGIEIIGTLQLVLCVLATTDRRRRDLGGSAPLAIGLSVALGHLLAIDYTGCGINPARSFGSAVITHNFSNHWIFWVGPFIGGALAVLIYDFILAPRSSDLTDRVKVWTSGQVEEYDLDADDINSRVEMKPK

SEQ ID NO: 5939 - protein, 301 aa, Homo sapiens
  Payload ID: 1293;
  Gene Symbol: AQP10;
  Gene Name: aquaporin 10;
  Uniprot ID:  Q96PS8;
  ENSP ID: ENSP00000318355
MVFTQAPAEIMGHLRIRSLLARQCLAEFLGVFVLMLLTQGAVAQAVTSGETKGNFFTMFLAGSLAVTIAIYVGGNVSGAHLNPAFSLAMCIVGRLPWVKLPIYILVQLLSAFCASGATYVLYHDALQNYTGGNLTVTGPKETASIFATYPAPYLSLNNGFLDQVLGTGMLIVGLLAILDRRNKGVPAGLEPVVVGMLILALGLSMGANCGIPLNPARDLGPRLFTYVAGWGPEVFSAGNGWWWVPVVAPLVGATVGTATYQLLVALHHPEGPEPAQDLVSAQHKASELETPASAQMLECKL

SEQ ID NO: 5940 - protein, 264 aa, Homo sapiens
  Payload ID: 1293;
  Gene Symbol: AQP10;
  Gene Name: aquaporin 10;
  Uniprot ID:  Q96PS8;
  ENSP ID: ENSP00000420341
MVFTQAPAEIMGHLRIRSLLARQCLAEFLGVFVLMLLTQGAVAQAVTSGETKGNFFTMFLAGSLAVTIAIYVGGNVSGAHLNPAFSLAMCIVGRLPWVKLPIYILVQLLSAFCASGATYVLYHDALQNYTGGNLTVTGPKETASIFATYPAPYLSLNNGFLDQVLGTGMLIVGLLAILDRRNKGVPAGLEPVVVGMLILALGLSMGANCGIPLNPARDLGPRLFTYVAGWGPEVFRWETDSPGAGLHSPSSAKGSVPGSTALCL

SEQ ID NO: 5941 - protein, 271 aa, Homo sapiens
  Payload ID: 1294;
  Gene Symbol: AQP11;
  Gene Name: aquaporin 11;
  Uniprot ID:  Q8NBQ7;
  ENSP ID: ENSP00000318770
MSPLLGLRSELQDTCTSLGLMLSVVLLMGLARVVARQQLHRPVAHAFVLEFLATFQLCCCTHELQLLSEQHPAHPTWTLTLVYFFSLVHGLTLVGTSSNPCGVMMQMMLGGMSPETGAVRLLAQLVSALCSRYCTSALWSLGLTQYHVSERSFACKNPIRVDLLKAVITEAVCSFLFHSALLHFQEVRTKLRIHLLAALITFLVYAGGSLTGAVFNPALALSLHFMCFDEAFPQFFIVYWLAPSLGILLMILMFSFFLPWLHNNHTINKKE

SEQ ID NO: 5942 - protein, 295 aa, Homo sapiens
  Payload ID: 1295;
  Gene Symbol: AQP12A;
  Gene Name: aquaporin 12A;
  Uniprot ID:  Q8IXF9;
  ENSP ID: ENSP00000337144
MAGLNVSLSFFFATFALCEAARRASKALLPVGAYEVFAREAMRTLVELGPWAGDFGPDLLLTLLFLLFLAHGVTLDGASANPTVSLQEFLMAEQSLPGTLLKLAAQGLGMQAACTLMRLCWAWELSDLHLLQSLMAQSCSSALRTSVPHGALVEAACAFCFHLTLLHLRHSPPAYSGPAVALLVTVTAYTAGPFTSAFFNPALAASVTFACSGHTLLEYVQVYWLGPLTGMVLAVLLHQGRLPHLFQRNLFYGQKNKYRAPRGKPAPASGDTQTPAKGSSVREPGRSGVEGPHSS

SEQ ID NO: 5943 - protein, 307 aa, Homo sapiens
  Payload ID: 1295;
  Gene Symbol: AQP12A;
  Gene Name: aquaporin 12A;
  ENSP ID: ENSP00000405899
MAGLNVSLSFFFATFALCEAARRASKALLPVGAYEVFAREAVGAVQLGPCCLEMRTLVELGPWAGDFGPDLLLTLLFLLFLAHGVTLDGASANPTVSLQEFLMAEQSLPGTLLKLAAQGLGMQAACTLMRLCWAWELSDLHLLQSLMAQSCSSALRTSVPHGALVEAACAFCFHLTLLHLRHSPPAYSGPAVALLVTVTAYTAGPFTSAFFNPALAASVTFACSGHTLLEYVQVYWLGPLTGMVLAVLLHQGRLPHLFQRNLFYGQKNKYRAPRGKPAPASGDTQTPAKGSSVREPGRSGVEGPHSS

SEQ ID NO: 5944 - protein, 307 aa, Homo sapiens
  Payload ID: 1296;
  Gene Symbol: AQP12B;
  Gene Name: aquaporin 12B;
  Uniprot ID:  A6NM10;
  ENSP ID: ENSP00000384894
MAGLNVSLSFFFATFTLCEAARRASKALLPVGAYEVFAREAVGAVQLGACFLEMRTLVELGPWAGDFGPDLLLTLLFLLFLAHGVTLDGASANPTVSLQEFLMAEESLPGTLLKLAAQGLGMQAACTLTRLCWAWELSDLHLLQSLMAQSCSSALRTSVPHGALVEAACAFCFHLTLLHLRHSPPAYSGPAVALLVTVTAYTAGPFTSAFFNPALAASVTFACSGHTLLEYVQVYWLGPLTGMVLAVLLHQGRLPHLFQRNLFYGQKNKYRAPRGKPAPASGDTQTPAKGSSVREPGRSGVEGPHSS

SEQ ID NO: 5945 - protein, 41 aa, Homo sapiens
  Payload ID: 1296;
  Gene Symbol: AQP12B;
  Gene Name: aquaporin 12B;
  ENSP ID: ENSP00000391528
MAGVPHGRGVSAWHAAEAGGTGAGHAGRLHPDAPLLGLGAQ

SEQ ID NO: 5946 - protein, 41 aa, Homo sapiens; identical to SEQ ID NO: 5945
  Payload ID: 1296;
  Gene Symbol: AQP12B;
  Gene Name: aquaporin 12B;
  ENSP ID: ENSP00000395897

SEQ ID NO: 5947 - protein, 41 aa, Homo sapiens; identical to SEQ ID NO: 5945
  Payload ID: 1296;
  Gene Symbol: AQP12B;
  Gene Name: aquaporin 12B;
  ENSP ID: ENSP00000407457

SEQ ID NO: 5948 - protein, 295 aa, Homo sapiens
  Payload ID: 1296;
  Gene Symbol: AQP12B;
  Gene Name: aquaporin 12B;
  Uniprot ID:  A6NM10;
  ENSP ID: ENSP00000481577
MAGLNVSLSFFFATFTLCEAARRASKALLPVGAYEVFAREAMRTLVELGPWAGDFGPDLLLTLLFLLFLAHGVTLDGASANPTVSLQEFLMAEESLPGTLLKLAAQGLGMQAACTLTRLCWAWELSDLHLLQSLMAQSCSSALRTSVPHGALVEAACAFCFHLTLLHLRHSPPAYSGPAVALLVTVTAYTAGPFTSAFFNPALAASVTFACSGHTLLEYVQVYWLGPLTGMVLAVLLHQGRLPHLFQRNLFYGQKNKYRAPRGKPAPASGDTQTPAKGSSVREPGRSGVEGPHSS

SEQ ID NO: 5949 - protein, 271 aa, Homo sapiens
  Payload ID: 1297;
  Gene Symbol: AQP2;
  Gene Name: aquaporin 2 (collecting duct);
  Uniprot ID:  P41181;
  ENSP ID: ENSP00000199280
MWELRSIAFSRAVFAEFLATLLFVFFGLGSALNWPQALPSVLQIAMAFGLGIGTLVQALGHISGAHINPAVTVACLVGCHVSVLRAAFYVAAQLLGAVAGAALLHEITPADIRGDLAVNALSNSTTAGQAVTVELFLTLQLVLCIFASTDERRGENPGTPALSIGFSVALGHLLGIHYTGCSMNPARSLAPAVVTGKFDDHWVFWIGPLVGAILGSLLYNYVLFPPAKSLSERLAVLKGLEPDTDWEEREVRRRQSVELHSPQSLPRGTKA

SEQ ID NO: 5950 - protein, 223 aa, Homo sapiens
  Payload ID: 1297;
  Gene Symbol: AQP2;
  Gene Name: aquaporin 2 (collecting duct);
  ENSP ID: ENSP00000447148
MWELRSIAFSRAVFAEFLATLLFVFFGLGSALNWPQALPSVLQIAMAFGLGIGTLVQALGHISGAHINPAVTVACLVGCHVSVLRAAFYVAAQLLGAVAGAALLHEITPADIRGDLAVNALSNSTTAGQAVTVELFLTLQLVLCIFASTDERRGENPGTPALSIGFSVALGHLLGIHYTGCSMNPARSLAPAVVTGKFDDHWVFWIGPLVGSPEPGRSPALRL

SEQ ID NO: 5951 - protein, 244 aa, Homo sapiens
  Payload ID: 1297;
  Gene Symbol: AQP2;
  Gene Name: aquaporin 2 (collecting duct);
  ENSP ID: ENSP00000450022
MWELRSIAFSRAVFAEFLATLLFVFFGLGSALNWPQALPSVLQIAMAFGLGIGTLVQALGHISGAHINPAVTVACLVGCHVSVLRAAFYVAAQLLGAVAGAALLHEITPADIRGDLAVNALSNSTTAGQAVTVELFLTLQLVLCIFASTDERRGENPGTPALSIGFSVALGHLLGVGHGHGFQPPWRNRHTDHSRDRHRDPKRDTYTELSRGTDTPEIHYTGCSMNPARSLAPAVVTGKFDDHW

SEQ ID NO: 5952 - protein, 292 aa, Homo sapiens
  Payload ID: 1298;
  Gene Symbol: AQP3;
  Gene Name: aquaporin 3 (Gill blood group);
  Uniprot ID:  Q92482;
  ENSP ID: ENSP00000297991
MGRQKELVSRCGEMLHIRYRLLRQALAECLGTLILVMFGCGSVAQVVLSRGTHGGFLTINLAFGFAVTLGILIAGQVSGAHLNPAVTFAMCFLAREPWIKLPIYTLAQTLGAFLGAGIVFGLYYDAIWHFADNQLFVSGPNGTAGIFATYPSGHLDMINGFFDQFIGTASLIVCVLAIVDPYNNPVPRGLEAFTVGLVVLVIGTSMGFNSGYAVNPARDFGPRLFTALAGWGSAVFTTGQHWWWVPIVSPLLGSIAGVFVYQLMIGCHLEQPPPSNEEENVKLAHVKHKEQI

SEQ ID NO: 5953 - protein, 323 aa, Homo sapiens
  Payload ID: 1299;
  Gene Symbol: AQP4;
  Gene Name: aquaporin 4;
  Uniprot ID:  P55087;
  ENSP ID: ENSP00000372654
MSDRPTARRWGKCGPLCTRENIMVAFKGVWTQAFWKAVTAEFLAMLIFVLLSLGSTINWGGTEKPLPVDMVLISLCFGLSIATMVQCFGHISGGHINPAVTVAMVCTRKISIAKSVFYIAAQCLGAIIGAGILYLVTPPSVVGGLGVTMVHGNLTAGHGLLVELIITFQLVFTIFASCDSKRTDVTGSIALAIGFSVAIGHLFAINYTGASMNPARSFGPAVIMGNWENHWIYWVGPIIGAVLAGGLYEYVFCPDVEFKRRFKEAFSKAAQQTKGSYMEVEDNRSQVETDDLILKPGVVHVIDVDRGEEKKGKDQSGEVLSSV

SEQ ID NO: 5954 - protein, 98 aa, Homo sapiens
  Payload ID: 1299;
  Gene Symbol: AQP4;
  Gene Name: aquaporin 4;
  ENSP ID: ENSP00000372656
MSDRPTARRWGVDLCVPERTSWWLSKGSGLKLSGKQSQRNFWPCLFLFSSAWDPPSTGVEQKSLYRSTWFSSPFALDSALQPWCSALAISAVATSTLQ

SEQ ID NO: 5955 - protein, 301 aa, Homo sapiens
  Payload ID: 1299;
  Gene Symbol: AQP4;
  Gene Name: aquaporin 4;
  Uniprot ID:  P55087;
  ENSP ID: ENSP00000393121
MVAFKGVWTQAFWKAVTAEFLAMLIFVLLSLGSTINWGGTEKPLPVDMVLISLCFGLSIATMVQCFGHISGGHINPAVTVAMVCTRKISIAKSVFYIAAQCLGAIIGAGILYLVTPPSVVGGLGVTMVHGNLTAGHGLLVELIITFQLVFTIFASCDSKRTDVTGSIALAIGFSVAIGHLFAINYTGASMNPARSFGPAVIMGNWENHWIYWVGPIIGAVLAGGLYEYVFCPDVEFKRRFKEAFSKAAQQTKGSYMEVEDNRSQVETDDLILKPGVVHVIDVDRGEEKKGKDQSGEVLSSV

SEQ ID NO: 5956 - protein, 185 aa, Homo sapiens
  Payload ID: 1299;
  Gene Symbol: AQP4;
  Gene Name: aquaporin 4;
  ENSP ID: ENSP00000462075
MSDRPTARRWGLGSTINWGGTEKPLPVDMVLISLCFGLSIATMVQCFGHISGGHINPAVTVAMVCTRKISIAKSVFYIAAQCLGAIIGAGILYLVTPPSVVGGLGVTMVHGNLTAGHGLLVELIITFQLVFTIFASCDSKRTDVTGSIALAIGFSVAIGHLFAINYTGASMNPARSFGPAVIMGN

SEQ ID NO: 5957 - protein, 301 aa, Homo sapiens; identical to SEQ ID NO: 5955
  Payload ID: 1299;
  Gene Symbol: AQP4;
  Gene Name: aquaporin 4;
  Uniprot ID:  P55087;
  ENSP ID: ENSP00000462597

SEQ ID NO: 5958 - protein, 296 aa, Homo sapiens
  Payload ID: 1299;
  Gene Symbol: AQP4;
  Gene Name: aquaporin 4;
  ENSP ID: ENSP00000484446
MSDRPTARRWGKCGPLCTRENIMVAFKGVWTQAFWKAVTAEFLAMLIFVLLSLGSTINWGGTEKPLPVDMVLISLCFGLSIATMVQCFGHISGGHINPAVTVAMVCTRKISIAKSVFYIAAQCLGAIIGAGILYLVTPPSVVGGLGVTMVHGNLTAGHGLLVELIITFQLVFTIFASCDSKRTDVTGSIALAIGFSVAIGHLFAIYWVGPIIGAVLAGGLYEYVFCPDVEFKRRFKEAFSKAAQQTKGSYMEVEDNRSQVETDDLILKPGVVHVIDVDRGEEKKGKDQSGEVLSSV

SEQ ID NO: 5959 - protein, 265 aa, Homo sapiens
  Payload ID: 1300;
  Gene Symbol: AQP5;
  Gene Name: aquaporin 5;
  Uniprot ID:  P55064;
  ENSP ID: ENSP00000293599
MKKEVCSVAFLKAVFAEFLATLIFVFFGLGSALKWPSALPTILQIALAFGLAIGTLAQALGPVSGGHINPAITLALLVGNQISLLRAFFYVAAQLVGAIAGAGILYGVAPLNARGNLAVNALNNNTTQGQAMVVELILTFQLALCIFASTDSRRTSPVGSPALSIGLSVTLGHLVGIYFTGCSMNPARSFGPAVVMNRFSPAHWVFWVGPIVGAVLAAILYFYLLFPNSLSLSERVAIIKGTYEPDEDWEEQREERKKTMELTTR

SEQ ID NO: 5960 - protein, 282 aa, Homo sapiens
  Payload ID: 1301;
  Gene Symbol: AQP6;
  Gene Name: aquaporin 6, kidney specific;
  Uniprot ID:  Q13520;
  ENSP ID: ENSP00000320247
MDAVEPGGRGWASMLACRLWKAISRALFAEFLATGLYVFFGVGSVMRWPTALPSVLQIAITFNLVTAMAVQVTWKASGAHANPAVTLAFLVGSHISLPRAVAYVAAQLVGATVGAALLYGVMPGDIRETLGINVVRNSVSTGQAVAVELLLTLQLVLCVFASTDSRQTSGSPATMIGISVALGHLIGIHFTGCSMNPARSFGPAIIIGKFTVHWVFWVGPLMGALLASLIYNFVLFPDTKTLAQRLAILTGTVEVGTGAGAGAEPLKKESQPGSGAVEMESV

SEQ ID NO: 5961 - protein, 108 aa, Homo sapiens
  Payload ID: 1301;
  Gene Symbol: AQP6;
  Gene Name: aquaporin 6, kidney specific;
  ENSP ID: ENSP00000449830
MIGISVALGHLIGIHFTGCSMNPARSFGPAIIIGKFTVHWVFWVGPLMGALLASLIYNFVLFPDTKTLAQRLAILTGTVEVGTGAGAGAEPLKKESQPGSGAVEMESV

SEQ ID NO: 5962 - protein, 282 aa, Homo sapiens; identical to SEQ ID NO: 5960
  Payload ID: 1301;
  Gene Symbol: AQP6;
  Gene Name: aquaporin 6, kidney specific;
  Uniprot ID:  Q13520;
  ENSP ID: ENSP00000477688

SEQ ID NO: 5963 - protein, 163 aa, Homo sapiens
  Payload ID: 1301;
  Gene Symbol: AQP6;
  Gene Name: aquaporin 6, kidney specific;
  ENSP ID: ENSP00000477759
MDAVEPGGRGWASMLACRLWKAISRALFAEFLATGLYVFFGVGSVMRWPTALPSVLQIAITFNLVTAMAVQVTWKASGAHANPAVTLAFLVGSHISLPRAVAYVAAQLVGATVGAALLYGVMPGDIRETLGINVAPPTSSALRLFPSSSLHLEACLTRPFSIS

SEQ ID NO: 5964 - protein, 342 aa, Homo sapiens
  Payload ID: 1302;
  Gene Symbol: AQP7;
  Gene Name: aquaporin 7;
  Uniprot ID:  O14520;
  ENSP ID: ENSP00000297988
MVQASGHRRSTRGSKMVSWSVIAKIQEILQRKMVREFLAEFMSTYVMMVFGLGSVAHMVLNKKYGSYLGVNLGFGFGVTMGVHVAGRISGAHMNAAVTFANCALGRVPWRKFPVYVLGQFLGSFLAAATIYSLFYTAILHFSGGQLMVTGPVATAGIFATYLPDHMTLWRGFLNEAWLTGMLQLCLFAITDQENNPALPGTEALVIGILVVIIGVSLGMNTGYAINPSRDLPPRIFTFIAGWGKQVFSNGENWWWVPVVAPLLGAYLGGIIYLVFIGSTIPREPLKLEDSVAYEDHGITVLPKMGSHEPTISPLTPVSVSPANRSSVHPAPPLHESMALEHF

SEQ ID NO: 5965 - protein, 256 aa, Homo sapiens
  Payload ID: 1302;
  Gene Symbol: AQP7;
  Gene Name: aquaporin 7;
  ENSP ID: ENSP00000368820
MGSGHCLRSTRGSKMVSWSVIAKIQEILQRKMVREFLAEFMSTYVMMVFGLGSVAHMVLNKKYGSYLGVNLGFGFGVTMGVHVAGRISGAHMNAAVTFANCALGRVPWRKFPVYVLGQFLGSFLAAATIYSLFYTAILHFSGGQLMVTGPVATAGIFATYLPDHMTLWRGFLNEAWLTGMLQLCLFAITDQENNPALPGTEALVIGILVVIIGVSLGMNTGYAINPSRDLPPRIFTFIAGWGKQVFRYCPCPGPFL

SEQ ID NO: 5966 - protein, 341 aa, Homo sapiens
  Payload ID: 1302;
  Gene Symbol: AQP7;
  Gene Name: aquaporin 7;
  ENSP ID: ENSP00000368821
MGSGHCLRSTRGSKMVSWSVIAKIQEILQRKMVREFLAEFMSTYVMMVFGLGSVAHMVLNKKYGSYLGVNLGFGFGVTMGVHVAGRISGAHMNAAVTFANCALGRVPWRKFPVYVLGQFLGSFLAAATIYSLFYTAILHFSGGQLMVTGPVATAGIFATYLPDHMTLWRGFLNEAWLTGMLQLCLFAITDQENNPALPGTEALVIGILVVIIGVSLGMNTGYAINPSRDLPPRIFTFIAGWGKQVFSNGENWWWVPVVAPLLGAYLGGIIYLVFIGSTIPREPLKLEDSVAYEDHGITVLPKMGSHEPTISPLTPVSVSPANRSSVHPAPPLHESMALEHF

SEQ ID NO: 5967 - protein, 216 aa, Homo sapiens
  Payload ID: 1302;
  Gene Symbol: AQP7;
  Gene Name: aquaporin 7;
  ENSP ID: ENSP00000396111
MVLNKKYGSYLGVNLGFGFGVTMGVHVAGRISGAHMNAAVTFANCALGRVPWRKFPVYVLGQFLGSFLAAATIYSLFYTAILHFSGGQLMVTGPVATAGIFATYLPDHMTLWRGFLNEAWLTGMLQLCLFAITDQENNPALPGTEALVIGILVVIIGVSLGMNTGYAINPSRDLPPRIFTFIAGWGKQVFRWHHLPGLHWLHHPTGAPEIGGFCGV

SEQ ID NO: 5968 - protein, 169 aa, Homo sapiens
  Payload ID: 1302;
  Gene Symbol: AQP7;
  Gene Name: aquaporin 7;
  ENSP ID: ENSP00000410138
MNAAVTFANCALGRVPWRKFPVYVLGQFLGSFLAAATIYSLFYTAILHFSGGQLMVTGPVATAGIFATYLPDHMTLWRGFLNEAWLTGMLQLCLFAITDQENNPALPGTEALVIGILVVIIGVSLGMNTGYAINPSRDLPPRIFTFIAGWGKQVFSNGENWWWVPVVAP

SEQ ID NO: 5969 - protein, 165 aa, Homo sapiens
  Payload ID: 1302;
  Gene Symbol: AQP7;
  Gene Name: aquaporin 7;
  Uniprot ID:  O14520;
  ENSP ID: ENSP00000412868
MNAAVTFANCALGRVPWRKFPVYVLGQFLGSFLAAATIYSLFYTAILHFSGGQLMVTGPVATAGIFATYLPDHMTLWRGFLNEAWLTGMLQLCLFAITDQENNPALPGTEALVIGILVVIIGVSLGMNTGYAINPSRDLPPRIFTFIAGWGKQVFRYCPCPGPFL

SEQ ID NO: 5970 - protein, 51 aa, Homo sapiens
  Payload ID: 1302;
  Gene Symbol: AQP7;
  Gene Name: aquaporin 7;
  ENSP ID: ENSP00000441619
MVQASGHRRSTRGSKMVSWSVIAKIQEILQRKMVREFLAEFMSTYVMMEPT

SEQ ID NO: 5971 - protein, 80 aa, Homo sapiens
  Payload ID: 1302;
  Gene Symbol: AQP7;
  Gene Name: aquaporin 7;
  ENSP ID: ENSP00000485081
MVQASGHRRSTRGSKMVSWSVIAKIQEILQRKMVREFLAEFMSTYVMMAWLTGMLQLCLFAITDQENNPALPGTEALVIG

SEQ ID NO: 5972 - protein, 41 aa, Homo sapiens
  Payload ID: 1302;
  Gene Symbol: AQP7;
  Gene Name: aquaporin 7;
  ENSP ID: ENSP00000485131
MVQASGHRRGLLAPWIALSAPHPPICKVASLVCHFYWSSPN

SEQ ID NO: 5973 - protein, 51 aa, Homo sapiens; identical to SEQ ID NO: 5970
  Payload ID: 1302;
  Gene Symbol: AQP7;
  Gene Name: aquaporin 7;
  ENSP ID: ENSP00000485224

SEQ ID NO: 5974 - protein, 50 aa, Homo sapiens
  Payload ID: 1302;
  Gene Symbol: AQP7;
  Gene Name: aquaporin 7;
  ENSP ID: ENSP00000485246
MVQASGHRRSTRGSKMVSWSVIAKIQEILQRKMVREFLAEFMSTYVMMRE

SEQ ID NO: 5975 - protein, 257 aa, Homo sapiens
  Payload ID: 1302;
  Gene Symbol: AQP7;
  Gene Name: aquaporin 7;
  ENSP ID: ENSP00000485332
MVQASGHRRSTRGSKMVSWSVIAKIQEILQRKMVREFLAEFMSTYVMMVFGLGSVAHMVLNKKYGSYLGVNLGFGFGVTMGVHVAGRISGAHMNAAVTFANCALGRVPWRKFPVYVLGQFLGSFLAAATIYSLFYTAILHFSGGQLMVTGPVATAGIFATYLPDHMTLWRGFLNEAWLTGMLQLCLFAITDQENNPALPGTEALVIGILVVIIGVSLGMNTGYAINPSRDLPPRIFTFIAGWGKQVFRYCPCPGPFL

SEQ ID NO: 5976 - protein, 85 aa, Homo sapiens
  Payload ID: 1302;
  Gene Symbol: AQP7;
  Gene Name: aquaporin 7;
  ENSP ID: ENSP00000485348
MVQASGHRRSTRGSKMVSWSVIAKIQEILQRKMVREFLAEFMSTYVMMREGDDWFGVGEESTCLRGLWKTESGRLCQQKMWAKRR

SEQ ID NO: 5977 - protein, 84 aa, Homo sapiens
  Payload ID: 1302;
  Gene Symbol: AQP7;
  Gene Name: aquaporin 7;
  ENSP ID: ENSP00000485419
MGSGHCLRSTRGSKMVSWSVIAKIQEILQRKMVREFLAEFMSTYVMMREGDDWFGVGEESTCLRGLWKTESGRLCQQKMWAKRR

SEQ ID NO: 5978 - protein, 261 aa, Homo sapiens
  Payload ID: 1303;
  Gene Symbol: AQP8;
  Gene Name: aquaporin 8;
  Uniprot ID:  O94778;
  ENSP ID: ENSP00000219660
MSGEIAMCEPEFGNDKAREPSVGGRWRVSWYERFVQPCLVELLGSALFIFIGCLSVIENGTDTGLLQPALAHGLALGLVIATLGNISGGHFNPAVSLAAMLIGGLNLVMLLPYWVSQLLGGMLGAALAKAVSPEERFWNASGAAFVTVQEQGQVAGALVAEIILTTLLALAVCMGAINEKTKGPLAPFSIGFAVTVDILAGGPVSGGCMNPARAFGPAVVANHWNFHWIYWLGPLLAGLLVGLLIRCFIGDGKTRLILKAR

SEQ ID NO: 5979 - protein, 255 aa, Homo sapiens
  Payload ID: 1303;
  Gene Symbol: AQP8;
  Gene Name: aquaporin 8;
  ENSP ID: ENSP00000454457
MCEPEFGNDKAREPSVGGRWRVSWYERFVQPCLVELLGSALFIFIGCLSVIENGTDTGLLQPALAHGLALGLVIATLGNISGGHFNPAVSLAAMLIGGLNLVMLLPYWVSQLLGGMLGAALAKAVSPEERFWNASGAAFVTVQEQGQVAGALVAEIILTTLLALAVCMGAINEKTKGPLAPFSIGFAVTVDILAGGPVSGGCMNPARAFGPAVVANHWNFHWIYWLGPLLAGLLVGLLIRCFIGDGKTRLILKAR

SEQ ID NO: 5980 - protein, 295 aa, Homo sapiens
  Payload ID: 1304;
  Gene Symbol: AQP9;
  Gene Name: aquaporin 9;
  Uniprot ID:  O43315;
  ENSP ID: ENSP00000219919
MQPEGAEKGKSFKQRLVLKSSLAKETLSEFLGTFILIVLGCGCVAQAILSRGRFGGVITINVGFSMAVAMAIYVAGGVSGGHINPAVSLAMCLFGRMKWFKLPFYVGAQFLGAFVGAATVFGIYYDGLMSFAGGKLLIVGENATAHIFATYPAPYLSLANAFADQVVATMILLIIVFAIFDSRNLGAPRGLEPIAIGLLIIVIASSLGLNSGCAMNPARDLSPRLFTALAGWGFEVFRAGNNFWWIPVVGPLVGAVIGGLIYVLVIEIHHPEPDSVFKTEQSEDKPEKYELSVIM

SEQ ID NO: 5981 - protein, 295 aa, Homo sapiens; identical to SEQ ID NO: 5980
  Payload ID: 1304;
  Gene Symbol: AQP9;
  Gene Name: aquaporin 9;
  Uniprot ID:  O43315;
  ENSP ID: ENSP00000441390

SEQ ID NO: 5982 - protein, 230 aa, Homo sapiens
  Payload ID: 1304;
  Gene Symbol: AQP9;
  Gene Name: aquaporin 9;
  ENSP ID: ENSP00000452673
MAVAMAIYVAGGVSGGHINPAVSLAMCLFGRMKWFKLPFYVGAQFLGAFVGAATVFGIYYDGLMSFAGGKLLIVGENATAHIFATYPAPYLSLANAFADQVVATMILLIIVFAIFDSRNLGAPRGLEPIAIGLLIIVIASSLGLNSGCAMNPARDLSPRLFTALAGWGFEVFRAGNNFWWIPVVGPLVGAVIGGLIYVLVIEIHHPEPDSVFKTEQSEDKPEKYELSVIM

SEQ ID NO: 5983 - protein, 1485 aa, Homo sapiens
  Payload ID: 1305;
  Gene Symbol: AQR;
  Gene Name: aquarius intron-binding spliceosomal factor;
  Uniprot ID:  O60306;
  ENSP ID: ENSP00000156471
MAAPAQPKKIVAPTVSQINAEFVTQLACKYWAPHIKKKSPFDIKVIEDIYEKEIVKSRFAIRKIMLLEFSQYLENYLWMNYSPEVSSKAYLMSICCMVNEKFRENVPAWEIFKKKPDHFPFFFKHILKAALAETDGEFSLHEQTVLLLFLDHCFNSLEVDLIRSQVQQLISLPMWMGLQLARLELELKKTPKLRKFWNLIKKNDEKMDPEAREQAYQERRFLSQLIQKFISVLKSVPLSEPVTMDKVHYCERFIELMIDLEALLPTRRWFNTILDDSHLLVHCYLSNLVRREEDGHLFSQLLDMLKFYTGFEINDQTGNALTENEMTTIHYDRITSLQRAAFAHFPELYDFALSNVAEVDTRESLVKFFGPLSSNTLHQVASYLCLLPTLPKNEDTTFDKEFLLELLVSRHERRISQIQQLNQMPLYPTEKIIWDENIVPTEYYSGEGCLALPKLNLQFLTLHDYLLRNFNLFRLESTYEIRQDIEDSVSRMKPWQSEYGGVVFGGWARMAQPIVAFTVVEVAKPNIGENWPTRVRADVTINLNVRDHIKDEWEGLRKHDVCFLITVRPTKPYGTKFDRRRPFIEQVGLVYVRGCEIQGMLDDKGRVIEDGPEPRPNLRGESRTFRVFLDPNQYQQDMTNTIQNGAEDVYETFNIIMRRKPKENNFKAVLETIRNLMNTDCVVPDWLHDIILGYGDPSSAHYSKMPNQIATLDFNDTFLSIEHLKASFPGHNVKVTVEDPALQIPPFRITFPVRSGKGKKRKDADVEDEDTEEAKTLIVEPHVIPNRGPYPYNQPKRNTIQFTHTQIEAIRAGMQPGLTMVVGPPGTGKTDVAVQIISNIYHNFPEQRTLIVTHSNQALNQLFEKIMALDIDERHLLRLGHGEEELETEKDFSRYGRVNYVLARRIELLEEVKRLQKSLGVPGDASYTCETAGYFFLYQVMSRWEEYISKVKNKGSTLPDVTEVSTFFPFHEYFANAPQPIFKGRSYEEDMEIAEGCFRHIKKIFTQLEEFRASELLRSGLDRSKYLLVKEAKIIAMTCTHAALKRHDLVKLGFKYDNILMEEAAQILEIETFIPLLLQNPQDGFSRLKRWIMIGDHHQLPPVIKNMAFQKYSNMEQSLFTRFVRVGVPTVDLDAQGRARASLCNLYNWRYKNLGNLPHVQLLPEFSTANAGLLYDFQLINVEDFQGVGESEPNPYFYQNLGEAEYVVALFMYMCLLGYPADKISILTTYNGQKHLIRDIINRRCGNNPLIGRPNKVTTVDRFQGQQNDYILLSLVRTRAVGHLRDVRRLVVAMSRARLGLYIFARVSLFQNCFELTPAFSQLTARPLHLHIIPTEPFPTTRKNGERPSHEVQIIKNMPQMANFVYNMYMHLIQTTHHYHQTLLQLPPAMVEEGEEVQNQETELETEEEAMTVQADIIPSPTDTSCRQETPAFQTDTTPSETGATSTPEAIPALSETTPTVVGAVSAPAEANTPQDATSAPEETK

SEQ ID NO: 5984 - protein, 646 aa, Homo sapiens
  Payload ID: 1305;
  Gene Symbol: AQR;
  Gene Name: aquarius intron-binding spliceosomal factor;
  ENSP ID: ENSP00000445700
MAAPAQPKKIVAPTVSQINAEFVTQLACKYWAPHIKKKSPFDIKVIEDIYEKEIVKSRFAIRKIMLLEFSQYLENYLWMNYSPEVSSKAYLMSICCMVNEKFRENVPAWEIFKKKPDHFPFFFKHILKAALAETDGEFSLHEQTVLLLFLDHCFNSLEVDLIRSQVQQLISLPMWMGLQLARLELELKKTPKLRKFWNLIKKNDEKMDPEAREQAYQERRFLSQLIQKFISVLKSVPLSEPVTMDKVHYCERFIELMIDLEALLPTRRWFNTILDDSHLLVHCYLSNLVRREEDGHLFSQLLDMLKFYTGFEINDQTGNALTENEMTTIHYDRITSLQRAAFAHFPELYDFALSNVAEVDTRESLVKFFGPLSSNTLHQVASYLCLLPTLPKNEDTTFDKEFLLELLVSRHERRISQIQQLNQMPLYPTEKIIWDENIVPTEYYSGEGCLALPKLNLQFLTLHDYLLRNFNLFRLESTYEIRQDIEDSVSRMKPWQSEYGGVVFGGWARMAQPIVAFTVVEVAKPNIGENWPTRVRADVTINLNVRDHIKDEWEGLRKHDVCFLITVRPTKPYGTKFDRRRPFIEQVGLVYVRGCEIQGMLDDKGRVIEDGMVTYIFERDLNPDPILEENQGHLECFWIQTSINKI

SEQ ID NO: 5985 - protein, 180 aa, Homo sapiens
  Payload ID: 1305;
  Gene Symbol: AQR;
  Gene Name: aquarius intron-binding spliceosomal factor;
  ENSP ID: ENSP00000453278
MPTGLHACVVPSDILCPPVPSRALLRNRLSLNDLSSSSTMARIWDLLFILFTLQLACKYWAPHIKKKSPFDIKVIEDIYEKEIVKSRFAIRKIMLLEFSQYLENYLWMNYSPEVSSKAYLMSICCMVNEKFRENVPAWEIFKKKPDHFPFFFKHILKAALAETDGEFSLHEQTVLLLFLD

SEQ ID NO: 5986 - protein, 663 aa, Homo sapiens
  Payload ID: 1306;
  Gene Symbol: ALOX12;
  Gene Name: arachidonate 12-lipoxygenase;
  Uniprot ID:  P18054;
  ENSP ID: ENSP00000251535
MGRYRIRVATGAWLFSGSYNRVQLWLVGTRGEAELELQLRPARGEEEEFDHDVAEDLGLLQFVRLRKHHWLVDDAWFCDRITVQGPGACAEVAFPCYRWVQGEDILSLPEGTARLPGDNALDMFQKHREKELKDRQQIYCWATWKEGLPLTIAADRKDDLPPNMRFHEEKRLDFEWTLKAGALEMALKRVYTLLSSWNCLEDFDQIFWGQKSALAEKVRQCWQDDELFSYQFLNGANPMLLRRSTSLPSRLVLPSGMEELQAQLEKELQNGSLFEADFILLDGIPANVIRGEKQYLAAPLVMLKMEPNGKLQPMVIQIQPPNPSSPTPTLFLPSDPPLAWLLAKSWVRNSDFQLHEIQYHLLNTHLVAEVIAVATMRCLPGLHPIFKFLIPHIRYTMEINTRARTQLISDGGIFDKAVSTGGGGHVQLLRRAAAQLTYCSLCPPDDLADRGLLGLPGALYAHDALRLWEIIARYVEGIVHLFYQRDDIVKGDPELQAWCREITEVGLCQAQDRGFPVSFQSQSQLCHFLTMCVFTCTAQHAAINQGQLDWYAWVPNAPCTMRMPPPTTKEDVTMATVMGSLPDVRQACLQMAISWHLSRRQPDMVPLGHHKEKYFSGPKPKAVLNQFRTDLEKLEKEITARNEQLDWPYEYLKPSCIENSVTI

SEQ ID NO: 5987 - protein, 147 aa, Homo sapiens
  Payload ID: 1306;
  Gene Symbol: ALOX12;
  Gene Name: arachidonate 12-lipoxygenase;
  ENSP ID: ENSP00000467033
RWVQGEDILSLPEGTARLPGDNALDMFQKHREKELKDRQQIYCWATWKEGLPLTIAADRKDDLPPNMRFHEEKRLDFEWTLKAGLVLPSGMEELQAQLEKELQNGSLFEADFILLDGIPANVIRGEKQYLAAPLVMLKMEPNGKLQP

SEQ ID NO: 5988 - protein, 701 aa, Homo sapiens
  Payload ID: 1307;
  Gene Symbol: ALOX12B;
  Gene Name: arachidonate 12-lipoxygenase, 12R type;
  Uniprot ID:  O75342;
  ENSP ID: ENSP00000315167
MATYKVRVATGTDLLSGTRDSISLTIVGTQGESHKQLLNHFGRDFATGAVGQYTVQCPQDLGELIIIRLHKERYAFFPKDPWYCNYVQICAPNGRIYHFPAYQWMDGYETLALREATGKTTADDSLPVLLEHRKEEIRAKQDFYHWRVFLPGLPSYVHIPSYRPPVRRHRNPNRPEWNGYIPGFPILINFKATKFLNLNLRYSFLKTASFFVRLGPMALAFKVRGLLDCKHSWKRLKDIRKIFPGKKSVVSEYVAEHWAEDTFFGYQYLNGVNPGLIRRCTRIPDKFPVTDDMVAPFLGEGTCLQAELEKGNIYLADYRIMEGIPTVELSGRKQHHCAPLCLLHFGPEGKMMPIAIQLSQTPGPDCPIFLPSDSEWDWLLAKTWVRYAEFYSHEAIAHLLETHLIAEAFCLALLRNLPMCHPLYKLLIPHTRYTVQINSIGRAVLLNEGGLSAKGMSLGVEGFAGVMVRALSELTYDSLYLPNDFVERGVQDLPGYYYRDDSLAVWNALEKYVTEIITYYYPSDAAVEGDPELQSWVQEIFKECLLGRESSGFPRCLRTVPELIRYVTIVIYTCSAKHAAVNTGQMEFTAWMPNFPASMRNPPIQTKGLTTLETFMDTLPDVKTTCITLLVLWTLSREPDDRRPLGHFPDIHFVEEAPRRSIEAFRQRLNQISHDIRQRNKCLPIPYYYLDPVLIENSISI

SEQ ID NO: 5989 - protein, 662 aa, Homo sapiens
  Payload ID: 1308;
  Gene Symbol: ALOX15;
  Gene Name: arachidonate 15-lipoxygenase;
  Uniprot ID:  P16050;
  ENSP ID: ENSP00000293761
MGLYRIRVSTGASLYAGSNNQVQLWLVGQHGEAALGKRLWPARGKETELKVEVPEYLGPLLFVKLRKRHLLKDDAWFCNWISVQGPGAGDEVRFPCYRWVEGNGVLSLPEGTGRTVGEDPQGLFQKHREEELEERRKLYRWGNWKDGLILNMAGAKLYDLPVDERFLEDKRVDFEVSLAKGLADLAIKDSLNVLTCWKDLDDFNRIFWCGQSKLAERVRDSWKEDALFGYQFLNGANPVVLRRSAHLPARLVFPPGMEELQAQLEKELEGGTLFEADFSLLDGIKANVILCSQQHLAAPLVMLKLQPDGKLLPMVIQLQLPRTGSPPPPLFLPTDPPMAWLLAKCWVRSSDFQLHELQSHLLRGHLMAEVIVVATMRCLPSIHPIFKLIIPHLRYTLEINVRARTGLVSDMGIFDQIMSTGGGGHVQLLKQAGAFLTYSSFCPPDDLADRGLLGVKSSFYAQDALRLWEIIYRYVEGIVSLHYKTDVAVKDDPELQTWCREITEIGLQGAQDRGFPVSLQARDQVCHFVTMCIFTCTGQHASVHLGQLDWYSWVPNAPCTMRLPPPTTKDATLETVMATLPNFHQASLQMSITWQLGRRQPVMVAVGQHEEEYFSGPEPKAVLKKFREELAALDKEIEIRNAKLDMPYEYLRPSVVENSVAI

SEQ ID NO: 5990 - protein, 109 aa, Homo sapiens
  Payload ID: 1308;
  Gene Symbol: ALOX15;
  Gene Name: arachidonate 15-lipoxygenase;
  ENSP ID: ENSP00000458630
MGLYRIRVSTGASLYAGSNNQVQLWLVGQHGEAALGKRLWPARGKETELKVEVPEYLGPLLFVKLRKRHLLKDDAWFCNWISVQGPGAGDEVRFPCYRWVEGNGVLSLP

SEQ ID NO: 5991 - protein, 662 aa, Homo sapiens; identical to SEQ ID NO: 5989
  Payload ID: 1308;
  Gene Symbol: ALOX15;
  Gene Name: arachidonate 15-lipoxygenase;
  Uniprot ID:  P16050;
  ENSP ID: ENSP00000458832

SEQ ID NO: 5992 - protein, 4 aa, Homo sapiens
  Payload ID: 1308;
  Gene Symbol: ALOX15;
  Gene Name: arachidonate 15-lipoxygenase;
  ENSP ID: ENSP00000460430
MAGA

SEQ ID NO: 5993 - protein, 623 aa, Homo sapiens
  Payload ID: 1308;
  Gene Symbol: ALOX15;
  Gene Name: arachidonate 15-lipoxygenase;
  Uniprot ID:  P16050;
  ENSP ID: ENSP00000460483
MGLYRIRVSTGASLYAGSNNQVQLWLVGQHGEAALGKRLWPARGKGPGAGDEVRFPCYRWVEGNGVLSLPEGTGRTVGEDPQGLFQKHREEELEERRKLYRWGNWKDGLILNMAGAKLYDLPVDERFLEDKRVDFEVSLAKGLADLAIKDSLNVLTCWKDLDDFNRIFWCGQSKLAERVRDSWKEDALFGYQFLNGANPVVLRRSAHLPARLVFPPGMEELQAQLEKELEGGTLFEADFSLLDGIKANVILCSQQHLAAPLVMLKLQPDGKLLPMVIQLQLPRTGSPPPPLFLPTDPPMAWLLAKCWVRSSDFQLHELQSHLLRGHLMAEVIVVATMRCLPSIHPIFKLIIPHLRYTLEINVRARTGLVSDMGIFDQIMSTGGGGHVQLLKQAGAFLTYSSFCPPDDLADRGLLGVKSSFYAQDALRLWEIIYRYVEGIVSLHYKTDVAVKDDPELQTWCREITEIGLQGAQDRGFPVSLQARDQVCHFVTMCIFTCTGQHASVHLGQLDWYSWVPNAPCTMRLPPPTTKDATLETVMATLPNFHQASLQMSITWQLGRRQPVMVAVGQHEEEYFSGPEPKAVLKKFREELAALDKEIEIRNAKLDMPYEYLRPSVVENSVAI

SEQ ID NO: 5994 - protein, 647 aa, Homo sapiens
  Payload ID: 1309;
  Gene Symbol: ALOX15B;
  Gene Name: arachidonate 15-lipoxygenase, type B;
  Uniprot ID:  O15296;
  ENSP ID: ENSP00000369520
MAEFRVRVSTGEAFGAGTWDKVSVSIVGTRGESPPLPLDNLGKEFTAGAEEDFQVTLPEDVGRVLLLRVHKAPPVLPLLGPLAPDAWFCRWFQLTPPRGGHLLFPCYQWLEGAGTLVLQEGTAKVSWADHHPVLQQQRQEELQARQEMYQWKAYNPGWPHCLDEKTVEDLELNIKYSTAKNANFYLQAGSAFAEMKIKGLLDRKGLWRSLNEMKRIFNFRRTPAAEHAFEHWQEDAFFASQFLNGLNPVLIRRCHYLPKNFPVTDAMVASVLGPGTSLQAELEKGSLFLVDHGILSGIQTNVINGKPQFSAAPMTLLYQSPGCGPLLPLAIQLSQTPGPNSPIFLPTDDKWDWLLAKTWVRNAEFSFHEALTHLLHSHLLPEVFTLATLRQLPHCHPLFKSTGIGIEGFSELIQRNMKQLNYSLLCLPEDIRTRGVEDIPGYYYRDDGMQIWGAVERFVSEIIGIYYPSDESVQDDRELQAWVREIFSKGFLNQESSGIPSSLETREALVQYVTMVIFTCSAKHAAVSAGQFDSCAWMPNLPPSMQLPPPTSKGLATCEGFIATLPPVNATCDVILALWLLSKEPGDQRPLGTYPDEHFTEEAPRRSIATFQSRLAQISRGIQERNQGLVLPYTYLDPPLIENSVSI

SEQ ID NO: 5995 - protein, 676 aa, Homo sapiens
  Payload ID: 1309;
  Gene Symbol: ALOX15B;
  Gene Name: arachidonate 15-lipoxygenase, type B;
  Uniprot ID:  O15296;
  ENSP ID: ENSP00000369530
MAEFRVRVSTGEAFGAGTWDKVSVSIVGTRGESPPLPLDNLGKEFTAGAEEDFQVTLPEDVGRVLLLRVHKAPPVLPLLGPLAPDAWFCRWFQLTPPRGGHLLFPCYQWLEGAGTLVLQEGTAKVSWADHHPVLQQQRQEELQARQEMYQWKAYNPGWPHCLDEKTVEDLELNIKYSTAKNANFYLQAGSAFAEMKIKGLLDRKGLWRSLNEMKRIFNFRRTPAAEHAFEHWQEDAFFASQFLNGLNPVLIRRCHYLPKNFPVTDAMVASVLGPGTSLQAELEKGSLFLVDHGILSGIQTNVINGKPQFSAAPMTLLYQSPGCGPLLPLAIQLSQTPGPNSPIFLPTDDKWDWLLAKTWVRNAEFSFHEALTHLLHSHLLPEVFTLATLRQLPHCHPLFKLLIPHTRYTLHINTLARELLIVPGQVVDRSTGIGIEGFSELIQRNMKQLNYSLLCLPEDIRTRGVEDIPGYYYRDDGMQIWGAVERFVSEIIGIYYPSDESVQDDRELQAWVREIFSKGFLNQESSGIPSSLETREALVQYVTMVIFTCSAKHAAVSAGQFDSCAWMPNLPPSMQLPPPTSKGLATCEGFIATLPPVNATCDVILALWLLSKEPGDQRPLGTYPDEHFTEEAPRRSIATFQSRLAQISRGIQERNQGLVLPYTYLDPPLIENSVSI

SEQ ID NO: 5996 - protein, 664 aa, Homo sapiens
  Payload ID: 1309;
  Gene Symbol: ALOX15B;
  Gene Name: arachidonate 15-lipoxygenase, type B;
  ENSP ID: ENSP00000458749
MAEFRVRVSTGEAFGAGTWDKVSVSIVGTRGESPPLPLDNLGKEFTAGAEEDFQVTLPEDVGRVLLLRVHKAPPVLPLLGPLAPDAWFCRWFQLTPPRGGHLLFPCYQWLEGAGTLVLQEGTAKVSWADHHPVLQQQRQEELQARQEMYQWKAYNPGWPHCLDEKTVEDLELNIKYSTAKNANFYLQAGSAFAEMKIKGLLDRKGLWRSLNEMKRIFNFRRTPAAEHAFEHWQEDAFFASQFLNGLNPVLIRRCHYLPKNFPVTDAMVASVLGPGTSLQAELEKGSLFLVDHGILSGIQTNVINGKPQFSAAPMTLLYQSPGCGPLLPLAIQLSQTPGPNSPIFLPTDDKWDWLLAKTWVRNAEFSFHEALTHLLHSHLLPEVFTLATLRQLPHCHPLFKLLIPHTRYTLHINTLARELLIVPGQVVDRSTGIGIEGFSELIQRNMKQLNYSLLCLPEDIRTRGVEDIPGYYYRDDGMQIWGAVERDESVQDDRELQAWVREIFSKGFLNQESSGIPSSLETREALVQYVTMVIFTCSAKHAAVSAGQFDSCAWMPNLPPSMQLPPPTSKGLATCEGFIATLPPVNATCDVILALWLLSKEPGDQRPLGTYPDEHFTEEAPRRSIATFQSRLAQISRGIQERNQGLVLPYTYLDPPLIENSVSI

SEQ ID NO: 5997 - protein, 602 aa, Homo sapiens
  Payload ID: 1309;
  Gene Symbol: ALOX15B;
  Gene Name: arachidonate 15-lipoxygenase, type B;
  Uniprot ID:  O15296;
  ENSP ID: ENSP00000460332
MAEFRVRVSTGEAFGAGTWDKVSVSIVGTRGESPPLPLDNLGKEFTAGAEEDFQVTLPEDVGRVLLLRVHKAPPVLPLLGPLAPDAWFCRWFQLTPPRGGHLLFPCYQWLEGAGTLVLQEGTAKVSWADHHPVLQQQRQEELQARQEMYQWKAYNPGWPHCLDEKTVEDLELNIKYSTAKNANFYLQAGSAFAEMKIKGLLDRKGLWRSLNEMKRIFNFRRTPAAEHAFEHWQEDAFFASQFLNGLNPVLIRRCHYLPKNFPVTDAMVASVLGPGTSLQAELEKGSLFLVDHGILSGIQTNVINGKPQFSAAPMTLLYQSPGCGPLLPLAIQLSQTPGPNSPIFLPTDDKWDWLLAKTWVRNAEFSFHEALTHLLHSHLLPEVFTLATLRQLPHCHPLFKSTGIGIEGFSELIQRNMKQLNYSLLCLPEDIRTRGVEDIPGYYYRDDGMQIWGIPSSLETREALVQYVTMVIFTCSAKHAAVSAGQFDSCAWMPNLPPSMQLPPPTSKGLATCEGFIATLPPVNATCDVILALWLLSKEPGDQRPLGTYPDEHFTEEAPRRSIATFQSRLAQISRGIQERNQGLVLPYTYLDPPLIENSVSI

SEQ ID NO: 5998 - protein, 674 aa, Homo sapiens
  Payload ID: 1310;
  Gene Symbol: ALOX5;
  Gene Name: arachidonate 5-lipoxygenase;
  Uniprot ID:  P09917;
  ENSP ID: ENSP00000363512
MPSYTVTVATGSQWFAGTDDYIYLSLVGSAGCSEKHLLDKPFYNDFERGAVDSYDVTVDEELGEIQLVRIEKRKYWLNDDWYLKYITLKTPHGDYIEFPCYRWITGDVEVVLRDGRAKLARDDQIHILKQHRRKELETRQKQYRWMEWNPGFPLSIDAKCHKDLPRDIQFDSEKGVDFVLNYSKAMENLFINRFMHMFQSSWNDFADFEKIFVKISNTISERVMNHWQEDLMFGYQFLNGCNPVLIRRCTELPEKLPVTTEMVECSLERQLSLEQEVQQGNIFIVDFELLDGIDANKTDPCTLQFLAAPICLLYKNLANKIVPIAIQLNQIPGDENPIFLPSDAKYDWLLAKIWVRSSDFHVHQTITHLLRTHLVSEVFGIAMYRQLPAVHPIFKLLVAHVRFTIAINTKAREQLICECGLFDKANATGGGGHVQMVQRAMKDLTYASLCFPEAIKARGMESKEDIPYYFYRDDGLLVWEAIRTFTAEVVDIYYEGDQVVEEDPELQDFVNDVYVYGMRGRKSSGFPKSVKSREQLSEYLTVVIFTASAQHAAVNFGQYDWCSWIPNAPPTMRAPPPTAKGVVTIEQIVDTLPDRGRSCWHLGAVWALSQFQENELFLGMYPEEHFIEKPVKEAMARFRKNLEAIVSVIAERNKKKQLPYYYLSPDRIPNSVAI

SEQ ID NO: 5999 - protein, 617 aa, Homo sapiens
  Payload ID: 1310;
  Gene Symbol: ALOX5;
  Gene Name: arachidonate 5-lipoxygenase;
  Uniprot ID:  P09917;
  ENSP ID: ENSP00000437634
MPSYTVTVATGSQWFAGTDDYIYLSLVGSAGCSEKHLLDKPFYNDFERGAVDSYDVTVDEELGEIQLVRIEKRKYWLNDDWYLKYITLKTPHGDYIEFPCYRWITGDVEVVLRDGRAKLARDDQIHILKQHRRKELETRQKQYRWMEWNPGFPLSIDAKCHKDLPRDIQFDSEKGVDFVLNYSKAMENLFINRFMHMFQSSWNDFADFEKIFVKISNTISERVMNHWQEDLMFGYQFLNGCNPVLIRRCTELPEKLPVTTEMVECSLERQLSLEQEVQQGNIFIVDFELLDGIDANKTDPCTLQFLAAPICLLYKNLANKIVPIAIQLNQIPGDENPIFLPSDAKYDWLLAKIWVRSSDFHVHQTITHLLRTHLVSEVFGIAMYRQLPAVHPIFKLLVAHVRFTIAINTKAREQLICECGLFDKANATGGGGHVQMVQRAMKDLTYASLCFPEAIKARGMESKEDIPYYFYRDDGLLVWEAIRTFTAEVVDIYYEGDQVVEEDPELQDFVNDVYVYGMRGRKSSGFPKSVKSREQLSEYLTVVIFTASAQHAAVNFGQLFLGMYPEEHFIEKPVKEAMARFRKNLEAIVSVIAERNKKKQLPYYYLSPDRIPNSVAI

SEQ ID NO: 6000 - protein, 139 aa, Homo sapiens
  Payload ID: 1310;
  Gene Symbol: ALOX5;
  Gene Name: arachidonate 5-lipoxygenase;
  ENSP ID: ENSP00000479452
MPSYTVTVATGSQWFAGTDDYIYLSLVGSAGCSEKHLLDKPFYNDFERGAVDSYDVTVDEELGEIQLVRIEKRKYWLNDDWYLKYITLKTPHGDYIEFPCYRWITGDVEVVLRDGREMDGVEPWLPLEHRCQMPQGFTP

SEQ ID NO: 6001 - protein, 617 aa, Homo sapiens; identical to SEQ ID NO: 5999
  Payload ID: 1310;
  Gene Symbol: ALOX5;
  Gene Name: arachidonate 5-lipoxygenase;
  Uniprot ID:  P09917;
  ENSP ID: ENSP00000479958

SEQ ID NO: 6002 - protein, 139 aa, Homo sapiens; identical to SEQ ID NO: 6000
  Payload ID: 1310;
  Gene Symbol: ALOX5;
  Gene Name: arachidonate 5-lipoxygenase;
  ENSP ID: ENSP00000483803

SEQ ID NO: 6003 - protein, 674 aa, Homo sapiens; identical to SEQ ID NO: 5998
  Payload ID: 1310;
  Gene Symbol: ALOX5;
  Gene Name: arachidonate 5-lipoxygenase;
  Uniprot ID:  P09917;
  ENSP ID: ENSP00000484468

SEQ ID NO: 6004 - protein, 161 aa, Homo sapiens
  Payload ID: 1311;
  Gene Symbol: ALOX5AP;
  Gene Name: arachidonate 5-lipoxygenase-activating prt;
  Uniprot ID:  P20292;
  ENSP ID: ENSP00000369858
MDQETVGNVVLLAIVTLISVVQNGFFAHKVEHESRTQNGRSFQRTGTLAFERVYTANQNCVDAYPTFLAVLWSAGLLCSQVPAAFAGLMYLFVRQKYFVGYLGERTQSTPGYIFGKRIILFLFLMSVAGIFNYYLIFFFGSDFENYIKTISTTISPLLLIP

SEQ ID NO: 6005 - protein, 218 aa, Homo sapiens
  Payload ID: 1311;
  Gene Symbol: ALOX5AP;
  Gene Name: arachidonate 5-lipoxygenase-activating prt;
  ENSP ID: ENSP00000479870
MLTFNHDAPWHTQKTLKTSEFGKSFGTLGHIGNISHQCWAGCAAGGRAVLSGEPEANMDQETVGNVVLLAIVTLISVVQNGFFAHKVEHESRTQNGRSFQRTGTLAFERVYTANQNCVDAYPTFLAVLWSAGLLCSQVPAAFAGLMYLFVRQKYFVGYLGERTQSTPGYIFGKRIILFLFLMSVAGIFNYYLIFFFGSDFENYIKTISTTISPLLLIP

SEQ ID NO: 6006 - protein, 843 aa, Homo sapiens
  Payload ID: 1312;
  Gene Symbol: ALOXE3;
  Gene Name: arachidonate lipoxygenase 3;
  Uniprot ID:  Q9BYJ1;
  ENSP ID: ENSP00000314879
MPRGAFRPCLPALYFAFLTCPTPEQRMSGTQAPDIHLGEPARGTGCVRGKQTSIRVQDCGRREEARAASRELRREKAQEHPRESWAHPQPYPAPQPLALRPETQPCPACRSSPPGRLLLRPALPGHPFLLPIMAVYRLCVTTGPYLRAGTLDNISVTLVGTCGESPKQRLDRMGRDFAPGSVQKYKVRCTAELGELLLLRVHKERYAFFRKDSWYCSRICVTEPDGSVSHFPCYQWIEGYCTVELRPGTARTICQDSLPLLLDHRTRELRARQECYRWKIYAPGFPCMVDVNSFQEMESDKKFALTKTTTCVDQGDSSGNRYLPGFPMKIDIPSLMYMEPNVRYSATKTISLLFNAIPASLGMKLRGLLDRKGSWKKLDDMQNIFWCHKTFTTKYVTEHWCEDHFFGYQYLNGVNPVMLHCISSLPSKLPVTNDMVAPLLGQDTCLQTELERGNIFLADYWILAEAPTHCLNGRQQYVAAPLCLLWLSPQGALVPLAIQLSQTPGPDSPIFLPTDSEWDWLLAKTWVRNSEFLVHENNTHFLCTHLLCEAFAMATLRQLPLCHPIYKLLLPHTRYTLQVNTIARATLLNPEGLVDQVTSIGRQGLIYLMSTGLAHFTYTNFCLPDSLRARGVLAIPNYHYRDDGLKIWAAIESFVSEIVGYYYPSDASVQQDSELQAWTGEIFAQAFLGRESSGFPSRLCTPGEMVKFLTAIIFNCSAQHAAVNSGQHDFGAWMPNAPSSMRQPPPQTKGTTTLKTYLDTLPEVNISCNNLLLFWLVSQEPKDQRPLGTYPDEHFTEEAPRRSIAAFQSRLAQISRDIQERNQGLALPYTYLDPPLIENSVSI

SEQ ID NO: 6007 - protein, 867 aa, Homo sapiens
  Payload ID: 1312;
  Gene Symbol: ALOXE3;
  Gene Name: arachidonate lipoxygenase 3;
  ENSP ID: ENSP00000369494
MGRNRSWGTLGSGRTSTPGHQSGPLTRRRAVSQLYRRYLLFSISASDPSLRSGTQAPDIHLGEPARGTGCVRGKQTSIRVQDCGRREEARAASRELRREKAQEHPRESWAHPQPYPAPQPLALRPETQPCPACRSSPPGRLLLRPALPGHPFLLPIMAVYRLCVTTGPYLRAGTLDNISVTLVGTCGESPKQRLDRMGRDFAPGSVQKYKVRCTAELGELLLLRVHKERYAFFRKDSWYCSRICVTEPDGSVSHFPCYQWIEGYCTVELRPGTARTICQDSLPLLLDHRTRELRARQECYRWKIYAPGFPCMVDVNSFQEMESDKKFALTKTTTCVDQGDSSGNRYLPGFPMKIDIPSLMYMEPNVRYSATKTISLLFNAIPASLGMKLRGLLDRKGSWKKLDDMQNIFWCHKTFTTKYVTEHWCEDHFFGYQYLNGVNPVMLHCISSLPSKLPVTNDMVAPLLGQDTCLQTELERGNIFLADYWILAEAPTHCLNGRQQYVAAPLCLLWLSPQGALVPLAIQLSQTPGPDSPIFLPTDSEWDWLLAKTWVRNSEFLVHENNTHFLCTHLLCEAFAMATLRQLPLCHPIYKLLLPHTRYTLQVNTIARATLLNPEGLVDQVTSIGRQGLIYLMSTGLAHFTYTNFCLPDSLRARGVLAIPNYHYRDDGLKIWAAIESFVSEIVGYYYPSDASVQQDSELQAWTGEIFAQAFLGRESSGFPSRLCTPGEMVKFLTAIIFNCSAQHAAVNSGQHDFGAWMPNAPSSMRQPPPQTKGTTTLKTYLDTLPEVNISCNNLLLFWLVSQEPKDQRPLGTYPDEHFTEEAPRRSIAAFQSRLAQISRDIQERNQGLALPYTYLDPPLIENSVSI

SEQ ID NO: 6008 - protein, 711 aa, Homo sapiens
  Payload ID: 1312;
  Gene Symbol: ALOXE3;
  Gene Name: arachidonate lipoxygenase 3;
  Uniprot ID:  Q9BYJ1;
  ENSP ID: ENSP00000400581
MAVYRLCVTTGPYLRAGTLDNISVTLVGTCGESPKQRLDRMGRDFAPGSVQKYKVRCTAELGELLLLRVHKERYAFFRKDSWYCSRICVTEPDGSVSHFPCYQWIEGYCTVELRPGTARTICQDSLPLLLDHRTRELRARQECYRWKIYAPGFPCMVDVNSFQEMESDKKFALTKTTTCVDQGDSSGNRYLPGFPMKIDIPSLMYMEPNVRYSATKTISLLFNAIPASLGMKLRGLLDRKGSWKKLDDMQNIFWCHKTFTTKYVTEHWCEDHFFGYQYLNGVNPVMLHCISSLPSKLPVTNDMVAPLLGQDTCLQTELERGNIFLADYWILAEAPTHCLNGRQQYVAAPLCLLWLSPQGALVPLAIQLSQTPGPDSPIFLPTDSEWDWLLAKTWVRNSEFLVHENNTHFLCTHLLCEAFAMATLRQLPLCHPIYKLLLPHTRYTLQVNTIARATLLNPEGLVDQVTSIGRQGLIYLMSTGLAHFTYTNFCLPDSLRARGVLAIPNYHYRDDGLKIWAAIESFVSEIVGYYYPSDASVQQDSELQAWTGEIFAQAFLGRESSGFPSRLCTPGEMVKFLTAIIFNCSAQHAAVNSGQHDFGAWMPNAPSSMRQPPPQTKGTTTLKTYLDTLPEVNISCNNLLLFWLVSQEPKDQRPLGTYPDEHFTEEAPRRSIAAFQSRLAQISRDIQERNQGLALPYTYLDPPLIENSVSI

SEQ ID NO: 6009 - protein, 609 aa, Homo sapiens
  Payload ID: 1313;
  Gene Symbol: ARAF;
  Gene Name: A-Raf proto-oncogene, serine/threonine kinase;
  ENSP ID: ENSP00000290277
MEPPRGPPANGAEPSRAVGTVKVYLPNKQRTVVTVRDGMSVYDSLDKALKVRGLNQDCCVVYRLIKGRKTVTAWDTAIAPLDGEELIVEVLEDVPLTMHNFVRKTFFSLAFCDFCLKFLFHGFRCQTCGYKFHQHCSSKVPTVCVDMSTNRQQPSRFYHSVQDLSGGSRQHEAPSNRPLNELLTPQGPSPRTQHCDPEHFPFPAPANAPLQRIRSTSTPNVHMVSTTAPMDSNLIQLTGQSFSTDAAGSRGGSDGTPRGSPSPASVSSGRKSPHSKSPAEQRERKSLADDKKKVKNLGYRDSGYYWEVPPSEVQLLKRIGTGSFGTVFRGRWHGDVAVKVLKVSQPTAEQAQAFKNEMQVLRKTRHVNILLFMGFMTRPGFAIITQWCEGSSLYHHLHVADTRFDMVQLIDVARQTAQGMDYLHAKNIIHRDLKSNNIFLHEGLTVKIGDFGLATVKTRWSGAQPLEQPSGSVLWMAAEVIRMQDPNPYSFQSDVYAYGVVLYELMTGSLPYSHIGCRDQIIFMVGRGYLSPDLSKISSNCPKAMRRLLSDCLKFQREERPLFPQILATIELLQRSLPKIERSASEPSLHRTQADELPACLLSAARLVP

SEQ ID NO: 6010 - protein, 186 aa, Homo sapiens
  Payload ID: 1313;
  Gene Symbol: ARAF;
  Gene Name: A-Raf proto-oncogene, serine/threonine kinase;
  Uniprot ID:  P10398;
  ENSP ID: ENSP00000366238
MEPPRGPPANGAEPSRAVGTVKVYLPNKQRTVVTVRDGMSVYDSLDKALKVRGLNQDCCVVYRLIKGRKTVTAWDTAIAPLDGEELIVEVLEDVPLTMHNFVRKTFFSLAFCDFCLKFLFHGFRCQTCGYKFHQHCSSKVPTVCVDMSTNRQQFYHSVQDLSGGSRQHEAPSNRPLNELLTPQGPR

SEQ ID NO: 6011 - protein, 606 aa, Homo sapiens [sequence omitted]

SEQ ID NO: 6012 - protein, 252 aa, Homo sapiens
  Payload ID: 1314;
  Gene Symbol: AANAT;
  Gene Name: aralkylamine N-acetyltransferase;
  Uniprot ID:  Q16613;
  ENSP ID: ENSP00000250615
MEPQSMKGQKRPFGGPWRLKVLGGPPWLRRTLPKLGRPKEAPVARMSTQSTHPLKPEAPRLPPGIPESPSCQRRHTLPASEFRCLTPEDAVSAFEIEREAFISVLGVCPLYLDEIRHFLTLCPELSLGWFEEGCLVAFIIGSLWDKERLMQESLTLHRSGGHIAHLHVLAVHRAFRQQGRGPILLWRYLHHLGSQPAVRRAALMCEDALVPFYERFSFHAVGPCAITVGSLTFMELHCSLRGHPFLRRNSGC

SEQ ID NO: 6013 - protein, 207 aa, Homo sapiens
  Payload ID: 1314;
  Gene Symbol: AANAT;
  Gene Name: aralkylamine N-acetyltransferase;
  Uniprot ID:  Q16613;
  ENSP ID: ENSP00000376282
MSTQSTHPLKPEAPRLPPGIPESPSCQRRHTLPASEFRCLTPEDAVSAFEIEREAFISVLGVCPLYLDEIRHFLTLCPELSLGWFEEGCLVAFIIGSLWDKERLMQESLTLHRSGGHIAHLHVLAVHRAFRQQGRGPILLWRYLHHLGSQPAVRRAALMCEDALVPFYERFSFHAVGPCAITVGSLTFMELHCSLRGHPFLRRNSGC

SEQ ID NO: 6014 - protein, 92 aa, Homo sapiens
  Payload ID: 1314;
  Gene Symbol: AANAT;
  Gene Name: aralkylamine N-acetyltransferase;
  ENSP ID: ENSP00000468239
MSTQSTHPLKPEAPRLPPGIPESPSCQRRHTLPASEFRCLTPEDAVSAFEIEREDSGREAQRLPVTHLSLLPQPSSPSWASAPCTWMRSGTS

SEQ ID NO: 6015 - protein, 151 aa, Homo sapiens
  Payload ID: 1314;
  Gene Symbol: AANAT;
  Gene Name: aralkylamine N-acetyltransferase;
  ENSP ID: ENSP00000468717
MRMRPLSLAVLQQVLGGPPWLRRTLPKLGRPKEAPVARMSTQSTHPLKPEAPRLPPGIPESPSCQRRHTLPASEFRCLTPEDAVSAFEIEREAFISVLGVCPLYLDEIRHFLTLCPELSLGWFEEGCLVAFIIGSLWDKERLMQESLTLHR

SEQ ID NO: 6016 - protein, 498 aa, Homo sapiens
  Payload ID: 1315;
  Gene Symbol: AMZ1;
  Gene Name: archaelysin family metallopeptidase 1;
  Uniprot ID:  Q400G9;
  ENSP ID: ENSP00000308149
MLQCRPAQEFSFGPRALKDALVSTDAALQQLYVSAFSPAERLFLAEAYNPQRTLFCTLLIRTGFDWLLSRPEAPEDFQTFHASLQHRKPRLARKHIYLQPIDLSEEPVGSSLLHQLCSCTEAFFLGLRVKCLPSVAAASIRCSSRPSRDSDRLQLHTDGILSFLKNNKPGDALCVLGLTLSDLYPHEAWSFTFSKFLPGHEVGVCSFARFSGEFPKSGPSAPDLALVEAAADGPEAPLQDRGWALCFSALGMVQCCKVTCHELCHLLGLGNCRWLRCLMQGALSLDEALRRPLDLCPICLRKLQHVLGFRLIERYQRLYTWTQAVVGTWPSQEAGEPSVWEDTPPASADSGMCCESDSEPGTSVSEPLTPDAGSHTFASGPEEGLSYLAASEAPLPPGGPAEAIKEHERWLAMCIQALQREVAEEDLVQVDRAVDALDRWEMFTGQLPATRQDPPSSRDSVGLRKVLGDKFSSLRRKLSARKLARAESAPRPWDGEES

SEQ ID NO: 6017 - protein, 297 aa, Homo sapiens
  Payload ID: 1315;
  Gene Symbol: AMZ1;
  Gene Name: archaelysin family metallopeptidase 1;
  Uniprot ID:  Q400G9;
  ENSP ID: ENSP00000386020
MLQCRPAQEFSFGPRALKDALVSTDAALQQLYVSAFSPAERLFLAEAYNPQRTLFCTLLIRTGFDWLLSRPEAPEDFQTFHASLQHRKPRLARKHIYLQPIDLSEEPVGSSLLHQLCSCTEAFFLGLRVKCLPSVAAASIRCSSRPSRDSDRLQLHTDGILSFLKNNKPGDALCVLGLTLSDLYPHEAWSFTFSKFLPGHGHVPRALPPSGPGELPLAPLPHAGCAQPGRGPAAAPGPLSHLPEEAAACPGFQAHREVPETLHLDSGGGGDVAQPGGGGAVSVGGHPACQRRLGHVL

SEQ ID NO: 6018 - protein, 302 aa, Homo sapiens
  Payload ID: 1316;
  Gene Symbol: AMZ2;
  Gene Name: archaelysin family metallopeptidase 2;
  Uniprot ID:  Q86W34;
  ENSP ID: ENSP00000352831
MQIIRHSEQTLKTALISKNPVLVSQYEKLNAGEQRLMNEAFQPASDLFGPITLHSPSDWITSHPEAPQDFEQFFSDPYRKTPSPNKRSIYIQSIGDILKFLKKKKPEDAFCVVGITMIDLYPRDSWNFVFGQASLTDGVGIFSFARYGSDFYSMHYKGKVKKLKKTSSSDYSIFDNYYIPEITSVLLLRSCKTLTHEIGHIFGLRHCQWLACLMQGSNHLEEADRRPLNLCPICLHKLQCAVGFSIVERYKALVRWIDDESSDTPGATPEHSHEDNGNLPKPVEAFKEWKEWIIKCLAVLQK

SEQ ID NO: 6019 - protein, 360 aa, Homo sapiens
  Payload ID: 1316;
  Gene Symbol: AMZ2;
  Gene Name: archaelysin family metallopeptidase 2;
  Uniprot ID:  Q86W34;
  ENSP ID: ENSP00000352976
MQIIRHSEQTLKTALISKNPVLVSQYEKLNAGEQRLMNEAFQPASDLFGPITLHSPSDWITSHPEAPQDFEQFFSDPYRKTPSPNKRSIYIQSIGSLGNTRIISEEYIKWLTGYCKAYFYGLRVKLLEPVPVSVTRCSFRVNENTHNLQIHAGDILKFLKKKKPEDAFCVVGITMIDLYPRDSWNFVFGQASLTDGVGIFSFARYGSDFYSMHYKGKVKKLKKTSSSDYSIFDNYYIPEITSVLLLRSCKTLTHEIGHIFGLRHCQWLACLMQGSNHLEEADRRPLNLCPICLHKLQCAVGFSIVERYKALVRWIDDESSDTPGATPEHSHEDNGNLPKPVEAFKEWKEWIIKCLAVLQK

SEQ ID NO: 6020 - protein, 360 aa, Homo sapiens; identical to SEQ ID NO: 6019
  Payload ID: 1316;
  Gene Symbol: AMZ2;
  Gene Name: archaelysin family metallopeptidase 2;
  Uniprot ID:  Q86W34;
  ENSP ID: ENSP00000376481

SEQ ID NO: 6021 - protein, 248 aa, Homo sapiens
  Payload ID: 1316;
  Gene Symbol: AMZ2;
  Gene Name: archaelysin family metallopeptidase 2;
  ENSP ID: ENSP00000461935
MQIIRHSEQTLKTALISKNPVLVSQYEKLNAGEQRLMNEAFQPASDLFGPITLHSPSDWITSHPEAPQDFEQFFSDPYRKTPSPNKRSIYIQSIGSLGNTRIISEEYIKWLTGYCKAYFYGLRVKLLEPVPVSVTRCSFRVNENTHNLQIHAGDILKFLKKKKPEDAFCVVGITMIDLYPRDSWNFVFGQASLTDGVGIFSFARYGSDFYSMHYKGKVKKLKKTSSSDYSIFDNYYIPEITSVLLLRS

SEQ ID NO: 6022 - protein, 201 aa, Homo sapiens
  Payload ID: 1316;
  Gene Symbol: AMZ2;
  Gene Name: archaelysin family metallopeptidase 2;
  ENSP ID: ENSP00000462140
MQIIRHSEQTLKTALISKNPVLVSQYEKLNAGEQRLMNEAFQPASDLFGPITLHSPSDWITSHPEAPQDFEQFFSDPYRKTPSPNKRSIYIQSIGSLGNTRIISEEYIKWLTGYCKAYFYGLRVKLLEPVPVSVTRCSFRVNENTHNLQIHAGDILKFLKKKKPEDAFCVVGITMIDLYPRDSWNFVFGQASLTDGTGEVD

SEQ ID NO: 6023 - protein, 197 aa, Homo sapiens
  Payload ID: 1316;
  Gene Symbol: AMZ2;
  Gene Name: archaelysin family metallopeptidase 2;
  ENSP ID: ENSP00000462292
MQIIRHSEQTLKTALISKNPVLVSQYEKLNAGEQRLMNEAFQPASDLFGPITLHSPSDWITSHPEAPQDFEQFFSDPYRKTPSPNKRSIYIQSIGSLGNTRIISEEYIKWLTGYCKAYFYGLRVKLLEPVPVSVTRCSFRVNENTHNLQIHAGDILKFLKKKKPEDAFCVVGITMIDLYPRDSWNFVFGQASLTDGV

SEQ ID NO: 6024 - protein, 195 aa, Homo sapiens
  Payload ID: 1316;
  Gene Symbol: AMZ2;
  Gene Name: archaelysin family metallopeptidase 2;
  ENSP ID: ENSP00000462484
MQIIRHSEQTLKTALISKNPVLVSQYEKLNAGEQRLMNEAFQPASDLFGPITLHSPSDWITSHPEAPQDFEQFFSDPYRKTPSPNKRSIYIQSIGSLGNTRIISEEYIKWLTGYCKAYFYGLRVKLLEPVPVSVTRCSFRVNENTHNLQIHAGDILKFLKKKKPEDAFCVVGITMIDLYPRDSWNFVFGQASLTD

SEQ ID NO: 6025 - protein, 360 aa, Homo sapiens; identical to SEQ ID NO: 6019
  Payload ID: 1316;
  Gene Symbol: AMZ2;
  Gene Name: archaelysin family metallopeptidase 2;
  Uniprot ID:  Q86W34;
  ENSP ID: ENSP00000463012

SEQ ID NO: 6026 - protein, 221 aa, Homo sapiens
  Payload ID: 1316;
  Gene Symbol: AMZ2;
  Gene Name: archaelysin family metallopeptidase 2;
  ENSP ID: ENSP00000463053
MRVRAAAARPRHVRPCKLKASMGAFLPNQDWITSHPEAPQDFEQFFSDPYRKTPSPNKRSIYIQSIGSLGNTRIISEEYIKWLTGYCKAYFYGLRVKLLEPVPVSVTRCSFRVNENTHNLQIHAGDILKFLKKKKPEDAFCVVGITMIDLYPRDSWNFVFGQASLTDGVGIFSFARYGSDFYSMHYKGKVKKLKKTSSSDYSIFDNYYIPEITSVLLLRSC

SEQ ID NO: 6027 - protein, 76 aa, Homo sapiens
  Payload ID: 1316;
  Gene Symbol: AMZ2;
  Gene Name: archaelysin family metallopeptidase 2;
  ENSP ID: ENSP00000463344
  MOD_RES (1)..(1): Any amino acid
XEQRLMNEAFQPASDLFGPITLHSPSDWITSHPEAPQDFEQFFSDPYRKTPSPNKRSIYIQSIGKYWLSRKHQNYQ

SEQ ID NO: 6028 - protein, 206 aa, Homo sapiens
  Payload ID: 1316;
  Gene Symbol: AMZ2;
  Gene Name: archaelysin family metallopeptidase 2;
  ENSP ID: ENSP00000463596
MQIIRHSEQTLKTALISKNPVLVSQYEKLNAGEQRLMNEAFQPASDLFGPITLHSPSDWITSHPEAPQDFEQFFSDPYRKTPSPNKRSIYIQSIGSLGNTRIISEEYIKWLTGYCKAYFYGLRVKLLEPVPVSVTRCSFRVNENTHNLQIHAGDILKFLKKKKPEDAFCVVGITMIDLYPRDSWNFVFGQASLTDGVGIFSFARYG

SEQ ID NO: 6029 - protein, 23 aa, Homo sapiens
  Payload ID: 1316;
  Gene Symbol: AMZ2;
  Gene Name: archaelysin family metallopeptidase 2;
  ENSP ID: ENSP00000463857
RSIYIQSIGKYWGHPEVLEKEET

SEQ ID NO: 6030 - protein, 360 aa, Homo sapiens; identical to SEQ ID NO: 6019
  Payload ID: 1316;
  Gene Symbol: AMZ2;
  Gene Name: archaelysin family metallopeptidase 2;
  Uniprot ID:  Q86W34;
  ENSP ID: ENSP00000464133

SEQ ID NO: 6031 - protein, 360 aa, Homo sapiens; identical to SEQ ID NO: 6019
  Payload ID: 1316;
  Gene Symbol: AMZ2;
  Gene Name: archaelysin family metallopeptidase 2;
  Uniprot ID:  Q86W34;
  ENSP ID: ENSP00000464635

SEQ ID NO: 6032 - protein, 360 aa, Homo sapiens; identical to SEQ ID NO: 6019
  Payload ID: 1316;
  Gene Symbol: AMZ2;
  Gene Name: archaelysin family metallopeptidase 2;
  Uniprot ID:  Q86W34;
  ENSP ID: ENSP00000483162

SEQ ID NO: 6033 - protein, 511 aa, Homo sapiens
  Payload ID: 1317;
  Gene Symbol: ARCN1;
  Gene Name: archain 1;
  Uniprot ID:  P48444;
  ENSP ID: ENSP00000264028
MVLLAAAVCTKAGKAIVSRQFVEMTRTRIEGLLAAFPKLMNTGKQHTFVETESVRYVYQPMEKLYMVLITTKNSNILEDLETLRLFSRVIPEYCRALEENEISEHCFDLIFAFDEIVALGYRENVNLAQIRTFTEMDSHEEKVFRAVRETQEREAKAEMRRKAKELQQARRDAERQGKKAPGFGGFGSSAVSGGSTAAMITETIIETDKPKVAPAPARPSGPSKALKLGAKGKEVDNFVDKLKSEGETIMSSSMGKRTSEATKMHAPPINMESVHMKIEEKITLTCGRDGGLQNMELHGMIMLRISDDKYGRIRLHVENEDKKGVQLQTHPNVDKKLFTAESLIGLKNPEKSFPVNSDVGVLKWRLQTTEESFIPLTINCWPSESGNGCDVNIEYELQEDNLELNDVVITIPLPSGVGAPVIGEIDGEYRHDSRRNTLEWCLPVIDAKNKSGSLEFSIAGQPNDFFPVQVSFVSKKNYCNIQVTKVTQVDGNSPVRFSTETTFLVDKYEIL

SEQ ID NO: 6034 - protein, 552 aa, Homo sapiens
  Payload ID: 1317;
  Gene Symbol: ARCN1;
  Gene Name: archain 1;
  ENSP ID: ENSP00000352385
MAECNLVAILISSIDNPLDKNLDNGGNSCLDFRPLNSFSQPQVLLAAAVCTKAGKAIVSRQFVEMTRTRIEGLLAAFPKLMNTGKQHTFVETESVRYVYQPMEKLYMVLITTKNSNILEDLETLRLFSRVIPEYCRALEENEISEHCFDLIFAFDEIVALGYRENVNLAQIRTFTEMDSHEEKVFRAVRETQEREAKAEMRRKAKELQQARRDAERQGKKAPGFGGFGSSAVSGGSTAAMITETIIETDKPKVAPAPARPSGPSKALKLGAKGKEVDNFVDKLKSEGETIMSSSMGKRTSEATKMHAPPINMESVHMKIEEKITLTCGRDGGLQNMELHGMIMLRISDDKYGRIRLHVENEDKKGVQLQTHPNVDKKLFTAESLIGLKNPEKSFPVNSDVGVLKWRLQTTEESFIPLTINCWPSESGNGCDVNIEYELQEDNLELNDVVITIPLPSGVGAPVIGEIDGEYRHDSRRNTLEWCLPVIDAKNKSGSLEFSIAGQPNDFFPVQVSFVSKKNYCNIQVTKVTQVDGNSPVRFSTETTFLVDKYEIL

SEQ ID NO: 6035 - protein, 423 aa, Homo sapiens
  Payload ID: 1317;
  Gene Symbol: ARCN1;
  Gene Name: archain 1;
  Uniprot ID:  P48444;
  ENSP ID: ENSP00000376599
MIPEYCRALEENEISEHCFDLIFAFDEIVALGYRENVNLAQIRTFTEMDSHEEKVFRAVRETQEREAKAEMRRKAKELQQARRDAERQGKKAPGFGGFGSSAVSGGSTAAMITETIIETDKPKVAPAPARPSGPSKALKLGAKGKEVDNFVDKLKSEGETIMSSSMGKRTSEATKMHAPPINMESVHMKIEEKITLTCGRDGGLQNMELHGMIMLRISDDKYGRIRLHVENEDKKGVQLQTHPNVDKKLFTAESLIGLKNPEKSFPVNSDVGVLKWRLQTTEESFIPLTINCWPSESGNGCDVNIEYELQEDNLELNDVVITIPLPSGVGAPVIGEIDGEYRHDSRRNTLEWCLPVIDAKNKSGSLEFSIAGQPNDFFPVQVSFVSKKNYCNIQVTKVTQVDGNSPVRFSTETTFLVDKYEIL

SEQ ID NO: 6036 - protein, 83 aa, Homo sapiens
  Payload ID: 1317;
  Gene Symbol: ARCN1;
  Gene Name: archain 1;
  ENSP ID: ENSP00000431676
MVLLAAAVCTKAGKAIVSRQFVEMTRTRIEGLLAAFPKLMNTGKQHTFVETESIRMSSVLFPYQFIPSSLCQVVFLSGPVLPV

SEQ ID NO: 6037 - protein, 189 aa, Homo sapiens
  Payload ID: 1317;
  Gene Symbol: ARCN1;
  Gene Name: archain 1;
  ENSP ID: ENSP00000482114
MVLLAAAVCTKAGKAIVSRQFVEMTRTRIEGLLAAFPKLMNTGKQHTFVETESVRYVYQPMEKLYMVLITTKNSNILEDLETLRLFSRVIPEYCRALEENEISEHCFDLIFAFDEIVALGYRENVNLAQIRTFTEMDSHEEKVFRAVRETQEREAKAEMRRKAKELQQAQSVGITGMSHHAQLLLYFNP

SEQ ID NO: 6038 - protein, 740 aa, Homo sapiens
  Payload ID: 1318;
  Gene Symbol: ACAP1;
  Gene Name: ArfGAP with coiled-coil, ankyrin repeat and PH domains 1;
  Uniprot ID:  Q15027;
  ENSP ID: ENSP00000158762
MTVKLDFEECLKDSPRFRASIELVEAEVSELETRLEKLLKLGTGLLESGRHYLAASRAFVVGICDLARLGPPEPMMAECLEKFTVSLNHKLDSHAELLDATQHTLQQQIQTLVKEGLRGFREARRDFWRGAESLEAALTHNAEVPRRRAQEAEEAGAALRTARAGYRGRALDYALQINVIEDKRKFDIMEFVLRLVEAQATHFQQGHEELSRLSQYRKELGAQLHQLVLNSAREKRDMEQRHVLLKQKELGGEEPEPSLREGPGGLVMEGHLFKRASNAFKTWSRRWFTIQSNQLVYQKKYKDPVTVVVDDLRLCTVKLCPDSERRFCFEVVSTSKSCLLQADSERLLQLWVSAVQSSIASAFSQARLDDSPRGPGQGSGHLAIGSAATLGSGGMARGREPGGVGHVVAQVQSVDGNAQCCDCREPAPEWASINLGVTLCIQCSGIHRSLGVHFSKVRSLTLDSWEPELVKLMCELGNVIINQIYEARVEAMAVKKPGPSCSRQEKEAWIHAKYVEKKFLTKLPEIRGRRGGRGRPRGQPPVPPKPSIRPRPGSLRSKPEPPSEDLGSLHPGALLFRASGHPPSLPTMADALAHGADVNWVNGGQDNATPLIQATAANSLLACEFLLQNGANVNQADSAGRGPLHHATILGHTGLACLFLKRGADLGARDSEGRDPLTIAMETANADIVTLLRLAKMREAEAAQGQAGDETYLDIFRDFSLMASDDPEKLSRRSHDLHTL

SEQ ID NO: 6039 - protein, 148 aa, Homo sapiens
  Payload ID: 1318;
  Gene Symbol: ACAP1;
  Gene Name: ArfGAP with coiled-coil, ankyrin repeat and PH domains 1;
  ENSP ID: ENSP00000458173
MMAECLEKFTVSLNHKLDSHAELLDATQHTLQQQIQTLVKEGLRGFREARRDFWRGAESLEAALTHNAEVPRRRAQEAEEAGAALRTARAGYRGRALDYALQINVIEDKRKFDIMEFVLRLVEAQATHFQQGHEELSRLSQYRKELGA

SEQ ID NO: 6040 - protein, 101 aa, Homo sapiens
  Payload ID: 1318;
  Gene Symbol: ACAP1;
  Gene Name: ArfGAP with coiled-coil, ankyrin repeat and PH domains 1;
  ENSP ID: ENSP00000459422
MMAECLEKFTVSLNHKLDSHAELLDATQHTLQQQIQTLVKEGLRGFREARRDFWRGAESLEAALTHNAEVPRRRAQEAEEAGAALRTARAGYRGRALDYAL

SEQ ID NO: 6041 - protein, 44 aa, Homo sapiens
  Payload ID: 1318;
  Gene Symbol: ACAP1;
  Gene Name: ArfGAP with coiled-coil, ankyrin repeat and PH domains 1;
  ENSP ID: ENSP00000460054
MREAEAAQGQAGDETYLDIFRDFSLMASDDPEKLSRRSHDLHTL

SEQ ID NO: 6042 - protein, 44 aa, Homo sapiens; identical to SEQ ID NO: 6041
  Payload ID: 1318;
  Gene Symbol: ACAP1;
  Gene Name: ArfGAP with coiled-coil, ankyrin repeat and PH domains 1;
  ENSP ID: ENSP00000460735

SEQ ID NO: 6043 - protein, 65 aa, Homo sapiens
  Payload ID: 1318;
  Gene Symbol: ACAP1;
  Gene Name: ArfGAP with coiled-coil, ankyrin repeat and PH domains 1;
  ENSP ID: ENSP00000460803
MNGTQPSSKDGKLWGRLRLAKMREAEAAQGQAGDETYLDIFRDFSLMASDDPEKLSRRSHDLHTL

SEQ ID NO: 6044 - protein, 44 aa, Homo sapiens; identical to SEQ ID NO: 6041
  Payload ID: 1318;
  Gene Symbol: ACAP1;
  Gene Name: ArfGAP with coiled-coil, ankyrin repeat and PH domains 1;
  ENSP ID: ENSP00000461314

SEQ ID NO: 6045 - protein, 778 aa, Homo sapiens
  Payload ID: 1319;
  Gene Symbol: ACAP2;
  Gene Name: ArfGAP with coiled-coil, ankyrin repeat and PH domains 2;
  Uniprot ID:  Q15057;
  ENSP ID: ENSP00000324287
MKMTVDFEECLKDSPRFRAALEEVEGDVAELELKLDKLVKLCIAMIDTGKAFCVANKQFMNGIRDLAQYSSNDAVVETSLTKFSDSLQEMINFHTILFDQTQRSIKAQLQNFVKEDLRKFKDAKKQFEKVSEEKENALVKNAQVQRNKQHEVEEATNILTATRKCFRHIALDYVLQINVLQSKRRSEILKSMLSFMYAHLAFFHQGYDLFSELGPYMKDLGAQLDRLVVDAAKEKREMEQKHSTIQQKDFSSDDSKLEYNVDAANGIVMEGYLFKRASNAFKTWNRRWFSIQNNQLVYQKKFKDNPTVVVEDLRLCTVKHCEDIERRFCFEVVSPTKSCMLQADSEKLRQAWIKAVQTSIATAYREKGDESEKLDKKSSPSTGSLDSGNESKEKLLKGESALQRVQCIPGNASCCDCGLADPRWASINLGITLCIECSGIHRSLGVHFSKVRSLTLDTWEPELLKLMCELGNDVINRVYEANVEKMGIKKPQPGQRQEKEAYIRAKYVERKFVDKYSISLSPPEQQKKFVSKSSEEKRLSISKFGPGDQVRASAQSSVRSNDSGIQQSSDDGRESLPSTVSANSLYEPEGERQDSSMFLDSKHLNPGLQLYRASYEKNLPKMAEALAHGADVNWANSEENKATPLIQAVLGGSLVTCEFLLQNGANVNQRDVQGRGPLHHATVLGHTGQVCLFLKRGANQHATDEEGKDPLSIAVEAANADIVTLLRLARMNEEMRESEGLYGQPGDETYQDIFRDFSQMASNNPEKLNRFQQDSQKF

SEQ ID NO: 6046 - protein, 49 aa, Homo sapiens
  Payload ID: 1319;
  Gene Symbol: ACAP2;
  Gene Name: ArfGAP with coiled-coil, ankyrin repeat and PH domains 2;
  ENSP ID: ENSP00000405262
MKMTVDFEECLKDSPRFRCRESRGLFYRLLFPKSLVQCVTSILELGSPR

SEQ ID NO: 6047 - protein, 51 aa, Homo sapiens
  Payload ID: 1319;
  Gene Symbol: ACAP2;
  Gene Name: ArfGAP with coiled-coil, ankyrin repeat and PH domains 2;
  ENSP ID: ENSP00000411336
MIDTGKAFCVANKQFMNGIRDLAQYSSNDAVVETSLTKFSDSLQEMINFHT

SEQ ID NO: 6048 - protein, 228 aa, Homo sapiens
  Payload ID: 1319;
  Gene Symbol: ACAP2;
  Gene Name: ArfGAP with coiled-coil, ankyrin repeat and PH domains 2;
  ENSP ID: ENSP00000412338
  MOD_RES (1)..(1): Any amino acid
XSLGVHFSKVRSLTLDTWEPELLKLMCELGNDVINRVYEANVEKMGIKKPQPGQRQEKEAYIRAKYVERKFVDKYSISLSPPEQQKKFVSKSSEEKRLSISKFGPGDQVRASAQSSVIAVNSDEARRESLFCPDELDSLFSYFDTSSKLRSIRSNDSGIQQSSDDGRESLPSTVSANSLYEPEGERQDSSMFLDSKHLNPGLQLYRASYEKNLPKMAEALAHGADVNW

SEQ ID NO: 6049 - protein, 256 aa, Homo sapiens
  Payload ID: 1319;
  Gene Symbol: ACAP2;
  Gene Name: ArfGAP with coiled-coil, ankyrin repeat and PH domains 2;
  ENSP ID: ENSP00000413388
  MOD_RES (1)..(1): Any amino acid
XSEEKENALVKNAQVQRNKQHEVEEATNILTATRKCFRHIALDYVLQINVLQSKRRSEILKSMLSFMYAHLAFFHQGYDLFSELGPYMKDLGAQLDRLVVDAAKEKREMEQKHSTIQQKAALQDFSSDDSKLEYNVDAANGIVMEGYLFKRASNAFKTWNRRWFSIQNNQLVYQKKFKDNPTVVVEDLRLCTVKHCEDIERRFCFEVVSPTKSCMLQADSEKLRQAWIKAVQTSIATAYREKGDESEKLDKKSSPS

SEQ ID NO: 6050 - protein, 777 aa, Homo sapiens [sequence omitted]

SEQ ID NO: 6051 - protein, 547 aa, Homo sapiens
  Payload ID: 1319;
  Gene Symbol: ACAP2;
  Gene Name: ArfGAP with coiled-coil, ankyrin repeat and PH domains 2;
  ENSP ID: ENSP00000489156
MKMTVDFEECLKDSPRFRAALEEVEGDVAELELKLDKLVKLCIAMIDTGKAFCVANKQFMNGIRDLAQYSSNDAVVETSLTKFSDSLQEMINFHTILFDQTQRSIKAQLQNFVKEDLRKFKDAKKQFEKVSEEKENALVKNAQVQRNKQHEVEEATNILTATRKCFRHIALDYVLQINVLQSKRRSEILKSMLSFMYAHLAFFHQGYDLFSELGPYMKDLGAQLDRLVVDAAKEKREMEQKHSTIQQKDFSSDDSKLEYNVDAANGIVMEGYLFKRASNAFKTWNRKKPDHIRRWFSIQNNQLVYQKKFKDNPTVVVEDLRLCTVKHCEDIERRFCFEVVSPTKSCMLQADSEKLRQAWIKAVQTSIATAYREKGDESEKLDKKSSPSTGSLDSGNESKEKLLKGESALQRVQCIPGNASCCDCGLADPRWASINLGITLCIECSGIHRSLGVHFSKVRSLTLDTWEPELLKLMCELGNDVINRVYEANVEKMGIKKPQPGQRQEKEAYIRAKYVERKFVDKYSISLSPPEQQKKFVSKSSEEKRLS

SEQ ID NO: 6052 - protein, 759 aa, Homo sapiens
  Payload ID: 1320;
  Gene Symbol: ACAP3;
  Gene Name: ArfGAP with coiled-coil, ankyrin repeat and PH domains 3;
  Uniprot ID:  Q96P50;
  ENSP ID: ENSP00000321139
MVEAGKAYVSTSRLFVSGVRDLSQQCQGDTVISECLQRFADSLQEVVNYHMILFDQAQRSVRQQLQSFVKEDVRKFKETKKQFDKVREDLELSLVRNAQAPRHRPHEVEEATGALTLTRKCFRHLALDYVLQINVLQAKKKFEILDSMLSFMHAQSSFFQQGYSLLHQLDPYMKKLAAELDQLVIDSAVEKREMERKHAAIQQRTLLQDFSYDESKVEFDVDAPSGVVMEGYLFKRASNAFKTWNRRWFSIQNSQLVYQKKLKDALTVVVDDLRLCSVKPCEDIERRFCFEVLSPTKSCMLQADSEKLRQAWVQAVQASIASAYRESPDSCYSERLDRTASPSTSSIDSATDTRERGVKGESVLQRVQSVAGNSQCGDCGQPDPRWASINLGVLLCIECSGIHRSLGVHCSKVRSLTLDSWEPELLKLMCELGNSAVNQIYEAQCEGAGSRKPTASSSRQDKEAWIKDKYVEKKFLRKAPMAPALEAPRRWRVQKCLRPHSSPRAPTARRKVRLEPVLPCVAALSSVGTLDRKFRRDSLFCPDELDSLFSYFDAGAAGAGPRKGAESEESSGEADGDTEAEAWGLADVRELHPGLLAHRAARARDLPALAAALAHGAEVNWADAEDEGKTPLVQAVLGGSLIVCEFLLQNGADVNQRDSRGRAPLHHATLLGRTGQVCLFLKRGADQHALDQEQRDPLAIAVQAANADIVTLLRLARMAEEMREAEAAPGPPGALAGSPTELQFRRCIQEFISLHLEES

SEQ ID NO: 6053 - protein, 834 aa, Homo sapiens
  Payload ID: 1320;
  Gene Symbol: ACAP3;
  Gene Name: ArfGAP with coiled-coil, ankyrin repeat and PH domains 3;
  Uniprot ID:  Q96P50;
  ENSP ID: ENSP00000346733
MTVEFEECVKDSPRFRATIDEVETDVVEIEAKLDKLVKLCSGMVEAGKAYVSTSRLFVSGVRDLSQQCQGDTVISECLQRFADSLQEVVNYHMILFDQAQRSVRQQLQSFVKEDVRKFKETKKQFDKVREDLELSLVRNAQAPRHRPHEVEEATGALTLTRKCFRHLALDYVLQINVLQAKKKFEILDSMLSFMHAQSSFFQQGYSLLHQLDPYMKKLAAELDQLVIDSAVEKREMERKHAAIQQRTLLQDFSYDESKVEFDVDAPSGVVMEGYLFKRASNAFKTWNRRWFSIQNSQLVYQKKLKDALTVVVDDLRLCSVKPCEDIERRFCFEVLSPTKSCMLQADSEKLRQAWVQAVQASIASAYRESPDSCYSERLDRTASPSTSSIDSATDTRERGVKGESVLQRVQSVAGNSQCGDCGQPDPRWASINLGVLLCIECSGIHRSLGVHCSKVRSLTLDSWEPELLKLMCELGNSAVNQIYEAQCEGAGSRKPTASSSRQDKEAWIKDKYVEKKFLRKAPMAPALEAPRRWRVQKCLRPHSSPRAPTARRKVRLEPVLPCVAALSSVGTLDRKFRRDSLFCPDELDSLFSYFDAGAAGAGPRSLSSDSGLGGSSDGSSDVLAFGSGSVVDSVTEEEGAESEESSGEADGDTEAEAWGLADVRELHPGLLAHRAARARDLPALAAALAHGAEVNWADAEDEGKTPLVQAVLGGSLIVCEFLLQNGADVNQRDSRGRAPLHHATLLGRTGQVCLFLKRGADQHALDQEQRDPLAIAVQAANADIVTLLRLARMAEEMREAEAAPGPPGALAGSPTELQFRRCIQEFISLHLEES

SEQ ID NO: 6054 - protein, 52 aa, Homo sapiens
  Payload ID: 1320;
  Gene Symbol: ACAP3;
  Gene Name: ArfGAP with coiled-coil, ankyrin repeat and PH domains 3;
  ENSP ID: ENSP00000347075
MTVEFEECVKDSPRFRAARGEQAAGAAFKAWGRPLTRWRRTWWRLRPNWTSW

SEQ ID NO: 6055 - protein, 374 aa, Homo sapiens
  Payload ID: 1321;
  Gene Symbol: ADAP1;
  Gene Name: ArfGAP with dual PH domains 1;
  Uniprot ID:  O75689;
  ENSP ID: ENSP00000265846
MAKERRRAVLELLQRPGNARCADCGAPDPDWASYTLGVFICLSCSGIHRNIPQVSKVKSVRLDAWEEAQVEFMASHGNDAARARFESKVPSFYYRPTPSDCQLLREQWIRAKYERQEFIYPEKQEPYSAGYREGFLWKRGRDNGQFLSRKFVLTEREGALKYFNRNDAKEPKAVMKIEHLNATFQPAKIGHPHGLQVTYLKDNSTRNIFIYHEDGKEIVDWFNALRAARFHYLQVAFPGAGDADLVPKLSRNYLKEGYMEKTGPKQTEGFRKRWFTMDDRRLMYFKDPLDAFARGEVFIGSKESGYTVLHGFPPSTQGHHWPHGITIVTPDRKFLFACETESDQREWVAAFQKAVDRPMLPQEYAVEAHFKHKP

SEQ ID NO: 6056 - protein, 192 aa, Homo sapiens
  Payload ID: 1321;
  Gene Symbol: ADAP1;
  Gene Name: ArfGAP with dual PH domains 1;
  ENSP ID: ENSP00000391315
  MOD_RES (1)..(1): Any amino acid
XCRVQPLCEQLQFMASHGNDAARARFESKVPSFYYRPTPSDCQLLREQWIRAKYERQEFIYPEKQEPYSAGYREGFLWKRGRDNGQFLSRKFVLTEREGALKYFNRNDAKEPKAVMKIEHLNATFQPAKIGHPHGLQVTYLKDNSTRNIFIYHEDGKEIVDWFNALRAARFHYLQVAFPGAGDADLVPKLSR

SEQ ID NO: 6057 - protein, 162 aa, Homo sapiens
  Payload ID: 1321;
  Gene Symbol: ADAP1;
  Gene Name: ArfGAP with dual PH domains 1;
  ENSP ID: ENSP00000394973
MLGCAEEGHASLGRDPDWASYTLGVFICLSCSGIHRNIPQVSKVKSVRLDAWEEAQVEFMASHGNDAARARFESKVPSFYYRPTPSDCQLLREQWIRAKYERQEFIYPEKQEPYSAGYREGFLWKRGRDNGQFLSRKFVLTEREGALKYFNRNDAKEPKAVM

SEQ ID NO: 6058 - protein, 207 aa, Homo sapiens
  Payload ID: 1321;
  Gene Symbol: ADAP1;
  Gene Name: ArfGAP with dual PH domains 1;
  ENSP ID: ENSP00000404217
  MOD_RES (1)..(1): Any amino acid
XNSLGVEKAGAAACAPGPCRACVWVVVSAMVLASLELLREQWIRAKYERQEFIYPEKQEPYSAGYREGFLWKRGRDNGQFLSRKFVLTEREGALKYFNRNDAKEPKAVMKIEHLNATFQPAKIGHPHGLQVTYLKDNSTRNIFIYHEDGKEIVDWFNALRAARFHYLQVAFPGAGDADLVPKLSRNYLKEGYMEKTGPKQTEGFRKR

SEQ ID NO: 6059 - protein, 302 aa, Homo sapiens
  Payload ID: 1321;
  Gene Symbol: ADAP1;
  Gene Name: ArfGAP with dual PH domains 1;
  Uniprot ID:  O75689;
  ENSP ID: ENSP00000407267
MASHGNDAARARFESKVPSFYYRPTPSDCQLLREQWIRAKYERQEFIYPEKQEPYSAGYREGFLWKRGRDNGQFLSRKFVLTEREGALKYFNRNDAKEPKAVMKIEHLNATFQPAKIGHPHGLQVTYLKDNSTRNIFIYHEDGKEIVDWFNALRAARFHYLQVAFPGAGDADLVPKLSRNYLKEGYMEKTGPKQTEGFRKRWFTMDDRRLMYFKDPLDAFARGEVFIGSKESGYTVLHGFPPSTQGHHWPHGITIVTPDRKFLFACETESDQREWVAAFQKAVDRPMLPQEYAVEAHFKHKP

SEQ ID NO: 6060 - protein, 245 aa, Homo sapiens
  Payload ID: 1321;
  Gene Symbol: ADAP1;
  Gene Name: ArfGAP with dual PH domains 1;
  ENSP ID: ENSP00000409129
YFNRNDAKEPKAVMKIEHLNATFQPAKIGHPHGLQVTYLKDNSTRNIFIYHEDGKTCLSYKIRIFIKIAPSERKASWPRPQQHQGHREIVDWFNALRAARFHYLQVAFPGAGDADLVPKLSRNYLKEGYMEKTGPKQTEGFRKRWFTMDDRRLMYFKDPLDAFARGEVFIGSKESGYTVLHGFPPSTQGHHWPHGITIVTPDRKFLFACETESDQREWVAAFQKAVDRPMLPQEYAVEAHFKHKP

SEQ ID NO: 6061 - protein, 357 aa, Homo sapiens
  Payload ID: 1321;
  Gene Symbol: ADAP1;
  Gene Name: ArfGAP with dual PH domains 1;
  ENSP ID: ENSP00000414436
  MOD_RES (1)..(1): Any amino acid
XSFSLSLFRKHVLGPCSVSLQSPLRDSVLATSGSLAHQPISRPPCLAPVGSLLNFMASHGNDAARARFESKVPSFYYRPTPSDCQLLREQWIRAKYERQEFIYPEKQEPYSAGYREGFLWKRGRDNGQFLSRKFVLTEREGALKYFNRNDAKEPKAVMKIEHLNATFQPAKIGHPHGLQVTYLKDNSTRNIFIYHEDGKEIVDWFNALRAARFHYLQVAFPGAGDADLVPKLSRNYLKEGYMEKTGPKQTEGFRKRWFTMDDRRLMYFKDPLDAFARGEVFIGSKESGYTVLHGFPPSTQGHHWPHGITIVTPDRKFLFACETESDQREWVAAFQKAVDRPMLPQEYAVEAHFKHKP

SEQ ID NO: 6062 - protein, 187 aa, Homo sapiens
  Payload ID: 1321;
  Gene Symbol: ADAP1;
  Gene Name: ArfGAP with dual PH domains 1;
  ENSP ID: ENSP00000416545
  MOD_RES (1)..(1): Any amino acid
XGCGLRRVVFRSLKFMASHGNDAARARFESKVPSFYYRPTPSDCQLLREQWIRAKYERQEFIYPEKQEPYSAGYREGFLWKRGRDNGQFLSRKFVLTEREGALKYFNRNDAKEPKAVMKIEHLNATFQPAKIGHPHGLQVTYLKDNSTRNIFIYHEDGKEIVDWFNALRAARFHYLQVAFPGAGDAD

SEQ ID NO: 6063 - protein, 385 aa, Homo sapiens
  Payload ID: 1321;
  Gene Symbol: ADAP1;
  Gene Name: ArfGAP with dual PH domains 1;
  Uniprot ID:  O75689;
  ENSP ID: ENSP00000442682
MFQFVFSRVYCINPARRKWKEFEKMLGCAEEGHASLGRDPDWASYTLGVFICLSCSGIHRNIPQVSKVKSVRLDAWEEAQVEFMASHGNDAARARFESKVPSFYYRPTPSDCQLLREQWIRAKYERQEFIYPEKQEPYSAGYREGFLWKRGRDNGQFLSRKFVLTEREGALKYFNRNDAKEPKAVMKIEHLNATFQPAKIGHPHGLQVTYLKDNSTRNIFIYHEDGKEIVDWFNALRAARFHYLQVAFPGAGDADLVPKLSRNYLKEGYMEKTGPKQTEGFRKRWFTMDDRRLMYFKDPLDAFARGEVFIGSKESGYTVLHGFPPSTQGHHWPHGITIVTPDRKFLFACETESDQREWVAAFQKAVDRPMLPQEYAVEAHFKHKP

SEQ ID NO: 6064 - protein, 279 aa, Homo sapiens
  Payload ID: 1321;
  Gene Symbol: ADAP1;
  Gene Name: ArfGAP with dual PH domains 1;
  ENSP ID: ENSP00000478011
MVLASLELLREQWIRAKYERQEFIYPEKQEPYSAGYREGFLWKRGRDNGQFLSRKFVLTEREGALKYFNRNDAKEPKAVMKIEHLNATFQPAKIGHPHGLQVTYLKDNSTRNIFIYHEDGKEIVDWFNALRAARFHYLQVAFPGAGDADLVPKLSRNYLKEGYMEKTGPKQTEGFRKRWFTMDDRRLMYFKDPLDAFARGEVFIGSKESGYTVLHGFPPSTQGHHWPHGITIVTPDRKFLFACETESDQREWVAAFQKAVDRPMLPQEYAVEAHFKHKP

SEQ ID NO: 6065 - protein, 302 aa, Homo sapiens; identical to SEQ ID NO: 6059
  Payload ID: 1321;
  Gene Symbol: ADAP1;
  Gene Name: ArfGAP with dual PH domains 1;
  Uniprot ID:  O75689;
  ENSP ID: ENSP00000481154

SEQ ID NO: 6066 - protein, 381 aa, Homo sapiens
  Payload ID: 1322;
  Gene Symbol: ADAP2;
  Gene Name: ArfGAP with dual PH domains 2;
  Uniprot ID:  Q9NPF8;
  ENSP ID: ENSP00000329468
MGDRERNKKRLLELLRAPDTGNAHCADCGAADPDWASYKLGIFICLNCCGVHRNFPDISRVKSVRLDFWDDSIVEFMIHNGNLRVKAKFEARVPAFYYIPQANDCLVLKEQWIRAKYERREFMADGETISLPGNREGFLWKRGRDNSQFLRRKFVLLAREGLLKYFTKEQGKSPKAVISIKDLNATFQTEKIGHPHGLQITYRRDGHTRNLFVYHESGKEIVDWFNALRAARLQYLKMAFPELPESELVPFLTRNYLKQGFMEKTGPKQKEPFKKRWFALDCHERRLLYYKNPLDAFEQGQVFLGNKEQGYEAYEDLPKGIRGNRWKAGLTIVTPERRFVLTCPSEKEQQEWLESLRGVLSSPLTPLNRLTASTESGRSSR

SEQ ID NO: 6067 - protein, 98 aa, Homo sapiens
  Payload ID: 1322;
  Gene Symbol: ADAP2;
  Gene Name: ArfGAP with dual PH domains 2;
  ENSP ID: ENSP00000462634
ESGKEIVDWFNALRAARLQYLKMAFPELPESEQKEPFKKRWFALDCHERRLLYYKNPLDAFEQGQVFLGNKEQGYEAYEDLPKGIRGNRWKAGLTIVT

SEQ ID NO: 6068 - protein, 84 aa, Homo sapiens
  Payload ID: 1322;
  Gene Symbol: ADAP2;
  Gene Name: ArfGAP with dual PH domains 2;
  ENSP ID: ENSP00000462832
MGDRERNKKRLLELLRAPDTGNAHCADCGAADPDWASYKLGIFICLNCCGVHRNFPDISRVKSVRLDFWDDSIVEGLKGTMDSS

SEQ ID NO: 6069 - protein, 145 aa, Homo sapiens
  Payload ID: 1322;
  Gene Symbol: ADAP2;
  Gene Name: ArfGAP with dual PH domains 2;
  ENSP ID: ENSP00000463649
  MOD_RES (1)..(1): Any amino acid
XFVYHESGKEIVDWFNALRAARLQYLKMAFPELPESELVPFLTRNYLKQGFMEKTGPKQKEPFKKRWFALDCHERRLLYYKNPLDAFEQGQVFLGNKEQGYEAYEDLPKGIRGNRWKAGLTIVTPERRFVLTCPTASTESGRSSR

SEQ ID NO: 6070 - protein, 106 aa, Homo sapiens
  Payload ID: 1322;
  Gene Symbol: ADAP2;
  Gene Name: ArfGAP with dual PH domains 2;
  ENSP ID: ENSP00000464120
MGDRERNKKRLLELLRAPDTGNAHCADCGAADPDWASYKLGIFICLNCCGVHRNFPDISRVKSVRLDFWDDSIVEFMIHNGNLRVKAKFEARVPAFYYIPQANDCL

SEQ ID NO: 6071 - protein, 387 aa, Homo sapiens
  Payload ID: 1322;
  Gene Symbol: ADAP2;
  Gene Name: ArfGAP with dual PH domains 2;
  ENSP ID: ENSP00000464121
MGDRERNKKRLLELLRAPDTGNAHCADCGAADPDWASYKLGIFICLNCCGVHRNFPDISRVKSVRLDFWDDSIVEVAVVLQFMIHNGNLRVKAKFEARVPAFYYIPQANDCLVLKEQWIRAKYERREFMADGETISLPGNREGFLWKRGRDNSQFLRRKFVLLAREGLLKYFTKEQGKSPKAVISIKDLNATFQTEKIGHPHGLQITYRRDGHTRNLFVYHESGKEIVDWFNALRAARLQYLKMAFPELPESELVPFLTRNYLKQGFMEKTGPKQKEPFKKRWFALDCHERRLLYYKNPLDAFEQGQVFLGNKEQGYEAYEDLPKGIRGNRWKAGLTIVTPERRFVLTCPSEKEQQEWLESLRGVLSSPLTPLNRLTASTESGRSSR

SEQ ID NO: 6072 - protein, 333 aa, Homo sapiens
  Payload ID: 1322;
  Gene Symbol: ADAP2;
  Gene Name: ArfGAP with dual PH domains 2;
  ENSP ID: ENSP00000464155
MGDRERNKKRLLELLRAPDTGNAHCADCGAADPDWASYKLGIFICLNCCGVHRNFPDISRVKSVRLDFWDDSIVEFMIHNGNLRVKAKFEARVPAFYYIPQANDCLVLKEQWIRAKYERREFMADGETISLPGNREGFLWKRGRDNSQFLRRKFVLLAREGLLKYFTKEQGKSPKAVISIKDLNATFQTEKIGHPHGLQITYRRDGHTRNLFVYHESGKLVPFLTRNYLKQGFMEKTGPKQKEPFKKRWFALDCHERRLLYYKNPLDAFEQGQVFLGNKEQGYEAYEDLPKGIRGNRWKAGLTIVTPERRFVLTCPSEKEQQEWLESLRGVLS

SEQ ID NO: 6073 - protein, 114 aa, Homo sapiens
  Payload ID: 1322;
  Gene Symbol: ADAP2;
  Gene Name: ArfGAP with dual PH domains 2;
  ENSP ID: ENSP00000467079
MADGETISLPGNREGFLWKRGRDNSQFLRRKFVLLAREGLLKYFTKEQGKSPKAVISIKDLNATFQTEKIGHPHGLQITYRRDGHTRNLFVYHESGKEIVDWFNALRAARLQYL

SEQ ID NO: 6074 - protein, 562 aa, Homo sapiens
  Payload ID: 1323;
  Gene Symbol: AGFG1;
  Gene Name: ArfGAP with FG repeats 1;
  Uniprot ID:  P52594;
  ENSP ID: ENSP00000312059
MAASAKRKQEEKHLKMLRDMTGLPHNRKCFDCDQRGPTYVNMTVGSFVCTSCSGSLRGLNPPHRVKSISMTTFTQQEIEFLQKHGNEVCKQIWLGLFDDRSSAIPDFRDPQKVKEFLQEKYEKKRWYVPPEQAKVVASVHASISGSSASSTSSTPEVKPLKSLLGDSAPTLHLNKGTPSQSPVVGRSQGQQQEKKQFDLLSDLGSDIFAAPAPQSTATANFANFAHFNSHAAQNSANADFANFDAFGQSSGSSNFGGFPTASHSPFQPQTTGGSAASVNANFAHFDNFPKSSSADFGTFNTSQSHQTASAVSKVSTNKAGLQTADKYAALANLDNIFSAGQGGDQGSGFGTTGKAPVGSVVSVPSQSSASSDKYAALAELDSVFSSAATSSNAYTSTSNASSNVFGTVPVVASAQTQPASSSVPAPFGATPSTNPFVAAAGPSVASSTNPFQTNARGATAATFGTASMSMPTGFGTPAPYSLPTSFSGSFQQPAFPAQAAFPQQTAFSQQPNGAGFAAFGQTKPVVTPFGQVAAAGVSSNPFMTGAPTGQFPTGSSSTNPFL

SEQ ID NO: 6075 - protein, 522 aa, Homo sapiens
  Payload ID: 1323;
  Gene Symbol: AGFG1;
  Gene Name: ArfGAP with FG repeats 1;
  Uniprot ID:  P52594;
  ENSP ID: ENSP00000362775
MAASAKRKQEEKHLKMLRDMTGLPHNRKCFDCDQRGPTYVNMTVGSFVCTSCSGSLRGLNPPHRVKSISMTTFTQQEIEFLQKHGNEVCKQIWLGLFDDRSSAIPDFRDPQKVKEFLQEKYEKKRWYVPPEQAKVVASVHASISGSSASSTSSTPEVKPLKSLLGDSAPTLHLNKGTPSQSPVVGRSQGQQQEKKQFDLLSDLGSDIFAAPAPQSTATANFANFAHFNSHAGGSAASVNANFAHFDNFPKSSSADFGTFNTSQSHQTASAVSKVSTNKAGLQTADKYAALANLDNIFSAGQGGDQGSGFGTTGKAPVGSVVSVPSQSSASSDKYAALAELDSVFSSAATSSNAYTSTSNASSNVFGTVPVVASAQTQPASSSVPAPFGATPSTNPFVAAAGPSVASSTNPFQTNARGATAATFGTASMSMPTGFGTPAPYSLPTSFSGSFQQPAFPAQAAFPQQTAFSQQPNGAGFAAFGQTKPVVTPFGQVAAAGVSSNPFMTGAPTGQFPTGSSSTNPFL

SEQ ID NO: 6076 - protein, 541 aa, Homo sapiens
  Payload ID: 1323;
  Gene Symbol: AGFG1;
  Gene Name: ArfGAP with FG repeats 1;
  ENSP ID: ENSP00000387154
MAASAKRKQEEKHLKMLRDMTGLPHNRKCFDCDQRGPTYVNMTVGSFVCTSCSGSLRGLNPPHRVKSISMTTFTQQEIEFLQKHGNEVCKQIWLGLFDDRSSAIPDFRDPQKVKEFLQEKYEKKRWYVPPEQAKVVASVHASISGSSASSTSSTPEVKPLKSLLGDSAPTLHLNKGTPSQSPVVGRSQGQQQEKKQFDLLSDLGSDIFAAPAPQSTATANFANFAHFNSHAAQNSANADFANFDAFGQSSGSSNFGGFPTASHSPFQPQTTGGSAASVNANFAHFDNFPKSSSADFGTFNTSQSHQTASAVSKVSTNKAGLQTADKYAALANLDNIFSAGQVPSQSSASSDKYAALAELDSVFSSAATSSNAYTSTSNASSNVFGTVPVVASAQTQPASSSVPAPFGATPSTNPFVAAAGPSVASSTNPFQTNARGATAATFGTASMSMPTGFGTPAPYSLPTSFSGSFQQPAFPAQAAFPQQTAFSQQPNGAGFAAFGQTKPVVTPFGQVAAAGVSSNPFMTGAPTGQFPTGSSSTNPFL

SEQ ID NO: 6077 - protein, 560 aa, Homo sapiens
  Payload ID: 1323;
  Gene Symbol: AGFG1;
  Gene Name: ArfGAP with FG repeats 1;
  Uniprot ID:  P52594;
  ENSP ID: ENSP00000387218
MAASAKRKQEEKHLKMLRDMTGLPHNRKCFDCDQRGPTYVNMTVGSFVCTSCSGSLRGLNPPHRVKSISMTTFTQQEIEFLQKHGNEVCKQIWLGLFDDRSSAIPDFRDPQKVKEFLQEKYEKKRWYVPPEQAKVVASVHASISGSSASSTSSTPEVKPLKSLLGDSAPTLHLNKGTPSQSPVVGRSQGQQQEKKQFDLLSDLGSDIFAAPAPQSTATANFANFAHFNSHAAQNSANADFANFDAFGQSSGSSNFGGFPTASHSPFQPQTTGGSAASVNANFAHFDNFPKSSSADFGTFNTSQSHQTASAVSKVSTNKAGLQTADKYAALANLDNIFSAGQGGDQGSGFGTTGKAPVGSVVSVPSQSSASSDKYAALAELDSVFSSAATSSNAYTSTSNASSNVFGTVPVVASAQTQPASSSVPAPFGATPSTNPFVAAAGPSVASSTNPFQTNARGATAATFGTASMSMPTGFGTPAPYSLPTSFSGSFQQPAFPAQAAFPQQTAFSQQPNGFAAFGQTKPVVTPFGQVAAAGVSSNPFMTGAPTGQFPTGSSSTNPFL

SEQ ID NO: 6078 - protein, 584 aa, Homo sapiens
  Payload ID: 1323;
  Gene Symbol: AGFG1;
  Gene Name: ArfGAP with FG repeats 1;
  Uniprot ID:  P52594;
  ENSP ID: ENSP00000387282
MAASAKRKQEEKHLKMLRDMTGLPHNRKCFDCDQRGPTYVNMTVGSFVCTSCSGSLRGLNPPHRVKSISMTTFTQQEIEFLQKHGNEVCKQIWLGLFDDRSSAIPDFRDPQKVKEFLQEKYEKKRWYVPPEQAKVVASVHASISGSSASSTSSTPEVKPLKSLLGDSAPTLHLNKGTPSQSPVVGRSQGQQQEKKQFDLLSDLGSDIFAAPAPQSTATANFANFAHFNSHAAQNSANADFANFDAFGQSSGSSNFGGFPTASHSPFQPQTTAFRMLSSSCSFGEFTSAFPLQATHSGSAASVNANFAHFDNFPKSSSADFGTFNTSQSHQTASAVSKVSTNKAGLQTADKYAALANLDNIFSAGQGGDQGSGFGTTGKAPVGSVVSVPSQSSASSDKYAALAELDSVFSSAATSSNAYTSTSNASSNVFGTVPVVASAQTQPASSSVPAPFGATPSTNPFVAAAGPSVASSTNPFQTNARGATAATFGTASMSMPTGFGTPAPYSLPTSFSGSFQQPAFPAQAAFPQQTAFSQQPNGFAAFGQTKPVVTPFGQVAAAGVSSNPFMTGAPTGQFPTGSSSTNPFL

SEQ ID NO: 6079 - protein, 132 aa, Homo sapiens
  Payload ID: 1323;
  Gene Symbol: AGFG1;
  Gene Name: ArfGAP with FG repeats 1;
  ENSP ID: ENSP00000396469
  MOD_RES (1)..(1): Any amino acid
XTNPFQTNARGATGLSGAMHSQVFPHAHFAATFGTASMSMPTGFGTPAPYSLPTSFSGSFQQPAFPAQAAFPQQTAFSQQPNGAGFAAFGQTKPVVTPFGQVAAAGVSSNPFMTGAPTGQFPTGSSSTNPFL

SEQ ID NO: 6080 - protein, 237 aa, Homo sapiens
  Payload ID: 1323;
  Gene Symbol: AGFG1;
  Gene Name: ArfGAP with FG repeats 1;
  ENSP ID: ENSP00000405429
MLCFKRRHKVCKQIWLGLFDDRSSAIPDFRDPQKVKEFLQEKYEKKRWYVPPEQAKVVASVHASISGSSASSTSSTPEVKPLKSLLGDSAPTLHLNKGTPSQSPVVGRSQGQQQEKKQFDLLSDLGSDIFAAPAPQSTATANFANFAHFNSHAAQNSANADFANFDAFGQSSGSSNFGGFPTASHSPFQPQTTGGSAASVNANFAHFDNFPKSSSADFGTFNTSQSHQTASAVSKVS

SEQ ID NO: 6081 - protein, 481 aa, Homo sapiens
  Payload ID: 1324;
  Gene Symbol: AGFG2;
  Gene Name: ArfGAP with FG repeats 2;
  Uniprot ID:  O95081;
  ENSP ID: ENSP00000300176
MVMAAKKGPGPGGGVSGGKAEAEAASEVWCRRVRELGGCSQAGNRHCFECAQRGVTYVDITVGSFVCTTCSGLLRGLNPPHRVKSISMTTFTEPEVVFLQSRGNEVCRKIWLGLFDARTSLVPDSRDPQKVKEFLQEKYEKKRWYVPPDQVKGPTYTKGSASTPVQGSIPEGKPLRTLLGDPAPSLSVAASTSSQPVSQSHARTSQARSTQPPPHSSVKKASTDLLADIGGDPFAAPQMAPAFAAFPAFGGQTPSQGGFANFDAFSSGPSSSVFGSLPPAGQASFQAQPTPAGSSQGTPFGATPLAPASQPNSLADVGSFLGPGVPAAGVPSSLFGMAGQVPPLQSVTMGGGGGSSTGLAFGAFTNPFTAPAAQSPLPSTNPFQPNGLAPGPGFGMSSAGPGFPQAVPPTGAFASSFPAPLFPPQTPLVQQQNGSSFGDLGSAKLGQRPLSQPAGISTNPFMTGPSSSPFASKPPTTNPFL

SEQ ID NO: 6082 - protein, 223 aa, Homo sapiens
  Payload ID: 1324;
  Gene Symbol: AGFG2;
  Gene Name: ArfGAP with FG repeats 2;
  ENSP ID: ENSP00000388594
  MOD_RES (1)..(1): Any amino acid
XSSVFGSLPPAGQASFQAQPTPAASRMLTESYSFGSSQGTPFGATPLAPASQPNSLADVGSFLGPGVPAAGVPSSLFGMAGQVPPLQSVTMGGGGGSSTGLAFGAFTNPFTAPAAQSPLPSTNPFQPNGLAPGPGFGMSSAGPGFPQAVPPTGAFASSFPAPLFPPQTPLVQQQNGSSFGDLGSAKLGQRPLSQPAGISTNPFMTGPSSSPFASKPPTTNPFL

SEQ ID NO: 6083 - protein, 155 aa, Homo sapiens
  Payload ID: 1324;
  Gene Symbol: AGFG2;
  Gene Name: ArfGAP with FG repeats 2;
  ENSP ID: ENSP00000394453
MVMAAKKGPGPGGGVSGGKAEAEAASEVWCRRVRELGGCSQAGNRHCFECAQRGVTYVDITVGSFVCTTCSGLLRGLNPPHRVKSISMTTFTEPEVVFLQSRGNEVCRKIWLGLFDARTSLVPDSRDPQKVKEFLQEKYEKKRWPDTFPRRLCQL

SEQ ID NO: 6084 - protein, 857 aa, Homo sapiens
  Payload ID: 1325;
  Gene Symbol: AGAP1;
  Gene Name: ArfGAP with GTPase domain, ankyrin repeat and PH domain 1;
  Uniprot ID:  Q9UPQ3;
  ENSP ID: ENSP00000307634
MNYQQQLANSAAIRAEIQRFESVHPNIYSIYELLERVEEPVLQNQIREHVIAIEDAFVNSQEWTLSRSVPELKVGIVGNLASGKSALVHRYLTGTYVQEESPEGGRFKKEIVVDGQSYLLLIRDEGGPPEAQFAMWVDAVIFVFSLEDEISFQTVYHYYSRMANYRNTSEIPLVLVGTQDAISSANPRVIDDARARKLSNDLKRCTYYETCATYGLNVERVFQDVAQKIVATRKKQQLSIGPCKSLPNSPSHSSVCSAQVSAVHISQTSNGGGSLSDYSSSVPSTPSTSQKELRIDVPPTANTPTPVRKQSKRRSNLFTSRKGSDPDKEKKGLESRADSIGSGRAIPIKQGMLLKRSGKSLNKEWKKKYVTLCDNGVLTYHPSLHDYMQNVHGKEIDLLRTTVKVPGKRPPRATSACAPISSPKTNGLSKDMSSLHISPNSGNVTSASGSQMASGISLVSFNSRPDGMHQRSYSVSSADQWSEATVIANSAISSDTGLGDSVCSSPSISSTTSPKLDPPPSPHANRKKHRRKKSTSNFKADGLSGTAEEQEENFEFIIVSLTGQTWHFEATTYEERDAWVQAIESQILASLQSCESSKNKSRLTSQSEAMALQSIRNMRGNSHCVDCETQNPNWASLNLGALMCIECSGIHRNLGTHLSRVRSLDLDDWPVELIKVMSSIGNELANSVWEESSQGRTKPSVDSTREEKERWIRAKYEQKLFLAPLPCTELSLGQHLLRATADEDLRTAILLLAHGSRDEVNETCGEGDGRTALHLACRKGNVVLAQLLIWYGVDVTARDAHGNTALAYARQASSQECIDVLLQYGCPDERFVLMATPNLSRRNNNRNNSSGRVPTII

SEQ ID NO: 6085 - protein, 804 aa, Homo sapiens
  Payload ID: 1325;
  Gene Symbol: AGAP1;
  Gene Name: ArfGAP with GTPase domain, ankyrin repeat and PH domain 1;
  Uniprot ID:  Q9UPQ3;
  ENSP ID: ENSP00000338378
MNYQQQLANSAAIRAEIQRFESVHPNIYSIYELLERVEEPVLQNQIREHVIAIEDAFVNSQEWTLSRSVPELKVGIVGNLASGKSALVHRYLTGTYVQEESPEGGRFKKEIVVDGQSYLLLIRDEGGPPEAQFAMWVDAVIFVFSLEDEISFQTVYHYYSRMANYRNTSEIPLVLVGTQDAISSANPRVIDDARARKLSNDLKRCTYYETCATYGLNVERVFQDVAQKIVATRKKQQLSIGPCKSLPNSPSHSSVCSAQVSAVHISQTSNGGGSLSDYSSSVPSTPSTSQKELRIDVPPTANTPTPVRKQSKRRSNLFTSRKGSDPDKEKKGLESRADSIGSGRAIPIKQGMLLKRSGKSLNKEWKKKYVTLCDNGVLTYHPSLHDYMQNVHGKEIDLLRTTVKVPGKRPPRATSACAPISSPKTNGLSKDMSSLHISPNSDTGLGDSVCSSPSISSTTSPKLDPPPSPHANRKKHRRKKSTSNFKADGLSGTAEEQEENFEFIIVSLTGQTWHFEATTYEERDAWVQAIESQILASLQSCESSKNKSRLTSQSEAMALQSIRNMRGNSHCVDCETQNPNWASLNLGALMCIECSGIHRNLGTHLSRVRSLDLDDWPVELIKVMSSIGNELANSVWEESSQGRTKPSVDSTREEKERWIRAKYEQKLFLAPLPCTELSLGQHLLRATADEDLRTAILLLAHGSRDEVNETCGEGDGRTALHLACRKGNVVLAQLLIWYGVDVTARDAHGNTALAYARQASSQECIDVLLQYGCPDERFVLMATPNLSRRNNNRNNSSGRVPTII

SEQ ID NO: 6086 - protein, 117 aa, Homo sapiens
  Payload ID: 1325;
  Gene Symbol: AGAP1;
  Gene Name: ArfGAP with GTPase domain, ankyrin repeat and PH domain 1;
  ENSP ID: ENSP00000385492
MDAFVNSQEWTLSRSVPELKVGIVGNLASGKSALVHRYLTGTYVQEESPEGGRFKKEIVVDGQSYLLLIRDEGGPPEAQFAMWVDAVIFVFSLEDEISFQTVYHYYSRMANYRNTSE

SEQ ID NO: 6087 - protein, 1069 aa, Homo sapiens
  Payload ID: 1325;
  Gene Symbol: AGAP1;
  Gene Name: ArfGAP with GTPase domain, ankyrin repeat and PH domain 1;
  ENSP ID: ENSP00000386897
MYLLDGSGEPASPPADAMPRGTPPRKTVYRISVTMVRKEQLAAPGSGGPDPRPVRRPRPARSPDAPGRLEEEAEEAEGAEEPEGPRPRAWDFRTFRTRSTGQLELGRLRPCARGLEPADLAGSAPAEEEGRGSPASGSPDVEGARAAPLRRSLSFRHWSGPEAPQGRTLGGGRRHSSSGSLAWAPCDEAAAGTTLEPATATQPASEKRNTLDVGEVLSKNDALSDLERWERSKSKNRTLDNSDLQRLERARAAAGAGAASEHRLLRFFSGIFARRDGGPGGGPSPRSGASRPRGYFSLRRAPAEAHSSSAESIDGSPRRDAFVNSQEWTLSRSVPELKVGIVGNLASGKSALVHRYLTGTYVQEESPEGGRFKKEIVVDGQSYLLLIRDEGGPPEAQFAMWVDAVIFVFSLEDEISFQTVYHYYSRMANYRNTSEIPLVLVGTQDAISSANPRVIDDARARKLSNDLKRCTYYETCATYGLNVERVFQDVAQKIVATRKKQQLSIGPCKSLPNSPSHSSVCSAQVSAVHISQTSNGGGSLSDYSSSVPSTPSTSQKELRIDVPPTANTPTPVRKQSKRRSNLFTSRKGSDPDKEKKGLESRADSIGSGRAIPIKQGMLLKRSGKSLNKEWKKKYVTLCDNGVLTYHPSLHDYMQNVHGKEIDLLRTTVKVPGKRPPRATSACAPISSPKTNGLSKDMSSLHISPNSDTGLGDSVCSSPSISSTTSPKLDPPPSPHANRKKHRRKKSTSNFKADGLSGTAEEQEENFEFIIVSLTGQTWHFEATTYEERDAWVQAIESQILASLQSCESSKNKSRLTSQSEAMALQSIRNMRGNSHCVDCETQNPNWASLNLGALMCIECSGIHRNLGTHLSRVRSLDLDDWPVELIKVMSSIGNELANSVWEESSQGRTKPSVDSTREEKERWIRAKYEQKLFLAPLPCTELSLGQHLLRATADEDLRTAILLLAHGSRDEVNETCGEGDGRTALHLACRKGNVVLAQLLIWYGVDVTARDAHGNTALAYARQASSQECIDVLLQYGCPDERFVLMATPNLSRRNNNRNNSSGRVPTII

SEQ ID NO: 6088 - protein, 405 aa, Homo sapiens
  Payload ID: 1325;
  Gene Symbol: AGAP1;
  Gene Name: ArfGAP with GTPase domain, ankyrin repeat and PH domain 1;
  Uniprot ID:  Q9UPQ3;
  ENSP ID: ENSP00000387174
MNYQQQLANSAAIRAEIQRFESVHPNIYSIYELLERVEEPVLQNQIREHVIAIEDAFVNSQEWTLSRSVPELKVGIVGNLASGKSALVHRYLTGTYVQEESPEGGRFKKEIVVDGQSYLLLIRDEGGPPEAQFAMWVDAVIFVFSLEDEISFQTVYHYYSRMANYRNTSEIPLVLVGTQDAISSANPRVIDDARARKLSNDLKRCTYYETCATYGLNVERVFQDVAQKIVATRKKQQLSIGPCKSLPNSPSHSSVCSAQVSAVHISQTSNGGGSLSDYSSSVPSTPSTSQKELRIDVPPTANTPTPVRKQSKRRSNLFTSRKGSDPDKEKKGLESRADSIGSGRAIPIKQGLPFFVLALTASTYLRPAGARARQSSPWPGPRGGQTSPHCAEGPQSAQLSGAMMN

SEQ ID NO: 6089 - protein, 276 aa, Homo sapiens
  Payload ID: 1325;
  Gene Symbol: AGAP1;
  Gene Name: ArfGAP with GTPase domain, ankyrin repeat and PH domain 1;
  ENSP ID: ENSP00000393838
  MOD_RES (1)..(1): Any amino acid
XSSPKTNGLSKDMSSLHISPNSDTGLGDSVCSSPSISSTTSPKLDPPPSPHANRKKHRRKKSTSNFKADGLSGTAEAKRKAWKLNRVGSLRNIYSSSTNTEEQEENFEFIIVSLTGQTWHFEATTYEERDAWVQAIESQILASLQSCESSKNKSRLTSQSEAMALQSIRNMRGNSHCVDCETQNPNWASLNLGALMCIECSGIHRNLGTHLSRVRSLDLDDWPVELIKVMSSIGNELANSVWEESSQGRTKPSVDSTREEKERWIRAKYEQKLFLA

SEQ ID NO: 6090 - protein, 253 aa, Homo sapiens
  Payload ID: 1325;
  Gene Symbol: AGAP1;
  Gene Name: ArfGAP with GTPase domain, ankyrin repeat and PH domain 1;
  ENSP ID: ENSP00000403482
  MOD_RES (1)..(1): Any amino acid
XKYVTLCDNGVLTYHPSLHDYMQNVHGKEIDLLRTTVKVPGKRPPRATSACAPISSPKTNGLSKDMSSLHISPNSGNVTSASGSQMASGISLVSFNSRPDGMHQRSYSVSSADQWSEATVIANSAISSDTGLGDSVCSSPSISSTTSPKLDPPPSPHANRKKHRRKKSTSNFKADGLSGTAEAKRKAWKLNRVGSLRNIYSSSTNTEEQEENFEFIIVSLTGQTWHFEATTYEERDAWVQAIESQILASLQSC

SEQ ID NO: 6091 - protein, 803 aa, Homo sapiens
  Payload ID: 1325;
  Gene Symbol: AGAP1;
  Gene Name: ArfGAP with GTPase domain, ankyrin repeat and PH domain 1;
  ENSP ID: ENSP00000411824
DAFVNSQEWTLSRSVPELKVGIVGNLASGKSALVHRYLTGTYVQEESPEGGRFKKEIVVDGQSYLLLIRDEGGPPEAQFAMWVDAVIFVFSLEDEISFQTVYHYYSRMANYRNTSEIPLVLVGTQDAISSANPRVIDDARARKLSNDLKRCTYYETCATYGLNVERVFQDVAQKIVATRKKQQLSIGPCKSLPNSPSHSSVCSAQVSAVHISQTSNGGGSLSDYSSSVPSTPSTSQKELRIDVPPTANTPTPVRKQSKRRSNLFTSRKGSDPDKEKKGLESRADSIGSGRAIPIKQGMLLKRSGKSLNKEWKKKYVTLCDNGVLTYHPSLHDYMQNVHGKEIDLLRTTVKVPGKRPPRATSACAPISSPKTNGLSKDMSSLHISPNSGNVTSASGSQMASGISLVSFNSRPDGMHQRSYSVSSADQWSEATVIANSAISSDTGLGDSVCSSPSISSTTSPKLDPPPSPHANRKKHRRKKSTSNFKADGLSGTAEEQEENFEFIIVSLTGQTWHFEATTYEERDAWVQAIESQILASLQSCESSKNKSRLTSQSEAMALQSIRNMRGNSHCVDCETQNPNWASLNLGALMCIECSGIHRNLGTHLSRVRSLDLDDWPVELIKVMSSIGNELANSVWEESSQGRTKPSVDSTREEKERWIRAKYEQKLFLAPLPCTELSLGQHLLRATADEDLRTAILLLAHGSRDEVNETCGEGDGRTALHLACRKGNVVLAQLLIWYGVDVTARDAHGNTALAYARQASSQECIDVLLQYGCPDERFVLMATPNLSRRNNNRNNSSGRVPTII

SEQ ID NO: 6092 - protein, 351 aa, Homo sapiens
  Payload ID: 1325;
  Gene Symbol: AGAP1;
  Gene Name: ArfGAP with GTPase domain, ankyrin repeat and PH domain 1;
  ENSP ID: ENSP00000483085
DAFVNSQEWTLSRSVPELKVGIVGNLASGKSALVHRYLTGTYVQEESPEGGRFKKEIVVDGQSYLLLIRDEGGPPEAQFAMWVDAVIFVFSLEDEISFQTVYHYYSRMANYRNTSEIPLVLVGTQDAISSANPRVIDDARARKLSNDLKRCTYYETCATYGLNVERVFQDVAQKIVATRKKQQLSIGPCKSLPNSPSHSSVCSAQVSAVHISQTSNGGGSLSDYSSSVPSTPSTSQKELRIDVPPTANTPTPVRKQSKRRSNLFTSRKGSDPDKEKKGLESRADSIGSGRAIPIKQGLPFFVLALTASTYLRPAGARARQSSPWPGPRGGQTSPHCAEGPQSAQLSGAMMN

SEQ ID NO: 6093 - protein, 750 aa, Homo sapiens
  Payload ID: 1325;
  Gene Symbol: AGAP1;
  Gene Name: ArfGAP with GTPase domain, ankyrin repeat and PH domain 1;
  ENSP ID: ENSP00000484463
DAFVNSQEWTLSRSVPELKVGIVGNLASGKSALVHRYLTGTYVQEESPEGGRFKKEIVVDGQSYLLLIRDEGGPPEAQFAMWVDAVIFVFSLEDEISFQTVYHYYSRMANYRNTSEIPLVLVGTQDAISSANPRVIDDARARKLSNDLKRCTYYETCATYGLNVERVFQDVAQKIVATRKKQQLSIGPCKSLPNSPSHSSVCSAQVSAVHISQTSNGGGSLSDYSSSVPSTPSTSQKELRIDVPPTANTPTPVRKQSKRRSNLFTSRKGSDPDKEKKGLESRADSIGSGRAIPIKQGMLLKRSGKSLNKEWKKKYVTLCDNGVLTYHPSLHDYMQNVHGKEIDLLRTTVKVPGKRPPRATSACAPISSPKTNGLSKDMSSLHISPNSDTGLGDSVCSSPSISSTTSPKLDPPPSPHANRKKHRRKKSTSNFKADGLSGTAEEQEENFEFIIVSLTGQTWHFEATTYEERDAWVQAIESQILASLQSCESSKNKSRLTSQSEAMALQSIRNMRGNSHCVDCETQNPNWASLNLGALMCIECSGIHRNLGTHLSRVRSLDLDDWPVELIKVMSSIGNELANSVWEESSQGRTKPSVDSTREEKERWIRAKYEQKLFLAPLPCTELSLGQHLLRATADEDLRTAILLLAHGSRDEVNETCGEGDGRTALHLACRKGNVVLAQLLIWYGVDVTARDAHGNTALAYARQASSQECIDVLLQYGCPDERFVLMATPNLSRRNNNRNNSSGRVPTII

SEQ ID NO: 6094 - protein, 108 aa, Homo sapiens
  Payload ID: 1325;
  Gene Symbol: AGAP1;
  Gene Name: ArfGAP with GTPase domain, ankyrin repeat and PH domain 1;
  ENSP ID: ENSP00000489496
QLANSAAIRAEIQRFESVHPNIYSIYELLERVEEPVLQNQIREHVIAIEDAFVNSQEWTLSRSVPELKVGIVGNLASGKSALVHRYLTGTYVQEEYGCRWQVQERDCR

SEQ ID NO: 6095 - protein, 836 aa, Homo sapiens
  Payload ID: 1326;
  Gene Symbol: AGAP2;
  Gene Name: ArfGAP with GTPase domain, ankyrin repeat and PH domain 2;
  Uniprot ID:  Q99490;
  ENSP ID: ENSP00000257897
MHAQRQFVVAAVRAEVRRHEVAKQALNRLRKLAERVDDPELQDSIQASLDSIREAVINSQEWTLSRSIPELRLGVLGDARSGKSSLIHRFLTGSYQVLEKTESEQYKKEMLVDGQTHLVLIREEAGAPDAKFSGWADAVIFVFSLEDENSFQAVSRLHGQLSSLRGEGRGGLALALVGTQDRISASSPRVVGDARARALCADMKRCSYYETCATYGLNVDRVFQEVAQKVVTLRKQQQLLAACKSLPSSPSHSAASTPVAGQASNGGHTSDYSSSLPSSPNVGHRELRAEAAAVAGLSTPGSLHRAAKRRTSLFANRRGSDSEKRSLDSRGETTGSGRAIPIKQSFLLKRSGNSLNKEWKKKYVTLSSNGFLLYHPSINDYIHSTHGKEMDLLRTTVKVPGKRPPRAISAFGPSASINGLVKDMSTVQMGEGLEATTPMPSPSPSPSSLQPPPDQTSKHLLKPDRNLARALSTDCTPSGDLSPLSREPPPSPMVKKQRRKKLTTPSKTEGSAGQAEEENFEFLIVSSTGQTWHFEAASFEERDAWVQAIESQILASLQCCESSKVKLRTDSQSEAVAIQAIRNAKGNSICVDCGAPNPTWASLNLGALICIECSGIHRNLGTHLSRVRSLDLDDWPRELTLVLTAIGNDTANRVWESDTRGRAKPSRDSSREERESWIRAKYEQLLFLAPLSTSEEPLGRQLWAAVQAQDVATVLLLLAHARHGPLDTSVEDPQLRSPLHLAAELAHVVITQLLLWYGADVAARDAQGRTALFYARQAGSQLCADILLQHGCPGEGGSAATTPSAATTPSITATPSPRRRSSAASVGRADAPVALV

SEQ ID NO: 6096 - protein, 1036 aa, Homo sapiens
  Payload ID: 1326;
  Gene Symbol: AGAP2;
  Gene Name: ArfGAP with GTPase domain, ankyrin repeat and PH domain 2;
  ENSP ID: ENSP00000328160
  MOD_RES (1)..(1): Any amino acid
XTSSRRPLLSSPSWGGPEPEGRAGGGIPGSSSPHPGTGSRRLKVAPPPPAPKPCKTVTTSGAKAGGGKGAGSRLSWPESEGKPRVKGSKSSAGTGASVSAAATAAAAGGGGSTASTSGGVGAGAGARGKLSPRKGKSKTLDNSDLHPGPPAGSPPPLTLPPTPSPATAVTAASAQPPGPAPPITLEPPAPGLKRGREGGRASTRDRKMLKFISGIFTKSTGGPPGSGPLPGPPSLSSGSGSRELLGAELRASPKAVINSQEWTLSRSIPELRLGVLGDARSGKSSLIHRFLTGSYQVLEKTESEQYKKEMLVDGQTHLVLIREEAGAPDAKFSGWADAVIFVFSLEDENSFQAVSRLHGQLSSLRGEGRGGLALALVGTQDRISASSPRVVGDARARALCADMKRCSYYETCATYGLNVDRVFQEVAQKVVTLRKQQQLLAACKSLPSSPSHSAASTPVAGQASNGGHTSDYSSSLPSSPNVGHRELRAEAAAVAGLSTPGSLHRAAKRRTSLFANRRGSDSEKRSLDSRGETTGSGRAIPIKQSFLLKRSGNSLNKEWKKKYVTLSSNGFLLYHPSINDYIHSTHGKEMDLLRTTVKVPGKRPPRAISAFGPSASINGLVKDMSTVQMGEGLEATTPMPSPSPSPSSLQPPPDQTSKHLLKPDRNLARALSTDCTPSGDLSPLSREPPPSPMVKKQRRKKLTTPSKTEGSAGQAEEENFEFLIVSSTGQTWHFEAASFEERDAWVQAIESQILASLQCCESSKVKLRTDSQSEAVAIQAIRNAKGNSICVDCGAPNPTWASLNLGALICIECSGIHRNLGTHLSRVRSLDLDDWPRELTLVLTAIGNDTANRVWESDTRGRAKPSRDSSREERESWIRAKYEQLLFLAPLSTSEEPLGRQLWAAVQAQDVATVLLLLAHARHGPLDTSVEDPQLRSPLHLAAELAHVVITQLLLWYGADVAARDAQGRTALFYARQAGSQLCADILLQHGCPGEGGSAATTPSAATTPSITATPSPRRRSSAASVGRADAPVALV

SEQ ID NO: 6097 - protein, 169 aa, Homo sapiens
  Payload ID: 1326;
  Gene Symbol: AGAP2;
  Gene Name: ArfGAP with GTPase domain, ankyrin repeat and PH domain 2;
  ENSP ID: ENSP00000446683
RRTSLFANRRGSDSEKRSLDSRGETTGSGRAIPIKQSFLLKRSGNSLNKEWKKKYVTLSSNGFLLYHPSINDYIHSTHGKEMDLLRTTVKVPGKRPPRAISAFGPSASINGLVKDMSTVQMGEGLEATTPMPSPSPSPSSLQPPPDQTSKHLLKPDRNLARALSTGQWG

SEQ ID NO: 6098 - protein, 1192 aa, Homo sapiens
  Payload ID: 1326;
  Gene Symbol: AGAP2;
  Gene Name: ArfGAP with GTPase domain, ankyrin repeat and PH domain 2;
  ENSP ID: ENSP00000449241
MSRGAGALQRRTTTYLISLTLVKLESVPPPPPSPSAAAAGAAGARGSETGDPGSPRGAEEPGKKRHERLFHRQDALWISTSSAGTGGAEPPALSPAPASPARPVSPAPGRRLSLWAVPPGPPLSGGLSPDPKPGGAPTSSRRPLLSSPSWGGPEPEGRAGGGIPGSSSPHPGTGSRRLKVAPPPPAPKPCKTVTTSGAKAGGGKGAGSRLSWPESEGKPRVKGSKSSAGTGASVSAAATAAAAGGGGSTASTSGGVGAGAGARGKLSPRKGKSKTLDNSDLHPGPPAGSPPPLTLPPTPSPATAVTAASAQPPGPAPPITLEPPAPGLKRGREGGRASTRDRKMLKFISGIFTKSTGGPPGSGPLPGPPSLSSGSGSRELLGAELRASPKAVINSQEWTLSRSIPELRLGVLGDARSGKSSLIHRFLTGSYQVLEKTESEQYKKEMLVDGQTHLVLIREEAGAPDAKFSGWADAVIFVFSLEDENSFQAVSRLHGQLSSLRGEGRGGLALALVGTQDRISASSPRVVGDARARALCADMKRCSYYETCATYGLNVDRVFQEVAQKVVTLRKQQQLLAACKSLPSSPSHSAASTPVAGQASNGGHTSDYSSSLPSSPNVGHRELRAEAAAVAGLSTPGSLHRAAKRRTSLFANRRGSDSEKRSLDSRGETTGSGRAIPIKQSFLLKRSGNSLNKEWKKKYVTLSSNGFLLYHPSINDYIHSTHGKEMDLLRTTVKVPGKRPPRAISAFGPSASINGLVKDMSTVQMGEGLEATTPMPSPSPSPSSLQPPPDQTSKHLLKPDRNLARALSTDCTPSGDLSPLSREPPPSPMVKKQRRKKLTTPSKTEGSAGQAEAKRKMWKLKSFGSLRNIYKAEENFEFLIVSSTGQTWHFEAASFEERDAWVQAIESQILASLQCCESSKVKLRTDSQSEAVAIQAIRNAKGNSICVDCGAPNPTWASLNLGALICIECSGIHRNLGTHLSRVRSLDLDDWPRELTLVLTAIGNDTANRVWESDTRGRAKPSRDSSREERESWIRAKYEQLLFLAPLSTSEEPLGRQLWAAVQAQDVATVLLLLAHARHGPLDTSVEDPQLRSPLHLAAELAHVVITQLLLWYGADVAARDAQGRTALFYARQAGSQLCADILLQHGCPGEGGSAATTPSAATTPSITATPSPRRRSSAASVGRADAPVALV

SEQ ID NO: 6099 - protein, 576 aa, Homo sapiens
  Payload ID: 1327;
  Gene Symbol: AGAP3;
  Gene Name: ArfGAP with GTPase domain, ankyrin repeat and PH domain 3;
  ENSP ID: ENSP00000335589
MERGWPQGDSCPGERPAACRRAHSVCDSLDLHGASAGRAAAALQAALCAASEQPARPRSVCSGGPEPPPTGARGLLLGLLRPRLGRRGLAPSGPPVSPAPSPASSPAPTRRSRTRGEPTPRPRPASMTFLEVNRLELAAAEAPGAGLGRAGSAGFLRGAALWSSQRWPVLRGGRGPEGPRRGLAALRKSFSFRLRRGQEVRRSESGLLARPPRARTRSDGDAGSLGAFPSRRDLLGSDAPRAAPEPGRPRTAAGLWRLLTSRFRRREPAPAAPLWGRRAAAAPELLRAPSDSFVNSQEWTLSRSVPELKVGIVGNLSSGKSALVHRYLTGTYVQEESPEGGRFKKEIVVDGQSYLLLIRDEGGPPELQFAAWVDAVVFVFSLEDEISFQTVYNYFLRLCSFRNASEVPMVLVGTQDAISAANPRVIDDSRARKLSTDLKRCTYYETCATYGLNVERVFQDVAQKVVALRKKQQLAIGPCKSLPNSPSHSAVSAASIPAVHINQATNGGGSAFSDYSSSVPSTPSISQRELRIETIAASSTPTPIRKQSKRRSNIFTICATVSNFSSTKRPFQLLPN

SEQ ID NO: 6100 - protein, 911 aa, Homo sapiens
  Payload ID: 1327;
  Gene Symbol: AGAP3;
  Gene Name: ArfGAP with GTPase domain, ankyrin repeat and PH domain 3;
  Uniprot ID:  Q96P47;
  ENSP ID: ENSP00000380413
MNFQAGGGQSPQQQQSLAAPGGGGAAAQQLVCGGQFGGAGPGAGGGGGPSQQLAGGPPQQFALSNSAAIRAEIQRFESVHPNIYAIYDLIERIEDLALQNQIREHVISIEDSFVNSQEWTLSRSVPELKVGIVGNLSSGKSALVHRYLTGTYVQEESPEGGRFKKEIVVDGQSYLLLIRDEGGPPELQFAAWVDAVVFVFSLEDEISFQTVYNYFLRLCSFRNASEVPMVLVGTQDAISAANPRVIDDSRARKLSTDLKRCTYYETCATYGLNVERVFQDVAQKVVALRKKQQLAIGPCKSLPNSPSHSAVSAASIPAVHINQATNGGGSAFSDYSSSVPSTPSISQRELRIETIAASSTPTPIRKQSKRRSNIFTSRKGADLDREKKAAECKVDSIGSGRAIPIKQGILLKRSGKSLNKEWKKKYVTLCDNGLLTYHPSLHDYMQNIHGKEIDLLRTTVKVPGKRLPRATPATAPGTSPRANGLSVERSNTQLGGGTGAPHSASSASLHSERPLSSSAWAGPRPEGLHQRSCSVSSADQWSEATTSLPPGMQHPASGPAEVLSSSPKLDPPPSPHSNRKKHRRKKSTGTPRPDGPSSATEEAEESFEFVVVSLTGQTWHFEASTAEERELWVQSVQAQILASLQGCRSAKDKTRLGNQNAALAVQAVRTVRGNSFCIDCDAPNPDWASLNLGALMCIECSGIHRHLGAHLSRVRSLDLDDWPPELLAVMTAMGNALANSVWEGALGGYSKPGPDACREEKERWIRAKYEQKLFLAPLPSSDVPLGQQLLRAVVEDDLRLLVMLLAHGSKEEVNETYGDGDGRTALHLSSAMANVVFTQLLIWYGVDVRSRDARGLTPLAYARRAGSQECADILIQHGCPGEGCGLAPTPNREPANGTNPSAELHRSPSLL

SEQ ID NO: 6101 - protein, 194 aa, Homo sapiens
  Payload ID: 1327;
  Gene Symbol: AGAP3;
  Gene Name: ArfGAP with GTPase domain, ankyrin repeat and PH domain 3;
  ENSP ID: ENSP00000417151
  MOD_RES (1)..(1): Any amino acid
XEGERSRGLREPGRSGLSGAGRGLHRPCLAMLSLSGVLARLRTRPRDSFVNSQEWTLSRSVPELKVGIVGNLSSGKSALVHRYLTGTYVQEESPEGGRFKKEIVVDGQSYLLLIRDEGGPPELQFAAWVDAVVFVFSLEDEISFQTVYNYFLRLCSFRNASEVPMVLVGTQDAISAANPRVIDDSRARKLSTDL

SEQ ID NO: 6102 - protein, 404 aa, Homo sapiens
  Payload ID: 1327;
  Gene Symbol: AGAP3;
  Gene Name: ArfGAP with GTPase domain, ankyrin repeat and PH domain 3;
  ENSP ID: ENSP00000417910
  MOD_RES (1)..(1): Any amino acid
XEIDLLRTTVKVPGKRLPRATPATAPGTSPRANGLSVERSNTQLGGGTASGPAEVLSSSPKLDPPPSPHSNRKKHRRKKSTGTPRPDGPSSATEEAEESFEFVVVSLTGQTWHFEASTAEERELWVQSVQAQILASLQGCRSAKDKTRLGNQNAALAVQAVRTVRGNSFCIDCDAPNPDWASLNLGALMCIECSGIHRHLGAHLSRVRSLDLDDWPPELLAVMTAMGNALANSVWEGALGGYSKPGPDACREEKERWIRAKYEQKLFLAPLPSSDVPLGQQLLRAVVEDDLRLLVMLLAHGSKEEVNETYGDGDGRTALHLSSAMANVVFTQLLIWYGVDVRSRDARGLTPLAYARRAGSQECADILIQHGCPGEGCGLAPTPNREPANGTNPSAELHRSPSLL

SEQ ID NO: 6103 - protein, 580 aa, Homo sapiens
  Payload ID: 1327;
  Gene Symbol: AGAP3;
  Gene Name: ArfGAP with GTPase domain, ankyrin repeat and PH domain 3;
  Uniprot ID:  Q96P47;
  ENSP ID: ENSP00000418016
MVLVGTQDAISAANPRVIDDSRARKLSTDLKRCTYYETCATYGLNVERVFQDVAQKVVALRKKQQLAIGPCKSLPNSPSHSAVSAASIPAVHINQATNGGGSAFSDYSSSVPSTPSISQRELRIETIAASSTPTPIRKQSKRRSNIFTSRKGADLDREKKAAECKVDSIGSGRAIPIKQGILLKRSGKSLNKEWKKKYVTLCDNGLLTYHPSLHDYMQNIHGKEIDLLRTTVKVPGKRLPRATPATAPGTSPRANGLSVERSNTQLGGGTEAEESFEFVVVSLTGQTWHFEASTAEERELWVQSVQAQILASLQGCRSAKDKTRLGNQNAALAVQAVRTVRGNSFCIDCDAPNPDWASLNLGALMCIECSGIHRHLGAHLSRVRSLDLDDWPPELLAVMTAMGNALANSVWEGALGGYSKPGPDACREEKERWIRAKYEQKLFLAPLPSSDVPLGQQLLRAVVEDDLRLLVMLLAHGSKEEVNETYGDGDGRTALHLSSAMANVVFTQLLIWYGVDVRSRDARGLTPLAYARRAGSQECADILIQHGCPGEGCGLAPTPNREPANGTNPSAELHRSPSLL

SEQ ID NO: 6104 - protein, 343 aa, Homo sapiens
  Payload ID: 1327;
  Gene Symbol: AGAP3;
  Gene Name: ArfGAP with GTPase domain, ankyrin repeat and PH domain 3;
  ENSP ID: ENSP00000418125
MNFQAGGGQSPQQQQSLAAPGGGGAAAQQLVCGGQFGGAGPGAGGGGGPSQQLAGGPPQQFALSNSAAIRAEIQRFESVHPNIYAIYDLIERIEDLALQNQIREHVISIEDSFVNSQEWTLSRSVPELKVGIVGNLSSGKSALVHRYLTGTYVQEESPEGGRFKKEIVVDGQSYLLLIRDEGGPPELQFAAWVDAVVFVFSLEDEISFQTVYNYFLRLCSFRNASEVPMVLVGTQDAISAANPRVIDDSRARKLSTDLKRCTYYETCATYGLNVERVFQDVAQKVVALRKKQQLAIGPCKSLPNSPSHSAVSAASIPAVHINQICATVSNFSSTKRPFQLLPN

SEQ ID NO: 6105 - protein, 177 aa, Homo sapiens
  Payload ID: 1327;
  Gene Symbol: AGAP3;
  Gene Name: ArfGAP with GTPase domain, ankyrin repeat and PH domain 3;
  ENSP ID: ENSP00000418159
DAISAANPRVIDDSRARKLSTDLKRCTYYETCATYGLNVERVFQDVAQKVVALRKKQQLAIGPCKSLPNSPSHSAVSAASIPAVHINQATNGGGSAFSDYSSSVPSTPSISQRELRIETIAASSTPTPIRKQSKRRSNIFTLMNRRPEGCLPKATQRICATVSNFSSTKRPFQLLPN

SEQ ID NO: 6106 - protein, 396 aa, Homo sapiens
  Payload ID: 1327;
  Gene Symbol: AGAP3;
  Gene Name: ArfGAP with GTPase domain, ankyrin repeat and PH domain 3;
  Uniprot ID:  Q96P47;
  ENSP ID: ENSP00000418921
MNFQAGGGQSPQQQQSLAAPGGGGAAAQQLVCGGQFGGAGPGAGGGGGPSQQLAGGPPQQFALSNSAAIRAEIQRFESVHPNIYAIYDLIERIEDLALQNQIREHVISIEDSFVNSQEWTLSRSVPELKVGIVGNLSSGKSALVHRYLTGTYVQEESPEGGRFKKEIVVDGQSYLLLIRDEGGPPELQFAAWVDAVVFVFSLEDEISFQTVYNYFLRLCSFRNASEVPMVLVGTQDAISAANPRVIDDSRARKLSTDLKRCTYYETCATYGLNVERVFQDVAQKVVALRKKQQLAIGPCKSLPNSPSHSAVSAASIPAVHINQATNGGGSAFSDYSSSVPSTPSISQRELRIETIAASSTPTPIRKQSKRRSNIFTICATVSNFSSTKRPFQLLPN

SEQ ID NO: 6107 - protein, 170 aa, Homo sapiens
  Payload ID: 1327;
  Gene Symbol: AGAP3;
  Gene Name: ArfGAP with GTPase domain, ankyrin repeat and PH domain 3;
  ENSP ID: ENSP00000419801
  MOD_RES (1)..(1): Any amino acid
XMVLVGTQDAISAANPRVIDDSRARKLSTDLKRCTYYETCATYGLNVERVFQDVAQKVVALRKKQQLAIGPCKSLPNSPSHSAVSAASIPAVHINQATNGGGSAFSDYSSSVPSTPSISQRELRIETIAASSTPTPIRKQSKRRSNIFTLMNRRPEGCLPKATQRVSWPS

SEQ ID NO: 6108 - protein, 875 aa, Homo sapiens
  Payload ID: 1327;
  Gene Symbol: AGAP3;
  Gene Name: ArfGAP with GTPase domain, ankyrin repeat and PH domain 3;
  Uniprot ID:  Q96P47;
  ENSP ID: ENSP00000480655
MNFQAGGGQSPQQQQQLAGGPPQQFALSNSAAIRAEIQRFESVHPNIYAIYDLIERIEDLALQNQIREHVISIEDSFVNSQEWTLSRSVPELKVGIVGNLSSGKSALVHRYLTGTYVQEESPEGGRFKKEIVVDGQSYLLLIRDEGGPPELQFAAWVDAVVFVFSLEDEISFQTVYNYFLRLCSFRNASEVPMVLVGTQDAISAANPRVIDDSRARKLSTDLKRCTYYETCATYGLNVERVFQDVAQKVVALRKKQQLAIGPCKSLPNSPSHSAVSAASIPAVHINQATNGGGSAFSDYSSSVPSTPSISQRELRIETIAASSTPTPIRKQSKRRSNIFTSRKGADLDREKKAAECKVDSIGSGRAIPIKQGILLKRSGKSLNKEWKKKYVTLCDNGLLTYHPSLHDYMQNIHGKEIDLLRTTVKVPGKRLPRATPATAPGTSPRANGLSVERSNTQLGGGTGAPHSASSASLHSERPLSSSAWAGPRPEGLHQRSCSVSSADQWSEATTSLPPGMQHPASGPAEVLSSSPKLDPPPSPHSNRKKHRRKKSTGTPRPDGPSSATEEAEESFEFVVVSLTGQTWHFEASTAEERELWVQSVQAQILASLQGCRSAKDKTRLGNQNAALAVQAVRTVRGNSFCIDCDAPNPDWASLNLGALMCIECSGIHRHLGAHLSRVRSLDLDDWPPELLAVMTAMGNALANSVWEGALGGYSKPGPDACREEKERWIRAKYEQKLFLAPLPSSDVPLGQQLLRAVVEDDLRLLVMLLAHGSKEEVNETYGDGDGRTALHLSSAMANVVFTQLLIWYGVDVRSRDARGLTPLAYARRAGSQECADILIQHGCPGEGCGLAPTPNREPANGTNPSAELHRSPSLL

SEQ ID NO: 6109 - protein, 663 aa, Homo sapiens
  Payload ID: 1328;
  Gene Symbol: AGAP4;
  Gene Name: ArfGAP with GTPase domain, ankyrin repeat and PH domain 4;
  ENSP ID: ENSP00000309985
MGNILTCRVHPSVSLEFDQQQGSVCPSESEIYEAGAGDRMAGAPMAAAVQPAEVTVEVGEDLHMHHVRDREMPEALEFNLSANPEASTIFQRNSQTDVVEIRRSNCTNHVSTVRFSQQYSLCSTIFLDDSTAIQHYLTMTIISVTLEIPHHITQRDADRSLSIPDEQLHSFAVSTVHIMKKRNGGGSLNNYSSSIPSTPSTSQEDPQFSVPPTANTPTPVCKRSMRWSNLFTSEKGSDPDKERKAPENHADTIGSGRAIPIKQGMLLKRSGKWLKTWKKKYVTLCSNGVLTYYSSLGDYMKNIHKKEIDLQTSTIKVPGKWPSLATSACTPISTSKSNGLSKDMDTGLGDSICFSPSISSTTSPKLNPPPSPHANKKKHLKKKSTNNFMIVSATGQTWHFEATTYEERDAWVQAIQSQILASLQSCESSKSKSQLTSQSKAMALQSIQNMRGNAHCVDCETQNPKWASLNLGVLMCIECSGIHRSLGTRLSRVRSLELDDWPVELRKVMSSIGNDLANSIWEGSSQGQTKPSEKSTREEKERWIRSKYEEKLFLAPLPCTELSLGQQLLRATADEDLQTAILLLAHGSREEVNETCGEGDGCTALHLACRKGNVVLAQLLIWYGVDVMARDAHGNTALTYARQASSQECINVLLQYGCPDKCV

SEQ ID NO: 6110 - protein, 663 aa, Homo sapiens
  Payload ID: 1328;
  Gene Symbol: AGAP4;
  Gene Name: ArfGAP with GTPase domain, ankyrin repeat and PH domain 4;
  Uniprot ID:  Q96P64;
  ENSP ID: ENSP00000392513
MGNILTCRVHPSVSLEFDQQQGSVCPSESEIYEAGAGDRMAGAPMAAAVQPAEVTVEVGEDLHMHHVRDREMPEALEFNPSANPEASTIFQRNSQTDVVEIRRSNCTNHVSTVRFSQQYSLCSTIFLDDSTAIQHYLTMTIISVTLEIPHHITQRDADRSLSIPDEQLHSFAVSTVHIMKKRNGGGSLNNYSSSIPSTPSTSQEDPQFSVPPTANTPTPVCKRSMRWSNLFTSEKGSDPDKERKAPENHADTIGSGRAIPIKQGMLLKRSGKWLKTWKKKYVTLCSNGVLTYYSSLGDYMKNIHKKEIDLQTSTIKVPGKWPSLATSACTPISTSKSNGLSKDMDTGLGDSICFSPSISSTTSPKLNPPPSPHANKKKHLKKKSTNNFMIVSATGQTWHFEATTYEERDAWVQAIQSQILASLQSCESSKSKSQLTSQSKAMALQSIQNMRGNAHCVDCETQNPKWASLNLGVLMCIECSGIHRSLGTRLSRVRSLELDDWPVELRKVMSSIGNDLANSIWEGSSQGQTKPSEKSTREEKERWIRSKYEEKLFLAPLPCTELSLGQQLLRATADEDLQTAILLLAHGSREEVNETCGEGDGCTALHLACRKGNVVLAQLLIWYGVDVMARDAHGNTALTYARQASSQECINVLLQYGCPDKCV

SEQ ID NO: 6111 - protein, 137 aa, Homo sapiens
  Payload ID: 1328;
  Gene Symbol: AGAP4;
  Gene Name: ArfGAP with GTPase domain, ankyrin repeat and PH domain 4;
  ENSP ID: ENSP00000468160
AGAPMAAAVQPAEVTVEVGEDLHMHHVRDREMPEALEFNLSANPEASTIFQRNSQTDALEFNPSANPEASTIFQRNSQTDVVEIRRSNCTNHVSTVRFSQQYSLCSTIFLDDSTAIQHYLTMTIISVTLEIPHHITQ

SEQ ID NO: 6112 - protein, 658 aa, Homo sapiens
  Payload ID: 1328;
  Gene Symbol: AGAP4;
  Gene Name: ArfGAP with GTPase domain, ankyrin repeat and PH domain 4;
  ENSP ID: ENSP00000478047
MGNILTCRVHPSVSLEFDQQQGSVCPSESEIYEAGAGDRMAGAPMAAAVQPAEVTVEVGEDLHMHHVRDREMPEALEFNLSANPEASTIFQRNSQTDALEFNPSANPEASTIFQRNSQTDVVEIRRSNCTNHVSTVRFSQQYSLCSTIFLDDSTAIQHYLTMTIISVTLEIPHHITQRDADRSLSIPDEQLHSFAVSTVHIMKKRNGGGSLNNYSSSIPSTPSTSQEDPQFSVPPTANTPTPVCKRSMRWSNLFTSEKGSDPDKERKAPENHADTIGSGRAIPIKQGMLLKRSGKWLKTWKKKYVTLCSNGVLTYYSSLGDYMKNIHKKEIDLQTSTIKVPGKWPSLATSACTPISTSKSNGLSKDMDTGLGDSICFSPSISSTTSPKLNPPPSPHANKKKHLKKKSTNNFMIVSATGQTWHFEATTYEERDAWVQAIQSQILASLQSCESSKSKSQLTSQSKAMALQSIQNMRGNAHCVDCETQNPKWASLNLGVLMCIECSGIHRSLGTRLSRVRSLELDDWPVELRKVMSSIGNDLANSIWEGSSQGQTKPSEKSTREEKERWIRSKYEEKLFLAPLPCTELSLGQQLLRATADEDLQTAILLLAHGSREEVNETCGEGDGCTALHLACRKGNVVLAQLLTGWTSWPEMPTGTQR

SEQ ID NO: 6113 - protein, 686 aa, Homo sapiens
  Payload ID: 1328;
  Gene Symbol: AGAP4;
  Gene Name: ArfGAP with GTPase domain, ankyrin repeat and PH domain 4;
  ENSP ID: ENSP00000483751
MGNILTCRVHPSVSLEFDQQQGSVCPSESEIYEAGAGDRMAGAPMAAAVQPAEVTVEVGEDLHMHHVRDREMPEALEFNLSANPEASTIFQRNSQTEALEFNPSANPEASTIFQRNSQTDVVEIRRSNCTNHVSTVRFSQQYSLCSTIFLDDSTAIQHYLTMTIISVTLEIPHHITQRDADRSLSIPDEQLHSFAVSTVHIMKKRNGGGSLNNYSSSIPSTPSTSQEDPQFSVPPTANTPTPVCKRSMRWSNLFTSEKGSDPDKERKAPENHADTIGSGRAIPIKQGMLLKRSGKWLKTWKKKYVTLCSNGVLTYYSSLGDYMKNIHKKEIDLQTSTIKVPGKWPSLATSACTPISTSKSNGLSKDMDTGLGDSICFSPSISSTTSPKLNPPPSPHANKKKHLKKKSTNNFMIVSATGQTWHFEATTYEERDAWVQAIQSQILASLQSCESSKSKSQLTSQSKAMALQSIQNMRGNAHCVDCETQNPKWASLNLGVLMCIECSGIHRSLGTRLSRVRSLELDDWPVELRKVMSSIGNDLANSIWEGSSQGQTKPSEKSTREEKERWIRSKYEEKLFLAPLPCTELSLGQQLLRATADEDLQTAILLLAHGSREEVNETCGEGDGCTALHLACRKGNVVLAQLLIWYGVDVMARDAHGNTALTYARQASSQECINVLLQYGCPDKCV

SEQ ID NO: 6114 - protein, 686 aa, Homo sapiens
  Payload ID: 1329;
  Gene Symbol: AGAP5;
  Gene Name: ArfGAP with GTPase domain, ankyrin repeat and PH domain 5;
  Uniprot ID:  A6NIR3;
  ENSP ID: ENSP00000363207
MGNILTCCVHPSVSLEFDQQQGSVCPSESEIYEAGAGDRMAGAPMAAAVQPAEVTVEVGEDLHMHHIRDQEMPEALEFSLSANPEASTIFQRNSQTDALEFNPSANPEASTIFQRNSQTDVVEIRRSNCTNHVSTERFSQQYSSCSTIFLDDSTASQHYLTMTIISVTLEIPHHITQRDADRSLSIPDEQLHSFAVSTVHITKNRNGGGSLNNYSSSIPSTPSTSQEDPQFSVPPTANTPTPVCKRSMRWSNLFTSEKGSHPDKERKAPENHADTIGSGRAIPIKQGMLLKRSGKWLKTWKKKYVTLCSNGVLTYYSSLGDYMKNIHKKEIDLRTSTIKVPGKWPSLATSACAPISSSKSNGLSKDMDTGLGDSICFSPSISSTTSPKLNPPPSPHANKKKHLKKKSTNNFMIVSATGQTWHFEATTYEERDAWVQAIQSQILASLQSCESSKSKSQLTSQSEAMALQSIQNMRGNAHCVDYETQNPKWASLNLGVLMCIECSGIHRSLGTRLSRVRSLELDDWPVELRKVMSSIGNDLANSIWEGSSQGQTKPSVKSTREEKERWIRSKYEEKLFLAPLPCTELSLGQHLLRATADEDLQTAILLLAHGSREEVNETCGEGDGCTALHLACRKGNVVLAQLLIWYGVDVMARDAHGNTALTYARQASSQECINVLLQYGCPDECV

SEQ ID NO: 6115 - protein, 663 aa, Homo sapiens
  Payload ID: 1329;
  Gene Symbol: AGAP5;
  Gene Name: ArfGAP with GTPase domain, ankyrin repeat and PH domain 5;
  ENSP ID: ENSP00000402792
MGNILTCCVHPSVSLEFDQQQGSVCPSESEIYEAGAGDRMAGAPMAAAVQPAEVTVEVGEDLHMHHIRDQEMPEALEFNPSANPEASTIFQRNSQTDVVEIRRSNCTNHVSTERFSQQYSSCSTIFLDDSTASQHYLTMTIISVTLEIPHHITQRDADRSLSIPDEQLHSFAVSTVHITKNRNGGGSLNNYSSSIPSTPSTSQEDPQFSVPPTANTPTPVCKRSMRWSNLFTSEKGSHPDKERKAPENHADTIGSGRAIPIKQGMLLKRSGKWLKTWKKKYVTLCSNGVLTYYSSLGDYMKNIHKKEIDLRTSTIKVPGKWPSLATSACAPISSSKSNGLSKDMDTGLGDSICFSPSISSTTSPKLNPPPSPHANKKKHLKKKSTNNFMIVSATGQTWHFEATTYEERDAWVQAIQSQILASLQSCESSKSKSQLTSQSEAMALQSIQNMRGNAHCVDYETQNPKWASLNLGVLMCIECSGIHRSLGTRLSRVRSLELDDWPVELRKVMSSIGNDLANSIWEGSSQGQTKPSVKSTREEKERWIRSKYEEKLFLAPLPCTELSLGQHLLRATADEDLQTAILLLAHGSREEVNETCGEGDGCTALHLACRKGNVVLAQLLIWYGVDVMARDAHGNTALTYARQASSQECINVLLQYGCPDECV

SEQ ID NO: 6116 - protein, 27 aa, Homo sapiens
  Payload ID: 1329;
  Gene Symbol: AGAP5;
  Gene Name: ArfGAP with GTPase domain, ankyrin repeat and PH domain 5;
  ENSP ID: ENSP00000475576
  MOD_RES (1)..(1): Any amino acid
XYSSCSTIFLDDSTASQHYLTMTIISH

SEQ ID NO: 6117 - protein, 658 aa, Homo sapiens
  Payload ID: 1329;
  Gene Symbol: AGAP5;
  Gene Name: ArfGAP with GTPase domain, ankyrin repeat and PH domain 5;
  ENSP ID: ENSP00000483632
MGNILTCCVHPSVSLEFDQQQGSVCPSESEIYEAGAGDRMAGAPMAAAVQPAEVTVEVGEDLHMHHIRDQEMPEALEFSLSANPEASTIFQRNSQTDALEFNPSANPEASTIFQRNSQTDVVEIRRSNCTNHVSTERFSQQYSSCSTIFLDDSTASQHYLTMTIISVTLEIPHHITQRDADRSLSIPDEQLHSFAVSTVHITKNRNGGGSLNNYSSSIPSTPSTSQEDPQFSVPPTANTPTPVCKRSMRWSNLFTSEKGSHPDKERKAPENHADTIGSGRAIPIKQGMLLKRSGKWLKTWKKKYVTLCSNGVLTYYSSLGDYMKNIHKKEIDLRTSTIKVPGKWPSLATSACAPISSSKSNGLSKDMDTGLGDSICFSPSISSTTSPKLNPPPSPHANKKKHLKKKSTNNFMIVSATGQTWHFEATTYEERDAWVQAIQSQILASLQSCESSKSKSQLTSQSEAMALQSIQNMRGNAHCVDYETQNPKWASLNLGVLMCIECSGIHRSLGTRLSRVRSLELDDWPVELRKVMSSIGNDLANSIWEGSSQGQTKPSVKSTREEKERWIRSKYEEKLFLAPLPCTELSLGQHLLRATADEDLQTAILLLAHGSREEVNETCGEGDGCTALHLACRKGNVVLAQLLTGWTSWPEMPTGTQR

SEQ ID NO: 6118 - protein, 686 aa, Homo sapiens
  Payload ID: 1329;
  Gene Symbol: AGAP5;
  Gene Name: ArfGAP with GTPase domain, ankyrin repeat and PH domain 5;
  ENSP ID: ENSP00000486918
MGNILTCCVHPSVSLEFDQQQGSVCPSESEIYEAGAGDRMAGAPMAAAVQPAEVTVEVGEDLHMHHIRDQEMPEALEFSLSANPEASTIFQRNSQTEALEFNPSANPEASTIFQRNSQTDVVEIRRSNCTNHVSTERFSQQYSSCSTIFLDDSTASQHYLTMTIISVTLEIPHHITQRDADRSLSIPDEQLHSFAVSTVHITKNRNGGGSLNNYSSSIPSTPSTSQEDPQFSVPPTANTPTPVCKRSMRWSNLFTSEKGSHPDKERKAPENHADTIGSGRAIPIKQGMLLKRSGKWLKTWKKKYVTLCSNGVLTYYSSLGDYMKNIHKKEIDLRTSTIKVPGKWPSLATSACAPISSSKSNGLSKDMDTGLGDSICFSPSISSTTSPKLNPPPSPHANKKKHLKKKSTNNFMIVSATGQTWHFEATTYEERDAWVQAIQSQILASLQSCESSKSKSQLTSQSEAMALQSIQNMRGNAHCVDYETQNPKWASLNLGVLMCIECSGIHRSLGTRLSRVRSLELDDWPVELRKVMSSIGNDLANSIWEGSSQGQTKPSVKSTREEKERWIRSKYEEKLFLAPLPCTELSLGQHLLRATADEDLQTAILLLAHGSREEVNETCGEGDGCTALHLACRKGNVVLAQLLIWYGVDVMARDAHGNTALTYARQASSQECINVLLQYGCPDECV

SEQ ID NO: 6119 - protein, 663 aa, Homo sapiens
  Payload ID: 1330;
  Gene Symbol: AGAP6;
  Gene Name: ArfGAP with GTPase domain, ankyrin repeat and PH domain 6;
  Uniprot ID:  Q5VW22;
  ENSP ID: ENSP00000363168
MGNILTCRVHPSVSLEFDQQQGSVCPSESETYEAGARDRMAGAPMAAAVQPAEVTVEVGEDLHMHHVRDREMPEALEFNPSANPEASTIFQRNSQTDVVEIRRSNCTNHVSAVRFSQQYSLCSTIFLDDSTAIQHYLTMTIISVTLEIPHHITQRDADRTLSIPDEQLHSFAVSTVHIMKKRNGGGSLNNYSSSIPSTPSTSQEDPQFSVPPTANTPTPVCKRSMRWSNLFTSEKGSDPDKERKAPENHADTIGSGRAIPIKQGMLLKRSGKWLKTWKKKYVTLCSNGMLTYYSSLGDYMKNIHKKEIDLQTSTIKVPGKWPSLATSACTPISSSKSNGLSKDMDTGLGDSICFSPSISSTTSPKLNPPPSPHANKKKHLKKKSTNNFMIVSATGQTWHFEATTYEERDAWVQAIQSQILASLQSCESSKSKSQLTSQSEAMALQSIQNMRGNAHCVDCETQNPKWASLNLGVLMCIECSGIHRSLGPHLSRVRSLELDDWPVELRKVMSSIVNDLANSIWEGSSQGQTKPSEKSTREEKERWIRSKYEEKLFLAPLPCTELSLGQQLLRATADEDLQTAILLLAHGSCEEVNETCGEGDGCTALHLACRKGNVVLAQLLIWYGVDVMARDAHGNTALTYARQASSQECINVLLQYGCPDECV

SEQ ID NO: 6120 - protein, 686 aa, Homo sapiens
  Payload ID: 1330;
  Gene Symbol: AGAP6;
  Gene Name: ArfGAP with GTPase domain, ankyrin repeat and PH domain 6;
  Uniprot ID:  Q5VW22;
  ENSP ID: ENSP00000400972
MGNILTCRVHPSVSLEFDQQQGSVCPSESETYEAGARDRMAGAPMAAAVQPAEVTVEVGEDLHMHHVRDREMPEALEFNLSANPESSTIFQRNSQTEALEFNPSANPEASTIFQRNSQTDVVEIRRSNCTNHVSAVRFSQQYSLCSTIFLDDSTAIQHYLTMTIISVTLEIPHHITQRDADRTLSIPDEQLHSFAVSTVHIMKKRNGGGSLNNYSSSIPSTPSTSQEDPQFSVPPTANTPTPVCKRSMRWSNLFTSEKGSDPDKERKAPENHADTIGSGRAIPIKQGMLLKRSGKWLKTWKKKYVTLCSNGMLTYYSSLGDYMKNIHKKEIDLQTSTIKVPGKWPSLATSACTPISSSKSNGLSKDMDTGLGDSICFSPSISSTTSPKLNPPPSPHANKKKHLKKKSTNNFMIVSATGQTWHFEATTYEERDAWVQAIQSQILASLQSCESSKSKSQLTSQSEAMALQSIQNMRGNAHCVDCETQNPKWASLNLGVLMCIECSGIHRSLGPHLSRVRSLELDDWPVELRKVMSSIVNDLANSIWEGSSQGQTKPSEKSTREEKERWIRSKYEEKLFLAPLPCTELSLGQQLLRATADEDLQTAILLLAHGSCEEVNETCGEGDGCTALHLACRKGNVVLAQLLIWYGVDVMARDAHGNTALTYARQASSQECINVLLQYGCPDECV

SEQ ID NO: 6121 - protein, 555 aa, Homo sapiens
  Payload ID: 1330;
  Gene Symbol: AGAP6;
  Gene Name: ArfGAP with GTPase domain, ankyrin repeat and PH domain 6;
  ENSP ID: ENSP00000483426
MVSAVRFSQQYSLCSTIFLDDSTAIQHYLTMTIISVTLEIPHHITQRDADRTLSIPDEQLHSFAVSTVHIMKKRNGGGSLNNYSSSIPSTPSTSQEDPQFSVPPTANTPTPVCKRSMRWSNLFTSEKGSDPDKERKAPENHADTIGSGRAIPIKQGMLLKRSGKWLKTWKKKYVTLCSNGMLTYYSSLGDYMKNIHKKEIDLQTSTIKVPGKWPSLATSACTPISSSKSNGLSKDMDTGLGDSICFSPSISSTTSPKLNPPPSPHANKKKHLKKKSTNNFMIVSATGQTWHFEATTYEERDAWVQAIQSQILASLQSCESSKSKSQLTSQSEAMALQSIQNMRGNAHCVDCETQNPKWASLNLGVLMCIECSGIHRSLGPHLSRVRSLELDDWPVELRKVMSSIVNDLANSIWEGSSQGQTKPSEKSTREEKERWIRSKYEEKLFLAPLPCTELSLGQQLLRATADEDLQTAILLLAHGSCEEVNETCGEGDGCTALHLACRKGNVVLAQLLIWYGVDVMARDAHGNTALTYARQASSQECINVLLQYGCPDECV

SEQ ID NO: 6122 - protein, 658 aa, Homo sapiens
  Payload ID: 1330;
  Gene Symbol: AGAP6;
  Gene Name: ArfGAP with GTPase domain, ankyrin repeat and PH domain 6;
  ENSP ID: ENSP00000485012
MGNILTCRVHPSVSLEFDQQQGSVCPSESETYEAGARDRMAGAPMAAAVQPAEVTVEVGEDLHMHHVRDREMPEALEFNLSANPESSTIFQRNSQTEALEFNPSANPEASTIFQRNSQTDVVEIRRSNCTNHVSAVRFSQQYSLCSTIFLDDSTAIQHYLTMTIISVTLEIPHHITQRDADRTLSIPDEQLHSFAVSTVHIMKKRNGGGSLNNYSSSIPSTPSTSQEDPQFSVPPTANTPTPVCKRSMRWSNLFTSEKGSDPDKERKAPENHADTIGSGRAIPIKQGMLLKRSGKWLKTWKKKYVTLCSNGMLTYYSSLGDYMKNIHKKEIDLQTSTIKVPGKWPSLATSACTPISSSKSNGLSKDMDTGLGDSICFSPSISSTTSPKLNPPPSPHANKKKHLKKKSTNNFMIVSATGQTWHFEATTYEERDAWVQAIQSQILASLQSCESSKSKSQLTSQSEAMALQSIQNMRGNAHCVDCETQNPKWASLNLGVLMCIECSGIHRSLGPHLSRVRSLELDDWPVELRKVMSSIVNDLANSIWEGSSQGQTKPSEKSTREEKERWIRSKYEEKLFLAPLPCTELSLGQQLLRATADEDLQTAILLLAHGSCEEVNETCGEGDGCTALHLACRKGNVVLAQLLTGWTSWPEMPTGTQR

SEQ ID NO: 6123 - protein, 658 aa, Homo sapiens
  Payload ID: 1331;
  Gene Symbol: AGAP9;
  Gene Name: ArfGAP with GTPase domain, ankyrin repeat and PH domain 9;
  Uniprot ID:  Q5VTM2;
  ENSP ID: ENSP00000392206
MGNILTCRVHPSVSLEFDQQQGSVCPSESEIYEAGAEDRMAGAPMAAAVQPAEVTVEVGEDLHMHQVRDREMPEALEFNLSANPEASTIFQRNSQTDALEFNSSANPEASTIFQRNSQTDVVEIRRSNCTNHVSTERFSQQYSSCSTIFLDDSTAIQHYLTMTIISVTLEIPHHITQRDADRSLSIPDEQLHSFAVSTVHIMKKRNGGGSLNNYSSSIPPTPSTSQEDPQFSVPPTANTPTPVCKRSMRWSNLFTSEKGSDPDKERKAPENHADTIGSGRAIPIKQGMLLKRSGKWLKTWKKKYVTLCSNGVLTYYSSLGDYMKNIHKKEIDLRTSTIKVPGKWPSLATSACAPISSSKSNGLSKDMDTGLGDSICFSPGISSTTSPKLNPPPSPHANKKKHLKKKSTNNFMIVSATGQTWHFEATTYEERDAWVQAIQSQILASLQSCKSSKSKSQLTSQSEAMALQSIQNMRGNAHCVDCETQNPKWASLNLGVLMCIECSGIHRSFGTRLSRVRSLELDDWPVELRKVMSSIGNELANSIWEGSSQGQTKPSIKSTREEKEWWIRSKYEEKLFLAPLPCTELSLGQQLLRATTDEDLQTAILLLAHGSREEVNETCGEGDGCTALHLACRKGNVVLEQLLTGWTSWPEMPTGTQR

SEQ ID NO: 6124 - protein, 1205 aa, Homo sapiens
  Payload ID: 1332;
  Gene Symbol: ARAP1;
  Gene Name: ArfGAP with RhoGAP domain, ankyrin repeat and PH domain 1;
  Uniprot ID:  Q96P48;
  ENSP ID: ENSP00000335506
MTKKEEPPPSRVPRAVRVASLLSEGEELSGDDQGDEEEDDHAYEGVPNGGWHTSSLSLSLPSTIAAPHPMDGPPGGSTPVTPVIKAGWLDKNPPQGSYIYQKRWVRLDTDHLRYFDSNKDAYSKRFISVACISHVAAIGDQKFEVITNNRTFAFRAESDVERKEWMQALQQAMAEQRARARLSSAYLLGVPGSEQPDRAGSLELRGFKNKLYVAVVGDKVQLYKNLEEYHLGIGITFIDMSVGNVKEVDRRSFDLTTPYRIFSFSADSELEKEQWLEAMQGAIAEALSTSEVAERIWAAAPNRFCADCGAPQPDWASINLCVVICKRCAGEHRGLGAGVSKVRSLKMDRKVWTETLIELFLQLGNGAGNRFWAANVPPSEALQPSSSPSTRRCHLEAKYREGKYRRYHPLFGNQEELDKALCAAVTTTDLAETQALLGCGAGINCFSGDPEAPTPLALAEQAGQTLQMEFLRNNRTTEVPRLDSMKPLEKHYSVVLPTVSHSGFLYKTASAGKLLQDRRAREEFSRRWCVLGDGVLSYFENERAVTPNGEIRASEIVCLAVPPPDTHGFEHTFEVYTEGERLYLFGLESAEQAHEWVKCIAKAFVPPLAEDLLARDFERLGRLPYKAGLSLQRAQEGWFSLSGSELRAVFPEGPCEEPLQLRKLQELSIQGDSENQVLVLVERRRTLYIQGERRLDFMGWLGAIQKAAASMGDTLSEQQLGDSDIPVIVYRCVDYITQCGLTSEGIYRKCGQTSKTQRLLESLRQDARSVHLKEGEQHVDDVSSALKRFLRDLPDGLFTRAQRLTWLEASEIEDEEEKVSRYRELLVRLPPVNRATVKALISHLYCVQCFSDTNQMNVHNLAIVFGPTLFQTDGQDYKAGRVVEDLINHYVVVFSVDEEELRKQREEITAIVKMRVAGTASGTQHAGDFICTVYLEEKKAETEQHIKVPASMTAEELTLEILDRRNVGIREKDYWTCFEVNEREEAERPLHFAEKVLPILHGLGTDSHLVVKKHQAMEAMLLYLASRVGDTKHGMMKFREDRSLLGLGLPSGGFHDRYFILNSSCLRLYKEVRSQRPWSGAPETSHRPEKEWPIKSLKVYLGVKKKLRPPTCWGFTVVHETEKHEKQQWYLCCDTQMELREWFATFLFVQHDGLVWPSEPSRVSRAVPEVRLGSVSLIPLRGSENEMRRSVAAFTADPLSLLRNV

SEQ ID NO: 6125 - protein, 1439 aa, Homo sapiens
  Payload ID: 1332;
  Gene Symbol: ARAP1;
  Gene Name: ArfGAP with RhoGAP domain, ankyrin repeat and PH domain 1;
  Uniprot ID:  Q96P48;
  ENSP ID: ENSP00000352332
MAEAGDAALSVAEWLRALHLEQYTGLFEQHGLVWATECQGLSDTRLMDMGMLLPGHRRRILAGLLRAHTSPAPAPRPTPRPVPMKRHIFRSPPVPATPPEPLPTTTEDEGLPAAPPIPPRRSCLPPTCFTTPSTAAPDPVLPPLPAKRHLAELSVPPVPPRTGPPRLLVSLPTKEEESLLPSLSSPPQPQSEEPLSTLPQGPPQPPSPPPCPPEIPPKPVRLFPEFDDSDYDEVPEEGPGAPARVMTKKEEPPPSRVPRAVRVASLLSEGEELSGDDQGDEEEDDHAYEGVPNGGWHTSSLSLSLPSTIAAPHPMDGPPGGSTPVTPVIKAGWLDKNPPQGSYIYQKRWVRLDTDHLRYFDSNKDAYSKRFISVACISHVAAIGDQKFEVITNNRTFAFRAESDVERKEWMQALQQAMAEQRARARLSSAYLLGVPGSEQPDRAGSLELRGFKNKLYVAVVGDKVQLYKNLEEYHLGIGITFIDMSVGNVKEVDRRSFDLTTPYRIFSFSADSELEKEQWLEAMQGAIAEALSTSEVAERIWAAAPNRFCADCGAPQPDWASINLCVVICKRCAGEHRGLGAGVSKVRSLKMDRKVWTETLIELFLQLGNGAGNRFWAANVPPSEALQPSSSPSTRRCHLEAKYREGKYRRYHPLFGNQEELDKALCAAVTTTDLAETQALLGCGAGINCFSGDPEAPTPLALAEQAGQTLQMEFLRNNRTTEVPRLDSMKPLEKHYSVVLPTVSHSGFLYKTASAGKLLQDRRAREEFSRRWCVLGDGVLSYFENERAVTPNGEIRASEIVCLAVPPPDTHGFEHTFEVYTEGERLYLFGLESAEQAHEWVKCIAKAFVPPLAEDLLARDFERLGRLPYKAGLSLQRAQEGWFSLSGSELRAVFPEGPCEEPLQLRKLQELSIQGDSENQVLVLVERRRTLYIQGERRLDFMGWLGAIQKAAASMGDTLSEQQLGDSDIPVIVYRCVDYITQCGLTSEGIYRKCGQTSKTQRLLESLRQDARSVHLKEGEQHVDDVSSALKRFLRDLPDGLFTRAQRLTWLEASEIEDEEEKVSRYRELLVRLPPVNRATVKALISHLYCVQCFSDTNQMNVHNLAIVFGPTLFQTDGQDYKAGRVVEDLINHYVVVFSVDEEELRKQREEITAIVKMRVAGTASGTQHAGDFICTVYLEEKKAETEQHIKVPASMTAEELTLEILDRRNVGIREKDYWTCFEVNEREEAERPLHFAEKVLPILHGLGTDSHLVVKKHQAMEAMLLYLASRVGDTKHGMMKFREDRSLLGLGLPSGGFHDRYFILNSSCLRLYKEVRSHRPEKEWPIKSLKVYLGVKKKLRPPTCWGFTVVHETEKHEKQQWYLCCDTQMELREWFATFLFVQHDGLVWPSEPSRVSRAVPEVRLGSVSLIPLRGSENEMRRSVAAFTADPLSLLRNV

SEQ ID NO: 6126 - protein, 1210 aa, Homo sapiens
  Payload ID: 1332;
  Gene Symbol: ARAP1;
  Gene Name: ArfGAP with RhoGAP domain, ankyrin repeat and PH domain 1;
  Uniprot ID:  Q96P48;
  ENSP ID: ENSP00000377230
MTLSGSRGQEEPPPSRVPRAVRVASLLSEGEELSGDDQGDEEEDDHAYEGVPNGGWHTSSLSLSLPSTIAAPHPMDGPPGGSTPVTPVIKAGWLDKNPPQGSYIYQKRWVRLDTDHLRYFDSNKDAYSKRFISVACISHVAAIGDQKFEVITNNRTFAFRAESDVERKEWMQALQQAMAEQRARARLSSAYLLGVPGSEQPDRAGSLELRGFKNKLYVAVVGDKVQLYKNLEEYHLGIGITFIDMSVGNVKEVDRRSFDLTTPYRIFSFSADSELEKEQWLEAMQGAIAEALSTSEVAERIWAAAPNRFCADCGAPQPDWASINLCVVICKRCAGEHRGLGAGVSKVRSLKMDRKVWTETLIELFLQLGNGAGNRFWAANVPPSEALQPSSSPSTRRCHLEAKYREGKYRRYHPLFGNQEELDKALCAAVTTTDLAETQALLGCGAGINCFSGDPEAPTPLALAEQAGQTLQMEFLRNNRTTEVPRLDSMKPLEKHYSVVLPTVSHSGFLYKTASAGKLLQDRRAREEFSRRWCVLGDGVLSYFENERAVTPNGEIRASEIVCLAVPPPDTHGFEHTFEVYTEGERLYLFGLESAEQAHEWVKCIAKAFVPPLAEDLLARDFERLGRLPYKAGLSLQRAQEGWFSLSGSELRAVFPEGPCEEPLQLRKLQELSIQGDSENQVLVLVERRRTLYIQGERRLDFMGWLGAIQKAAASMGDTLSEQQLGDSDIPVIVYRCVDYITQCGLTSEGIYRKCGQTSKTQRLLESLRQDARSVHLKEGEQHVDDVSSALKRFLRDLPDGLFTRAQRLTWLEASEIEDEEEKVSRYRELLVRLPPVNRATVKALISHLYCVQCFSDTNQMNVHNLAIVFGPTLFQTDGQDYKAGRVVEDLINHYVVVFSVDEEELRKQREEITAIVKMRVAGTASGTQHAGDFICTVYLEEKKAETEQHIKVPASMTAEELTLEILDRRNVGIREKDYWTCFEVNEREEAERPLHFAEKVLPILHGLGTDSHLVVKKHQAMEAMLLYLASRVGDTKHGMMKFREDRSLLGLGLPSGGFHDRYFILNSSCLRLYKEVRSQRPWSGAPETSHRPEKEWPIKSLKVYLGVKKKLRPPTCWGFTVVHETEKHEKQQWYLCCDTQMELREWFATFLFVQHDGLVWPSEPSRVSRAVPEVRLGSVSLIPLRGSENEMRRSVAAFTADPLSLLRNV

SEQ ID NO: 6127 - protein, 1450 aa, Homo sapiens
  Payload ID: 1332;
  Gene Symbol: ARAP1;
  Gene Name: ArfGAP with RhoGAP domain, ankyrin repeat and PH domain 1;
  Uniprot ID:  Q96P48;
  ENSP ID: ENSP00000377233
MAEAGDAALSVAEWLRALHLEQYTGLFEQHGLVWATECQGLSDTRLMDMGMLLPGHRRRILAGLLRAHTSPAPAPRPTPRPVPMKRHIFRSPPVPATPPEPLPTTTEDEGLPAAPPIPPRRSCLPPTCFTTPSTAAPDPVLPPLPAKRHLAELSVPPVPPRTGPPRLLVSLPTKEEESLLPSLSSPPQPQSEEPLSTLPQGPPQPPSPPPCPPEIPPKPVRLFPEFDDSDYDEVPEEGPGAPARVMTKKEEPPPSRVPRAVRVASLLSEGEELSGDDQGDEEEDDHAYEGVPNGGWHTSSLSLSLPSTIAAPHPMDGPPGGSTPVTPVIKAGWLDKNPPQGSYIYQKRWVRLDTDHLRYFDSNKDAYSKRFISVACISHVAAIGDQKFEVITNNRTFAFRAESDVERKEWMQALQQAMAEQRARARLSSAYLLGVPGSEQPDRAGSLELRGFKNKLYVAVVGDKVQLYKNLEEYHLGIGITFIDMSVGNVKEVDRRSFDLTTPYRIFSFSADSELEKEQWLEAMQGAIAEALSTSEVAERIWAAAPNRFCADCGAPQPDWASINLCVVICKRCAGEHRGLGAGVSKVRSLKMDRKVWTETLIELFLQLGNGAGNRFWAANVPPSEALQPSSSPSTRRCHLEAKYREGKYRRYHPLFGNQEELDKALCAAVTTTDLAETQALLGCGAGINCFSGDPEAPTPLALAEQAGQTLQMEFLRNNRTTEVPRLDSMKPLEKHYSVVLPTVSHSGFLYKTASAGKLLQDRRAREEFSRRWCVLGDGVLSYFENERAVTPNGEIRASEIVCLAVPPPDTHGFEHTFEVYTEGERLYLFGLESAEQAHEWVKCIAKAFVPPLAEDLLARDFERLGRLPYKAGLSLQRAQEGWFSLSGSELRAVFPEGPCEEPLQLRKLQELSIQGDSENQVLVLVERRRTLYIQGERRLDFMGWLGAIQKAAASMGDTLSEQQLGDSDIPVIVYRCVDYITQCGLTSEGIYRKCGQTSKTQRLLESLRQDARSVHLKEGEQHVDDVSSALKRFLRDLPDGLFTRAQRLTWLEASEIEDEEEKVSRYRELLVRLPPVNRATVKALISHLYCVQCFSDTNQMNVHNLAIVFGPTLFQTDGQDYKAGRVVEDLINHYVVVFSVDEEELRKQREEITAIVKMRVAGTASGTQHAGDFICTVYLEEKKAETEQHIKVPASMTAEELTLEILDRRNVGIREKDYWTCFEVNEREEAERPLHFAEKVLPILHGLGTDSHLVVKKHQAMEAMLLYLASRVGDTKHGMMKFREDRSLLGLGLPSGGFHDRYFILNSSCLRLYKEVRSQRPWSGAPETSHRPEKEWPIKSLKVYLGVKKKLRPPTCWGFTVVHETEKHEKQQWYLCCDTQMELREWFATFLFVQHDGLVWPSEPSRVSRAVPEVRLGSVSLIPLRGSENEMRRSVAAFTADPLSLLRNV

SEQ ID NO: 6128 - protein, 679 aa, Homo sapiens
  Payload ID: 1332;
  Gene Symbol: ARAP1;
  Gene Name: ArfGAP with RhoGAP domain, ankyrin repeat and PH domain 1;
  ENSP ID: ENSP00000390461
IDASGKGEFSRRWCVLGDGVLSYFENERAVTPNGEIRASEIVCLAVPPPDTHGFEHTFEVYTEGERLYLFGLESAEQAHEWVKCIAKAFVPPLAEDLLARDFERLGRLPYKAGLSLQRAQEGWFSLSGSELRAVFPEGPCEEPLQLRKLQELSIQGDSENQVLVLVERRRTLYIQGERRLDFMGWLGAIQKAAASMGDTLSEQQLGDSDIPVIVYRCVDYITQCGLTSEGIYRKCGQTSKTQRLLESLRQDARSVHLKEGEQHVDDVSSALKRFLRDLPDGLFTRAQRLTWLEASEIEDEEEKVSRYRELLVRLPPVNRATVKALISHLYCVQCFSDTNQMNVHNLAIVFGPTLFQTDGQDYKAGRVVEDLINHYVVVFSVDEEELRKQREEITAIVKMRVAGTASGTQHAGDFICTVYLEEKKAETEQHIKVPASMTAEELTLEILDRRNVGIREKDYWTCFEVNEREEAERPLHFAEKVLPILHGLGTDSHLVVKKHQAMEAMLLYLASRVGDTKHGMMKFREDRSLLGLGLPSGGFHDRYFILNSSCLRLYKEVRSHRPEKEWPIKSLKVYLGVKKKLRPPTCWGFTVVHETEKHEKQQWYLCCDTQMELREWFATFLFVQHDGLVWPSEPSRVSRAVPEVRLGSVSLIPLRGSENEMRRSVAAFTADPLSLLRNV

SEQ ID NO: 6129 - protein, 1194 aa, Homo sapiens
  Payload ID: 1332;
  Gene Symbol: ARAP1;
  Gene Name: ArfGAP with RhoGAP domain, ankyrin repeat and PH domain 1;
  ENSP ID: ENSP00000392264
MTKKEEPPPSRVPRAVRVASLLSEGEELSGDDQGDEEEDDHAYEGVPNGGWHTSSLSLSLPSTIAAPHPMDGPPGGSTPVTPVIKAGWLDKNPPQGSYIYQKRWVRLDTDHLRYFDSNKDAYSKRFISVACISHVAAIGDQKFEVITNNRTFAFRAESDVERKEWMQALQQAMAEQRARARLSSAYLLGVPGSEQPDRAGSLELRGFKNKLYVAVVGDKVQLYKNLEEYHLGIGITFIDMSVGNVKEVDRRSFDLTTPYRIFSFSADSELEKEQWLEAMQGAIAEALSTSEVAERIWAAAPNRFCADCGAPQPDWASINLCVVICKRCAGEHRGLGAGVSKVRSLKMDRKVWTETLIELFLQLGNGAGNRFWAANVPPSEALQPSSSPSTRRCHLEAKYREGKYRRYHPLFGNQEELDKALCAAVTTTDLAETQALLGCGAGINCFSGDPEAPTPLALAEQAGQTLQMEFLRNNRTTEVPRLDSMKPLEKHYSVVLPTVSHSGFLYKTASAGKLLQDRRAREEFSRRWCVLGDGVLSYFENERAVTPNGEIRASEIVCLAVPPPDTHGFEHTFEVYTEGERLYLFGLESAEQAHEWVKCIAKAFVPPLAEDLLARDFERLGRLPYKAGLSLQRAQEGWFSLSGSELRAVFPEGPCEEPLQLRKLQELSIQGDSENQVLVLVERRRTLYIQGERRLDFMGWLGAIQKAAASMGDTLSEQQLGDSDIPVIVYRCVDYITQCGLTSEGIYRKCGQTSKTQRLLESLRQDARSVHLKEGEQHVDDVSSALKRFLRDLPDGLFTRAQRLTWLEASEIEDEEEKVSRYRELLVRLPPVNRATVKALISHLYCVQCFSDTNQMNVHNLAIVFGPTLFQTDGQDYKAGRVVEDLINHYVVVFSVDEEELRKQREEITAIVKMRVAGTASGTQHAGDFICTVYLEEKKAETEQHIKVPASMTAEELTLEILDRRNVGIREKDYWTCFEVNEREEAERPLHFAEKVLPILHGLGTDSHLVVKKHQAMEAMLLYLASRVGDTKHGMMKFREDRSLLGLGLPSGGFHDRYFILNSSCLRLYKEVRSHRPEKEWPIKSLKVYLGVKKKLRPPTCWGFTVVHETEKHEKQQWYLCCDTQMELREWFATFLFVQHDGLVWPSEPSRVSRAVPEVRLGSVSLIPLRGSENEMRRSVAAFTADPLSLLRNV

SEQ ID NO: 6130 - protein, 254 aa, Homo sapiens
  Payload ID: 1332;
  Gene Symbol: ARAP1;
  Gene Name: ArfGAP with RhoGAP domain, ankyrin repeat and PH domain 1;
  ENSP ID: ENSP00000399118
MEFLRNNRTTEVPRLDSMKPLEKHYSVVLPTVSHSGFLYKTASAGKLLQDRRAREEFSRRWCVLGDGVLSYFENERAVTPNGEIRASEIVCLAVPPPDTHGFEHTFEVYTEGERLYLFGLESAEQAHEWVKCIAKAFVPPLAEDLLARDFERLGRLPYKAGLSLQRAQEGWFSLSGSELRAVFPEGPCEEPLQLRKLQELSIQGDSENQVLVLVERRRTLYIQGERRLDFMGWLGAIQKAAASMGDTLSEQQLG

SEQ ID NO: 6131 - protein, 1133 aa, Homo sapiens
  Payload ID: 1332;
  Gene Symbol: ARAP1;
  Gene Name: ArfGAP with RhoGAP domain, ankyrin repeat and PH domain 1;
  Uniprot ID:  Q96P48;
  ENSP ID: ENSP00000403127
MTKKEEPPPSRVPRAVRVASLLSEGEELSGDDQGDEEEDDHAYEGVPNGGWHTSSLSLSLPSTIAAPHPMDGPPGGSTPVTPVIKAGWLDKNPPQGSYIYQKRWVRLDTDHLRYFDSNKDAYSKRFISVACISHVAAIGDQKFEVITNNRTFAFRAESDVERKEWMQALQQAMAEQRARARLSSAYLLGVPGSEQPDRAGSLELRGFKNKLYVAVVGDKVQLYKNLEEYHLGIGITFIDMSVGNVKEVDRRSFDLTTPYRIFSFSADSELEKEQWLEAMQGAIAEALSTSEVAERIWAAAPNRFCADCGAPQPDWASINLCVVICKRCAGEHRGLGAGVSKVRSLKMDRKVWTETLIEALCAAVTTTDLAETQALLGCGAGINCFSGDPEAPTPLALAEQAGQTLQMEFLRNNRTTEVPRLDSMKPLEKHYSVVLPTVSHSGFLYKTASAGKLLQDRRAREEFSRRWCVLGDGVLSYFENERAVTPNGEIRASEIVCLAVPPPDTHGFEHTFEVYTEGERLYLFGLESAEQAHEWVKCIAKAFVPPLAEDLLARDFERLGRLPYKAGLSLQRAQEGWFSLSGSELRAVFPEGPCEEPLQLRKLQELSIQGDSENQVLVLVERRRTLYIQGERRLDFMGWLGAIQKAAASMGDTLSEQQLGDSDIPVIVYRCVDYITQCGLTSEGIYRKCGQTSKTQRLLESLRQDARSVHLKEGEQHVDDVSSALKRFLRDLPDGLFTRAQRLTWLEASEIEDEEEKVSRYRELLVRLPPVNRATVKALISHLYCVQCFSDTNQMNVHNLAIVFGPTLFQTDGQDYKAGRVVEDLINHYVVVFSVDEEELRKQREEITAIVKMRVAGTASGTQHAGDFICTVYLEEKKAETEQHIKVPASMTAEELTLEILDRRNVGIREKDYWTCFEVNEREEAERPLHFAEKVLPILHGLGTDSHLVVKKHQAMEAMLLYLASRVGDTKHGMMKFREDRSLLGLGLPSGGFHDRYFILNSSCLRLYKEVRSHRPEKEWPIKSLKVYLGVKKKLRPPTCWGFTVVHETEKHEKQQWYLCCDTQMELREWFATFLFVQHDGLVWPSEPSRVSRAVPEVRLGSVSLIPLRGSENEMRRSVAAFTADPLSLLRNV

SEQ ID NO: 6132 - protein, 307 aa, Homo sapiens
  Payload ID: 1332;
  Gene Symbol: ARAP1;
  Gene Name: ArfGAP with RhoGAP domain, ankyrin repeat and PH domain 1;
  ENSP ID: ENSP00000411452
MEFLRNNRTTEVPRLDSMKPLEKHYSVVLPTVSHSGFLYKTASAGKLLQDRRAREEFSRRWCVLGDGVLSYFENERAVTPNGEIRASEIVCLAVPPPDTHGFEHTFEVYTEGERLYLFGLESAEQAHEWVKCIAKAFVPPLAEDLLARDFERLGRLPYKAGLSLQRAQEGWFSLSGSELRAVFPEGPCEEPLQLRKLQELSIQGDSENQVLVLVERRRTLYIQGERRLDFMGWLGAIQKAAASMGDTLSEQQLGDSDIPVIVYRCVDYITQCGLTSEGIYRKCGQTSKTQRLLESLRQDARSVHLKE

SEQ ID NO: 6133 - protein, 233 aa, Homo sapiens
  Payload ID: 1332;
  Gene Symbol: ARAP1;
  Gene Name: ArfGAP with RhoGAP domain, ankyrin repeat and PH domain 1;
  ENSP ID: ENSP00000441741
MTAEELTLEILDRRNVGIREKDYWTCFEVNEREEAERPLHFAEKVLPILHGLGTDSHLVVKKHQAMEAMLLYLASRVGDTKHGMMKFREDRSLLGLGLPSGGFHDRYFILNSSCLRLYKEVRSHRPEKEWPIKSLKVYLGVKKKLRPPTCWGFTVVHETEKHEKQQWYLCCDTQMELREWFATFLFVQHDGLVWPSEPSRVSRAVPEVRLGSVSLIPLRGTSAQRLSTGAHPW

SEQ ID NO: 6134 - protein, 178 aa, Homo sapiens
  Payload ID: 1332;
  Gene Symbol: ARAP1;
  Gene Name: ArfGAP with RhoGAP domain, ankyrin repeat and PH domain 1;
  ENSP ID: ENSP00000442746
  MOD_RES (1)..(1): Any amino acid
XKKKLRPPTCWGFTVVHETEKHEKQQWYLCCDTQMELREWFATFLFVQHDGLVWPSEPSRVSRAVPEVRLGSVSLIPLRGSENEMRRSVAAFTADPLSVSGSPCLWAGGWGPGWVPAFYSTVDDCPDCPPRLPSGPLPPALVGALIGLFGSHHSKEPLLPGPGSWESPLPGPGSWEPG

SEQ ID NO: 6135 - protein, 1704 aa, Homo sapiens
  Payload ID: 1333;
  Gene Symbol: ARAP2;
  Gene Name: ArfGAP with RhoGAP domain, ankyrin repeat and PH domain 2;
  Uniprot ID:  Q8WZ64;
  ENSP ID: ENSP00000302895
MSSVSEVNVDIKDFLMSINLEQYLLHFHESGFTTVKDCAAINDSLLQKIGISPTGHRRRILKQLQIILSKMQDIPIYANVHKTKKNDDPSKDYHVPSSDQNICIELSNSGSVQTSSPPQLETVRKNLEDSDASVERSQYPQSDDKLSPPKRDFPTAEEPHLNLGSLNDSLFGSDNIKIESLITKKTVDHTVEEQQTEKVKLITENLSKLPNADSECLSFVGCSTSGTNSGNGTNGLLEGSPPSPFFKFQGEMIVNDLYVPSSPILAPVRSRSKLVSRPSRSFLLRHRPVPEIPGSTKGVSGSYFRERRNVATSTEKSVAWQNSNEENSSSIFPYGETFLFQRLENSKKRSIKNEFLTQGEALKGEAATATNSFIIKSSIYDNRKEKISEDKVEDIWIPREDKNNFLIDTASESEYSTVEECFQSLRRKNSKASKSRTQKALILDSVNRHSYPLSSTSGNADSSAVSSQAISPYACFYGASAKKVKSGWLDKLSPQGKRMFQKRWVKFDGLSISYYNNEKEMYSKGIIPLSAISTVRVQGDNKFEVVTTQRTFVFRVEKEEERNDWISILLNALKSQSLTSQSQAVVTPEKCGYLELRGYKAKIFTVLSGNSVWLCKNEQDFKSGLGITIIPMNVANVKQVDRTVKQSFEIITPYRSFSFTAETEKEKQDWIEAVQQSIAETLSDYEVAEKIWFNESNRSCADCKAPDPDWASINLCVVICKKCAGQHRSLGPKDSKVRSLKMDASIWSNELIELFIVIGNKRANDFWAGNLQKDEELHMDSPVEKRKNFITQKYKEGKFRKTLLASLTKEELNKALCAAVVKPDVLETMALLFSGADVMCATGDPVHSTPYLLAKKAGQSLQMEFLYHNKFSDFPQHDIHSEGVLSQESSQSTFLCDFLYQAPSAASKLSSEKKLLEETNKKWCVLEGGFLSYYENDKSTTPNGTININEVICLAIHKEDFYLNTGPIFIFEIYLPSERVFLFGAETSQAQRKWTEAIAKHFVPLFAENLTEADYDLIGQLFYKDCHALDQWRKGWFAMDKSSLHFCLQMQEVQGDRMHLRRLQELTISTMVQNGEKLDVLLLVEKGRTLYIHGHTKLDFTVWHTAIEKAAGTDGNALQDQQLSKNDVPIIVNSCIAFVTQYGLGCKYIYQKNGDPLHISELLESFKKDARSFKLRAGKHQLEDVTAVLKSFLSDIDDALLTKELYPYWISALDTQDDKERIKKYGAFIRSLPGVNRATLAAIIEHLYRVQKCSEINHMNAHNLALVFSSCLFQTKGQTSEEVNVIEDLINNYVEIFEVKEDQVKQMDIENSFITKWKDTQVSQAGDLLIEVYVERKEPDCSIIIRISPVMEAEELTNDILAIKNIIPTKGDIWATFEVIENEELERPLHYKENVLEQVLRWSSLAEPGSAYLVVKRFLTADTIKHCSDRSTLGSIKEGILKIKEEPSKILSGNKFQDRYFVLRDGFLFLYKDVKSSKHDKMFSLSSMKFYRGVKKKMKPPTSWGLTAYSEKHHWHLCCDSSRTQTEWMTSIFIAQHEYDIWPPAGKERKRSITKNPKIGGLPLIPIQHEGNATLARKNIESARAELERLRLSEKCDKESVDSSLKERASMVAHCLEHKDDKLRNRPRKHRSFNCLEDTEPEAPLGQPKGHKGLKTLRKTEDRNSKATLDSDHKLPSRVIEELNVVLQRSRTLPKELQDEQILK

SEQ ID NO: 6136 - protein, 47 aa, Homo sapiens
  Payload ID: 1333;
  Gene Symbol: ARAP2;
  Gene Name: ArfGAP with RhoGAP domain, ankyrin repeat and PH domain 2;
  ENSP ID: ENSP00000422731
MSSVSEVNVDIKDFLMSINLEQYLLHFHESGFTTVKDCAAINDSLLQ

SEQ ID NO: 6137 - protein, 50 aa, Homo sapiens
  Payload ID: 1333;
  Gene Symbol: ARAP2;
  Gene Name: ArfGAP with RhoGAP domain, ankyrin repeat and PH domain 2;
  ENSP ID: ENSP00000423886
MLIHQPFLHRQYLPMPAFMEHLQRRLNQDGWINSLLKGNLILNKPKQITS

SEQ ID NO: 6138 - protein, 863 aa, Homo sapiens
  Payload ID: 1333;
  Gene Symbol: ARAP2;
  Gene Name: ArfGAP with RhoGAP domain, ankyrin repeat and PH domain 2;
  ENSP ID: ENSP00000481036
MDASIWSNELIELFIVIGNKRANDFWAGNLQKDEELHMDSPVEKRKNFITQKYKEGKFRKTLLASLTKEELNKALCAAVVKPDVLETMALLFSGADVMCATGDPVHSTPYLLAKKAGQSLQMEFLYHNKFSDFPQHDIHSEGVLSQESSQSTFLCDFLYQAPSAASKLSSEKKLLEETNKKWCVLEGGFLSYYENDKSTTPNGTININEVICLAIHKEDFYLNTGPIFIFEIYLPSERVFLFGAETSQAQRKWTEAIAKHFVPLFAENLTEADYDLIGQLFYKDCHALDQWRKGWFAMDKSSLHFCLQMQEVQGDRMHLRRLQELTISTMVQNGEKLDVLLLVEKGRTLYIHGHTKLDFTVWHTAIEKAAGTDGNALQDQQLSKNDVPIIVNSCIAFVTQYGLGCKYIYQKNGDPLHISELLESFKKDARSFKLRAGKHQLEDVTAVLKSFLSDIDDALLTKELYPYWISALDTQDDKERIKKYGAFIRSLPGVNRATLAAIIEHLYRVQKCSEINHMNAHNLALVFSSCLFQTKGQTSEEVNVIEDLINNYVEIFEVKEDQVKQMDIENSFITKWKDTQVSQAGDLLIEVYVERKEPDCSIIIRISPVMEAEELTNDILAIKNIIPTKGDIWATFEVIENEELERPLHYKENVLEQVLRWSSLAEPGSAYLVVKRFLTADTIKHCSDRSTLGSIKEGILKIKEEPSKILSGNKFQDRYFVLRDGFLFLYKDVKSSKHDKMFSLSSMKFYRGVKKKMKPPTSWGLTAYSEKHHWHLCCDSSRTQTEWMTSIFIAQHEYDIWPPAGKERKRSITKNPKIGGLPLIPIQHEGNATLARKILRVQEQNLKGCGSVKSVIKSPWTLA

SEQ ID NO: 6139 - protein, 1544 aa, Homo sapiens
  Payload ID: 1334;
  Gene Symbol: ARAP3;
  Gene Name: ArfGAP with RhoGAP domain, ankyrin repeat and PH domain 3;
  Uniprot ID:  Q8WWN8;
  ENSP ID: ENSP00000239440
MAAPQDLDIAVWLATVHLEQYADTFRRHGLATAGAARGLGHEELKQLGISATGHRKRILRLLQTGTEEGSLDPKSDSAMEPSPSPAPQAQPPKPVPKPRTVFGGLSGPATTQRPGLSPALGGPGVSRSPEPSPRPPPLPTSSSEQSSALNTVEMMPNSIYFGLDSRGRAQAAQDKAPDSSQISAPTPALRPTTGTVHIMDPGCLYYGVQPVGTPGAPDRRESRGVCQGRAEHRLSRQDLEAREDAGYASLELPGDSTLLSPTLETEETSDDLISPYASFSFTADRLTPLLSGWLDKLSPQGNYVFQRRFVQFNGRSLMYFGSDKDPFPKGVIPLTAIEMTRSSKDNKFQVITGQRVFVFRTESEAQRDMWCSTLQSCLKEQRLLGHPRPPQPPRPLRTGMLELRGHKAKVFAALSPGELALYKSEQAFSLGIGICFIELQGCSVRETKSRSFDLLTPHRCFSFTAESGGARQSWAAALQEAVTETLSDYEVAEKIWSNRANRQCADCGSSRPDWAAVNLGVVICKQCAGQHRALGSGISKVQSLKLDTSVWSNEIVQLFIVLGNDRANRFWAGTLPPGEGLHPDATPGPRGEFISRKYRLGLFRKPHPQYPDHSQLLQALCAAVARPNLLKNMTQLLCVEAFEGEEPWFPPAPDGSCPGLLPSDPSPGVYNEVVVRATYSGFLYCSPVSNKAGPSPPRRGRDAPPRLWCVLGAALEMFASENSPEPLSLIQPQDIVCLGVSPPPTDPGDRFPFSFELILAGGRIQHFGTDGADSLEAWTSAVGKWFSPLSCHQLLGPGLLRLGRLWLRSPSHTAPAPGLWLSGFGLLRGDHLFLCSAPGPGPPAPEDMVHLRRLQEISVVSAADTPDKKEHLVLVETGRTLYLQGEGRLDFTAWNAAIGGAAGGGGTGLQEQQMSRGDIPIIVDACISFVTQHGLRLEGVYRKGGARARSLRLLAEFRRDARSVKLRPGEHFVEDVTDTLKRFFRELDDPVTSARLLPRWREAAELPQKNQRLEKYKDVIGCLPRVNRRTLATLIGHLYRVQKCAALNQMCTRNLALLFAPSVFQTDGRGEHEVRVLQELIDGYISVFDIDSDQVAQIDLEVSLITTWKDVQLSQAGDLIMEVYIEQQLPDNCVTLKVSPTLTAEELTNQVLEMRGTAAGMDLWVTFEIREHGELERPLHPKEKVLEQALQWCQLPEPCSASLLLKKVPLAQAGCLFTGIRRESPRVGLLRCREEPPRLLGSRFQERFFLLRGRCLLLLKEKKSSKPEREWPLEGAKVYLGIRKKLKPPTPWGFTLILEKMHLYLSCTDEDEMWDWTTSILKAQHDDQQPVVLRRHSSSDLARQKFGTMPLLPIRGDDSGATLLSANQTLRRLHNRRTLSMFFPMKSSQGSVEEQEELEEPVYEEPVYEEVGAFPELIQDTSTSFSTTREWTVKPENPLTSQKSLDQPFLSKSSTLGQEERPPEPPPGPPSKSSPQARGSLEEQLLQELSSLILRKGETTAGLGSPSQPSSPQSPSPTGLPTQTPGFPTQPPCTSSPPSSQPLT

SEQ ID NO: 6140 - protein, 473 aa, Homo sapiens
  Payload ID: 1334;
  Gene Symbol: ARAP3;
  Gene Name: ArfGAP with RhoGAP domain, ankyrin repeat and PH domain 3;
  ENSP ID: ENSP00000421148
MAAPQDLDIAVWLATVHLEQYADTFRRHGLATAGAARGLGHEELKQLGISATGHRKRILRLLQTGTEEGSLDPKSDSAMEPSPSPAPQAQPPKPVPKPRTVFGGLSGPATTQRPGLSPALGGPGVSRSPEPSPRPPPLPTSSSEQSSALNTVEMMPNSIYFGLDSRGRAQAAQDKAPDSSQISAPTPALRPTTGTVHIMDPGCLYYGVQPVGTPGAPDRRESRGVCQGRAEHRLSRQDLEAREDAGYASLELPGDSTLLSPTLETEETSDDLISPYASFSFTADRLTPLLSGWLDKLSPQGNYVFQRRFVQFNGRSLMYFGSDKDPFPKGVIPLTAIEMTRSSKDNKFQVITGQRVFVFRTESEAQRDMWCSTLQSCLKEQRLLGHPRPPQPPRPLRTGMLELRGHKAKVFAALSPGELALYKSEQAFSLGIGICFIELQGCSVRETKSRSFDLLTPHRCFSFTAESGGARQS

SEQ ID NO: 6141 - protein, 1193 aa, Homo sapiens
  Payload ID: 1334;
  Gene Symbol: ARAP3;
  Gene Name: ArfGAP with RhoGAP domain, ankyrin repeat and PH domain 3;
  Uniprot ID:  Q8WWN8;
  ENSP ID: ENSP00000421468
MTRSSKDNKFQVITGQRVFVFRTESEAQRDMWCSTLQSCLKEQRLLGHPRPPQPPRPLRTGMLELRGHKAKVFAALSPGELALYKSEQAFSLGIGICFIELQGCSVRETKSRSFDLLTPHRCFSFTAESGGARQSWAAALQEAVTETLSDYEVAEKIWSNRANRQCADCGSSRPDWAAVNLGVVICKQCAGQHRALGSGISKVQSLKLDTSVWSNEIVQLFIVLGNDRANRFWAGTLPPGEGLHPDATPGPRGEFISRKYRLGLFRKPHPQYPDHSQLLQALCAAVARPNLLKNMTQLLCVEAFEGEEPWFPPAPDGSCPGLLPSDPSPGVYNEVVVRATYSGFLYCSPVSNKAGPSPPRRGRDAPPRLWCVLGAALEMFASENSPEPLSLIQPQDIVCLGVSPPPTDPGDRFPFSFELILAGGRIQHFGTDGADSLEAWTSAVGKWFSPLSCHQLLGPGLLRLGRLWLRSPSHTAPAPGLWLSGFGLLRGDHLFLCSAPGPGPPAPEDMVHLRRLQEISVVSAADTPDKKEHLVLVETGRTLYLQGEGRLDFTAWNAAIGGAAGGGGTGLQEQQMSRGDIPIIVDACISFVTQHGLRLEGVYRKGGARARSLRLLAEFRRDARSVKLRPGEHFVEDVTDTLKRFFRELDDPVTSARLLPRWREAAELPQKNQRLEKYKDVIGCLPRVNRRTLATLIGHLYRVQKCAALNQMCTRNLALLFAPSVFQTDGRGEHEVRVLQELIDGYISVFDIDSDQVAQIDLEVSLITTWKDVQLSQAGDLIMEVYIEQQLPDNCVTLKVSPTLTAEELTNQVLEMRGTAAGMDLWVTFEIREHGELERPLHPKEKVLEQALQWCQLPEPCSASLLLKKVPLAQAGCLFTGIRRESPRVGLLRCREEPPRLLGSRFQERFFLLRGRCLLLLKEKKSSKPEREWPLEGAKVYLGIRKKLKPPTPWGFTLILEKMHLYLSCTDEDEMWDWTTSILKAQHDDQQPVVLRRHSSSDLARQKFGTMPLLPIRGDDSGATLLSANQTLPMKSSQGSVEEQEELEEPVYEEPVYEEVGAFPELIQDTSTSFSTTREWTVKPENPLTSQKSLDQPFLSKSSTLGQEERPPEPPPGPPSKSSPQARGSLEEQLLQELSSLILRKGETTAGLGSPSQPSSPQSPSPTGLPTQTPGFPTQPPCTSSPPSSQPLT

SEQ ID NO: 6142 - protein, 1375 aa, Homo sapiens
  Payload ID: 1334;
  Gene Symbol: ARAP3;
  Gene Name: ArfGAP with RhoGAP domain, ankyrin repeat and PH domain 3;
  ENSP ID: ENSP00000421826
MEPSPSPAPQAQPPKPVPKPRTVFGGLSGPATTQRPGLSPALGGPGVSRSPEPSPRPPPLPTSSSEQSSALNTVEMMPNSIYFGLDSRGRAQAAQDKAPDSSQISAPTPALRPTTGTVHIMDPGCLYYGVQPVGTPGAPDRRESRGVCQGRAEHRLSRQDLEAREDAGYASLELPGDSTLLSPTLETEETSDDLISPYASFSFTADRLTPLLSGWLDKLSPQGNYVFQRRFVQFNGRSLMYFGSDKDPFPKGVIPLTAIEMTRSSKDNKFQVITGQRVFVFRTESEAQRDMWCSTLQSCLKEQRLLGHPRPPQPPRPLRTGMLELRGHKAKVFAALSPGELALYKSEQAFSLGIGICFIELQGCSVRETKSRSFDLLTPHRCFSFTAESGGARQSWAAALQEAVTETLSDYEVAEKIWSNRANRQCADCGSSRPDWAAVNLGVVICKQCAGQHRALGSGISKVQSLKLDTSVWSNEIVQLFIVLGNDRANRFWAGTLPPGEGLHPDATPGPRGEFISRKYRLGLFRKPHPQYPDHSQLLQALCAAVARPNLLKNMTQLLCVEAFEDPSPGVYNEVVVRATYSGFLYCSPVSNKAGPSPPRRGRDAPPRLWCVLGAALEMFASENSPEPLSLIQPQDIVCLGVSPPPTDPGDRFPFSFELILAGGRIQHFGTDGADSLEAWTSAVGKWFSPLSCHQLLGPGLLRLGRLWLRSPSHTAPAPGLWLSGFGLLRGDHLFLCSAPGPGPPAPEDMVHLRRLQEISVVSAADTPDKKEHLVLVETGRTLYLQGEGRLDFTAWNAAIGGAAGGGGTGLQEQQMSRGDIPIIVDACISFVTQHELPQKNQRLEKYKDVIGCLPRVNRRTLATLIGHLYRVQKCAALNQMCTRNLALLFAPSVFQTDGRGEHEVRVLQELIDGYISVFDIDSDQVAQIDLEVSLITTWKDVQLSQAGDLIMEVYIEQQLPDNCVTLKVSPTLTAEELTNQVLEMRGTAAGMDLWVTFEIREHGELERPLHPKEKVLEQALQWCQLPEPCSASLLLKKVPLAQAGCLFTGIRRESPRVGLLRCREEPPRLLGSRFQERFFLLRGRCLLLLKEKKSSKPEREWPLEGAKVYLGIRKKLKPPTPWGFTLILEKMHLYLSCTDEDEMWDWTTSILKAQHDDQQPVVLRRHSSSDLARQKFGTMPLLPIRGDDSGATLLSANQTLRRLHNRRTLSMFFPMKSSQGSVEEQEELEEPVYEEPVYEEVGAFPELIQDTSTSFSTTREWTVKPENPLTSQKSLDQPFLSKSSTLGQEERPPEPPPGPPSKSSPQARGSLEEQLLQELSSLILRKGETTAGLGSPSQPSSPQSPSPTGLPTQTPGFPTQPPCTSSPPSSQPLT

SEQ ID NO: 6143 - protein, 1375 aa, Homo sapiens; identical to SEQ ID NO: 6142
  Payload ID: 1334;
  Gene Symbol: ARAP3;
  Gene Name: ArfGAP with RhoGAP domain, ankyrin repeat and PH domain 3;
  ENSP ID: ENSP00000486980

SEQ ID NO: 6144 - protein, 1122 aa, Homo sapiens
  Payload ID: 1335;
  Gene Symbol: ASAP1;
  Gene Name: ArfGAP with SH3 domain, ankyrin repeat and PH domain 1;
  ENSP ID: ENSP00000350297
MVSNLKRIMAQKWMPDQISVSEFIAETTEDYNSPTTSSFTTRLHNCRNTVTLLEEALDQDRTALQKVKKSVKAIYNSGQDHVQNEENYAQVLDKFGSNFLSRDNPDLGTAFVKFSTLTKELSTLLKNLLQGLSHNVIFTLDSLLKGDLKGVKGDLKKPFDKAWKDYETKFTKIEKEKREHAKQHGMIRTEITGAEIAEEMEKERRLFQLQMCEYLIKVNEIKTKKGVDLLQNLIKYYHAQCNFFQDGLKTADKLKQYIEKLAADLYNIKQTQDEEKKQLTALRDLIKSSLQLDQKEDSQSRQGGYSMHQLQGNKEYGSEKKGYLLKKSDGIRKVWQRRKCSVKNGILTISHATSNRQPAKLNLLTCQVKPNAEDKKSFDLISHNRTYHFQAEDEQDYVAWISVLTNSKEEALTMAFRGEQSAGENSLEDLTKAIIEDVQRLPGNDICCDCGSSEPTWLSTNLGILTCIECSGIHREMGVHISRIQSLELDKLGTSELLLAKNVGNNSFNDIMEANLPSPSPKPTPSSDMTVRKEYITAKYVDHRFSRKTCSTSSAKLNELLEAIKSRDLLALIQVYAEGVELMEPLLEPGQELGETALHLAVRTADQTSLHLVDFLVQNCGNLDKQTALGNTVLHYCSMYSKPECLKLLLRSKPTVDIVNQAGETALDIAKRLKATQCEDLLSQAKSGKFNPHVHVEYEWNLRQEEIDESDDDLDDKPSPIKKERSPRPQSFCHSSSISPQDKLALPGFSTPRDKQRLSYGAFTNQIFVSTSTDSPTSPTTEAPPLPPRNAGKGPTGPPSTLPLSTQTSSGSSTLSKKRPPPPPPGHKRTLSDPPSPLPHGPPNKGAVPWGNDGGPSSSSKTTNKFEGLSQQSSTSSAKTALGPRVLPKLPQKVALRKTDHLSLDKATIPPEIFQKSSQLAELPQKPPPGDLPPKPTELAPKPQIGDLPPKPGELPPKPQLGDLPPKPQLSDLPPKPQMKDLPPKPQLGDLLAKSQTGDVSPKAQQPSEVTLKSHPLDLSPNVQSRDAIQKQASEDSNDLTPTLPETPVPLPRKINTGKNKVRRVKTIYDCQADNDDELTFIEGEVIIVTGEEDQEWWIGHIEGQPERKGVFPVSFVHILSD

SEQ ID NO: 6145 - protein, 39 aa, Homo sapiens
  Payload ID: 1335;
  Gene Symbol: ASAP1;
  Gene Name: ArfGAP with SH3 domain, ankyrin repeat and PH domain 1;
  ENSP ID: ENSP00000428463
MRSSASRLSSFSSRDSLWNRYPGMIFRVFEKMRGADGFH

SEQ ID NO: 6146 - protein, 39 aa, Homo sapiens; identical to SEQ ID NO: 6145
  Payload ID: 1335;
  Gene Symbol: ASAP1;
  Gene Name: ArfGAP with SH3 domain, ankyrin repeat and PH domain 1;
  ENSP ID: ENSP00000428629

SEQ ID NO: 6147 - protein, 33 aa, Homo sapiens
  Payload ID: 1335;
  Gene Symbol: ASAP1;
  Gene Name: ArfGAP with SH3 domain, ankyrin repeat and PH domain 1;
  ENSP ID: ENSP00000428936
MIRTEITGAEIAEEMEKERRLFQLQMCEYLIKV

SEQ ID NO: 6148 - protein, 950 aa, Homo sapiens
  Payload ID: 1335;
  Gene Symbol: ASAP1;
  Gene Name: ArfGAP with SH3 domain, ankyrin repeat and PH domain 1;
  ENSP ID: ENSP00000429391
  MOD_RES (1)..(1): Any amino acid
XKREHAKQHGMIRTEITGAEIAEEMEKERRLFQLQMCEYLIKVNEIKTKKGVDLLQNLIKYYHAQCNFFQDGLKTADKLKQYIEKLAADLYNIKQTQDEEKKQLTALRDLIKSSLQLDQKESRRDSQSRQGGYSMHQLQGNKEYGSEKKGYLLKKSDGIRKVWQRRKCSVKNGILTISHATSNRQPAKLNLLTCQVKPNAEDKKSFDLISHNRTYHFQAEDEQDYVAWISVLTNSKEEALTMAFRGEQSAGENSLEDLTKAIIEDVQRLPGNDICCDCGSSEPTWLSTNLGILTCIECSGIHREMGVHISRIQSLELDKLGTSELLLAKNVGNNSFNDIMEANLPSPSPKPTPSSDMTVRKEYITAKYVDHRFSRKTCSTSSAKLNELLEAIKSRDLLALIQVYAEGVELMEPLLEPGQELGETALHLAVRTADQTSLHLVDFLVQNCGNLDKQTALGNTVLHYCSMYSKPECLKLLLRSKPTVDIVNQAGETALDIAKRLKATQCEDLLSQAKSGKFNPHVHVEYEWNLRQEEIDESDDDLDDKPSPIKKERSPRPQSFCHSSSISPQDKLALPGFSTPRDKQRLSYGAFTNQIFVSTSTDSPTSPTTEAPPLPPRNAGKGPTGPPSTLPLSTQTSSGSSTLSKKRPPPPPPGHKRTLSDPPSPLPHGPPNKGAVPWGNDGGPSSSSKTTNKFEGLSQQSSTSSAKTALGPRVLPKLPQKVALRKTDHLSLDKATIPPEIFQKSSQLAELPQKPPPGDLPPKPTELAPKPQIGDLPPKPGELPPKPQLGDLPPKPQLSDLPPKPQMKDLPPKPQLGDLLAKSQTGDVSPKAQQPSEVTLKSHPLDLSPNVQSRDAIQKQASEDSNDLTPTLPETPVPLPRKINTGKNKVRRVKTIYDCQADNDDELTFIEGEVIIVTGEEDQEWWIGHIEGQPERKGVFPVSFVHILSD

SEQ ID NO: 6149 - protein, 39 aa, Homo sapiens; identical to SEQ ID NO: 6145
  Payload ID: 1335;
  Gene Symbol: ASAP1;
  Gene Name: ArfGAP with SH3 domain, ankyrin repeat and PH domain 1;
  ENSP ID: ENSP00000429614

SEQ ID NO: 6150 - protein, 483 aa, Homo sapiens
  Payload ID: 1335;
  Gene Symbol: ASAP1;
  Gene Name: ArfGAP with SH3 domain, ankyrin repeat and PH domain 1;
  ENSP ID: ENSP00000429829
  MOD_RES (1)..(1): Any amino acid
XELMEPLLEPGQELGETALHLAVRTADQTSLHLVDFLVQNCGNLDKQTALGNTVLHYCSMYSKPECLKLLLRSKPTVDIVNQAGETALDIAKRLKATQCEDLLSQAKSGKFNPHVHVEYEWNLRQEEIDESDDDLDDKPSPIKKERSPRPQSFCHSSSISPQDKLALPGFSTPRDKQRLSYGAFTNQIFVSTSTDSPTSPTTEAPPLPPRNAGKGNDGGPSSSSKTTNKFEGLSQQSSTSSAKTALGPRVLPKLPQKVALRKTDHLSLDKATIPPEIFQKSSQLAELPQKPPPGDLPPKPTELAPKPQIGDLPPKPGELPPKPQLGDLPPKPQLSDLPPKPQMKDLPPKPQLGDLLAKSQTGDVSPKAQQPSEVTLKSHPLDLSPNVQSRDAIQKQASEDSNDLTPTLPETPVPLPRKINTGKNKVRRVKTIYDCQADNDDELTFIEGEVIIVTGEEDQEWWIGHIEGQPERKGVFPVSFVHI

SEQ ID NO: 6151 - protein, 1129 aa, Homo sapiens
  Payload ID: 1335;
  Gene Symbol: ASAP1;
  Gene Name: ArfGAP with SH3 domain, ankyrin repeat and PH domain 1;
  Uniprot ID:  Q9ULH1;
  ENSP ID: ENSP00000429900
MRSSASRLSSFSSRDSLWNRMPDQISVSEFIAETTEDYNSPTTSSFTTRLHNCRNTVTLLEEALDQDRTALQKVKKSVKAIYNSGQDHVQNEENYAQVLDKFGSNFLSRDNPDLGTAFVKFSTLTKELSTLLKNLLQGLSHNVIFTLDSLLKGDLKGVKGDLKKPFDKAWKDYETKFTKIEKEKREHAKQHGMIRTEITGAEIAEEMEKERRLFQLQMCEYLIKVNEIKTKKGVDLLQNLIKYYHAQCNFFQDGLKTADKLKQYIEKLAADLYNIKQTQDEEKKQLTALRDLIKSSLQLDQKEDSQSRQGGYSMHQLQGNKEYGSEKKGYLLKKSDGIRKVWQRRKCSVKNGILTISHATSNRQPAKLNLLTCQVKPNAEDKKSFDLISHNRTYHFQAEDEQDYVAWISVLTNSKEEALTMAFRGEQSAGENSLEDLTKAIIEDVQRLPGNDICCDCGSSEPTWLSTNLGILTCIECSGIHREMGVHISRIQSLELDKLGTSELLLAKNVGNNSFNDIMEANLPSPSPKPTPSSDMTVRKEYITAKYVDHRFSRKTCSTSSAKLNELLEAIKSRDLLALIQVYAEGVELMEPLLEPGQELGETALHLAVRTADQTSLHLVDFLVQNCGNLDKQTALGNTVLHYCSMYSKPECLKLLLRSKPTVDIVNQAGETALDIAKRLKATQCEDLLSQAKSGKFNPHVHVEYEWNLRQEEIDESDDDLDDKPSPIKKERSPRPQSFCHSSSISPQDKLALPGFSTPRDKQRLSYGAFTNQIFVSTSTDSPTSPTTEAPPLPPRNAGKGPTGPPSTLPLSTQTSSGSSTLSKKRPPPPPPGHKRTLSDPPSPLPHGPPNKGAVPWGNDGGPSSSSKTTNKFEGLSQQSSTSSAKTALGPRVLPKLPQKVALRKTDHLSLDKATIPPEIFQKSSQLAELPQKPPPGDLPPKPTELAPKPQIGDLPPKPGELPPKPQLGDLPPKPQLSDLPPKPQMKDLPPKPQLGDLLAKSQTGDVSPKAQQPSEVTLKSHPLDLSPNVQSRDAIQKQASEDSNDLTPTLPETPVPLPRKINTGKNKVRRVKTIYDCQADNDDELTFIEGEVIIVTGEEDQEWWIGHIEGQPERKGVFPVSFVHILSD

SEQ ID NO: 6152 - protein, 98 aa, Homo sapiens
  Payload ID: 1335;
  Gene Symbol: ASAP1;
  Gene Name: ArfGAP with SH3 domain, ankyrin repeat and PH domain 1;
  ENSP ID: ENSP00000430917
MVSNLKRIMAQKWMPDQISVSEFIAETTEDYNSPTTSSFTTRLHNCRNTVTLLEEALDQDRTALQKVKKSVKAIYNSGQDHVQNEENYAQVLDKFGSN

SEQ ID NO: 6153 - protein, 1006 aa, Homo sapiens
  Payload ID: 1336;
  Gene Symbol: ASAP2;
  Gene Name: ArfGAP with SH3 domain, ankyrin repeat and PH domain 2;
  Uniprot ID:  O43150;
  ENSP ID: ENSP00000281419
MPDQISVSEFVAETHEDYKAPTASSFTTRTAQCRNTVAAIEEALDVDRMVLYKMKKSVKAINSSGLAHVENEEQYTQALEKFGGNCVCRDDPDLGSAFLKFSVFTKELTALFKNLIQNMNNIISFPLDSLLKGDLKGVKGDLKKPFDKAWKDYETKITKIEKEKKEHAKLHGMIRTEISGAEIAEEMEKERRFFQLQMCEYLLKVNEIKIKKGVDLLQNLIKYFHAQCNFFQDGLKAVESLKPSIETLSTDLHTIKQAQDEERRQLIQLRDILKSALQVEQKEDSQIRQSTAYSLHQPQGNKEHGTERNGSLYKKSDGIRKVWQKRKCSVKNGFLTISHGTANRPPAKLNLLTCQVKTNPEEKKCFDLISHDRTYHFQAEDEQECQIWMSVLQNSKEEALNNAFKGDDNTGENNIVQELTKEIISEVQRMTGNDVCCDCGAPDPTWLSTNLGILTCIECSGIHRELGVHYSRMQSLTLDVLGTSELLLAKNIGNAGFNEIMECCLPAEDSVKPNPGSDMNARKDYITAKYIERRYARKKHADNAAKLHSLCEAVKTRDIFGLLQAYADGVDLTEKIPLANGHEPDETALHLAVRSVDRTSLHIVDFLVQNSGNLDKQTGKGSTALHYCCLTDNAECLKLLLRGKASIEIANESGETPLDIAKRLKHEHCEELLTQALSGRFNSHVHVEYEWRLLHEDLDESDDDMDEKLQPSPNRREDRPISFYQLGSNQLQSNAVSLARDAANLAKEKQRAFMPSILQNETYGALLSGSPPPAQPAAPSTTSAPPLPPRNVGKVQTASSANTLWKTNSVSVDGGSRQRSSSDPPAVHPPLPPLRVTSTNPLTPTPPPPVAKTPSVMEALSQPSKPAPPGISQIRPPPLPPQPPSRLPQKKPAPGADKSTPLTNKGQPRGPVDLSATEALGPLSNAMVLQPPAPMPRKSQATKLKPKRVKALYNCVADNPDELTFSEGDVIIVDGEEDQEWWIGHIDGDPGRKGAFPVSFVHFIAD

SEQ ID NO: 6154 - protein, 961 aa, Homo sapiens
  Payload ID: 1336;
  Gene Symbol: ASAP2;
  Gene Name: ArfGAP with SH3 domain, ankyrin repeat and PH domain 2;
  Uniprot ID:  O43150;
  ENSP ID: ENSP00000316404
MPDQISVSEFVAETHEDYKAPTASSFTTRTAQCRNTVAAIEEALDVDRMVLYKMKKSVKAINSSGLAHVENEEQYTQALEKFGGNCVCRDDPDLGSAFLKFSVFTKELTALFKNLIQNMNNIISFPLDSLLKGDLKGVKGDLKKPFDKAWKDYETKITKIEKEKKEHAKLHGMIRTEISGAEIAEEMEKERRFFQLQMCEYLLKVNEIKIKKGVDLLQNLIKYFHAQCNFFQDGLKAVESLKPSIETLSTDLHTIKQAQDEERRQLIQLRDILKSALQVEQKEDSQIRQSTAYSLHQPQGNKEHGTERNGSLYKKSDGIRKVWQKRKCSVKNGFLTISHGTANRPPAKLNLLTCQVKTNPEEKKCFDLISHDRTYHFQAEDEQECQIWMSVLQNSKEEALNNAFKGDDNTGENNIVQELTKEIISEVQRMTGNDVCCDCGAPDPTWLSTNLGILTCIECSGIHRELGVHYSRMQSLTLDVLGTSELLLAKNIGNAGFNEIMECCLPAEDSVKPNPGSDMNARKDYITAKYIERRYARKKHADNAAKLHSLCEAVKTRDIFGLLQAYADGVDLTEKIPLANGHEPDETALHLAVRSVDRTSLHIVDFLVQNSGNLDKQTGKGSTALHYCCLTDNAECLKLLLRGKASIEIANESGETPLDIAKRLKHEHCEELLTQALSGRFNSHVHVEYEWRLLHEDLDESDDDMDEKLQPSPNRREDRPISFYQLGSNQLQSNAVSLARDAANLAKEKQRAFMPSILQNETYGALLSGSPPPAQPAAPSTTSAPPLPPRNVGKDPLTPTPPPPVAKTPSVMEALSQPSKPAPPGISQIRPPPLPPQPPSRLPQKKPAPGADKSTPLTNKGQPRGPVDLSATEALGPLSNAMVLQPPAPMPRKSQATKLKPKRVKALYNCVADNPDELTFSEGDVIIVDGEEDQEWWIGHIDGDPGRKGAFPVSFVHFIAD

SEQ ID NO: 6155 - protein, 903 aa, Homo sapiens
  Payload ID: 1337;
  Gene Symbol: ASAP3;
  Gene Name: ArfGAP with SH3 domain, ankyrin repeat and PH domain 3;
  Uniprot ID:  Q8TDY4;
  ENSP ID: ENSP00000338769
MPEQFSVAEFLAVTAEDLSSPAGAAAFAAKMPRYRGAALAREEILEGDQAILQRIKKAVRAIHSSGLGHVENEEQYREAVESLGNSHLSQNSHELSTGFLNLAVFTREVAALFKNLIQNLNNIVSFPLDSLMKGQLRDGRQDSKKQLEKAWKDYEAKMAKLEKERDRARVTGGIPGEVAQDMQRERRIFQLHMCEYLLKAGESQMKQGPDFLQSLIKFFHAQHNFFQDGWKAAQSLFPFIEKLAASVHALHQAQEDELQKLTQLRDSLRGTLQLESREEHLSRKNSGCGYSIHQHQGNKQFGTEKVGFLYKKSDGIRRVWQKRKCGVKYGCLTISHSTINRPPVKLTLLTCQVRPNPEEKKCFDLVTHNRTYHFQAEDEHECEAWVSVLQNSKDEALSSAFLGEPSAGPGSWGSAGHDGEPHDLTKLLIAEVKSRPGNSQCCDCGAADPTWLSTNLGVLTCIQCSGVHRELGVRFSRMQSLTLDLLGPSELLLALNMGNTSFNEVMEAQLPSHGGPKPSAESDMGTRRDYIMAKYVEHRFARRCTPEPQRLWTAICNRDLLSVLEAFANGQDFGQPLPGPDAQAPEELVLHLAVKVANQASLPLVDFIIQNGGHLDAKAADGNTALHYAALYNQPDCLKLLLKGRALVGTVNEAGETALDIARKKHHKECEELLEQAQAGTFAFPLHVDYSWVISTEPGSDSEEDEEEKRCLLKLPAQAHWASGRLDISNKTYETVASLGAATPQGESEDCPPPLPVKNSSRTLVQGCARHASGDRSEVSSLSSEAPETPESLGSPASSSSLMSPLEPGDPSQAPPNSEEGLREPPGTSRPSLTSGTTPSEMYLPVRFSSESTRSYRRGARSPEDGPSARQPLPRRNVPVGITEGDGSRTGSLPASSVQLLQD

SEQ ID NO: 6156 - protein, 894 aa, Homo sapiens
  Payload ID: 1337;
  Gene Symbol: ASAP3;
  Gene Name: ArfGAP with SH3 domain, ankyrin repeat and PH domain 3;
  Uniprot ID:  Q8TDY4;
  ENSP ID: ENSP00000408826
MPEQFSVAEFLAVTAEDLSSPAGAAAFAAKMPRYRGAALAREEILEGDQAILQRIKKAVRAIHSSGLGHVENEEQYREAVESLGNSHLSQNSHELSTGFLNLAVFTREVAALFKNLIQNLNNIVSFPLDSLMKGQLRDGRQASLSLGSRAKLEKERDRARVTGGIPGEVAQDMQRERRIFQLHMCEYLLKAGESQMKQGPDFLQSLIKFFHAQHNFFQDGWKAAQSLFPFIEKLAASVHALHQAQEDELQKLTQLRDSLRGTLQLESREEHLSRKNSGCGYSIHQHQGNKQFGTEKVGFLYKKSDGIRRVWQKRKCGVKYGCLTISHSTINRPPVKLTLLTCQVRPNPEEKKCFDLVTHNRTYHFQAEDEHECEAWVSVLQNSKDEALSSAFLGEPSAGPGSWGSAGHDGEPHDLTKLLIAEVKSRPGNSQCCDCGAADPTWLSTNLGVLTCIQCSGVHRELGVRFSRMQSLTLDLLGPSELLLALNMGNTSFNEVMEAQLPSHGGPKPSAESDMGTRRDYIMAKYVEHRFARRCTPEPQRLWTAICNRDLLSVLEAFANGQDFGQPLPGPDAQAPEELVLHLAVKVANQASLPLVDFIIQNGGHLDAKAADGNTALHYAALYNQPDCLKLLLKGRALVGTVNEAGETALDIARKKHHKECEELLEQAQAGTFAFPLHVDYSWVISTEPGSDSEEDEEEKRCLLKLPAQAHWASGRLDISNKTYETVASLGAATPQGESEDCPPPLPVKNSSRTLVQGCARHASGDRSEVSSLSSEAPETPESLGSPASSSSLMSPLEPGDPSQAPPNSEEGLREPPGTSRPSLTSGTTPSEMYLPVRFSSESTRSYRRGARSPEDGPSARQPLPRRNVPVGITEGDGSRTGSLPASSVQLLQD

SEQ ID NO: 6157 - protein, 124 aa, Homo sapiens
  Payload ID: 1337;
  Gene Symbol: ASAP3;
  Gene Name: ArfGAP with SH3 domain, ankyrin repeat and PH domain 3;
  ENSP ID: ENSP00000434897
  MOD_RES (1)..(1): Any amino acid
XRFSRMQSLTLDLLGPSELLLALNMGNTSFNEVMEAQLPSHGGPKPSAESDMGTRRDYIMAKYVEHRFARRCTPEPQRLWTAICNRDLLSVLEAFANGQDFGQPLPGPDAQVRTPPRATYNPPV

SEQ ID NO: 6158 - protein, 203 aa, Homo sapiens
  Payload ID: 1337;
  Gene Symbol: ASAP3;
  Gene Name: ArfGAP with SH3 domain, ankyrin repeat and PH domain 3;
  ENSP ID: ENSP00000435394
LEQAQAGTFAFPLHVDYSWVISTEPGSDSEEDEEEKRCLLKLPAQAHWASGRLDISNKTYETVASLGAATPQGENRSEVSSLSSEAPETPESLGSPASSSSLMSPLEPGDPSQAPPNSEEGLREPPGTSRPSLTSGTTPSEMYLPVRFSSESTRSYRRGARSPEDGPSARQPLPRRNVPVGITEGDGSRTGSLPASSVQLLQD

SEQ ID NO: 6159 - protein, 44 aa, Homo sapiens
  Payload ID: 1337;
  Gene Symbol: ASAP3;
  Gene Name: ArfGAP with SH3 domain, ankyrin repeat and PH domain 3;
  ENSP ID: ENSP00000435858
MPEQFSVAEFLAVTAEDLSSPAGAAAFAAKMPRSWKETKPSCRE

SEQ ID NO: 6160 - protein, 407 aa, Homo sapiens
  Payload ID: 1337;
  Gene Symbol: ASAP3;
  Gene Name: ArfGAP with SH3 domain, ankyrin repeat and PH domain 3;
  Uniprot ID:  Q8TDY4;
  ENSP ID: ENSP00000436150
MGNTSFNEVMEAQLPSHGGPKPSAESDMGTRRDYIMAKYVEHRFARRCTPEPQRLWTAICNRDLLSVLEAFANGQDFGQPLPGPDAQAPEELVLHLAVKVANQASLPLVDFIIQNGGHLDAKAADGNTALHYAALYNQPDCLKLLLKGRALVGTVNEAGETALDIARKKHHKECEELLEQAQAGTFAFPLHVDYSWVISTEPGSDSEEDEEEKRCLLKLPAQAHWASGRLDISNKTYETVASLGAATPQGESEDCPPPLPVKNSSRTLVQGCARHASGDRSEVSSLSSEAPETPESLGSPASSSSLMSPLEPGDPSQAPPNSEEGLREPPGTSRPSLTSGTTPSEMYLPVRFSSESTRSYRRGARSPEDGPSARQPLPRRNVPVGITEGDGSRTGSLPASSVQLLQD

SEQ ID NO: 6161 - protein, 120 aa, Homo sapiens
  Payload ID: 1337;
  Gene Symbol: ASAP3;
  Gene Name: ArfGAP with SH3 domain, ankyrin repeat and PH domain 3;
  ENSP ID: ENSP00000436439
YLLKAGESQMKQGPDFLQSLIKFFHAQHNFFQDGWKAAQSLFPFIEKLAASVHALHQAQEDELQKLTQLRDSLRGTLQLESREEHLSRKNSGCGYSIHQHQGNKQFGTEKVGFLYKKSDG

SEQ ID NO: 6162 - protein, 157 aa, Homo sapiens
  Payload ID: 1337;
  Gene Symbol: ASAP3;
  Gene Name: ArfGAP with SH3 domain, ankyrin repeat and PH domain 3;
  ENSP ID: ENSP00000476400
MPEQFSVAEFLAVTAEDLSSPAGAAAFAAKMPRYRGAALAREEILEGDQAILQRIKKAVRAIHSSGLGHVENEEQYREAVESLGNSHLSQNSHELSTGFLNLAVFTREVAALFKNLIQNLNNIVSFPLDSLMKGQLRDGRQDSKKQLEKAWKDYEAK

SEQ ID NO: 6163 - protein, 202 aa, Homo sapiens
  Payload ID: 1337;
  Gene Symbol: ASAP3;
  Gene Name: ArfGAP with SH3 domain, ankyrin repeat and PH domain 3;
  ENSP ID: ENSP00000483740
MPEQFSVAEFLAVTAEDLSSPAGAAAFAAKMPRYRGAALAREEILEGDQAILQRIKKAVRAIHSSGLGHVENEEQYREAVESLGNSHLSQNSHELSTGFLNLAVFTREVAALFKNLIQNLNNIVSFPLDSLMKGQLRDGRQDSKKQLEKAWKDYEAKMAKLEKERDRARVTGGIPGNLGIPAKPHPTLKRASESPQAPPDPA

SEQ ID NO: 6164 - protein, 407 aa, Homo sapiens; identical to SEQ ID NO: 6160
  Payload ID: 1337;
  Gene Symbol: ASAP3;
  Gene Name: ArfGAP with SH3 domain, ankyrin repeat and PH domain 3;
  ENSP ID: ENSP00000488934

SEQ ID NO: 6165 - protein, 903 aa, Homo sapiens; identical to SEQ ID NO: 6155
  Payload ID: 1337;
  Gene Symbol: ASAP3;
  Gene Name: ArfGAP with SH3 domain, ankyrin repeat and PH domain 3;
  ENSP ID: ENSP00000488946

SEQ ID NO: 6166 - protein, 894 aa, Homo sapiens; identical to SEQ ID NO: 6156
  Payload ID: 1337;
  Gene Symbol: ASAP3;
  Gene Name: ArfGAP with SH3 domain, ankyrin repeat and PH domain 3;
  ENSP ID: ENSP00000488953

SEQ ID NO: 6167 - protein, 120 aa, Homo sapiens; identical to SEQ ID NO: 6161
  Payload ID: 1337;
  Gene Symbol: ASAP3;
  Gene Name: ArfGAP with SH3 domain, ankyrin repeat and PH domain 3;
  ENSP ID: ENSP00000489094

SEQ ID NO: 6168 - protein, 157 aa, Homo sapiens; identical to SEQ ID NO: 6162
  Payload ID: 1337;
  Gene Symbol: ASAP3;
  Gene Name: ArfGAP with SH3 domain, ankyrin repeat and PH domain 3;
  ENSP ID: ENSP00000489187

SEQ ID NO: 6169 - protein, 124 aa, Homo sapiens; identical to SEQ ID NO: 6157
  Payload ID: 1337;
  Gene Symbol: ASAP3;
  Gene Name: ArfGAP with SH3 domain, ankyrin repeat and PH domain 3;
  ENSP ID: ENSP00000489344
  MOD_RES (1)..(1): Any amino acid

SEQ ID NO: 6170 - protein, 202 aa, Homo sapiens; identical to SEQ ID NO: 6163
  Payload ID: 1337;
  Gene Symbol: ASAP3;
  Gene Name: ArfGAP with SH3 domain, ankyrin repeat and PH domain 3;
  ENSP ID: ENSP00000489432

SEQ ID NO: 6171 - protein, 203 aa, Homo sapiens; identical to SEQ ID NO: 6158
  Payload ID: 1337;
  Gene Symbol: ASAP3;
  Gene Name: ArfGAP with SH3 domain, ankyrin repeat and PH domain 3;
  ENSP ID: ENSP00000489483

SEQ ID NO: 6172 - protein, 44 aa, Homo sapiens; identical to SEQ ID NO: 6159
  Payload ID: 1337;
  Gene Symbol: ASAP3;
  Gene Name: ArfGAP with SH3 domain, ankyrin repeat and PH domain 3;
  ENSP ID: ENSP00000489485

SEQ ID NO: 6173 - protein, 2177 aa, Homo sapiens
  Payload ID: 1338;
  Gene Symbol: ARFGEF3;
  Gene Name: ARFGEF family member 3;
  Uniprot ID:  Q5TH69;
  ENSP ID: ENSP00000251691
MEEILRKLQKEASGSKYKAIKESCTWALETLGGLDTIVKIPPHVLREKCLLPLQLALESKNVKLAQHALAGMQKLLSEERFVSMETDSDEKQLLNQILNAVKVTPSLNEDLQVEVMKVLLCITYTPTFDLNGSAVLKIAEVCIETYISSCHQRSINTAVRATLSQMLSDLTLQLRQRQENTIIENPDVPQDFGNQGSTVESLCDDVVSVLTVLCEKLQAAINDSQQLQLLYLECILSVLSSSSSSMHLHRRFTDLIWKNLCPALIVILGNPIHDKTITSAHTSSTSTSLESDSASPGVSDHGRGSGCSCTAPALSGPVARTIYYIAAELVRLVGSVDSMKPVLQSLYHRVLLYPPPQHRVEAIKIMKEILGSPQRLCDLAGPSSTESESRKRSISKRKSHLDLLKLIMDGMTEACIKGGIEACYAAVSCVCTLLGALDELSQGKGLSEGQVQLLLLRLEELKDGAEWSRDSMEINEADFRWQRRVLSSEHTPWESGNERSLDISISVTTDTGQTTLEGELGQTTPEDHSGNHKNSLKSPAIPEGKETLSKVLETEAVDQPDVVQRSHTVPYPDITNFLSVDCRTRSYGSRYSESNFSVDDQDLSRTEFDSCDQYSMAAEKDSGRSDVSDIGSDNCSLADEEQTPRDCLGHRSLRTAALSLKLLKNQEADQHSARLFIQSLEGLLPRLLSLSNVEEVDTALQNFASTFCSGMMHSPGFDGNSSLSFQMLMNADSLYTAAHCALLLNLKLSHGDYYRKRPTLAPGVMKDFMKQVQTSGVLMVFSQAWIEELYHQVLDRNMLGEAGYWGSPEDNSLPLITMLTDIDGLESSAIGGQLMASAATESPFAQSRRIDDSTVAGVAFARYILVGCWKNLIDTLSTPLTGRMAGSSKGLAFILGAEGIKEQNQKERDAICMSLDGLRKAARLSCALGVAANCASALAQMAAASCVQEEKEEREAQEPSDAITQVKLKVEQKLEQIGKVQGVWLHTAHVLCMEAILSVGLEMGSHNPDCWPHVFRVCEYVGTLEHNHFSDGASQPPLTISQPQKATGSAGLLGDPECEGSPPEHSPEQGRSLSTAPVVQPLSIQDLVREGSRGRASDFRGGSLMSGSSAAKVVLTLSTQADRLFEDATDKLNLMALGGFLYQLKKASQSQLFHSVTDTVDYSLAMPGEVKSTQDRKSALHLFRLGNAMLRIVRSKARPLLHVMRCWSLVAPHLVEAACHKERHVSQKAVSFIHDILTEVLTDWNEPPHFHFNEALFRPFERIMQLELCDEDVQDQVVTSIGELVEVCSTQIQSGWRPLFSALETVHGGNKSEMKEYLVGDYSMGKGQAPVFDVFEAFLNTDNIQVFANAATSYIMCLMKFVKGLGEVDCKEIGDCAPAPGAPSTDLCLPALDYLRRCSQLLAKIYKMPLKPIFLSGRLAGLPRRLQEQSASSEDGIESVLSDFDDDTGLIEVWIILLEQLTAAVSNCPRQHQPPTLDLLFELLRDVTKTPGPGFGIYAVVHLLLPVMSVWLRRSHKDHSYWDMASANFKHAIGLSCELVVEHIQSFLHSDIRYESMINTMLKDLFELLVACVAKPTETISRVGCSCIRYVLVTAGPVFTEEMWRLACCALQDAFSATLKPVKDLLGCFHSGTESFSGEGCQVRVAAPSSSPSAEAEYWRIRAMAQQVFMLDTQCSPKTPNNFDHAQSCQLIIELPPDEKPNGHTKKSVSFREIVVSLLSHQVLLQNLYDILLEEFVKGPSPGEEKTIQVPEAKLAGFLRYISMQNLAVIFDLLLDSYRTAREFDTSPGLKCLLKKVSGIGGAANLYRQSAMSFNIYFHALVCAVLTNQETITAEQVKKVLFEDDERSTDSSQQCSSEDEDIFEETAQVSPPRGKEKRQWRARMPLLSVQPVSNADWVWLVKRLHKLCMELCNNYIQMHLDLENCMEEPPIFKGDPFFILPSFQSESSTPSTGGFSGKETPSEDDRSQSREHMGESLSLKAGGGDLLLPPSPKVEKKDPSRKKEWWENAGNKIYTMAADKTISKLMTEYKKRKQQHNLSAFPKEVKVEKKGEPLGPRGQDSPLLQRPQHLMDQGQMRHSFSAGPELLRQDKRPRSGSTGSSLSVSVRDAEAQIQAWTNMVLTVLNQIQILPDQTFTALQPAVFPCISQLTCHVTDIRVRQAVREWLGRVGRVYDIIV

SEQ ID NO: 6174 - protein, 330 aa, Homo sapiens
  Payload ID: 1339;
  Gene Symbol: ARG1;
  Gene Name: arginase 1;
  Uniprot ID:  P05089;
  ENSP ID: ENSP00000349446
MSAKSRTIGIIGAPFSKGQPRGGVEEGPTVLRKAGLLEKLKEQVTQNFLILECDVKDYGDLPFADIPNDSPFQIVKNPRSVGKASEQLAGKVAEVKKNGRISLVLGGDHSLAIGSISGHARVHPDLGVIWVDAHTDINTPLTTTSGNLHGQPVSFLLKELKGKIPDVPGFSWVTPCISAKDIVYIGLRDVDPGEHYILKTLGIKYFSMTEVDRLGIGKVMEETLSYLLGRKKRPIHLSFDVDGLDPSFTPATGTPVVGGLTYREGLYITEEIYKTGLLSGLDIMEVNPSLGKTPEEVTRTVNTAVAITLACFGLAREGNHKPIDYLNPPK

SEQ ID NO: 6175 - protein, 322 aa, Homo sapiens
  Payload ID: 1339;
  Gene Symbol: ARG1;
  Gene Name: arginase 1;
  Uniprot ID:  P05089;
  ENSP ID: ENSP00000357066
MSAKSRTIGIIGAPFSKGQPRGGVEEGPTVLRKAGLLEKLKEQECDVKDYGDLPFADIPNDSPFQIVKNPRSVGKASEQLAGKVAEVKKNGRISLVLGGDHSLAIGSISGHARVHPDLGVIWVDAHTDINTPLTTTSGNLHGQPVSFLLKELKGKIPDVPGFSWVTPCISAKDIVYIGLRDVDPGEHYILKTLGIKYFSMTEVDRLGIGKVMEETLSYLLGRKKRPIHLSFDVDGLDPSFTPATGTPVVGGLTYREGLYITEEIYKTGLLSGLDIMEVNPSLGKTPEEVTRTVNTAVAITLACFGLAREGNHKPIDYLNPPK

SEQ ID NO: 6176 - protein, 354 aa, Homo sapiens
  Payload ID: 1340;
  Gene Symbol: ARG2;
  Gene Name: arginase 2;
  Uniprot ID:  P78540;
  ENSP ID: ENSP00000261783
MSLRGSLSRLLQTRVHSILKKSVHSVAVIGAPFSQGQKRKGVEHGPAAIREAGLMKRLSSLGCHLKDFGDLSFTPVPKDDLYNNLIVNPRSVGLANQELAEVVSRAVSDGYSCVTLGGDHSLAIGTISGHARHCPDLCVVWVDAHADINTPLTTSSGNLHGQPVSFLLRELQDKVPQLPGFSWIKPCISSASIVYIGLRDVDPPEHFILKNYDIQYFSMRDIDRLGIQKVMERTFDLLIGKRQRPIHLSFDIDAFDPTLAPATGTPVVGGLTYREGMYIAEEIHNTGLLSALDLVEVNPQLATSEEEAKTTANLAVDVIASSFGQTREGGHIVYDQLPTPSSPDESENQARVRI

SEQ ID NO: 6177 - protein, 68 aa, Homo sapiens
  Payload ID: 1341;
  Gene Symbol: ARGLU1;
  Gene Name: arginine and glutamate rich 1;
  ENSP ID: ENSP00000353844
MKLNEKFSEGWRKPNASWKSSCSKNSSDRDKLSLPHKKLERGSWRVWQPRSTLCRTLDKTEEERAKRE

SEQ ID NO: 6178 - protein, 142 aa, Homo sapiens
  Payload ID: 1341;
  Gene Symbol: ARGLU1;
  Gene Name: arginine and glutamate rich 1;
  ENSP ID: ENSP00000365092
MKLNEKFSEGWRKPNASWKSSCSKNSSDRDKLSLPHKKLERGSWRVWQPRSTLCRTLDKTEEERAKREELERILEENNRKIAEAQAKLAEEQLRIVEEQRKIHEERMKLEQERQRQQKEEQKIILGKGKSRPKLSFSLKTQD

SEQ ID NO: 6179 - protein, 273 aa, Homo sapiens
  Payload ID: 1341;
  Gene Symbol: ARGLU1;
  Gene Name: arginine and glutamate rich 1;
  Uniprot ID:  Q9NWB6;
  ENSP ID: ENSP00000383059
MGRSRSRSSSRSKHTKSSKHNKKRSRSRSRSRDKERVRKRSKSRESKRNRRRESRSRSRSTNTAVSRRERDRERASSPPDRIDIFGRTVSKRSSLDEKQKREEEEKKAEFERQRKIRQQEIEEKLIEEETARRVEELVAKRVEEELEKRKDEIEREVLRRVEEAKRIMEKQLLEELERQRQAELAAQKAREEEERAKREELERILEENNRKIAEAQAKLAEEQLRIVEEQRKIHEERMKLEQERQRQQKEEQKIILGKGKSRPKLSFSLKTQD

SEQ ID NO: 6180 - protein, 164 aa, Homo sapiens
  Payload ID: 1342;
  Gene Symbol: AVP;
  Gene Name: arginine vasopressin;
  Uniprot ID:  P01185;
  ENSP ID: ENSP00000369647
MPDTMLPACFLGLLAFSSACYFQNCPRGGKRAMSDLELRQCLPCGPGGKGRCFGPSICCADELGCFVGTAEALRCQEENYLPSPCQSGQKACGSGGRCAAFGVCCNDESCVTEPECREGFHRRARASDRSNATQLDGPAGALLLRLVQLAGAPEPFEPAQPDAY

SEQ ID NO: 6181 - protein, 418 aa, Homo sapiens
  Payload ID: 1343;
  Gene Symbol: AVPR1A;
  Gene Name: arginine vasopressin receptor 1A;
  Uniprot ID:  P37288;
  ENSP ID: ENSP00000299178
MRLSAGPDAGPSGNSSPWWPLATGAGNTSREAEALGEGNGPPRDVRNEELAKLEIAVLAVTFAVAVLGNSSVLLALHRTPRKTSRMHLFIRHLSLADLAVAFFQVLPQMCWDITYRFRGPDWLCRVVKHLQVFGMFASAYMLVVMTADRYIAVCHPLKTLQQPARRSRLMIAAAWVLSFVLSTPQYFVFSMIEVNNVTKARDCWATFIQPWGSRAYVTWMTGGIFVAPVVILGTCYGFICYNIWCNVRGKTASRQSKGAEQAGVAFQKGFLLAPCVSSVKSISRAKIRTVKMTFVIVTAYIVCWAPFFIIQMWSVWDPMSVWTESENPTITITALLGSLNSCCNPWIYMFFSGHLLQDCVQSFPCCQNMKEKFNKEDTDSMSRRQTFYSNNRSPTNSTGMWKDSPKSSKSIKFIPVST

SEQ ID NO: 6182 - protein, 186 aa, Homo sapiens
  Payload ID: 1343;
  Gene Symbol: AVPR1A;
  Gene Name: arginine vasopressin receptor 1A;
  ENSP ID: ENSP00000449822
MTGGIFVAPVVILGTCYGFICYNIWCNVRGKTASRQSKGAEQAGVAFQKGFLLAPCVSSVKSISRAKIRTVKMTFVIVTAYIVCWAPFFIIQMWSVWDPMSVWTESENPTITITALLGSLNSCCNPWIYMFFSGHLLQDCVQSFPCCQNMKEKFNKEDTDSMSRRQTFYSNNRSPTNSTDKKMRTG

SEQ ID NO: 6183 - protein, 424 aa, Homo sapiens
  Payload ID: 1344;
  Gene Symbol: AVPR1B;
  Gene Name: arginine vasopressin receptor 1B;
  Uniprot ID:  P47901;
  ENSP ID: ENSP00000356094
MDSGPLWDANPTPRGTLSAPNATTPWLGRDEELAKVEIGVLATVLVLATGGNLAVLLTLGQLGRKRSRMHLFVLHLALTDLAVALFQVLPQLLWDITYRFQGPDLLCRAVKYLQVLSMFASTYMLLAMTLDRYLAVCHPLRSLQQPGQSTYLLIAAPWLLAAIFSLPQVFIFSLREVIQGSGVLDCWADFGFPWGPRAYLTWTTLAIFVLPVTMLTACYSLICHEICKNLKVKTQAWRVGGGGWRTWDRPSPSTLAATTRGLPSRVSSINTISRAKIRTVKMTFVIVLAYIACWAPFFSVQMWSVWDKNAPDEDSTNVAFTISMLLGNLNSCCNPWIYMGFNSHLLPRPLRHLACCGGPQPRMRRRLSDGSLSSRHTTLLTRSSCPATLSLSLSLTLSGRPRPEESPRDLELADGEGTAETIIF

SEQ ID NO: 6184 - protein, 371 aa, Homo sapiens
  Payload ID: 1345;
  Gene Symbol: AVPR2;
  Gene Name: arginine vasopressin receptor 2;
  Uniprot ID:  P30518;
  ENSP ID: ENSP00000338072
MLMASTTSAVPGHPSLPSLPSNSSQERPLDTRDPLLARAELALLSIVFVAVALSNGLVLAALARRGRRGHWAPIHVFIGHLCLADLAVALFQVLPQLAWKATDRFRGPDALCRAVKYLQMVGMYASSYMILAMTLDRHRAICRPMLAYRHGSGAHWNRPVLVAWAFSLLLSLPQLFIFAQRNVEGGSGVTDCWACFAEPWGRRTYVTWIALMVFVAPTLGIAACQVLIFREIHASLVPGPSERPGGRRRGRRTGSPGEGAHVSAAVAKTVRMTLVIVVVYVLCWAPFFLVQLWAAWDPEAPLEGAPFVLLMLLASLNSCTNPWIYASFSSSVSSELRSLLCCARGRTPPSLGPQDESCTTASSSLAKDTSS

SEQ ID NO: 6185 - protein, 371 aa, Homo sapiens; identical to SEQ ID NO: 6184
  Payload ID: 1345;
  Gene Symbol: AVPR2;
  Gene Name: arginine vasopressin receptor 2;
  Uniprot ID:  P30518;
  ENSP ID: ENSP00000351805

SEQ ID NO: 6186 - protein, 309 aa, Homo sapiens
  Payload ID: 1345;
  Gene Symbol: AVPR2;
  Gene Name: arginine vasopressin receptor 2;
  Uniprot ID:  P30518;
  ENSP ID: ENSP00000359066
MLMASTTSAVPGHPSLPSLPSNSSQERPLDTRDPLLARAELALLSIVFVAVALSNGLVLAALARRGRRGHWAPIHVFIGHLCLADLAVALFQVLPQLAWKATDRFRGPDALCRAVKYLQMVGMYASSYMILAMTLDRHRAICRPMLAYRHGSGAHWNRPVLVAWAFSLLLSLPQLFIFAQRNVEGGSGVTDCWACFAEPWGRRTYVTWIALMVFVAPTLGIAACQVLIFREIHASLVPGPSERPGGRRRGRRTGSPGEGAHVSAAVAKTVRMTLVIVVVYVLCWAPFFLVQLWAAWDPEAPLEGGCSRG

SEQ ID NO: 6187 - protein, 48 aa, Homo sapiens
  Payload ID: 1345;
  Gene Symbol: AVPR2;
  Gene Name: arginine vasopressin receptor 2;
  ENSP ID: ENSP00000393397
MLMASTTSACPSSSSSPSATWKVAAGSLTAGPALRSPGAVAPMSPGLP

SEQ ID NO: 6188 - protein, 372 aa, Homo sapiens
  Payload ID: 1345;
  Gene Symbol: AVPR2;
  Gene Name: arginine vasopressin receptor 2;
  ENSP ID: ENSP00000393513
MLMASTTSAVPGHPSLPSLPSNSSQERPLDTRDPLLARAELALLSIVFVAVALSNGLVLAALARRGRRGHWAPIHVFIGHLCLADLAVALFQVLPQLAWKATDRFRGPDALCRAVKYLQMVGMYASSYMILAMTLDRHRAICRPMLAYRHGSGAHWNRPVLVAWAFSLLLSLPQLFIFAQRNVEGGSGVTDCWACFAEPWGRRTYVTWIALMVFVAPTLGIAACQVLIFREIHASLVPGPSERPGGRRRGRRTGSPGEGAHVSAAVAKTVRMTLGRPLCYSCCWPASTAAPTPGSMHLSAAACPQSCEACSAVPGDAPHPAWVPKMSPAPPPAPPWPRTLHREELLGVLPLEALRSSAAFLGLVLGATGRGT

SEQ ID NO: 6189 - protein, 147 aa, Homo sapiens
  Payload ID: 1346;
  Gene Symbol: AVPI1;
  Gene Name: arginine vasopressin-induced 1;
  Uniprot ID:  Q5T686;
  ENSP ID: ENSP00000359660
MGTPASVVSEPPPWQAPIEARGRKQASANIFQDAELLQIQALFQRSGDQLAEERAQIIWECAGDHRVAEALKRLRRKRPPRQKPLGHSLHHCSRLRILEPHSALANPQSATETASSEQYLHSRKKSARIRRNWRKSGPTSYLHQIRH

SEQ ID NO: 6190 - protein, 334 aa, Homo sapiens
  Payload ID: 1347;
  Gene Symbol: RSRC1;
  Gene Name: arginine/serine-rich coiled-coil 1;
  Uniprot ID:  Q96IZ7;
  ENSP ID: ENSP00000295930
MGRRSSDTEEESRSKRKKKHRRRSSSSSSSDSRTYSRKKGGRKSRSKSRSWSRDLQPRSHSYDRRRRHRSSSSSSYGSRRKRSRSRSRGRGKSYRVQRSRSKSRTRRSRSRPRLRSHSRSSERSSHRRTRSRSRDRERRKGRDKEKREKEKDKGKDKELHNIKRGESGNIKAGLEHLPPAEQAKARLQLVLEAAAKADEALKAKERNEEEAKRRKEEDQATLVEQVKRVKEIEAIESDSFVQQTFRSSKEVKKSVEPSEVKQATSTSGPASAVADPPSTEKEIDPTSIPTAIKYQDDNSLAHPNLFIEKADAEEKWFKRLIALRQERLMGSPVA

SEQ ID NO: 6191 - protein, 276 aa, Homo sapiens
  Payload ID: 1347;
  Gene Symbol: RSRC1;
  Gene Name: arginine/serine-rich coiled-coil 1;
  Uniprot ID:  Q96IZ7;
  ENSP ID: ENSP00000308671
MGRRSSDTEEESRSKRKKKHRRRSSSSSSSDSRTYSRKKGGRKSRSKSRSWSRDLQPRSHSYDRRRRHRSSSSSSYGSRRKRSRSRSRGRGKSYRVQRSRSKSRTRRESGNIKAGLEHLPPAEQAKARLQLVLEAAAKADEALKAKERNEEEAKRRKEEDQATLVEQVKRVKEIEAIESDSFVQQTFRSSKEVKKSVEPSEVKQATSTSGPASAVADPPSTEKEIDPTSIPTAIKYQDDNSLAHPNLFIEKADAEEKWFKRLIALRQERLMGSPVA

SEQ ID NO: 6192 - protein, 203 aa, Homo sapiens
  Payload ID: 1347;
  Gene Symbol: RSRC1;
  Gene Name: arginine/serine-rich coiled-coil 1;
  ENSP ID: ENSP00000417302
MGRRSSDTEEESRSKRKKKHRRRSSSSSSSDSRTYSRKKGGRKSRSKSRSWSRDLQPRSHSYDRRRRHRSSSSSSYGSRRKRSRSRSRGRGKSYRVQRSRSKSRTRRSRSRPRLRSHSRSSERSSHRRTRSRSRDRERRKGRDKEKREKEKDKGKDKELHNIKRGESGNIKAGLEHLPPAEQAKARLQLVLEAAAKADEALKA

SEQ ID NO: 6193 - protein, 164 aa, Homo sapiens
  Payload ID: 1347;
  Gene Symbol: RSRC1;
  Gene Name: arginine/serine-rich coiled-coil 1;
  ENSP ID: ENSP00000417690
MGRRSSDTEEESRSKRKKKHRRRSSSSSSSDSRTYSRKKGGRKSRSKSRSWSRDLQPRSHSYDRRRRHRSSSSSSYGSRRKRSRSRSRGRGKSYRVQRSRSKSRTRRSRSRPRLRSHSRSSERSSHRRTRSRSRDRERRKGRDKEKREKEKDKGKDKELHNIKR

SEQ ID NO: 6194 - protein, 283 aa, Homo sapiens
  Payload ID: 1347;
  Gene Symbol: RSRC1;
  Gene Name: arginine/serine-rich coiled-coil 1;
  ENSP ID: ENSP00000417816
MGRRSSDTEEESRSKRKKKHRRRSSSSSSSDSRTYSRKKGGRKSRSKSRSWSRDLQPRSHSYDRRRRHRSSSSSSYGSRRKRSRSRSRGRGKSYRVQRSRSKSRTRRSRSRPRLRSHSRSSERSSHRRTRSRSRDRERRKGRDKEKREKEKDKGKDKELHNIKRGESGNIKAGLEHLPPAEQAKARLQLVLEAAAKADEALKAKERNEEEAKRRKEEDQATLVEQVKRVKEIEAIESDSFVQQTFRSSKEVKKLFIEKADAEEKWFKRLIALRQERLMGSPVA

SEQ ID NO: 6195 - protein, 112 aa, Homo sapiens
  Payload ID: 1347;
  Gene Symbol: RSRC1;
  Gene Name: arginine/serine-rich coiled-coil 1;
  ENSP ID: ENSP00000419054
  MOD_RES (1)..(1): Any amino acid
XKKHRRRSSSSSSSDSRTYSRKKGGRKSRSKSRSWSRDLQPRSHSYDRRRRHRSSSSSSYGSRRKRSRSRSRGRGKSYRVQRSRSKSRTRRYPPTSTSWVAGTTGTHRHTQL

SEQ ID NO: 6196 - protein, 194 aa, Homo sapiens
  Payload ID: 1347;
  Gene Symbol: RSRC1;
  Gene Name: arginine/serine-rich coiled-coil 1;
  ENSP ID: ENSP00000419394
MGRRSSDTEEESRSKRKKKHRRRSSSSSSSDSRTYSRKKGGRKSRSKSRSWSRDLQPRSHSYDRRRRHRSSSSSSYGSRRKRSRSRSRGRGKSYRVQRSRSKSRTRRSRSRPRLRSHSRSSERSSHRRTRSRSRDRERRKGRDKEKREKEKDKGKDKELHNIKRGESGNIKAGLEHLPPAEQAKARLQLVLEAA

SEQ ID NO: 6197 - protein, 276 aa, Homo sapiens; identical to SEQ ID NO: 6191
  Payload ID: 1347;
  Gene Symbol: RSRC1;
  Gene Name: arginine/serine-rich coiled-coil 1;
  Uniprot ID:  Q96IZ7;
  ENSP ID: ENSP00000419794

SEQ ID NO: 6198 - protein, 199 aa, Homo sapiens
  Payload ID: 1347;
  Gene Symbol: RSRC1;
  Gene Name: arginine/serine-rich coiled-coil 1;
  ENSP ID: ENSP00000420018
MGRRSSDTEEESRSKRKKKHRRRSSSSSSSDSRTYSRKKGGRKSRSKSRSWSRDLQPRSHSYDRRRRHRSSSSSSYGSRRKRSRSRSRGRGKSYRVQRSRSKSRTRRSRSRPRLRSHSRSSERSSHRRTRSRSRDRERRKGRDKEKREKEKDKGKDKELHNIKRGFHQKNCERKKKLTSNRKRKVLGRPNWNLETSKLD

SEQ ID NO: 6199 - protein, 334 aa, Homo sapiens; identical to SEQ ID NO: 6190
  Payload ID: 1347;
  Gene Symbol: RSRC1;
  Gene Name: arginine/serine-rich coiled-coil 1;
  Uniprot ID:  Q96IZ7;
  ENSP ID: ENSP00000420150

SEQ ID NO: 6200 - protein, 208 aa, Homo sapiens
  Payload ID: 1347;
  Gene Symbol: RSRC1;
  Gene Name: arginine/serine-rich coiled-coil 1;
  ENSP ID: ENSP00000420464
  MOD_RES (1)..(1): Any amino acid
XSRSRPRLRSHSRSSERSSHRRTRSRSRDRERRKGRDKEKREKEKDKGKDKELHNIKRGESGNIKAGLEHLPPAEQAKARLQLVLEAAAKADEALKAKERNEEEAKRRKEEDQATLVEQVKRVKEIEAIESDSFVQQTFRSSKEVKKSVEPSEVKQATSTSGPASAVADPPSTEKEIDPTSIPTAIKYQDDNSLAHPNVISLNFTNVS

SEQ ID NO: 6201 - protein, 334 aa, Homo sapiens; identical to SEQ ID NO: 6190
  Payload ID: 1347;
  Gene Symbol: RSRC1;
  Gene Name: arginine/serine-rich coiled-coil 1;
  Uniprot ID:  Q96IZ7;
  ENSP ID: ENSP00000481697

SEQ ID NO: 6202 - protein, 434 aa, Homo sapiens
  Payload ID: 1348;
  Gene Symbol: RSRC2;
  Gene Name: arginine/serine-rich coiled-coil 2;
  Uniprot ID:  Q7L4I2;
  ENSP ID: ENSP00000330188
MAASDTERDGLAPEKTSPDRDKKKEQSEVSVSPRASKHHYSRSRSRSRERKRKSDNEGRKHRSRSRSKEGRRHESKDKSSKKHKSEEHNDKEHSSDKGRERLNSSENGEDRHKRKERKSSRGRSHSRSRSRERRHRSRSRERKKSRSRSRERKKSRSRSRERKKSRSRSRERKRRIRSRSRSRSRHRHRTRSRSRTRSRSRDRKKRIEKPRRFSRSLSRTPSPPPFRGRNTAMDAQEALARRLERAKKLQEQREKEMVEKQKQQEIAAAAATGGSVLNVAALLASGTQVTPQIAMAAQMAALQAKALAETGIAVPSYYNPAAVNPMKFAEQEKKRKMLWQGKKEGDKSQSAEIWEKLNFGNKDQNVKFRKLMGIKSEDEAGCSSVDEESYKTLKQQEEVFRNLDAQYEMARSQTHTQRGMGLGFTSSMRGMDAV

SEQ ID NO: 6203 - protein, 236 aa, Homo sapiens
  Payload ID: 1348;
  Gene Symbol: RSRC2;
  Gene Name: arginine/serine-rich coiled-coil 2;
  ENSP ID: ENSP00000343315
MIRTNFFLKQGRRHESKDKSSKKHKSEEHNDKEHSSDKGRERLNSSENGEDRHKRKERKSSRGRSHSRSRSRERRHRSRSRERKKSRSRSRERKKSRSRSRERKKSRSRSRERKRRIRSRSRSRSRHRHRTRSRSRTRSRSRDRKKRIEKPRRFSRSLSRTPSPPPFRGRNTAMDAQEALARRLERAKKLQEQREKEMVEKQKQQEIAAAAATGGSVLNVAALLASGTQVTPQIAM

SEQ ID NO: 6204 - protein, 76 aa, Homo sapiens
  Payload ID: 1348;
  Gene Symbol: RSRC2;
  Gene Name: arginine/serine-rich coiled-coil 2;
  ENSP ID: ENSP00000412148
MAASDTERDGLAPEKTSPDRDKKKEQSEVSVSPRASKHHYSRSRSRSRERKRKSDNEGRKHRSRSRSKERAYARRD

SEQ ID NO: 6205 - protein, 76 aa, Homo sapiens; identical to SEQ ID NO: 6204
  Payload ID: 1348;
  Gene Symbol: RSRC2;
  Gene Name: arginine/serine-rich coiled-coil 2;
  ENSP ID: ENSP00000432725

SEQ ID NO: 6206 - protein, 76 aa, Homo sapiens; identical to SEQ ID NO: 6204
  Payload ID: 1348;
  Gene Symbol: RSRC2;
  Gene Name: arginine/serine-rich coiled-coil 2;
  ENSP ID: ENSP00000436515

SEQ ID NO: 6207 - protein, 176 aa, Homo sapiens
  Payload ID: 1348;
  Gene Symbol: RSRC2;
  Gene Name: arginine/serine-rich coiled-coil 2;
  ENSP ID: ENSP00000444159
  MOD_RES (1)..(1): Any amino acid
XRRHESKDKSSKKHKSEEHNDKEHSSDKGRERLNSSENGEDRHKRKERKSSRGRSHSRSRSRERRHRSRSRERKKSRSRSRERKKSRSRSRERKKSRSRSRERKRRIRSRSRSRSRHRHRTRSRSRTRSRSRDRKKRIEKPRRFSRSLSRTPSPPPFRGRNTAMDAQEALARRQNT

SEQ ID NO: 6208 - protein, 25 aa, Homo sapiens
  Payload ID: 1348;
  Gene Symbol: RSRC2;
  Gene Name: arginine/serine-rich coiled-coil 2;
  ENSP ID: ENSP00000445664
MKEENTGAGAEAKSVLMREETELKT

SEQ ID NO: 6209 - protein, 91 aa, Homo sapiens
  Payload ID: 1348;
  Gene Symbol: RSRC2;
  Gene Name: arginine/serine-rich coiled-coil 2;
  ENSP ID: ENSP00000446470
MVRTGTNAKKESHQEAEVTQDLGLVKDAIVVEAGSGRSLDPGVGSGRNRDPEAERGRNRDPEAGKENGGSGLVPAQDQDTGIGLEAGVGQG

SEQ ID NO: 6210 - protein, 290 aa, Homo sapiens
  Payload ID: 1349;
  Gene Symbol: RSRP1;
  Gene Name: arginine/serine-rich prt 1;
  Uniprot ID:  Q9BUV0;
  ENSP ID: ENSP00000243189
MSNYVNDMWPGSPQEKDSPSTSRSGGSSRLSSRSRSRSFSRSSRSHSRVSSRFSSRSRRSKSRSRSRRRHQRKYRRYSRSYSRSRSRSRSRRYRERRYGFTRRYYRSPSRYRSRSRSRSRSRGRSYCGRAYAIARGQRYYGFGRTVYPEEHSRWRDRSRTRSRSRTPFRLSEKDRMELLEIAKTNAAKALGTTNIDLPASLRTVPSAKETSRGIGVSSNGAKPELSEKVTEDGTRNPNEKPTQQRSIAFSSNNSVAKPIQKSAKAATEEASSRSPKIDQKKSPYGLWIPI

SEQ ID NO: 6211 - protein, 242 aa, Homo sapiens
  Payload ID: 1349;
  Gene Symbol: RSRP1;
  Gene Name: arginine/serine-rich prt 1;
  Uniprot ID:  Q9BUV0;
  ENSP ID: ENSP00000391510
MSNYVNDMWPGSPQEKDSPSTSRSGGSSRLSSRSRSRSFSRSSRSHSRVSSRFSSRSRRSKSRSRSRRRHQRKYRRYSRSYSRSRSRSRSRRYRERRYGFTRRYYRSPSRYRSRSRSRSRSRGRSYCGRAYAIARGQRYYGFGRTVYPEEHSRWRDRSRTRSRSRTPFRLSEKDRMELLEIAKTNAAKALGTTNIDLPASLRTVPSAKETSRGIGVSSNGAKPEVSILGLSEQNFQKANCQI

SEQ ID NO: 6212 - protein, 84 aa, Homo sapiens
  Payload ID: 1349;
  Gene Symbol: RSRP1;
  Gene Name: arginine/serine-rich prt 1;
  ENSP ID: ENSP00000454463
  MOD_RES (1)..(1): Any amino acid
XRTVYPEEHSRWRDRSRTRSRSRTPFRLSEKDRMELLEIAKTNAAKALGTTNIDLPASLRTVPSAKETSRGIGVSSNGAKPEKS

SEQ ID NO: 6213 - protein, 129 aa, Homo sapiens
  Payload ID: 1349;
  Gene Symbol: RSRP1;
  Gene Name: arginine/serine-rich prt 1;
  ENSP ID: ENSP00000454590
MSNYVNDMWPGSPQEKDSPSTSRSGGSSRLSSRSRSRSFSRSSRSHSRVSSRFSSRSRRSKSRSRSRRRHQRKYRRYSRSYSRSRSRSRSRRYRERRYGFTRRYYRSPSRYRSRSRSRSRSRGRSYCGR

SEQ ID NO: 6214 - protein, 183 aa, Homo sapiens
  Payload ID: 1349;
  Gene Symbol: RSRP1;
  Gene Name: arginine/serine-rich prt 1;
  ENSP ID: ENSP00000455127
  MOD_RES (1)..(1): Any amino acid
XSRYRSRSRSRSRSRGRSYCGRAYAIARGQRYYGFGRTVYPEEHSRWRDRSRTRSRSRTPFRLSEKDRMELLEIAKTNAAKALGTTNIDLPASLRTVPSAKETSRGIGVSSNGAKPELSEKVTEDGTRNPNEKPTQQRSIAFSSNNSVAKPIQKSAKAATEEASSRSPKIDQKKSPYGLWIPI

SEQ ID NO: 6215 - protein, 96 aa, Homo sapiens
  Payload ID: 1349;
  Gene Symbol: RSRP1;
  Gene Name: arginine/serine-rich prt 1;
  ENSP ID: ENSP00000456995
MSNYVNDMWPGSPQEKDSPSTSRSGGSSRLSSRSRSRSFSRSSRSHSRVSSRFSSRSRRSKSRSRSRRRHQRKYRRYSRSYSRSRSRSRSRRYRER

SEQ ID NO: 6216 - protein, 226 aa, Homo sapiens
  Payload ID: 1349;
  Gene Symbol: RSRP1;
  Gene Name: arginine/serine-rich prt 1;
  ENSP ID: ENSP00000457195
MSNYVNDMWPGSPQEKDSPSTSRSGGSSRLSSRSRSRSFSRSSRSHSRVSSRFSSRSRRSKSRSRSRRRHQRKYRRYSRSYSRSRSRSRSRRYRERRYGFTRRYYRSPSRYRSRSRSRSRSRGRSYCGRAYAIARGQRYYGFGRTVYPEEHSRWRDRSRTRSRSRTPFRLSEKDRMELLEIAKTNAAKALGTTNIDLPASLRTVPSAKETSRGIGVSSNGAKPEMF

SEQ ID NO: 6217 - protein, 226 aa, Homo sapiens
  Payload ID: 1349;
  Gene Symbol: RSRP1;
  Gene Name: arginine/serine-rich prt 1;
  Uniprot ID:  Q9BUV0;
  ENSP ID: ENSP00000457582
MSNYVNDMWPGSPQEKDSPSTSRSGGSSRLSSRSRSRSFSRSSRSHSRVSSRFSSRSRRSKSRSRSRRRHQRKYRRYSRSYSRSRSRSRSRRYRERRYGFTRRYYRSPSRYRSRSRSRSRSRGRSYCGRAYAIARGQRYYGFGRTVYPEEHSRWRDRSRTRSRSRTPFRLSEKDRMELLEIAKTNAAKALGTTNIDLPASLRTVPSAKETSRGIGVSSNGAKPEKS

SEQ ID NO: 6218 - protein, 89 aa, Homo sapiens
  Payload ID: 1349;
  Gene Symbol: RSRP1;
  Gene Name: arginine/serine-rich prt 1;
  ENSP ID: ENSP00000458042
MSNYVNDMWPGSPQEKDSPSTSRSGGSSRLSSRSRSRSFSRSSRSHSRVSSRFSSRSRRSKSRSRSRRRHQRKYRRYSRSYSRSRSRSR

SEQ ID NO: 6219 - protein, 315 aa, Homo sapiens
  Payload ID: 1350;
  Gene Symbol: ARGFX;
  Gene Name: arginine-fifty homeobox;
  Uniprot ID:  A6NJG6;
  ENSP ID: ENSP00000335578
MRNRMAPENPQPDPFINRNYSNMKVIPPQDPASPSFTLLSKLECSGTVSAYCSLNLPGSTDPPTSASRVAATTAIRRRHKERTSFTHQQYEELEALFSQTMFPDRNLQEKLALRLDLPESTVKVWFRNRRFKLKKQQQQQSAKQRNQILPSKKNVPTSPRTSPSPYAFSPVISDFYSSLPSQPLDPSNWAWNSTFTESSTSDFQMQDTQWERLVASVPALYSDAYDIFQIIELYNLPDENEISSSSFHCLYQYLSPTKYQVGGQGSSLSIFAGPAVGLSPAQTWPNMTSQAFEAYSLTDSLEFQKTSNMVDLGFL

SEQ ID NO: 6220 - protein, 1566 aa, Homo sapiens
  Payload ID: 1351;
  Gene Symbol: RERE;
  Gene Name: arginine-glutamic acid dipeptide (RE) repeats;
  Uniprot ID:  Q9P2R6;
  ENSP ID: ENSP00000338629
MTADKDKDKDKEKDRDRDRDREREKRDKARESENSRPRRSCTLEGGAKNYAESDHSEDEDNDNNSATAEESTKKNKKKPPKKKSRYERTDTGEITSYITEDDVVYRPGDCVYIESRRPNTPYFICSIQDFKLVHNSQACCRSPTPALCDPPACSLPVASQPPQHLSEAGRGPVGSKRDHLLMNVKWYYRQSEVPDSVYQHLVQDRHNENDSGRELVITDPVIKNRELFISDYVDTYHAAALRGKCNISHFSDIFAAREFKARVDSFFYILGYNPETRRLNSTQGEIRVGPSHQAKLPDLQPFPSPDGDTVTQHEELVWMPGVNDCDLLMYLRAARSMAAFAGMCDGGSTEDGCVAASRDDTTLNALNTLHESGYDAGKALQRLVKKPVPKLIEKCWTEDEVKRFVKGLRQYGKNFFRIRKELLPNKETGELITFYYYWKKTPEAASSRAHRRHRRQAVFRRIKTRTASTPVNTPSRPPSSEFLDLSSASEDDFDSEDSEQELKGYACRHCFTTTSKDWHHGGRENILLCTDCRIHFKKYGELPPIEKPVDPPPFMFKPVKEEDDGLSGKHSMRTRRSRGSMSTLRSGRKKQPASPDGRTSPINEDIRSSGRNSPSAASTSSNDSKAETVKKSAKKVKEEASSPLKSNKRQREKVASDTEEADRTSSKKTKTQEISRPNSPSEGEGESSDSRSVNDEGSSDPKDIDQDNRSTSPSIPSPQDNESDSDSSAQQQMLQAQPPALQAPTGVTPAPSSAPPGTPQLPTPGPTPSATAVPPQGSPTASQAPNQPQAPTAPVPHTHIQQAPALHPQRPPSPHPPPHPSPHPPLQPLTGSAGQPSAPSHAQPPLHGQGPPGPHSLQAGPLLQHPGPPQPFGLPPQASQGQAPLGTSPAAAYPHTSLQLPASQSALQSQQPPREQPLPPAPLAMPHIKPPPTTPIPQLPAPQAHKHPPHLSGPSPFSMNANLPPPPALKPLSSLSTHHPPSAHPPPLQLMPQSQPLPSSPAQPPGLTQSQNLPPPPASHPPTGLHQVAPQPPFAQHPFVPGGPPPITPPTCPSTSTPPAGPGTSAQPPCSGAAASGGSIAGGSSCPLPTVQIKEEALDDAEEPESPPPPPRSPSPEPTVVDTPSHASQSARFYKHLDRGYNSCARTDLYFMPLAGSKLAKKREEAIEKAKREAEQKAREEREREKEKEKEREREREREREAERAAKASSSAHEGRLSDPQLSGPGHMRPSFEPPPTTIAAVPPYIGPDTPALRTLSEYARPHVMSPTNRNHPFYMPLNPTDPLLAYHMPGLYNVDPTIRERELREREIREREIRERELRERMKPGFEVKPPELDPLHPAANPMEHFARHSALTIPPTAGPHPFASFHPGLNPLERERLALAGPQLRPEMSYPDRLAAERIHAERMASLTSDPLARLQMFNVTPHHHQHSHIHSHLHLHQQDPLHQGSAGPVHPLVDPLTAGPHLARFPYPPGTLPNPLLGQPPHEHEMLRHPVFGTPYPRDLPGAIPPPMSAAHQLQAMHAQSAELQRLAMEQQWLHGHPHMHGGHLPSQEDYYSRLKKEGDKQL

SEQ ID NO: 6221 - protein, 1298 aa, Homo sapiens
  Payload ID: 1351;
  Gene Symbol: RERE;
  Gene Name: arginine-glutamic acid dipeptide (RE) repeats;
  ENSP ID: ENSP00000366684
MDDPFSPCRRLNSTQGEIRVGPSHQAKLPDLQPFPSPDGDTVTQHEELVWMPGVNDCDLLMYLRAARSMAAFAGMCDGGSTEDGCVAASRDDTTLNALNTLHESGYDAGKALQRLVKKPVPKLIEKCWTEDEVKRFVKGLRQYGKNFFRIRKELLPNKETGELITFYYYWKKTPEAASSRAHRRHRRQAVFRRIKTRTASTPVNTPSRPPSSEFLDLSSASEDDFDSEDSEQELKGYACRHCFTTTSKDWHHGGRENILLCTDCRIHFKKYGELPPIEKPVDPPPFMFKPVKEEDDGLSGKHSMRTRRSRGSMSTLRSGRKKQPASPDGRTSPINEDIRSSGRNSPSAASTSSNDSKAETVKKSAKKVKEEASSPLKSNKRQREKVASDTEEADRTSSKKTKTQEISRPNSPSEGEGESSDSRSVNDEGSSDPKDIDQDNRSTSPSIPSPQDNESDSDSSAQQQMLQAQPPALQAPTGVTPAPSSAPPGTPQLPTPGPTPSATAVPPQGSPTASQAPNQPQAPTAPVPHTHIQQAPALHPQRPPSPHPPPHPSPHPPLQPLTGSAGQPSAPSHAQPPLHGQGPPGPHSLQAGPLLQHPGPPQPFGLPPQASQGQAPLGTSPAAAYPHTSLQLPASQSALQSQQPPREQPLPPAPLAMPHIKPPPTTPIPQLPAPQAHKHPPHLSGPSPFSMNANLPPPPALKPLSSLSTHHPPSAHPPPLQLMPQSQPLPSSPAQPPGLTQSQNLPPPPASHPPTGLHQVAPQPPFAQHPFVPGGPPPITPPTCPSTSTPPAGPGTSAQPPCSGAAASGGSIAGGSSCPLPTVQIKEEALDDAEEPESPPPPPRSPSPEPTVVDTPSHASQSARFYKHLDRGYNSCARTDLYFMPLAGSKLAKKREEAIEKAKREAEQKAREEREREKEKEKEREREREREREAERAAKASSSAHEGRLSDPQLSGPGHMRPSFEPPPTTIAAVPPYIGPDTPALRTLSEYARPHVMSPTNRNHPFYMPLNPTDPLLAYHMPGLYNVDPTIRERELREREIREREIRERELRERMKPGFEVKPPELDPLHPAANPMEHFARHSALTIPPTAGPHPFASFHPGLNPLERERLALAGPQLRPEMSYPDRLAAERIHAERMASLTSDPLARLQMFNVTPHHHQHSHIHSHLHLHQQDPLHQGSAGPVHPLVDPLTAGPHLARFPYPPGTLPNPLLGQPPHEHEMLRHPVFGTPYPRDLPGAIPPPMSAAHQLQAMHAQSAELQRLAMEQQWLHGHPHMHGGHLPSQEDYYSRLKKEGDKQL

SEQ ID NO: 6222 - protein, 584 aa, Homo sapiens
  Payload ID: 1351;
  Gene Symbol: RERE;
  Gene Name: arginine-glutamic acid dipeptide (RE) repeats;
  ENSP ID: ENSP00000383699
MTADKDKDKDKEKDRDRDRDREREKRDKARESENSRPRRSCTLEGGAKNYAESDHSEDEDNDNNSATAEESTKKNKKKPPKKKSRYERTDTGEITSYITEDDVVYRPGDCVYIESRRPNTPYFICSIQDFKLVHNSQACCRSPTPALCDPPACSLPVASQPPQHLSEAGRGPVGSKRDHLLMNVKWYYRQSEVPDSVYQHLVQDRHNENDSGRELVITDPVIKNRELFISDYVDTYHAAALRGKCNISHFSDIFAAREFKARVDSFFYILGYNPETRRLNSTQGEIRVGPSHQAKLPDLQPFPSPDGDTVTQHEELVWMPGVNDCDLLMYLRAARSMAAFAGMCDGGSTEDGCVAASRDDTTLNALNTLHESGYDAGKALQRLVKKPVPKLIEKCWTEDEVKRFVKGLRQYGKNFFRIRKELLPNKETGELITFYYYWKKTPEAASSRAHRRHRRQAVFRRIKTRTASTPVNTPSRPPSSEFLDLSSASEDDFDSEDSEQELKGYACRHCFTTSTPYPRDLPGAIPPPMSAAHQLQAMHAQSAELQRLAMEQQWLHGHPHMHGGHLPSQEDYYSRLKKEGDKQL

SEQ ID NO: 6223 - protein, 1566 aa, Homo sapiens; identical to SEQ ID NO: 6220
  Payload ID: 1351;
  Gene Symbol: RERE;
  Gene Name: arginine-glutamic acid dipeptide (RE) repeats;
  Uniprot ID:  Q9P2R6;
  ENSP ID: ENSP00000383700

SEQ ID NO: 6224 - protein, 1012 aa, Homo sapiens
  Payload ID: 1351;
  Gene Symbol: RERE;
  Gene Name: arginine-glutamic acid dipeptide (RE) repeats;
  Uniprot ID:  Q9P2R6;
  ENSP ID: ENSP00000422246
MFKPVKEEDDGLSGKHSMRTRRSRGSMSTLRSGRKKQPASPDGRTSPINEDIRSSGRNSPSAASTSSNDSKAETVKKSAKKVKEEASSPLKSNKRQREKVASDTEEADRTSSKKTKTQEISRPNSPSEGEGESSDSRSVNDEGSSDPKDIDQDNRSTSPSIPSPQDNESDSDSSAQQQMLQAQPPALQAPTGVTPAPSSAPPGTPQLPTPGPTPSATAVPPQGSPTASQAPNQPQAPTAPVPHTHIQQAPALHPQRPPSPHPPPHPSPHPPLQPLTGSAGQPSAPSHAQPPLHGQGPPGPHSLQAGPLLQHPGPPQPFGLPPQASQGQAPLGTSPAAAYPHTSLQLPASQSALQSQQPPREQPLPPAPLAMPHIKPPPTTPIPQLPAPQAHKHPPHLSGPSPFSMNANLPPPPALKPLSSLSTHHPPSAHPPPLQLMPQSQPLPSSPAQPPGLTQSQNLPPPPASHPPTGLHQVAPQPPFAQHPFVPGGPPPITPPTCPSTSTPPAGPGTSAQPPCSGAAASGGSIAGGSSCPLPTVQIKEEALDDAEEPESPPPPPRSPSPEPTVVDTPSHASQSARFYKHLDRGYNSCARTDLYFMPLAGSKLAKKREEAIEKAKREAEQKAREEREREKEKEKEREREREREREAERAAKASSSAHEGRLSDPQLSGPGHMRPSFEPPPTTIAAVPPYIGPDTPALRTLSEYARPHVMSPTNRNHPFYMPLNPTDPLLAYHMPGLYNVDPTIRERELREREIREREIRERELRERMKPGFEVKPPELDPLHPAANPMEHFARHSALTIPPTAGPHPFASFHPGLNPLERERLALAGPQLRPEMSYPDRLAAERIHAERMASLTSDPLARLQMFNVTPHHHQHSHIHSHLHLHQQDPLHQGSAGPVHPLVDPLTAGPHLARFPYPPGTLPNPLLGQPPHEHEMLRHPVFGTPYPRDLPGAIPPPMSAAHQLQAMHAQSAELQRLAMEQQWLHGHPHMHGGHLPSQEDYYSRLKKEGDKQL

SEQ ID NO: 6225 - protein, 91 aa, Homo sapiens
  Payload ID: 1351;
  Gene Symbol: RERE;
  Gene Name: arginine-glutamic acid dipeptide (RE) repeats;
  ENSP ID: ENSP00000423259
  MOD_RES (1)..(1): Any amino acid
XCVYIESRRPNTPYFICSIQDFKLSKRDHLLMNVKWYYRQSEVPDSVYQHLVQDRHNENDSGRELVITDPVIKNRELFISDYVDTYHAAAL

SEQ ID NO: 6226 - protein, 177 aa, Homo sapiens
  Payload ID: 1351;
  Gene Symbol: RERE;
  Gene Name: arginine-glutamic acid dipeptide (RE) repeats;
  ENSP ID: ENSP00000423451
MSTLRSGRKKQPASPDGRTSPINEDIRSSGRNSPSAASTSSNDSKAETVKKSAKKVKEEASSPLKSNKRQREKVASDTEEADRTSSKKTKTQEISRPNSPSEGSAGPVHPLVDPLTAGPHLARFPYPPGTLPNPLLGQPPHEHEMLRHPVFGTPYPRDLPGAIPPPMSAAHQLQAMH

SEQ ID NO: 6227 - protein, 89 aa, Homo sapiens
  Payload ID: 1351;
  Gene Symbol: RERE;
  Gene Name: arginine-glutamic acid dipeptide (RE) repeats;
  ENSP ID: ENSP00000464712
MPGVNDCDLLMYLRAARSMAAFAGMCDGGSTEDGCVAASRDDTTLNALNTLHESGYDAGKALQRLVKKPVPKLIEKCWTEDEVKRFVKG

SEQ ID NO: 6228 - protein, 26 aa, Homo sapiens
  Payload ID: 1351;
  Gene Symbol: RERE;
  Gene Name: arginine-glutamic acid dipeptide (RE) repeats;
  ENSP ID: ENSP00000464847
MFKPVKEEDDGLSGKHSMRTRRSRGS

SEQ ID NO: 6229 - protein, 213 aa, Homo sapiens
  Payload ID: 1351;
  Gene Symbol: RERE;
  Gene Name: arginine-glutamic acid dipeptide (RE) repeats;
  ENSP ID: ENSP00000465133
  MOD_RES (1)..(1): Any amino acid
XDLSSASEDDFDSEDSEQELKGYACRHCFTTTSKDWHHGGRENILLCTDCRIHFKKYGELPPIEKPVDPPPFMFKPVKEEDDGLSGKHSMRTRRSRGSVSPLGPWGSWQLLQFPGMCGGLSLPGGGSESLVYQTKSWRGAALPEAVACLWAGKSSLFSPSRGPRVASCSGFCSKLLASGSVQALQGPSCSPRLLLVVSLPLYQISAILNLQAL

SEQ ID NO: 6230 - protein, 35 aa, Homo sapiens
  Payload ID: 1351;
  Gene Symbol: RERE;
  Gene Name: arginine-glutamic acid dipeptide (RE) repeats;
  ENSP ID: ENSP00000465271
MTADKDKDKDKEKDRDRDRDREREKRDKARESENS

SEQ ID NO: 6231 - protein, 464 aa, Homo sapiens
  Payload ID: 1352;
  Gene Symbol: ASL;
  Gene Name: argininosuccinate lyase;
  Uniprot ID:  P04424;
  ENSP ID: ENSP00000307188
MASESGKLWGGRFVGAVDPIMEKFNASIAYDRHLWEVDVQGSKAYSRGLEKAGLLTKAEMDQILHGLDKVAEEWAQGTFKLNSNDEDIHTANERRLKELIGATAGKLHTGRSRNDQVVTDLRLWMRQTCSTLSGLLWELIRTMVDRAEAERDVLFPGYTHLQRAQPIRWSHWILSHAVALTRDSERLLEVRKRINVLPLGSGAIAGNPLGVDRELLRAELNFGAITLNSMDATSERDFVAEFLFWASLCMTHLSRMAEDLILYCTKEFSFVQLSDAYSTGSSLMPQKKNPDSLELIRSKAGRVFGRCAGLLMTLKGLPSTYNKDLQEDKEAVFEVSDTMSAVLQVATGVISTLQIHQENMGQALSPDMLATDLAYYLVRKGMPFRQAHEASGKAVFMAETKGVALNQLSLQELQTISPLFSGDVICVWDYGHSVEQYGALGGTARSSVDWQIRQVRALLQAQQA

SEQ ID NO: 6232 - protein, 242 aa, Homo sapiens
  Payload ID: 1352;
  Gene Symbol: ASL;
  Gene Name: argininosuccinate lyase;
  ENSP ID: ENSP00000354710
MASEVAEEWAQGTFKLNSNDEDIHTANERRLKELIGATAGKLHTGRSRNDQVVTDLRLWMRQTCSTLSGLLWELIRTMVDRAEAERDVLFPGYTHLQRAQPIRWSHWILSHAVALTRDSERLLEVRKRINVLPLGSGAIAGNPLGVDRELLRAELNFGAITLNSMDATSERDFVAEFLFWASLCMTHLSRMAEDLILYCTKEFSFVQLSDAYSTGSSLMPQKKNPDSLELIRSKAGRVFGRV

SEQ ID NO: 6233 - protein, 438 aa, Homo sapiens
  Payload ID: 1352;
  Gene Symbol: ASL;
  Gene Name: argininosuccinate lyase;
  Uniprot ID:  P04424;
  ENSP ID: ENSP00000370219
MASESGKLWGGRFVGAVDPIMEKFNASIAYDRHLWEVDVQGSKAYSRGLEKAGLLTKAEMDQILHGLDKVAEEWAQGTFKLNSNDEDIHTANERRLKELIGATAGKLHTGRSRNDQVVTDLRLWMRQTCSTLSGLLWELIRTMVDRAEAERDVLFPGYTHLQRAQPIRWSHWILSGAIAGNPLGVDRELLRAELNFGAITLNSMDATSERDFVAEFLFWASLCMTHLSRMAEDLILYCTKEFSFVQLSDAYSTGSSLMPQKKNPDSLELIRSKAGRVFGRCAGLLMTLKGLPSTYNKDLQEDKEAVFEVSDTMSAVLQVATGVISTLQIHQENMGQALSPDMLATDLAYYLVRKGMPFRQAHEASGKAVFMAETKGVALNQLSLQELQTISPLFSGDVICVWDYGHSVEQYGALGGTARSSVDWQIRQVRALLQAQQA

SEQ ID NO: 6234 - protein, 444 aa, Homo sapiens
  Payload ID: 1352;
  Gene Symbol: ASL;
  Gene Name: argininosuccinate lyase;
  Uniprot ID:  P04424;
  ENSP ID: ENSP00000378740
MASESGKLWGGRFVGAVDPIMEKFNASIAYDRHLWEVDVQGSKAYSRGLEKAGLLTKAEMDQILHGLDKVAEEWAQGTFKLNSNDEDIHTANERRLKELIGATAGKLHTGRSRNDQVVTDLRLWMRQTCSTLSGLLWELIRTMVDRAEAERDVLFPGYTHLQRAQPIRWSHWILSHAVALTRDSERLLEVRKRINVLPLGSGAIAGNPLGVDRELLRAELNFGAITLNSMDATSERDFVAEFLFWASLCMTHLSRMAEDLILYCTKEFSFVQLSDAYSTGSSLMPQKKNPDSLELIRSKAGRVFGREDKEAVFEVSDTMSAVLQVATGVISTLQIHQENMGQALSPDMLATDLAYYLVRKGMPFRQAHEASGKAVFMAETKGVALNQLSLQELQTISPLFSGDVICVWDYGHSVEQYGALGGTARSSVDWQIRQVRALLQAQQA

SEQ ID NO: 6235 - protein, 464 aa, Homo sapiens; identical to SEQ ID NO: 6231
  Payload ID: 1352;
  Gene Symbol: ASL;
  Gene Name: argininosuccinate lyase;
  Uniprot ID:  P04424;
  ENSP ID: ENSP00000378741

SEQ ID NO: 6236 - protein, 412 aa, Homo sapiens
  Payload ID: 1353;
  Gene Symbol: ASS1;
  Gene Name: argininosuccinate synthase 1;
  Uniprot ID:  P00966;
  ENSP ID: ENSP00000253004
MSSKGSVVLAYSGGLDTSCILVWLKEQGYDVIAYLANIGQKEDFEEARKKALKLGAKKVFIEDVSREFVEEFIWPAIQSSALYEDRYLLGTSLARPCIARKQVEIAQREGAKYVSHGATGKGNDQVRFELSCYSLAPQIKVIAPWRMPEFYNRFKGRNDLMEYAKQHGIPIPVTPKNPWSMDENLMHISYEAGILENPKNQAPPGLYTKTQDPAKAPNTPDILEIEFKKGVPVKVTNVKDGTTHQTSLELFMYLNEVAGKHGVGRIDIVENRFIGMKSRGIYETPAGTILYHAHLDIEAFTMDREVRKIKQGLGLKFAELVYTGFWHSPECEFVRHCIAKSQERVEGKVQVSVLKGQVYILGRESPLSLYNEELVSMNVQGDYEPTDATGFININSLRLKEYHRLQSKVTAK

SEQ ID NO: 6237 - protein, 412 aa, Homo sapiens; identical to SEQ ID NO: 6236
  Payload ID: 1353;
  Gene Symbol: ASS1;
  Gene Name: argininosuccinate synthase 1;
  Uniprot ID:  P00966;
  ENSP ID: ENSP00000361469

SEQ ID NO: 6238 - protein, 412 aa, Homo sapiens; identical to SEQ ID NO: 6236
  Payload ID: 1353;
  Gene Symbol: ASS1;
  Gene Name: argininosuccinate synthase 1;
  Uniprot ID:  P00966;
  ENSP ID: ENSP00000361471

SEQ ID NO: 6239 - protein, 198 aa, Homo sapiens
  Payload ID: 1353;
  Gene Symbol: ASS1;
  Gene Name: argininosuccinate synthase 1;
  ENSP ID: ENSP00000394212
MSSKGSVVLAYSGGLDTSCILVWLKEQGYDVIAYLANIGQKEDFEEARKKALKLGAKKVFIEDVSREFVEEFIWPAIQSSALYEDRYLLGTSLARPCIARKQVEIAQREGAKYVSHGATGKGNDQVRFELSCYSLAPQIKVIAPWRMPEFYNRFKGRNDLMEYAKQHGIPIPVTPKNPWSMDENLMHISYEAGILENP

SEQ ID NO: 6240 - protein, 179 aa, Homo sapiens
  Payload ID: 1353;
  Gene Symbol: ASS1;
  Gene Name: argininosuccinate synthase 1;
  ENSP ID: ENSP00000397785
MSSKGSVVLAYSGGLDTSCILVWLKEQGYDVIAYLANIGQKEDFEEARKKALKLGAKKVFIEDVSREFVEEFIWPAIQSSALYEDRYLLGTSLARPCIARKQVEIAQREGAKYVSHGATGKVIAPWRMPEFYNRFKGRNDLMEYAKQHGIPIPVTPKNPWSMDENLMHISYEAGILENP

SEQ ID NO: 6241 - protein, 650 aa, Homo sapiens
  Payload ID: 1354;
  Gene Symbol: RNPEP;
  Gene Name: arginyl aminopeptidase (aminopeptidase B);
  Uniprot ID:  Q9H4A4;
  ENSP ID: ENSP00000295640
MASGEHSPGSGAARRPLHSAQAVDVASASNFRAFELLHLHLDLRAEFGPPGPGAGSRGLSGTAVLDLRCLEPEGAAELRLDSHPCLEVTAAALRRERPGSEEPPAEPVSFYTQPFSHYGQALCVSFPQPCRAAERLQVLLTYRVGEGPGVCWLAPEQTAGKKKPFVYTQGQAVLNRAFFPCFDTPAVKYKYSALIEVPDGFTAVMSASTWEKRGPNKFFFQMCQPIPSYLIALAIGDLVSAEVGPRSRVWAEPCLIDAAKEEYNGVIEEFLATGEKLFGPYVWGRYDLLFMPPSFPFGGMENPCLTFVTPCLLAGDRSLADVIIHEISHSWFGNLVTNANWGEFWLNEGFTMYAQRRISTILFGAAYTCLEAATGRALLRQHMDITGEENPLNKLRVKIEPGVDPDDTYNETPYEKGFCFVSYLAHLVGDQDQFDSFLKAYVHEFKFRSILADDFLDFYLEYFPELKKKRVDIIPGFEFDRWLNTPGWPPYLPDLSPGDSLMKPAEELAQLWAAEELDMKAIEAVAISPWKTYQLVYFLDKILQKSPLPPGNVKKLGDTYPSISNARNAELRLRWGQIVLKNDHQEDFWKVKEFLHNQGKQKYTLPLYHAMMGGSEVAQTLAKETFASTASQLHSNVVNYVQQIVAPKGS

SEQ ID NO: 6242 - protein, 611 aa, Homo sapiens
  Payload ID: 1354;
  Gene Symbol: RNPEP;
  Gene Name: arginyl aminopeptidase (aminopeptidase B);
  ENSP ID: ENSP00000356255
MASGEHSPGSGAARRPLHSAQAVDVASASNFRAFELLHLHLDLRAEFGPPGPGAGSRGLSGTAVLDLRCLEPEGAAELRLDSHPCLEVTAAALRRERPGSEEPPAEPVSFYTQPFSHYGQALCVSFPQPCRAAERLQVLLTYRVGEGPGVCWLAPEQTAGKKKPFVYTQGQAVLNRAFFPCFDTPAVKYKYSALIEVPDGFTAVMSASTWEKRGPNKFFFQMCQPIPSYLIALAIGDLVSAEVGPRYDLLFMPPSFPFGGMENPCLTFVTPCLLAGDRSLADVIIHEISHSWFGNLVTNANWGEFWLNEGFTMYAQRRISTILFGAAYTCLEAATGRALLRQHMDITGEENPLNKLRVKIEPGVDPDDTYNETPYEKGFCFVSYLAHLVGDQDQFDSFLKAYVHEFKFRSILADDFLDFYLEYFPELKKKRVDIIPGFEFDRWLNTPGWPPYLPDLSPGDSLMKPAEELAQLWAAEELDMKAIEAVAISPWKTYQLVYFLDKILQKSPLPPGNVKKLGDTYPSISNARNAELRLRWGQIVLKNDHQEDFWKVKEFLHNQGKQKYTLPLYHAMMGGSEVAQTLAKETFASTASQLHSNVVNYVQQIVAPKGS

SEQ ID NO: 6243 - protein, 344 aa, Homo sapiens
  Payload ID: 1354;
  Gene Symbol: RNPEP;
  Gene Name: arginyl aminopeptidase (aminopeptidase B);
  ENSP ID: ENSP00000389602
MTCCSCTSLSALLDFWAEVCWLAPEQTAGKKKPFVYTQGQAVLNRAFFPCFDTPAVKYKYSALIEVPDGFTAVMSASTWEKRGPNKFFFQMCQPIPSYLIALAIGDLVSAEVGPRSRVWAEPCLIDAAKEEYNGVIEEFLATGEKLFGPYVWGRYDLLFMPPSFPFGGMENPCLTFVTPCLLAGDRSLADVIIHEISHSWFGNLVTNANWGEFWLNEGFTMYAQRRISTILFGAAYTCLEAATGRALLRQHMDITGEENPLNKLRVKIEPGVDPDDTYNETPYEKGFCFVSYLAHLVGDQDQFDSFLKAYVHEFKFRSILADDFLDFYLEYFPELKKKRVDIIP

SEQ ID NO: 6244 - protein, 168 aa, Homo sapiens
  Payload ID: 1354;
  Gene Symbol: RNPEP;
  Gene Name: arginyl aminopeptidase (aminopeptidase B);
  ENSP ID: ENSP00000407614
LIDAAKEEYNGVIEEFLATGEKLFGPYVWGRYDLLFMPPSFPFGGMENPCLTFVTPCLLAGDRSLADVIIHEISHSWFGNLVTNANWGEFWLNEGFTMYAQRRISTILFGVDPDDTYNETPYEKGFCFVSYLAHLVGDQDQFDSFLKAYVHEFKFRSILADDFLDFYL

SEQ ID NO: 6245 - protein, 171 aa, Homo sapiens
  Payload ID: 1354;
  Gene Symbol: RNPEP;
  Gene Name: arginyl aminopeptidase (aminopeptidase B);
  ENSP ID: ENSP00000478325
FRAFELLHLHLDLRAEFGPPGPGAGSRGLSGTAVLDLRCLEPEGAAELRLDSHPCLEVTAAALRRERPGSEEPPAEPVSFYTQPFSHYGQALCVSFPQPCRAAERLQVLLTYRVGEGPGVCWLAPEQTAGKKKPFVYTQGQAVLNRAFFPCFDTPAVKYKYSALIEEPGVG

SEQ ID NO: 6246 - protein, 151 aa, Homo sapiens
  Payload ID: 1354;
  Gene Symbol: RNPEP;
  Gene Name: arginyl aminopeptidase (aminopeptidase B);
  ENSP ID: ENSP00000478884
  MOD_RES (1)..(1): Any amino acid
XPGAGSRGLSGTAVLDLRCLEPEGAAELRLDSHPCLEVTAAALRRERPGSEEPPAEPVSFYTQPFSHYGQALCVSFPQPCRAAERLQVLLTYRVGEGPGVCWLAPEQTAGKKKPFVYTQGQAVLNRAFFPCFDTPAVKYKYSALIEEPGVG

SEQ ID NO: 6247 - protein, 494 aa, Homo sapiens
  Payload ID: 1355;
  Gene Symbol: RNPEPL1;
  Gene Name: arginyl aminopeptidase (aminopeptidase B)-like 1;
  Uniprot ID:  Q9HAU8;
  ENSP ID: ENSP00000270357
MSATRSAYMEEEGVFHFHMEHPVPAYLVALVAGDLKPADIGPRSRVWAEPCLLPTATSKLSGAVEQWLSAAERLYGPYMWGRYDIVFLPPSFPIVAMENPCLTFIISSILESDEFLVIDVIHEVAHSWFGNAVTNATWEEMWLSEGLATYAQRRITTETYGAAFTCLETAFRLDALHRQMKLLGEDSPVSKLQVKLEPGVNPSHLMNLFTYEKGYCFVYYLSQLCGDPQRFDDFLRAYVEKYKFTSVVAQDLLDSFLSFFPELKEQSVDCRAGLEFERWLNATGPPLAEPDLSQGSSLTRPVEALFQLWTAEPLDQAAASASAIDISKWRTFQTALFLDRLLDGSPLPQEVVMSLSKCYSSLLDSMNAEIRIRWLQIVVRNDYYPDLHRVRRFLESQMSRMYTIPLYEDLCTGALKSFALEVFYQTQGRLHPNLRRAIQQILSQGLGSSTEPASEPSTELGKAEADTDSDAQALLLGDEAPSSAISLRDVNVSA

SEQ ID NO: 6248 - protein, 247 aa, Homo sapiens
  Payload ID: 1355;
  Gene Symbol: RNPEPL1;
  Gene Name: arginyl aminopeptidase (aminopeptidase B)-like 1;
  ENSP ID: ENSP00000403319
AYVEKYKFTSVVAQDLLDSFLSFFPELKEQSVDCRAGPPLAEPDLSQGSSLTRPVEALFQLWTAEPLDQAAASASAIDISKWRTFQTALFLDRLLDGSPLPQEVVMSLSKCYSSLLDSMNAEIRIRWLQIVVRNDYYPDLHRVRRFLESQMSRMYTIPLYEDLCTGALKSFALEVFYQTQGRLHPNLRRAIQQILSQGLGSSTEPASEPSTELGKAEADTDSDAQALLLGDEAPSSAISLRDVNVSA

SEQ ID NO: 6249 - protein, 114 aa, Homo sapiens
  Payload ID: 1355;
  Gene Symbol: RNPEPL1;
  Gene Name: arginyl aminopeptidase (aminopeptidase B)-like 1;
  ENSP ID: ENSP00000414661
MKLLGEDSPVSKLQAYVEKYKFTSVVAQDLLDSFLSFFPELKEQSVDCRAGLEFERWLNATGPPLAEPDLSQGSSLTRPVEALFQLWTAEPLDQAAASASAIDISKWRTFQTAL

SEQ ID NO: 6250 - protein, 518 aa, Homo sapiens
  Payload ID: 1356;
  Gene Symbol: ATE1;
  Gene Name: arginyltransferase 1;
  Uniprot ID:  O95260;
  ENSP ID: ENSP00000224652
MAFWAGGSPSVVDYFPSEDFYRCGYCKNESGSRSNGMWAHSMTVQDYQDLIDRGWRRSGKYVYKPVMNQTCCPQYTIRCRPLQFQPSKSHKKVLKKMLKFLAKGEVPKGSCEDEPMDSTMDDAVAGDFALINKLDIQCDLKTLSDDIKESLESEGKNSKKEEPQELLQSQDFVGEKLGSGEPSHSVKVHTVPKPGKGADLSKPPCRKAKEIRKERKRLKLMQQNPAGELEGFQAQGHPPSLFPPKAKSNQPKSLEDLIFESLPENASHKLEVRVVRSSPPSSQFKATLLESYQVYKRYQMVIHKNPPDTPTESQFTRFLCSSPLEAETPPNGPDCGYGSFHQQYWLDGKIIAVGVIDILPNCVSSVYLYYDPDYSFLSLGVYSALREIAFTRQLHEKTSQLSYYYMGFYIHSCPKMKYKGQYRPSDLLCPETYVWVPIEQCLPSLENSKYCRFNQDPEAVDEDRSTEPDRLQVFHKRAIMPYGVYKKQQKDPSEEAAVLQYASLVGQKCSERMLLFRN

SEQ ID NO: 6251 - protein, 422 aa, Homo sapiens
  Payload ID: 1356;
  Gene Symbol: ATE1;
  Gene Name: arginyltransferase 1;
  ENSP ID: ENSP00000358036
MLKFLAKGEVPKGSCEDEPMDSTMDDAVAGDFALINKLDIQCDLKTLSDDIKESLESEGKNSKKEEPQELLQSQDFVGEKLGSGEPSHSVKVHTVPKPGKGADLSKPPCRKAKEIRKERKRLKLMQQNPAGELEGFQAQGHPPSLFPPKAKSNQPKSLEDLIFESLPENASHKLEVRLVPVSFEDPEFKSSFSQSFSLYVKYQVAIHQDPPDECGKTEFTRFLCSSPLEAETPPNGPDCGYGSFHQQYWLDGKIIAVGVIDILPNCVSSVYLYYDPDYSFLSLGVYSALREIAFTRQLHEKTSQLSYYYMGFYIHSCPKMKYKGQYRPSDLLCPETYVWVPIEQCLPSLENSKYCRFNQDPEAVDEDRSTEPDRLQVFHKRAIMPYGVYKKQQKDPSEEAAVLQYASLVGQKCSERMLLFRN

SEQ ID NO: 6252 - protein, 518 aa, Homo sapiens
  Payload ID: 1356;
  Gene Symbol: ATE1;
  Gene Name: arginyltransferase 1;
  Uniprot ID:  O95260;
  ENSP ID: ENSP00000358039
MAFWAGGSPSVVDYFPSEDFYRCGYCKNESGSRSNGMWAHSMTVQDYQDLIDRGWRRSGKYVYKPVMNQTCCPQYTIRCRPLQFQPSKSHKKVLKKMLKFLAKGEVPKGSCEDEPMDSTMDDAVAGDFALINKLDIQCDLKTLSDDIKESLESEGKNSKKEEPQELLQSQDFVGEKLGSGEPSHSVKVHTVPKPGKGADLSKPPCRKAKEIRKERKRLKLMQQNPAGELEGFQAQGHPPSLFPPKAKSNQPKSLEDLIFESLPENASHKLEVRLVPVSFEDPEFKSSFSQSFSLYVKYQVAIHQDPPDECGKTEFTRFLCSSPLEAETPPNGPDCGYGSFHQQYWLDGKIIAVGVIDILPNCVSSVYLYYDPDYSFLSLGVYSALREIAFTRQLHEKTSQLSYYYMGFYIHSCPKMKYKGQYRPSDLLCPETYVWVPIEQCLPSLENSKYCRFNQDPEAVDEDRSTEPDRLQVFHKRAIMPYGVYKKQQKDPSEEAAVLQYASLVGQKCSERMLLFRN

SEQ ID NO: 6253 - protein, 515 aa, Homo sapiens
  Payload ID: 1356;
  Gene Symbol: ATE1;
  Gene Name: arginyltransferase 1;
  ENSP ID: ENSP00000397787
  MOD_RES (1)..(1): Any amino acid
XAGGSPSVVDYFPSEDFYRCGYCKNESGSRSNGMWAHSMTVQDYQDLIDRGWRRSGKYVYKPVMNQTCCPQYTIRCRPLQFQPSKSHKKVLKKMLKFLAKGEVPKGSCEDEPMDSTMDDAVAGDFALINKLDIQCDLKTLSDDIKESLESEGKNSKKEEPQELLQSQDFVGEKLGSGEPSHSVKVHTVPKPGKGADLSKPPCRKAKEIRKERKRLKLMQQNPAGELEGFQAQGHPPSLFPPKAKSNQPKSLEDLIFESLPENASHKLEVRVVRSSPPSSQFKATLLESYQVYKRYQMVIHKNPPDTPTESQFTRFLCSSPLEAETPPNGPDCGYGSFHQQYWLDGKIIAVGVIDILPNCVSSVYLYYDPDYSFLSLGVYSALREIAFTRQLHEKTSQLSYYYMGFYIHSCPKMKYKGQYRPSDLLCPETYVWVPIEQCLPSLENSKYCRFNQDPEAVDEDRSTEPDRLQVFHKRAIMPYGVYKKQQKDPSEEAAVLQYASLVGQKCSERMLLFRN

SEQ ID NO: 6254 - protein, 222 aa, Homo sapiens
  Payload ID: 1356;
  Gene Symbol: ATE1;
  Gene Name: arginyltransferase 1;
  ENSP ID: ENSP00000405099
MASVVEYKGLRAGYHCGYCDSKEGKASCGMWAHSMTVQDYQDLIDRGWRRSGKYVYKPVMNQTCCPQYTIRCRPLQFQPSKSHKKVLKKMLKFLAKGEVPKGSCEDEPMDSTMDDAVAGDFALINKLDIQCDLKTLSDDIKESLESEGKNSKKEEPQELLQSQDFVGEKLGSGEPSHSVKVHTVPKPGKGADLSKPPCRKAKEIRKERKRLKLMQQNPAGEL

SEQ ID NO: 6255 - protein, 511 aa, Homo sapiens
  Payload ID: 1356;
  Gene Symbol: ATE1;
  Gene Name: arginyltransferase 1;
  ENSP ID: ENSP00000440881
MASVVEYKGLRAGYHCGYCDSKEGKASCGMWAHSMTVQDYQDLIDRGWRRSGKYVYKPVMNQTCCPQYTIRCRPLQFQPSKSHKKVLKKMLKFLAKGEVPKGSCEDEPMDSTMDDAVAGDFALINKLDIQCDLKTLSDDIKESLESEGKNSKKEEPQELLQSQDFVGEKLGSGEPSHSVKVHTVPKPGKGADLSKPPCRKAKEIRKERKRLKLMQQNPAGELEGFQAQGHPPSLFPPKAKSNQPKSLEDLIFESLPENASHKLEVRLVPVSFEDPEFKSSFSQSFSLYVKYQVAIHQDPPDECGKTEFTRFLCSSPLEAETPPNGPDCGYGSFHQQYWLDGKIIAVGVIDILPNCVSSVYLYYDPDYSFLSLGVYSALREIAFTRQLHEKTSQLSYYYMGFYIHSCPKMKYKGQYRPSDLLCPETYVWVPIEQCLPSLENSKYCRFNQDPEAVDEDRSTEPDRLQVFHKRAIMPYGVYKKQQKDPSEEAAVLQYASLVGQKCSERMLLFRN

SEQ ID NO: 6256 - protein, 403 aa, Homo sapiens
  Payload ID: 1356;
  Gene Symbol: ATE1;
  Gene Name: arginyltransferase 1;
  ENSP ID: ENSP00000444852
MDSTMDDAVAGDFALINKLDIQCDLKTLSDDIKESLESEGKNSKKEEPQELLQSQDFVGEKLGSGEPSHSVKVHTVPKPGKGADLSKPPCRKAKEIRKERKRLKLMQQNPAGELEGFQAQGHPPSLFPPKAKSNQPKSLEDLIFESLPENASHKLEVRVVRSSPPSSQFKATLLESYQVYKRYQMVIHKNPPDTPTESQFTRFLCSSPLEAETPPNGPDCGYGSFHQQYWLDGKIIAVGVIDILPNCVSSVYLYYDPDYSFLSLGVYSALREIAFTRQLHEKTSQLSYYYMGFYIHSCPKMKYKGQYRPSDLLCPETYVWVPIEQCLPSLENSKYCRFNQDPEAVDEDRSTEPDRLQVFHKRAIMPYGVYKKQQKDPSEEAAVLQYASLVGQKCSERMLLFRN

SEQ ID NO: 6257 - protein, 660 aa, Homo sapiens
  Payload ID: 1357;
  Gene Symbol: RARS;
  Gene Name: arginyl-tRNA synthetase;
  Uniprot ID:  P54136;
  ENSP ID: ENSP00000231572
MDVLVSECSARLLQQEEEIKSLTAEIDRLKNCGCLGASPNLEQLQEENLKLKYRLNILRKSLQAERNKPTKNMINIISRLQEVFGHAIKAAYPDLENPPLLVTPSQQAKFGDYQCNSAMGISQMLKTKEQKVNPREIAENITKHLPDNECIEKVEIAGPGFINVHLRKDFVSEQLTSLLVNGVQLPALGENKKVIVDFSSPNIAKEMHVGHLRSTIIGESISRLFEFAGYDVLRLNHVGDWGTQFGMLIAHLQDKFPDYLTVSPPIGDLQVFYKESKKRFDTEEEFKKRAYQCVVLLQGKNPDITKAWKLICDVSRQELNKIYDALDVSLIERGESFYQDRMNDIVKEFEDRGFVQVDDGRKIVFVPGCSIPLTIVKSDGGYTYDTSDLAAIKQRLFEEKADMIIYVVDNGQSVHFQTIFAAAQMIGWYDPKVTRVFHAGFGVVLGEDKKKFKTRSGETVRLMDLLGEGLKRSMDKLKEKERDKVLTAEELNAAQTSVAYGCIKYADLSHNRLNDYIFSFDKMLDDRGNTAAYLLYAFTRIRSIARLANIDEEMLQKAARETKILLDHEKEWKLGRCILRFPEILQKILDDLFLHTLCDYIYELATAFTEFYDSCYCVEKDRQTGKILKVNMWRMLLCEAVAAVMAKGFDILGIKPVQRM

SEQ ID NO: 6258 - protein, 58 aa, Homo sapiens
  Payload ID: 1357;
  Gene Symbol: RARS;
  Gene Name: arginyl-tRNA synthetase;
  ENSP ID: ENSP00000428494
MDVLVSECSARLLQQSLALSSRLECSGTISTHRNLSLWDSGNSPASASQVARITGRRD

SEQ ID NO: 6259 - protein, 129 aa, Homo sapiens
  Payload ID: 1357;
  Gene Symbol: RARS;
  Gene Name: arginyl-tRNA synthetase;
  ENSP ID: ENSP00000429030
MDVLVSECSARLLQQEEEIKSLTAEIDRLKNCGCLGASPNLEQLQEENLKLKYRLNILRKSLQAERNKPTKNMINIISRLQEVFGHAIKAAYPDLENPPLLVTPSQQAKFGDYQCNSAMGISQVLLMST

SEQ ID NO: 6260 - protein, 113 aa, Homo sapiens
  Payload ID: 1357;
  Gene Symbol: RARS;
  Gene Name: arginyl-tRNA synthetase;
  ENSP ID: ENSP00000430035
MDVLVSECSARLLQQEEEIKSLTAEIDRLKNCGCLGASPNLEQLQEENLKLKYRLNILRKSLQAERNKPTKNMINIISRLQEVFGHAIKAAYPDLENPPLLVTPNAQNQGTES

SEQ ID NO: 6261 - protein, 58 aa, Homo sapiens; identical to SEQ ID NO: 6258
  Payload ID: 1357;
  Gene Symbol: RARS;
  Gene Name: arginyl-tRNA synthetase;
  ENSP ID: ENSP00000486284

SEQ ID NO: 6262 - protein, 578 aa, Homo sapiens
  Payload ID: 1358;
  Gene Symbol: RARS2;
  Gene Name: arginyl-tRNA synthetase 2, mitochondrial;
  Uniprot ID:  Q5T160;
  ENSP ID: ENSP00000358549
MACGFRRAIACQLSRVLNLPPENLITSISAVPISQKEEVADFQLSVDSLLEKDNDHSRPDIQVQAKRLAEKLRCDTVVSEISTGQRTVNFKINRELLTKTVLQQVIEDGSKYGLKSELFSGLPQKKIVVEFSSPNVAKKFHVGHLRSTIIGNFIANLKEALGHQVIRINYLGDWGMQFGLLGTGFQLFGYEEKLQSNPLQHLFEVYVQVNKEAADDKSVAKAAQEFFQRLELGDVQALSLWQKFRDLSIEEYIRVYKRLGVYFDEYSGESFYREKSQEVLKLLESKGLLLKTIKGTAVVDLSGNGDPSSICTVMRSDGTSLYATRDLAAAIDRMDKYNFDTMIYVTDKGQKKHFQQVFQMLKIMGYDWAERCQHVPFGVVQGMKTRRGDVTFLEDVLNEIQLRMLQNMASIKTTKELKNPQETAERVGLAALIIQDFKGLLLSDYKFSWDRVFQSRGDTGVFLQYTHARLHSLEETFGCGYLNDFNTACLQEPQSVSILQHLLRFDEVLYKSSQDFQPRHIVSYLLTLSHLAAVAHKTLQIKDSPPEVAGARLHLFKAVRSVLANGMKLLGITPVCRM

SEQ ID NO: 6263 - protein, 206 aa, Homo sapiens
  Payload ID: 1358;
  Gene Symbol: RARS2;
  Gene Name: arginyl-tRNA synthetase 2, mitochondrial;
  ENSP ID: ENSP00000389656
  MOD_RES (1)..(1): Any amino acid
XFQSVESSTRKLDHINICSSNFPKRSFALVTQAGVQWHNLDSLQSPPPGFKRFPCLSLPSSWDCREVADFQLSVDSLLEKDNDHSRPDIQVQAKRLAEKLRCDTVVSEISTGQRTVNFKINRELLTKTVLQQVIEDGSKYGLKSELFSGLPQKKIVVEFSSPNVAKKFHVGHLRSTIIGNFIANLKEALGHQVIRINYLGDWGMQF

SEQ ID NO: 6264 - protein, 857 aa, Homo sapiens
  Payload ID: 1359;
  Gene Symbol: AGO1;
  Gene Name: argonaute RISC catalytic component 1;
  Uniprot ID:  Q9UL18;
  ENSP ID: ENSP00000362300
MEAGPSGAAAGAYLPPLQQVFQAPRRPGIGTVGKPIKLLANYFEVDIPKIDVYHYEVDIKPDKCPRRVNREVVEYMVQHFKPQIFGDRKPVYDGKKNIYTVTALPIGNERVDFEVTIPGEGKDRIFKVSIKWLAIVSWRMLHEALVSGQIPVPLESVQALDVAMRHLASMRYTPVGRSFFSPPEGYYHPLGGGREVWFGFHQSVRPAMWKMMLNIDVSATAFYKAQPVIEFMCEVLDIRNIDEQPKPLTDSQRVRFTKEIKGLKVEVTHCGQMKRKYRVCNVTRRPASHQTFPLQLESGQTVECTVAQYFKQKYNLQLKYPHLPCLQVGQEQKHTYLPLEVCNIVAGQRCIKKLTDNQTSTMIKATARSAPDRQEEISRLMKNASYNLDPYIQEFGIKVKDDMTEVTGRVLPAPILQYGGRNRAIATPNQGVWDMRGKQFYNGIEIKVWAIACFAPQKQCREEVLKNFTDQLRKISKDAGMPIQGQPCFCKYAQGADSVEPMFRHLKNTYSGLQLIIVILPGKTPVYAEVKRVGDTLLGMATQCVQVKNVVKTSPQTLSNLCLKINVKLGGINNILVPHQRSAVFQQPVIFLGADVTHPPAGDGKKPSITAVVGSMDAHPSRYCATVRVQRPRQEIIEDLSYMVRELLIQFYKSTRFKPTRIIFYRDGVPEGQLPQILHYELLAIRDACIKLEKDYQPGITYIVVQKRHHTRLFCADKNERIGKSGNIPAGTTVDTNITHPFEFDFYLCSHAGIQGTSRPSHYYVLWDDNRFTADELQILTYQLCHTYVRCTRSVSIPAPAYYARLVAFRARYHLVDKEHDSGEGSHISGQSNGRDPQALAKAVQVHQDTLRTMYFA

SEQ ID NO: 6265 - protein, 782 aa, Homo sapiens
  Payload ID: 1359;
  Gene Symbol: AGO1;
  Gene Name: argonaute RISC catalytic component 1;
  ENSP ID: ENSP00000362302
MVQHFKPQIFGDRKPVYDGKKNIYTVTALPIGNERVDFEVTIPGEGKDRIFKVSIKWLAIVSWRMLHEALVSGQIPVPLESVQALDVAMRHLASMRYTPVGRSFFSPPEGYYHPLGGGREVWFGFHQSVRPAMWKMMLNIDVSATAFYKAQPVIEFMCEVLDIRNIDEQPKPLTDSQRVRFTKEIKGLKVEVTHCGQMKRKYRVCNVTRRPASHQTFPLQLESGQTVECTVAQYFKQKYNLQLKYPHLPCLQVGQEQKHTYLPLEVCNIVAGQRCIKKLTDNQTSTMIKATARSAPDRQEEISRLMKNASYNLDPYIQEFGIKVKDDMTEVTGRVLPAPILQYGGRNRAIATPNQGVWDMRGKQFYNGIEIKVWAIACFAPQKQCREEVLKNFTDQLRKISKDAGMPIQGQPCFCKYAQGADSVEPMFRHLKNTYSGLQLIIVILPGKTPVYAEVKRVGDTLLGMATQCVQVKNVVKTSPQTLSNLCLKINVKLGGINNILVPHQRSAVFQQPVIFLGADVTHPPAGDGKKPSITAVVGSMDAHPSRYCATVRVQRPRQEIIEDLSYMVRELLIQFYKSTRFKPTRIIFYRDGVPEGQLPQILHYELLAIRDACIKLEKDYQPGITYIVVQKRHHTRLFCADKNERIGKSGNIPAGTTVDTNITHPFEFDFYLCSHAGIQGTSRPSHYYVLWDDNRFTADELQILTYQLCHTYVRCTRSVSIPAPAYYARLVAFRARYHLVDKEHDSGEGSHISGQSNGRDPQALAKAVQVHQDTLRTMYFA

SEQ ID NO: 6266 - protein, 133 aa, Homo sapiens
  Payload ID: 1359;
  Gene Symbol: AGO1;
  Gene Name: argonaute RISC catalytic component 1;
  ENSP ID: ENSP00000489254
  MOD_RES (1)..(1): Any amino acid
XHFKPQIFGDRKPVYDGKKNIYTVTALPIGNERVDFEVTIPGEGKDRIFKVSIKWLAIVSWRMLHEALVSGQIPVPLESVQALDVAMRHLASMRPGLLRAQDASQGGGLCPRDQFSACPCQVHPCGPLLLLTA

SEQ ID NO: 6267 - protein, 859 aa, Homo sapiens
  Payload ID: 1360;
  Gene Symbol: AGO2;
  Gene Name: argonaute RISC catalytic component 2;
  Uniprot ID:  Q9UKV8;
  ENSP ID: ENSP00000220592
MYSGAGPALAPPAPPPPIQGYAFKPPPRPDFGTSGRTIKLQANFFEMDIPKIDIYHYELDIKPEKCPRRVNREIVEHMVQHFKTQIFGDRKPVFDGRKNLYTAMPLPIGRDKVELEVTLPGEGKDRIFKVSIKWVSCVSLQALHDALSGRLPSVPFETIQALDVVMRHLPSMRYTPVGRSFFTASEGCSNPLGGGREVWFGFHQSVRPSLWKMMLNIDVSATAFYKAQPVIEFVCEVLDFKSIEEQQKPLTDSQRVKFTKEIKGLKVEITHCGQMKRKYRVCNVTRRPASHQTFPLQQESGQTVECTVAQYFKDRHKLVLRYPHLPCLQVGQEQKHTYLPLEVCNIVAGQRCIKKLTDNQTSTMIRATARSAPDRQEEISKLMRSASFNTDPYVREFGIMVKDEMTDVTGRVLQPPSILYGGRNKAIATPVQGVWDMRNKQFHTGIEIKVWAIACFAPQRQCTEVHLKSFTEQLRKISRDAGMPIQGQPCFCKYAQGADSVEPMFRHLKNTYAGLQLVVVILPGKTPVYAEVKRVGDTVLGMATQCVQMKNVQRTTPQTLSNLCLKINVKLGGVNNILLPQGRPPVFQQPVIFLGADVTHPPAGDGKKPSIAAVVGSMDAHPNRYCATVRVQQHRQEIIQDLAAMVRELLIQFYKSTRFKPTRIIFYRDGVSEGQFQQVLHHELLAIREACIKLEKDYQPGITFIVVQKRHHTRLFCTDKNERVGKSGNIPAGTTVDTKITHPTEFDFYLCSHAGIQGTSRPSHYHVLWDDNRFSSDELQILTYQLCHTYVRCTRSVSIPAPAYYAHLVAFRARYHLVDKEHDSAEGSHTSGQSNGRDHQALAKAVQVHQDTLRTMYFA

SEQ ID NO: 6268 - protein, 73 aa, Homo sapiens
  Payload ID: 1360;
  Gene Symbol: AGO2;
  Gene Name: argonaute RISC catalytic component 2;
  ENSP ID: ENSP00000430164
MYSGAGPGKSWNTWSSTLKHRSLGIGSPCLTAGRIYTQPCPFRLGGTRWSWRSRCQEKARIASSRCPSSGCPA

SEQ ID NO: 6269 - protein, 825 aa, Homo sapiens
  Payload ID: 1360;
  Gene Symbol: AGO2;
  Gene Name: argonaute RISC catalytic component 2;
  Uniprot ID:  Q9UKV8;
  ENSP ID: ENSP00000430176
MYSGAGPALAPPAPPPPIQGYAFKPPPRPDFGTSGRTIKLQANFFEMDIPKIDIYHYELDIKPEKCPRRVNREIVEHMVQHFKTQIFGDRKPVFDGRKNLYTAMPLPIGRDKVELEVTLPGEGKDRIFKVSIKWVSCVSLQALHDALSGRLPSVPFETIQALDVVMRHLPSMRYTPVGRSFFTASEGCSNPLGGGREVWFGFHQSVRPSLWKMMLNIDVSATAFYKAQPVIEFVCEVLDFKSIEEQQKPLTDSQRVKFTKEIKGLKVEITHCGQMKRKYRVCNVTRRPASHQTFPLQQESGQTVECTVAQYFKDRHKLVLRYPHLPCLQVGQEQKHTYLPLEVCNIVAGQRCIKKLTDNQTSTMIRATARSAPDRQEEISKLMRSASFNTDPYVREFGIMVKDEMTDVTGRVLQPPSILYGGRNKAIATPVQGVWDMRNKQFHTGIEIKVWAIACFAPQRQCTEVHLKSFTEQLRKISRDAGMPIQGQPCFCKYAQGADSVEPMFRHLKNTYAGLQLVVVILPGKTPVYAEVKRVGDTVLGMATQCVQMKNVQRTTPQTLSNLCLKINVKLGGVNNILLPQGRPPVFQQPVIFLGADVTHPPAGDGKKPSIAAVVGSMDAHPNRYCATVRVQQHRQEIIQDLAAMVRELLIQFYKSTRFKPTRIIFYRDGVSEGQFQQVLHHELLAIREACIKLEKDYQPGITFIVVQKRHHTRLFCTDKNERGTSRPSHYHVLWDDNRFSSDELQILTYQLCHTYVRCTRSVSIPAPAYYAHLVAFRARYHLVDKEHDSAEGSHTSGQSNGRDHQALAKAVQVHQDTLRTMYFA

SEQ ID NO: 6270 - protein, 36 aa, Homo sapiens
  Payload ID: 1360;
  Gene Symbol: AGO2;
  Gene Name: argonaute RISC catalytic component 2;
  ENSP ID: ENSP00000431056
MDIPKIDIYHYELDIKPEKCPRRVNREIVEHMVQHF

SEQ ID NO: 6271 - protein, 626 aa, Homo sapiens
  Payload ID: 1361;
  Gene Symbol: AGO3;
  Gene Name: argonaute RISC catalytic component 3;
  Uniprot ID:  Q9H9G7;
  ENSP ID: ENSP00000246314
MCEVLDIHNIDEQPRPLTDSHRVKFTKEIKGLKVEVTHCGTMRRKYRVCNVTRRPASHQTFPLQLENGQTVERTVAQYFREKYTLQLKYPHLPCLQVGQEQKHTYLPLEVCNIVAGQRCIKKLTDNQTSTMIKATARSAPDRQEEISRLVRSANYETDPFVQEFQFKVRDEMAHVTGRVLPAPMLQYGGRNRTVATPSHGVWDMRGKQFHTGVEIKMWAIACFATQRQCREEILKGFTDQLRKISKDAGMPIQGQPCFCKYAQGADSVEPMFRHLKNTYSGLQLIIVILPGKTPVYAEVKRVGDTLLGMATQCVQVKNVIKTSPQTLSNLCLKINVKLGGINNILVPHQRPSVFQQPVIFLGADVTHPPAGDGKKPSIAAVVGSMDAHPSRYCATVRVQRPRQEIIQDLASMVRELLIQFYKSTRFKPTRIIFYRDGVSEGQFRQVLYYELLAIREACISLEKDYQPGITYIVVQKRHHTRLFCADRTERVGRSGNIPAGTTVDTDITHPYEFDFYLCSHAGIQGTSRPSHYHVLWDDNCFTADELQLLTYQLCHTYVRCTRSVSIPAPAYYAHLVAFRARYHLVDKEHDSAEGSHVSGQSNGRDPQALAKAVQIHQDTLRTMYFA

SEQ ID NO: 6272 - protein, 229 aa, Homo sapiens
  Payload ID: 1361;
  Gene Symbol: AGO3;
  Gene Name: argonaute RISC catalytic component 3;
  ENSP ID: ENSP00000317425
MEIGSAGPAGAQPLLMVPRRPGYGTMGKPIKLLANCFQVEIPKIDVYLYEVDIKPDKCPRRVNREVVDSMVQHFKVTIFGDRRPVYDGKRSLYTANPLPVATTGVDLDVTLPGEGGKDRPFKVSIKFVSRVSWHLLHEVLTGRTLPEPLELDKPISTNPVHAVDVVLRHLPSMKYTPVGRSFFSAPEGYDHPLGGGREVWFGFHQSVRPAMWKMMLNIDERDLWQQCGE

SEQ ID NO: 6273 - protein, 860 aa, Homo sapiens
  Payload ID: 1361;
  Gene Symbol: AGO3;
  Gene Name: argonaute RISC catalytic component 3;
  Uniprot ID:  Q9H9G7;
  ENSP ID: ENSP00000362287
MEIGSAGPAGAQPLLMVPRRPGYGTMGKPIKLLANCFQVEIPKIDVYLYEVDIKPDKCPRRVNREVVDSMVQHFKVTIFGDRRPVYDGKRSLYTANPLPVATTGVDLDVTLPGEGGKDRPFKVSIKFVSRVSWHLLHEVLTGRTLPEPLELDKPISTNPVHAVDVVLRHLPSMKYTPVGRSFFSAPEGYDHPLGGGREVWFGFHQSVRPAMWKMMLNIDVSATAFYKAQPVIQFMCEVLDIHNIDEQPRPLTDSHRVKFTKEIKGLKVEVTHCGTMRRKYRVCNVTRRPASHQTFPLQLENGQTVERTVAQYFREKYTLQLKYPHLPCLQVGQEQKHTYLPLEVCNIVAGQRCIKKLTDNQTSTMIKATARSAPDRQEEISRLVRSANYETDPFVQEFQFKVRDEMAHVTGRVLPAPMLQYGGRNRTVATPSHGVWDMRGKQFHTGVEIKMWAIACFATQRQCREEILKGFTDQLRKISKDAGMPIQGQPCFCKYAQGADSVEPMFRHLKNTYSGLQLIIVILPGKTPVYAEVKRVGDTLLGMATQCVQVKNVIKTSPQTLSNLCLKINVKLGGINNILVPHQRPSVFQQPVIFLGADVTHPPAGDGKKPSIAAVVGSMDAHPSRYCATVRVQRPRQEIIQDLASMVRELLIQFYKSTRFKPTRIIFYRDGVSEGQFRQVLYYELLAIREACISLEKDYQPGITYIVVQKRHHTRLFCADRTERVGRSGNIPAGTTVDTDITHPYEFDFYLCSHAGIQGTSRPSHYHVLWDDNCFTADELQLLTYQLCHTYVRCTRSVSIPAPAYYAHLVAFRARYHLVDKEHDSAEGSHVSGQSNGRDPQALAKAVQIHQDTLRTMYFA

SEQ ID NO: 6274 - protein, 229 aa, Homo sapiens; identical to SEQ ID NO: 6272
  Payload ID: 1361;
  Gene Symbol: AGO3;
  Gene Name: argonaute RISC catalytic component 3;
  ENSP ID: ENSP00000380928

SEQ ID NO: 6275 - protein, 64 aa, Homo sapiens
  Payload ID: 1361;
  Gene Symbol: AGO3;
  Gene Name: argonaute RISC catalytic component 3;
  ENSP ID: ENSP00000489286
MEIGSAGPAGAQPLLMVPRRPGYGTMGKPIKLLANCFQVEIPKIDVYLYEVDIKPDKCPRRVNR

SEQ ID NO: 6276 - protein, 861 aa, Homo sapiens
  Payload ID: 1362;
  Gene Symbol: AGO4;
  Gene Name: argonaute RISC catalytic component 4;
  Uniprot ID:  Q9HCK5;
  ENSP ID: ENSP00000362306
MEALGPGPPASLFQPPRRPGLGTVGKPIRLLANHFQVQIPKIDVYHYDVDIKPEKRPRRVNREVVDTMVRHFKMQIFGDRQPGYDGKRNMYTAHPLPIGRDRVDMEVTLPGEGKDQTFKVSVQWVSVVSLQLLLEALAGHLNEVPDDSVQALDVITRHLPSMRYTPVGRSFFSPPEGYYHPLGGGREVWFGFHQSVRPAMWNMMLNIDVSATAFYRAQPIIEFMCEVLDIQNINEQTKPLTDSQRVKFTKEIRGLKVEVTHCGQMKRKYRVCNVTRRPASHQTFPLQLENGQAMECTVAQYFKQKYSLQLKYPHLPCLQVGQEQKHTYLPLEVCNIVAGQRCIKKLTDNQTSTMIKATARSAPDRQEEISRLVKSNSMVGGPDPYLKEFGIVVHNEMTELTGRVLPAPMLQYGGRNKTVATPNQGVWDMRGKQFYAGIEIKVWAVACFAPQKQCREDLLKSFTDQLRKISKDAGMPIQGQPCFCKYAQGADSVEPMFKHLKMTYVGLQLIVVILPGKTPVYAEVKRVGDTLLGMATQCVQVKNVVKTSPQTLSNLCLKINAKLGGINNVLVPHQRPSVFQQPVIFLGADVTHPPAGDGKKPSIAAVVGSMDGHPSRYCATVRVQTSRQEISQELLYSQEVIQDLTNMVRELLIQFYKSTRFKPTRIIYYRGGVSEGQMKQVAWPELIAIRKACISLEEDYRPGITYIVVQKRHHTRLFCADKTERVGKSGNVPAGTTVDSTITHPSEFDFYLCSHAGIQGTSRPSHYQVLWDDNCFTADELQLLTYQLCHTYVRCTRSVSIPAPAYYARLVAFRARYHLVDKDHDSAEGSHVSGQSNGRDPQALAKAVQIHHDTQHTMYFA

SEQ ID NO: 6277 - protein, 517 aa, Homo sapiens
  Payload ID: 1363;
  Gene Symbol: ARHGAP19-SLIT1;
  Gene Name: ARHGAP19-SLIT1 readthrough (NMD candidate);
  ENSP ID: ENSP00000473567
MATEAQSEGEVPARESGRSDAICSFVICNDSSLRGQPIIFNPDFFVEKLRHEKPEIFTELVVSNITRLIDLPGTELAQLMGEVDLKLPGGAGPASGFFRSLMSLKRKEKGVIFGSPLTEEGIAQIYQLIEYLHKNLRVEGLFRVPGNSVRQQILRDALNNGTDIDLESGEFHSNDVATLLKMFLGELPEPLLTHKHFNAHLKIADLMQFDDKGNKTNIPDKDRQIEALQLLFLILPPPNRNLLKLLLDLLYQTAKKQDKNKMSAYNLALMFAPHVLWPKNVTANDLQENITKLNSGMAFMIKHSQKLFKAPAYIRECARLHYLGSRTQASKDDLDLIASCHTKSFQLAKSQKRNRVDSCPHQEETQHHTEEALRELFQHVHDMPESAKKKQLIRQFNKQSLTQTPGREPSTSQVQKRARSRSFSGLIKRKVLGNQMMSEKKKKNPTPESVAIGELKGTSKENRNLLFSGSPAVTMTPTRLKWSEGKKEGKKGNSMATTSLGSIRMTLRGSSSCGCCS

SEQ ID NO: 6278 - protein, 290 aa, Homo sapiens
  Payload ID: 1364;
  Gene Symbol: ARIH2OS;
  Gene Name: ariadne homolog 2 opposite strand;
  Uniprot ID:  Q8N7S6;
  ENSP ID: ENSP00000386193
MLGQRAGDGERPGLPGDGEGGVPARPGRRAERPPQRPAKVNKAVTCAAHLPGAAASRPLSPNKPDRVRPGQRDRIGAKRQRRRRADAGQARAASSRRVVPTAPEVLGAVASLPDRGRPTVARVATGSRLEGLFSAASLKLSALTQSLTRVRQAPTASGATIRLPASPVEMFLTSAFLTGFSFHCLYSGIGHGEDILASVEQITIVSRPLSGQRGAGPGNSAYTPRRSQGGPRAATTPGFRFPCRGLVRRAVLRLTVTVQDCILTALLAVSFHSIGVVIMTSSYLLGPVVK

SEQ ID NO: 6279 - protein, 557 aa, Homo sapiens
  Payload ID: 1365;
  Gene Symbol: ARIH1;
  Gene Name: ariadne RBR E3 ubiquitin prt ligase 1;
  Uniprot ID:  Q9Y4X5;
  ENSP ID: ENSP00000369217
MDSDEGYNYEFDEDEECSEEDSGAEEEEDEDDDEPDDDTLDLGEVELVEPGLGVGGERDGLLCGETGGGGGSALGPGGGGGGGGGGGGGGPGHEQEEDYRYEVLTAEQILQHMVECIREVNEVIQNPATITRILLSHFNWDKEKLMERYFDGNLEKLFAECHVINPSKKSRTRQMNTRSSAQDMPCQICYLNYPNSYFTGLECGHKFCMQCWSEYLTTKIMEEGMGQTISCPAHGCDILVDDNTVMRLITDSKVKLKYQHLITNSFVECNRLLKWCPAPDCHHVVKVQYPDAKPVRCKCGRQFCFNCGENWHDPVKCKWLKKWIKKCDDDSETSNWIAANTKECPKCHVTIEKDGGCNHMVCRNQNCKAEFCWVCLGPWEPHGSAWYNCNRYNEDDAKAARDAQERSRAALQRYLFYCNRYMNHMQSLRFEHKLYAQVKQKMEEMQQHNMSWIEVQFLKKAVDVLCQCRATLMYTYVFAFYLKKNNQSIIFENNQADLENATEVLSGYLERDISQDSLQDIKQKVQDKYRYCESRRRVLLQHVHEGYEKDLWEYIED

SEQ ID NO: 6280 - protein, 204 aa, Homo sapiens
  Payload ID: 1365;
  Gene Symbol: ARIH1;
  Gene Name: ariadne RBR E3 ubiquitin prt ligase 1;
  ENSP ID: ENSP00000454774
  MOD_RES (1)..(1): Any amino acid
XSDEGYNYEFDEDEECSEEDSGAEEEEDEDDDEPDDDTLDLGEVELVEPGLGVGGERDGLLCGETGGGGGSALGPGGGGGGGGGGGGGGPGHEQEEDYRYEVLTAEQILQHMVECIREVNEVIQNPATITRILLSHFNWDKEKLMERRLITDSKVKLKYQHLITNSFVECNRLLKWCPAPDCHHVVKVQYPDAKPVRCKCGRQF

SEQ ID NO: 6281 - protein, 167 aa, Homo sapiens
  Payload ID: 1365;
  Gene Symbol: ARIH1;
  Gene Name: ariadne RBR E3 ubiquitin prt ligase 1;
  ENSP ID: ENSP00000456746
MDSDEGYNYEFDEDEECSEEDSGAEEEEDEDDDEPDDDTLDLGEVELVEPGLGVGGERDGLLCGETGGGGGSALGPGGGGGGGGGGGGGGPGHEQEEDYRYEVLTAEQILQHMVECIREVNEVIQNPATITRILLSHFNWDKEKLMESISLALNVDISFVCSAGVNI

SEQ ID NO: 6282 - protein, 47 aa, Homo sapiens
  Payload ID: 1365;
  Gene Symbol: ARIH1;
  Gene Name: ariadne RBR E3 ubiquitin prt ligase 1;
  ENSP ID: ENSP00000457767
  MOD_RES (1)..(1): Any amino acid
XNEDDAKAARDAQECLALSPRLEYSGMISAHCNLHLLGSSDSPASAS

SEQ ID NO: 6283 - protein, 114 aa, Homo sapiens
  Payload ID: 1365;
  Gene Symbol: ARIH1;
  Gene Name: ariadne RBR E3 ubiquitin prt ligase 1;
  ENSP ID: ENSP00000477687
RSRAALQRYLFYCNRYMNHMQSLRFEHKLYAQVKQKMEEMQQHNMSWIENNQADLENATEVLSGYLERDISQDSLQDIKQKVQDKYRYCESRRRVLLQHVHEGYEKDLWEYIED

SEQ ID NO: 6284 - protein, 493 aa, Homo sapiens
  Payload ID: 1366;
  Gene Symbol: ARIH2;
  Gene Name: ariadne RBR E3 ubiquitin prt ligase 2;
  Uniprot ID:  O95376;
  ENSP ID: ENSP00000348769
MSVDMNSQGSDSNEEDYDPNCEEEEEEEEDDPGDIEDYYVGVASDVEQQGADAFDPEEYQFTCLTYKESEGALNEHMTSLASVLKVSHSVAKLILVNFHWQVSEILDRYKSNSAQLLVEARVQPNPSKHVPTSHPPHHCAVCMQFVRKENLLSLACQHQFCRSCWEQHCSVLVKDGVGVGVSCMAQDCPLRTPEDFVFPLLPNEELREKYRRYLFRDYVESHYQLQLCPGADCPMVIRVQEPRARRVQCNRCNEVFCFKCRQMYHAPTDCATIRKWLTKCADDSETANYISAHTKDCPKCNICIEKNGGCNHMQCSKCKHDFCWMCLGDWKTHGSEYYECSRYKENPDIVNQSQQAQAREALKKYLFYFERWENHNKSLQLEAQTYQRIHEKIQERVMNNLGTWIDWQYLQNAAKLLAKCRYTLQYTYPYAYYMESGPRKKLFEYQQAQLEAEIENLSWKVERADSYDRGDLENQMHIAEQRRRTLLKDFHDT

SEQ ID NO: 6285 - protein, 107 aa, Homo sapiens
  Payload ID: 1366;
  Gene Symbol: ARIH2;
  Gene Name: ariadne RBR E3 ubiquitin prt ligase 2;
  ENSP ID: ENSP00000395560
MSVDMNSQGSDSNEEDYDPNCEEEEEEEEDDPGDIEDYYVGVASDVEQQGADAFDPEEYQFTCLTYKESEGALNEHMTSLASVLKVSHSVAKLILVNFHWQVSEILD

SEQ ID NO: 6286 - protein, 107 aa, Homo sapiens; identical to SEQ ID NO: 6285
  Payload ID: 1366;
  Gene Symbol: ARIH2;
  Gene Name: ariadne RBR E3 ubiquitin prt ligase 2;
  ENSP ID: ENSP00000397225

SEQ ID NO: 6287 - protein, 138 aa, Homo sapiens
  Payload ID: 1366;
  Gene Symbol: ARIH2;
  Gene Name: ariadne RBR E3 ubiquitin prt ligase 2;
  ENSP ID: ENSP00000399788
MSVDMNSQGSDSNEEDYDPNCEEEEEEEEDDPGDIEDYYVGVASDVEQQGADAFDPEEYQFTCLTYKESEGALNEHMTSLASVLKVSHSVAKLILVNFHWQVSEILDRYKSNSAQLLVEARVQPNPSKHVPTSHPPHH

SEQ ID NO: 6288 - protein, 493 aa, Homo sapiens; identical to SEQ ID NO: 6284
  Payload ID: 1366;
  Gene Symbol: ARIH2;
  Gene Name: ariadne RBR E3 ubiquitin prt ligase 2;
  Uniprot ID:  O95376;
  ENSP ID: ENSP00000403222

SEQ ID NO: 6289 - protein, 106 aa, Homo sapiens
  Payload ID: 1366;
  Gene Symbol: ARIH2;
  Gene Name: ariadne RBR E3 ubiquitin prt ligase 2;
  ENSP ID: ENSP00000403845
MSVDMNSQGSDSNEEDYDPNCEEEEEEEEDDPGDIEDYYVGVASDVEQQGADAFDPEEYQFTCLTYKESEGALNEHMTSLASVLKAVDAHCHQLHPPYGTGISFSC

SEQ ID NO: 6290 - protein, 85 aa, Homo sapiens
  Payload ID: 1366;
  Gene Symbol: ARIH2;
  Gene Name: ariadne RBR E3 ubiquitin prt ligase 2;
  ENSP ID: ENSP00000404838
MSVDMNSQGSDSNEEDYDPNCEEEEEEEEDDPGDIEDYYVGVASDVEQQGADAFDPEEYQFTCLTYKESEGALNEHMTSLASVLK

SEQ ID NO: 6291 - protein, 55 aa, Homo sapiens
  Payload ID: 1366;
  Gene Symbol: ARIH2;
  Gene Name: ariadne RBR E3 ubiquitin prt ligase 2;
  ENSP ID: ENSP00000406063
MSVDMNSQGSDSNEEDYDPNCEEEEEEEEDDPGDIEDYYVGVASDVEQQGADAFD

SEQ ID NO: 6292 - protein, 562 aa, Homo sapiens
  Payload ID: 1367;
  Gene Symbol: ARX;
  Gene Name: aristaless related homeobox;
  Uniprot ID:  Q96QS3;
  ENSP ID: ENSP00000368332
MSNQYQEEGCSERPECKSKSPTLLSSYCIDSILGRRSPCKMRLLGAAQSLPAPLTSRADPEKAVQGSPKSSSAPFEAELHLPPKLRRLYGPGGGRLLQGAAAAAAAAAAAAAAAATATAGPRGEAPPPPPPTARPGERPDGAGAAAAAAAAAAAAWDTLKISQAPQVSISRSKSYRENGAPFVPPPPALDELGGPGGVTHPEERLGVAGGPGSAPAAGGGTGTEDDEEELLEDEEDEDEEEELLEDDEEELLEDDARALLKEPRRCPVAATGAVAAAAAAAVATEGGELSPKEELLLHPEDAEGKDGEDSVCLSAGSDSEEGLLKRKQRRYRTTFTSYQLEELERAFQKTHYPDVFTREELAMRLDLTEARVQVWFQNRRAKWRKREKAGAQTHPPGLPFPGPLSATHPLSPYLDASPFPPHHPALDSAWTAAAAAAAAAFPSLPPPPGSASLPPSGAPLGLSTFLGAAVFRHPAFISPAFGRLFSTMAPLTSASTAAALLRQPTPAVEGAVASGALADPATAAADRRASSIAALRLKAKEHAAQLTQLNILPGTSTGKEVC

SEQ ID NO: 6293 - protein, 113 aa, Homo sapiens
  Payload ID: 1368;
  Gene Symbol: ARL2-SNX15;
  Gene Name: ARL2-SNX15 readthrough (NMD candidate);
  ENSP ID: ENSP00000476630
MGLLTILKKMKQKERELRLLMLGLDNAGKTTILKKFNGEDIDTISPTLGFNIKTLEHRGFKLNIWDVGGQKSLRSYWRNYFESTDGLIWVVDSADRQRMQDCQRELQSLLVEE

SEQ ID NO: 6294 - protein, 282 aa, Homo sapiens
  Payload ID: 1369;
  Gene Symbol: ARMC1;
  Gene Name: armadillo repeat containing 1;
  Uniprot ID:  Q9NVT9;
  ENSP ID: ENSP00000276569
MNSSTSTMSEEPDALSVVNQLRDLAADPLNRRAIVQDQGCLPGLILFMDHPNPPVVHSALLALRYLAECRANREKMKGELGMMLSLQNVIQKTTTPGETKLLASEIYDILQSSNMADGDSFNEMNSRRRKAQFFLGTTNKRAKTVVLHIDGLDDTSRRNLCEEALLKIKGVISFTFQMAVQRCVVRIRSDLKAEALASAIASTKVMKAQQVVKSESGEEMLVPFQDTPVEVEQNTELPDYLPEDESPTKEQDKAVSRVGSHPEGGASWLSTAANFLSRSFYW

SEQ ID NO: 6295 - protein, 180 aa, Homo sapiens
  Payload ID: 1369;
  Gene Symbol: ARMC1;
  Gene Name: armadillo repeat containing 1;
  Uniprot ID:  Q9NVT9;
  ENSP ID: ENSP00000388572
MSAWPYFIYGPSQPSSRPLRFACSSILGRMPCKQRKDERRTGYDVELTKCYTESRRNLCEEALLKIKGVISFTFQMAVQRCVVRIRSDLKAEALASAIASTKVMKAQQVVKSESGEEMLVPFQDTPVEVEQNTELPDYLPEDESPTKEQDKAVSRVGSHPEGGASWLSTAANFLSRSFYW

SEQ ID NO: 6296 - protein, 190 aa, Homo sapiens
  Payload ID: 1369;
  Gene Symbol: ARMC1;
  Gene Name: armadillo repeat containing 1;
  ENSP ID: ENSP00000429191
MNSSTSTMSEEPDALSVVNQLRDLAADPLNRRAIVQDQGCLPGLILFMDHPNPPVVHSALLALRYLAECRANREKMKGELGMMLSLQNVIQKTTTPGETKLLASEIYDILQSSNMADGDSFNEMNSRRRKAQFFLGTTNKRAKTVVLHIDGLDDTSRRNLCEEALLKIKGVISFTFQMAVQRCVVRIRSD

SEQ ID NO: 6297 - protein, 123 aa, Homo sapiens
  Payload ID: 1369;
  Gene Symbol: ARMC1;
  Gene Name: armadillo repeat containing 1;
  ENSP ID: ENSP00000429715
MNSSTSTMSEEPDALSVVNQLRDLAADPLNRRAIVQDQGCLPGLILFMDHPNPPVVHSALLALRYLAECRANREKMKGELGMMLSLQNVIQKTTTPGETKLLASEIYDILQSSNMADGDSFNE

SEQ ID NO: 6298 - protein, 102 aa, Homo sapiens
  Payload ID: 1369;
  Gene Symbol: ARMC1;
  Gene Name: armadillo repeat containing 1;
  ENSP ID: ENSP00000434297
MNSSTSTMSEEPDALSVVNQLRDLAADPLNRRAIVQDQGCLPGLILFMDHPNPPVVHSALLALRYLAECRANREKMKGELGMMLSLQNVIQNLGEIYVKRLC

SEQ ID NO: 6299 - protein, 81 aa, Homo sapiens
  Payload ID: 1370;
  Gene Symbol: ARMC10;
  Gene Name: armadillo repeat containing 10;
  ENSP ID: ENSP00000305395
MGGPRGAGWVAAGLLLGAGACYCIYRLTRGRRRGDRELGIRSSKSADEKTETPKNSKCSLDGCTSFLKGEAKCYQHLRRLN

SEQ ID NO: 6300 - protein, 343 aa, Homo sapiens
  Payload ID: 1370;
  Gene Symbol: ARMC10;
  Gene Name: armadillo repeat containing 10;
  Uniprot ID:  Q8N2F6;
  ENSP ID: ENSP00000319412
MGGPRGAGWVAAGLLLGAGACYCIYRLTRGRRRGDRELGIRSSKSAGALEEGTSEGQLCGRSARPQTGGTWESQWSKTSQPEDLTDGSYDDVLNAEQLQKLLYLLESTEDPVIIERALITLGNNAAFSVNQAIIRELGGIPIVANKINHSNQSIKEKALNALNNLSVNVENQIKIKIYISQVCEDVFSGPLNSAVQLAGLTLLTNMTVTNDHQHMLHSYITDLFQVLLTGNGNTKVQVLKLLLNLSENPAMTEGLLRAQVDSSFLSLYDSHVAKEILLRVLTLFQNIKNCLKIEGHLAVQPTFTEGSLFFLLHGEECAQKIRALVDHHDAEVKEKVVTIIPKI

SEQ ID NO: 6301 - protein, 193 aa, Homo sapiens
  Payload ID: 1370;
  Gene Symbol: ARMC10;
  Gene Name: armadillo repeat containing 10;
  ENSP ID: ENSP00000319798
MGGPRGAGWVAAGLLLGAGACYCIYRLTRGRRRGDRELGIRSSKSAGALEEGTSEGQLCGRSARPQTGGTWESQWSKTSQPEDLTDGSYDDVLNAEQLQKLLYLLESTEDPVIIERALITLGNNAAFSVNQAIIRELGGIPIVANKINHSNQSIKEKALNALNNLSVNVENQIKIKPRITFRGMENKTEEGGT

SEQ ID NO: 6302 - protein, 284 aa, Homo sapiens
  Payload ID: 1370;
  Gene Symbol: ARMC10;
  Gene Name: armadillo repeat containing 10;
  Uniprot ID:  Q8N2F6;
  ENSP ID: ENSP00000396654
MGGPRGAGWVAAGLLLGAGACYCIYRLTRGRRRGDRELGIRSSKSAGALEEGTSEGQLCGRSARPQTGGTWESQWSKTSQPEDLTDGSYDDVLNAEQLQKLLYLLESTEDPVIIERALITLGNNAAFSVNQAIIRELGGIPIVANKINHSNQSIKEKALNALNNLSVNVENQIKIKVQVLKLLLNLSENPAMTEGLLRAQVDSSFLSLYDSHVAKEILLRVLTLFQNIKNCLKIEGHLAVQPTFTEGSLFFLLHGEECAQKIRALVDHHDAEVKEKVVTIIPKI

SEQ ID NO: 6303 - protein, 284 aa, Homo sapiens
  Payload ID: 1370;
  Gene Symbol: ARMC10;
  Gene Name: armadillo repeat containing 10;
  Uniprot ID:  Q8N2F6;
  ENSP ID: ENSP00000397969
MGGPRGAGWVAAGLLLGAGACYCIYRLTRGRRRGDRELGIRSSKSAEDLTDGSYDDVLNAEQLQKLLYLLESTEDPVIIERALITLGNNAAFSVNQAIIRELGGIPIVANKINHSNQSIKEKALNALNNLSVNVENQIKIKIYISQVCEDVFSGPLNSAVQLAGLTLLTNMTVTNDHQHMLHSYITDLFQVLLTGNGNTKVDSSFLSLYDSHVAKEILLRVLTLFQNIKNCLKIEGHLAVQPTFTEGSLFFLLHGEECAQKIRALVDHHDAEVKEKVVTIIPKI

SEQ ID NO: 6304 - protein, 233 aa, Homo sapiens
  Payload ID: 1370;
  Gene Symbol: ARMC10;
  Gene Name: armadillo repeat containing 10;
  ENSP ID: ENSP00000398201
MGGPRGAGWVAAGLLLGAGACYCIYRLTRGRRRGDRELGIRSSKSAGALEEGTSEGQLCGRSARPQTGGTWESQWSKTSQPEDLTDGSYDDVLNAEQLQKLLYLLESTEDPVIIERALITLGNNAAFSVNQIPMKLVTGITFAIIRELGGIPIVANKINHSNQSIKEKALNALNNLSVNVENQIKIKVDSSFLSLYDSHVAKEILLRVLTLFQNIKNCLKIEGHLAVQPTFTE

SEQ ID NO: 6305 - protein, 249 aa, Homo sapiens
  Payload ID: 1370;
  Gene Symbol: ARMC10;
  Gene Name: armadillo repeat containing 10;
  Uniprot ID:  Q8N2F6;
  ENSP ID: ENSP00000405612
MGGPRGAGWVAAGLLLGAGACYCIYRLTRGRRRGDRELGIRSSKSAEDLTDGSYDDVLNAEQLQKLLYLLESTEDPVIIERALITLGNNAAFSVNQAIIRELGGIPIVANKINHSNQSIKEKALNALNNLSVNVENQIKIKVQVLKLLLNLSENPAMTEGLLRAQVDSSFLSLYDSHVAKEILLRVLTLFQNIKNCLKIEGHLAVQPTFTEGSLFFLLHGEECAQKIRALVDHHDAEVKEKVVTIIPKI

SEQ ID NO: 6306 - protein, 185 aa, Homo sapiens
  Payload ID: 1370;
  Gene Symbol: ARMC10;
  Gene Name: armadillo repeat containing 10;
  ENSP ID: ENSP00000406840
RELGGIPIVANKINHSNQSIKEKALNALNNLSVNVENQIKIKIYISQVCEDVFSGPLNSAVQLAGLTLLTNMTVTNDHQHMLHSYITDLFQVLLTGNGNTKVDSSFLSLYDSHVAKEILLRVLTLFQNIKNCLKIEGHLAVQPTFTEGSLFFLLHGEECAQKIRALVDHHDAEVKEKVVTIIPKI

SEQ ID NO: 6307 - protein, 308 aa, Homo sapiens
  Payload ID: 1370;
  Gene Symbol: ARMC10;
  Gene Name: armadillo repeat containing 10;
  Uniprot ID:  Q8N2F6;
  ENSP ID: ENSP00000413619
MGGPRGAGWVAAGLLLGAGACYCIYRLTRGRRRGDRELGIRSSKSAEDLTDGSYDDVLNAEQLQKLLYLLESTEDPVIIERALITLGNNAAFSVNQAIIRELGGIPIVANKINHSNQSIKEKALNALNNLSVNVENQIKIKIYISQVCEDVFSGPLNSAVQLAGLTLLTNMTVTNDHQHMLHSYITDLFQVLLTGNGNTKVQVLKLLLNLSENPAMTEGLLRAQVDSSFLSLYDSHVAKEILLRVLTLFQNIKNCLKIEGHLAVQPTFTEGSLFFLLHGEECAQKIRALVDHHDAEVKEKVVTIIPKI

SEQ ID NO: 6308 - protein, 225 aa, Homo sapiens
  Payload ID: 1370;
  Gene Symbol: ARMC10;
  Gene Name: armadillo repeat containing 10;
  Uniprot ID:  Q8N2F6;
  ENSP ID: ENSP00000440463
MGGPRGAGWVAAGLLLGAGACYCIYRLTRGRRRGDRELGIRSSKSAEDLTDGSYDDVLNAEQLQKLLYLLESTEDPVIIERALITLGNNAAFSVNQAIIRELGGIPIVANKINHSNQSIKEKALNALNNLSVNVENQIKIKVDSSFLSLYDSHVAKEILLRVLTLFQNIKNCLKIEGHLAVQPTFTEGSLFFLLHGEECAQKIRALVDHHDAEVKEKVVTIIPKI

SEQ ID NO: 6309 - protein, 153 aa, Homo sapiens
  Payload ID: 1370;
  Gene Symbol: ARMC10;
  Gene Name: armadillo repeat containing 10;
  ENSP ID: ENSP00000487721
AIIRELGGIPIVANKINHSNQSIKEKALNALNNLSVNVENQIKIKVQVLKLLLNLSENPAMTEGLLRAQVDSSFLSLYDSHVAKEILLRVLTLFQNIKNCLKIEGHLAVQPTFTEGSLFFLLHGEECAQKIRALVDHHDAEVKEKVVTIIPKI

SEQ ID NO: 6310 - protein, 185 aa, Homo sapiens; identical to SEQ ID NO: 6306
  Payload ID: 1370;
  Gene Symbol: ARMC10;
  Gene Name: armadillo repeat containing 10;
  ENSP ID: ENSP00000487771

SEQ ID NO: 6311 - protein, 153 aa, Homo sapiens; identical to SEQ ID NO: 6309
  Payload ID: 1370;
  Gene Symbol: ARMC10;
  Gene Name: armadillo repeat containing 10;
  ENSP ID: ENSP00000488082

SEQ ID NO: 6312 - protein, 212 aa, Homo sapiens
  Payload ID: 1370;
  Gene Symbol: ARMC10;
  Gene Name: armadillo repeat containing 10;
  ENSP ID: ENSP00000488365
AIIRELGGIPIVANKINHSNQSIKEKALNALNNLSVNVENQIKIKIYISQVCEDVFSGPLNSAVQLAGLTLLTNMTVTNDHQHMLHSYITDLFQVLLTGNGNTKVQVLKLLLNLSENPAMTEGLLRAQVDSSFLSLYDSHVAKEILLRVLTLFQNIKNCLKIEGHLAVQPTFTEGSLFFLLHGEECAQKIRALVDHHDAEVKEKVVTIIPKI

SEQ ID NO: 6313 - protein, 212 aa, Homo sapiens; identical to SEQ ID NO: 6312
  Payload ID: 1370;
  Gene Symbol: ARMC10;
  Gene Name: armadillo repeat containing 10;
  ENSP ID: ENSP00000488536

SEQ ID NO: 6314 - protein, 91 aa, Homo sapiens
  Payload ID: 1370;
  Gene Symbol: ARMC10;
  Gene Name: armadillo repeat containing 10;
  ENSP ID: ENSP00000488561
AIIRELGGIPIVANKINHSNQSIKEKALNALNNLSVNVENQIKIKVDSSFLSLYDSHVAKEILLRVLTLFQNIKNCLKIEGHLAVQPTFTE

SEQ ID NO: 6315 - protein, 62 aa, Homo sapiens
  Payload ID: 1370;
  Gene Symbol: ARMC10;
  Gene Name: armadillo repeat containing 10;
  ENSP ID: ENSP00000488674
AIIRELGGIPIVANKINHSNQSIKEKALNALNNLSVNVENQIKIKPRITFRGMENKTEEGGT

SEQ ID NO: 6316 - protein, 367 aa, Homo sapiens
  Payload ID: 1371;
  Gene Symbol: ARMC12;
  Gene Name: armadillo repeat containing 12;
  Uniprot ID:  Q5T9G4;
  ENSP ID: ENSP00000288065
MGKSIPQYLGQLDIRKSVVSLATGAGAIYLLYKAIKAGIKCKPPLCSNSPICIARECPGPGERALPQEAPAPEASAVGGPKGLAVERERHGRDSGELRRLLNSLECKQDEYAKSMILHSITRCVYLLEAEASACTTDDIVLLGYMLDDKDNSVKTQALNTLKAFSGIRKFRLKIQEHSIKVLELISTIWDTELHIAGLRLLNNLPLPDYVHPQLRRVMPALMEILQSDYILAQVQAVRLLSYLAQKNDLLYDILNCQVHSNFLNLFQPTQSGSLLYEVLVFAERLSEGRNAPHYHVVKWHYNEQSLHESLFGEESRLADRLLALVIHPEEDVQIQACKVIVSLQYPQDLRARPSSCQPSRSYFKNTE

SEQ ID NO: 6317 - protein, 340 aa, Homo sapiens
  Payload ID: 1371;
  Gene Symbol: ARMC12;
  Gene Name: armadillo repeat containing 12;
  Uniprot ID:  Q5T9G4;
  ENSP ID: ENSP00000362973
MGKSIPQYLGQLDIRKSVVSLATGAGAIYLLYKAIKAGIKCKPPLCSNSPICIARLAVERERHGRDSGELRRLLNSLECKQDEYAKSMILHSITRCVYLLEAEASACTTDDIVLLGYMLDDKDNSVKTQALNTLKAFSGIRKFRLKIQEHSIKVLELISTIWDTELHIAGLRLLNNLPLPDYVHPQLRRVMPALMEILQSDYILAQVQAVRLLSYLAQKNDLLYDILNCQVHSNFLNLFQPTQSGSLLYEVLVFAERLSEGRNAPHYHVVKWHYNEQSLHESLFGEESRLADRLLALVIHPEEDVQIQACKVIVSLQYPQDLRARPSSCQPSRSYFKNTE

SEQ ID NO: 6318 - protein, 330 aa, Homo sapiens
  Payload ID: 1371;
  Gene Symbol: ARMC12;
  Gene Name: armadillo repeat containing 12;
  Uniprot ID:  Q5T9G4;
  ENSP ID: ENSP00000362976
MGKSIPQYLGQLDIRKSVVSLATGAGAIYLLYKAIKAGIKCKPPLCSNSPICIARLAVERERHGRDSGELRRLLNSLECKQDEYAKSMILHSITRCVYLLEAEASACTTDDIVLLGYMLDDKDNSVKTQALNTLKAFSGIRKFRLKIQEHSIKVLELISTIWDTELHIAGLRLLNNLPLPDYVHPQLRRVMPALMEILQSDYILAQVQAVRLLSYLAQKNDLLYDILNCQPTQSGSLLYEVLVFAERLSEGRNAPHYHVVKWHYNEQSLHESLFGEESRLADRLLALVIHPEEDVQIQACKVIVSLQYPQDLRARPSSCQPSRSYFKNTE

SEQ ID NO: 6319 - protein, 55 aa, Homo sapiens
  Payload ID: 1371;
  Gene Symbol: ARMC12;
  Gene Name: armadillo repeat containing 12;
  ENSP ID: ENSP00000418825
MGKSIPQYLGQLDIRKSVVSLATGAGAIYLLYKAIKAGIKCKPPLCSNSPICIAP

SEQ ID NO: 6320 - protein, 222 aa, Homo sapiens
  Payload ID: 1372;
  Gene Symbol: ARMC2;
  Gene Name: armadillo repeat containing 2;
  ENSP ID: ENSP00000237512
MLSPNDKMLGKLDPFYQPSVSKQKTSAEIISEARNALRTVRTQRPFTPQEAQRKLFGPASSRTSENRPPSSFSLHASSFESSDSRPISGTRLSPLELKPKVPASPTREEDSCFSFPKPPVDPAKIRRVSNARARLFRAASQRALLPDRSLPPSDSKKTVESKETVMMGDSMVKINGIYLTKSNAICHLKSHPLQLTDDGGFSEIKEQEMFKGTTSLPSHLKN

SEQ ID NO: 6321 - protein, 702 aa, Homo sapiens
  Payload ID: 1372;
  Gene Symbol: ARMC2;
  Gene Name: armadillo repeat containing 2;
  Uniprot ID:  Q8NEN0;
  ENSP ID: ENSP00000357968
MMGDSMVKINGIYLTKSNAICHLKSHPLQLTDDGGFSEIKEQEMFKGTTSLPSHLKNGGDQGKRHARASSCPSSSDLSRLQTKAVPKADLQEEDAEIEVDEVFWNTRIVPILRELEKEENIETVCAACTQLHHALEEGNMLGNKFKGRSILLKTLCKLVDVGSDSLSLKLAKIILALKVSRKNLLNVCKLIFKISRNEKNDSLIQNDSILESLLEVLRSEDLQTNMEAFLYCMGSIKFISGNLGFLNEMISKGAVEILINLIKQINENIKKCGTFLPNSGHLLVQVTATLRNLVDSSLVRSKFLNISALPQLCTAMEQYKGDKDVCTNIARIFSKLTSYRDCCTALASYSRCYALFLNLINKYQKKQDLVVRVVFILGNLTAKNNQAREQFSKEKGSIQTLLSLFQTFHQLDLHSQKPVGQRGEQHRAQRPPSEAEDVLIKLTRVLANIAIHPGVGPVLAANPGIVGLLLTTLEYKSLDDCEELVINATATINNLSYYQVKNSIIQDKKLYIAELLLKLLVSNNMDGILEAVRVFGNLSQDHDVCDFIVQNNVHRFMMALLDAQHQDICFSACGVLLNLTVDKDKRVILKEGGGIKKLVDCLRDLGPTDWQLACLVCKTLWNFSENITNASSCFGNEDTNTLLLLLSSFLDEELALDGSFDPDLKNYHKLHWETEFKPVAQQLLNRIQRHHTFLEPLPIPSF

SEQ ID NO: 6322 - protein, 867 aa, Homo sapiens
  Payload ID: 1372;
  Gene Symbol: ARMC2;
  Gene Name: armadillo repeat containing 2;
  Uniprot ID:  Q8NEN0;
  ENSP ID: ENSP00000376417
MLSPNDKMLGKLDPFYQPSVSKQKTSAEIISEARNALRTVRTQRPFTPQEAQRKLFGPASSRTSENRPPSSFSLHASSFESSDSRPISGTRLSPLELKPKVPASPTREEDSCFSFPKPPVDPAKIRRVSNARARLFRAASQRALLPDRSLPPSDSKKTVESKETVMMGDSMVKINGIYLTKSNAICHLKSHPLQLTDDGGFSEIKEQEMFKGTTSLPSHLKNGGDQGKRHARASSCPSSSDLSRLQTKAVPKADLQEEDAEIEVDEVFWNTRIVPILRELEKEENIETVCAACTQLHHALEEGNMLGNKFKGRSILLKTLCKLVDVGSDSLSLKLAKIILALKVSRKNLLNVCKLIFKISRNEKNDSLIQNDSILESLLEVLRSEDLQTNMEAFLYCMGSIKFISGNLGFLNEMISKGAVEILINLIKQINENIKKCGTFLPNSGHLLVQVTATLRNLVDSSLVRSKFLNISALPQLCTAMEQYKGDKDVCTNIARIFSKLTSYRDCCTALASYSRCYALFLNLINKYQKKQDLVVRVVFILGNLTAKNNQAREQFSKEKGSIQTLLSLFQTFHQLDLHSQKPVGQRGEQHRAQRPPSEAEDVLIKLTRVLANIAIHPGVGPVLAANPGIVGLLLTTLEYKSLDDCEELVINATATINNLSYYQVKNSIIQDKKLYIAELLLKLLVSNNMDGILEAVRVFGNLSQDHDVCDFIVQNNVHRFMMALLDAQHQDICFSACGVLLNLTVDKDKRVILKEGGGIKKLVDCLRDLGPTDWQLACLVCKTLWNFSENITNASSCFGNEDTNTLLLLLSSFLDEELALDGSFDPDLKNYHKLHWETEFKPVAQQLLNRIQRHHTFLEPLPIPSF

SEQ ID NO: 6323 - protein, 85 aa, Homo sapiens
  Payload ID: 1372;
  Gene Symbol: ARMC2;
  Gene Name: armadillo repeat containing 2;
  ENSP ID: ENSP00000393191
  MOD_RES (1)..(1): Any amino acid
XLPPSDSKKTVESKETVMMGDSMVKINGIYLTKSNAICHLKSHPLQLTDDGGFSEIKEQEMFKGTTSLPSHLKNGGPHCRLWNDD

SEQ ID NO: 6324 - protein, 872 aa, Homo sapiens
  Payload ID: 1373;
  Gene Symbol: ARMC3;
  Gene Name: armadillo repeat containing 3;
  Uniprot ID:  Q5W041;
  ENSP ID: ENSP00000298032
MGKKIKKEVEPPPKDVFDPLMIESKKAATVVLMLNSPEEEILAKACEAIYKFALKGEENKTTLLELGAVEPLTKLLTHEDKIVRRNATMIFGILASNNDVKKLLRELDVMNSVIAQLAPEEEVVIHEFASLCLANMSAEYTSKVQIFEHGGLEPLIRLLSSPDPDVKKNSMECIYNLVQDFQCRAKLQELNAIPPILDLLKSEYPVIQLLALKTLGVIANDKESRTMLRDNQGLDHLIKILETKELNDLHIEALAVIANCLEDMDTMVQIQQTGGLKKLLSFAENSTIPDIQKNAAKAITKAAYDPENRKLFHEQEVEKCLVALLGSENDGTKIAASQAISAMCENSGSKDFFNNQGIPQLIQLLKSDNEEVREAAALALANLTTCNPANANAAAEADGIDPLINLLSSKRDGAIANAATVLTNMAMQEPLRLNIQNHDIMHAIISPLRSANTVVQSKAALAVTATACDVEARTELRNSGGLEPLVELLRSKNDEVRKHASWAVMVCAGDELTANELCRLGALDILEEVNVSGTRKNKFSEAAYNKLLNNNLSLKYSQTGYLSSSNIINDGFYDYGRINPGTKLLPLKELCLQEPSDLRAVLLINSKSYVSPPSSMEDKSDVGYGRSISSSSSLRRSSKEKNKKNSYHFSAGFGSPIEDKSEPASGRNTVLSKSATKEKGWRKSKGKKEEEKVKEEEEVMVVPKFVGEGSSDKEWCPPSDPDFSMYVYEVTKSILPITNIKEQIEDLAKYVAEKMGGKIPKEKLPDFSWELHISELKFQLKSNVIPIGHVKKGIFYHRALLFKALADRIGIGCSLVRGEYGRAWNEVMLQNDSRKGVIGGLPAPEMYVIDLMFHPGGLMKLRSREADLYRFI

SEQ ID NO: 6325 - protein, 609 aa, Homo sapiens
  Payload ID: 1373;
  Gene Symbol: ARMC3;
  Gene Name: armadillo repeat containing 3;
  ENSP ID: ENSP00000365711
MDTMVQIQQTGGLKKLLSFAENSTIPDIQKNAAKAITKAAYDPENRKLFHEQEVEKCLVALLGSENDGTKIAASQAISAMCENSGSKDFFNNQGIPQLIQLLKSDNEEVREAAALALANLTTCNPANANAAAEADGIDPLINLLSSKRDGAIANAATVLTNMAMQEPLRLNIQNHDIMHAIISPLRSANTVVQSKAALAVTATACDVEARTELRNSGGLEPLVELLRSKNDEVRKHASWAVMVCAGDELTANELCRLGALDILEEVNVSGTRKNKFSEAAYNKLLNNNLSLKYSQTGYLSSSNIINDGFYDYGRINPGTKLLPLKELCLQEPSDLRAVLLINSKSYVSPPSSMEDKSDVGYGRSISSSSSLRRSSKEKNKKNSYHFSAGFGSPIEDKSEPASGRNTVLSKSATKEKGWRKSKGKKEEEKVKEEEEVMVVPKFVGEGSSDKEWCPPSDPDFSMYVYEVTKSILPITNIKEQIEDLAKYVAEKMGGKIPKEKLPDFSWELHISELKFQLKSNVIPIGHVKKGIFYHRALLFKALADRIGIGCSLVRGEYGRAWNEVMLQNDSRKGVIGGLPAPEMYVIDLMFHPGGLMKLRSREADLYRFI

SEQ ID NO: 6326 - protein, 865 aa, Homo sapiens
  Payload ID: 1373;
  Gene Symbol: ARMC3;
  Gene Name: armadillo repeat containing 3;
  Uniprot ID:  Q5W041;
  ENSP ID: ENSP00000386943
MGKKIKKEVEPPPKDVFDPLMIESKKAATVVLMLNSPEEEILAKACEAIYKFALKGEENKTTLLELGAVEPLTKLLTHEDKIVRRNATMIFGILASNNDVKKLLRELDVMNSVIAQLAPEEEVVIHEFASLCLANMSAEYTSKVQIFEHGGLEPLIRLLSSPDPDVKKNSMECIYNLVQDFQCRAKLQELNAIPPILDLLKSEYPVIQLLALKTLGVIANDKESRTMLRDNQGLDHLIKILETKELNDLHIEALAVIANCLEDMDTMVQIQQTGGLKKLLSFAENSTIPDIQKNAAKAITKAAYDPENRKLFHEQEVEKCLVALLGSENDGTKIAASQAISAMCENSGSKDFFNNQGIPQLIQLLKSDNEEVREAAALALANLTTCNPANANAAAEADGIDPLINLLSSKRDGAIANAATVLTNMAMQEPLRLNIQNHDIMHAIISPLRSANTVVQSKAALAVTATACDVEARTELRNSGGLEPLVELLRSKNDEVRKHASWAVMVCAGDELTANELCRLGALDILEEVNVSGTRKNKFSEAAYNKLLNNNLSLKYSQTGYLSSSNIINDGFYDYGRINPGTKLLPLKELCLQEPSDLRAVLLINSKSYVSPPSSMEDKSDVGYGRSISSSSSLRRSSKEKNNAGFGSPIEDKSEPASGRNTVLSKSATKEKGWRKSKGKKEEEKVKEEEEVMVVPKFVGEGSSDKEWCPPSDPDFSMYVYEVTKSILPITNIKEQIEDLAKYVAEKMGGKIPKEKLPDFSWELHISELKFQLKSNVIPIGHVKKGIFYHRALLFKALADRIGIGCSLVRGEYGRAWNEVMLQNDSRKGVIGGLPAPEMYVIDLMFHPGGLMKLRSREADLYRFI

SEQ ID NO: 6327 - protein, 688 aa, Homo sapiens
  Payload ID: 1373;
  Gene Symbol: ARMC3;
  Gene Name: armadillo repeat containing 3;
  Uniprot ID:  Q5W041;
  ENSP ID: ENSP00000387288
MGKKIKKEVEPPPKDVFDPLMIESKKAATVVLMLNSPEEEILAKACEAIYKFALKGEENKTTLLELGAVEPLTKLLTHEDKIVRRNATMIFGILASNNDVKKLLRELDVMNSVIAQLAPEEEVVIHEFASLCLANMSAEYTSKVQIFEHGGLEPLIRLLSSPDPDVKKNSMECIYNLVQDFQCRAKLQELNAIPPILDLLKSEYPVIQLLALKTLGVIANDKESRTMLRDNQGLDHLIKILETKELNDLHIEALAVIANCLEDMDTMVQIQQTGGLKKLLSFAENSTIPDIQKNAAKAITKAAYDPENRKLFHEQEVEKCLVALLGSENDGTKIAASQAISAMCENSGSKDFFNNQGIPQLIQLLKSDNEEVREAAALALANLTTCNPANANAAAEADGIDPLINLLSSKRDGAIANAATVLTNMAMQEPLRLNIQNHDIMHAIISPLRSANTVVQSKAALAVTATACDVEARTELRNSGGLEPLVELLRSKNDEVRKHASWAVMVCAGDELTANELCRLGALDILEEVNVSGTRKNKFSEAAYNKLLNNNLSLKYSQTGYLSSSNIINDGFYDYGRINPGTKLLPLKELCLQEPSDLRAVLLINSKSYVSPPSSMEDKSDVGYGRSISSSSSLRRSSKEKNKKNSYHFSAGFGSPIEDKSEPASGRNTVLSKSATKEKGWSSLPTSR

SEQ ID NO: 6328 - protein, 118 aa, Homo sapiens
  Payload ID: 1373;
  Gene Symbol: ARMC3;
  Gene Name: armadillo repeat containing 3;
  ENSP ID: ENSP00000396629
MIFGILASNNDVKKLLRELDVMNSVIAQLAPEEEVVIHEFASLCLANMSAEYTSKVQIFEHGGLEPLIRLLSSPDPDVKKNSMECIYNLVQDFQCRAKLQELNAIPPILDLLKSEYPV

SEQ ID NO: 6329 - protein, 1044 aa, Homo sapiens
  Payload ID: 1374;
  Gene Symbol: ARMC4;
  Gene Name: armadillo repeat containing 4;
  Uniprot ID:  Q5T2S8;
  ENSP ID: ENSP00000306410
MGVALRKLTQWTAAGHGTGILEITPLNEAILKEIIVFVESFIYKHPQEAKFVFVEPLEWNTSLAPSAFESGYVVSETTVKSEEVDKNGQPLLFLSVPQIKIRSFGQLSRLLLIAKTGKLKEAQACVEANRDPIVKILGSDYNTMKENSIALNILGKITRDDDPESEIKMKIAMLLKQLDLHLLNHSLKHISLEISLSPMTVKKDIELLKRFSGKGNQTVLESIEYTSDYEFSNGCRAPPWRQIRGEICYVLVKPHDGETLCITCSAGGVFLNGGKTDDEGDVNYERKGSIYKNLVTFLREKSPKFSENMSKLGISFSEDQQKEKDQLGKAPKKEEAAALRKDISGSDKRSLEKNQINFWRNQMTKRWEPSLNWKTTVNYKGKGSAKEIQEDKHTGKLEKPRPSVSHGRAQLLRKSAEKIEETVSDSSSESEEDEEPPDHRQEASADLPSEYWQIQKLVKYLKGGNQTATVIALCSMRDFSLAQETCQLAIRDVGGLEVLINLLETDEVKCKIGSLKILKEISHNPQIRQNIVDLGGLPIMVNILDSPHKSLKCLAAETIANVAKFKRARRVVRQHGGITKLVALLDCAHDSTKPAQSSLYEARDVEVARCGALALWSCSKSHTNKEAIRKAGGIPLLARLLKTSHENMLIPVVGTLQECASEENYRAAIKAERIIENLVKNLNSENEQLQEHCAMAIYQCAEDKETRDLVRLHGGLKPLASLLNNTDNKERLAAVTGAIWKCSISKENVTKFREYKAIETLVGLLTDQPEEVLVNVVGALGECCQERENRVIVRKCGGIQPLVNLLVGINQALLVNVTKAVGACAVEPESMMIIDRLDGVRLLWSLLKNPHPDVKASAAWALCPCIKNAKDAGEMVRSFVGGLELIVNLLKSDNKEVLASVCAAITNIAKDQENLAVITDHGVVPLLSKLANTNNNKLRHHLAEAISRCCMWGRNRVAFGEHKAVAPLVRYLKSNDTNVHRATAQALYQLSEDADNCITMHENGAVKLLLDMVGSPDQDLQEAAAGCISNIRRLALATEKARYT

SEQ ID NO: 6330 - protein, 389 aa, Homo sapiens
  Payload ID: 1374;
  Gene Symbol: ARMC4;
  Gene Name: armadillo repeat containing 4;
  ENSP ID: ENSP00000398155
LSRLLLIAKTGKLKEAQACVEANRDPIVKILGSDYNTMKENSIALNILGKITRDDDPESEIKMKIAMLLKQLDLHLLNHSLKHISLEISLSPMTVKKDIELLKRFSGKGNQTVLESIEYTSDYEFSNGCRAPPWRQIRGEICYVLVKPHDGETLCITCSAGGVFLNGGKTDDEGDVNYERKGSIYKNLVTFLREKSPKFSENMSKLGISFSEDQQKEKDQLGKAPKKEEAAALRKDISGSDKRSLEKNQINFWRNQMTKRWEPSLNWKTTVNYKGKGSAKEIQEDKHTGKLEKPRPSVSHGRAQLLRKSAEKIEETVSDSSSESEEDEEPPDHRQEASADLPSEYWQIQKLVKYLKQKETSQNGRNKRWIRKQNTRVIRSMIFDVGKTS

SEQ ID NO: 6331 - protein, 57 aa, Homo sapiens
  Payload ID: 1374;
  Gene Symbol: ARMC4;
  Gene Name: armadillo repeat containing 4;
  ENSP ID: ENSP00000473438
MGVALRKLTQWTAAGHGTGILEITPLNEAILKEIIVFVESFIYKHPQEAKFVFVEPL

SEQ ID NO: 6332 - protein, 935 aa, Homo sapiens
  Payload ID: 1375;
  Gene Symbol: ARMC5;
  Gene Name: armadillo repeat containing 5;
  Uniprot ID:  Q96C12;
  ENSP ID: ENSP00000268314
MAAAKPTLTDSLSFCLAQLAAAAGEALGGEKDPATNETPLSRALLALRTRHIKAAGGIERFRARGGLRPLLALLRRAAAAGSAPSQAGPGSAPSSAASGASSPAPASGPAPSAVSSSSPTPPVRLRKTLDLALSILADCCTEGACRTEVRRLGGILPLVTILQCMKTDSIQNRTARALGNLAMEPESCGDIHCAGAVPLLVESLTACQDSQCLQSVVRALRNLADSPQHRLALAQQGAVRPLAELLATAPDAALTLALVRALLELSRGCSRACAEQLSLGGGLGPLVSLASHPKRAVREGTILILANLCAQGLIRPALGNAGGVEVLVDELRQRRDPNGASPTSQQPLVRAVCLLCREAINRARLRDAGGLDLLMGLLRDPRASAWHPRIVAALVGFLYDTGALGRLQALGLVPLLAGQLCGEAGEEEEEGREAASWDFPEERTPERAQGGSFRSLRSWLISEGYATGPDDISPDWSPEQCPPEPMEPASPAPTPTSLRAPRTQRTPGRSPAAAIEEPWGREGPALLLLSRFSQAPDPSGALVTGPALYGLLTYVTGAPGPPSPRALRILSRLTCNPACLEAFVRSYGAALLRAWLVLGVAPDDWPAPRARPTLHSRHRELGERLLQNLTVQAESPFGVGALTHLLLSGSPEDRVACALTLPFICRKPSLWRRLLLEQGGLRLLLAALTRPAPHPLFLFFAADSLSCLQDLVSPTVSPAVPQAVPMDLDSPSPCLYEPLLGPAPVPAPDLHFLLDSGLQLPAQRAASATASPFFRALLSGSFAEAQMDLVPLRGLSPGAAWPVLHHLHGCRGCGAALGPVPPPGQPLLGSEAEEALEAAGRFLLPGLEEELEEAVGRIHLGPQGGPESVGEVFRLGRPRLAAHCARWTLGSEQCPRKRGLALVGLVEAAGEEAGPLTEALLAVVMGIELGARVPA

SEQ ID NO: 6333 - protein, 1030 aa, Homo sapiens
  Payload ID: 1375;
  Gene Symbol: ARMC5;
  Gene Name: armadillo repeat containing 5;
  ENSP ID: ENSP00000386125
MVTLGAGVRLFTGVYPVVLNQIRATSEASAITRTTMPAPELTSTSRAEDTRDTGVQLRKRKIPQARHSRKRQRTFSFRSLGSAARSGAESEARAKMAAAKPTLTDSLSFCLAQLAAAAGEALGGEKDPATNETPLSRALLALRTRHIKAAGGIERFRARGGLRPLLALLRRAAAAGSAPSQAGPGSAPSSAASGASSPAPASGPAPSAVSSSSPTPPVRLRKTLDLALSILADCCTEGACRTEVRRLGGILPLVTILQCMKTDSIQNRTARALGNLAMEPESCGDIHCAGAVPLLVESLTACQDSQCLQSVVRALRNLADSPQHRLALAQQGAVRPLAELLATAPDAALTLALVRALLELSRGCSRACAEQLSLGGGLGPLVSLASHPKRAVREGTILILANLCAQGLIRPALGNAGGVEVLVDELRQRRDPNGASPTSQQPLVRAVCLLCREAINRARLRDAGGLDLLMGLLRDPRASAWHPRIVAALVGFLYDTGALGRLQALGLVPLLAGQLCGEAGEEEEEGREAASWDFPEERTPERAQGGSFRSLRSWLISEGYATGPDDISPDWSPEQCPPEPMEPASPAPTPTSLRAPRTQRTPGRSPAAAIEEPWGREGPALLLLSRFSQAPDPSGALVTGPALYGLLTYVTGAPGPPSPRALRILSRLTCNPACLEAFVRSYGAALLRAWLVLGVAPDDWPAPRARPTLHSRHRELGERLLQNLTVQAESPFGVGALTHLLLSGSPEDRVACALTLPFICRKPSLWRRLLLEQGGLRLLLAALTRPAPHPLFLFFAADSLSCLQDLVSPTVSPAVPQAVPMDLDSPSPCLYEPLLGPAPVPAPDLHFLLDSGLQLPAQRAASATASPFFRALLSGSFAEAQMDLVPLRGLSPGAAWPVLHHLHGCRGCGAALGPVPPPGQPLLGSEAEEALEAAGRFLLPGLEEELEEAVGRIHLGPQGGPESVGEVFRLGRPRLAAHCARWTLGSEQCPRKRGLALVGLVEAAGEEAGPLTEALLAVVMGIELGARVPA

SEQ ID NO: 6334 - protein, 725 aa, Homo sapiens
  Payload ID: 1375;
  Gene Symbol: ARMC5;
  Gene Name: armadillo repeat containing 5;
  Uniprot ID:  Q96C12;
  ENSP ID: ENSP00000399561
MAAAKPTLTDSLSFCLAQLAAAAGEALGGEKDPATNETPLSRALLALRTRHIKAAGGIERFRARGGLRPLLALLRRAAAAGSAPSQAGPGSAPSSAASGASSPAPASGPAPSAVSSSSPTPPVRLRKTLDLALSILADCCTEGACRTEVRRLGGILPLVTILQCMKTDSIQNRTARALGNLAMEPESCGDIHCAGAVPLLVESLTACQDSQCLQSVVRALRNLADSPQHRLALAQQGAVRPLAELLATAPDAALTLALVRALLELSRGCSRACAEQLSLGGGLGPLVSLASHPKRAVREGTILILANLCAQGLIRPALGNAGGVEVLVDELRQRRDPNGASPTSQQPLVRAVCLLCREAINRARLRDAGGLDLLMGLLRDPRASAWHPRIVAALVGFLYDTGALGRLQALGLVPLLAGQLCGEAGEEEEEGREAASWDFPEERTPERAQGGSFRSLRSWLISEGYATGPDDISPDWSPEQCPPEPMEPASPAPTPTSLRAPRTQRTPGRSPAAAIEEPWGREGPALLLLSRFSQAPDPSGALVTGPALYGLLTYVTGAPGPPSPRALRILSRLTCNPACLEAFVRSYGAALLRAWLVLGVAPDDWPAPRARPTLHSRHRELGEFPYPPVSLPPCESPSSPMASMGPEPHLPTHLSSPARPPDNLSPEWGGEQGVPVPPWAHRQSSAVSSALALGPRYPNSRCSPAPRIWAGLCFFPGSAIGSALS

SEQ ID NO: 6335 - protein, 771 aa, Homo sapiens
  Payload ID: 1375;
  Gene Symbol: ARMC5;
  Gene Name: armadillo repeat containing 5;
  Uniprot ID:  Q96C12;
  ENSP ID: ENSP00000443995
MKTDSIQNRTARALGNLAMEPESCGDIHCAGAVPLLVESLTACQDSQCLQSVVRALRNLADSPQHRLALAQQGAVRPLAELLATAPDAALTLALVRALLELSRGCSRACAEQLSLGGGLGPLVSLASHPKRAVREGTILILANLCAQGLIRPALGNAGGVEVLVDELRQRRDPNGASPTSQQPLVRAVCLLCREAINRARLRDAGGLDLLMGLLRDPRASAWHPRIVAALVGFLYDTGALGRLQALGLVPLLAGQLCGEAGEEEEEGREAASWDFPEERTPERAQGGSFRSLRSWLISEGYATGPDDISPDWSPEQCPPEPMEPASPAPTPTSLRAPRTQRTPGRSPAAAIEEPWGREGPALLLLSRFSQAPDPSGALVTGPALYGLLTYVTGAPGPPSPRALRILSRLTCNPACLEAFVRSYGAALLRAWLVLGVAPDDWPAPRARPTLHSRHRELGERLLQNLTVQAESPFGVGALTHLLLSGSPEDRVACALTLPFICRKPSLWRRLLLEQGGLRLLLAALTRPAPHPLFLFFAADSLSCLQDLVSPTVSPAVPQAVPMDLDSPSPCLYEPLLGPAPVPAPDLHFLLDSGLQLPAQRAASATASPFFRALLSGSFAEAQMDLVPLRGLSPGAAWPVLHHLHGCRGCGAALGPVPPPGQPLLGSEAEEALEAAGRFLLPGLEEELEEAVGRIHLGPQGGPESVGEVFRLGRPRLAAHCARWTLGSEQCPRKRGLALVGLVEAAGEEAGPLTEALLAVVMGIELGARVPA

SEQ ID NO: 6336 - protein, 10 aa, Homo sapiens
  Payload ID: 1375;
  Gene Symbol: ARMC5;
  Gene Name: armadillo repeat containing 5;
  ENSP ID: ENSP00000454430
  MOD_RES (1)..(1): Any amino acid
XLGKCSAPVS

SEQ ID NO: 6337 - protein, 598 aa, Homo sapiens
  Payload ID: 1375;
  Gene Symbol: ARMC5;
  Gene Name: armadillo repeat containing 5;
  ENSP ID: ENSP00000456571
  MOD_RES (1)..(1): Any amino acid
XTEVRRLGGILPLVTILQCMKTDSIQNRTARALGNLAMEPESCGDIHCAGAVPLLVESLTACQDSQCLQSVALGLVPLLAGQLCGEAGEEEEEGREAASWDFPEERTPERAQGGSFRSLRSWLISEGYATGPDDISPDWSPEQCPPEPMEPASPAPTPTSLRAPRTQRTPGRSPAAAIEEPWGREGPALLLLSRFSQAPDPSGALVTGPALYGLLTYVTGAPGPPSPRALRILSRLTCNPACLEAFVRSYGAALLRAWLVLGVAPDDWPAPRARPTLHSRHRELGERLLQNLTVQAESPFGVGALTHLLLSGSPEDRVACALTLPFICRKPSLWRRLLLEQGGLRLLLAALTRPAPHPLFLFFAADSLSCLQDLVSPTVSPAVPQAVPMDLDSPSPCLYEPLLGPAPVPAPDLHFLLDSGLQLPAQRAASATASPFFRALLSGSFAEAQMDLVPLRGLSPGAAWPVLHHLHGCRGCGAALGPVPPPGQPLLGSEAEEALEAAGRFLLPGLEEELEEAVGRIHLGPQGGPESVGEVFRLGRPRLAAHCARWTLGSEQCPRKRGLALVGLVEAAGEEAGPLTEALLAVVMGIELGARVPA

SEQ ID NO: 6338 - protein, 935 aa, Homo sapiens; identical to SEQ ID NO: 6332
  Payload ID: 1375;
  Gene Symbol: ARMC5;
  Gene Name: armadillo repeat containing 5;
  Uniprot ID:  Q96C12;
  ENSP ID: ENSP00000456877

SEQ ID NO: 6339 - protein, 476 aa, Homo sapiens
  Payload ID: 1376;
  Gene Symbol: ARMC6;
  Gene Name: armadillo repeat containing 6;
  Uniprot ID:  Q6NXE6;
  ENSP ID: ENSP00000269932
MVSKRIAQETFDAAVRENIEEFAMGPEEAVKEAVEQFESQGVDLSNIVKTAPKVSADGSQEPTHDILQMLSDLQESVASSRPQEVSAYLTRFCDQCKQDKACRFLAAQKGAYPIIFTAWKLATAGDQGLLLQSLNALSVLTDGQPDLLDAQGLQLLVATLTQNADEADLTCSGIRCVRHACLKHEQNRQDLVKAGVLPLLTGAITHHGHHTDVVREACWALRVMTFDDDIRVPFGHAHNHAKMIVQENKGLKVLIEATKAFLDNPGILSELCGTLSRLAIRNEFCQEVVDLGGLSILVSLLADCNDHQMRDQSGVQELVKQVLSTLRAIAGNDDVKDAIVRAGGTESIVAAMTQHLTSPQVCEQSCAALCFLALRKPDNSRIIVEGGGAVAALQAMKAHPQKAGVQKQACMLIRNLVAHGQAFSKPILDLGAEALIMQARSAHRDCEDVAKAALRDLGCHVELRELWTGQRGNLAP

SEQ ID NO: 6340 - protein, 476 aa, Homo sapiens; identical to SEQ ID NO: 6339
  Payload ID: 1376;
  Gene Symbol: ARMC6;
  Gene Name: armadillo repeat containing 6;
  Uniprot ID:  Q6NXE6;
  ENSP ID: ENSP00000376147

SEQ ID NO: 6341 - protein, 501 aa, Homo sapiens
  Payload ID: 1376;
  Gene Symbol: ARMC6;
  Gene Name: armadillo repeat containing 6;
  Uniprot ID:  Q6NXE6;
  ENSP ID: ENSP00000376148
MSERCCSRYSSGASIGCTPTSTQAKMVSKRIAQETFDAAVRENIEEFAMGPEEAVKEAVEQFESQGVDLSNIVKTAPKVSADGSQEPTHDILQMLSDLQESVASSRPQEVSAYLTRFCDQCKQDKACRFLAAQKGAYPIIFTAWKLATAGDQGLLLQSLNALSVLTDGQPDLLDAQGLQLLVATLTQNADEADLTCSGIRCVRHACLKHEQNRQDLVKAGVLPLLTGAITHHGHHTDVVREACWALRVMTFDDDIRVPFGHAHNHAKMIVQENKGLKVLIEATKAFLDNPGILSELCGTLSRLAIRNEFCQEVVDLGGLSILVSLLADCNDHQMRDQSGVQELVKQVLSTLRAIAGNDDVKDAIVRAGGTESIVAAMTQHLTSPQVCEQSCAALCFLALRKPDNSRIIVEGGGAVAALQAMKAHPQKAGVQKQACMLIRNLVAHGQAFSKPILDLGAEALIMQARSAHRDCEDVAKAALRDLGCHVELRELWTGQRGNLAP

SEQ ID NO: 6342 - protein, 156 aa, Homo sapiens
  Payload ID: 1376;
  Gene Symbol: ARMC6;
  Gene Name: armadillo repeat containing 6;
  ENSP ID: ENSP00000437580
MLSDLQESVASSRPQEVSAYLTRFCDQCKQDKACRFLAAQKGAYPIIFTAWKLATAGDQGLLLQSLNALSVLTDGQPDLLDAQGLQLLVATLTQNADEADLTCSGIRCVRHACLKHEQNRQDLVKAGVLPLLTGAITHHGHHTDVVREACWALRVM

SEQ ID NO: 6343 - protein, 103 aa, Homo sapiens
  Payload ID: 1376;
  Gene Symbol: ARMC6;
  Gene Name: armadillo repeat containing 6;
  ENSP ID: ENSP00000438369
MVSKRIAQETFDAAVRENIEEFAMGPEEAVKEAVEQFESQGVDLSNIVKTAPKVSADGSQEPTHDILQMLSDLQESVASSRPQEVSAYLTRFCDQCKQDKACR

SEQ ID NO: 6344 - protein, 63 aa, Homo sapiens
  Payload ID: 1376;
  Gene Symbol: ARMC6;
  Gene Name: armadillo repeat containing 6;
  ENSP ID: ENSP00000439003
MSERCCSRYRDGALLCCPCWSQTPDLKQSSHLGLLKHWDHSSGASIGCTPTSTQAKMVSKRIA

SEQ ID NO: 6345 - protein, 70 aa, Homo sapiens
  Payload ID: 1376;
  Gene Symbol: ARMC6;
  Gene Name: armadillo repeat containing 6;
  ENSP ID: ENSP00000439038
MVSKRIAQETFDAAVRENIEEFAMGPEEAVKEAVEQFESQGVDLSNIVKTAPKVSADGSQEPTHDILQML

SEQ ID NO: 6346 - protein, 161 aa, Homo sapiens
  Payload ID: 1376;
  Gene Symbol: ARMC6;
  Gene Name: armadillo repeat containing 6;
  ENSP ID: ENSP00000439269
MVSKRIAQETFDAAVRENIEEFAMGPEEAVKEAVEQFESQGVDLSNIVKTAPKVSADGSQEPTHDILQMLSDLQESVASSRPQEVSAYLTRFCDQCKQDKACRFLAAQKGAYPIIFTAWKLATAGDQGLLLQSLNALSVLTDGQPDLLDAQGLQLLVATLT

SEQ ID NO: 6347 - protein, 47 aa, Homo sapiens
  Payload ID: 1376;
  Gene Symbol: ARMC6;
  Gene Name: armadillo repeat containing 6;
  ENSP ID: ENSP00000441420
MSERCCSRYRDGVSPRVQAGLKLLASCDPSASASQSAGHHAWPEVET

SEQ ID NO: 6348 - protein, 256 aa, Homo sapiens
  Payload ID: 1376;
  Gene Symbol: ARMC6;
  Gene Name: armadillo repeat containing 6;
  ENSP ID: ENSP00000441948
MVSKRIAQETFDAAVRENIEEFAMGPEEAVKEAVEQFESQGVDLSNIVKTAPKVSADGSQEPTHDILQMLSDLQESVASSRPQEVSAYLTRFCDQCKQDKACRFLAAQKGAYPIIFTAWKLATAGDQGLLLQSLNALSVLTDGQPDLLDAQGLQLLVATLTQNADEADLTCSGIRCVRHACLKHEQNRQDLVKAGVLPLLTGAITHHGHHTDVVREACWALRVMTFDDDIRVPFGHAHNHAKMIVQENKGLKVLIE

SEQ ID NO: 6349 - protein, 30 aa, Homo sapiens
  Payload ID: 1376;
  Gene Symbol: ARMC6;
  Gene Name: armadillo repeat containing 6;
  ENSP ID: ENSP00000442263
MVSKRIAQETFDAAVRENIEEFAMGPEEAV

SEQ ID NO: 6350 - protein, 81 aa, Homo sapiens
  Payload ID: 1376;
  Gene Symbol: ARMC6;
  Gene Name: armadillo repeat containing 6;
  ENSP ID: ENSP00000443719
  MOD_RES (1)..(1): Any amino acid
XKAHPQKAGVQKQACMLIRNLVAHGQAFSKPILDLGAEALIMQARSAHRDCEDVAKAALRDLGCHVELRELWTGQRGNLAP

SEQ ID NO: 6351 - protein, 501 aa, Homo sapiens; identical to SEQ ID NO: 6341
  Payload ID: 1376;
  Gene Symbol: ARMC6;
  Gene Name: armadillo repeat containing 6;
  Uniprot ID:  Q6NXE6;
  ENSP ID: ENSP00000444156

SEQ ID NO: 6352 - protein, 137 aa, Homo sapiens
  Payload ID: 1376;
  Gene Symbol: ARMC6;
  Gene Name: armadillo repeat containing 6;
  ENSP ID: ENSP00000444265
  MOD_RES (1)..(1): Any amino acid
XSGVQELVKQVLSTLRAIAGNDDVKDAIVRAGGTESIVAAMTQHLTSPQVCEQSCAALCFLALRKPDNSRIIVEGGGAVAALQAMKAHPQKAGVQVGRAGDGGRQAGVGCAETGLHADPKPGGPRPGLLEAHPGPGG

SEQ ID NO: 6353 - protein, 43 aa, Homo sapiens
  Payload ID: 1376;
  Gene Symbol: ARMC6;
  Gene Name: armadillo repeat containing 6;
  ENSP ID: ENSP00000444317
MVSKRIAQETFDAAVRENIEEFAMGPEEAVKEAVEQFESQDAQ

SEQ ID NO: 6354 - protein, 408 aa, Homo sapiens
  Payload ID: 1376;
  Gene Symbol: ARMC6;
  Gene Name: armadillo repeat containing 6;
  ENSP ID: ENSP00000444341
MLSDLQESVASSRPQEVSAYLTRFCDQCKQDKACRFLAAQKGAYPIIFTAWKLATAGDQGLLLQSLNALSVLTDGQPDLLDAQGLQLLVATLTQNADEADLTCSGIRCVRHACLKHEQNRQDLVKAGVLPLLTGAITHHGHHTDVVREACWALRVMTFDDDIRVPFGHAHNHAKMIVQENKGLKVLIEATKAFLDNPGILSELCGTLSRLAIRNEFCQEVVDLGGLSILVSLLADCNDHQMRDQSGVQELVKQVLSTLRAIAGNDDVKDAIVRAGGTESIVAAMTQHLTSPQVCEQSCAALCFLALRKPDNSRIIVEGGGAVAALQAMKAHPQKAGVQKQACMLIRNLVAHGQAFSKPILDLGAEALIMQARSAHRDCEDVAKAALRDLGCHVELRELWTGQRGNLAP

SEQ ID NO: 6355 - protein, 70 aa, Homo sapiens
  Payload ID: 1376;
  Gene Symbol: ARMC6;
  Gene Name: armadillo repeat containing 6;
  ENSP ID: ENSP00000444916
MSERCCSRYSQAGVQWHDLGSLQPPPLCSSGSPTSVSLIAGITDLRSIYRLHANINTGEDGLQAHCPGDL

SEQ ID NO: 6356 - protein, 259 aa, Homo sapiens
  Payload ID: 1376;
  Gene Symbol: ARMC6;
  Gene Name: armadillo repeat containing 6;
  ENSP ID: ENSP00000446037
MVSKRIAQETFDAAVRENIEEFAMGPEEAVKEAVEQFESQGVDLSNIVKTAPKVSADGSQEPTHDILQMLSDLQESVASSRPQEVSAYLTRFCDQCKQDKACRFLAAQKGAYPIIFTAWKLATAGDQGLLLQSLNALSVLTDGQPDLLDAQGLQLLVATLTQNADEADLTCSGIRCVRHACLKHEQNRQDLVKAGVLPLLTGAITHHGHHTDVVREACWALRVMTFDDDIRVPFGHAHNHAKMIVQENKGLKVLIEATK

SEQ ID NO: 6357 - protein, 163 aa, Homo sapiens
  Payload ID: 1376;
  Gene Symbol: ARMC6;
  Gene Name: armadillo repeat containing 6;
  ENSP ID: ENSP00000446209
MSERCCSRYSSGASIGCTPTSTQAKMVSKRIAQETFDAAVRENIEEFAMGPEEAVKEAVEQFESQGVDLSNIVKTAPKVSADGSQEPTHDILQMLSDLQESVASSRPQEVSAYLTRFCDQCKQDKACRFLAAQKGAYPIIFTAWKLATAGDQGLLLQSLNALS

SEQ ID NO: 6358 - protein, 145 aa, Homo sapiens
  Payload ID: 1376;
  Gene Symbol: ARMC6;
  Gene Name: armadillo repeat containing 6;
  ENSP ID: ENSP00000446234
  MOD_RES (1)..(1): Any amino acid
XEVVDLGGLSILVSLLADCNDHQMRDQSGVQELVKQVLSTLRAIAGNDDVKDAIVRAGGTESIVAAMTQHLTSPQKQACMLIRNLVAHGQAFSKPILDLGAEALIMQARSAHRDCEDVAKAALRDLGCHVELRELWTGQRGNLAP

SEQ ID NO: 6359 - protein, 198 aa, Homo sapiens
  Payload ID: 1377;
  Gene Symbol: ARMC7;
  Gene Name: armadillo repeat containing 7;
  Uniprot ID:  Q9H6L4;
  ENSP ID: ENSP00000245543
MAQKPKVDPHVGRLGYLQALVTEFQETQSQDAKEQVLANLANFAYDPSNYEYLRQLQVLDLFLDSLSEENETLVEFAIGGLCNLCPDRANKEHILHAGGVPLIINCLSSPNEETVLSAITTLMHLSPPGRSFLPELTATPVVQCMLRFSLSASARLRNLAQIFLEDFCSPRQVAEARSRQAHSALGIPLPRSVAPRQR

SEQ ID NO: 6360 - protein, 82 aa, Homo sapiens
  Payload ID: 1377;
  Gene Symbol: ARMC7;
  Gene Name: armadillo repeat containing 7;
  ENSP ID: ENSP00000462642
MAQKPKVDPHVGRLGYLQALVTEFQETQSQDAKEQVLANLANFAYDPSNYEYLRQLQVLDLFLDSLSEENETLVEFAIAAAV

SEQ ID NO: 6361 - protein, 101 aa, Homo sapiens
  Payload ID: 1377;
  Gene Symbol: ARMC7;
  Gene Name: armadillo repeat containing 7;
  ENSP ID: ENSP00000462939
MAQKPKVDPHVGRLGYLQALVTEFQETQSQDAKEQVLANLANFAYDPSNYEYLRQLQVLDLFLDSLSEENETLVEFAIARPPRPKHSSFLSVESLRGTMLQ

SEQ ID NO: 6362 - protein, 103 aa, Homo sapiens
  Payload ID: 1377;
  Gene Symbol: ARMC7;
  Gene Name: armadillo repeat containing 7;
  Uniprot ID:  Q9H6L4;
  ENSP ID: ENSP00000462962
MAQKPKVDPHVGRLGYLQALVTEFQETQSQDAKEQVLANLANFAYDPSNYEYLRQLQEACATCAQTGPTRSTSCTQEVSHSSSTAYPAPMRRRCCLPSPRSCT

SEQ ID NO: 6363 - protein, 385 aa, Homo sapiens
  Payload ID: 1378;
  Gene Symbol: ARMC8;
  Gene Name: armadillo repeat containing 8;
  Uniprot ID:  Q8IUR7;
  ENSP ID: ENSP00000351221
MEVTASSRHYVDRLFDPDPQKVLQGVIDMKNAVIGNNKQKANLIVLGAVPRLLYLLQQETSSTELKTECAVVLGSLAMGTENNVKSLLDCHIIPALLQGLLSPDLKFIEACLRCLRTIFTSPVTPEELLYTDATVIPHLMALLSRSRYTQEYICQIFSHCCKGPDHQTILFNHGAVQNIAHLLTSLSYKVRMQALKCFSVLAFENPQVSMTLVNVLVDGELLPQIFVKMLQRDKPIEMQLTSAKCLTYMCRAGAIRTDDNCIVLKTLPCLVRMCSKERLLEERVEGAETLAYLIEPDVELQRIASITDHLIAMLADYFKYPSSVSAITDIKRLDHDLKHAHELRQAAFKLYASLGANDEDIRKKVSLGEGRPPVLTASRQGVTST

SEQ ID NO: 6364 - protein, 600 aa, Homo sapiens
  Payload ID: 1378;
  Gene Symbol: ARMC8;
  Gene Name: armadillo repeat containing 8;
  ENSP ID: ENSP00000417049
MKNAVIGNNKQKANLIVLGAVPRLLYLLQQETSSTELKTECAVVLGSLAMGTENNVKSLLDCHIIPALLQGLLSPDLKFIEACLRCLRTIFTSPVTPEELLYTGPDHQTILFNHGAVQNIAHLLTSLSYKVRMQALKCFSVLAFENPQVSMTLVNVLVDGELLPQIFVKMLQRDKPIEMQLTSAKCLTYMCRAGAIRTDDNCIVLKTLPCLVRMCSKERLLEERVEGAETLAYLIEPDVELQRIASITDHLIAMLADYFKYPSSVSAITDIKRLDHDLKHAHELRQAAFKLYASLGANDEDIRKKIIETENMMDRIVTGLSESSVKVRLAAVRCLHSLSRSVQQLRTSFQDHAVWKPLMKVLQNAPDEILVVASSMLCNLLLEFSPSKEPILESGAVELLCGLTQSENPALRVNGIWALMNMAFQAEQKIKADILRSLSTEQLFRLLSDSDLNVLMKTLGLLRNLLSTRPHIDKIMSTHGKQIMQAVTLILEGEHNIEVKEQTLCILANIADGTTAKDLIMTNDDILQKIKYYMGHSHVKLQLAAMFCISNLIWNEEEGSQERQDKLRDMGIVDILHKLSQSPDSNLCDKAKMALQQYLA

SEQ ID NO: 6365 - protein, 631 aa, Homo sapiens
  Payload ID: 1378;
  Gene Symbol: ARMC8;
  Gene Name: armadillo repeat containing 8;
  Uniprot ID:  Q8IUR7;
  ENSP ID: ENSP00000417304
MKNAVIGNNKQKANLIVLGAVPRLLYLLQQETSSTELKTECAVVLGSLAMGTENNVKSLLDCHIIPALLQGLLSPDLKFIEACLRCLRTIFTSPVTPEELLYTDATVIPHLMALLSRSRYTQEYICQIFSHCCKGPDHQTILFNHGAVQNIAHLLTSLSYKVRMQALKCFSVLAFENPQVSMTLVNVLVDGELLPQIFVKMLQRDKPIEMQLTSAKCLTYMCRAGAIRTDDNCIVLKTLPCLVRMCSKERLLEERVEGAETLAYLIEPDVELQRIASITDHLIAMLADYFKYPSSVSAITDIKRLDHDLKHAHELRQAAFKLYASLGANDEDIRKKIIETENMMDRIVTGLSESSVKVRLAAVRCLHSLSRSVQQLRTSFQDHAVWKPLMKVLQNAPDEILVVASSMLCNLLLEFSPSKEPILESGAVELLCGLTQSENPALRVNGIWALMNMAFQAEQKIKADILRSLSTEQLFRLLSDSDLNVLMKTLGLLRNLLSTRPHIDKIMSTHGKQIMQAVTLILEGEHNIEVKEQTLCILANIADGTTAKDLIMTNDDILQKIKYYMGHSHVKLQLAAMFCISNLIWNEEEGSQERQDKLRDMGIVDILHKLSQSPDSNLCDKAKMALQQYLA

SEQ ID NO: 6366 - protein, 352 aa, Homo sapiens
  Payload ID: 1378;
  Gene Symbol: ARMC8;
  Gene Name: armadillo repeat containing 8;
  ENSP ID: ENSP00000417403
MACLLETPIRMSVLSRHEKCCNWKQQAESQSHCFRSCSKDATVIPHLMALLSRSRYTQEYICQIFSHCCKGPDHQTILFNHGAVQNIAHLLTSLSYKVRMQALKCFSVLAFENPQVSMTLVNVLVDGELLPQIFVKMLQRDKPIEMQLTSAKCLTYMCRAGAIRTDDNCIVLKTLPCLVRMCSKERLLEERVEGAETLAYLIEPDVELQRIASITDHLIAMLADYFKYPSSVSAITDIKRLDHDLKHAHELRQAAFKLYASLGANDEDIRKKIIETENMMDRIVTGLSESSVKVRLAAVRCLHSLSRSVQQLRTSFQDHAVWKPLMKVLQNAPDEILVVASSMLCNLLLEFS

SEQ ID NO: 6367 - protein, 90 aa, Homo sapiens
  Payload ID: 1378;
  Gene Symbol: ARMC8;
  Gene Name: armadillo repeat containing 8;
  ENSP ID: ENSP00000417457
  MOD_RES (1)..(1): Any amino acid
XLGLLRNLLSTRPHIDKIMSTHGKQIMQAVTLILEGEHNIEVKEQTLCILANIADGTTAKDLIMTNDDILQKIKYYMGAQTGHLLKSVGS

SEQ ID NO: 6368 - protein, 130 aa, Homo sapiens
  Payload ID: 1378;
  Gene Symbol: ARMC8;
  Gene Name: armadillo repeat containing 8;
  ENSP ID: ENSP00000417699
MKNAVIGNNKQKANLIVLGAVPRLLYLLQQETSSTELKTECAVVLGSLAMGTENNVKSLLDCHIIPALLQGLLSPDLKFIEACLRCLRTIFTSPVTPEELLYTDATVIPHLMALLSRSRYTQEYICQIFS

SEQ ID NO: 6369 - protein, 198 aa, Homo sapiens
  Payload ID: 1378;
  Gene Symbol: ARMC8;
  Gene Name: armadillo repeat containing 8;
  ENSP ID: ENSP00000418074
MACLLETPIRMSVLSEVTASSRHYVDRLFDPDPQKVLQGVIDMKNAVIGNNKQKANLIVLGAVPRLLYLLQQETSSTELKTECAVVLGSLAMGTENNVKSLLDCHIIPALLQGLLSPDLKFIEACLRCLRTIFTSPVTPEELLYTDATVIPHLMALLSRSRYTQEYICQIFSHCCKGPDHQTILFNHGAVQNIAHLLT

SEQ ID NO: 6370 - protein, 399 aa, Homo sapiens
  Payload ID: 1378;
  Gene Symbol: ARMC8;
  Gene Name: armadillo repeat containing 8;
  ENSP ID: ENSP00000418405
MACLLETPIRMSVLSEVTASSRHYVDRLFDPDPQKVLQGVIDMKNAVIGNNKQKANLIVLGAVPRLLYLLQQETSSTELKTECAVVLGSLAMGTENNVKSLLDCHIIPALLQGLLSPDLKFIEACLRCLRTIFTSPVTPEELLYTDATVIPHLMALLSRSRYTQEYICQIFSHCCKGPDHQTILFNHGAVQNIAHLLTSLSYKVRMQALKCFSVLAFENPQVSMTLVNVLVDGELLPQIFVKMLQRDKPIEMQLTSAKCLTYMCRAGAIRTDDNCIVLKTLPCLVRMCSKERLLEERVEGAETLAYLIEPDVELQRIASITDHLIAMLADYFKYPSSVSAITDIKRLDHDLKHAHELRQAAFKLYASLGANDEDIRKKVSLGEGRPPVLTASRQGVTST

SEQ ID NO: 6371 - protein, 357 aa, Homo sapiens
  Payload ID: 1378;
  Gene Symbol: ARMC8;
  Gene Name: armadillo repeat containing 8;
  ENSP ID: ENSP00000418412
MKNAVIGNNKQKANLIVLGAVPRLLYLLQQETSSTELKTECAVVLGSLAMGTENNVKSLLDCHIIPALLQGLLSPDLKFIEACLRCLRTIFTSPVTPEELLYTDATVIPHLMALLSRSRYTQEYICQIFSHCCKGPDHQTILFNHGAVQNIAHLLTSLSYKVRMQALKCFSVLAFENPQVSMTLVNVLVDGELLPQIFVKMLQRDKPIEMQLTSAKCLTYMCRAGAIRTDDNCIVLKTLPCLVRMCSKERLLEERVEGAETLAYLIEPDVELQRIASITDHLIAMLADYFKYPSSVSAITDIKRLDHDLKHAHELRQAAFKLYASLGANDEDIRKKVSLGEGRPPVLTASRQGVTST

SEQ ID NO: 6372 - protein, 25 aa, Homo sapiens
  Payload ID: 1378;
  Gene Symbol: ARMC8;
  Gene Name: armadillo repeat containing 8;
  ENSP ID: ENSP00000418457
MEVTASSRHYVDRLFDPDPQKVLQG

SEQ ID NO: 6373 - protein, 673 aa, Homo sapiens
  Payload ID: 1378;
  Gene Symbol: ARMC8;
  Gene Name: armadillo repeat containing 8;
  Uniprot ID:  Q8IUR7;
  ENSP ID: ENSP00000419413
MACLLETPIRMSVLSEVTASSRHYVDRLFDPDPQKVLQGVIDMKNAVIGNNKQKANLIVLGAVPRLLYLLQQETSSTELKTECAVVLGSLAMGTENNVKSLLDCHIIPALLQGLLSPDLKFIEACLRCLRTIFTSPVTPEELLYTDATVIPHLMALLSRSRYTQEYICQIFSHCCKGPDHQTILFNHGAVQNIAHLLTSLSYKVRMQALKCFSVLAFENPQVSMTLVNVLVDGELLPQIFVKMLQRDKPIEMQLTSAKCLTYMCRAGAIRTDDNCIVLKTLPCLVRMCSKERLLEERVEGAETLAYLIEPDVELQRIASITDHLIAMLADYFKYPSSVSAITDIKRLDHDLKHAHELRQAAFKLYASLGANDEDIRKKIIETENMMDRIVTGLSESSVKVRLAAVRCLHSLSRSVQQLRTSFQDHAVWKPLMKVLQNAPDEILVVASSMLCNLLLEFSPSKEPILESGAVELLCGLTQSENPALRVNGIWALMNMAFQAEQKIKADILRSLSTEQLFRLLSDSDLNVLMKTLGLLRNLLSTRPHIDKIMSTHGKQIMQAVTLILEGEHNIEVKEQTLCILANIADGTTAKDLIMTNDDILQKIKYYMGHSHVKLQLAAMFCISNLIWNEEEGSQERQDKLRDMGIVDILHKLSQSPDSNLCDKAKMALQQYLA

SEQ ID NO: 6374 - protein, 113 aa, Homo sapiens
  Payload ID: 1378;
  Gene Symbol: ARMC8;
  Gene Name: armadillo repeat containing 8;
  ENSP ID: ENSP00000419473
  MOD_RES (1)..(1): Any amino acid
XLLSPDLKFIEACLRCLRTIFTSPVTPEELLYTGPDHQTILFNHGAVQNIAHLLTSLSYKLDHDLKHAHELRQAAFKLYASLGANDEDIRKKVSLGEGRPPVLTASRQGVTST

SEQ ID NO: 6375 - protein, 117 aa, Homo sapiens
  Payload ID: 1378;
  Gene Symbol: ARMC8;
  Gene Name: armadillo repeat containing 8;
  ENSP ID: ENSP00000419888
  MOD_RES (1)..(1): Any amino acid
XLLSPDLKFIEACLRCLRTIFTSPVTPEELLYTDATVIPHLMALLSRSRYTQEYICQIFSHCCKGPDHQTILFNHGAVQNIAHLLTSLSYKVRMQALKCFSVLAFENPQVSMTLVNV

SEQ ID NO: 6376 - protein, 659 aa, Homo sapiens
  Payload ID: 1378;
  Gene Symbol: ARMC8;
  Gene Name: armadillo repeat containing 8;
  Uniprot ID:  Q8IUR7;
  ENSP ID: ENSP00000420333
MEVTASSRHYVDRLFDPDPQKVLQGVIDMKNAVIGNNKQKANLIVLGAVPRLLYLLQQETSSTELKTECAVVLGSLAMGTENNVKSLLDCHIIPALLQGLLSPDLKFIEACLRCLRTIFTSPVTPEELLYTDATVIPHLMALLSRSRYTQEYICQIFSHCCKGPDHQTILFNHGAVQNIAHLLTSLSYKVRMQALKCFSVLAFENPQVSMTLVNVLVDGELLPQIFVKMLQRDKPIEMQLTSAKCLTYMCRAGAIRTDDNCIVLKTLPCLVRMCSKERLLEERVEGAETLAYLIEPDVELQRIASITDHLIAMLADYFKYPSSVSAITDIKRLDHDLKHAHELRQAAFKLYASLGANDEDIRKKIIETENMMDRIVTGLSESSVKVRLAAVRCLHSLSRSVQQLRTSFQDHAVWKPLMKVLQNAPDEILVVASSMLCNLLLEFSPSKEPILESGAVELLCGLTQSENPALRVNGIWALMNMAFQAEQKIKADILRSLSTEQLFRLLSDSDLNVLMKTLGLLRNLLSTRPHIDKIMSTHGKQIMQAVTLILEGEHNIEVKEQTLCILANIADGTTAKDLIMTNDDILQKIKYYMGHSHVKLQLAAMFCISNLIWNEEEGSQERQDKLRDMGIVDILHKLSQSPDSNLCDKAKMALQQYLA

SEQ ID NO: 6377 - protein, 385 aa, Homo sapiens; identical to SEQ ID NO: 6363
  Payload ID: 1378;
  Gene Symbol: ARMC8;
  Gene Name: armadillo repeat containing 8;
  Uniprot ID:  Q8IUR7;
  ENSP ID: ENSP00000420440

SEQ ID NO: 6378 - protein, 606 aa, Homo sapiens
  Payload ID: 1378;
  Gene Symbol: ARMC8;
  Gene Name: armadillo repeat containing 8;
  Uniprot ID:  Q8IUR7;
  ENSP ID: ENSP00000420706
MACLLETPIRMSVLSEVTASSRHYVDRLFDPDPQKVLQGVIDMKNAVIGNNKQKANLIVLGAVPRLLYLLQQETSSTELKTECAVVLGSLAMGTENNVKSLLDCHIIPALLQGLLSPDLKFIEACLRCLRTIFTSPVTPEELLYTDATVIPHLMALLSRSRYTQEYICQIFSHCCKGPDHQTILFNHGAVQNIAHLLTSLSYKVRMQALKCFSVLAFENPQVSMTLVNVLVDGELLPQIFVKMLQRDKPIEMQLTSAKCLTYMCRAGAIRTDDNCIVLKLDHDLKHAHELRQAAFKLYASLGANDEDIRKKIIETENMMDRIVTGLSESSVKVRLAAVRCLHSLSRSVQQLRTSFQDHAVWKPLMKVLQNAPDEILVVASSMLCNLLLEFSPSKEPILESGAVELLCGLTQSENPALRVNGIWALMNMAFQAEQKIKADILRSLSTEQLFRLLSDSDLNVLMKTLGLLRNLLSTRPHIDKIMSTHGKQIMQAVTLILEGEHNIEVKEQTLCILANIADGTTAKDLIMTNDDILQKIKYYMGHSHVKLQLAAMFCISNLIWNEEEGSQERQDKLRDMGIVDILHKLSQSPDSNLCDKAKMALQQYLA

SEQ ID NO: 6379 - protein, 227 aa, Homo sapiens
  Payload ID: 1378;
  Gene Symbol: ARMC8;
  Gene Name: armadillo repeat containing 8;
  ENSP ID: ENSP00000420719
MACLLETPIRMSVLSEVTASSRHYVDRLFDPDPQKVLQGVIDMKNAVIGNNKQKANLIVLGAVPRLLYLLQQETSSTELKTECAVVLGSLAMGTENNVKSLLDCHIIPALLQGLLSPDLKFIEACLRCLRTIFTSPVTPEELLYTGPDHQTILFNHGAVQNIAHLLTSLSYKVRMQALKCFSVLAFENPQVSMTLVNVLVDGELLPQIFVKMLQRDKPIEMQLTSAK

SEQ ID NO: 6380 - protein, 642 aa, Homo sapiens
  Payload ID: 1378;
  Gene Symbol: ARMC8;
  Gene Name: armadillo repeat containing 8;
  Uniprot ID:  Q8IUR7;
  ENSP ID: ENSP00000441592
MACLLETPIRMSVLSEVTASSRHYVDRLFDPDPQKVLQGVIDMKNAVIGNNKQKANLIVLGAVPRLLYLLQQETSSTELKTECAVVLGSLAMGTENNVKSLLDCHIIPALLQGLLSPDLKFIEACLRCLRTIFTSPVTPEELLYTGPDHQTILFNHGAVQNIAHLLTSLSYKVRMQALKCFSVLAFENPQVSMTLVNVLVDGELLPQIFVKMLQRDKPIEMQLTSAKCLTYMCRAGAIRTDDNCIVLKTLPCLVRMCSKERLLEERVEGAETLAYLIEPDVELQRIASITDHLIAMLADYFKYPSSVSAITDIKRLDHDLKHAHELRQAAFKLYASLGANDEDIRKKIIETENMMDRIVTGLSESSVKVRLAAVRCLHSLSRSVQQLRTSFQDHAVWKPLMKVLQNAPDEILVVASSMLCNLLLEFSPSKEPILESGAVELLCGLTQSENPALRVNGIWALMNMAFQAEQKIKADILRSLSTEQLFRLLSDSDLNVLMKTLGLLRNLLSTRPHIDKIMSTHGKQIMQAVTLILEGEHNIEVKEQTLCILANIADGTTAKDLIMTNDDILQKIKYYMGHSHVKLQLAAMFCISNLIWNEEEGSQERQDKLRDMGIVDILHKLSQSPDSNLCDKAKMALQQYLA

SEQ ID NO: 6381 - protein, 665 aa, Homo sapiens
  Payload ID: 1379;
  Gene Symbol: ARMC9;
  Gene Name: armadillo repeat containing 9;
  Uniprot ID:  Q7Z3E5;
  ENSP ID: ENSP00000258417
MGDILAHESELLGLVKEYLDFAEFEDTLKTFSKECKIKGKPLCKTVGGSFRDSKSLTIQKDLVAAFDNGDQKVFFDLWEEHISSSIRDGDSFAQKLEFYLHIHFAIYLLKYSVGRPDKEELDEKISYFKTYLETKGAALSQTTEFLPFYALPFVPNPMVHPSFKELFQDSWTPELKLKLIKFLALISKASNTPKLLTIYKENGQSNKEILQQLHQQLVEAERRSVTYLKRYNKIQADYHNLIGVTAELVDSLEATVSGKMITPEYLQSVCVRLFSNQMRQSLAHSVDFTRPGTASTMLRASLAPVKLKDVPLLPSLDYEKLKKDLILGSDRLKAFLLQALRWRLTTSHPGEQRETVLQAYISNDLLDCYSHNQRSVLQLLHSTSDVVRQYMARLINAFASLAEGRLYLAQNTKVLQMLEGRLKEEDKDIITRENVLGALQKFSLRRPLQTAMIQDGLIFWLVDVLKDPDCLSDYTLEYSVALLMNLCLRSTGKNMCAKVAGLVLKVLSDLLGHENHEIQPYVNGALYSILSVPSIREEARAMGMEDILRCFIKEGNAEMIRQIEFIIKQLNSEELPDGVLESDDDEDEDDEEDHDIMEADLDKDELIQPQLGELSGEKLLTTEYLGIMTNTGKTRRKGLANVQWSGDEPLQRPVTPGGHRNGYPV

SEQ ID NO: 6382 - protein, 166 aa, Homo sapiens
  Payload ID: 1379;
  Gene Symbol: ARMC9;
  Gene Name: armadillo repeat containing 9;
  ENSP ID: ENSP00000387391
MGDILAHESELLGLVKEYLDFAEFEDTLKTFSKECKIKGKPLCKTVGGSFRDSKSLTIQKDLVAAFDNGDQKVFFDLWEEHISSSIRDGDSFAQKLEFYLHIHFAIYLLKYSVGRPDKEELDEKISYFKTYLETKGAALSQTTEFLPFYALPFVPNPMVHPSFKEL

SEQ ID NO: 6383 - protein, 172 aa, Homo sapiens
  Payload ID: 1379;
  Gene Symbol: ARMC9;
  Gene Name: armadillo repeat containing 9;
  ENSP ID: ENSP00000388527
  MOD_RES (1)..(1): Any amino acid
XRSVLQLLHSTSDVVRQYMARLINAFASLAEGRLYLAQNTKVLQMLEGRLKEEDKDIITRENVLGALQKFSLRRPLQTAMIQDGLIFWLVDVLKDPDCLSDYTLEYSVALLMNLCLRSTGKNMCAKVAGLVLKVLSDLLGHENHEIQPYVNGALYSILSVPSIREEARAMVP

SEQ ID NO: 6384 - protein, 208 aa, Homo sapiens
  Payload ID: 1379;
  Gene Symbol: ARMC9;
  Gene Name: armadillo repeat containing 9;
  ENSP ID: ENSP00000392086
SLEATVSGKMASTMLRASLAPVKLKDVPLLPSLDYEKLKKDLILGSDRLKAFLLQALRWRLTTSHPGEQRETVLQAYISNDLLDCYSHNQRSVLQLLHSTSDVVRQYMARLINAFASLAEGRLYLAQNTKVLQMLEGRLKEEDKDIITRENVLGALQKFSLRRPLQTAMIQDGLIFWLVDVLKDPDCLSDYTLEYSVALLMNLCLRST

SEQ ID NO: 6385 - protein, 73 aa, Homo sapiens
  Payload ID: 1379;
  Gene Symbol: ARMC9;
  Gene Name: armadillo repeat containing 9;
  ENSP ID: ENSP00000407146
ELVDSLEATVSGKMITPEYLQSVCVRLFSNQMRQSLAHSVDFTRPGTVRLCAQGRVPVVYPPKFKKNVTLKIA

SEQ ID NO: 6386 - protein, 158 aa, Homo sapiens
  Payload ID: 1379;
  Gene Symbol: ARMC9;
  Gene Name: armadillo repeat containing 9;
  ENSP ID: ENSP00000411778
MCLGSAILTWKTAATRSVLQLLHSTSDVVRQYMARLINAFASLAEGRLYLAQNTKVLQMLEGRLKEEDKDIITRENVLGALQKFSLRRPLQTAMIQDGLIFWLVDVLKDPDCLSDYTLEYSVALLMNLCLRSTGKNMCAKVAGLVLKVLSDLLGHENH

SEQ ID NO: 6387 - protein, 194 aa, Homo sapiens
  Payload ID: 1379;
  Gene Symbol: ARMC9;
  Gene Name: armadillo repeat containing 9;
  ENSP ID: ENSP00000413932
  MOD_RES (1)..(1): Any amino acid
XELVLLSRKLKDVPLLPSLDYEKLKKDLILGSDRLKAFLLQALRWRLTTSHPGEQRETVLQAYISNDLLDCYSHNQRSVLQLLHSTSDVVRQYMARLINAFASLAEGRLYLAQNTKVLQMLEGRLKEEDKDIITRENVLGALQKFSLRRPLQTAMIQDGLIFWLVDVLKDPDCLSDYTLEYSVALLMNLCLRST

SEQ ID NO: 6388 - protein, 818 aa, Homo sapiens
  Payload ID: 1379;
  Gene Symbol: ARMC9;
  Gene Name: armadillo repeat containing 9;
  ENSP ID: ENSP00000484241
MGDILAHESELLGLVKEYLDFAEFEDTLKTFSKECKIKGKPLCKTVGGSFRDSKSLTIQKDLVAAFDNGDQKVFFDLWEEHISSSIRDGDSFAQKLEFYLHIHFAIYLLKYSVGRPDKEELDEKISYFKTYLETKGAALSQTTEFLPFYALPFVPNPMVHPSFKELFQDSWTPELKLKLIKFLALISKASNTPKLLTIYKENGQSNKEILQQLHQQLVEAERRSVTYLKRYNKIQADYHNLIGVTAELVDSLEATVSGKMITPEYLQSVCVRLFSNQMRQSLAHSVDFTRPGTASTMLRASLAPVKLKDVPLLPSLDYEKLKKDLILGSDRLKAFLLQALRWRLTTSHPGEQRETVLQAYISNDLLDCYSHNQRSVLQLLHSTSDVVRQYMARLINAFASLAEGRLYLAQNTKVLQMLEGRLKEEDKDIITRENVLGALQKFSLRRPLQTAMIQDGLIFWLVDVLKDPDCLSDYTLEYSVALLMNLCLRSTGKNMCAKVAGLVLKVLSDLLGHENHEIQPYVNGALYSILSVPSIREEARAMGMEDILRCFIKEGNAEMIRQIEFIIKQLNSEELPDGVLESDDDEDEDDEEDHDIMEADLDKDELIQPQLGELSGEKLLTTEYLGIMTNTGKTRRKGLANVQWSGDEPLQRPVTPGGHRNGYPVVEDQHTPPQTAQHARNGHPQALPAAHEAVYREGKPSTPESCVSSSSAIIAKPGEWLPRGRQEEPRPAPTGTPRQPREAPQDPGNGVTTRECASAFTCKPRAPCTPEMLDWNPPKAKASVLAPLFSSCGPQQASRPGSTASSTRGLPSSQSHRK

SEQ ID NO: 6389 - protein, 818 aa, Homo sapiens; identical to SEQ ID NO: 6388
  Payload ID: 1379;
  Gene Symbol: ARMC9;
  Gene Name: armadillo repeat containing 9;
  ENSP ID: ENSP00000484804

SEQ ID NO: 6390 - protein, 453 aa, Homo sapiens
  Payload ID: 1380;
  Gene Symbol: ARMCX1;
  Gene Name: armadillo repeat containing, X-linked 1;
  Uniprot ID:  Q9P291;
  ENSP ID: ENSP00000361917
MGRTREAGCVAAGVVIGAGACYCVYRLAWGRDENEKIWDEDEESTDTSEIGVETVKGAKTNAGAGSGAKLQGDSEVKPEVSLGLEDCPGVKEKAHSGSHSGGGLEAKAKALFNTLKEQASAKAGKGARVGTISGNRTLAPSLPCPGGRGGGCHPTRSGSRAGGRASGKSKGKARSKSTRAPATTWPVRRGKFNFPYKIDDILSAPDLQKVLNILERTNDPFIQEVALVTLGNNAAYSFNQNAIRELGGVPIIAKLIKTKDPIIREKTYNALNNLSVNAENQGKIKTYISQVCDDTMVCRLDSAVQMAGLRLLTNMTVTNHYQHLLSYSFPDFFALLFLGNHFTKIQIMKLIINFTENPAMTRELVSCKVPSELISLFNKEWDREILLNILTLFENINDNIKNEGLASSRKEFSRSSLFFLFKESGVCVKKIKALANHNDLVVKVKVLKVLTKL

SEQ ID NO: 6391 - protein, 365 aa, Homo sapiens
  Payload ID: 1380;
  Gene Symbol: ARMCX1;
  Gene Name: armadillo repeat containing, X-linked 1;
  ENSP ID: ENSP00000477961
MGRTREAGCVAAGVVIGAGACYCVYRLAWGRDENEKIWDEDEESTDTSEIGVETVKGAKTNAGAGSGAKLQGDSEVKPEVSLGLEDCPGVKEKAHSGSHSGGGLEAKAKALFNTLKEQASAKAGKGARVGTISGNRTLAPSLPCPGGRGGGCHPTRSGSRAGGRASGKSKGKARSKSTRAPATTWPVRRGKFNFPYKIDDILSAPDLQKVLNILERTNDPFIQEVALVTLGNNAAYSFNQNAIRELGGVPIIAKLIKTKDPIIREKTYNALNNLSVNAENQGKIKTYISQVCDDTMVCRLDSAVQMAGLRLLTNMTVTNHYQHLLSYSFPDFFALLFLGNHFTKIQIMKLIINFTENPAMTAGQL

SEQ ID NO: 6392 - protein, 632 aa, Homo sapiens
  Payload ID: 1381;
  Gene Symbol: ARMCX2;
  Gene Name: armadillo repeat containing, X-linked 2;
  Uniprot ID:  Q7L311;
  ENSP ID: ENSP00000328631
MSRVRDAGCVAAGIVIGAGAWYCVYKYTRGRDQTKKRMAKPKNRAVAGTGARARAGLRAGFTIDLGSGFSPPTPVRAEAEDRAQDEASALDTVGAEAVAPAASSAEAQSGAGSQAQEADGAGVGPKAESVVGAAMASAIAPPPGVTEALGAAEAPAMAGAPKVAEAPREAETSRAAVPPGTVVPTEAAAPTEVTEGPGVAAPTKVAEAPGVASPTEAAEAPVPATPTGAAAPTGAAESPGTSGSPRTAVVPGTSAAKKATPGAHTGAIPKATSATGAVPKGGGKGVTRSRNGGKGKGKKSKVEVDELGMGFRPGDGAAAAAAASANGGQAFLAEVPDSEEGESGWTDTESDSDSEPETQRRGRGRRPVAMQKRPFPYEIDEILGVRDLRKVLALLQKSDDPFIQQVALLTLSNNANYSCNQETIRKLGGLPIIANMINKTDPHIKEKALMAMNNLSENYENQGRLQVYMNKVMDDIMASNLNSAVQVVGLKFLTNMTITNDYQHLLVNSIANFFRLLSQGGGKIKVEILKILSNFAENPDMLKKLLSTQVPASFSSLYNSYVESEILINALTLFEIIYDNLRAEVFNYREFNKGSLFYLCTTSGVCVKKIRALANHHDLLVKVKVIKLVNKF

SEQ ID NO: 6393 - protein, 632 aa, Homo sapiens; identical to SEQ ID NO: 6392
  Payload ID: 1381;
  Gene Symbol: ARMCX2;
  Gene Name: armadillo repeat containing, X-linked 2;
  Uniprot ID:  Q7L311;
  ENSP ID: ENSP00000331662

SEQ ID NO: 6394 - protein, 632 aa, Homo sapiens; identical to SEQ ID NO: 6392
  Payload ID: 1381;
  Gene Symbol: ARMCX2;
  Gene Name: armadillo repeat containing, X-linked 2;
  Uniprot ID:  Q7L311;
  ENSP ID: ENSP00000349281

SEQ ID NO: 6395 - protein, 104 aa, Homo sapiens
  Payload ID: 1381;
  Gene Symbol: ARMCX2;
  Gene Name: armadillo repeat containing, X-linked 2;
  ENSP ID: ENSP00000393778
MSRVRDAGCVAAGIVIGAGAWYCVYKYTRGRDQTKKRMAKPKNRAVAGTGARARAGLRAGFTIDLGSGFSPPTPVRAEAEDRAQDEASALDTVGAEAVAPAASS

SEQ ID NO: 6396 - protein, 62 aa, Homo sapiens
  Payload ID: 1381;
  Gene Symbol: ARMCX2;
  Gene Name: armadillo repeat containing, X-linked 2;
  ENSP ID: ENSP00000405376
MSRVRDAGCVAAGIVIGAGAWYCVYKYTRGRDQTKKRMAKPKNRAVAGTGARARAGLRAGFT

SEQ ID NO: 6397 - protein, 165 aa, Homo sapiens
  Payload ID: 1381;
  Gene Symbol: ARMCX2;
  Gene Name: armadillo repeat containing, X-linked 2;
  ENSP ID: ENSP00000410151
MSRVRDAGCVAAGIVIGAGAWYCVYKYTRGRDQTKKRMAKPKNRAVAGTGARARAGLRAGFTIDLGSGFSPPTPVRAEAEDRAQDEASALDTVGAEAVAPAASSAEAQSGAGSQAQEADGAGVGPKAESVVGAAMASAIAPPPGVTEALGAAEAPAMAGAPKVAE

SEQ ID NO: 6398 - protein, 167 aa, Homo sapiens
  Payload ID: 1381;
  Gene Symbol: ARMCX2;
  Gene Name: armadillo repeat containing, X-linked 2;
  ENSP ID: ENSP00000412481
MSRVRDAGCVAAGIVIGAGAWYCVYKYTRGRDQTKKRMAKPKNRAVAGTGARARAGLRAGFTIDLGSGFSPPTPVRAEAEDRAQDEASALDTVGAEAVAPAASSAEAQSGAGSQAQEADGAGVGPKAESVVGAAMASAIAPPPGVTEALGAAEAPAMAGAPKVAEAP

SEQ ID NO: 6399 - protein, 92 aa, Homo sapiens
  Payload ID: 1381;
  Gene Symbol: ARMCX2;
  Gene Name: armadillo repeat containing, X-linked 2;
  ENSP ID: ENSP00000415490
MSRVRDAGCVAAGIVIGAGAWYCVYKYTRGRDQTKKRMAKPKNRAVAGTGARARAGLRAGFTIDLGSGFSPPTPVRAEAEDRAQDEASALDT

SEQ ID NO: 6400 - protein, 379 aa, Homo sapiens
  Payload ID: 1382;
  Gene Symbol: ARMCX3;
  Gene Name: armadillo repeat containing, X-linked 3;
  Uniprot ID:  Q9UH62;
  ENSP ID: ENSP00000340672
MGYARKVGWVTAGLVIGAGACYCIYRLTRGRKQNKEKMAEGGSGDVDDAGDCSGARYNDWSDDDDDSNESKSIVWYPPWARIGTEAGTRARARARARATRARRAVQKRASPNSDDTVLSPQELQKVLCLVEMSEKPYILEAALIALGNNAAYAFNRDIIRDLGGLPIVAKILNTRDPIVKEKALIVLNNLSVNAENQRRLKVYMNQVCDDTITSRLNSSVQLAGLRLLTNMTVTNEYQHMLANSISDFFRLFSAGNEETKLQVLKLLLNLAENPAMTRELLRAQVPSSLGSLFNKKENKEVILKLLVIFENINDNFKWEENEPTQNQFGEGSLFFFLKEFQVCADKVLGIESHHDFLVKVKVGKFMAKLAEHMFPKSQE

SEQ ID NO: 6401 - protein, 379 aa, Homo sapiens; identical to SEQ ID NO: 6400
  Payload ID: 1382;
  Gene Symbol: ARMCX3;
  Gene Name: armadillo repeat containing, X-linked 3;
  Uniprot ID:  Q9UH62;
  ENSP ID: ENSP00000439032

SEQ ID NO: 6402 - protein, 63 aa, Homo sapiens
  Payload ID: 1382;
  Gene Symbol: ARMCX3;
  Gene Name: armadillo repeat containing, X-linked 3;
  ENSP ID: ENSP00000454251
MGYARKVGWVTAGLVIGAGACYCIYRLTRGRKQNKEKMAEGGSGDVDDAGDCSGARYNDWSDD

SEQ ID NO: 6403 - protein, 379 aa, Homo sapiens; identical to SEQ ID NO: 6400
  Payload ID: 1382;
  Gene Symbol: ARMCX3;
  Gene Name: armadillo repeat containing, X-linked 3;
  Uniprot ID:  Q9UH62;
  ENSP ID: ENSP00000454483

SEQ ID NO: 6404 - protein, 94 aa, Homo sapiens
  Payload ID: 1382;
  Gene Symbol: ARMCX3;
  Gene Name: armadillo repeat containing, X-linked 3;
  ENSP ID: ENSP00000457997
MGYARKVGWVTAGLVIGAGACYCIYRLTRGRKQNKEKMAEGGSGDVDDAGDCSGARYNDWSDDDDDSNESKSIVWYPPWARIGTEAGTRARARA

SEQ ID NO: 6405 - protein, 2290 aa, Homo sapiens
  Payload ID: 1383;
  Gene Symbol: ARMCX4;
  Gene Name: armadillo repeat containing, X-linked 4;
  ENSP ID: ENSP00000404304
MGRIQEVGWVTAGLVIWAGTCYYIYKFTKGRAQSVRTLARNGSTVKMETVVGVQSQTLAINEAEIKTKPQVEIGAETGARSGPRAEVETKATAIAIHRANSQAKAMVGAEPETQSESKVVAGTLVMTEAVTLTEVKAKAREVAMKEAVTQTDAEAGKIVKKEAVTQTKAKAWALVAKTEAKREAMTQTKAETHILAEKETEINRVMVTQSETLAVPREVAKMGATNKTGIVDETKTRALEETVSVAKTQSEARPGATVDARGNPNGMSREVAGVDMKSCAQSQAVTKIQGDDMPGTGVEDMGNCKTMSRAESGADTRASAQPQIFAKTQTEAIPGAKIDAGGNTNAMCKVGAGADVRACIQPQTVAKKQAEVTSGARVDGRGNTNVISKAITGADMRAAAQPQAVASTHAEAMSDAKVKNRGNPNAMTKAGAKANLRANSQVEALPDARDKSRGNPNVMAKVGDGTDMLSCTQPQLVASVQADTLSDGKIKVRGNVNTMPKEGAGVDMKAQGMAQSQGEALPNTRGKARGKAKAKCKTGPGMDMKTCTQPQAGVKTPAEALLDSRVDGRGNPNATSKAGTKADQRVCGQPLVVANPQGEALPGAKNKVKGNPHTVLKVGAGEGTTDSAQPEAVVSFQGEALLGTKNKVKGNPNVVLKAEVGEGAMGTAQLQIMASSKGEALLDSKNKVKGNSNAVSKAGAGTDTTGSVQPQIVANSQGEVLPGAKNKIRGNPTTVPNSGVGPYTTDSARLQAVANSQGEVLPGAKNKVKANLNAVSKAEAGMGATGSVQPQAVANSHCETLPGAKNKVRGNWNAVSKAGAGMDTRGSAQPQAVANSQGEVLPGAKNKVKGNPNVVSKAGAREDTVGSTQPQVLASSQRETLPGARNKVKGNSNVVSKAGAREDTMGSAQPQVVANSQRETLPGARNKVKGNSNAISKAEAGAGIMGSVQVQVVASFQGEVLPGAKNKVRGNSNAVPKAEAGADTVGSAQPQAVANSQSETLLGARNKVKGNTIAVPKAGTGAGTRHSAQPQIVAGSQGETLPGARDKSMSTSEAEATAEDEAYAKPEAEAMPTSESEGGSGTQACRKTQPNIHDYYWNGIGVEDWIAAERWIKFRFQTMDGDWENSVSWADDENEASIGSWSGASDKAGIIRSWAVACDETSVKSWAGARAENVVGIGTWARAGEQASGGLWAGGQTSEGTWAGDKASGGAWTGAENQASGGSWALAGNQAIGELWAAGQASDGSWPGGQASGVSWVGEEAIGGSWTGAENQASEGSWAGAGAGNMSSVSYWAGVVDQAGGGSWAGTSDQSGGGSKPRFEDQASGEGSWAGAGGQASGGSMLGPEDQSSGRSWADTADQASGGSRLGHVDQSSGGAWAGTLDQSGGGSKPRFENQTTEEGSWAGAGGQAGGGSKVGPEDQSSGRSWANSGDQISGGFLVGIVDQANGGSWTGAGHPASVGPKPIFEDQVSGRGSWADAREQVVGDSRLGLRDQSSGDSWAGTGDQASGWFCVCPGSQTNGGSWGGASGQDVGGSRPGPTNQSSAGSWDSPGSQVSGSCWTGAGAVDQAGGCSKPGFEDQAIGGGFWPGAGDQTGGGSRPGSEDQSSGIGSWGVAGGQVLGGARPGPADQSSGGSWAGTGNQSSGRSWIGPGDQAVDCSKPEFEDQACGGGSWAGAGSQASGESWAGSRPGNEAIGGSRMGSEDQATGGSWARSEDQASGRFQVSFEVEANEGFWFGPGAEAVIGSWCWTEEKADIVSRPDDKDEATTASRSGAGEEAMICSRIEAENKASSGSWIRSEEVAYMGSCVGAEAGAGAEAGAGAEAGAGAGAEAGAEAGAGAGAGPGTESGAGIWSWDGDATTVESRLGAGEEAGVESWTLARNVGEDELSRESSPDIEEISLRSLFWAESENSNTFRSKSGKDASFESGAGDNTSIKDKFEAAGGVDIGSWFCAGNENTSEDKSAPKAKAKKSSESRGIYPYMVPGAGMGSWDGAMIWSETKFAHQSEASFPVEDESRKQTRTGEKTRPWSCRCKHEANMDPRDLEKLICMIEMTEDPSVHEIANNALYNSADYSYSHEVVRNVGGISVIESLLNNPYPSVRQKALNALNNISVAAENHRKVKTYLNQVCEDTVTYPLNSNVQLAGLRLIRHLTITSEYQHMVTNYISEFLRLLTVGSGETKDHVLGMLLNFSKNPSMTKDLLIANAPTSLINIFSKKETKENILNALSLFENINYHFKRRAKAFTQDKFSKNSLYFLFQRPKACAKKLRALAAECNDPEVKERVELLISKL

SEQ ID NO: 6406 - protein, 51 aa, Homo sapiens
  Payload ID: 1383;
  Gene Symbol: ARMCX4;
  Gene Name: armadillo repeat containing, X-linked 4;
  ENSP ID: ENSP00000422573
MSAAGLKITGSKETKRRLLLISIDWVYCQEKQEERRELPRIITGVDPKSIP

SEQ ID NO: 6407 - protein, 348 aa, Homo sapiens
  Payload ID: 1383;
  Gene Symbol: ARMCX4;
  Gene Name: armadillo repeat containing, X-linked 4;
  Uniprot ID:  Q5H9R4;
  ENSP ID: ENSP00000423440
MSAAGLKITGSKETKRRLLLISIDWVYCQEKQEERRELPRIITGPPPEAAVVAFEWLKTSTLTGLHPQLPLSLPQPECALPYLVRAFSRGDYMGRIQEVGWVTAGLVIWAGTCYYIYKFTKGRAQSVRTLARNGSTVKMETVVGVQSQTLAINEAEIKTKPQVEIGAETGARSGPRAEVETKATAIAIHRANSQAKAMVGAEPETQSESKVVAGTLVMTEAVTLTEVKAKAREVAMKEAVTQTDAEAGKIVKKEAVTQTKAKAWALVAKTEAKREAMTQTKAETHILAEKETEINRVMVTQSETLAVPREVAKMGATNKTGIVDETKTRALEETVLIPRAFPSKNASC

SEQ ID NO: 6408 - protein, 348 aa, Homo sapiens; identical to SEQ ID NO: 6407
  Payload ID: 1383;
  Gene Symbol: ARMCX4;
  Gene Name: armadillo repeat containing, X-linked 4;
  Uniprot ID:  Q5H9R4;
  ENSP ID: ENSP00000423927

SEQ ID NO: 6409 - protein, 360 aa, Homo sapiens
  Payload ID: 1383;
  Gene Symbol: ARMCX4;
  Gene Name: armadillo repeat containing, X-linked 4;
  Uniprot ID:  Q5H9R4;
  ENSP ID: ENSP00000424452
MSAAGLKITGSKETKRRLLLISIDWSRDLMNLCIYFRVYCQEKQEERRELPRIITGPPPEAAVVAFEWLKTSTLTGLHPQLPLSLPQPECALPYLVRAFSRGDYMGRIQEVGWVTAGLVIWAGTCYYIYKFTKGRAQSVRTLARNGSTVKMETVVGVQSQTLAINEAEIKTKPQVEIGAETGARSGPRAEVETKATAIAIHRANSQAKAMVGAEPETQSESKVVAGTLVMTEAVTLTEVKAKAREVAMKEAVTQTDAEAGKIVKKEAVTQTKAKAWALVAKTEAKREAMTQTKAETHILAEKETEINRVMVTQSETLAVPREVAKMGATNKTGIVDETKTRALEETVLIPRAFPSKNASC

SEQ ID NO: 6410 - protein, 360 aa, Homo sapiens; identical to SEQ ID NO: 6409
  Payload ID: 1383;
  Gene Symbol: ARMCX4;
  Gene Name: armadillo repeat containing, X-linked 4;
  Uniprot ID:  Q5H9R4;
  ENSP ID: ENSP00000425302

SEQ ID NO: 6411 - protein, 51 aa, Homo sapiens; identical to SEQ ID NO: 6406
  Payload ID: 1383;
  Gene Symbol: ARMCX4;
  Gene Name: armadillo repeat containing, X-linked 4;
  ENSP ID: ENSP00000426585

SEQ ID NO: 6412 - protein, 558 aa, Homo sapiens
  Payload ID: 1384;
  Gene Symbol: ARMCX5;
  Gene Name: armadillo repeat containing, X-linked 5;
  Uniprot ID:  Q6P1M9;
  ENSP ID: ENSP00000246174
MVDSGTEARARGKAEAGLQDGISGPATARVNGKTQAEAVAEAELKTESVTQAKAGDGAMTRTHTVTYREAMAVTREVIKVEDTTKTRVMVETKTKPLAERSIVPQTKSKAMPMSRVSTVTKSEVKVVAVIEANIRSYAKSHDKANTGSRPDRREETSIGMKSSDEDEENICSWFWTGEEPSVGSWFWPEEETSLQVYKPLPKIQEKPKPTHKPTLTIKQKVIAWSRARYIVLVPVEGGEQSLPPEGNWTLVETLIETPLGIRPLTKIPPYHGPYYQTLAEIKKQIRQREKYGPNPKACHCKSRGFSLEPKEFDKLVALLKLTKDPFIHEIATMIMGISPAYPFTQDIIHDVGITVMIENLVNNPNVKEHPGALSMVDDSSESSEEPKSGESYIHQVCKGIISCPLNSPVQLAGLKLLGHLSIKFEDHYVITSYIPDFLTLLNKGSVKTKFYVLKVFSCLSKNHANTRELISAKVLSSLVAPFNKNESKANILNIIEIFENINFQFKTKAKLFTKEKFTKSELISIFQEAKQFGQKLQDLAEHSDPEVRDKVIRLILKL

SEQ ID NO: 6413 - protein, 558 aa, Homo sapiens; identical to SEQ ID NO: 6412
  Payload ID: 1384;
  Gene Symbol: ARMCX5;
  Gene Name: armadillo repeat containing, X-linked 5;
  Uniprot ID:  Q6P1M9;
  ENSP ID: ENSP00000361827

SEQ ID NO: 6414 - protein, 7 aa, Homo sapiens
  Payload ID: 1384;
  Gene Symbol: ARMCX5;
  Gene Name: armadillo repeat containing, X-linked 5;
  ENSP ID: ENSP00000473737
MVDSGTE

SEQ ID NO: 6415 - protein, 68 aa, Homo sapiens
  Payload ID: 1384;
  Gene Symbol: ARMCX5;
  Gene Name: armadillo repeat containing, X-linked 5;
  ENSP ID: ENSP00000474470
MVDSGTEARARGKAEAGLQDGISGPATARVNGKTQAEAVAEAELKTESVTQAKAGDGAMTRTHTVTYR

SEQ ID NO: 6416 - protein, 71 aa, Homo sapiens
  Payload ID: 1384;
  Gene Symbol: ARMCX5;
  Gene Name: armadillo repeat containing, X-linked 5;
  ENSP ID: ENSP00000474484
MVDSGTEARARGKAEAGLQDGISGPATARVNGKTQAEAVAEAELKTESVTQAKAGDGAMTRTHTVTYREAM

SEQ ID NO: 6417 - protein, 558 aa, Homo sapiens; identical to SEQ ID NO: 6412
  Payload ID: 1384;
  Gene Symbol: ARMCX5;
  Gene Name: armadillo repeat containing, X-linked 5;
  Uniprot ID:  Q6P1M9;
  ENSP ID: ENSP00000474720

SEQ ID NO: 6418 - protein, 300 aa, Homo sapiens
  Payload ID: 1385;
  Gene Symbol: ARMCX6;
  Gene Name: armadillo repeat containing, X-linked 6;
  Uniprot ID:  Q7L4S7;
  ENSP ID: ENSP00000354708
MGRAREVGWMAAGLMIGAGACYCVYKLTIGRDDSEKLEEEGEEEWDDDQELDEEEPDIWFDFETMARPWTEDGDWTEPGAPGGTEDRPSGGGKANRAHPIKQRPFPYEHKNTWSAQNCKNGSCVLDLSKCLFIQGKLLFAEPKDAGFPFSQDINSHLASLSMARNTSPTPDPTVREALCAPDNLNASIESQGQIKMYINEVCRETVSRCCNSFLQQAGLNLLISMTVINNMLAKSASDLKFPLISEGSGCAKVQVLKPLMGLSEKPVLAGELVGAQMLFSFMSLFIRNGNREILLETPAP

SEQ ID NO: 6419 - protein, 300 aa, Homo sapiens; identical to SEQ ID NO: 6418
  Payload ID: 1385;
  Gene Symbol: ARMCX6;
  Gene Name: armadillo repeat containing, X-linked 6;
  Uniprot ID:  Q7L4S7;
  ENSP ID: ENSP00000440648

SEQ ID NO: 6420 - protein, 300 aa, Homo sapiens; identical to SEQ ID NO: 6418
  Payload ID: 1385;
  Gene Symbol: ARMCX6;
  Gene Name: armadillo repeat containing, X-linked 6;
  Uniprot ID:  Q7L4S7;
  ENSP ID: ENSP00000444537

SEQ ID NO: 6421 - protein, 962 aa, Homo sapiens
  Payload ID: 1386;
  Gene Symbol: ARVCF;
  Gene Name: armadillo repeat gene deleted in velocardiofacial syndrome;
  Uniprot ID:  O00192;
  ENSP ID: ENSP00000263207
MEDCNVHSAASILASVKEQEARFERLTRALEQERRHVALQLERAQQPGMVSGGMGSGQPLPMAWQQLVLQEQSPGSQASLATMPEAPDVLEETVTVEEDPGTPTSHVSIVTSEDGTTRRTETKVTKTVKTVTTRTVRQVPVGPDGLPLLDGGPPLGPFADGALDRHFLLRGGGPVATLSRAYLSSGGGFPEGPEPRDSPSYGSLSRGLGMRPPRAGPLGPGPGDGCFTLPGHREAFPVGPEPGPPGGRSLPERFQAEPYGLEDDTRSLAADDEGGPELEPDYGTATRRRPECGRGLHTRAYEDTADDGGELADERPAFPMVTAPLAQPERGSMGSLDRLVRRSPSVDSARKEPRWRDPELPEVLAMLRHPVDPVKANAAAYLQHLCFENEGVKRRVRQLRGLPLLVALLDHPRAEVRRRACGALRNLSYGRDTDNKAAIRDCGGVPALVRLLRAARDNEVRELVTGTLWNLSSYEPLKMVIIDHGLQTLTHEVIVPHSGWEREPNEDSKPRDAEWTTVFKNTSGCLRNVSSDGAEARRRLRECEGLVDALLHALQSAVGRKDTDNKSVENCVCIMRNLSYHVHKEVPGADRYQEAEPGPLGSAVGSQRRRRDDASCFGGKKAKEEWFHQGKKDGEMDRNFDTLDLPKRTEAAKGFELLYQPEVVRLYLSLLTESRNFNTLEAAAGALQNLSAGNWMWATYIRATVRKERGLPVLVELLQSETDKVVRAVAIALRNLSLDRRNKDLIGSYAMAELVRNVRNAQAPPRPGACLEEDTVVAVLNTIHEIVSDSLDNARSLLQARGVPALVALVASSQSVREAKAASHVLQTVWSYKELRGTLQKDGWTKARFQSAAATAKGPKGALSPGGFDDSTLPLVDKSLEGEKTGSRDVIPMDALGPDGYSTVDRRERRPRGASSAGEASEKEPLKLDPSRKAPPPGPSRPAVRLVDAVGDAKPQPVDSWV

SEQ ID NO: 6422 - protein, 899 aa, Homo sapiens
  Payload ID: 1386;
  Gene Symbol: ARVCF;
  Gene Name: armadillo repeat gene deleted in velocardiofacial syndrome;
  Uniprot ID:  O00192;
  ENSP ID: ENSP00000384341
MPAELRQEQSPGSQASLATMPEAPDVLEETVTVEEDPGTPTSHVSIVTSEDGTTRRTETKVTKTVKTVTTRTVRQVPVGPDGLPLLDGGPPLGPFADGALDRHFLLRGGGPVATLSRAYLSSGGGFPEGPEPRDSPSYGSLSRGLGMRPPRAGPLGPGPGDGCFTLPGHREAFPVGPEPGPPGGRSLPERFQAEPYGLEDDTRSLAADDEGGPELEPDYGTATRRRPECGRGLHTRAYEDTADDGGELADERPAFPMVTAPLAQPERGSMGSLDRLVRRSPSVDSARKEPRWRDPELPEVLAMLRHPVDPVKANAAAYLQHLCFENEGVKRRVRQLRGLPLLVALLDHPRAEVRRRACGALRNLSYGRDTDNKAAIRDCGGVPALVRLLRAARDNEVRELVTGTLWNLSSYEPLKMVIIDHGLQTLTHEVIVPHSGWEREPNEDSKPRDAEWTTVFKNTSGCLRNVSSDGAEARRRLRECEGLVDALLHALQSAVGRKDTDNKSVENCVCIMRNLSYHVHKEVPGADRYQEAEPGPLGSAVGSQRRRRDDASCFGGKKAKEEWFHQGKKDGEMDRNFDTLDLPKRTEAAKGFELLYQPEVVRLYLSLLTESRNFNTLEAAAGALQNLSAGNWMWATYIRATVRKERGLPVLVELLQSETDKVVRAVAIALRNLSLDRRNKDLIGSYAMAELVRNVRNAQAPPRPGACLEEDTVVAVLNTIHEIVSDSLDNARSLLQARGVPALVALVASSQSVREAKAASHVLQTVWSYKELRGTLQKDGWTKARFQSAAATAKGPKGALSPGGFDDSTLPLVDKSLEGEKTGSRDVIPMDALGPDGYSTVDRRERRPRGASSAGEASEKEPLKLDPSRKAPPPGPSRPAVRLVDAVGDAKPQPVDSWV

SEQ ID NO: 6423 - protein, 893 aa, Homo sapiens
  Payload ID: 1386;
  Gene Symbol: ARVCF;
  Gene Name: armadillo repeat gene deleted in velocardiofacial syndrome;
  ENSP ID: ENSP00000384732
MPAELRQEQSPGSQASLATMPEAPDVLEETVTVEEDPGTPTSHVSIVTSEDGTTRRTETKVTKTVKTVTTRTVRQVPVGPDGLPLLDGGPPLGPFADGALDRHFLLRGGGPVATLSRAYLSSGGGFPEGPEPRDSPSYGSLSRGLGMRPPRAGPLGPGPGDGCFTLPGHREAFPVGPEPGPPGGRSLPERFQAEPYGLEDDTRSLAADDEGGPELEPDYGTATRRRPECGRGLHTRAYEDTADDGGELADERPAFPMVTAPLAQPERGSMGSLDRLVRRSPSVDSARKEPRWRDPELPEVLAMLRHPVDPVKANAAAYLQHLCFENEGVKRRVRQLRGLPLLVALLDHPRAEVRRRACGALRNLSYGRDTDNKAAIRDCGGVPALVRLLRAARDNEVRELVTGTLWNLSSYEPLKMVIIDHGLQTLTHEVIVPHSGWEREPNEDSKPRDAEWTTVFKNTSGCLRNVSSDGAEARRRLRECEGLVDALLHALQSAVGRKDTDNKSVENCVCIMRNLSYHVHKEVPGADRYQEAEPGPLGSAVGSQRRRRDDASCFGGKKAKGKKDGEMDRNFDTLDLPKRTEAAKGFELLYQPEVVRLYLSLLTESRNFNTLEAAAGALQNLSAGNWMWATYIRATVRKERGLPVLVELLQSETDKVVRAVAIALRNLSLDRRNKDLIGSYAMAELVRNVRNAQAPPRPGACLEEDTVVAVLNTIHEIVSDSLDNARSLLQARGVPALVALVASSQSVREAKAASHVLQTVWSYKELRGTLQKDGWTKARFQSAAATAKGPKGALSPGGFDDSTLPLVDKSLEGEKTGSRDVIPMDALGPDGYSTVDRRERRPRGASSAGEASEKEPLKLDPSRKAPPPGPSRPAVRLVDAVGDAKPQPVDSWV

SEQ ID NO: 6424 - protein, 956 aa, Homo sapiens
  Payload ID: 1386;
  Gene Symbol: ARVCF;
  Gene Name: armadillo repeat gene deleted in velocardiofacial syndrome;
  ENSP ID: ENSP00000385444
MEDCNVHSAASILASVKEQEARFERLTRALEQERRHVALQLERAQQPGMVSGGMGSGQPLPMAWQQLVLQEQSPGSQASLATMPEAPDVLEETVTVEEDPGTPTSHVSIVTSEDGTTRRTETKVTKTVKTVTTRTVRQVPVGPDGLPLLDGGPPLGPFADGALDRHFLLRGGGPVATLSRAYLSSGGGFPEGPEPRDSPSYGSLSRGLGMRPPRAGPLGPGPGDGCFTLPGHREAFPVGPEPGPPGGRSLPERFQAEPYGLEDDTRSLAADDEGGPELEPDYGTATRRRPECGRGLHTRAYEDTADDGGELADERPAFPMVTAPLAQPERGSMGSLDRLVRRSPSVDSARKEPRWRDPELPEVLAMLRHPVDPVKANAAAYLQHLCFENEGVKRRVRQLRGLPLLVALLDHPRAEVRRRACGALRNLSYGRDTDNKAAIRDCGGVPALVRLLRAARDNEVRELVTGTLWNLSSYEPLKMVIIDHGLQTLTHEVIVPHSGWEREPNEDSKPRDAEWTTVFKNTSGCLRNVSSDGAEARRRLRECEGLVDALLHALQSAVGRKDTDNKSVENCVCIMRNLSYHVHKEVPGADRYQEAEPGPLGSAVGSQRRRRDDASCFGGKKAKGKKDGEMDRNFDTLDLPKRTEAAKGFELLYQPEVVRLYLSLLTESRNFNTLEAAAGALQNLSAGNWMWATYIRATVRKERGLPVLVELLQSETDKVVRAVAIALRNLSLDRRNKDLIGSYAMAELVRNVRNAQAPPRPGACLEEDTVVAVLNTIHEIVSDSLDNARSLLQARGVPALVALVASSQSVREAKAASHVLQTVWSYKELRGTLQKDGWTKARFQSAAATAKGPKGALSPGGFDDSTLPLVDKSLEGEKTGSRDVIPMDALGPDGYSTVDRRERRPRGASSAGEASEKEPLKLDPSRKAPPPGPSRPAVRLVDAVGDAKPQPVDSWV

SEQ ID NO: 6425 - protein, 376 aa, Homo sapiens
  Payload ID: 1387;
  Gene Symbol: ACTR1A;
  Gene Name: ARP1 actin-related prt 1 homolog A, centractin alpha (yeast);
  Uniprot ID:  P61163;
  ENSP ID: ENSP00000358921
MESYDVIANQPVVIDNGSGVIKAGFAGDQIPKYCFPNYVGRPKHVRVMAGALEGDIFIGPKAEEHRGLLSIRYPMEHGIVKDWNDMERIWQYVYSKDQLQTFSEEHPVLLTEAPLNPRKNRERAAEVFFETFNVPALFISMQAVLSLYATGRTTGVVLDSGDGVTHAVPIYEGFAMPHSIMRIDIAGRDVSRFLRLYLRKEGYDFHSSSEFEIVKAIKERACYLSINPQKDETLETEKAQYYLPDGSTIEIGPSRFRAPELLFRPDLIGEESEGIHEVLVFAIQKSDMDLRRTLFSNIVLSGGSTLFKGFGDRLLSEVKKLAPKDVKIRISAPQERLYSTWIGGSILASLDTFKKMWVSKKEYEEDGARSIHRKTF

SEQ ID NO: 6426 - protein, 332 aa, Homo sapiens
  Payload ID: 1387;
  Gene Symbol: ACTR1A;
  Gene Name: ARP1 actin-related prt 1 homolog A, centractin alpha (yeast);
  ENSP ID: ENSP00000473334
MESYDVIANQPVVIDNGSGVIKAGFAGDQIPKYCFPNYVGRPKHVRVMAGALEGDIFIGPKAEEHRGLLSIRYPMEHGIVKDWNDMERIWQYVYSKDQLQTFSEEHPVLLTEAPLNPRKNRERAAEVFFETFNVPALFISMQAVLSLYATGRTTGVVLDSGDGVTHAVPIYEGFAMPHSIMRIDIAGRDVSRFLRLYLRKEGYDFHSSSEFEIVKAIKERACYLSINPQKDETLETEKAQYYLPDGSTIEIGPSRFRAPELLFRPDLIGEESEGIHEVLVFAIQKSDMDLRRTLFSNIVLSGGSTLFKDICTSGETVFHVDWGLHPCLPGHL

SEQ ID NO: 6427 - protein, 376 aa, Homo sapiens
  Payload ID: 1388;
  Gene Symbol: ACTR1B;
  Gene Name: ARP1 actin-related prt 1 homolog B, centractin beta (yeast);
  Uniprot ID:  P42025;
  ENSP ID: ENSP00000289228
MESYDIIANQPVVIDNGSGVIKAGFAGDQIPKYCFPNYVGRPKHMRVMAGALEGDLFIGPKAEEHRGLLTIRYPMEHGVVRDWNDMERIWQYVYSKDQLQTFSEEHPVLLTEAPLNPSKNREKAAEVFFETFNVPALFISMQAVLSLYATGRTTGVVLDSGDGVTHAVPIYEGFAMPHSIMRVDIAGRDVSRYLRLLLRKEGVDFHTSAEFEVVRTIKERACYLSINPQKDEALETEKVQYTLPDGSTLDVGPARFRAPELLFQPDLVGDESEGLHEVVAFAIHKSDMDLRRTLFANIVLSGGSTLFKGFGDRLLSEVKKLAPKDIKIKISAPQERLYSTWIGGSILASLDTFKKMWVSKKEYEEDGSRAIHRKTF

SEQ ID NO: 6428 - protein, 394 aa, Homo sapiens
  Payload ID: 1389;
  Gene Symbol: ACTR2;
  Gene Name: ARP2 actin-related prt 2 homolog (yeast);
  Uniprot ID:  P61160;
  ENSP ID: ENSP00000260641
MDSQGRKVVVCDNGTGFVKCGYAGSNFPEHIFPALVGRPIIRSTTKVGNIEIKDLMVGDEASELRSMLEVNYPMENGIVRNWDDMKHLWDYTFGPEKLNIDTRNCKILLTEPPMNPTKNREKIVEVMFETYQFSGVYVAIQAVLTLYAQGLLTGVVVDSGDGVTHICPVYEGFSLPHLTRRLDIAGRDITRYLIKLLLLRGYAFNHSADFETVRMIKEKLCYVGYNIEQEQKLALETTVLVESYTLPDGRIIKVGGERFEAPEALFQPHLINVEGVGVAELLFNTIQAADIDTRSEFYKHIVLSGGSTMYPGLPSRLERELKQLYLERVLKGDVEKLSKFKIRIEDPPRRKHMVFLGGAVLADIMKDKDNFWMTRQEYQEKGVRVLEKLGVTVR

SEQ ID NO: 6429 - protein, 399 aa, Homo sapiens
  Payload ID: 1389;
  Gene Symbol: ACTR2;
  Gene Name: ARP2 actin-related prt 2 homolog (yeast);
  Uniprot ID:  P61160;
  ENSP ID: ENSP00000367220
MDSQGRKVVVCDNGTGFVKCGYAGSNFPEHIFPALVGRPIIRSTTKVGNIEIKNNKKMDLMVGDEASELRSMLEVNYPMENGIVRNWDDMKHLWDYTFGPEKLNIDTRNCKILLTEPPMNPTKNREKIVEVMFETYQFSGVYVAIQAVLTLYAQGLLTGVVVDSGDGVTHICPVYEGFSLPHLTRRLDIAGRDITRYLIKLLLLRGYAFNHSADFETVRMIKEKLCYVGYNIEQEQKLALETTVLVESYTLPDGRIIKVGGERFEAPEALFQPHLINVEGVGVAELLFNTIQAADIDTRSEFYKHIVLSGGSTMYPGLPSRLERELKQLYLERVLKGDVEKLSKFKIRIEDPPRRKHMVFLGGAVLADIMKDKDNFWMTRQEYQEKGVRVLEKLGVTVR

SEQ ID NO: 6430 - protein, 339 aa, Homo sapiens
  Payload ID: 1389;
  Gene Symbol: ACTR2;
  Gene Name: ARP2 actin-related prt 2 homolog (yeast);
  ENSP ID: ENSP00000437383
MVGDEASELRSMLEVNYPMENGIVRNWDDMKHLWDYTFGPEKLNIDTRNCKILLTEPPMNPTKNREKIVEVMFETYQFSGVYVAIQAVLTLYAQGLLTGVVVDSGDGVTHICPVYEGFSLPHLTRRLDIAGRDITRYLIKLLLLRGYAFNHSADFETVRMIKEKLCYVGYNIEQEQKLALETTVLVESYTLPDGRIIKVGGERFEAPEALFQPHLINVEGVGVAELLFNTIQAADIDTRSEFYKHIVLSGGSTMYPGLPSRLERELKQLYLERVLKGDVEKLSKFKIRIEDPPRRKHMVFLGGAVLADIMKDKDNFWMTRQEYQEKGVRVLEKLGVTVR

SEQ ID NO: 6431 - protein, 418 aa, Homo sapiens
  Payload ID: 1390;
  Gene Symbol: ACTR3;
  Gene Name: ARP3 actin-related prt 3 homolog (yeast);
  Uniprot ID:  P61158;
  ENSP ID: ENSP00000263238
MAGRLPACVVDCGTGYTKLGYAGNTEPQFIIPSCIAIKESAKVGDQAQRRVMKGVDDLDFFIGDEAIEKPTYATKWPIRHGIVEDWDLMERFMEQVIFKYLRAEPEDHYFLLTEPPLNTPENREYTAEIMFESFNVPGLYIAVQAVLALAASWTSRQVGERTLTGTVIDSGDGVTHVIPVAEGYVIGSCIKHIPIAGRDITYFIQQLLRDREVGIPPEQSLETAKAVKERYSYVCPDLVKEFNKYDTDGSKWIKQYTGINAISKKEFSIDVGYERFLGPEIFFHPEFANPDFTQPISEVVDEVIQNCPIDVRRPLYKNIVLSGGSTMFRDFGRRLQRDLKRTVDARLKLSEELSGGRLKPKPIDVQVITHHMQRYAVWFGGSMLASTPEFYQVCHTKKDYEEIGPSICRHNPVFGVMS

SEQ ID NO: 6432 - protein, 41 aa, Homo sapiens
  Payload ID: 1390;
  Gene Symbol: ACTR3;
  Gene Name: ARP3 actin-related prt 3 homolog (yeast);
  ENSP ID: ENSP00000394213
MAGRLPACVVDCGTGYTKLGYAGNTEPQFIIPSLANPPWYS

SEQ ID NO: 6433 - protein, 84 aa, Homo sapiens
  Payload ID: 1390;
  Gene Symbol: ACTR3;
  Gene Name: ARP3 actin-related prt 3 homolog (yeast);
  ENSP ID: ENSP00000403125
MKGVDDLDFFIGDEAIEKPTYATKWPIRHGIVEDWDLMERFMEQVIFKYLRAEPEDHYFLLTEPPLNTPENREYTAEIMFESFN

SEQ ID NO: 6434 - protein, 34 aa, Homo sapiens
  Payload ID: 1390;
  Gene Symbol: ACTR3;
  Gene Name: ARP3 actin-related prt 3 homolog (yeast);
  ENSP ID: ENSP00000407912
MAGRLPACVVDCGTGYTKLGYAGNTEPQFIIPSY

SEQ ID NO: 6435 - protein, 367 aa, Homo sapiens
  Payload ID: 1390;
  Gene Symbol: ACTR3;
  Gene Name: ARP3 actin-related prt 3 homolog (yeast);
  ENSP ID: ENSP00000444987
MKGVDDLDFFIGDEAIEKPTYATKWPIRHGIVEDWDLMERFMEQVIFKYLRAEPEDHYFLLTEPPLNTPENREYTAEIMFESFNVPGLYIAVQAVLALAASWTSRQVGERTLTGTVIDSGDGVTHVIPVAEGYVIGSCIKHIPIAGRDITYFIQQLLRDREVGIPPEQSLETAKAVKERYSYVCPDLVKEFNKYDTDGSKWIKQYTGINAISKKEFSIDVGYERFLGPEIFFHPEFANPDFTQPISEVVDEVIQNCPIDVRRPLYKNIVLSGGSTMFRDFGRRLQRDLKRTVDARLKLSEELSGGRLKPKPIDVQVITHHMQRYAVWFGGSMLASTPEFYQVCHTKKDYEEIGPSICRHNPVFGVMS

SEQ ID NO: 6436 - protein, 418 aa, Homo sapiens
  Payload ID: 1391;
  Gene Symbol: ACTR3B;
  Gene Name: ARP3 actin-related prt 3 homolog B (yeast);
  Uniprot ID:  Q9P1U1;
  ENSP ID: ENSP00000256001
MAGSLPPCVVDCGTGYTKLGYAGNTEPQFIIPSCIAIRESAKVVDQAQRRVLRGVDDLDFFIGDEAIDKPTYATKWPIRHGIIEDWDLMERFMEQVVFKYLRAEPEDHYFLMTEPPLNTPENREYLAEIMFESFNVPGLYIAVQAVLALAASWTSRQVGERTLTGIVIDSGDGVTHVIPVAEGYVIGSCIKHIPIAGRDITYFIQQLLREREVGIPPEQSLETAKAIKEKYCYICPDIVKEFAKYDVDPRKWIKQYTGINAINQKKFVIDVGYERFLGPEIFFHPEFANPDFMESISDVVDEVIQNCPIDVRRPLYKNVVLSGGSTMFRDFGRRLQRDLKRVVDARLRLSEELSGGRIKPKPVEVQVVTHHMQRYAVWFGGSMLASTPEFFQVCHTKKDYEEYGPSICRHNPVFGVMS

SEQ ID NO: 6437 - protein, 348 aa, Homo sapiens
  Payload ID: 1391;
  Gene Symbol: ACTR3B;
  Gene Name: ARP3 actin-related prt 3 homolog B (yeast);
  Uniprot ID:  Q9P1U1;
  ENSP ID: ENSP00000367007
MAGSLPPCVVDCGTGYTKLGYAGNTEPQFIIPSCIAIRESAKVVDQAQRRVLRGVDDLDFFIGDEAIDKPTYATKWPIRHGIIEDWDLMERFMEQVVFKYLRAEPEDHYFLMTEPPLNTPENREYLAEIMFESFNVPGLYIAVQAVLALAASWTSRQVGERTLTGIVIDSGDGVTHVIPVAEGYVIGSCIKHIPIAGRDITYFIQQLLREREVGIPPEQSLETAKAIKEKYCYICPDIVKEFAKYDVDPRKWIKQYTGINAINQKKFVIDVGYERFLGPEIFFHPEFANPDFMESISDVVDEVIQNCPIDVRRPLYKPEFFQVCHTKKDYEEYGPSICRHNPVFGVMS

SEQ ID NO: 6438 - protein, 330 aa, Homo sapiens
  Payload ID: 1391;
  Gene Symbol: ACTR3B;
  Gene Name: ARP3 actin-related prt 3 homolog B (yeast);
  Uniprot ID:  Q9P1U1;
  ENSP ID: ENSP00000380452
MERFMEQVVFKYLRAEPEDHYFLMTEPPLNTPENREYLAEIMFESFNVPGLYIAVQAVLALAASWTSRQVGERTLTGIVIDSGDGVTHVIPVAEGYVIGSCIKHIPIAGRDITYFIQQLLREREVGIPPEQSLETAKAIKEKYCYICPDIVKEFAKYDVDPRKWIKQYTGINAINQKKFVIDVGYERFLGPEIFFHPEFANPDFMESISDVVDEVIQNCPIDVRRPLYKNVVLSGGSTMFRDFGRRLQRDLKRVVDARLRLSEELSGGRIKPKPVEVQVVTHHMQRYAVWFGGSMLASTPEFFQVCHTKKDYEEYGPSICRHNPVFGVMS

SEQ ID NO: 6439 - protein, 210 aa, Homo sapiens
  Payload ID: 1392;
  Gene Symbol: ACTR3C;
  Gene Name: ARP3 actin-related prt 3 homolog C (yeast);
  Uniprot ID:  Q9C0K3;
  ENSP ID: ENSP00000252071
MFESFNVPGLYIAVQAVLALAASWTSRQVGERTLTGIVIDSGDGVTHVIPVAEGYVIGSCIKHIPIAGRDITYFIQQLLREREVGIPPEQSLETAKAIKEKYCYICPDIVKEFAKYDVDPQKWIKQYTGINAINQKKFVIDVGYERFLGPEIFFHPEFANPDSMESISDVVDEVIQNCPIDVRRPLYKMEQIPLSYPQGHGFHPLSPPFH

SEQ ID NO: 6440 - protein, 208 aa, Homo sapiens
  Payload ID: 1392;
  Gene Symbol: ACTR3C;
  Gene Name: ARP3 actin-related prt 3 homolog C (yeast);
  ENSP ID: ENSP00000417426
SPRLPEGWSRQPAEPLAKLGSPAQLRTAEPAPPRQTEPPLNTPENREYLAEGYVIGSCIKHIPIAGRDITYFIQQLLREREVGIPPEQSLETAKAIKEKYCYICPDIVKEFAKYDVDPQKWIKQYTGINAINQKKFVIDVGYERFLGPEIFFHPEFANPDSMESISDVVDEVIQNCPIDVRRPLYKMEQIPLSYPQGHGFHPLSPPFH

SEQ ID NO: 6441 - protein, 51 aa, Homo sapiens
  Payload ID: 1392;
  Gene Symbol: ACTR3C;
  Gene Name: ARP3 actin-related prt 3 homolog C (yeast);
  ENSP ID: ENSP00000417997
MFESFNVPGLYIAVQAVLALAASWTSRQVGERTLTGIVIDSGDGVTHVIPV

SEQ ID NO: 6442 - protein, 222 aa, Homo sapiens
  Payload ID: 1392;
  Gene Symbol: ACTR3C;
  Gene Name: ARP3 actin-related prt 3 homolog C (yeast);
  ENSP ID: ENSP00000418635
MGKGWLFRKILASPSVFRREGTAGPAGGPPGPARAPTAAPFPEPRRPSPRLPEGWSRQPAEPLAKLGSPAQLRTAEPAPPRQTEPPLNTPENREYLAEIMFESFNVPGLYIAVQAVLALAASWTSRQVGERTLTGIVIDSGDGVTHVIPVAEGYVIGSCIKHIPIAGRDITYFIQQLLREREVGIPPEQSLETAKAIKEKYCYICPDIVKEFAKYDVDPQKW

SEQ ID NO: 6443 - protein, 189 aa, Homo sapiens
  Payload ID: 1392;
  Gene Symbol: ACTR3C;
  Gene Name: ARP3 actin-related prt 3 homolog C (yeast);
  ENSP ID: ENSP00000440990
MFESFNVPGLYIAVQAVLALAASWTSRQVGERTLTGIVIDSGDGVTHVIPVAEGYVIGSCIKHIPIAGRDITYFIQQLLREREVGIPPEQSLETAKAIKEKYCYICPDIVKEFAKYDVDPQKWIKQYTGINAINQKKFVIDVGYERFLGPEIFFHPEFANPDSMESISDVVDEVIQNCPIDVRRPLYKV

SEQ ID NO: 6444 - protein, 24 aa, Homo sapiens
  Payload ID: 1392;
  Gene Symbol: ACTR3C;
  Gene Name: ARP3 actin-related prt 3 homolog C (yeast);
  ENSP ID: ENSP00000481447
FQMEQIPLSYPQGHGFHPLSPPFH

SEQ ID NO: 6445 - protein, 607 aa, Homo sapiens
  Payload ID: 1393;
  Gene Symbol: ACTR5;
  Gene Name: ARP5 actin-related prt 5 homolog (yeast);
  Uniprot ID:  Q9H9F9;
  ENSP ID: ENSP00000243903
MAANVFPFRDARAAPDPVLEAGPVAHGPLPVPLVLDNGSFQVRAGWACPGQDPGPEPRLQFRAVCARGRGGARGASGPQVGNALGSLEPLRWMLRSPFDRNVPVNLELQELLLDYSFQHLGVSSQGCVDHPIVLTEAVCNPLYSRQMMSELLFECYGIPKVAYGIDSLFSFYHNKPKNSMCSGLIISSGYQCTHVLPILEGRLDAKNCKRINLGGSQAAGYLQRLLQLKYPGHLAAITLSRMEEILHEHSYIAEDYVEELHKWRCPDYYENNVHKMQLPFSSKLLGSTLTSEEKQERRQQQLRRLQELNARRREEKLQLDQERLDRLLYVQELLEDGQMDQFHKALIELNMDSPEELQSYIQKLSIAVEQAKQKILQAEVNLEVDVVDSKPETPDLEQLEPSLEDVESMNDFDPLFSEETPGVEKPVTTVQPVFNLAAYHQLFVGTERIRAPEIIFQPSLIGEEQAGIAETLQYILDRYPKDIQEMLVQNVFLTGGNTMYPGMKARMEKELLEMRPFRSSFQVQLASNPVLDAWYGARDWALNHLDDNEVWITRKEYEEKGGEYLKEHCASNIYVPIRLPKQASRSSDAQASSKGSAAGGGGAGEQA

SEQ ID NO: 6446 - protein, 396 aa, Homo sapiens
  Payload ID: 1394;
  Gene Symbol: ACTR6;
  Gene Name: ARP6 actin-related prt 6 homolog (yeast);
  Uniprot ID:  Q9GZN1;
  ENSP ID: ENSP00000188312
MTTLVLDNGAYNAKIGYSHENVSVIPNCQFRSKTARLKTFTANQIDEIKDPSGLFYILPFQKGYLVNWDVQRQVWDYLFGKEMYQVDFLDTNIIITEPYFNFTSIQESMNEILFEEYQFQAVLRVNAGALSAHRYFRDNPSELCCIIVDSGYSFTHIVPYCRSKKKKEAIIRINVGGKLLTNHLKEIISYRQLHVMDETHVINQVKEDVCYVSQDFYRDMDIAKLKGEENTVMIDYVLPDFSTIKKGFCKPREEMVLSGKYKSGEQILRLANERFAVPEILFNPSDIGIQEMGIPEAIVYSIQNLPEEMQPHFFKNIVLTGGNSLFPGFRDRVYSEVRCLTPTDYDVSVVLPENPITYAWEGGKLISENDDFEDMVVTREDYEENGHSVCEEKFDI

SEQ ID NO: 6447 - protein, 376 aa, Homo sapiens
  Payload ID: 1394;
  Gene Symbol: ACTR6;
  Gene Name: ARP6 actin-related prt 6 homolog (yeast);
  ENSP ID: ENSP00000447237
MTTLVLDNGAYNAKIGYSHENVSVIPNCQFRSKTARLKTFTANQIDEIKDPSGLFYILPFQKGYLVNWDVQRQVWDYLFGKEMYQVDFLDTNIIITEPYFNFTSIQESMNEILFEEYQFQAVLRVNAGALSAHRYFRDNPSELCCIIVDSGYSFTHIVPYCRSKKKKEAIIRINVGGKLLTNHLKEIISYRQLHVMDETHVINQVKEDVCYVSQDFYRDMDIAKLKGEENTVMIDYVLPDFSTIKKGFCKPREEMVLSGKYKSGEQILRLANERFAVPEILFNPSDIGIQEMGIPEAIVYSIQNLPEGFRDRVYSEVRCLTPTDYDVSVVLPENPITYAWEGGKLISENDDFEDMVVTREDYEENGHSVCEEKFDI

SEQ ID NO: 6448 - protein, 144 aa, Homo sapiens
  Payload ID: 1394;
  Gene Symbol: ACTR6;
  Gene Name: ARP6 actin-related prt 6 homolog (yeast);
  ENSP ID: ENSP00000447565
MTTLVLDNGAYNAKIGYSHENVSVIPNCQFRSKTARLKTFTANQIDEIKDPSGLFYILPFQKGYLVNWDVQRQVWDYLFGKEMYQVDFLDTNIIITEPYFNFTSIQESMNEILFEEYQFQAVLRVNGSCSVAQARVWWHKHGSL

SEQ ID NO: 6449 - protein, 127 aa, Homo sapiens
  Payload ID: 1394;
  Gene Symbol: ACTR6;
  Gene Name: ARP6 actin-related prt 6 homolog (yeast);
  ENSP ID: ENSP00000447641
MTTLVLDNGAYNAKIGYSHENVSVIPNCQFRSKTARLKTFTANQIDEIKDPSGLFYILPFQKGYLVNWDVQRQVWDYLFGKEMYQVDFLDTNIIITEPYFNFTSIQESMNEILFEEYQFQAVLRVNG

SEQ ID NO: 6450 - protein, 294 aa, Homo sapiens
  Payload ID: 1394;
  Gene Symbol: ACTR6;
  Gene Name: ARP6 actin-related prt 6 homolog (yeast);
  ENSP ID: ENSP00000448356
MYQVDFLDTNIIITEPYFNFTSIQESMNEILFEEYQFQAVLRVNAGALSAHRYFRDNPSELCCIIVDSGYSFTHIVPYCRSKKKKEAIIRINVGGKLLTNHLKEIISYRQLHVMDETHVINQVKEDVCYVSQDFYRDMDIAKLKGEENTVMIDYVLPDFSTIKKGFCKPREEMVLSGKYKSGEQILRLANERFAVPEILFNPSDIGIQEMGIPEAIVYSIQNLPEGFRDRVYSEVRCLTPTDYDVSVVLPENPITYAWEGGKLISENDDFEDMVVTREDYEENGHSVCEEKFDI

SEQ ID NO: 6451 - protein, 88 aa, Homo sapiens
  Payload ID: 1394;
  Gene Symbol: ACTR6;
  Gene Name: ARP6 actin-related prt 6 homolog (yeast);
  ENSP ID: ENSP00000448447
MTTLVLDNGAYNAKIGYSHENVSVIPNCQFRSKTARLKTFTANQIDEIKDPSGLFYILPFQKGYLVNWDVQRQVWDYLFGKEMYQVTN

SEQ ID NO: 6452 - protein, 192 aa, Homo sapiens
  Payload ID: 1394;
  Gene Symbol: ACTR6;
  Gene Name: ARP6 actin-related prt 6 homolog (yeast);
  ENSP ID: ENSP00000448508
MYQGPSRVLKEAPGAEAYGYECLGGLHRTSTGCWGVIPNCQFRSKTARLKTFTANQIDEIKDPSGLFYILPFQKGYLVNWDVQRQVWDYLFGKEMYQVDFLDTNIIITEPYFNFTSIQESMNEILFEEYQFQAVLRVNAGALSAHRYFRDNPSELCCIIVDSGYSFTHIVPYCRSKKKKEAIIRINVGGKLL

SEQ ID NO: 6453 - protein, 314 aa, Homo sapiens
  Payload ID: 1394;
  Gene Symbol: ACTR6;
  Gene Name: ARP6 actin-related prt 6 homolog (yeast);
  ENSP ID: ENSP00000448669
MYQVDFLDTNIIITEPYFNFTSIQESMNEILFEEYQFQAVLRVNAGALSAHRYFRDNPSELCCIIVDSGYSFTHIVPYCRSKKKKEAIIRINVGGKLLTNHLKEIISYRQLHVMDETHVINQVKEDVCYVSQDFYRDMDIAKLKGEENTVMIDYVLPDFSTIKKGFCKPREEMVLSGKYKSGEQILRLANERFAVPEILFNPSDIGIQEMGIPEAIVYSIQNLPEEMQPHFFKNIVLTGGNSLFPGFRDRVYSEVRCLTPTDYDVSVVLPENPITYAWEGGKLISENDDFEDMVVTREDYEENGHSVCEEKFDI

SEQ ID NO: 6454 - protein, 88 aa, Homo sapiens; identical to SEQ ID NO: 6451
  Payload ID: 1394;
  Gene Symbol: ACTR6;
  Gene Name: ARP6 actin-related prt 6 homolog (yeast);
  ENSP ID: ENSP00000450330

SEQ ID NO: 6455 - protein, 624 aa, Homo sapiens
  Payload ID: 1395;
  Gene Symbol: ACTR8;
  Gene Name: ARP8 actin-related prt 8 homolog (yeast);
  Uniprot ID:  Q9H981;
  ENSP ID: ENSP00000336842
MTQAEKGDTENGKEKGGEKEKEQRGVKRPIVPALVPESLQEQIQSNFIIVIHPGSTTLRIGRATDTLPASIPHVIARRHKQQGQPLYKDSWLLREGLNKPESNEQRQNGLKMVDQAIWSKKMSNGTRRIPVSPEQARSYNKQMRPAILDHCSGNKWTNTSHHPEYLVGEEALYVNPLDCYNIHWPIRRGQLNIHPGPGGSLTAVLADIEVIWSHAIQKYLEIPLKDLKYYRCILLIPDIYNKQHVKELVNMILMKMGFSGIVVHQESVCATYGSGLSSTCIVDVGDQKTSVCCVEDGVSHRNTRLCLAYGGSDVSRCFYWLMQRAGFPYRECQLTNKMDCLLLQHLKETFCHLDQDISGLQDHEFQIRHPDSPALLYQFRLGDEKLQAPMALFYPATFGIVGQKMTTLQHRSQGDPEDPHDEHYLLATQSKQEQSAKATADRKSASKPIGFEGDLRGQSSDLPERLHSQEVDLGSAQGDGLMAGNDSEEALTALMSRKTAISLFEGKALGLDKAILHSIDCCSSDDTKKKMYSSILVVGGGLMFHKAQEFLQHRILNKMPPSFRRIIENVDVITRPKDMDPRLIAWKGGAVLACLDTTQELWIYQREWQRFGVRMLRERAAFVW

SEQ ID NO: 6456 - protein, 378 aa, Homo sapiens
  Payload ID: 1395;
  Gene Symbol: ACTR8;
  Gene Name: ARP8 actin-related prt 8 homolog (yeast);
  ENSP ID: ENSP00000417230
  MOD_RES (1)..(1): Any amino acid
XAVLADIEVIWSHAIQKYLEIPLKDLKYYRCILLIPDIYNKQHVKELVNMILMKMGFSGIVVHQESVCATYGSGLSSTCIVDVGDQKTSVCCVEDGVSHRNTRIFSWNQDISGLQDHEFQIRHPDSPALLYQFRLGDEKLQAPMALFYPATFGIVGQKMTTLQHRSQGDPEDPHDEHYLLATQSKQEQSAKATADRKSASKPIGFEGDLRGQSSDLPERLHSQEVDLGSAQGDGLMAGNDSEEALTALMSRKTAISLFEGKALGLDKAILHSIDCCSSDDTKKKMYSSILVVGGGLMFHKAQEFLQHRILNKMPPSFRRIIENVDVITRPKDMDPRLIAWKGGAVLACLDTTQELWIYQREWQRFGVRMLRERAAFVW

SEQ ID NO: 6457 - protein, 102 aa, Homo sapiens
  Payload ID: 1395;
  Gene Symbol: ACTR8;
  Gene Name: ARP8 actin-related prt 8 homolog (yeast);
  ENSP ID: ENSP00000417781
MVDQAIWSKKMSNGTRRIPVSPEQARSYNKQMRPAILDHCSGNKWTNTSHHPEYLVGEEALYVNPLDCYNIHWPIRRGQLNIHPGPGGSLTAVLADIEVIWS

SEQ ID NO: 6458 - protein, 513 aa, Homo sapiens
  Payload ID: 1395;
  Gene Symbol: ACTR8;
  Gene Name: ARP8 actin-related prt 8 homolog (yeast);
  Uniprot ID:  Q9H981;
  ENSP ID: ENSP00000419429
MVDQAIWSKKMSNGTRRIPVSPEQARSYNKQMRPAILDHCSGNKWTNTSHHPEYLVGEEALYVNPLDCYNIHWPIRRGQLNIHPGPGGSLTAVLADIEVIWSHAIQKYLEIPLKDLKYYRCILLIPDIYNKQHVKELVNMILMKMGFSGIVVHQESVCATYGSGLSSTCIVDVGDQKTSVCCVEDGVSHRNTRLCLAYGGSDVSRCFYWLMQRAGFPYRECQLTNKMDCLLLQHLKETFCHLDQDISGLQDHEFQIRHPDSPALLYQFRLGDEKLQAPMALFYPATFGIVGQKMTTLQHRSQGDPEDPHDEHYLLATQSKQEQSAKATADRKSASKPIGFEGDLRGQSSDLPERLHSQEVDLGSAQGDGLMAGNDSEEALTALMSRKTAISLFEGKALGLDKAILHSIDCCSSDDTKKKMYSSILVVGGGLMFHKAQEFLQHRILNKMPPSFRRIIENVDVITRPKDMDPRLIAWKGGAVLACLDTTQELWIYQREWQRFGVRMLRERAAFVW

SEQ ID NO: 6459 - protein, 625 aa, Homo sapiens
  Payload ID: 1396;
  Gene Symbol: ARPC4-TTLL3;
  Gene Name: ARPC4-TTLL3 readthrough;
  ENSP ID: ENSP00000380427
MTATLRPYLSAVRATLQAALCLENFSSQVVERHNKPEVEVRSSKELLLQPVTISRNEKEKVLIEGSINSVRVSIAVKQADEIEKILCHKFMRFMMMRAENFFILRRKPVEQKKIFTIQGCYPVIRCLLRRRGWVEKKMVHRSGPTLLPPQKDLDSSAMGDSDTTEDEDEDEDEEFQPSQLFDFDDLLKFDDLDGTHALMVGLCLNLRNLPWFDEVDANSFFPRCYCLGAEDDKKAFIGDKQPKKQEKNPVLVSPEFVDEALCACEEYLSNLAHMDIDKDLEAPLYLTPEGWSLFLQRYYQVVHEGAELRHLDTQVQRCEDILQQLQAVVPQIDMEGDRNIWIVKPGAKSRGRGIMCMDHLEEMLKLVNGNPVVMKDGKWVVQKYIERPLLIFGTKFDLRQWFLVTDWNPLTVWFYRDSYIRFSTQPFSLKNLDNSVHLCNNSIQKHLENSCHRHPLLPPDNMWSSQRFQAHLQEMGAPNAWSTIIVPGMKDAVIHALQTSQDTVQCRKASFELYGADFVFGEDFQPWLIEINASPTMAPSTAVTARLCAGVQADTLRVVIDRMLDRNCDTGAFELIYKQPVTTSPASTPRPSCLLPMYSDTRARSSDDSTASWWALRPCRPQARP

SEQ ID NO: 6460 - protein, 167 aa, Homo sapiens
  Payload ID: 1396;
  Gene Symbol: ARPC4-TTLL3;
  Gene Name: ARPC4-TTLL3 readthrough;
  ENSP ID: ENSP00000393764
  MOD_RES (1)..(1): Any amino acid
XTATLRPYLSAVRATLQAALCLENFSSQVVERHNKPEVEVRSSKELLLQPVTISRNEKEKVLIEGSINSVRVSIAVKQGYDISFLITNFHTEQMYKHKLVDFVIHFMEEIDKEISEMKLSVNARARIVAEEFLKNQKKIFTIQGCYPVIRCLLRRRGWVEKKMVHRS

SEQ ID NO: 6461 - protein, 47 aa, Homo sapiens
  Payload ID: 1396;
  Gene Symbol: ARPC4-TTLL3;
  Gene Name: ARPC4-TTLL3 readthrough;
  ENSP ID: ENSP00000402163
MTATLRPYLSAVRATLQAALCLENFSSQVVERHNKPEVEVRGMISAF

SEQ ID NO: 6462 - protein, 181 aa, Homo sapiens
  Payload ID: 1396;
  Gene Symbol: ARPC4-TTLL3;
  Gene Name: ARPC4-TTLL3 readthrough;
  ENSP ID: ENSP00000412284
MTATLRPYLSAVRATLQAALCLENFSSQVVERHNKPEVEVRSSKELLLQPVTISRNEKEKVLIEGSINSVRVSIAVKQADEIEKILCHKFMRFMMMRAENFFILRRKPVEGYDISFLITNFHTEQMYKHKLVDFVIHFMEEIDKEISEMKLSVNARARIVAEEFLKNVSRSSGEDPPRRLT

SEQ ID NO: 6463 - protein, 388 aa, Homo sapiens
  Payload ID: 1397;
  Gene Symbol: ARR3;
  Gene Name: arrestin 3, retinal (X-arrestin);
  Uniprot ID:  P36575;
  ENSP ID: ENSP00000311538
MSKVFKKTSSNGKLSIYLGKRDFVDHVDTVEPIDGVVLVDPEYLKCRKLFVMLTCAFRYGRDDLEVIGLTFRKDLYVQTLQVVPAESSSPQGPLTVLQERLLHKLGDNAYPFTLQMVTNLPCSVTLQPGPEDAGKPCGIDFEVKSFCAENPEETVSKRDYVRLVVRKVQFAPPEAGPGPSAQTIRRFLLSAQPLQLQAWMDREVHYHGEPISVNVSINNCTNKVIKKIKISVDQITDVVLYSLDKYTKTVFIQEFTETVAANSSFSQSFAVTPILAASCQKRGLALDGKLKHEDTNLASSTIIRPGMDKELLGILVSYKVRVNLMVSCGGILGDLTASDVGVELPLVLIHPKPSHEAASSEDIVIEEFTRKGEEESQKAVEAEGDEGS

SEQ ID NO: 6464 - protein, 359 aa, Homo sapiens
  Payload ID: 1397;
  Gene Symbol: ARR3;
  Gene Name: arrestin 3, retinal (X-arrestin);
  Uniprot ID:  P36575;
  ENSP ID: ENSP00000363619
MSKVFKKTSSNGKLSIYLGKRDFVDHVDTVEPIDGVVLVDPEYLKCRKLFVMLTCAFRYGRDDLEVIGLTFRKDLYVQTLQVVPAESSSPQGPLTVLQERLLHKLGDNAYPFTLQMVTNLPCSVTLQPGPEDAGKPCGIDFEVKSFCAENPEETVSKRDYVRLVVRKVQFAPPEAGPGPSAQTIRRFLLSAQPLQLQAWMDREVHYHGEPISVNVSINNCTNKVIKKIKISVDQITDVVLYSLDKYTKTVFIQEFTETVAANSSFSQSFAVTPILAASCQKRGLALDGKLKHEDTNLASSTIIRPGMDKELLGILVSYKVRVNLMVSCGGILGDLTASDVGVELPLVLIHPKPSHEAAR

SEQ ID NO: 6465 - protein, 97 aa, Homo sapiens
  Payload ID: 1397;
  Gene Symbol: ARR3;
  Gene Name: arrestin 3, retinal (X-arrestin);
  ENSP ID: ENSP00000425505
MLTCAFRYGRDDLEVIGLTFRKDLYVQTLQVVPAESSSPQGPLTVLQERLLHKLGDNAYPFTLQMVTNLPCSVTLQPGPEDAGKPCGIDFEVKSFCA

SEQ ID NO: 6466 - protein, 388 aa, Homo sapiens [sequence omitted]

SEQ ID NO: 6467 - protein, 433 aa, Homo sapiens
  Payload ID: 1398;
  Gene Symbol: ARRDC1;
  Gene Name: arrestin domain containing 1;
  Uniprot ID:  Q8N5I2;
  ENSP ID: ENSP00000360475
MGRVQLFEISLSHGRVVYSPGEPLAGTVRVRLGAPLPFRAIRVTCIGSCGVSNKANDTAWVVEEGYFNSSLSLADKGSLPAGEHSFPFQFLLPATAPTSFEGPFGKIVHQVRAAIHTPRFSKDHKCSLVFYILSPLNLNSIPDIEQPNVASATKKFSYKLVKTGSVVLTASTDLRGYVVGQALQLHADVENQSGKDTSPVVASLLQKVSYKAKRWIHDVRTIAEVEGAGVKAWRRAQWHEQILVPALPQSALPGCSLIHIDYYLQVSLKAPEATVTLPVFIGNIAVNHAPVSPRPGLGLPPGAPPLVVPSAPPQEEAEAEAAAGGPHFLDPVFLSTKSHSQRQPLLATLSSVPGAPEPCPQDGSPASHPLHPPLCISTGATVPYFAEGSGGPVPTTSTLILPPEYSSWGYPYEAPPSYEQSCGGVEPSLTPES

SEQ ID NO: 6468 - protein, 177 aa, Homo sapiens
  Payload ID: 1398;
  Gene Symbol: ARRDC1;
  Gene Name: arrestin domain containing 1;
  ENSP ID: ENSP00000406247
MGRVQLFEISLSHGRVVYSPGEPLAGTVRVRLGAPLPFRAIRVTCIGSCGVSNKANDTAWVVEEGYFNSSLSLADKGSLPAGEHSFPFQFLLPATAPTSFEGPFGKIVHQVRAAIHTPRFSKDHKCSLVFYILSPLNLNSIPDIEGSSLRTPAKPLPGPPPKQPNVASATKKFSYKL

SEQ ID NO: 6469 - protein, 271 aa, Homo sapiens
  Payload ID: 1398;
  Gene Symbol: ARRDC1;
  Gene Name: arrestin domain containing 1;
  ENSP ID: ENSP00000406833
MGRVQLFEISLSHGRVVYSPGEPLAGTVRVRLGAPLPFRAIRVTCIGSCGVSNKANDTAWVVEEGYFNSSLSLADKGSLPAGEHSFPFQFLLPATAPTSFEGPFGKIVHQVRAAIHTPRFSKDHKCSLVFYILSPLNLNSIPDIEALQLHADVENQSGKDTSPVVASLLQKVSYKAKRWIHDVRTIAEVEGAGVKAWRRAQWHEQILVPALPQSALPGCSLIHIDYYLQVSLKAPEATVTLPVFIGNIAVNHAPVSPRPGLGLPPGAPPLV

SEQ ID NO: 6470 - protein, 123 aa, Homo sapiens
  Payload ID: 1398;
  Gene Symbol: ARRDC1;
  Gene Name: arrestin domain containing 1;
  ENSP ID: ENSP00000435996
MGRVQLFEISLSHGRVVYSPGEPLAGTVRVRLGAPLPFRAIRVTCIGSCGVSNKANDTAWVVEEGYFNSSLSLADKGKFGSQFPSGDPWGQPLEWGLSVLSSPFPRSASWIWHWPILSQGCGP

SEQ ID NO: 6471 - protein, 407 aa, Homo sapiens
  Payload ID: 1399;
  Gene Symbol: ARRDC2;
  Gene Name: arrestin domain containing 2;
  Uniprot ID:  Q8TBH0;
  ENSP ID: ENSP00000222250
MLFDKVKAFSVQLDGATAGVEPVFSGGQAVAGRVLLELSSAARVGALRLRARGRAHVHWTESRSAGSSTAYTQSYSERVEVVSHRATLLAPDTGETTTLPPGRHEFLFSFQLPPTLVTSFEGKHGSVRYCIKATLHRPWVPARRARKVFTVIEPVDINTPALLAPQAGAREKVARSWYCNRGLVSLSAKIDRKGYTPGEVIPVFAEIDNGSTRPVLPRAAVVQTQTFMARGARKQKRAVVASLAGEPVGPGQRALWQGRALRIPPVGPSILHCRVLHVDYALKVCVDIPGTSKLLLELPLVIGTIPLHPFGSRSSSVGSHASFLLDWRLGALPERPEAPPEYSEVVADTEEAALGQSPFPLPQDPDMSLEGPFFAYIQEFRYRPPPLYSEEDPNPLLGDMRPRCMTC

SEQ ID NO: 6472 - protein, 402 aa, Homo sapiens
  Payload ID: 1399;
  Gene Symbol: ARRDC2;
  Gene Name: arrestin domain containing 2;
  Uniprot ID:  Q8TBH0;
  ENSP ID: ENSP00000368977
MRSGGVRSFALELARGPGGAYRGGERLCGRVLLEAAAPLRVRALEVKARGGAATHWLEGRSVGVNAVSSDYAAAETYLRRRQLLLRDTGETTTLPPGRHEFLFSFQLPPTLVTSFEGKHGSVRYCIKATLHRPWVPARRARKVFTVIEPVDINTPALLAPQAGAREKVARSWYCNRGLVSLSAKIDRKGYTPGEVIPVFAEIDNGSTRPVLPRAAVVQTQTFMARGARKQKRAVVASLAGEPVGPGQRALWQGRALRIPPVGPSILHCRVLHVDYALKVCVDIPGTSKLLLELPLVIGTIPLHPFGSRSSSVGSHASFLLDWRLGALPERPEAPPEYSEVVADTEEAALGQSPFPLPQDPDMSLEGPFFAYIQEFRYRPPPLYSEEDPNPLLGDMRPRCMTC

SEQ ID NO: 6473 - protein, 6 aa, Homo sapiens
  Payload ID: 1399;
  Gene Symbol: ARRDC2;
  Gene Name: arrestin domain containing 2;
  ENSP ID: ENSP00000476804
MARGAR

SEQ ID NO: 6474 - protein, 322 aa, Homo sapiens
  Payload ID: 1399;
  Gene Symbol: ARRDC2;
  Gene Name: arrestin domain containing 2;
  ENSP ID: ENSP00000477100
MLFDKVKAFSVQLDGATAGVEPVFSGGQAVAGRVLLELSSAARVGALRLRARGRAHVHWTESRSAGSSTAYTQSYSERVEVVSHRATLLAPGTDGGPLLQHQLCASHHLDGGTSVSPGTPAQPLSRLLFLLPADTGETTTLPPGRHEFLFSFQLPPTLVTSFEGKHGSVRYCIKATLHRPWVPARRARKVFTVIEPVDINTPALLAPQAGAREKVARSWYCNRGLVSLSAKIDRKGYTPGEVIPVFAEIDNGSTRPVLPRAAVVQTQTFMARGARKQKRAVVASLAGEPVGPGQRALWQGRALRIPPVGPSILHCRVLHVDY

SEQ ID NO: 6475 - protein, 414 aa, Homo sapiens
  Payload ID: 1400;
  Gene Symbol: ARRDC3;
  Gene Name: arrestin domain containing 3;
  Uniprot ID:  Q96B67;
  ENSP ID: ENSP00000265138
MVLGKVKSLTISFDCLNDSNVPVYSSGDTVSGRVNLEVTGEIRVKSLKIHARGHAKVRWTESRNAGSNTAYTQNYTEEVEYFNHKDILIGHERDDDNSEEGFHTIHSGRHEYAFSFELPQTPLATSFEGRHGSVRYWVKAELHRPWLLPVKLKKEFTVFEHIDINTPSLLSPQAGTKEKTLCCWFCTSGPISLSAKIERKGYTPGESIQIFAEIENCSSRMVVPKAAIYQTQAFYAKGKMKEVKQLVANLRGESLSSGKTETWNGKLLKIPPVSPSILDCSIIRVEYSLMVYVDIPGAMDLFLNLPLVIGTIPLHPFGSRTSSVSSQCSMNMNWLSLSLPERPEAPPSYAEVVTEEQRRNNLAPVSACDDFERALQGPLFAYIQEFRFLPPPLYSEIDPNPDQSADDRPSCPSR

SEQ ID NO: 6476 - protein, 418 aa, Homo sapiens
  Payload ID: 1401;
  Gene Symbol: ARRDC4;
  Gene Name: arrestin domain containing 4;
  Uniprot ID:  Q8NCT1;
  ENSP ID: ENSP00000268042
MGGEAGCAAAVGAEGRVKSLGLVFEDERKGCYSSGETVAGHVLLEASEPVALRALRLEAQGRATAAWGPSTCPRASASTAALAVFSEVEYLNVRLSLREPPAGEGIILLQPGKHEFPFRFQLPSEPLVTSFTGKYGSIQYCVRAVLERPKVPDQSVKRELQVVSHVDVNTPALLTPVLKTQEKMVGCWFFTSGPVSLSAKIERKGYCNGEAIPIYAEIENCSSRLIVPKAAIFQTQTYLASGKTKTIRHMVANVRGNHIASGSTDTWNGKTLKIPPVTPSILDCCIIRVDYSLAVYIHIPGAKKLMLELPLVIGTIPYNGFGSRNSSIASQFSMDMSWLTLTLPEQPEAPPNYADVVSEEEFSRHIPPYPQPPNCEGEVCCPVFACIQEFRFQPPPLYSEVDPHPSDVEESQPVSFIL

SEQ ID NO: 6477 - protein, 342 aa, Homo sapiens
  Payload ID: 1402;
  Gene Symbol: ARRDC5;
  Gene Name: arrestin domain containing 5;
  Uniprot ID:  A6NEK1;
  ENSP ID: ENSP00000371200
MGDREECLSTPQPPMSVVKSIELVLPEDRIYLAGSSIKGQVILTLNSTLVDPIVKVELVGRGYVEWSEEAGASCDYSRNVICNNKADYVHKTKTFPVEDNWLSAGSHTFDFHFNLPPRLPSTFTSKFGHVFYFVQASCMGREHILAKKRMYLLVQGTSTFHKETPFQNPLFVEAEEKVSYNCCRQGTVCLQIQMERNTFTPGEKVVFTTEINNQTSKCIKTVVFALYAHIQYEGFTPSAERRSRLDSSELLRQEANTPVTRFNTTKVVSTFNLPLLLSVSSSTQDGEIMHTRYELVTTVHLPWSLTSLKAKVPIIITSASVDSAICQLSEDGVLPVNPDHQN

SEQ ID NO: 6478 - protein, 410 aa, Homo sapiens
  Payload ID: 1403;
  Gene Symbol: ARRB1;
  Gene Name: arrestin, beta 1;
  Uniprot ID:  P49407;
  ENSP ID: ENSP00000353124
MGDKGTRVFKKASPNGKLTVYLGKRDFVDHIDLVDPVDGVVLVDPEYLKERRVYVTLTCAFRYGREDLDVLGLTFRKDLFVANVQSFPPAPEDKKPLTRLQERLIKKLGEHAYPFTFEIPPNLPCSVTLQPGPEDTGKACGVDYEVKAFCAENLEEKIHKRNSVRLVIRKVQYAPERPGPQPTAETTRQFLMSDKPLHLEASLDKEIYYHGEPISVNVHVTNNTNKTVKKIKISVRQYADICLFNTAQYKCPVAMEEADDTVAPSSTFCKVYTLTPFLANNREKRGLALDGKLKHEDTNLASSTLLREGANREILGIIVSYKVKVKLVVSRGGDVAVELPFTLMHPKPKEEPPHREVPENETPVDTNLIELDTNDDDIVFEDFARQRLKGMKDDKEEEEDGTGSPQLNNR

SEQ ID NO: 6479 - protein, 418 aa, Homo sapiens
  Payload ID: 1403;
  Gene Symbol: ARRB1;
  Gene Name: arrestin, beta 1;
  Uniprot ID:  P49407;
  ENSP ID: ENSP00000409581
MGDKGTRVFKKASPNGKLTVYLGKRDFVDHIDLVDPVDGVVLVDPEYLKERRVYVTLTCAFRYGREDLDVLGLTFRKDLFVANVQSFPPAPEDKKPLTRLQERLIKKLGEHAYPFTFEIPPNLPCSVTLQPGPEDTGKACGVDYEVKAFCAENLEEKIHKRNSVRLVIRKVQYAPERPGPQPTAETTRQFLMSDKPLHLEASLDKEIYYHGEPISVNVHVTNNTNKTVKKIKISVRQYADICLFNTAQYKCPVAMEEADDTVAPSSTFCKVYTLTPFLANNREKRGLALDGKLKHEDTNLASSTLLREGANREILGIIVSYKVKVKLVVSRGGLLGDLASSDVAVELPFTLMHPKPKEEPPHREVPENETPVDTNLIELDTNDDDIVFEDFARQRLKGMKDDKEEEEDGTGSPQLNNR

SEQ ID NO: 6480 - protein, 72 aa, Homo sapiens
  Payload ID: 1403;
  Gene Symbol: ARRB1;
  Gene Name: arrestin, beta 1;
  ENSP ID: ENSP00000433137
  MOD_RES (1)..(1): Any amino acid
XVCLPLPCRCSGETTPTPGPVPSAECSRRPVQMESSPSTWESGTLWTTSTSWTLWMVWSWWILSISKSGESM

SEQ ID NO: 6481 - protein, 257 aa, Homo sapiens
  Payload ID: 1403;
  Gene Symbol: ARRB1;
  Gene Name: arrestin, beta 1;
  ENSP ID: ENSP00000433171
MGVFKKASPNGKLTVYLGKRDFVDHIDLVDPVDGVVLVDPEYLKERRVYVTLTCAFRYGREDLDVLGLTFRKDLFVANVQSFPPAPEDKKPLTRLQERLIKKLGEHAYPFTFEIPPNLPCSVTLQPGPEDTGKACGVDYEVKAFCAENLEEKIHKRNSVRLVIRKVQYAPERPGPQPTAETTRQFLMSDKPLHLEASLDKEIYYHGEPISVNVHVTNNTNKTVKKIKISVRQYADICLFNTAQYKCPVAMEEADDTV

SEQ ID NO: 6482 - protein, 69 aa, Homo sapiens
  Payload ID: 1403;
  Gene Symbol: ARRB1;
  Gene Name: arrestin, beta 1;
  ENSP ID: ENSP00000434196
  MOD_RES (1)..(1): Any amino acid
XGGRRRERPAAATARDGRGEAMEGDLQRERLSSPSTWESGTLWTTSTSWTLWMVWSWWILSISKSGESM

SEQ ID NO: 6483 - protein, 59 aa, Homo sapiens
  Payload ID: 1403;
  Gene Symbol: ARRB1;
  Gene Name: arrestin, beta 1;
  ENSP ID: ENSP00000436352
SHCKRWERRGHGRRLAAGEAESVQEGQSKWKAHRLPGKAGLCGPHRPRGPCGWCGPGGS

SEQ ID NO: 6484 - protein, 195 aa, Homo sapiens
  Payload ID: 1403;
  Gene Symbol: ARRB1;
  Gene Name: arrestin, beta 1;
  ENSP ID: ENSP00000436530
  MOD_RES (1)..(1): Any amino acid
XRPGPQPTAETTRQFLMSDKPLHLEASLDKEIYYHGEPISVNVHVTNNTNKTVKKIKISVRQYADICLFNTAQYKCPVAMEEADDTVAPSSTFCKVYTLTPFLANNREKRGLALDGKLKHEDTNLASSTLLREGANREILGIIVSYKVKVKLVVSRGGDVAVELPFTLMHPKPKEEPPHREVMTTLYLRTLLARD

SEQ ID NO: 6485 - protein, 409 aa, Homo sapiens
  Payload ID: 1404;
  Gene Symbol: ARRB2;
  Gene Name: arrestin, beta 2;
  Uniprot ID:  P32121;
  ENSP ID: ENSP00000269260
MGEKPGTRVFKKSSPNCKLTVYLGKRDFVDHLDKVDPVDGVVLVDPDYLKDRKVFVTLTCAFRYGREDLDVLGLSFRKDLFIATYQAFPPVPNPPRPPTRLQDRLLRKLGQHAHPFFFTIPQNLPCSVTLQPGPEDTGKACGVDFEIRAFCAKSLEEKSHKRNSVRLVIRKVQFAPEKPGPQPSAETTRHFLMSDRSLHLEASLDKELYYHGEPLNVNVHVTNNSTKTVKKIKVSVRQYADICLFSTAQYKCPVAQLEQDDQVSPSSTFCKVYTITPLLSDNREKRGLALDGKLKHEDTNLASSTIVKEGANKEVLGILVSYRVKVKLVVSRGGDVSVELPFVLMHPKPHDHIPLPRPQSAAPETDVPVDTNLIEFDTNYATDDDIVFEDFARLRLKGMKDDDYDDQLC

SEQ ID NO: 6486 - protein, 406 aa, Homo sapiens
  Payload ID: 1404;
  Gene Symbol: ARRB2;
  Gene Name: arrestin, beta 2;
  Uniprot ID:  P32121;
  ENSP ID: ENSP00000341895
MGEKPGTRVFKKSSPNCKLTVYLGKRDFVDHLDKVDPVVFVTLTCAFRYGREDLDVLGLSFRKDLFIATYQAFPPVPNPPRPPTRLQDRLLRKLGQHAHPFFFTIPQNLPCSVTLQPGPEDTGKACGVDFEIRAFCAKSLEEKSHKRNSVRLVIRKVQFAPEKPGPQPSAETTRHFLMSDRSLHLEASLDKELYYHGEPLNVNVHVTNNSTKTVKKIKVSVRQYADICLFSTAQYKCPVAQLEQDDQVSPSSTFCKVYTITPLLSDNREKRGLALDGKLKHEDTNLASSTIVKEGANKEVLGILVSYRVKVKLVVSRGGDVSVELPFVLMHPKPHDHIPLPRPQSAPTPTPPLPVPPAAPETDVPVDTNLIEFDTNYATDDDIVFEDFARLRLKGMKDDDYDDQLC

SEQ ID NO: 6487 - protein, 394 aa, Homo sapiens
  Payload ID: 1404;
  Gene Symbol: ARRB2;
  Gene Name: arrestin, beta 2;
  Uniprot ID:  P32121;
  ENSP ID: ENSP00000370898
MGEKPGTRVFKKSSPNCKLTVYLGKRDFVDHLDKVDPVVFVTLTCAFRYGREDLDVLGLSFRKDLFIATYQAFPPVPNPPRPPTRLQDRLLRKLGQHAHPFFFTIPQNLPCSVTLQPGPEDTGKACGVDFEIRAFCAKSLEEKSHKRNSVRLVIRKVQFAPEKPGPQPSAETTRHFLMSDRSLHLEASLDKELYYHGEPLNVNVHVTNNSTKTVKKIKVSVRQYADICLFSTAQYKCPVAQLEQDDQVSPSSTFCKVYTITPLLSDNREKRGLALDGKLKHEDTNLASSTIVKEGANKEVLGILVSYRVKVKLVVSRGGDVSVELPFVLMHPKPHDHIPLPRPQSAAPETDVPVDTNLIEFDTNYATDDDIVFEDFARLRLKGMKDDDYDDQLC

SEQ ID NO: 6488 - protein, 430 aa, Homo sapiens
  Payload ID: 1404;
  Gene Symbol: ARRB2;
  Gene Name: arrestin, beta 2;
  Uniprot ID:  P32121;
  ENSP ID: ENSP00000403701
MGEKPGTRVFKKSSPNCKLTVYLGKRDFVDHLDKVDPVDGVVLVDPDYLKDRKVFVTLTCAFRYGREDLDVLGLSFRKDLFIATYQAFPPVPNPPRPPTRLQDRLLRKLGQHAHPFFFTVRMPLPSEGQGAGAGTVSGVGIPQNLPCSVTLQPGPEDTGKACGVDFEIRAFCAKSLEEKSHKRNSVRLVIRKVQFAPEKPGPQPSAETTRHFLMSDRSLHLEASLDKELYYHGEPLNVNVHVTNNSTKTVKKIKVSVRQYADICLFSTAQYKCPVAQLEQDDQVSPSSTFCKVYTITPLLSDNREKRGLALDGKLKHEDTNLASSTIVKEGANKEVLGILVSYRVKVKLVVSRGGDVSVELPFVLMHPKPHDHIPLPRPQSAAPETDVPVDTNLIEFDTNYATDDDIVFEDFARLRLKGMKDDDYDDQLC

SEQ ID NO: 6489 - protein, 64 aa, Homo sapiens
  Payload ID: 1404;
  Gene Symbol: ARRB2;
  Gene Name: arrestin, beta 2;
  ENSP ID: ENSP00000458371
MGEKPGTRVFKKSSPNCKLTVYLGKRDFVDHLDKVDPVDTPESSMLRHTAARPRGYRKGLRRRL

SEQ ID NO: 6490 - protein, 74 aa, Homo sapiens
  Payload ID: 1404;
  Gene Symbol: ARRB2;
  Gene Name: arrestin, beta 2;
  ENSP ID: ENSP00000458946
MGEKPGTRVFKKSSPNCKPLAAEAAQPEPATGLGGAGLGPQARPQRRRPKASHVPVALLGANPSSPCTWASGTS

SEQ ID NO: 6491 - protein, 217 aa, Homo sapiens
  Payload ID: 1404;
  Gene Symbol: ARRB2;
  Gene Name: arrestin, beta 2;
  ENSP ID: ENSP00000460607
MSDRSLHLEASLDKELYYHGEPLNVNVHVTNNSTKTVKKIKVSVRQYADICLFSTAQYKCPVAQLEQDDQVSPSSTFCKVYTITPLLSDNREKRGLALDGKLKHEDTNLASSTIVKEGANKEVLGILVSYRVKVKLVVSRGGDVSVELPFVLMHPKPHDHIPLPRPQSAAPETDVPVDTNLIEFDTNYATDDDIVFEDFARLRLKGMKDDDYDDQLC

SEQ ID NO: 6492 - protein, 196 aa, Homo sapiens
  Payload ID: 1404;
  Gene Symbol: ARRB2;
  Gene Name: arrestin, beta 2;
  ENSP ID: ENSP00000460879
GGETRDQLTVYLGKRDFVDHLDKVDPVDGVVLVDPDYLKDRKVFVTLTCAFRYGREDLDVLGLSFRKDLFIATYQAFPPVPNPPRPPTRLQDRLLRKLGQHAHPFFFTIPQNLPCSVTLQPGPEDTGKACGVDFEIRAFCAKSLEEKSHKRNSVRLVIRKVQFAPEKPGPQPSAETTRHFLMSDRSLHLEASLDKE

SEQ ID NO: 6493 - protein, 217 aa, Homo sapiens; identical to SEQ ID NO: 6491
  Payload ID: 1404;
  Gene Symbol: ARRB2;
  Gene Name: arrestin, beta 2;
  ENSP ID: ENSP00000465296

SEQ ID NO: 6494 - protein, 113 aa, Homo sapiens
  Payload ID: 1404;
  Gene Symbol: ARRB2;
  Gene Name: arrestin, beta 2;
  ENSP ID: ENSP00000465877
MSDRSLHLEASLDKELYYHGEPLNVNVHVTNNSTKTVKKIKVSVRQYADICLFSTAQYKCPVAQLEQDDQVSPSSTFCKVYTITPLLSDNREKRGLALDGKLKHEDTNLASST

SEQ ID NO: 6495 - protein, 217 aa, Homo sapiens; identical to SEQ ID NO: 6491
  Payload ID: 1404;
  Gene Symbol: ARRB2;
  Gene Name: arrestin, beta 2;
  ENSP ID: ENSP00000466344

SEQ ID NO: 6496 - protein, 330 aa, Homo sapiens
  Payload ID: 1404;
  Gene Symbol: ARRB2;
  Gene Name: arrestin, beta 2;
  ENSP ID: ENSP00000466857
MGEKPGTRVFKKSSPNCKLTVYLGKRDFVDHLDKVDPVDGVVLVDPDYLKDRKVFVTLTCAFRYGREDLDVLGLSFRKDLFIATYQAFPPVPNPPRPPTRLQDRLLRKLGQHAHPFFFTIPQNLPCSVTLQPGPEDTGKACGVDFEIRAFCAKSLEEKSHKRNSVRLVIRKVQFAPEKPGPQPSAETTRHFLMSDRSLHLEASLDKELYYHGEPLNVNVHVTNNSTKTVKKIKVSVRQYADICLFSTAQYKCPVAQLEQDDQREGGCQQGGAGNPGVLQGQGEAGGVSRRGCLCGAAFCSYAPQAPRPHPPPQTPVSRSGDRCPCGHQPH

SEQ ID NO: 6497 - protein, 348 aa, Homo sapiens
  Payload ID: 1405;
  Gene Symbol: ASNA1;
  Gene Name: arsA arsenite transporter, ATP-binding, homolog 1 (bacterial);
  Uniprot ID:  O43681;
  ENSP ID: ENSP00000349887
MAAGVAGWGVEAEEFEDAPDVEPLEPTLSNIIEQRSLKWIFVGGKGGVGKTTCSCSLAVQLSKGRESVLIISTDPAHNISDAFDQKFSKVPTKVKGYDNLFAMEIDPSLGVAELPDEFFEEDNMLSMGKKMMQEAMSAFPGIDEAMSYAEVMRLVKGMNFSVVVFDTAPTGHTLRLLNFPTIVERGLGRLMQIKNQISPFISQMCNMLGLGDMNADQLASKLEETLPVIRSVSEQFKDPEQTTFICVCIAEFLSLYETERLIQELAKCKIDTHNIIVNQLVFPDPEKPCKMCEARHKIQAKYLDQMEDLYEDFHIVKLPLLPHEVRGADKVNTFSALLLEPYKPPSAQ

SEQ ID NO: 6498 - protein, 348 aa, Homo sapiens; identical to SEQ ID NO: 6497
  Payload ID: 1405;
  Gene Symbol: ASNA1;
  Gene Name: arsA arsenite transporter, ATP-binding, homolog 1 (bacterial);
  Uniprot ID:  O43681;
  ENSP ID: ENSP00000466379

SEQ ID NO: 6499 - protein, 200 aa, Homo sapiens
  Payload ID: 1405;
  Gene Symbol: ASNA1;
  Gene Name: arsA arsenite transporter, ATP-binding, homolog 1 (bacterial);
  ENSP ID: ENSP00000468450
MAAGVAGWGVEAEEFEDAPDVEPLEPTLSNIIEQRSLKWIFVGGKGGVGKTTCSCSLAVQLSKGRESVLIISTDPAHNISDAFDQKFSKVPTKVKGYDNLFAMEIDPSLGVAELPDEFFEEDNMLSMGKKMMQEAMSAFPGIDEAMSYAEVMRLVKGMNFSVVVFDTAPTGHTLRLLNFPTIVERGLGRLMQIKNQISPF

SEQ ID NO: 6500 - protein, 331 aa, Homo sapiens
  Payload ID: 1405;
  Gene Symbol: ASNA1;
  Gene Name: arsA arsenite transporter, ATP-binding, homolog 1 (bacterial);
  ENSP ID: ENSP00000481254
MLDVEPLEPTLSNIIEQRSLKWIFVGGKGGVGKTTCSCSLAVQLSKGRESVLIISTDPAHNISDAFDQKFSKVPTKVKGYDNLFAMEIDPSLGVAELPDEFFEEDNMLSMGKKMMQEAMSAFPGIDEAMSYAEVMRLVKGMNFSVVVFDTAPTGHTLRLLNFPTIVERGLGRLMQIKNQISPFISQMCNMLGLGDMNADQLASKLEETLPVIRSVSEQFKDPEQTTFICVCIAEFLSLYETERLIQELAKCKIDTHNIIVNQLVFPDPEKPCKMCEARHKIQAKYLDQMEDLYEDFHIVKLPLLPHEVRGADKVNTFSALLLEPYKPPSAQ

SEQ ID NO: 6501 - protein, 375 aa, Homo sapiens
  Payload ID: 1406;
  Gene Symbol: AS3MT;
  Gene Name: arsenite methyltransferase;
  Uniprot ID:  Q9HBK9;
  ENSP ID: ENSP00000358896
MAALRDAEIQKDVQTYYGQVLKRSADLQTNGCVTTARPVPKHIREALQNVHEEVALRYYGCGLVIPEHLENCWILDLGSGSGRDCYVLSQLVGEKGHVTGIDMTKGQVEVAEKYLDYHMEKYGFQASNVTFIHGYIEKLGEAGIKNESHDIVVSNCVINLVPDKQQVLQEAYRVLKHGGELYFSDVYTSLELPEEIRTHKVLWGECLGGALYWKELAVLAQKIGFCPPRLVTANLITIQNKELERVIGDCRFVSATFRLFKHSKTGPTKRCQVIYNGGITGHEKELMFDANFTFKEGEIVEVDEETAAILKNSRFAQDFLIRPIGEKLPTSGGCSALELKDIITDPFKLAEESDSMKSRCVPDAAGGCCGTKKSC

SEQ ID NO: 6502 - protein, 338 aa, Homo sapiens
  Payload ID: 1406;
  Gene Symbol: AS3MT;
  Gene Name: arsenite methyltransferase;
  ENSP ID: ENSP00000479361
MAALRDAEIQKDVQTYYGQVLKRSADLQTNGCVTTARPVPKHIREALQNVHEEVALRYYGCGLVIPEHLENCWILDLGSGSGRDCYVLSQLVGEKGHVTGIDMTKGQVEVAEKYLDYHMEKYGFQASNVTFIHGYIEKLGEAGIKNESHDIVVSNCVINLVPDKQQVLQEAYRVLKHGGELYFSDVYTSLELPEEIRTHKVLWGECLGGALYWKELAVLAQKIGFCPPRLVTANLITIQNKELERVIGDCRFVSATFRLFKHSKTGPTKRCQVIYNGGITGHEKELMFDANFTFKEGEIVEVDEETAAILKNSRFAQDFLIRPIGEKLPTSGAVLLWS

SEQ ID NO: 6503 - protein, 220 aa, Homo sapiens
  Payload ID: 1407;
  Gene Symbol: ARTN;
  Gene Name: artemin;
  Uniprot ID:  Q5T4W7;
  ENSP ID: ENSP00000361429
MELGLGGLSTLSHCPWPRQQPALWPTLAALALLSSVAEASLGSAPRSPAPREGPPPVLASPAGHLPGGRTARWCSGRARRPPPQPSRPAPPPPAPPSALPRGGRAARAGGPGSRARAAGARGCRLRSQLVPVRALGLGHRSDELVRFRFCSGSCRRARSPHDLSLASLLGAGALRPPPGSRPVSQPCCRPTRYEAVSFMDVNSTWRTVDRLSATACGCLG

SEQ ID NO: 6504 - protein, 220 aa, Homo sapiens; identical to SEQ ID NO: 6503
  Payload ID: 1407;
  Gene Symbol: ARTN;
  Gene Name: artemin;
  Uniprot ID:  Q5T4W7;
  ENSP ID: ENSP00000361434

SEQ ID NO: 6505 - protein, 228 aa, Homo sapiens
  Payload ID: 1407;
  Gene Symbol: ARTN;
  Gene Name: artemin;
  Uniprot ID:  Q5T4W7;
  ENSP ID: ENSP00000387435
MELGLGGLSTLSHCPWPRQQAPLGLSAQPALWPTLAALALLSSVAEASLGSAPRSPAPREGPPPVLASPAGHLPGGRTARWCSGRARRPPPQPSRPAPPPPAPPSALPRGGRAARAGGPGSRARAAGARGCRLRSQLVPVRALGLGHRSDELVRFRFCSGSCRRARSPHDLSLASLLGAGALRPPPGSRPVSQPCCRPTRYEAVSFMDVNSTWRTVDRLSATACGCLG

SEQ ID NO: 6506 - protein, 237 aa, Homo sapiens
  Payload ID: 1407;
  Gene Symbol: ARTN;
  Gene Name: artemin;
  Uniprot ID:  Q5T4W7;
  ENSP ID: ENSP00000391998
MPGLISARGQPLLEVLPPQAHLGALFLPEAPLGLSAQPALWPTLAALALLSSVAEASLGSAPRSPAPREGPPPVLASPAGHLPGGRTARWCSGRARRPPPQPSRPAPPPPAPPSALPRGGRAARAGGPGSRARAAGARGCRLRSQLVPVRALGLGHRSDELVRFRFCSGSCRRARSPHDLSLASLLGAGALRPPPGSRPVSQPCCRPTRYEAVSFMDVNSTWRTVDRLSATACGCLG

SEQ ID NO: 6507 - protein, 76 aa, Homo sapiens
  Payload ID: 1407;
  Gene Symbol: ARTN;
  Gene Name: artemin;
  ENSP ID: ENSP00000434071
MELGLGGLSTLSHCPWPRQQAPLGLSAQPALWPTLAALALLSSVAEASLGSAPRSPAPREGPPPVLASPAGHLPGR

SEQ ID NO: 6508 - protein, 66 aa, Homo sapiens
  Payload ID: 1407;
  Gene Symbol: ARTN;
  Gene Name: artemin;
  ENSP ID: ENSP00000434784
MELGLGGLSTLSHCPWPRQQPALWPTLAALALLSSVAEASLGSAPRSPAPREGPPPVLASPAGHLP

SEQ ID NO: 6509 - protein, 89 aa, Homo sapiens
  Payload ID: 1407;
  Gene Symbol: ARTN;
  Gene Name: artemin;
  ENSP ID: ENSP00000434856
MELGLGGLSTLSHCPWPRQQAPLGLSAQPALWPTLAALALLSSVAEASLGSAPRSPAPREGPPPVLASPAGHLPGGRTARWCSGRARRP

SEQ ID NO: 6510 - protein, 76 aa, Homo sapiens; identical to SEQ ID NO: 6507
  Payload ID: 1407;
  Gene Symbol: ARTN;
  Gene Name: artemin;
  ENSP ID: ENSP00000435140

SEQ ID NO: 6511 - protein, 66 aa, Homo sapiens; identical to SEQ ID NO: 6508
  Payload ID: 1407;
  Gene Symbol: ARTN;
  Gene Name: artemin;
  ENSP ID: ENSP00000435804

SEQ ID NO: 6512 - protein, 89 aa, Homo sapiens; identical to SEQ ID NO: 6509
  Payload ID: 1407;
  Gene Symbol: ARTN;
  Gene Name: artemin;
  ENSP ID: ENSP00000436149

SEQ ID NO: 6513 - protein, 228 aa, Homo sapiens; identical to SEQ ID NO: 6505
  Payload ID: 1407;
  Gene Symbol: ARTN;
  Gene Name: artemin;
  Uniprot ID:  Q5T4W7;
  ENSP ID: ENSP00000436727

SEQ ID NO: 6514 - protein, 271 aa, Homo sapiens
  Payload ID: 1408;
  Gene Symbol: ARV1;
  Gene Name: ARV1 homolog, fatty acid homeostasis modulator;
  Uniprot ID:  Q9H2C2;
  ENSP ID: ENSP00000312458
MGNGGRSGLQQGKGNVDGVAATPTAASASCQYRCIECNQEAKELYRDYNHGVLKITICKSCQKPVDKYIEYDPVIILINAILCKAQAYRHILFNTQINIHGKLCIFCLLCEAYLRWWQLQDSNQNTAPDDLIRYAKEWDFYRMFAIAALEQTAYFIGIFTFLWVERPMTAKKKPNFILLLKALLLSSYGKLLLIPAVIWEHDYTSVCLKLIKVFVLTSNFQAIRVTLNINRKLSFLAVLSGLLLESIMVYFFQSMEWDVGSDYAIFKSQDF

SEQ ID NO: 6515 - protein, 231 aa, Homo sapiens
  Payload ID: 1408;
  Gene Symbol: ARV1;
  Gene Name: ARV1 homolog, fatty acid homeostasis modulator;
  ENSP ID: ENSP00000355618
MGNGGRSGLQQGKGNVDGVAATPTAASASCQYRCIECNQEAKELYRDYNHGVLKITICIHGKLCIFCLLCEAYLRWWQLQDSNQNTAPDDLIRYAKEWDFYRMFAIAALEQTAYFIGIFTFLWVERPMTAKKKPNFILLLKALLLSSYGKLLLIPAVIWEHDYTSVCLKLIKVFVLTSNFQAIRVTLNINRKLSFLAVLSGLLLESIMVYFFQSMEWDVGSDYAIFKSQDF

SEQ ID NO: 6516 - protein, 291 aa, Homo sapiens
  Payload ID: 1408;
  Gene Symbol: ARV1;
  Gene Name: ARV1 homolog, fatty acid homeostasis modulator;
  ENSP ID: ENSP00000394547
  MOD_RES (1)..(1): Any amino acid
XNVDGVAATPTAASASCQYRCIECNQEAKELYRDYNHGVLKITICKSCQKPVDKYIEYDPVIILINAILCKAQAYRHILFNTQINIHGKLCIFCLLCEAYLRWWQLQDSNQNTAPDDLIRYAKEWDFYRMFAIAALGWSAVAQSQLTAALNSWAQAILLPRPPQVAGTTEQTAYFIGIFTFLWVERPMTAKKKPNFILLLKALLLSSYGKLLLIPAVIWEHDYTSVCLKLIKVFVLTSNFQAIRVTLNINRKLSFLAVLSGLLLESIMVYFFQSMEWDVGSDYAIFKSQDF

SEQ ID NO: 6517 - protein, 268 aa, Homo sapiens
  Payload ID: 1408;
  Gene Symbol: ARV1;
  Gene Name: ARV1 homolog, fatty acid homeostasis modulator;
  ENSP ID: ENSP00000416039
  MOD_RES (1)..(1): Any amino acid
XGRSGLQQGKGNVDGVAATPTAASASCQYRCIECNQEAKELYRDYNHGVLKITICKSCQKPVDKYIEYDPVIILINAILCKAQAYRHILFNTQINIHGKLCIFCLLCEAYLRWWQLQDSNQNTAPDDLIRYAKEWDFYRMFAIAALEQTAYFIGIFTFLWVERPMTAKKKPNFILLLKALLLSSYGKLLLIPAVIWEHDYTSVCLKLIKVFVLTSNFQAIRVTLNINRKLSFLAVLSGLLLESIMVYFFQSMEWDVGSDYAIFKSQDF

SEQ ID NO: 6518 - protein, 122 aa, Homo sapiens
  Payload ID: 1408;
  Gene Symbol: ARV1;
  Gene Name: ARV1 homolog, fatty acid homeostasis modulator;
  ENSP ID: ENSP00000435420
  MOD_RES (1)..(1): Any amino acid
XQTAYFIGIFTFLWVERPMTAKKKPNFILLLKALLLSSYGKLLLIPAVIWEHDYTSVCLKLIKVFVLTSNFQAIRVTLNINRKLSFLAVLSGLLLESIMVYFFQSMEWDVGSDYAIFKSQDF

SEQ ID NO: 6519 - protein, 247 aa, Homo sapiens
  Payload ID: 1408;
  Gene Symbol: ARV1;
  Gene Name: ARV1 homolog, fatty acid homeostasis modulator;
  ENSP ID: ENSP00000436763
MGWQRLLLLPRPPASTGASNATRRPKSCTETITTKSCQKPVDKYIEYDPVIILINAILCKAQAYRHILFNTQINIHGKLCIFCLLCEAYLRWWQLQDSNQNTAPDDLIRYAKEWDFYRMFAIAALEQTAYFIGIFTFLWVERPMTAKKKPNFILLLKALLLSSYGKLLLIPAVIWEHDYTSVCLKLIKVFVLTSNFQAIRVTLNINRKLSFLAVLSGLLLESIMVYFFQSMEWDVGSDYAIFKSQDF

SEQ ID NO: 6520 - protein, 848 aa, Homo sapiens
  Payload ID: 1409;
  Gene Symbol: AHR;
  Gene Name: aryl hydrocarbon receptor;
  Uniprot ID:  P35869;
  ENSP ID: ENSP00000242057
MNSSSANITYASRKRRKPVQKTVKPIPAEGIKSNPSKRHRDRLNTELDRLASLLPFPQDVINKLDKLSVLRLSVSYLRAKSFFDVALKSSPTERNGGQDNCRAANFREGLNLQEGEFLLQALNGFVLVVTTDALVFYASSTIQDYLGFQQSDVIHQSVYELIHTEDRAEFQRQLHWALNPSQCTESGQGIEEATGLPQTVVCYNPDQIPPENSPLMERCFICRLRCLLDNSSGFLAMNFQGKLKYLHGQKKKGKDGSILPPQLALFAIATPLQPPSILEIRTKNFIFRTKHKLDFTPIGCDAKGRIVLGYTEAELCTRGSGYQFIHAADMLYCAESHIRMIKTGESGMIVFRLLTKNNRWTWVQSNARLLYKNGRPDYIIVTQRPLTDEEGTEHLRKRNTKLPFMFTTGEAVLYEATNPFPAIMDPLPLRTKNGTSGKDSATTSTLSKDSLNPSSLLAAMMQQDESIYLYPASSTSSTAPFENNFFNESMNECRNWQDNTAPMGNDTILKHEQIDQPQDVNSFAGGHPGLFQDSKNSDLYSIMKNLGIDFEDIRHMQNEKFFRNDFSGEVDFRDIDLTDEILTYVQDSLSKSPFIPSDYQQQQSLALNSSCMVQEHLHLEQQQQHHQKQVVVEPQQQLCQKMKHMQVNGMFENWNSNQFVPFNCPQQDPQQYNVFTDLHGISQEFPYKSEMDSMPYTQNFISCNQPVLPQHSKCTELDYPMGSFEPSPYPTTSSLEDFVTCLQLPENQKHGLNPQSAIITPQTCYAGAVSMYQCQPEPQHTHVGQMQYNPVLPGQQAFLNKFQNGVLNETYPAELNNINNTQTTTHLQPLHHPSEARPFPDLTSSGFL

SEQ ID NO: 6521 - protein, 848 aa, Homo sapiens; identical to SEQ ID NO: 6520
  Payload ID: 1409;
  Gene Symbol: AHR;
  Gene Name: aryl hydrocarbon receptor;
  Uniprot ID:  P35869;
  ENSP ID: ENSP00000436466

SEQ ID NO: 6522 - protein, 330 aa, Homo sapiens
  Payload ID: 1410;
  Gene Symbol: AIP;
  Gene Name: aryl hydrocarbon receptor interacting prt;
  Uniprot ID:  O00170;
  ENSP ID: ENSP00000279146
MADIIARLREDGIQKRVIQEGRGELPDFQDGTKATFHYRTLHSDDEGTVLDDSRARGKPMELIIGKKFKLPVWETIVCTMREGEIAQFLCDIKHVVLYPLVAKSLRNIAVGKDPLEGQRHCCGVAQMREHSSLGHADLDALQQNPQPLIFHMEMLKVESPGTYQQDPWAMTDEEKAKAVPLIHQEGNRLYREGHVKEAAAKYYDAIACLKNLQMKEQPGSPEWIQLDQQITPLLLNYCQCKLVVEEYYEVLDHCSSILNKYDDNVKAYFKRGKAHAAVWNAQEAQADFAKVLELDPALAPVVSRELRALEARIRQKDEEDKARFRGIFSH

SEQ ID NO: 6523 - protein, 232 aa, Homo sapiens
  Payload ID: 1410;
  Gene Symbol: AIP;
  Gene Name: aryl hydrocarbon receptor interacting prt;
  ENSP ID: ENSP00000434982
MADIIARLREDGIQKRVIQEGRGELPDFQDGTKATFHYRTLHSDDEGTVLDDSRARGKPMELIIGKKFKLPVWETIVCTMREGEIAQFLCDIKVESPGTYQQDPWAMTDEEKAKAVPLIHQEGNRLYREGHVKEAAAKYYDAIACLKNLQMKEQPGSPEWIQLDQQITPLLLNYCQCKLVVEEYYEVLDHCSSILNKYDDNVKAYFKRGKAHAAVWNAQEAQADFAKVLELD

SEQ ID NO: 6524 - protein, 188 aa, Homo sapiens
  Payload ID: 1410;
  Gene Symbol: AIP;
  Gene Name: aryl hydrocarbon receptor interacting prt;
  ENSP ID: ENSP00000476993
GQRHCCGVAQMREHSSLGHADLDALQQNPQPLIFHMEMLKVESPGTYQQDPWAMTDEEKAKAVPLIHQEGNRLYREGHVKEAAAKYYDAIACLKNLQMKEQPGSPEWIQLDQQITPLLLNYCQCKLVVEEYYEVLDHCSSILNKYDGEHRALGCRGLRVVREWPFSCHCWGQDLAFHNPHSELPRGPD

SEQ ID NO: 6525 - protein, 321 aa, Homo sapiens
  Payload ID: 1411;
  Gene Symbol: AIPL1;
  Gene Name: aryl hydrocarbon receptor interacting prt-like 1;
  Uniprot ID:  Q9NZN9;
  ENSP ID: ENSP00000250087
MDAALLLNVEGVKKTILHGGTGELPNFITGSRVIFHFRTMKCDEERTVIDDSRQVGQPMHIIIGNMFKLEVWEILLTSMRVHEVAEFWCDTIVDAPSDYQRETWNLSNHEKMKAVPVLHGEGNRLFKLGRYEEASSKYQEAIICLRNLQTKEKPWEVQWLKLEKMINTLILNYCQCLLKKEEYYEVLEHTSDILRHHPGIVKAYYVRARAHAEVWNEAEAKADLQKVLELEPSMQKAVRRELRLLENRMAEKQEEERLRCRNMLSQGATQPPAEPPTEPPAQSSTEPPAEPPTAPSAELSAGPPAEPATEPPPSPGHSLQH

SEQ ID NO: 6526 - protein, 61 aa, Homo sapiens
  Payload ID: 1411;
  Gene Symbol: AIPL1;
  Gene Name: aryl hydrocarbon receptor interacting prt-like 1;
  ENSP ID: ENSP00000370520
MDAALLLNVEGVKKTILHGGTGELPNFITGSRVSGAPPEQTGSPTAAFNIPGDLSFPHHEM

SEQ ID NO: 6527 - protein, 384 aa, Homo sapiens
  Payload ID: 1411;
  Gene Symbol: AIPL1;
  Gene Name: aryl hydrocarbon receptor interacting prt-like 1;
  Uniprot ID:  Q9NZN9;
  ENSP ID: ENSP00000370521
MDAALLLNVEGVKKTILHGGTGELPNFITGSRVIFHFRTMKCDEERTVIDDSRQVGQPMHIIIGNMFKLEVWEILLTSMRVHEVAEFWCDTIHTGVYPILSRSLRQMAQGKDPTEWHVHTCGLANMFAYHTLGYEDLDELQKEPQPLVFVIELLQVDAPSDYQRETWNLSNHEKMKAVPVLHGEGNRLFKLGRYEEASSKYQEAIICLRNLQTKEKPWEVQWLKLEKMINTLILNYCQCLLKKEEYYEVLEHTSDILRHHPGIVKAYYVRARAHAEVWNEAEAKADLQKVLELEPSMQKAVRRELRLLENRMAEKQEEERLRCRNMLSQGATQPPAEPPTEPPAQSSTEPPAEPPTAPSAELSAGPPAEPATEPPPSPGHSLQH

SEQ ID NO: 6528 - protein, 372 aa, Homo sapiens
  Payload ID: 1411;
  Gene Symbol: AIPL1;
  Gene Name: aryl hydrocarbon receptor interacting prt-like 1;
  ENSP ID: ENSP00000458456
MDAALLLNVEGVKKTILHGGTGELPNFITGSRERTVIDDSRQVGQPMHIIIGNMFKLEVWEILLTSMRVHEVAEFWCDTIHTGVYPILSRSLRQMAQGKDPTEWHVHTCGLANMFAYHTLGYEDLDELQKEPQPLVFVIELLQVDAPSDYQRETWNLSNHEKMKAVPVLHGEGNRLFKLGRYEEASSKYQEAIICLRNLQTKEKPWEVQWLKLEKMINTLILNYCQCLLKKEEYYEVLEHTSDILRHHPGIVKAYYVRARAHAEVWNEAEAKADLQKVLELEPSMQKAVRRELRLLENRMAEKQEEERLRCRNMLSQGATQPPAEPPTEPPAQSSTEPPAEPPTAPSAELSAGPPAEPATEPPPSPGHSLQH

SEQ ID NO: 6529 - protein, 324 aa, Homo sapiens
  Payload ID: 1411;
  Gene Symbol: AIPL1;
  Gene Name: aryl hydrocarbon receptor interacting prt-like 1;
  Uniprot ID:  Q9NZN9;
  ENSP ID: ENSP00000459522
MDAALLLNVEGVKKTILHGGTGELPNFITGSRHTGVYPILSRSLRQMAQGKDPTEWHVHTCGLANMFAYHTLGYEDLDELQKEPQPLVFVIELLQVDAPSDYQRETWNLSNHEKMKAVPVLHGEGNRLFKLGRYEEASSKYQEAIICLRNLQTKEKPWEVQWLKLEKMINTLILNYCQCLLKKEEYYEVLEHTSDILRHHPGIVKAYYVRARAHAEVWNEAEAKADLQKVLELEPSMQKAVRRELRLLENRMAEKQEEERLRCRNMLSQGATQPPAEPPTEPPAQSSTEPPAEPPTAPSAELSAGPPAEPATEPPPSPGHSLQH

SEQ ID NO: 6530 - protein, 270 aa, Homo sapiens
  Payload ID: 1411;
  Gene Symbol: AIPL1;
  Gene Name: aryl hydrocarbon receptor interacting prt-like 1;
  ENSP ID: ENSP00000459673
MDAALLLNVEGVKKTILHGGTGELPNFITGSRVIFHFRTMKCDEERTVIDDSRQVGQPMHIIIGNMFKLEVWEILLTSMRVHEVAEFWCDTIHTGVYPILSRSLRQMAQGKDPTEWHVHTCGLANMFAYHTLGYEDLDELQKEPQPLVFVIELLQVDAPSDYQRETWNLSNHEKMKAVPVLHGEGNRLFKLGRYEEASSKYQEAIICLRNLQTKEKPWEVQWLKLEKMINTLILNYCQCLLKKEEYYEVLEHTSDILRHHPGARGCRGGQ

SEQ ID NO: 6531 - protein, 262 aa, Homo sapiens
  Payload ID: 1411;
  Gene Symbol: AIPL1;
  Gene Name: aryl hydrocarbon receptor interacting prt-like 1;
  ENSP ID: ENSP00000460134
MDAALLLNVEGVKKTILHGGTGELPNFITGSRVIFHFRTMKCDEERTVIDDSRQVGQPMHIIIGNMFKLEVWEILLTSMRVHEVAEFWCDTIHTGVYPILSRSLRQMAQGKDPTEWHVHTCGLANMFAYHTLGYEDLDELQKEPQPLVFVIELLQRETWNLSNHEKMKAVPVLHGEGNRLFKLGRYEEASSKYQEAIICLRNLQTKEKPWEVQWLKLEKMINTLILNYCQCLLKKEEYYEVLEHTSDILRHHPGARGCRGGQ

SEQ ID NO: 6532 - protein, 216 aa, Homo sapiens
  Payload ID: 1411;
  Gene Symbol: AIPL1;
  Gene Name: aryl hydrocarbon receptor interacting prt-like 1;
  ENSP ID: ENSP00000460672
MDAALLLNVEGVKKTILHGGTGELPNFITGSRVIFHFRTMKCDEERTVIDDSRQVGQPMHIIIGNMFKLEVWEILLTSMRVHEVAEFWCDTIHTGVYPILSRSLRQMAQGKDPTEWHVHTCGLANMFAYHTLGYEDLDELQKEPQPLVFVIELLQLWGQVDAPSDYQRETWNLSNHEKMKAVPVLHGEGNRLFKLGRYEEASSKYQEAIICLRNLQ

SEQ ID NO: 6533 - protein, 360 aa, Homo sapiens
  Payload ID: 1411;
  Gene Symbol: AIPL1;
  Gene Name: aryl hydrocarbon receptor interacting prt-like 1;
  Uniprot ID:  Q9NZN9;
  ENSP ID: ENSP00000460827
MDAALLLNVEGVKKTILHGGTGELPNFITGSRVIFHFRTMKCDEERTVIDDSRQVGQPMHIIIGNMFKLEVWEILLTSMRVHEVAEFWCDTIHTGVYPILSRSLRQMAQGKDPTEWHVHTCGLANMFAYHTLGYEDLDELQKEPQPLVFVIELLQVDAPSDYQRETWNLSNHEKMKAVPVLHGEGNRLFKLGRYEEASSKYQEAIICLRNLQTKCLLKKEEYYEVLEHTSDILRHHPGIVKAYYVRARAHAEVWNEAEAKADLQKVLELEPSMQKAVRRELRLLENRMAEKQEEERLRCRNMLSQGATQPPAEPPTEPPAQSSTEPPAEPPTAPSAELSAGPPAEPATEPPPSPGHSLQH

SEQ ID NO: 6534 - protein, 362 aa, Homo sapiens
  Payload ID: 1411;
  Gene Symbol: AIPL1;
  Gene Name: aryl hydrocarbon receptor interacting prt-like 1;
  Uniprot ID:  Q9NZN9;
  ENSP ID: ENSP00000461287
MDAALLLNVEGVKKTILHGGTGELPNFITGSRVGQPMHIIIGNMFKLEVWEILLTSMRVHEVAEFWCDTIHTGVYPILSRSLRQMAQGKDPTEWHVHTCGLANMFAYHTLGYEDLDELQKEPQPLVFVIELLQVDAPSDYQRETWNLSNHEKMKAVPVLHGEGNRLFKLGRYEEASSKYQEAIICLRNLQTKEKPWEVQWLKLEKMINTLILNYCQCLLKKEEYYEVLEHTSDILRHHPGIVKAYYVRARAHAEVWNEAEAKADLQKVLELEPSMQKAVRRELRLLENRMAEKQEEERLRCRNMLSQGATQPPAEPPTEPPAQSSTEPPAEPPTAPSAELSAGPPAEPATEPPPSPGHSLQH

SEQ ID NO: 6535 - protein, 136 aa, Homo sapiens
  Payload ID: 1411;
  Gene Symbol: AIPL1;
  Gene Name: aryl hydrocarbon receptor interacting prt-like 1;
  ENSP ID: ENSP00000467360
  MOD_RES (1)..(1): Any amino acid
XEGVKKTILHGGTGELPNFITGSRVIFHFRTMKCDEERTVIDDSRQVGQPMHIIIGNMFKLEVWEILLTSMRVHEVAEFWCDTIPEPTPSWFSPLNAKTAPLLSPHVQPAGMSSPSLEVFKEQPDAFLCFMLWVGG

SEQ ID NO: 6536 - protein, 326 aa, Homo sapiens
  Payload ID: 1411;
  Gene Symbol: AIPL1;
  Gene Name: aryl hydrocarbon receptor interacting prt-like 1;
  ENSP ID: ENSP00000481337
MDAALLLNVEGVKKTILHGGTGELPNFITGSRVIFHFRTMKCDEERTVIDDSRQVGQPMHIIIGNMFKLEVWEILLTSMRVHEVAEFWCDTIHTGVYPILSRSLRQMAQGKDPTEWHVHTCGLANMFAYHTLGYEDLDELQKEPQPLVFVIELLQVDAPSDYQRETWNLSNHEKMKAVPVLHGEGNRLFKLGRYEEASSKYQEAIICLRNLQTKEKPWEVQWLKLEKMINTLILNYCQCLLKKEEYYEVLEHTSDILRHHPGIVKAYYVRARAHAEVWNEAEAKADLQKVLELEPSMQKAVRRELRLLENAWRRSRRRSGCAAGTC

SEQ ID NO: 6537 - protein, 787 aa, Homo sapiens
  Payload ID: 1412;
  Gene Symbol: ARNT;
  Gene Name: aryl hydrocarbon receptor nuclear translocator;
  Uniprot ID:  P27540;
  ENSP ID: ENSP00000346372
MAATTANPEMTSDVPSLGPAIASGNSGPGIQGGGAIVQRAIKRRPGLDFDDDGEGNSKFLRCDDDQMSNDKERFARSDDEQSSADKERLARENHSEIERRRRNKMTAYITELSDMVPTCSALARKPDKLTILRMAVSHMKSLRGTGNTSTDGSYKPSFLTDQELKHLILEAADGFLFIVSCETGRVVYVSDSVTPVLNQPQSEWFGSTLYDQVHPDDVDKLREQLSTSENALTGRILDLKTGTVKKEGQQSSMRMCMGSRRSFICRMRCGSSSVDPVSVNRLSFVRNRCRNGLGSVKDGEPHFVVVHCTGYIKAWPPAGVSLPDDDPEAGQGSKFCLVAIGRLQVTSSPNCTDMSNVCQPTEFISRHNIEGIFTFVDHRCVATVGYQPQELLGKNIVEFCHPEDQQLLRDSFQQVVKLKGQVLSVMFRFRSKNQEWLWMRTSSFTFQNPYSDEIEYIICTNTNVKNSSQEPRPTLSNTIQRPQLGPTANLPLEMGSGQLAPRQQQQQTELDMVPGRDGLASYNHSQVVQPVTTTGPEHSKPLEKSDGLFAQDRDPRFSEIYHNINADQSKGISSSTVPATQQLFSQGNTFPPTPRPAENFSGLAPPVTIVQPSASAGQMLAQISRHSNPTQGATPTWTPTTRSGFSAQQVATQATAKTRTSQFGVGSFQTPSSFSSMSLPGAPTASPGAAAYPSLTNRGSNFAPETGQTAGQFQTRTAEGVGVWPQWQGQQPHHRSSSSEQHVQQPPAQQPGQPEVFQEMLSMLGDQSNSYNNEEFPDLTMFPPFSE

SEQ ID NO: 6538 - protein, 789 aa, Homo sapiens
  Payload ID: 1412;
  Gene Symbol: ARNT;
  Gene Name: aryl hydrocarbon receptor nuclear translocator;
  Uniprot ID:  P27540;
  ENSP ID: ENSP00000351407
MAATTANPEMTSDVPSLGPAIASGNSGPGIQGGGAIVQRAIKRRPGLDFDDDGEGNSKFLRCDDDQMSNDKERFARSDDEQSSADKERLARENHSEIERRRRNKMTAYITELSDMVPTCSALARKPDKLTILRMAVSHMKSLRGTGNTSTDGSYKPSFLTDQELKHLILEAADGFLFIVSCETGRVVYVSDSVTPVLNQPQSEWFGSTLYDQVHPDDVDKLREQLSTSENALTGRILDLKTGTVKKEGQQSSMRMCMGSRRSFICRMRCGSSSVDPVSVNRLSFVRNRCRNGLGSVKDGEPHFVVVHCTGYIKAWPPAGVSLPDDDPEAGQGSKFCLVAIGRLQVTSSPNCTDMSNVCQPTEFISRHNIEGIFTFVDHRCVATVGYQPQELLGKNIVEFCHPEDQQLLRDSFQQVVKLKGQVLSVMFRFRSKNQEWLWMRTSSFTFQNPYSDEIEYIICTNTNVKNSSQEPRPTLSNTIQRPQLGPTANLPLEMGSGQLAPRQQQQQTELDMVPGRDGLASYNHSQVVQPVTTTGPEHSKPLEKSDGLFAQDRDPRFSEIYHNINADQSKGISSSTVPATQQLFSQGNTFPPTPRPAENFRNSGLAPPVTIVQPSASAGQMLAQISRHSNPTQGATPTWTPTTRSGFSAQQVATQATAKTRTSQFGVGSFQTPSSFSSMSLPGAPTASPGAAAYPSLTNRGSNFAPETGQTAGQFQTRTAEGVGVWPQWQGQQPHHRSSSSEQHVQQPPAQQPGQPEVFQEMLSMLGDQSNSYNNEEFPDLTMFPPFSE

SEQ ID NO: 6539 - protein, 775 aa, Homo sapiens
  Payload ID: 1412;
  Gene Symbol: ARNT;
  Gene Name: aryl hydrocarbon receptor nuclear translocator;
  Uniprot ID:  P27540;
  ENSP ID: ENSP00000423851
MTSDVPSLGPAIASGNSGPGIQGGGAIVQRAIKRRPGLDFDDDGEGNSKFLRCDDDQMSNDKERFARSDDEQSSADKERLARENHSEIERRRRNKMTAYITELSDMVPTCSALARKPDKLTILRMAVSHMKSLRGTGNTSTDGSYKPSFLTDQELKHLILEAADGFLFIVSCETGRVVYVSDSVTPVLNQPQSEWFGSTLYDQVHPDDVDKLREQLSTSENALTGRILDLKTGTVKKEGQQSSMRMCMGSRRSFICRMRCGSSSVDPVSVNRLSFVRNRCRNGLGSVKDGEPHFVVVHCTGYIKAWPPADDDPEAGQGSKFCLVAIGRLQVTSSPNCTDMSNVCQPTEFISRHNIEGIFTFVDHRCVATVGYQPQELLGKNIVEFCHPEDQQLLRDSFQQVVKLKGQVLSVMFRFRSKNQEWLWMRTSSFTFQNPYSDEIEYIICTNTNVKNSSQEPRPTLSNTIQRPQLGPTANLPLEMGSGQLAPRQQQQQTELDMVPGRDGLASYNHSQVVQPVTTTGPEHSKPLEKSDGLFAQDRDPRFSEIYHNINADQSKGISSSTVPATQQLFSQGNTFPPTPRPAENFRNSGLAPPVTIVQPSASAGQMLAQISRHSNPTQGATPTWTPTTRSGFSAQQVATQATAKTRTSQFGVGSFQTPSSFSSMSLPGAPTASPGAAAYPSLTNRGSNFAPETGQTAGQFQTRTAEGVGVWPQWQGQQPHHRSSSSEQHVQQPPAQQPGQPEVFQEMLSMLGDQSNSYNNEEFPDLTMFPPFSE

SEQ ID NO: 6540 - protein, 55 aa, Homo sapiens
  Payload ID: 1412;
  Gene Symbol: ARNT;
  Gene Name: aryl hydrocarbon receptor nuclear translocator;
  ENSP ID: ENSP00000425363
MAATTANPEMTSDVPSLGPAIASGNSGPGIQGGGAIVQRAIKRRPGWSLAVVAQA

SEQ ID NO: 6541 - protein, 416 aa, Homo sapiens
  Payload ID: 1412;
  Gene Symbol: ARNT;
  Gene Name: aryl hydrocarbon receptor nuclear translocator;
  ENSP ID: ENSP00000425899
MAATTANPEMTSDVPSLGPAIASGNSGPGIQGGGAIVQRAIKRRPGLDFDDDGEGNSKFLRCDDDQMSNDKERFARSDDEQSSADKERLARENHSEIERRRRNKMTAYITELSDMVPTCSALARKPDKLTILRMAVSHMKSLRGTGNTSTDGSYKPSFLTDQELKHLILEAADGFLFIVSCETGRVVYVSDSVTPVLNQPQSEWFGSTLYDQVHPDDVDKLREQLSTSENALTGRILDLKTGTVKKEGQQSSMRMCMGSRRSFICRMRCGSSSVDPVSVNRLSFVRNRCRNGLGSVKDGEPHFVVVHCTGYIKAWPPAGVSLPDDDPEAGQGSKFCLVAIGRLQVTSSPNCTDMSNVCQPTEFISRHNIEGIFTFVDHRCVATVGYQPQELLGKNIVEFCHPEDQQLLRDSFQQEL

SEQ ID NO: 6542 - protein, 774 aa, Homo sapiens
  Payload ID: 1412;
  Gene Symbol: ARNT;
  Gene Name: aryl hydrocarbon receptor nuclear translocator;
  Uniprot ID:  P27540;
  ENSP ID: ENSP00000427571
MAATTANPEMTSDVPSLGPAIASGNSGPGIQGGGAIVQRAIKRRPGLDFDDDGEGNSKFLRCDDDQMSNDKERFARENHSEIERRRRNKMTAYITELSDMVPTCSALARKPDKLTILRMAVSHMKSLRGTGNTSTDGSYKPSFLTDQELKHLILEAADGFLFIVSCETGRVVYVSDSVTPVLNQPQSEWFGSTLYDQVHPDDVDKLREQLSTSENALTGRILDLKTGTVKKEGQQSSMRMCMGSRRSFICRMRCGSSSVDPVSVNRLSFVRNRCRNGLGSVKDGEPHFVVVHCTGYIKAWPPAGVSLPDDDPEAGQGSKFCLVAIGRLQVTSSPNCTDMSNVCQPTEFISRHNIEGIFTFVDHRCVATVGYQPQELLGKNIVEFCHPEDQQLLRDSFQQVVKLKGQVLSVMFRFRSKNQEWLWMRTSSFTFQNPYSDEIEYIICTNTNVKNSSQEPRPTLSNTIQRPQLGPTANLPLEMGSGQLAPRQQQQQTELDMVPGRDGLASYNHSQVVQPVTTTGPEHSKPLEKSDGLFAQDRDPRFSEIYHNINADQSKGISSSTVPATQQLFSQGNTFPPTPRPAENFRNSGLAPPVTIVQPSASAGQMLAQISRHSNPTQGATPTWTPTTRSGFSAQQVATQATAKTRTSQFGVGSFQTPSSFSSMSLPGAPTASPGAAAYPSLTNRGSNFAPETGQTAGQFQTRTAEGVGVWPQWQGQQPHHRSSSSEQHVQQPPAQQPGQPEVFQEMLSMLGDQSNSYNNEEFPDLTMFPPFSE

SEQ ID NO: 6543 - protein, 625 aa, Homo sapiens
  Payload ID: 1413;
  Gene Symbol: ARNTL;
  Gene Name: aryl hydrocarbon receptor nuclear translocator-like;
  Uniprot ID:  O00327;
  ENSP ID: ENSP00000374357
MADQRMDISSTISDFMSPGPTDLLSSSLGTSGVDCNRKRKGSSTDYQESMDTDKDDPHGRLEYTEHQGRIKNAREAHSQIEKRRRDKMNSFIDELASLVPTCNAMSRKLDKLTVLRMAVQHMKTLRGATNPYTEANYKPTFLSDDELKHLILRAADGFLFVVGCDRGKILFVSESVFKILNYSQNDLIGQSLFDYLHPKDIAKVKEQLSSSDTAPRERLIDAKTGLPVKTDITPGPSRLCSGARRSFFCRMKCNRPSVKVEDKDFPSTCSKKKDRKSFCTIHSTGYLKSWPPTKMGLDEDNEPDNEGCNLSCLVAIGRLHSHVVPQPVNGEIRVKSMEYVSRHAIDGKFVFVDQRATAILAYLPQELLGTSCYEYFHQDDIGHLAECHRQVLQTREKITTNCYKFKIKDGSFITLRSRWFSFMNPWTKEVEYIVSTNTVVLANVLEGGDPTFPQLTASPHSMDSMLPSGEGGPKRTHPTVPGIPGGTRAGAGKIGRMIAEEIMEIHRIRGSSPSSCGSSPLNITSTPPPDASSPGGKKILNGGTPDIPSSGLLSGQAQENPGYPYSDSSSILGENPHIGIDMIDNDQGSSSPSNDEAAMAVIMSLLEADAGLGGPVDFSDLPWPL

SEQ ID NO: 6544 - protein, 626 aa, Homo sapiens
  Payload ID: 1413;
  Gene Symbol: ARNTL;
  Gene Name: aryl hydrocarbon receptor nuclear translocator-like;
  Uniprot ID:  O00327;
  ENSP ID: ENSP00000384517
MADQRMDISSTISDFMSPGPTDLLSSSLGTSGVDCNRKRKGSSTDYQESMDTDKDDPHGRLEYTEHQGRIKNAREAHSQIEKRRRDKMNSFIDELASLVPTCNAMSRKLDKLTVLRMAVQHMKTLRGATNPYTEANYKPTFLSDDELKHLILRAADGFLFVVGCDRGKILFVSESVFKILNYSQNDLIGQSLFDYLHPKDIAKVKEQLSSSDTAPRERLIDAKTGLPVKTDITPGPSRLCSGARRSFFCRMKCNRPSVKVEDKDFPSTCSKKKADRKSFCTIHSTGYLKSWPPTKMGLDEDNEPDNEGCNLSCLVAIGRLHSHVVPQPVNGEIRVKSMEYVSRHAIDGKFVFVDQRATAILAYLPQELLGTSCYEYFHQDDIGHLAECHRQVLQTREKITTNCYKFKIKDGSFITLRSRWFSFMNPWTKEVEYIVSTNTVVLANVLEGGDPTFPQLTASPHSMDSMLPSGEGGPKRTHPTVPGIPGGTRAGAGKIGRMIAEEIMEIHRIRGSSPSSCGSSPLNITSTPPPDASSPGGKKILNGGTPDIPSSGLLSGQAQENPGYPYSDSSSILGENPHIGIDMIDNDQGSSSPSNDEAAMAVIMSLLEADAGLGGPVDFSDLPWPL

SEQ ID NO: 6545 - protein, 582 aa, Homo sapiens
  Payload ID: 1413;
  Gene Symbol: ARNTL;
  Gene Name: aryl hydrocarbon receptor nuclear translocator-like;
  Uniprot ID:  O00327;
  ENSP ID: ENSP00000385581
MINIESMDTDKDDPHGRLEYTEHQGRIKNAREAHSQIEKRRRDKMNSFIDELASLVPTCNAMSRKLDKLTVLRMAVQHMKTLRGATNPYTEANYKPTFLSDDELKHLILRAADGFLFVVGCDRGKILFVSESVFKILNYSQNDLIGQSLFDYLHPKDIAKVKEQLSSSDTAPRERLIDAKTGLPVKTDITPGPSRLCSGARRSFFCRMKCNRPSVKVEDKDFPSTCSKKKDRKSFCTIHSTGYLKSWPPTKMGLDEDNEPDNEGCNLSCLVAIGRLHSHVVPQPVNGEIRVKSMEYVSRHAIDGKFVFVDQRATAILAYLPQELLGTSCYEYFHQDDIGHLAECHRQVLQTREKITTNCYKFKIKDGSFITLRSRWFSFMNPWTKEVEYIVSTNTVVLANVLEGGDPTFPQLTASPHSMDSMLPSGEGGPKRTHPTVPGIPGGTRAGAGKIGRMIAEEIMEIHRIRGSSPSSCGSSPLNITSTPPPDASSPGGKKILNGGTPDIPSSGLLSGQAQENPGYPYSDSSSILGENPHIGIDMIDNDQGSSSPSNDEAAMAVIMSLLEADAGLGGPVDFSDLPWPL

SEQ ID NO: 6546 - protein, 624 aa, Homo sapiens
  Payload ID: 1413;
  Gene Symbol: ARNTL;
  Gene Name: aryl hydrocarbon receptor nuclear translocator-like;
  Uniprot ID:  O00327;
  ENSP ID: ENSP00000385897
MSKEAVSLWALTVSLQPPVPLCVCREMTGSGRRKQQCVTLPFISRELCFYLLLFPPPRLEYTEHQGRIKNAREAHSQIEKRRRDKMNSFIDELASLVPTCNAMSRKLDKLTVLRMAVQHMKTLRGATNPYTEANYKPTFLSDDELKHLILRAADGFLFVVGCDRGKILFVSESVFKILNYSQNDLIGQSLFDYLHPKDIAKVKEQLSSSDTAPRERLIDAKTGLPVKTDITPGPSRLCSGARRSFFCRMKCNRPSVKVEDKDFPSTCSKKKADRKSFCTIHSTGYLKSWPPTKMGLDEDNEPDNEGCNLSCLVAIGRLHSHVVPQPVNGEIRVKSMEYVSRHAIDGKFVFVDQRATAILAYLPQELLGTSCYEYFHQDDIGHLAECHRQVLQTREKITTNCYKFKIKDGSFITLRSRWFSFMNPWTKEVEYIVSTNTVVLANVLEGGDPTFPQLTASPHSMDSMLPSGEGGPKRTHPTVPGIPGGTRAGAGKIGRMIAEEIMEIHRIRGSSPSSCGSSPLNITSTPPPDASSPGGKKILNGGTPDIPSSGLLSGQAQENPGYPYSDSSSILGENPHIGIDMIDNDQGSSSPSNDEAAMAVIMSLLEADAGLGGPVDFSDLPWPL

SEQ ID NO: 6547 - protein, 583 aa, Homo sapiens
  Payload ID: 1413;
  Gene Symbol: ARNTL;
  Gene Name: aryl hydrocarbon receptor nuclear translocator-like;
  Uniprot ID:  O00327;
  ENSP ID: ENSP00000385915
MINIESMDTDKDDPHGRLEYTEHQGRIKNAREAHSQIEKRRRDKMNSFIDELASLVPTCNAMSRKLDKLTVLRMAVQHMKTLRGATNPYTEANYKPTFLSDDELKHLILRAADGFLFVVGCDRGKILFVSESVFKILNYSQNDLIGQSLFDYLHPKDIAKVKEQLSSSDTAPRERLIDAKTGLPVKTDITPGPSRLCSGARRSFFCRMKCNRPSVKVEDKDFPSTCSKKKADRKSFCTIHSTGYLKSWPPTKMGLDEDNEPDNEGCNLSCLVAIGRLHSHVVPQPVNGEIRVKSMEYVSRHAIDGKFVFVDQRATAILAYLPQELLGTSCYEYFHQDDIGHLAECHRQVLQTREKITTNCYKFKIKDGSFITLRSRWFSFMNPWTKEVEYIVSTNTVVLANVLEGGDPTFPQLTASPHSMDSMLPSGEGGPKRTHPTVPGIPGGTRAGAGKIGRMIAEEIMEIHRIRGSSPSSCGSSPLNITSTPPPDASSPGGKKILNGGTPDIPSSGLLSGQAQENPGYPYSDSSSILGENPHIGIDMIDNDQGSSSPSNDEAAMAVIMSLLEADAGLGGPVDFSDLPWPL

SEQ ID NO: 6548 - protein, 100 aa, Homo sapiens
  Payload ID: 1413;
  Gene Symbol: ARNTL;
  Gene Name: aryl hydrocarbon receptor nuclear translocator-like;
  ENSP ID: ENSP00000431488
MADQRMDISSTISDFMSPGPTDLLSSSLGTSGVDCNRKRKGSSTDYQESMDTDKDDPHGRLEYTEHQGRIKNAREAHSQIEKRRRDKMNSFIDELASLVP

SEQ ID NO: 6549 - protein, 59 aa, Homo sapiens
  Payload ID: 1413;
  Gene Symbol: ARNTL;
  Gene Name: aryl hydrocarbon receptor nuclear translocator-like;
  ENSP ID: ENSP00000431566
MADQRMDISSTISDFMSPGPTDLLSSSLGTSGVDCNRKRKGSSTDYQESMDTDKDDPHG

SEQ ID NO: 6550 - protein, 76 aa, Homo sapiens
  Payload ID: 1413;
  Gene Symbol: ARNTL;
  Gene Name: aryl hydrocarbon receptor nuclear translocator-like;
  ENSP ID: ENSP00000433540
MADQRMDISSTISDFMSPGPTDLLSSSLGTSGVDCNRKRKGSSTDYQESMDTDKDDPHGRLEYTEHQGRIKNAREA

SEQ ID NO: 6551 - protein, 135 aa, Homo sapiens
  Payload ID: 1413;
  Gene Symbol: ARNTL;
  Gene Name: aryl hydrocarbon receptor nuclear translocator-like;
  ENSP ID: ENSP00000433571
MADQRMDISSTISDFMSPGPTDLLSSSLGTSGVDCNRKRKGSSTDYQESMDTDKDDPHGRLEYTEHQGRIKNAREAHSQIEKRRRDKMNSFIDELASLVPTCNAMSRKLDKLTVLRMAVQHMKTLRGATNPYTEA

SEQ ID NO: 6552 - protein, 23 aa, Homo sapiens
  Payload ID: 1413;
  Gene Symbol: ARNTL;
  Gene Name: aryl hydrocarbon receptor nuclear translocator-like;
  ENSP ID: ENSP00000434044
MADQRMDISSTISDFMSPGPTDL

SEQ ID NO: 6553 - protein, 46 aa, Homo sapiens
  Payload ID: 1413;
  Gene Symbol: ARNTL;
  Gene Name: aryl hydrocarbon receptor nuclear translocator-like;
  ENSP ID: ENSP00000434263
MINIESMDTDKDDPHGRLEYTEHQGRIKNAREAHSQIEKRRRDKMN

SEQ ID NO: 6554 - protein, 60 aa, Homo sapiens
  Payload ID: 1413;
  Gene Symbol: ARNTL;
  Gene Name: aryl hydrocarbon receptor nuclear translocator-like;
  ENSP ID: ENSP00000434781
MADQRMDISSTISDFMSPGPTDLLSSSLGTSGVDCNRKRKGSSTDYQLEYTEHQGRIKNA

SEQ ID NO: 6555 - protein, 141 aa, Homo sapiens
  Payload ID: 1413;
  Gene Symbol: ARNTL;
  Gene Name: aryl hydrocarbon receptor nuclear translocator-like;
  ENSP ID: ENSP00000436313
MINIESMDTDKDDPHGRLEYTEHQGRIKNAREAHSQIEKRRRDKMNSFIDELASLVPTCNAMSRKLDKLTVLRMAVQHMKTLRGATNPYTEANYKPTFLSDDELKHLILRAADGFLFVVGCDRGKILFVSESVFKILNYSQ

SEQ ID NO: 6556 - protein, 171 aa, Homo sapiens
  Payload ID: 1413;
  Gene Symbol: ARNTL;
  Gene Name: aryl hydrocarbon receptor nuclear translocator-like;
  ENSP ID: ENSP00000436442
RATAILAYLPQELLGTSCYEYFHQDDIGHLAECHRQVLQTREKITTNCYKFKIKDGSFITLRSRWFSFMNPWTKEVEYIVSTNTVVLSRVDTGHLGQVEWCTVLSRPDSRFLIAGMFTEPTSWKAGTQPSHSSQHPPTAWTACCPLEKVAQRGPTPLFQGFQGEPGLGQEK

SEQ ID NO: 6557 - protein, 72 aa, Homo sapiens
  Payload ID: 1413;
  Gene Symbol: ARNTL;
  Gene Name: aryl hydrocarbon receptor nuclear translocator-like;
  ENSP ID: ENSP00000436721
MINIESMDTDKDDPHGRLEYTEHQGRIKNAREAHSQIEKRRRDKMNSFIDELASLVPTCNAMSRKLDKLTVL

SEQ ID NO: 6558 - protein, 588 aa, Homo sapiens
  Payload ID: 1414;
  Gene Symbol: ARNTL2;
  Gene Name: aryl hydrocarbon receptor nuclear translocator-like 2;
  Uniprot ID:  Q8WYA1;
  ENSP ID: ENSP00000261178
MAAEEEAAAGGKVLREENQCIAPVVSSRVSPGTRPTAMGSFSSHMTEFPRKRKGSDSDPSQEAHSQTEKRRRDKMNNLIEELSAMIPQCNPMARKLDKLTVLRMAVQHLRSLKGLTNSYVGSNYRPSFLQDNELRHLILKTAEGFLFVVGCERGKILFVSKSVSKILNYDQASLTGQSLFDFLHPKDVAKVKEQLSSFDISPREKLIDAKTGLQVHSNLHAGRTRVYSGSRRSFFCRIKSCKISVKEEHGCLPNSKKKEHRKFYTIHCTGYLRSWPPNIVGMEEERNSKKDNSNFTCLVAIGRLQPYIVPQNSGEINVKPTEFITRFAVNGKFVYVDQRATAILGYLPQELLGTSCYEYFHQDDHNNLTDKHKAVLQSKEKILTDSYKFRAKDGSFVTLKSQWFSFTNPWTKELEYIVSVNTLVLGHSEPGEASFLPCSSQSSEESSRQSCMSVPGMSTGTVLGAGSIGTDIANEILDLQRLQSSSYLDDSSPTGLMKDTHTVNCRSMSNKELFPPSPSEMGELEATRQNQSTVAVHSHEPLLSDGAQLDFDALCDNDDTAMAAFMNYLEAEGGLGDPGDFSDIQWTL

SEQ ID NO: 6559 - protein, 636 aa, Homo sapiens
  Payload ID: 1414;
  Gene Symbol: ARNTL2;
  Gene Name: aryl hydrocarbon receptor nuclear translocator-like 2;
  Uniprot ID:  Q8WYA1;
  ENSP ID: ENSP00000266503
MAAEEEAAAGGKVLREENQCIAPVVSSRVSPGTRPTAMGSFSSHMTEFPRKRKGSDSDPSQSGIMTEKVVEKLSQNPLTYLLSTRIEISASSGSRVEDGEHQVKMKAFREAHSQTEKRRRDKMNNLIEELSAMIPQCNPMARKLDKLTVLRMAVQHLRSLKGLTNSYVGSNYRPSFLQDNELRHLILKTAEGFLFVVGCERGKILFVSKSVSKILNYDQASLTGQSLFDFLHPKDVAKVKEQLSSFDISPREKLIDAKTGLQVHSNLHAGRTRVYSGSRRSFFCRIKSCKISVKEEHGCLPNSKKKEHRKFYTIHCTGYLRSWPPNIVGMEEERNSKKDNSNFTCLVAIGRLQPYIVPQNSGEINVKPTEFITRFAVNGKFVYVDQRATAILGYLPQELLGTSCYEYFHQDDHNNLTDKHKAVLQSKEKILTDSYKFRAKDGSFVTLKSQWFSFTNPWTKELEYIVSVNTLVLGHSEPGEASFLPCSSQSSEESSRQSCMSVPGMSTGTVLGAGSIGTDIANEILDLQRLQSSSYLDDSSPTGLMKDTHTVNCRSMSNKELFPPSPSEMGELEATRQNQSTVAVHSHEPLLSDGAQLDFDALCDNDDTAMAAFMNYLEAEGGLGDPGDFSDIQWTL

SEQ ID NO: 6560 - protein, 622 aa, Homo sapiens
  Payload ID: 1414;
  Gene Symbol: ARNTL2;
  Gene Name: aryl hydrocarbon receptor nuclear translocator-like 2;
  Uniprot ID:  Q8WYA1;
  ENSP ID: ENSP00000312247
MAAEEEAAAGGKVLREENQCIAPVVSSRVSPGTRPTAMGSFSSHMTEFPRKRKGSDSDPSQSGIMTEKVVEKLSQNPLTYLLSTRIEISASSGSREAHSQTEKRRRDKMNNLIEELSAMIPQCNPMARKLDKLTVLRMAVQHLRSLKGLTNSYVGSNYRPSFLQDNELRHLILKTAEGFLFVVGCERGKILFVSKSVSKILNYDQASLTGQSLFDFLHPKDVAKVKEQLSSFDISPREKLIDAKTGLQVHSNLHAGRTRVYSGSRRSFFCRIKSCKISVKEEHGCLPNSKKKEHRKFYTIHCTGYLRSWPPNIVGMEEERNSKKDNSNFTCLVAIGRLQPYIVPQNSGEINVKPTEFITRFAVNGKFVYVDQRATAILGYLPQELLGTSCYEYFHQDDHNNLTDKHKAVLQSKEKILTDSYKFRAKDGSFVTLKSQWFSFTNPWTKELEYIVSVNTLVLGHSEPGEASFLPCSSQSSEESSRQSCMSVPGMSTGTVLGAGSIGTDIANEILDLQRLQSSSYLDDSSPTGLMKDTHTVNCRSMSNKELFPPSPSEMGELEATRQNQSTVAVHSHEPLLSDGAQLDFDALCDNDDTAMAAFMNYLEAEGGLGDPGDFSDIQWTL

SEQ ID NO: 6561 - protein, 599 aa, Homo sapiens
  Payload ID: 1414;
  Gene Symbol: ARNTL2;
  Gene Name: aryl hydrocarbon receptor nuclear translocator-like 2;
  Uniprot ID:  Q8WYA1;
  ENSP ID: ENSP00000379238
MAAEEEAAAGGEVAGGEATAPGKVLREENQCIAPVVSSRVSPGTRPTAMGSFSSHMTEFPRKRKGSDSDPSQEAHSQTEKRRRDKMNNLIEELSAMIPQCNPMARKLDKLTVLRMAVQHLRSLKGLTNSYVGSNYRPSFLQDNELRHLILKTAEGFLFVVGCERGKILFVSKSVSKILNYDQASLTGQSLFDFLHPKDVAKVKEQLSSFDISPREKLIDAKTGLQVHSNLHAGRTRVYSGSRRSFFCRIKSCKISVKEEHGCLPNSKKKEHRKFYTIHCTGYLRSWPPNIVGMEEERNSKKDNSNFTCLVAIGRLQPYIVPQNSGEINVKPTEFITRFAVNGKFVYVDQRATAILGYLPQELLGTSCYEYFHQDDHNNLTDKHKAVLQSKEKILTDSYKFRAKDGSFVTLKSQWFSFTNPWTKELEYIVSVNTLVLGHSEPGEASFLPCSSQSSEESSRQSCMSVPGMSTGTVLGAGSIGTDIANEILDLQRLQSSSYLDDSSPTGLMKDTHTVNCRSMSNKELFPPSPSEMGELEATRQNQSTVAVHSHEPLLSDGAQLDFDALCDNDDTAMAAFMNYLEAEGGLGDPGDFSDIQWTL

SEQ ID NO: 6562 - protein, 588 aa, Homo sapiens
  Payload ID: 1414;
  Gene Symbol: ARNTL2;
  Gene Name: aryl hydrocarbon receptor nuclear translocator-like 2;
  ENSP ID: ENSP00000400185
  MOD_RES (1)..(1): Any amino acid
XPVVSSRVSPGTRPTAMGSFSSHMTEFPRKRKGSDSDPSHQNPLTYLLSTRIEISASSGSREAHSQTEKRRRDKMNNLIEELSAMIPQCNPMARKLDKLTVLRMAVQHLRSLKGLTNSYVGSNYRPSFLQDNELRHLILKTAEGFLFVVGCERGKILFVSKSVSKILNYDQASLTGQSLFDFLHPKDVAKVKEQLSSFDISPREKLIDAKTGLQVHSNLHAGRTRVYSGSRRSFFCRIKSCKISVKEEHGCLPNSKKKEHRKFYTIHCTGYLRSWPPNIVGMEEERNSKKDNSNFTCLVAIGRLQPYIVPQNSGEINVKPTEFITRFAVNGKFVYVDQRATAILGYLPQELLGTSCYEYFHQDDHNNLTDKHKAVLQSKEKILTDSYKFRAKDGSFVTLKSQWFSFTNPWTKELEYIVSVNTLVLGHSEPGEASFLPCSSQSSEESSRQSCMSVPGMSTGTVLGAGSIGTDIANEILDLQRLQSSSYLDDSSPTGLMKDTHTVNCRSMSNKELFPPSPSEMGELEATRQNQSTVAVHSHEPLLSDGAQLDFDALCDNDDTAMAAFMNYLEAEGGLGDPGDFSDIQWTL

SEQ ID NO: 6563 - protein, 540 aa, Homo sapiens
  Payload ID: 1414;
  Gene Symbol: ARNTL2;
  Gene Name: aryl hydrocarbon receptor nuclear translocator-like 2;
  Uniprot ID:  Q8WYA1;
  ENSP ID: ENSP00000438545
MAAEEEAAAGGEVAGGEATAPGKVLREENQCIAPVVSSRVSPGTRPTAMGSFSSHMTEFPRKRKGSDSDPSQEAHSQTEKRRRDKMNNLIEELSAMIPQCNPMARKLDKLTVLRMAVQHLRSLKGLTNSYVGSNYRPSFLQDNELRHLILKTAEGFLFVVGCERGKILFVSKSVSKILNYDQASLTGQSLFDFLHPKDVAKVKEQLSSFDISPREKLIDAKTGLQVHSNLHAGRTRVYSGSRRSFFCRIKSCKISVKEEHGCLPNSKKKEHRKFYTIHCTGYLRSWPPNIVGMEEERNSKKDNSNFTCLVAIGRLQPYIVPQNSGEINVKPTEFITRFAVNGKFVYVDQRATAILGYLPQELLGTSCYEYFHQDDHNNLTDKHKAVLQSKEKILTDSYKFRAKDGSFVTLKSQWFSFTNPWTKELEYIVSVNTLVLGHSEPGEASFLPCSSQSSEESSRQSCMSVPGMSTGTVLGAGSIGTDIANEILDLQRLQSSSYLDDSSPTGLMKDTHTVNCRSVMVHSWISMPYVTMMTQPWLHL

SEQ ID NO: 6564 - protein, 602 aa, Homo sapiens
  Payload ID: 1414;
  Gene Symbol: ARNTL2;
  Gene Name: aryl hydrocarbon receptor nuclear translocator-like 2;
  Uniprot ID:  Q8WYA1;
  ENSP ID: ENSP00000442438
MAAEEEAAAGGKVLREENQCIAPVVSSRVSPGTRPTAMGSFSSHMTEFPRKRKGSDSDPSQVEDGEHQVKMKAFREAHSQTEKRRRDKMNNLIEELSAMIPQCNPMARKLDKLTVLRMAVQHLRSLKGLTNSYVGSNYRPSFLQDNELRHLILKTAEGFLFVVGCERGKILFVSKSVSKILNYDQASLTGQSLFDFLHPKDVAKVKEQLSSFDISPREKLIDAKTGLQVHSNLHAGRTRVYSGSRRSFFCRIKSCKISVKEEHGCLPNSKKKEHRKFYTIHCTGYLRSWPPNIVGMEEERNSKKDNSNFTCLVAIGRLQPYIVPQNSGEINVKPTEFITRFAVNGKFVYVDQRATAILGYLPQELLGTSCYEYFHQDDHNNLTDKHKAVLQSKEKILTDSYKFRAKDGSFVTLKSQWFSFTNPWTKELEYIVSVNTLVLGHSEPGEASFLPCSSQSSEESSRQSCMSVPGMSTGTVLGAGSIGTDIANEILDLQRLQSSSYLDDSSPTGLMKDTHTVNCRSMSNKELFPPSPSEMGELEATRQNQSTVAVHSHEPLLSDGAQLDFDALCDNDDTAMAAFMNYLEAEGGLGDPGDFSDIQWTL

SEQ ID NO: 6565 - protein, 551 aa, Homo sapiens
  Payload ID: 1414;
  Gene Symbol: ARNTL2;
  Gene Name: aryl hydrocarbon receptor nuclear translocator-like 2;
  Uniprot ID:  Q8WYA1;
  ENSP ID: ENSP00000445836
MGSFSSHMTEFPRKRKGSDSDPSQEAHSQTEKRRRDKMNNLIEELSAMIPQCNPMARKLDKLTVLRMAVQHLRSLKGLTNSYVGSNYRPSFLQDNELRHLILKTAEGFLFVVGCERGKILFVSKSVSKILNYDQASLTGQSLFDFLHPKDVAKVKEQLSSFDISPREKLIDAKTGLQVHSNLHAGRTRVYSGSRRSFFCRIKSCKISVKEEHGCLPNSKKKEHRKFYTIHCTGYLRSWPPNIVGMEEERNSKKDNSNFTCLVAIGRLQPYIVPQNSGEINVKPTEFITRFAVNGKFVYVDQRATAILGYLPQELLGTSCYEYFHQDDHNNLTDKHKAVLQSKEKILTDSYKFRAKDGSFVTLKSQWFSFTNPWTKELEYIVSVNTLVLGHSEPGEASFLPCSSQSSEESSRQSCMSVPGMSTGTVLGAGSIGTDIANEILDLQRLQSSSYLDDSSPTGLMKDTHTVNCRSMSNKELFPPSPSEMGELEATRQNQSTVAVHSHEPLLSDGAQLDFDALCDNDDTAMAAFMNYLEAEGGLGDPGDFSDIQWTL

SEQ ID NO: 6566 - protein, 399 aa, Homo sapiens
  Payload ID: 1415;
  Gene Symbol: AADAC;
  Gene Name: arylacetamide deacetylase;
  Uniprot ID:  P22760;
  ENSP ID: ENSP00000232892
MGRKSLYLLIVGILIAYYIYTPLPDNVEEPWRMMWINAHLKTIQNLATFVELLGLHHFMDSFKVVGSFDEVPPTSDENVTVTETKFNNILVRVYVPKRKSEALRRGLFYIHGGGWCVGSAALSGYDLLSRWTADRLDAVVVSTNYRLAPKYHFPIQFEDVYNALRWFLRKKVLAKYGVNPERIGISGDSAGGNLAAAVTQQLLDDPDVKIKLKIQSLIYPALQPLDVDLPSYQENSNFLFLSKSLMVRFWSEYFTTDRSLEKAMLSRQHVPVESSHLFKFVNWSSLLPERFIKGHVYNNPNYGSSELAKKYPGFLDVRAAPLLADDNKLRGLPLTYVITCQYDLLRDDGLMYVTRLRNTGVQVTHNHVEDGFHGAFSFLGLKISHRLINQYIEWLKENL

SEQ ID NO: 6567 - protein, 204 aa, Homo sapiens
  Payload ID: 1415;
  Gene Symbol: AADAC;
  Gene Name: arylacetamide deacetylase;
  ENSP ID: ENSP00000419620
MGRKSLYLLIVGILIAYYIYTPLPDNVEEPWRMMWINAHLKTIQNLATFVELLGLHHFMDSFKVVGSFDEVPPTSDENVTVTETKFNNILVRVYVPKRKSEALRRGLFYIHGGGWCVGSAALSGYDLLSRWTADRLDAVVVSTNYRLAPKYHFPIQFEDVYNALRWFLRKKVLAKYGVNPERIGISGDSAGGNLAAAVTQQVCS

SEQ ID NO: 6568 - protein, 401 aa, Homo sapiens
  Payload ID: 1416;
  Gene Symbol: AADACL2;
  Gene Name: arylacetamide deacetylase-like 2;
  Uniprot ID:  Q6P093;
  ENSP ID: ENSP00000348911
MGLKALCLGLLCVLFVSHFYTPMPDNIEESWKIMALDAIAKTCTFTAMCFENMRIMRYEEFISMIFRLDYTQPLSDEYITVTDTTFVDIPVRLYLPKRKSETRRRAVIYFHGGGFCFGSSKQRAFDFLNRWTANTLDAVVVGVDYRLAPQHHFPAQFEDGLAAVKFFLLEKILTKYGVDPTRICIAGDSSGGNLATAVTQQVQNDAEIKHKIKMQVLLYPGLQITDSYLPSHRENEHGIVLTRDVAIKLVSLYFTKDEALPWAMRRNQHMPLESRHLFKFVNWSILLPEKYRKDYVYTEPILGGLSYSLPGLTDSRALPLLANDSQLQNLPLTYILTCQHDLLRDDGLMYVTRLRNVGVQVVHEHIEDGIHGALSFMTSPFYLRLGLRIRDMYVSWLDKNL

SEQ ID NO: 6569 - protein, 53 aa, Homo sapiens
  Payload ID: 1416;
  Gene Symbol: AADACL2;
  Gene Name: arylacetamide deacetylase-like 2;
  ENSP ID: ENSP00000387390
MGLKALCLGLLCVLFVSHFYTPMPDNIEESWKIMALDAIAKTCTFTNRGLLTS

SEQ ID NO: 6570 - protein, 401 aa, Homo sapiens; identical to SEQ ID NO: 6568
  Payload ID: 1416;
  Gene Symbol: AADACL2;
  Gene Name: arylacetamide deacetylase-like 2;
  Uniprot ID:  Q6P093;
  ENSP ID: ENSP00000461239

SEQ ID NO: 6571 - protein, 53 aa, Homo sapiens; identical to SEQ ID NO: 6569
  Payload ID: 1416;
  Gene Symbol: AADACL2;
  Gene Name: arylacetamide deacetylase-like 2;
  ENSP ID: ENSP00000461479

SEQ ID NO: 6572 - protein, 407 aa, Homo sapiens
  Payload ID: 1417;
  Gene Symbol: AADACL3;
  Gene Name: arylacetamide deacetylase-like 3;
  Uniprot ID:  Q5VUY0;
  ENSP ID: ENSP00000352268
MWDLALIFLAAACVFSLGVTLWVICSHFFTVHIPAAVGHPVKLRVLHCIFQLLLTWGMIFEKLRICSMPQFFCFMQDLPPLKYDPDVVVTDFRFGTIPVKLYQPKASTCTLKPGIVYYHGGGGVMGSLKTHHGICSRLCKESDSVVLAVGYRKLPKHKFPVPVRDCLVATIHFLKSLDAYGVDPARVVVCGDSFGGAIAAVVCQQLVDRPDLPRIRAQILIYAILQALDLQTPSFQQRKNIPLLTWSFICYFFFQNLDFSSSWQEVIMKGAHLPAEVWEKYRKWLGPENIPERFKERGYQLKPHEPMNEAAYLEVSVVLDVMCSPLIAEDDIVSQLPETCIVSCEYDALRDNSLLYKKRLEDLGVPVTWHHMEDGFHGVLRTIDMSFLHFPCSMRILSALVQFVKGL

SEQ ID NO: 6573 - protein, 407 aa, Homo sapiens
  Payload ID: 1418;
  Gene Symbol: AADACL4;
  Gene Name: arylacetamide deacetylase-like 4;
  Uniprot ID:  Q5VUY2;
  ENSP ID: ENSP00000365395
MAVPWLVLLLALPIFFLGVFVWAVFEHFLTTDIPATLQHPAKLRFLHCIFLYLVTLGNIFEKLGICSMPKFIRFLHDSVRIKKDPELVVTDLRFGTIPVRLFQPKAASSRPRRGIIFYHGGATVFGSLDCYHGLCNYLARETESVLLMIGYRKLPDHHSPALFQDCMNASIHFLKALETYGVDPSRVVVCGESVGGAAVAAITQALVGRSDLPRIRAQVLIYPVVQAFCLQLPSFQQNQNVPLLSRKFMVTSLCNYLAIDLSWRDAILNGTCVPPDVWRKYEKWLSPDNIPKKFKNRGYQPWSPGPFNEAAYLEAKHMLDVENSPLIADDEVIAQLPEAFLVSCENDILRDDSLLYKKRLEDQGVRVTWYHLYDGFHGSIIFFDKKALSFPCSLKIVNAVVSYIKGI

SEQ ID NO: 6574 - protein, 308 aa, Homo sapiens
  Payload ID: 1419;
  Gene Symbol: AFMID;
  Gene Name: arylformamidase;
  Uniprot ID:  Q63HM1;
  ENSP ID: ENSP00000328938
MMDVSGVGFPSKVPWKKMSAEELENQYCPSRWVVRLGAEEALRTYSQIGIEATTRARATRKSLLHVPYGDGEGEKVDIYFPDESSEALPFFLFFHGGYWQSGSKDESAFMVHPLTAQGVAVVIVAYGIAPKGTLDHMVDQVTRSVAFVQKRYPSNKGIYLCGHSAGAHLAAMMLLADWTKHGVTPNLRGFFLVSGVFDLEPIVYTSQNVALQLTLEDAQRNSPQLKVAQAQPVDPTCRVLVVVGQFDSPEFHRQSWEFYQVLPVQTLCQGEWKASFEELHDVDHFEIVENLTQKDNVLTQIILKTIFQ

SEQ ID NO: 6575 - protein, 303 aa, Homo sapiens
  Payload ID: 1419;
  Gene Symbol: AFMID;
  Gene Name: arylformamidase;
  Uniprot ID:  Q63HM1;
  ENSP ID: ENSP00000386890
MMDVSGVGFPSKVPWKKMSAEELENQYCPSRWVVRLGAEEALRTYSQIGIEATTRARATRKSLLHVPYGDGEGEKVDIYFPDESSEALPFFLFFHGGYWQSGSKDESAFMVHPLTAQGVAVVIVAYGIAPKGTLDHMVDQVTRSVAFVQKRYPSNKGIYLCGHSAGAHLAAMMLLADWTKHGVTPNLRGFFLVSGVFDLEPIVYTSQNVALQLTLEDAQRNSPQLKVAQAQPVDPTCRVLVVVGQFDSPEFHRQSWEFYQTLCQGEWKASFEELHDVDHFEIVENLTQKDNVLTQIILKTIFQ

SEQ ID NO: 6576 - protein, 93 aa, Homo sapiens
  Payload ID: 1419;
  Gene Symbol: AFMID;
  Gene Name: arylformamidase;
  ENSP ID: ENSP00000464929
MMDVSGVGFPSKVPWKKMSAEELENQYCPSRWVVRLGAEEALRTYSQIGIEALPFFLFFHGGYWQSGRPCVKESGKPHLKSSTMWTTLKLLRI

SEQ ID NO: 6577 - protein, 111 aa, Homo sapiens
  Payload ID: 1419;
  Gene Symbol: AFMID;
  Gene Name: arylformamidase;
  ENSP ID: ENSP00000465406
MMDVSGVGFPSKVPWKKMSAEELENQYCPSRWVVRLGAEEALRTYSQIGIEATTRARATRKSLLHVPYGDGEGEKVDIYFPDESSEALPFFLFFHGGYWQSGRLFPGEWGL

SEQ ID NO: 6578 - protein, 37 aa, Homo sapiens
  Payload ID: 1419;
  Gene Symbol: AFMID;
  Gene Name: arylformamidase;
  ENSP ID: ENSP00000466241
MSAEELENQYCPSRWVVRLGAEEALRTYSQIGIEVHL

SEQ ID NO: 6579 - protein, 206 aa, Homo sapiens
  Payload ID: 1419;
  Gene Symbol: AFMID;
  Gene Name: arylformamidase;
  ENSP ID: ENSP00000466515
MMDVSGVGFPSKVPWKKMSAEELENQYCPSRWVVRLGAEEALRTYSQIGIEATTRARATRKSLLHVPYGDGEGEKVDIYFPDESSEALPFFLFFHGGYWQSGSKDESAFMVHPLTAQGVAVVIVAYGIAPKGTLDHMVDQVTRSVAFVQKRYPSNKWVLPVDFLPVGPQWVGGQCNQYLGYSQAAPLACGAESKLGLFEGGLMLWG

SEQ ID NO: 6580 - protein, 187 aa, Homo sapiens
  Payload ID: 1419;
  Gene Symbol: AFMID;
  Gene Name: arylformamidase;
  ENSP ID: ENSP00000466566
MMDVSGVGFPSKVPWKKMSAEELENQYCPSRWVVRLGAEEALRTYSQIGIEATTRARATRKSLLHVPYGDGEGEKVDIYFPDESSEALPFFLFFHGGYWQSGRHPGPHGRPGDPQRCVCPEAVSKQQVGVASRFSSCWTSVGGRTVQSVPRIQPSCPSGLWSRKQIGTLRRGPDVVGKLRANPALCS

SEQ ID NO: 6581 - protein, 57 aa, Homo sapiens
  Payload ID: 1419;
  Gene Symbol: AFMID;
  Gene Name: arylformamidase;
  ENSP ID: ENSP00000466859
MMDVSGVGFPSKVPWKKMSAEELENQYCPSRWVVRLGAEEALRTYSQIGIEGLRTPV

SEQ ID NO: 6582 - protein, 84 aa, Homo sapiens
  Payload ID: 1419;
  Gene Symbol: AFMID;
  Gene Name: arylformamidase;
  ENSP ID: ENSP00000467365
MMDVSGVGFPSKVPWKKMSAEELENQYCPSRWVVRLGAEEALRTYSQIGIEDYLENNLPVVLTILGAWSTCIPPWEASPKSFRS

SEQ ID NO: 6583 - protein, 60 aa, Homo sapiens
  Payload ID: 1419;
  Gene Symbol: AFMID;
  Gene Name: arylformamidase;
  ENSP ID: ENSP00000467869
MMDVSGVGFPSKVPWKKMSAEELENQYCPSRWVVRLGAEEALRTYSQIGIEEIWTWEPVN

SEQ ID NO: 6584 - protein, 717 aa, Homo sapiens
  Payload ID: 1420;
  Gene Symbol: ARNT2;
  Gene Name: aryl-hydrocarbon receptor nuclear translocator 2;
  Uniprot ID:  Q9HBZ2;
  ENSP ID: ENSP00000307479
MATPAAVNPPEMASDIPGSVTLPVAPMAATGQVRMAGAMPARGGKRRSGMDFDDEDGEGPSKFSRENHSEIERRRRNKMTQYITELSDMVPTCSALARKPDKLTILRMAVSHMKSMRGTGNKSTDGAYKPSFLTEQELKHLILEAADGFLFVVAAETGRVIYVSDSVTPVLNQPQSEWFGSTLYEQVHPDDVEKLREQLCTSENSMTGRILDLKTGTVKKEGQQSSMRMCMGSRRSFICRMRCGNAPLDHLPLNRITTMRKRFRNGLGPVKEGEAQYAVVHCTGYIKAWPPAGMTIPEEDADVGQGSKYCLVAIGRLQVTSSPVCMDMNGMSVPTEFLSRHNSDGIITFVDPRCISVIGYQPQDLLGKDILEFCHPEDQSHLRESFQQVVKLKGQVLSVMYRFRTKNREWMLIRTSSFTFQNPYSDEIEYIICTNTNVKQLQQQQAELEVHQRDGLSSYDLSQVPVPNLPAGVHEAGKSVEKADAIFSQERDPRFAEMFAGISASEKKMMSSASAAGTQQIYSQGSPFPSGHSGKAFSSSVVHVPGVNDIQSSSSTGQNMSQISRQLNQSQVAWTGSRPPFPGQQIPSQSSKTQSSPFGIGTSHTYPADPSSYSPLSSPATSSPSGNAYSSLANRTPGFAESGQSSGQFQGRPSEVWSQWQSQHHGQQSGEQHSHQQPGQTEVFQDMLPMPGDPTQGTGNYNIEDFADLGMFPPFSE

SEQ ID NO: 6585 - protein, 130 aa, Homo sapiens
  Payload ID: 1420;
  Gene Symbol: ARNT2;
  Gene Name: aryl-hydrocarbon receptor nuclear translocator 2;
  ENSP ID: ENSP00000452961
MRMCMGSRRSFICRMRCGNAPLDHLPLNRITTMRKRFRNGLGPVKEGEAQYAVVHCTGYIKAWPPAGMTIPEEDADVGQGSKYCLVAIGRLQVTSSPVCMDMNGMSVPTEFLSRHNSDGIITFVDPRCIS

SEQ ID NO: 6586 - protein, 706 aa, Homo sapiens
  Payload ID: 1420;
  Gene Symbol: ARNT2;
  Gene Name: aryl-hydrocarbon receptor nuclear translocator 2;
  Uniprot ID:  Q9HBZ2;
  ENSP ID: ENSP00000453651
MASDIPGSVTLPVAPMAATGQVRMAGAMPARGGKRRSGMDFDDEDGEGPSKFSRENHSEIERRRRNKMTQYITELSDMVPTCSALARKPDKLTILRMAVSHMKSMRGTGNKSTDGAYKPSFLTEQELKHLILEAADGFLFVVAAETGRVIYVSDSVTPVLNQPQSEWFGSTLYEQVHPDDVEKLREQLCTSENSMTGRILDLKTGTVKKEGQQSSMRMCMGSRRSFICRMRCGNAPLDHLPLNRITTMRKRFRNGLGPVKEGEAQYAVVHCTGYIKAWPPAGMTIPEEDADVGQGSKYCLVAIGRLQVTSSPVCMDMNGMSVPTEFLSRHNSDGIITFVDPRCISVIGYQPQDLLGKDILEFCHPEDQSHLRESFQQVVKLKGQVLSVMYRFRTKNREWMLIRTSSFTFQNPYSDEIEYIICTNTNVKQLQQQQAELEVHQRDGLSSYDLSQVPVPNLPAGVHEAGKSVEKADAIFSQERDPRFAEMFAGISASEKKMMSSASAAGTQQIYSQGSPFPSGHSGKAFSSSVVHVPGVNDIQSSSSTGQNMSQISRQLNQSQVAWTGSRPPFPGQQIPSQSSKTQSSPFGIGTSHTYPADPSSYSPLSSPATSSPSGNAYSSLANRTPGFAESGQSSGQFQGRPSEVWSQWQSQHHGQQSGEQHSHQQPGQTEVFQDMLPMPGDPTQGTGNYNIEDFADLGMFPPFSE

SEQ ID NO: 6587 - protein, 706 aa, Homo sapiens; identical to SEQ ID NO: 6586
  Payload ID: 1420;
  Gene Symbol: ARNT2;
  Gene Name: aryl-hydrocarbon receptor nuclear translocator 2;
  Uniprot ID:  Q9HBZ2;
  ENSP ID: ENSP00000453792

SEQ ID NO: 6588 - protein, 716 aa, Homo sapiens [sequence omitted]

SEQ ID NO: 6589 - protein, 566 aa, Homo sapiens
  Payload ID: 1420;
  Gene Symbol: ARNT2;
  Gene Name: aryl-hydrocarbon receptor nuclear translocator 2;
  ENSP ID: ENSP00000483762
MATPAAVNPPEMASDIPGSVTLPVAPMAATGQVRMAGAMPARGGKRRSGMDFDDEDGEGPSKFSRENHSEIERRRRNKMTQYITELSDMVPTCSALARKPDKLTILRMAVSHMKSMRGTGNKSTDGAYKPSFLTEQELKHLILEAADGFLFVVAAETGRVIYVSDSVTPVLNQPQSEWFGSTLYEQVHPDDVEKLREQLCTSENSMTGRILDLKTGTVKKEGQQSSMRMCMGSRRSFICRMRCGNAPLDHLPLNRITTMRKRFRNGLGPVKEGEAQYAVVHCTGYIKAWPPAGMTIPEEDADVGQGSKYCLVAIGRLQVTSSPVCMDMNGMSVPTEFLSRHNSDGIITFVDPRCISVIGYQPQDLLGKDILEFCHPEDQSHLRESFQQVVKLKGQVLSVMYRFRTKNREWMLIRTSSFTFQNPYSDEIEYIICTNTNVKQLQQQQAELEVHQRDGLSSYDLSQVPVPNLPAGVHEAGKSVEKADAIFSQERDPRFAEMFAGISASEKKMMSSASAAGTQQIYSQGSPFPSGHSGKAFSSSVVHVPGVNDIQSSSSTGQNMSQISGS

SEQ ID NO: 6590 - protein, 719 aa, Homo sapiens
  Payload ID: 1421;
  Gene Symbol: AHRR;
  Gene Name: aryl-hydrocarbon receptor repressor;
  Uniprot ID:  A9YTQ3;
  ENSP ID: ENSP00000323816
MPRTMIPPGECTYAGRKRRRPLQKQRPAVGAEKSNPSKRHRDRLNAELDHLASLLPFPPDIISKLDKLSVLRLSVSYLRVKSFFQVVQEQSSRQPAAGAPSPGDSCPLAGSAVLEGRLLLESLNGFALVVSAEGTIFYASATIVDYLGFHQTDVMHQNIYDYIHVDDRQDFCRQLHWAMDPPQVVFGQPPPLETGDDAILGRLLRAQEWGTGTPTEYSAFLTRCFICRVRCLLDSTSGFLARGSQAWQLRLCCPEPLMTMQFQGKLKFLFGQKKKAPSGAMLPPRLSLFCIAAPVLLPSAAEMKMRSALLRAKPRADTAATADAKVKATTSLCESELHGKPNYSAGRSSRESGVLVLREQTDAGRWAQVPARAPCLCLRGGPDLVLDPKGGSGDREEEQHRMLSRASGVTGRRETPGPTKPLPWTAGKHSEDGARPRLQPSKNDPPSLRPMPRGSCLPCPCVQGTFRNSPISHPPSPSPSAYSSRTSRPMRDVGEDQVHPPLCHFPQRSLQHQLPQPGAQRFATRGYPMEDMKLQGVPMPPGDLCGPTLLLDVSIKMEKDSGCEGAADGCVPSQVWLGASDRSHPATFPTRMHLKTEPDSRQQVYISHLGHGVRGAQPHGRATAGRSRELTPFHPAHCACLEPTDGLPQSEPPHQLCARGRGEQSCTCRAAEAAPVVKREPLDSPQWATHSQGMVPGMLPKSALATLVPPQASGCTFLP

SEQ ID NO: 6591 - protein, 701 aa, Homo sapiens
  Payload ID: 1421;
  Gene Symbol: AHRR;
  Gene Name: aryl-hydrocarbon receptor repressor;
  Uniprot ID:  A9YTQ3;
  ENSP ID: ENSP00000424601
MPRTMIPPGECTYAGRKRRRPLQKQRPAVGAEKSNPSKRHRDRLNAELDHLASLLPFPPDIISKLDKLSVLRLSVSYLRVKSFFQVVQEQSSRQPAAGAPSPGDSCPLAGSAVLEGRLLLESLNGFALVVSAEGTIFYASATIVDYLGFHQTDVMHQNIYDYIHVDDRQDFCRQLHWAMDPPQVVFGQPPPLETGDDAILGRLLRAQEWGTGTPTEYSAFLTRCFICRVRCLLDSTSGFLTMQFQGKLKFLFGQKKKAPSGAMLPPRLSLFCIAAPVLLPSAAEMKMRSALLRAKPRADTAATADAKVKATTSLCESELHGKPNYSAGRSSRESGVLVLREQTDAGRWAQVPARAPCLCLRGGPDLVLDPKGGSGDREEEQHRMLSRASGVTGRRETPGPTKPLPWTAGKHSEDGARPRLQPSKNDPPSLRPMPRGSCLPCPCVQGTFRNSPISHPPSPSPSAYSSRTSRPMRDVGEDQVHPPLCHFPQRSLQHQLPQPGAQRFATRGYPMEDMKLQGVPMPPGDLCGPTLLLDVSIKMEKDSGCEGAADGCVPSQVWLGASDRSHPATFPTRMHLKTEPDSRQQVYISHLGHGVRGAQPHGRATAGRSRELTPFHPAHCACLEPTDGLPQSEPPHQLCARGRGEQSCTCRAAEAAPVVKREPLDSPQWATHSQGMVPGMLPKSALATLVPPQASGCTFLP

SEQ ID NO: 6592 - protein, 547 aa, Homo sapiens [sequence omitted]

SEQ ID NO: 6593 - protein, 215 aa, Homo sapiens
  Payload ID: 1421;
  Gene Symbol: AHRR;
  Gene Name: aryl-hydrocarbon receptor repressor;
  ENSP ID: ENSP00000426076
LLPSAAEMKMRSALLRAKPRADTAATADAKDREEEQHRMLSRASGVTGRRETPGPTKPLPWTAGKHSEDGARPRLQPSKNDPPSLRPMPRGSCLPCPCVQGTFRNSPISHPPSPSPSAYSSRTSRPMRDVGEDQVHPPLCHFPQRSLQHQLPQPGAQRFATRGYPMEDMKLQGVPMPPGDLCGPTLLLDVSIKMEKDSGCEGAADGCVPSQVWLG

SEQ ID NO: 6594 - protein, 557 aa, Homo sapiens
  Payload ID: 1421;
  Gene Symbol: AHRR;
  Gene Name: aryl-hydrocarbon receptor repressor;
  ENSP ID: ENSP00000426932
MRGRGMPTDVMHQNIYDYIHVDDRQDFCRQLHWAMDPPQVVFGQPPPLETGDDAILGRLLRAQEWGTGTPTEYSAFLTRCFICRVRCLLDSTSGFLTMQFQGKLKFLFGQKKKAPSGAMLPPRLSLFCIAAPVLLPSAAEMKMRSALLRAKPRADTAATADAKVKATTSLCESELHGKPNYSAGRSSRESGVLVLREQTDAGRWAQVPARAPCLCLRGGPDLVLDPKGGSGDREEEQHRMLSRASGVTGRRETPGPTKPLPWTAGKHSEDGARPRLQPSKNDPPSLRPMPRGSCLPCPCVQGTFRNSPISHPPSPSPSAYSSRTSRPMRDVGEDQVHPPLCHFPQRSLQHQLPQPGAQRFATRGYPMEDMKLQGVPMPPGDLCGPTLLLDVSIKMEKDSGCEGAADGCVPSQVWLGASDRSHPATFPTRMHLKTEPDSRQQVYISHLGHGVRGAQPHGRATAGRSRELTPFHPAHCACLEPTDGLPQSEPPHQLCARGRGEQSCTCRAAEAAPVVKREPLDSPQWATHSQGMVPGMLPKSALATLVPPQASGCTFLP

SEQ ID NO: 6595 - protein, 157 aa, Homo sapiens
  Payload ID: 1421;
  Gene Symbol: AHRR;
  Gene Name: aryl-hydrocarbon receptor repressor;
  ENSP ID: ENSP00000428893
MIPPGECTYAGRKRRRPLQKQRPAVGAEKSNPSKRHRDRLNAELDHLASLLPFPPDIISKLDKLSVLRLSVSYLRVKSFFQVVQEQSSRQPAAGAPSPGDSCPLAGSAVLEGRLLLESLNGFALVVSAEGTIFYASATIVDYLGFHQTDVMHQNIYD

SEQ ID NO: 6596 - protein, 81 aa, Homo sapiens
  Payload ID: 1421;
  Gene Symbol: AHRR;
  Gene Name: aryl-hydrocarbon receptor repressor;
  ENSP ID: ENSP00000429944
MIPPGECTYAGRKRRRPLQKQRPAVGAEKSNPSKRHRDRLNAELDHLASLLPFPPDIISKLDKLSVLRLSVSYLRVKSFFQ

SEQ ID NO: 6597 - protein, 139 aa, Homo sapiens
  Payload ID: 1421;
  Gene Symbol: AHRR;
  Gene Name: aryl-hydrocarbon receptor repressor;
  ENSP ID: ENSP00000430842
MIPPGECTYAGRKRRRPLQKQRPAVGAEKSNPSKRHRDRLNAELDHLASLLPFPPDIISKLDKLSVLRLSVSYLRVKSFFQGQGLAVADAEDVDDHTGERRPMSFRRPRALDTQALRRTQFGLHLLMVNIAGLIATDRL

SEQ ID NO: 6598 - protein, 12 aa, Homo sapiens
  Payload ID: 1421;
  Gene Symbol: AHRR;
  Gene Name: aryl-hydrocarbon receptor repressor;
  ENSP ID: ENSP00000430914
MHQNIYDYIHVD

SEQ ID NO: 6599 - protein, 509 aa, Homo sapiens
  Payload ID: 1422;
  Gene Symbol: ARSA;
  Gene Name: arylsulfatase A;
  ENSP ID: ENSP00000216124
MSMGAPRSLLLALAAGLAVARPPNIVLIFADDLGYGDLGCYGHPSSTTPNLDQLAAGGLRFTDFYVPVSLCTPSRAALLTGRLPVRMGMYPGVLVPSSRGGLPLEEVTVAEVLAARGYLTGMAGKWHLGVGPEGAFLPPHQGFHRFLGIPYSHDQGPCQNLTCFPPATPCDGGCDQGLVPIPLLANLSVEAQPPWLPGLEARYMAFAHDLMADAQRQDRPFFLYYASHHTHYPQFSGQSFAERSGRGPFGDSLMELDAAVGTLMTAIGDLGLLEETLVIFTADNGPETMRMSRGGCSGLLRCGKGTTYEGGVREPALAFWPGHIAPGVTHELASSLDLLPTLAALAGAPLPNVTLDGFDLSPLLLGTGKSPRQSLFFYPSYPDEVRGVFAVRTGKYKAHFFTQGSAHSDTTADPACHASSSLTAHEPPLLYDLSKDPGENYNLLGGVAGATPEVLQALKQLQLLKAQLDAAVTFGPSQVARGEDPALQICCHPGCTPRPACCHCPDPHA

SEQ ID NO: 6600 - protein, 509 aa, Homo sapiens; identical to SEQ ID NO: 6599
  Payload ID: 1422;
  Gene Symbol: ARSA;
  Gene Name: arylsulfatase A;
  ENSP ID: ENSP00000348406

SEQ ID NO: 6601 - protein, 509 aa, Homo sapiens; identical to SEQ ID NO: 6599
  Payload ID: 1422;
  Gene Symbol: ARSA;
  Gene Name: arylsulfatase A;
  ENSP ID: ENSP00000378981

SEQ ID NO: 6602 - protein, 509 aa, Homo sapiens; identical to SEQ ID NO: 6599
  Payload ID: 1422;
  Gene Symbol: ARSA;
  Gene Name: arylsulfatase A;
  ENSP ID: ENSP00000378983

SEQ ID NO: 6603 - protein, 423 aa, Homo sapiens
  Payload ID: 1422;
  Gene Symbol: ARSA;
  Gene Name: arylsulfatase A;
  Uniprot ID:  P15289;
  ENSP ID: ENSP00000412542
MGMYPGVLVPSSRGGLPLEEVTVAEVLAARGYLTGMAGKWHLGVGPEGAFLPPHQGFHRFLGIPYSHDQGPCQNLTCFPPATPCDGGCDQGLVPIPLLANLSVEAQPPWLPGLEARYMAFAHDLMADAQRQDRPFFLYYASHHTHYPQFSGQSFAERSGRGPFGDSLMELDAAVGTLMTAIGDLGLLEETLVIFTADNGPETMRMSRGGCSGLLRCGKGTTYEGGVREPALAFWPGHIAPGVTHELASSLDLLPTLAALAGAPLPNVTLDGFDLSPLLLGTGKSPRQSLFFYPSYPDEVRGVFAVRTGKYKAHFFTQGSAHSDTTADPACHASSSLTAHEPPLLYDLSKDPGENYNLLGGVAGATPEVLQALKQLQLLKAQLDAAVTFGPSQVARGEDPALQICCHPGCTPRPACCHCPDPHA

SEQ ID NO: 6604 - protein, 69 aa, Homo sapiens
  Payload ID: 1422;
  Gene Symbol: ARSA;
  Gene Name: arylsulfatase A;
  ENSP ID: ENSP00000477013
  MOD_RES (1)..(1): Any amino acid
XPSYPDEVRGVFAVRTGKYKAHFFTQGSAHSDTTADPACHASSSLTAHEPPLLYDLSKDPDGVSLCRPG

SEQ ID NO: 6605 - protein, 533 aa, Homo sapiens
  Payload ID: 1423;
  Gene Symbol: ARSB;
  Gene Name: arylsulfatase B;
  Uniprot ID:  P15848;
  ENSP ID: ENSP00000264914
MGPRGAASLPRGPGPRRLLLPVVLPLLLLLLLAPPGSGAGASRPPHLVFLLADDLGWNDVGFHGSRIRTPHLDALAAGGVLLDNYYTQPLCTPSRSQLLTGRYQIRTGLQHQIIWPCQPSCVPLDEKLLPQLLKEAGYTTHMVGKWHLGMYRKECLPTRRGFDTYFGYLLGSEDYYSHERCTLIDALNVTRCALDFRDGEEVATGYKNMYSTNIFTKRAIALITNHPPEKPLFLYLALQSVHEPLQVPEEYLKPYDFIQDKNRHHYAGMVSLMDEAVGNVTAALKSSGLWNNTVFIFSTDNGGQTLAGGNNWPLRGRKWSLWEGGVRGVGFVASPLLKQKGVKNRELIHISDWLPTLVKLARGHTNGTKPLDGFDVWKTISEGSPSPRIELLHNIDPNFVDSSPCPRNSMAPAKDDSSLPEYSAFNTSVHAAIRHGNWKLLTGYPGCGYWFPPPSQYNVSEIPSSDPPTKTLWLFDIDRDPEERHDLSREYPHIVTKLLSRLQFYHKHSVPVYFPAQDPRCDPKATGVWGPWM

SEQ ID NO: 6606 - protein, 413 aa, Homo sapiens
  Payload ID: 1423;
  Gene Symbol: ARSB;
  Gene Name: arylsulfatase B;
  Uniprot ID:  P15848;
  ENSP ID: ENSP00000379455
MGPRGAASLPRGPGPRRLLLPVVLPLLLLLLLAPPGSGAGASRPPHLVFLLADDLGWNDVGFHGSRIRTPHLDALAAGGVLLDNYYTQPLCTPSRSQLLTGRYQIRTGLQHQIIWPCQPSCVPLDEKLLPQLLKEAGYTTHMVGKWHLGMYRKECLPTRRGFDTYFGYLLGSEDYYSHERCTLIDALNVTRCALDFRDGEEVATGYKNMYSTNIFTKRAIALITNHPPEKPLFLYLALQSVHEPLQVPEEYLKPYDFIQDKNRHHYAGMVSLMDEAVGNVTAALKSSGLWNNTVFIFSTDNGGQTLAGGNNWPLRGRKWSLWEGGVRGVGFVASPLLKQKGVKNRELIHISDWLPTLVKLARGHTNGTKPLDGFDVWKTISEGSPSPRIELLHNIDPNFVDSSPYWPECSLLL

SEQ ID NO: 6607 - protein, 45 aa, Homo sapiens
  Payload ID: 1423;
  Gene Symbol: ARSB;
  Gene Name: arylsulfatase B;
  ENSP ID: ENSP00000428611
MGPRGAASLPRGPGPRRLLLPVVLPLLLLLLLAPPGSGAGASRPP

SEQ ID NO: 6608 - protein, 413 aa, Homo sapiens; identical to SEQ ID NO: 6606
  Payload ID: 1423;
  Gene Symbol: ARSB;
  Gene Name: arylsulfatase B;
  Uniprot ID:  P15848;
  ENSP ID: ENSP00000456339

SEQ ID NO: 6609 - protein, 593 aa, Homo sapiens
  Payload ID: 1424;
  Gene Symbol: ARSD;
  Gene Name: arylsulfatase D;
  Uniprot ID:  P51689;
  ENSP ID: ENSP00000370546
MRSAARRGRAAPAARDSLPVLLFLCLLLKTCEPKTANAFKPNILLIMADDLGTGDLGCYGNNTLRTPNIDQLAEEGVRLTQHLAAAPLCTPSRAAFLTGRHSFRSGMDASNGYRALQWNAGSGGLPENETTFARILQQHGYATGLIGKWHQGVNCASRGDHCHHPLNHGFDYFYGMPFTLTNDCDPGRPPEVDAALRAQLWGYTQFLALGILTLAAGQTCGFFSVSARAVTGMAGVGCLFFISWYSSFGFVRRWNCILMRNHDVTEQPMVLEKTASLMLKEAVSYIERHKHGPFLLFLSLLHVHIPLVTTSAFLGKSQHGLYGDNVEEMDWLIGKVLNAIEDNGLKNSTFTYFTSDHGGHLEARDGHSQLGGWNGIYKGGKGMGGWEGGIRVPGIFHWPGVLPAGRVIGEPTSLMDVFPTVVQLVGGEVPQDRVIDGHSLVPLLQGAEARSAHEFLFHYCGQHLHAARWHQKDSGSVWKVHYTTPQFHPEGAGACYGRGVCPCSGEGVTHHRPPLLFDLSRDPSEARPLTPDSEPLYHAVIARVGAAVSEHRQTLSPVPQQFSMSNILWKPWLQPCCGHFPFCSCHEDGDGTP

SEQ ID NO: 6610 - protein, 159 aa, Homo sapiens
  Payload ID: 1424;
  Gene Symbol: ARSD;
  Gene Name: arylsulfatase D;
  ENSP ID: ENSP00000409180
PGVLPAGRVIGEPTSLMDVFPTVVQLVGGEVPQDRVIDGHSLVPLLQGAEARSAHEFLFHYCGQHLHAARWHQKDSGSVWKVHYTTPQFHPEGAGACYGRGVCPCSGEGVTHHRPPLLFDLSRDPSEARPLTPDSEPLYHAVIARGHLLAELNLKPKRR

SEQ ID NO: 6611 - protein, 82 aa, Homo sapiens
  Payload ID: 1424;
  Gene Symbol: ARSD;
  Gene Name: arylsulfatase D;
  ENSP ID: ENSP00000453789
MRSAARRGRAAPAARDSLPVLLFLCLLLKTCEPKTANAFKPNILLIMADDLGTGDLGCYGNNTLRDRFSLCCQGLSRTPGLK

SEQ ID NO: 6612 - protein, 589 aa, Homo sapiens
  Payload ID: 1425;
  Gene Symbol: ARSE;
  Gene Name: arylsulfatase E (chondrodysplasia punctata 1);
  Uniprot ID:  P51690;
  ENSP ID: ENSP00000370526
MLHLHHSCLCFRSWLPAMLAVLLSLAPSASSDISASRPNILLLMADDLGIGDIGCYGNNTMRTPNIDRLAEDGVKLTQHISAASLCTPSRAAFLTGRYPVRSGMVSSIGYRVLQWTGASGGLPTNETTFAKILKEKGYATGLIGKWHLGLNCESASDHCHHPLHHGFDHFYGMPFSLMGDCARWELSEKRVNLEQKLNFLFQVLALVALTLVAGKLTHLIPVSWMPVIWSALSAVLLLASSYFVGALIVHADCFLMRNHTITEQPMCFQRTTPLILQEVASFLKRNKHGPFLLFVSFLHVHIPLITMENFLGKSLHGLYGDNVEEMDWMVGRILDTLDVEGLSNSTLIYFTSDHGGSLENQLGNTQYGGWNGIYKGGKGMGGWEGGIRVPGIFRWPGVLPAGRVIGEPTSLMDVFPTVVRLAGGEVPQDRVIDGQDLLPLLLGTAQHSDHEFLMHYCERFLHAARWHQRDRGTMWKVHFVTPVFQPEGAGACYGRKVCPCFGEKVVHHDPPLLFDLSRDPSETHILTPASEPVFYQVMERVQQAVWEHQRTLSPVPLQLDRLGNIWRPWLQPCCGPFPLCWCLREDDPQ

SEQ ID NO: 6613 - protein, 178 aa, Homo sapiens
  Payload ID: 1425;
  Gene Symbol: ARSE;
  Gene Name: arylsulfatase E (chondrodysplasia punctata 1);
  ENSP ID: ENSP00000406528
MLHLHHSCLCFRSWLPAMLAVLLSLAPSASSDISASRPNILLLMADDLGIGDIGCYGNNTMRTPNIDRLAEDGVKLTQHISAASLCTPSRAAFLTGRYPVRSGMVSSIGYRVLQWTGASGGLPTNETTFAKILKEKGYATGLIGKWHLGLNCESASDHCHHPLHHGFDHFYGMPFSLM

SEQ ID NO: 6614 - protein, 544 aa, Homo sapiens
  Payload ID: 1425;
  Gene Symbol: ARSE;
  Gene Name: arylsulfatase E (chondrodysplasia punctata 1);
  ENSP ID: ENSP00000438198
MSGSRERDNMLHLHHSWTPNIDRLAEDGVKLTQHISAASLCTPSRAAFLTGRYPVRSGMVSSIGYRVLQWTGASGGLPTNETTFAKILKEKGYATGLIGKWHLGLNCESASDHCHHPLHHGFDHFYGMPFSLMGDCARWELSEKRVNLEQKLNFLFQVLALVALTLVAGKLTHLIPVSWMPVIWSALSAVLLLASSYFVGALIVHADCFLMRNHTITEQPMCFQRTTPLILQEVASFLKRNKHGPFLLFVSFLHVHIPLITMENFLGKSLHGLYGDNVEEMDWMVGRILDTLDVEGLSNSTLIYFTSDHGGSLENQLGNTQYGGWNGIYKGGKGMGGWEGGIRVPGIFRWPGVLPAGRVIGEPTSLMDVFPTVVRLAGGEVPQDRVIDGQDLLPLLLGTAQHSDHEFLMHYCERFLHAARWHQRDRGTMWKVHFVTPVFQPEGAGACYGRKVCPCFGEKVVHHDPPLLFDLSRDPSETHILTPASEPVFYQVMERVQQAVWEHQRTLSPVPLQLDRLGNIWRPWLQPCCGPFPLCWCLREDDPQ

SEQ ID NO: 6615 - protein, 614 aa, Homo sapiens
  Payload ID: 1425;
  Gene Symbol: ARSE;
  Gene Name: arylsulfatase E (chondrodysplasia punctata 1);
  ENSP ID: ENSP00000441417
MRPVINRCAPGSLDLMLPQAASEGIVFHSLQISLCFRSWLPAMLAVLLSLAPSASSDISASRPNILLLMADDLGIGDIGCYGNNTMRTPNIDRLAEDGVKLTQHISAASLCTPSRAAFLTGRYPVRSGMVSSIGYRVLQWTGASGGLPTNETTFAKILKEKGYATGLIGKWHLGLNCESASDHCHHPLHHGFDHFYGMPFSLMGDCARWELSEKRVNLEQKLNFLFQVLALVALTLVAGKLTHLIPVSWMPVIWSALSAVLLLASSYFVGALIVHADCFLMRNHTITEQPMCFQRTTPLILQEVASFLKRNKHGPFLLFVSFLHVHIPLITMENFLGKSLHGLYGDNVEEMDWMVGRILDTLDVEGLSNSTLIYFTSDHGGSLENQLGNTQYGGWNGIYKGGKGMGGWEGGIRVPGIFRWPGVLPAGRVIGEPTSLMDVFPTVVRLAGGEVPQDRVIDGQDLLPLLLGTAQHSDHEFLMHYCERFLHAARWHQRDRGTMWKVHFVTPVFQPEGAGACYGRKVCPCFGEKVVHHDPPLLFDLSRDPSETHILTPASEPVFYQVMERVQQAVWEHQRTLSPVPLQLDRLGNIWRPWLQPCCGPFPLCWCLREDDPQ

SEQ ID NO: 6616 - protein, 590 aa, Homo sapiens
  Payload ID: 1426;
  Gene Symbol: ARSF;
  Gene Name: arylsulfatase F;
  Uniprot ID:  P54793;
  ENSP ID: ENSP00000352319
MRPRRPLVFMSLVCALLNTCQAHRVHDDKPNIVLIMVDDLGIGDLGCYGNDTMRTPHIDRLAREGVRLTQHISAASLCSPSRSAFLTGRYPIRSGMVSSGNRRVIQNLAVPAGLPLNETTLAALLKKQGYSTGLIGKWHQGLNCDSRSDQCHHPYNYGFDYYYGMPFTLVDSCWPDPSRNTELAFESQLWLCVQLVAIAILTLTFGKLSGWVSVPWLLIFSMILFIFLLGYAWFSSHTSPLYWDCLLMRGHEITEQPMKAERAGSIMVKEAISFLERHSKETFLLFFSFLHVHTPLPTTDDFTGTSKHGLYGDNVEEMDSMVGKILDAIDDFGLRNNTLVYFTSDHGGHLEARRGHAQLGGWNGIYKGGKGMGGWEGGIRVPGIVRWPGKVPAGRLIKEPTSLMDILPTVASVSGGSLPQDRVIDGRDLMPLLQGNVRHSEHEFLFHYCGSYLHAVRWIPKDDSGSVWKAHYVTPVFQPPASGGCYVTSLCRCFGEQVTYHNPPLLFDLSRDPSESTPLTPATEPLHDFVIKKVANALKEHQETIVPVTYQLSELNQGRTWLKPCCGVFPFCLCDKEEEVSQPRGPNEKR

SEQ ID NO: 6617 - protein, 590 aa, Homo sapiens; identical to SEQ ID NO: 6616
  Payload ID: 1426;
  Gene Symbol: ARSF;
  Gene Name: arylsulfatase F;
  Uniprot ID:  P54793;
  ENSP ID: ENSP00000370519

SEQ ID NO: 6618 - protein, 562 aa, Homo sapiens
  Payload ID: 1427;
  Gene Symbol: ARSH;
  Gene Name: arylsulfatase family, member H;
  Uniprot ID:  Q5FYA8;
  ENSP ID: ENSP00000370522
MTRNARPNIVLLMADDLGVGDLCCYGNNSVSTPNIDRLASEGVRLTQHLAAASMCTPSRAAFLTGRYPIRSGMVSAYNLNRAFTWLGGSGGLPTNETTFAKLLQHRGYRTGLIGKWHLGLSCASRNDHCYHPLNHGFHYFYGVPFGLLSDCQASKTPELHRWLRIKLWISTVALALVPFLLLIPKFARWFSVPWKVIFVFALLAFLFFTSWYSSYGFTRRWNCILMRNHEIIQQPMKEEKVASLMLKEALAFIERYKREPFLLFFSFLHVHTPLISKKKFVGRSKYGRYGDNVEEMDWMVGKILDALDQERLANHTLVYFTSDNGGHLEPLDGAVQLGGWNGIYKGGKGMGGWEGGIRVPGIFRWPSVLEAGRVINEPTSLMDIYPTLSYIGGGILSQDRVIDGQNLMPLLEGRASHSDHEFLFHYCGVYLHTVRWHQKDCATVWKAHYVTPKFYPEGTGACYGSGICSCSGDVTYHDPPLLFDISRDPSEALPLNPDNEPLFDSVIKKMEAAIREHRRTLTPVPQQFSVFNTIWKPWLQPCCGTFPFCGCDKEDDILPMAP

SEQ ID NO: 6619 - protein, 569 aa, Homo sapiens
  Payload ID: 1428;
  Gene Symbol: ARSI;
  Gene Name: arylsulfatase family, member I;
  Uniprot ID:  Q5FYB1;
  ENSP ID: ENSP00000333395
MHTLTGFSLVSLLSFGYLSWDWAKPSFVADGPGEAGEQPSAAPPQPPHIIFILTDDQGYHDVGYHGSDIETPTLDRLAAKGVKLENYYIQPICTPSRSQLLTGRYQIHTGLQHSIIRPQQPNCLPLDQVTLPQKLQEAGYSTHMVGKWHLGFYRKECLPTRRGFDTFLGSLTGNVDYYTYDNCDGPGVCGFDLHEGENVAWGLSGQYSTMLYAQRASHILASHSPQRPLFLYVAFQAVHTPLQSPREYLYRYRTMGNVARRKYAAMVTCMDEAVRNITWALKRYGFYNNSVIIFSSDNGGQTFSGGSNWPLRGRKGTYWEGGVRGLGFVHSPLLKRKQRTSRALMHITDWYPTLVGLAGGTTSAADGLDGYDVWPAISEGRASPRTEILHNIDPLYNHAQHGSLEGGFGIWNTAVQAAIRVGEWKLLTGDPGYGDWIPPQTLATFPGSWWNLERMASVRQAVWLFNISADPYEREDLAGQRPDVVRTLLARLAEYNRTAIPVRYPAENPRAHPDFNGGAWGPWASDEEEEEEEGRARSFSRGRRKKKCKICKLRSFFRKLNTRLMSQRI

SEQ ID NO: 6620 - protein, 86 aa, Homo sapiens
  Payload ID: 1428;
  Gene Symbol: ARSI;
  Gene Name: arylsulfatase family, member I;
  ENSP ID: ENSP00000420955
MVGKWHLGFYRKECLPTRRGFDTFLGSLTGNVDYYTYDNCDGPGVCGFDLHEGENVAWGLSGQYSTMLYAQRASHILASHSPQRPL

SEQ ID NO: 6621 - protein, 426 aa, Homo sapiens
  Payload ID: 1428;
  Gene Symbol: ARSI;
  Gene Name: arylsulfatase family, member I;
  Uniprot ID:  Q5FYB1;
  ENSP ID: ENSP00000426879
MVGKWHLGFYRKECLPTRRGFDTFLGSLTGNVDYYTYDNCDGPGVCGFDLHEGENVAWGLSGQYSTMLYAQRASHILASHSPQRPLFLYVAFQAVHTPLQSPREYLYRYRTMGNVARRKYAAMVTCMDEAVRNITWALKRYGFYNNSVIIFSSDNGGQTFSGGSNWPLRGRKGTYWEGGVRGLGFVHSPLLKRKQRTSRALMHITDWYPTLVGLAGGTTSAADGLDGYDVWPAISEGRASPRTEILHNIDPLYNHAQHGSLEGGFGIWNTAVQAAIRVGEWKLLTGDPGYGDWIPPQTLATFPGSWWNLERMASVRQAVWLFNISADPYEREDLAGQRPDVVRTLLARLAEYNRTAIPVRYPAENPRAHPDFNGGAWGPWASDEEEEEEEGRARSFSRGRRKKKCKICKLRSFFRKLNTRLMSQRI

SEQ ID NO: 6622 - protein, 599 aa, Homo sapiens
  Payload ID: 1429;
  Gene Symbol: ARSJ;
  Gene Name: arylsulfatase family, member J;
  Uniprot ID:  Q5FYB0;
  ENSP ID: ENSP00000320219
MAPRGCAGHPPPPSPQACVCPGKMLAMGALAGFWILCLLTYGYLSWGQALEEEEEGALLAQAGEKLEPSTTSTSQPHLIFILADDQGFRDVGYHGSEIKTPTLDKLAAEGVKLENYYVQPICTPSRSQFITGKYQIHTGLQHSIIRPTQPNCLPLDNATLPQKLKEVGYSTHMVGKWHLGFYRKECMPTRRGFDTFFGSLLGSGDYYTHYKCDSPGMCGYDLYENDNAAWDYDNGIYSTQMYTQRVQQILASHNPTKPIFLYIAYQAVHSPLQAPGRYFEHYRSIININRRRYAAMLSCLDEAINNVTLALKTYGFYNNSIIIYSSDNGGQPTAGGSNWPLRGSKGTYWEGGIRAVGFVHSPLLKNKGTVCKELVHITDWYPTLISLAEGQIDEDIQLDGYDIWETISEGLRSPRVDILHNIDPIYTKAKNGSWAAGYGIWNTAIQSAIRVQHWKLLTGNPGYSDWVPPQSFSNLGPNRWHNERITLSTGKSVWLFNITADPYERVDLSNRYPGIVKKLLRRLSQFNKTAVPVRYPPKDPRSNPRLNGGVWGPWYKEETKKKKPSKNQAEKKQKKSKKKKKKQQKAVSGSTCHSGVTCG

SEQ ID NO: 6623 - protein, 133 aa, Homo sapiens
  Payload ID: 1429;
  Gene Symbol: ARSJ;
  Gene Name: arylsulfatase family, member J;
  ENSP ID: ENSP00000421327
MAPRGCAGHPPPPSPQACVCPGKMLAMGALAGFWILCLLTYGYLSWGQALEEEEEGALLAQAGEKLEPSTTSTSQPHLIFILADDQGFRDVGYHGSEIKTPTLDKLAAEGVKLENYYVQPICTPSRSQFITGK

SEQ ID NO: 6624 - protein, 536 aa, Homo sapiens
  Payload ID: 1430;
  Gene Symbol: ARSK;
  Gene Name: arylsulfatase family, member K;
  Uniprot ID:  Q6UWY0;
  ENSP ID: ENSP00000369346
MLLLWVSVVAALALAVLAPGAGEQRRRAAKAPNVVLVVSDSFDGRLTFHPGSQVVKLPFINFMKTRGTSFLNAYTNSPICCPSRAAMWSGLFTHLTESWNNFKGLDPNYTTWMDVMERHGYRTQKFGKLDYTSGHHSISNRVEAWTRDVAFLLRQEGRPMVNLIRNRTKVRVMERDWQNTDKAVNWLRKEAINYTEPFVIYLGLNLPHPYPSPSSGENFGSSTFHTSLYWLEKVSHDAIKIPKWSPLSEMHPVDYYSSYTKNCTGRFTKKEIKNIRAFYYAMCAETDAMLGEIILALHQLDLLQKTIVIYSSDHGELAMEHRQFYKMSMYEASAHVPLLMMGPGIKAGLQVSNVVSLVDIYPTMLDIAGIPLPQNLSGYSLLPLSSETFKNEHKVKNLHPPWILSEFHGCNVNASTYMLRTNHWKYIAYSDGASILPQLFDLSSDPDELTNVAVKFPEITYSLDQKLHSIINYPKVSASVHQYNKEQFIKWKQSIGQNYSNVIANLRWHQDWQKEPRKYENAIDQWLKTHMNPRAV

SEQ ID NO: 6625 - protein, 46 aa, Homo sapiens
  Payload ID: 1430;
  Gene Symbol: ARSK;
  Gene Name: arylsulfatase family, member K;
  ENSP ID: ENSP00000422126
MLLLWVSVVAALALAVLAPGAGEQRRRAAKAPNVVLVVSDSFIPDD

SEQ ID NO: 6626 - protein, 153 aa, Homo sapiens
  Payload ID: 1430;
  Gene Symbol: ARSK;
  Gene Name: arylsulfatase family, member K;
  ENSP ID: ENSP00000422608
MLLLWVSVVAALALAVLAPGAGEQRRRAAKAPNVVLVVSDSFDGRLTFHPGSQVVKLPFINFMKTRGTSFLNAYTNSPICCPSRAAMWSGLFTHLTESWNNFKGLDPNYTTWMDVMERHGYRTQKFGKLDYTSGHHSIRHSERGSTNQRSEKV

SEQ ID NO: 6627 - protein, 395 aa, Homo sapiens
  Payload ID: 1430;
  Gene Symbol: ARSK;
  Gene Name: arylsulfatase family, member K;
  ENSP ID: ENSP00000423636
MLLLWVSVVAALALAVLAPGAGEQRRRAAKAPNVVLVVSDSFDGRLTFHPGSQVVKLPFINFMKTRGTSFLNAYTNSPICCPSRAAMWSGLFTHLTESWNNFKGLDPNYTTWMDVMERHGYRTQKFGKLDYTSGHHSISNRVEAWTRDVAFLLRQEGRPMVNLIRNRTKVRVMERDWQNTDKAVNWLRKEAINYTEPFVIYLGLNLPHPYPSPSSGENFGSSTFHTSLYWLEKVSHDAIKIPKWSPLSEMHPVDYYSSYTKNCTGRFTKKEIKNIRAFYYAMCAETDAMLGEIILALHQLDLLQKTIVIYSSDHGELAMEHRQFYKMSMYEASAHVPLLMMGPGIKAGLQVSNVVSLVDIYPTMLDEKTEVEISKLLAEVHMASGILLEFLCLRT

SEQ ID NO: 6628 - protein, 92 aa, Homo sapiens
  Payload ID: 1430;
  Gene Symbol: ARSK;
  Gene Name: arylsulfatase family, member K;
  ENSP ID: ENSP00000424018
RAAKAPNVVLVVSDSFDGRLTFHPGSQVVKLPFINFMKTRGTSFLNAYTNSPICCPSRAVIVWKRGQEMLLSYSDKKAGPWLILSVTGLKSE

SEQ ID NO: 6629 - protein, 525 aa, Homo sapiens
  Payload ID: 1431;
  Gene Symbol: ARSG;
  Gene Name: arylsulfatase G;
  Uniprot ID:  Q96EG1;
  ENSP ID: ENSP00000407193
MGWLFLKVLLAGVSFSGFLYPLVDFCISGKTRGQKPNFVIILADDMGWGDLGANWAETKDTANLDKMASEGMRFVDFHAAASTCSPSRASLLTGRLGLRNGVTRNFAVTSVGGLPLNETTLAEVLQQAGYVTGIIGKWHLGHHGSYHPNFRGFDYYFGIPYSHDMGCTDTPGYNHPPCPACPQGDGPSRNLQRDCYTDVALPLYENLNIVEQPVNLSSLAQKYAEKATQFIQRASTSGRPFLLYVALAHMHVPLPVTQLPAAPRGRSLYGAGLWEMDSLVGQIKDKVDHTVKENTFLWFTGDNGPWAQKCELAGSVGPFTGFWQTRQGGSPAKQTTWEGGHRVPALAYWPGRVPVNVTSTALLSVLDIFPTVVALAQASLPQGRRFDGVDVSEVLFGRSQPGHRVLFHPNSGAAGEFGALQTVRLERYKAFYITGGARACDGSTGPELQHKFPLIFNLEDDTAEAVPLERGGAEYQAVLPEVRKVLADVLQDIANDNISSADYTQDPSVTPCCNPYQIACRCQAA

SEQ ID NO: 6630 - protein, 361 aa, Homo sapiens
  Payload ID: 1431;
  Gene Symbol: ARSG;
  Gene Name: arylsulfatase G;
  ENSP ID: ENSP00000413953
MGCTDTPGYNHPPCPACPQGDGPSRNLQRDCYTDVALPLYENLNIVEQPVNLSSLAQKYAEKATQFIQRASTSGRPFLLYVALAHMHVPLPVTQLPAAPRGRSLYGAGLWEMDSLVGQIKDKVDHTVKENTFLWFTGDNGPWAQKCELAGSVGPFTGFWQTRQGGSPAKQTTWEGGHRVPALAYWPGRVPVNVTSTALLSVLDIFPTVVALAQASLPQGRRFDGVDVSEVLFGRSQPGHRVLFHPNSGAAGEFGALQTVRLERYKAFYITGGARACDGSTGPELQHKFPLIFNLEDDTAEAVPLERGGAEYQAVLPEVRKVLADVLQDIANDNISSADYTQDPSVTPCCNPYQIACRCQAA

SEQ ID NO: 6631 - protein, 28 aa, Homo sapiens
  Payload ID: 1431;
  Gene Symbol: ARSG;
  Gene Name: arylsulfatase G;
  ENSP ID: ENSP00000462306
MGWLFLKVLLAGVSFSGFLYPLVDFCIS

SEQ ID NO: 6632 - protein, 525 aa, Homo sapiens; identical to SEQ ID NO: 6629
  Payload ID: 1431;
  Gene Symbol: ARSG;
  Gene Name: arylsulfatase G;
  Uniprot ID:  Q96EG1;
  ENSP ID: ENSP00000480910

SEQ ID NO: 6633 - protein, 2969 aa, Homo sapiens
  Payload ID: 1432;
  Gene Symbol: ASH1L;
  Gene Name: ash1 (absent, small, or homeotic)-like (Drosophila);
  Uniprot ID:  Q9NR48;
  ENSP ID: ENSP00000357330
MDPRNTAMLGLGSDSEGFSRKSPSAISTGTLVSKREVELEKNTKEEEDLRKRNRERNIEAGKDDGLTDAQQQFSVKETNFSEGNLKLKIGLQAKRTKKPPKNLENYVCRPAIKTTIKHPRKALKSGKMTDEKNEHCPSKRDPSKLYKKADDVAAIECQSEEVIRLHSQGENNPLSKKLSPVHSEMADYINATPSTLLGSRDPDLKDRALLNGGTSVTEKLAQLIATCPPSKSSKTKPKKLGTGTTAGLVSKDLIRKAGVGSVAGIIHKDLIKKPTISTAVGLVTKDPGKKPVFNAAVGLVNKDSVKKLGTGTTAVFINKNLGKKPGTITTVGLLSKDSGKKLGIGIVPGLVHKESGKKLGLGTVVGLVNKDLGKKLGSTVGLVAKDCAKKIVASSAMGLVNKDIGKKLMSCPLAGLISKDAINLKAEALLPTQEPLKASCSTNINNQESQELSESLKDSATSKTFEKNVVRQNKESILEKFSVRKEIINLEKEMFNEGTCIQQDSFSSSEKGSYETSKHEKQPPVYCTSPDFKMGGASDVSTAKSPFSAVGESNLPSPSPTVSVNPLTRSPPETSSQLAPNPLLLSSTTELIEEISESVGKNQFTSESTHLNVGHRSVGHSISIECKGIDKEVNDSKTTHIDIPRISSSLGKKPSLTSESSIHTITPSVVNFTSLFSNKPFLKLGAVSASDKHCQVAESLSTSLQSKPLKKRKGRKPRWTKVVARSTCRSPKGLELERSELFKNVSCSSLSNSNSEPAKFMKNIGPPSFVDHDFLKRRLPKLSKSTAPSLALLADSEKPSHKSFATHKLSSSMCVSSDLLSDIYKPKRGRPKSKEMPQLEGPPKRTLKIPASKVFSLQSKEEQEPPILQPEIEIPSFKQGLSVSPFPKKRGRPKRQMRSPVKMKPPVLSVAPFVATESPSKLESESDNHRSSSDFFESEDQLQDPDDLDDSHRPSVCSMSDLEMEPDKKITKRNNGQLMKTIIRKINKMKTLKRKKLLNQILSSSVESSNKGKVQSKLHNTVSSLAATFGSKLGQQINVSKKGTIYIGKRRGRKPKTVLNGILSGSPTSLAVLEQTAQQAAGSALGQILPPLLPSSASSSEILPSPICSQSSGTSGGQSPVSSDAGFVEPSSVPYLHLHSRQGSMIQTLAMKKASKGRRRLSPPTLLPNSPSHLSELTSLKEATPSPISESHSDETIPSDSGIGTDNNSTSDRAEKFCGQKKRRHSFEHVSLIPPETSTVLSSLKEKHKHKCKRRNHDYLSYDKMKRQKRKRKKKYPQLRNRQDPDFIAELEELISRLSEIRITHRSHHFIPRDLLPTIFRINFNSFYTHPSFPLDPLHYIRKPDLKKKRGRPPKMREAMAEMPFMHSLSFPLSSTGFYPSYGMPYSPSPLTAAPIGLGYYGRYPPTLYPPPPSPSFTTPLPPPSYMHAGHLLLNPAKYHKKKHKLLRQEAFLTTSRTPLLSMSTYPSVPPEMAYGWMVEHKHRHRHKHREHRSSEQPQVSMDTGSSRSVLESLKRYRFGKDAVGERYKHKEKHRCHMSCPHLSPSKSLINREEQWVHREPSESSPLALGLQTPLQIDCSESSPSLSLGGFTPNSEPASSDEHTNLFTSAIGSCRVSNPNSSGRKKLTDSPGLFSAQDTSLNRLHRKESLPSNERAVQTLAGSQPTSDKPSQRPSESTNCSPTRKRSSSESTSSTVNGVPSRSPRLVASGDDSVDSLLQRMVQNEDQEPMEKSIDAVIATASAPPSSSPGRSHSKDRTLGKPDSLLVPAVTSDSCNNSISLLSEKLTSSCSPHHIKRSVVEAMQRQARKMCNYDKILATKKNLDHVNKILKAKKLQRQARTGNNFVKRRPGRPRKCPLQAVVSMQAFQAAQFVNPELNRDEEGAALHLSPDTVTDVIEAVVQSVNLNPEHKKGLKRKGWLLEEQTRKKQKPLPEEEEQENNKSFNEAPVEIPSPSETPAKPSEPESTLQPVLSLIPREKKPPRPPKKKYQKAGLYSDVYKTTDPKSRLIQLKKEKLEYTPGEHEYGLFPAPIHVVFFVSGKYLRQKRIDFQLPYDILWQWKHNQLYKKPDVPLYKKIRSNVYVDVKPLSGYEATTCNCKKPDDDTRKGCVDDCLNRMIFAECSPNTCPCGEQCCNQRIQRHEWVQCLERFRAEEKGWGIRTKEPLKAGQFIIEYLGEVVSEQEFRNRMIEQYHNHSDHYCLNLDSGMVIDSYRMGNEARFINHSCDPNCEMQKWSVNGVYRIGLYALKDMPAGTELTYDYNFHSFNVEKQQLCKCGFEKCRGIIGGKSQRVNGLTSSKNSQPMATHKKSGRSKEKRKSKHKLKKRRGHLSEEPSENINTPTRLTPQLQMKPMSNRERNFVLKHHVFLVRNWEKIRQKQEEVKHTSDNIHSASLYTRWNGICRDDGNIKSDVFMTQFSALQTARSVRTRRLAAAEENIEVARAARLAQIFKEICDGIISYKDSSRQALAAPLLNLPPKKKNADYYEKISDPLDLITIEKQILTGYYKTVEAFDADMLKVFRNAEKYYGRKSPVGRDVCRLRKAYYNARHEASAQIDEIVGETASEADSSETSVSEKENGHEKDDDVIRCICGLYKDEGLMIQCDKCMVWQHCDCMGVNSDVEHYLCEQCDPRPVDREVPMIPRPHYAQPGCVYFICLLRDDLLLRQGDCVYLMRDSRRTPDGHPVRQSYRLLSHINRDKLDIFRIEKLWKNEKEERFAFGHHYFRPHETHHSPSRRFYHNELFRVPLYEIIPLEAVVGTCCVLDLYTYCKGRPKGVKEQDVYICDYRLDKSAHLFYKIHRNRYPVCTKPYAFDHFPKKLTPKKDFSPHYVPDNYKRNGGRSSWKSERSKPPLKDLGQEDDALPLIEEVLASQEQAANEIPSLEEPEREGATANVSEGEKKTEESSQEPQSTCTPEERRHNQRERLNQILLNLLEKIPGKNAIDVTYLLEEGSGRKLRRRTLFIPENSFRK

SEQ ID NO: 6634 - protein, 2964 aa, Homo sapiens
  Payload ID: 1432;
  Gene Symbol: ASH1L;
  Gene Name: ash1 (absent, small, or homeotic)-like (Drosophila);
  Uniprot ID:  Q9NR48;
  ENSP ID: ENSP00000376204
MDPRNTAMLGLGSDSEGFSRKSPSAISTGTLVSKREVELEKNTKEEEDLRKRNRERNIEAGKDDGLTDAQQQFSVKETNFSEGNLKLKIGLQAKRTKKPPKNLENYVCRPAIKTTIKHPRKALKSGKMTDEKNEHCPSKRDPSKLYKKADDVAAIECQSEEVIRLHSQGENNPLSKKLSPVHSEMADYINATPSTLLGSRDPDLKDRALLNGGTSVTEKLAQLIATCPPSKSSKTKPKKLGTGTTAGLVSKDLIRKAGVGSVAGIIHKDLIKKPTISTAVGLVTKDPGKKPVFNAAVGLVNKDSVKKLGTGTTAVFINKNLGKKPGTITTVGLLSKDSGKKLGIGIVPGLVHKESGKKLGLGTVVGLVNKDLGKKLGSTVGLVAKDCAKKIVASSAMGLVNKDIGKKLMSCPLAGLISKDAINLKAEALLPTQEPLKASCSTNINNQESQELSESLKDSATSKTFEKNVVRQNKESILEKFSVRKEIINLEKEMFNEGTCIQQDSFSSSEKGSYETSKHEKQPPVYCTSPDFKMGGASDVSTAKSPFSAVGESNLPSPSPTVSVNPLTRSPPETSSQLAPNPLLLSSTTELIEEISESVGKNQFTSESTHLNVGHRSVGHSISIECKGIDKEVNDSKTTHIDIPRISSSLGKKPSLTSESSIHTITPSVVNFTSLFSNKPFLKLGAVSASDKHCQVAESLSTSLQSKPLKKRKGRKPRWTKVVARSTCRSPKGLELERSELFKNVSCSSLSNSNSEPAKFMKNIGPPSFVDHDFLKRRLPKLSKSTAPSLALLADSEKPSHKSFATHKLSSSMCVSSDLLSDIYKPKRGRPKSKEMPQLEGPPKRTLKIPASKVFSLQSKEEQEPPILQPEIEIPSFKQGLSVSPFPKKRGRPKRQMRSPVKMKPPVLSVAPFVATESPSKLESESDNHRSSSDFFESEDQLQDPDDLDDSHRPSVCSMSDLEMEPDKKITKRNNGQLMKTIIRKINKMKTLKRKKLLNQILSSSVESSNKGKVQSKLHNTVSSLAATFGSKLGQQINVSKKGTIYIGKRRGRKPKTVLNGILSGSPTSLAVLEQTAQQAAGSALGQILPPLLPSSASSSEILPSPICSQSSGTSGGQSPVSSDAGFVEPSSVPYLHLHSRQGSMIQTLAMKKASKGRRRLSPPTLLPNSPSHLSELTSLKEATPSPISESHSDETIPSDSGIGTDNNSTSDRAEKFCGQKKRRHSFEHVSLIPPETSTVLSSLKEKHKHKCKRRNHDYLSYDKMKRQKRKRKKKYPQLRNRQDPDFIAELEELISRLSEIRITHRSHHFIPRDLLPTIFRINFNSFYTHPSFPLDPLHYIRKPDLKKKRGRPPKMREAMAEMPFMHSLSFPLSSTGFYPSYGMPYSPSPLTAAPIGLGYYGRYPPTLYPPPPSPSFTTPLPPPSYMHAGHLLLNPAKYHKKKHKLLRQEAFLTTSRTPLLSMSTYPSVPPEMAYGWMVEHKHRHRHKHREHRSSEQPQVSMDTGSSRSVLESLKRYRFGKDAVGERYKHKEKHRCHMSCPHLSPSKSLINREEQWVHREPSESSPLALGLQTPLQIDCSESSPSLSLGGFTPNSEPASSDEHTNLFTSAIGSCRVSNPNSSGRKKLTDSPGLFSAQDTSLNRLHRKESLPSNERAVQTLAGSQPTSDKPSQRPSESTNCSPTRKRSSSESTSSTVNGVPSRSPRLVASGDDSVDSLLQRMVQNEDQEPMEKSIDAVIATASAPPSSSPGRSHSKDRTLGKPDSLLVPAVTSDSCNNSISLLSEKLTSSCSPHHIKRSVVEAMQRQARKMCNYDKILATKKNLDHVNKILKAKKLQRQARTGNNFVKRRPGRPRKCPLQAVVSMQAFQAAQFVNPELNRDEEGAALHLSPDTVTDVIEAVVQSVNLNPEHKKGLKRKGWLLEEQTRKKQKPLPEEEEQENNKSFNEAPVEIPSPSETPAKPSEPESTLQPVLSLIPREKKPPRPPKKKYQKAGLYSDVYKTTDPKSRLIQLKKEKLEYTPGEHEYGLFPAPIHVGKYLRQKRIDFQLPYDILWQWKHNQLYKKPDVPLYKKIRSNVYVDVKPLSGYEATTCNCKKPDDDTRKGCVDDCLNRMIFAECSPNTCPCGEQCCNQRIQRHEWVQCLERFRAEEKGWGIRTKEPLKAGQFIIEYLGEVVSEQEFRNRMIEQYHNHSDHYCLNLDSGMVIDSYRMGNEARFINHSCDPNCEMQKWSVNGVYRIGLYALKDMPAGTELTYDYNFHSFNVEKQQLCKCGFEKCRGIIGGKSQRVNGLTSSKNSQPMATHKKSGRSKEKRKSKHKLKKRRGHLSEEPSENINTPTRLTPQLQMKPMSNRERNFVLKHHVFLVRNWEKIRQKQEEVKHTSDNIHSASLYTRWNGICRDDGNIKSDVFMTQFSALQTARSVRTRRLAAAEENIEVARAARLAQIFKEICDGIISYKDSSRQALAAPLLNLPPKKKNADYYEKISDPLDLITIEKQILTGYYKTVEAFDADMLKVFRNAEKYYGRKSPVGRDVCRLRKAYYNARHEASAQIDEIVGETASEADSSETSVSEKENGHEKDDDVIRCICGLYKDEGLMIQCDKCMVWQHCDCMGVNSDVEHYLCEQCDPRPVDREVPMIPRPHYAQPGCVYFICLLRDDLLLRQGDCVYLMRDSRRTPDGHPVRQSYRLLSHINRDKLDIFRIEKLWKNEKEERFAFGHHYFRPHETHHSPSRRFYHNELFRVPLYEIIPLEAVVGTCCVLDLYTYCKGRPKGVKEQDVYICDYRLDKSAHLFYKIHRNRYPVCTKPYAFDHFPKKLTPKKDFSPHYVPDNYKRNGGRSSWKSERSKPPLKDLGQEDDALPLIEEVLASQEQAANEIPSLEEPEREGATANVSEGEKKTEESSQEPQSTCTPEERRHNQRERLNQILLNLLEKIPGKNAIDVTYLLEEGSGRKLRRRTLFIPENSFRK

SEQ ID NO: 6635 - protein, 154 aa, Homo sapiens
  Payload ID: 1432;
  Gene Symbol: ASH1L;
  Gene Name: ash1 (absent, small, or homeotic)-like (Drosophila);
  ENSP ID: ENSP00000448820
  MOD_RES (1)..(1): Any amino acid
XLKVFRNAEKYYGRKSPVGRDVCRLRKAYYNARHEASAQIDEIVGETASEADSSETSVSEKENGHEKDDDVIRCICGLYKDEGLMIQCDKCMVWQHCDCMGVNSDVEHYLCEQCDPRPVDREYDQRENKILRNLWKEWHYIKLRFLAGHGRSCL

SEQ ID NO: 6636 - protein, 177 aa, Homo sapiens
  Payload ID: 1432;
  Gene Symbol: ASH1L;
  Gene Name: ash1 (absent, small, or homeotic)-like (Drosophila);
  ENSP ID: ENSP00000449283
MDPRNTAMLGLGSDSEGFSRKSPSAISTGTLVSKREVELEKNTKEEEDLRKRNRERNIEAGKDDGLTDAQQQFSVKETNFSEGNLKLKIGLQAKRTKKPPKNLENYVCRPAIKTTIKHPRKALKSGKMTDEKNEHCPSKRMESYSVAQTGVQWCDLGSPQPPPPGFKRFSYSPASAP

SEQ ID NO: 6637 - protein, 628 aa, Homo sapiens
  Payload ID: 1433;
  Gene Symbol: ASH2L;
  Gene Name: ash2 (absent, small, or homeotic)-like (Drosophila);
  Uniprot ID:  Q9UBL3;
  ENSP ID: ENSP00000340896
MAAAGAGPGQEAGAGPGPGAVANATGAEEGEMKPVAAGAAAPPGEGISAAPTVEPSSGEAEGGEANLVDVSGGLETESSNGKDTLEGAGDTSEVMDTQAGSVDEENGRQLGEVELQCGICTKWFTADTFGIDTSSCLPFMTNYSFHCNVCHHSGNTYFLRKQANLKEMCLSALANLTWQSRTQDEHPKTMFSKDKDIIPFIDKYWECMTTRQRPGKMTWPNNIVKTMSKERDVFLVKEHPDPGSKDPEEDYPKFGLLDQDLSNIGPAYDNQKQSSAVSTSGNLNGGIAAGSSGKGRGAKRKQQDGGTTGTTKKARSDPLFSAQRLPPHGYPLEHPFNKDGYRYILAEPDPHAPDPEKLELDCWAGKPIPGDLYRACLYERVLLALHDRAPQLKISDDRLTVVGEKGYSMVRASHGVRKGAWYFEITVDEMPPDTAARLGWSQPLGNLQAPLGYDKFSYSWRSKKGTKFHQSIGKHYSSGYGQGDVLGFYINLPEDTETAKSLPDTYKDKALIKFKSYLYFEEKDFVDKAEKSLKQTPHSEIIFYKNGVNQGVAYKDIFEGVYFPAISLYKSCTVSINFGPCFKYPPKDLTYRPMSDMGWGAVVEHTLADVLYHVETEVDGRRSPPWEP

SEQ ID NO: 6638 - protein, 534 aa, Homo sapiens
  Payload ID: 1433;
  Gene Symbol: ASH2L;
  Gene Name: ash2 (absent, small, or homeotic)-like (Drosophila);
  Uniprot ID:  Q9UBL3;
  ENSP ID: ENSP00000395310
MDTQAGSVDEENGRQLGEVELQCGICTKWFTADTFGIDTSSCLPFMTNYSFHCNVCHHSGNTYFLRKQANLKEMCLSALANLTWQSRTQDEHPKTMFSKDKDIIPFIDKYWECMTTRQRPGKMTWPNNIVKTMSKERDVFLVKEHPDPGSKDPEEDYPKFGLLDQDLSNIGPAYDNQKQSSAVSTSGNLNGGIAAGSSGKGRGAKRKQQDGGTTGTTKKARSDPLFSAQRLPPHGYPLEHPFNKDGYRYILAEPDPHAPDPEKLELDCWAGKPIPGDLYRACLYERVLLALHDRAPQLKISDDRLTVVGEKGYSMVRASHGVRKGAWYFEITVDEMPPDTAARLGWSQPLGNLQAPLGYDKFSYSWRSKKGTKFHQSIGKHYSSGYGQGDVLGFYINLPEDTETAKSLPDTYKDKALIKFKSYLYFEEKDFVDKAEKSLKQTPHSEIIFYKNGVNQGVAYKDIFEGVYFPAISLYKSCTVSINFGPCFKYPPKDLTYRPMSDMGWGAVVEHTLADVLYHVETEVDGRRSPPWEP

SEQ ID NO: 6639 - protein, 90 aa, Homo sapiens
  Payload ID: 1433;
  Gene Symbol: ASH2L;
  Gene Name: ash2 (absent, small, or homeotic)-like (Drosophila);
  ENSP ID: ENSP00000427839
  MOD_RES (1)..(1): Any amino acid
XQIIFYKNGVNQGVAYKDIFEGVYFPAISLYKSCTVSINFGPCFKYPPKDLTYRPMSDMGWGAVVEHTLADVLYHVETEVDGRRSPPWEP

SEQ ID NO: 6640 - protein, 201 aa, Homo sapiens
  Payload ID: 1433;
  Gene Symbol: ASH2L;
  Gene Name: ash2 (absent, small, or homeotic)-like (Drosophila);
  ENSP ID: ENSP00000428877
MAAAGAGPGQEAGAGPGPGAVANATGAEEGEMKPVAAGAAAPPGEGISAAPTVEPSSGEAEGGKETTLQCQTGRSNGHSENRVGELPLFEPLPGPTLTQEGAGDTSEVMDTQAGSVDEENGRQLGEVELQCGICTKWFTADTFGIDTSSCLPFMTNYSFHCNVCHHSGNTYFLRKQANLKEMCLSALANLTWQSRTQDEHP

SEQ ID NO: 6641 - protein, 192 aa, Homo sapiens
  Payload ID: 1433;
  Gene Symbol: ASH2L;
  Gene Name: ash2 (absent, small, or homeotic)-like (Drosophila);
  ENSP ID: ENSP00000429387
  MOD_RES (1)..(1): Any amino acid
XGYSMVRASHGVRKGAWYFEITVDEMPPDTAARLGWSQPLGNLQAPLGYDKFSYSWRSKKGTKFHQSIGKHYSSGYGQGDVLGFYINLPEDTETAKSLPDTYKDKALIKFKSYLYFEEKDFVDKAEKSLKQTPHSEIIFYKNGVNQGVAYKDIFEGVYFPAISLYKSCTVSINFGPCFKYPPKDLTYRPVSN

SEQ ID NO: 6642 - protein, 501 aa, Homo sapiens
  Payload ID: 1433;
  Gene Symbol: ASH2L;
  Gene Name: ash2 (absent, small, or homeotic)-like (Drosophila);
  Uniprot ID:  Q9UBL3;
  ENSP ID: ENSP00000430259
MDTQAGSVDEENGRQLGEVELQCGICTKWFTADTFGIDTSSCLPFMTNYSFHCNVCHHSGNTYFLRKQANLKEMCLSALANLTWQSRTQDEHPKTMFSKDKDIIPFIDKYWECMTTRQRPGKMTWPNNIVKTMSKERDVFLVKEHPDPGSKDPEEDYPKFGLLDQDLSNIGPAYDNQKQSSAVSTSGNLNGGIAAGSSGKGRGAKRKQQDGGTTGTTKKARSDPLFSAQRLPPHGYPLEHPFNKDGYRYILAEPDPHAPDPEKLELDCWAGKPIPGDLYRACLYERVLLALHDRAPQLKISDDRLTVVGEKGYSMVRASHGVRKGAWYFEITVDEMPPDTAARLGWSQPLGNLQAPLGYDKFSYSWRSKKGTKFHQSIGKHYSSGYGQGDVLGFYINLPEDTETAKSLPDTYKDKALIKFKSYLYFEEKDFVDKAEKSLKQTPHSEVSINFGPCFKYPPKDLTYRPMSDMGWGAVVEHTLADVLYHVETEVDGRRSPPWEP

SEQ ID NO: 6643 - protein, 121 aa, Homo sapiens
  Payload ID: 1433;
  Gene Symbol: ASH2L;
  Gene Name: ash2 (absent, small, or homeotic)-like (Drosophila);
  ENSP ID: ENSP00000430889
MAAAGAGPGQEAGAGPGPGAVANATGAEEGEMKPVAAGAAAPPGEGISAAPTVEPSSGEAEGGEANLVDVSGGLETESSNGKDTLILSTFHDQLQFSLQRLPSQWEYLFPPEASKLEGNVP

SEQ ID NO: 6644 - protein, 489 aa, Homo sapiens
  Payload ID: 1433;
  Gene Symbol: ASH2L;
  Gene Name: ash2 (absent, small, or homeotic)-like (Drosophila);
  ENSP ID: ENSP00000443606
MTNYSFHCNVCHHSGNTYFLRKQANLKEMCLSALANLTWQSRTQDEHPKTMFSKDKDIIPFIDKYWECMTTRQRPGKMTWPNNIVKTMSKERDVFLVKEHPDPGSKDPEEDYPKFGLLDQDLSNIGPAYDNQKQSSAVSTSGNLNGGIAAGSSGKGRGAKRKQQDGGTTGTTKKARSDPLFSAQRLPPHGYPLEHPFNKDGYRYILAEPDPHAPDPEKLELDCWAGKPIPGDLYRACLYERVLLALHDRAPQLKISDDRLTVVGEKGYSMVRASHGVRKGAWYFEITVDEMPPDTAARLGWSQPLGNLQAPLGYDKFSYSWRSKKGTKFHQSIGKHYSSGYGQGDVLGFYINLPEDTETAKSLPDTYKDKALIKFKSYLYFEEKDFVDKAEKSLKQTPHSEIIFYKNGVNQGVAYKDIFEGVYFPAISLYKSCTVSINFGPCFKYPPKDLTYRPMSDMGWGAVVEHTLADVLYHVETEVDGRRSPPWEP

SEQ ID NO: 6645 - protein, 291 aa, Homo sapiens
  Payload ID: 1434;
  Gene Symbol: ASGR1;
  Gene Name: asialoglycoprt receptor 1;
  Uniprot ID:  P07306;
  ENSP ID: ENSP00000269299
MTKEYQDLQHLDNEESDHHQLRKGPPPPQPLLQRLCSGPRLLLLSLGLSLLLLVVVCVIGSQNSQLQEELRGLRETFSNFTASTEAQVKGLSTQGGNVGRKMKSLESQLEKQQKDLSEDHSSLLLHVKQFVSDLRSLSCQMAALQGNGSERTCCPVNWVEHERSCYWFSRSGKAWADADNYCRLEDAHLVVVTSWEEQKFVQHHIGPVNTWMGLHDQNGPWKWVDGTDYETGFKNWRPEQPDDWYGHGLGGGEDCAHFTDDGRWNDDVCQRPYRWVCETELDKASQEPPLL

SEQ ID NO: 6646 - protein, 190 aa, Homo sapiens
  Payload ID: 1434;
  Gene Symbol: ASGR1;
  Gene Name: asialoglycoprt receptor 1;
  ENSP ID: ENSP00000370307
MKSLESQLEKQQKDLSEDHSSLLLHVKQFVSDLRSLSCQMAALQGNGSERTCCPVNWVEHERSCYWFSRSGKAWADADNYCRLEDAHLVVVTSWEEQKFVQHHIGPVNTWMGLHDQNGPWKWVDGTDYETGFKNWRPEQPDDWYGHGLGGGEDCAHFTDDGRWNDDVCQRPYRWVCETELDKASQEPPLL

SEQ ID NO: 6647 - protein, 94 aa, Homo sapiens
  Payload ID: 1434;
  Gene Symbol: ASGR1;
  Gene Name: asialoglycoprt receptor 1;
  ENSP ID: ENSP00000458530
MAALQGNGSERTCCPVNWVEHERSCYWFSRSGKAWADADNYCRLEDAHLVVVTSWEEQKFVQHHIGPVNTWMGLHDQNGPWKWVDGTDYETGFK

SEQ ID NO: 6648 - protein, 29 aa, Homo sapiens
  Payload ID: 1434;
  Gene Symbol: ASGR1;
  Gene Name: asialoglycoprt receptor 1;
  ENSP ID: ENSP00000458803
MKSLESQLEKQQKDLSEDHSSLLLHVKQF

SEQ ID NO: 6649 - protein, 252 aa, Homo sapiens
  Payload ID: 1434;
  Gene Symbol: ASGR1;
  Gene Name: asialoglycoprt receptor 1;
  Uniprot ID:  P07306;
  ENSP ID: ENSP00000459169
MTKEYQDLQHLDNEESDHHQLRKDSQLQEELRGLRETFSNFTASTEAQVKGLSTQGGNVGRKMKSLESQLEKQQKDLSEDHSSLLLHVKQFVSDLRSLSCQMAALQGNGSERTCCPVNWVEHERSCYWFSRSGKAWADADNYCRLEDAHLVVVTSWEEQKFVQHHIGPVNTWMGLHDQNGPWKWVDGTDYETGFKNWRPEQPDDWYGHGLGGGEDCAHFTDDGRWNDDVCQRPYRWVCETELDKASQEPPLL

SEQ ID NO: 6650 - protein, 117 aa, Homo sapiens
  Payload ID: 1434;
  Gene Symbol: ASGR1;
  Gene Name: asialoglycoprt receptor 1;
  ENSP ID: ENSP00000459896
MTKEYQDLQHLDNEESDHHQLRKGPPPPQPLLQRLCSGPRLLLLSLGLSLLLLVVVCVIGSQNSQLQEELRGLRETFSNFTASTEAQVKGLSTQGGNVGRKMKSLESQLEKQQKDLS

SEQ ID NO: 6651 - protein, 162 aa, Homo sapiens
  Payload ID: 1434;
  Gene Symbol: ASGR1;
  Gene Name: asialoglycoprt receptor 1;
  ENSP ID: ENSP00000467511
  MOD_RES (1)..(1): Any amino acid
XRETFSNFTASTEAQVKGLSTQGGNVGRKMKSLESQLEKQQKDLSEDHSSLLLHVKQFVSDLRSLSCQMAALQGNGSERTCCPVNWVEHERSCYWFSRSGKAWADADNYCRLEDAHLVVVTSWEEQKFVQHHIGPVNTWMGLHDQNGPWKWVDGTDYETGFK

SEQ ID NO: 6652 - protein, 252 aa, Homo sapiens; identical to SEQ ID NO: 6649
  Payload ID: 1434;
  Gene Symbol: ASGR1;
  Gene Name: asialoglycoprt receptor 1;
  Uniprot ID:  P07306;
  ENSP ID: ENSP00000481182

SEQ ID NO: 6653 - protein, 287 aa, Homo sapiens
  Payload ID: 1435;
  Gene Symbol: ASGR2;
  Gene Name: asialoglycoprt receptor 2;
  Uniprot ID:  P07307;
  ENSP ID: ENSP00000254850
MAKDFQDIQQLSSEENDHPFHQGPPPAQPLAQRLCSMVCFSLLALSFNILLLVVICVTGSQSAQLQAELRSLKEAFSNFSSSTLTEVQAISTHGGSVGDKITSLGAKLEKQQQDLKADHDALLFHLKHFPVDLRFVACQMELLHSNGSQRTCCPVNWVEHQGSCYWFSHSGKAWAEAEKYCQLENAHLVVINSWEEQKFIVQHTNPFNTWIGLTDSDGSWKWVDGTDYRHNYKNWAVTQPDNWHGHELGGSEDCVEVQPDGRWNDDFCLQVYRWVCEKRRNATGEVA

SEQ ID NO: 6654 - protein, 311 aa, Homo sapiens
  Payload ID: 1435;
  Gene Symbol: ASGR2;
  Gene Name: asialoglycoprt receptor 2;
  Uniprot ID:  P07307;
  ENSP ID: ENSP00000347140
MAKDFQDIQQLSSEENDHPFHQGEGPGTRRLNPRRGNPFLKGPPPAQPLAQRLCSMVCFSLLALSFNILLLVVICVTGSQSEGHGGAQLQAELRSLKEAFSNFSSSTLTEVQAISTHGGSVGDKITSLGAKLEKQQQDLKADHDALLFHLKHFPVDLRFVACQMELLHSNGSQRTCCPVNWVEHQGSCYWFSHSGKAWAEAEKYCQLENAHLVVINSWEEQKFIVQHTNPFNTWIGLTDSDGSWKWVDGTDYRHNYKNWAVTQPDNWHGHELGGSEDCVEVQPDGRWNDDFCLQVYRWVCEKRRNATGEVA

SEQ ID NO: 6655 - protein, 292 aa, Homo sapiens
  Payload ID: 1435;
  Gene Symbol: ASGR2;
  Gene Name: asialoglycoprt receptor 2;
  Uniprot ID:  P07307;
  ENSP ID: ENSP00000405844
MAKDFQDIQQLSSEENDHPFHQGPPPAQPLAQRLCSMVCFSLLALSFNILLLVVICVTGSQSEGHGGAQLQAELRSLKEAFSNFSSSTLTEVQAISTHGGSVGDKITSLGAKLEKQQQDLKADHDALLFHLKHFPVDLRFVACQMELLHSNGSQRTCCPVNWVEHQGSCYWFSHSGKAWAEAEKYCQLENAHLVVINSWEEQKFIVQHTNPFNTWIGLTDSDGSWKWVDGTDYRHNYKNWAVTQPDNWHGHELGGSEDCVEVQPDGRWNDDFCLQVYRWVCEKRRNATGEVA

SEQ ID NO: 6656 - protein, 135 aa, Homo sapiens
  Payload ID: 1435;
  Gene Symbol: ASGR2;
  Gene Name: asialoglycoprt receptor 2;
  ENSP ID: ENSP00000458835
MAKDFQDIQQLSSEENDHPFHQGEGPGTRRLNPRRGNPFLKGPPPAQPLAQRLCSMVCFSLLALSFNILLLVVICVTGSQSAQLQAELRSLKEAFSNFSSSTLTEVQAISTHGGSVGDKITSLGAKLEKQQQDLK

SEQ ID NO: 6657 - protein, 140 aa, Homo sapiens
  Payload ID: 1436;
  Gene Symbol: ASPG;
  Gene Name: asparaginase;
  ENSP ID: ENSP00000446856
AAARGGHTEAVTMLLQRGVDVNTRDTDGFSPLLLAVRGRHPGVIGLLREAGASLSTQELEEAGTELCRLAYRADLEGLQVWWQAGADLGQPGYDGHSALHVAEAAGNLAVVAFLQSLEGAVGAQAPCPEPSCFQEVLPGV

SEQ ID NO: 6658 - protein, 126 aa, Homo sapiens
  Payload ID: 1436;
  Gene Symbol: ASPG;
  Gene Name: asparaginase;
  ENSP ID: ENSP00000447032
  MOD_RES (1)..(1): Any amino acid
XPASRNQRILYTVLECQPLFDSSDMTIAEWVCLAQTIKRHYEQYHGFVVIHGTDTMAFAASMLSFMLENLQKTVILTGAQVPIHALWSDGRENLLGALLMAGQYVIPELLTKDLRGEMTPPSVEER

SEQ ID NO: 6659 - protein, 555 aa, Homo sapiens
  Payload ID: 1436;
  Gene Symbol: ASPG;
  Gene Name: asparaginase;
  ENSP ID: ENSP00000448911
MARAVGPERRLLAVYTGGTIGMRSELGVLVPGTGLAAILRTLPMFHDEEHARARGLSEDTLVLPPASRNQRILYTVLECQPLFDSSDMTIAEWVCLAQTIKRHYEQYHGFVVIHGTDTMAFAASMLSFMLENLQKTVILTGAQVPIHALWSDGRENLLGALLMAGQYVIPEVCLFFQNQLFRGNRATKVDARRFAAFCSPNLLPLATVGADITINRELVRKVDGKAGLVVHSSMEQDVGLLRLYPGIPAALVRAFLQPPLKGVVMETFGSGNGPTKPDLLQELRVATERGLVIVNCTHCLQGAVTTDYAAGMAMAGAGVISGFDMTSEAALAKLSYVLGQPGLSLDVRKELLTKDLRGEMTPPSVEERRPSLQGNTLGGGVSWLLSLSGSQEADALRNALVPSLACAAAHAGDVEALQALVELGSDLGLVDFNGQTPLHAAARGGHTEAVTMLLQRGVDVNTRDTDGFSPLLLAVRGRHPGVIGLLREAGASLSTQELEEAGTELCRQRQPGTWQWWPFYRAWRVRLVPRPHAQKCCLVSNLKASCCSISHSFLP

SEQ ID NO: 6660 - protein, 573 aa, Homo sapiens
  Payload ID: 1436;
  Gene Symbol: ASPG;
  Gene Name: asparaginase;
  Uniprot ID:  Q86U10;
  ENSP ID: ENSP00000450040
MARAVGPERRLLAVYTGGTIGMRSELGVLVPGTGLAAILRTLPMFHDEEHARARGLSEDTLVLPPASRNQRILYTVLECQPLFDSSDMTIAEWVCLAQTIKRHYEQYHGFVVIHGTDTMAFAASMLSFMLENLQKTVILTGAQVPIHALWSDGRENLLGALLMAGQYVIPEVCLFFQNQLFRGNRATKVDARRFAAFCSPNLLPLATVGADITINRELVRKVDGKAGLVVHSSMEQDVGLLRLYPGIPAALVRAFLQPPLKGVVMETFGSGNGPTKPDLLQELRVATERGLVIVNCTHCLQGAVTTDYAAGMAMAGAGVISGFDMTSEAALAKLSYVLGQPGLSLDVRKELLTKDLRGEMTPPSVEERRPSLQGNTLGGGVSWLLSLSGSQEADALRNALVPSLACAAAHAGDVEALQALVELGSDLGLVDFNGQTPLHAAARGGHTEAVTMLLQRGVDVNTRDTDGFSPLLLAVRGRHPGVIGLLREAGASLSTQELEEAGTELCRLAYRADLEGLQVWWQAGADLGQPGYDGHSALHVAEAAGNLAVVAFLQSLEGAVGAQAPCPEVLPGV

SEQ ID NO: 6661 - protein, 308 aa, Homo sapiens
  Payload ID: 1437;
  Gene Symbol: ASRGL1;
  Gene Name: asparaginase like 1;
  Uniprot ID:  Q7L266;
  ENSP ID: ENSP00000301776
MNPIVVVHGGGAGPISKDRKERVHQGMVRAATVGYGILREGGSAVDAVEGAVVALEDDPEFNAGCGSVLNTNGEVEMDASIMDGKDLSAGAVSAVQCIANPIKLARLVMEKTPHCFLTDQGAAQFAAAMGVPEIPGEKLVTERNKKRLEKEKHEKGAQKTDCQKNLGTVGAVALDCKGNVAYATSTGGIVNKMVGRVGDSPCLGAGGYADNDIGAVSTTGHGESILKVNLARLTLFHIEQGKTVEEAADLSLGYMKSRVKGLGGLIVVSKTGDWVAKWTSTSMPWAAAKDGKLHFGIDPDDTTITDLP

SEQ ID NO: 6662 - protein, 308 aa, Homo sapiens; identical to SEQ ID NO: 6661
  Payload ID: 1437;
  Gene Symbol: ASRGL1;
  Gene Name: asparaginase like 1;
  Uniprot ID:  Q7L266;
  ENSP ID: ENSP00000400057

SEQ ID NO: 6663 - protein, 70 aa, Homo sapiens
  Payload ID: 1437;
  Gene Symbol: ASRGL1;
  Gene Name: asparaginase like 1;
  ENSP ID: ENSP00000431772
MNPIVVVHGGGAGPISKDRKERVHQGMVRAATVGYGILREGGSAVDAVEGAVVALEDDPEFNADTSLLSD

SEQ ID NO: 6664 - protein, 70 aa, Homo sapiens; identical to SEQ ID NO: 6663
  Payload ID: 1437;
  Gene Symbol: ASRGL1;
  Gene Name: asparaginase like 1;
  ENSP ID: ENSP00000433136

SEQ ID NO: 6665 - protein, 164 aa, Homo sapiens
  Payload ID: 1437;
  Gene Symbol: ASRGL1;
  Gene Name: asparaginase like 1;
  ENSP ID: ENSP00000478649
MNPIVVVHGGGAGPISKDRKERVHQGMVRAATVGYGILREGGSAVDAVEGAVVALEDDPEFNAGCGSVLNTNGEVEMDASIMDGKDLSAGAVSAVQCIANPIKLARLVMEKTPHCFLTDQGAAQFAAAMGVPEIPGEKLVTERNKKRLEKEKHEKGAQKTDCQK

SEQ ID NO: 6666 - protein, 133 aa, Homo sapiens
  Payload ID: 1437;
  Gene Symbol: ASRGL1;
  Gene Name: asparaginase like 1;
  ENSP ID: ENSP00000482684
MVRAATVGYGILREGGSAVDAVEGAVVALEDDPEFNAGCGSVLNTNGEVEMDASIMDGKDLSAGAVSAVQCIANPIKLARLVMEKTPHCFLTDQGAAQFAAAMGVPEIPGEKLVTERNKKRLEKEKHEKGAQK

SEQ ID NO: 6667 - protein, 56 aa, Homo sapiens
  Payload ID: 1437;
  Gene Symbol: ASRGL1;
  Gene Name: asparaginase like 1;
  ENSP ID: ENSP00000484457
IPGEKLVTERNKKRLEKEKHEKGAQKTDCQKFFRGHKLTTRLTVDVLGNLSSTCSQ

SEQ ID NO: 6668 - protein, 70 aa, Homo sapiens; identical to SEQ ID NO: 6663
  Payload ID: 1437;
  Gene Symbol: ASRGL1;
  Gene Name: asparaginase like 1;
  ENSP ID: ENSP00000486943

SEQ ID NO: 6669 - protein, 561 aa, Homo sapiens
  Payload ID: 1438;
  Gene Symbol: ASNS;
  Gene Name: asparagine synthetase (glutamine-hydrolyzing);
  Uniprot ID:  P08243;
  ENSP ID: ENSP00000175506
MCGIWALFGSDDCLSVQCLSAMKIAHRGPDAFRFENVNGYTNCCFGFHRLAVVDPLFGMQPIRVKKYPYLWLCYNGEIYNHKKMQQHFEFEYQTKVDGEIILHLYDKGGIEQTICMLDGVFAFVLLDTANKKVFLGRDTYGVRPLFKAMTEDGFLAVCSEAKGLVTLKHSATPFLKVEPFLPGHYEVLDLKPNGKVASVEMVKYHHCRDVPLHALYDNVEKLFPGFEIETVKNNLRILFNNAVKKRLMTDRRIGCLLSGGLDSSLVAATLLKQLKEAQVQYPLQTFAIGMEDSPDLLAARKVADHIGSEHYEVLFNSEEGIQALDEVIFSLETYDITTVRASVGMYLISKYIRKNTDSVVIFSGEGSDELTQGYIYFHKAPSPEKAEEESERLLRELYLFDVLRADRTTAAHGLELRVPFLDHRFSSYYLSLPPEMRIPKNGIEKHLLRETFEDSNLIPKEILWRPKEAFSDGITSVKNSWFKILQEYVEHQVDDAMMANAAQKFPFNTPKTKEGYYYRQVFERHYPGRADWLSHYWMPKWINATDPSARTLTHYKSAVKA

SEQ ID NO: 6670 - protein, 561 aa, Homo sapiens; identical to SEQ ID NO: 6669
  Payload ID: 1438;
  Gene Symbol: ASNS;
  Gene Name: asparagine synthetase (glutamine-hydrolyzing);
  Uniprot ID:  P08243;
  ENSP ID: ENSP00000377845

SEQ ID NO: 6671 - protein, 561 aa, Homo sapiens; identical to SEQ ID NO: 6669
  Payload ID: 1438;
  Gene Symbol: ASNS;
  Gene Name: asparagine synthetase (glutamine-hydrolyzing);
  Uniprot ID:  P08243;
  ENSP ID: ENSP00000377846

SEQ ID NO: 6672 - protein, 162 aa, Homo sapiens
  Payload ID: 1438;
  Gene Symbol: ASNS;
  Gene Name: asparagine synthetase (glutamine-hydrolyzing);
  ENSP ID: ENSP00000394242
MCGIWALFGSDDCLSVQCLSAMKIAHRGPDAFRFENVNGYTNCCFGFHRLAVVDPLFGMQPIRVKKYPYLWLCYNGEIYNHKKMQQHFEFEYQTKVDGEIILHLYDKGGIEQTICMLDGVFAFVLLDTANKKVFLGRDTYGVRPLFKAMTEDGFLAVCSEAK

SEQ ID NO: 6673 - protein, 32 aa, Homo sapiens
  Payload ID: 1438;
  Gene Symbol: ASNS;
  Gene Name: asparagine synthetase (glutamine-hydrolyzing);
  ENSP ID: ENSP00000397802
MCGIWALFGSDDCLSVQCLSAMKIAHRGPDAF

SEQ ID NO: 6674 - protein, 214 aa, Homo sapiens
  Payload ID: 1438;
  Gene Symbol: ASNS;
  Gene Name: asparagine synthetase (glutamine-hydrolyzing);
  ENSP ID: ENSP00000400422
MCGIWALFGSDDCLSVQCLSAMKIAHRGPDAFRFENVNGYTNCCFGFHRLAVVDPLFGMQPIRVKKYPYLWLCYNGEIYNHKKMQQHFEFEYQTKVDGEIILHLYDKGGIEQTICMLDGVFAFVLLDTANKKVFLGRDTYGVRPLFKAMTEDGFLAVCSEAKGLVTLKHSATPFLKVEPFLPGHYEVLDLKPNGKVASVEMVKYHHCRDVPLHA

SEQ ID NO: 6675 - protein, 401 aa, Homo sapiens
  Payload ID: 1438;
  Gene Symbol: ASNS;
  Gene Name: asparagine synthetase (glutamine-hydrolyzing);
  ENSP ID: ENSP00000401651
MCGIWALFGSDDCLSVQCLSAMKIAHRGPDAFRFENVNGYTNCCFGFHRLAVVDPLFGMQPIRVKKYPYLWLCYNGEIYNHKKMQQHFEFEYQTKVDGEIILHLYDKGGIEQTICMLDGVFAFVLLDTANKKVFLGRDTYGVRPLFKAMTEDGFLAVCSEAKGLVTLKHSATPFLKVEPFLPGHYEVLDLKPNGKVASVEMVKYHHCRDVPLHALYDNVEKLFPGFEIETVKNNLRILFNNAVKKRLMTDRRIGCLLSGGLDSSLVAATLLKQLKEAQVQYPLQTFAIGMEDSPDLLAARKVADHIGSEHYEVLFNSEEGIQALDEVIFSLETYDITTVRASVGMYLISKYIRKNTDSVVIFSGEGSDELTQGYIYFHKDWRGRKKNCFVCQKQNSWCFCL

SEQ ID NO: 6676 - protein, 118 aa, Homo sapiens
  Payload ID: 1438;
  Gene Symbol: ASNS;
  Gene Name: asparagine synthetase (glutamine-hydrolyzing);
  ENSP ID: ENSP00000402350
MCGIWALFGSDDCLSVQCLSAMKIAHRGPDAFRFENVNGYTNCCFGFHRLAVVDPLFGMQPIRVKKYPYLWLCYNGEIYNHKKMQQHFEFEYQTKVDGEIILHLYDKGGIEQTICMLD

SEQ ID NO: 6677 - protein, 540 aa, Homo sapiens
  Payload ID: 1438;
  Gene Symbol: ASNS;
  Gene Name: asparagine synthetase (glutamine-hydrolyzing);
  Uniprot ID:  P08243;
  ENSP ID: ENSP00000406994
MKIAHRGPDAFRFENVNGYTNCCFGFHRLAVVDPLFGMQPIRVKKYPYLWLCYNGEIYNHKKMQQHFEFEYQTKVDGEIILHLYDKGGIEQTICMLDGVFAFVLLDTANKKVFLGRDTYGVRPLFKAMTEDGFLAVCSEAKGLVTLKHSATPFLKVEPFLPGHYEVLDLKPNGKVASVEMVKYHHCRDVPLHALYDNVEKLFPGFEIETVKNNLRILFNNAVKKRLMTDRRIGCLLSGGLDSSLVAATLLKQLKEAQVQYPLQTFAIGMEDSPDLLAARKVADHIGSEHYEVLFNSEEGIQALDEVIFSLETYDITTVRASVGMYLISKYIRKNTDSVVIFSGEGSDELTQGYIYFHKAPSPEKAEEESERLLRELYLFDVLRADRTTAAHGLELRVPFLDHRFSSYYLSLPPEMRIPKNGIEKHLLRETFEDSNLIPKEILWRPKEAFSDGITSVKNSWFKILQEYVEHQVDDAMMANAAQKFPFNTPKTKEGYYYRQVFERHYPGRADWLSHYWMPKWINATDPSARTLTHYKSAVKA

SEQ ID NO: 6678 - protein, 478 aa, Homo sapiens
  Payload ID: 1438;
  Gene Symbol: ASNS;
  Gene Name: asparagine synthetase (glutamine-hydrolyzing);
  Uniprot ID:  P08243;
  ENSP ID: ENSP00000408472
MQQHFEFEYQTKVDGEIILHLYDKGGIEQTICMLDGVFAFVLLDTANKKVFLGRDTYGVRPLFKAMTEDGFLAVCSEAKGLVTLKHSATPFLKVEPFLPGHYEVLDLKPNGKVASVEMVKYHHCRDVPLHALYDNVEKLFPGFEIETVKNNLRILFNNAVKKRLMTDRRIGCLLSGGLDSSLVAATLLKQLKEAQVQYPLQTFAIGMEDSPDLLAARKVADHIGSEHYEVLFNSEEGIQALDEVIFSLETYDITTVRASVGMYLISKYIRKNTDSVVIFSGEGSDELTQGYIYFHKAPSPEKAEEESERLLRELYLFDVLRADRTTAAHGLELRVPFLDHRFSSYYLSLPPEMRIPKNGIEKHLLRETFEDSNLIPKEILWRPKEAFSDGITSVKNSWFKILQEYVEHQVDDAMMANAAQKFPFNTPKTKEGYYYRQVFERHYPGRADWLSHYWMPKWINATDPSARTLTHYKSAVKA

SEQ ID NO: 6679 - protein, 63 aa, Homo sapiens
  Payload ID: 1438;
  Gene Symbol: ASNS;
  Gene Name: asparagine synthetase (glutamine-hydrolyzing);
  ENSP ID: ENSP00000408797
MKIAHRGPDAFRFENVNGYTNCCFGFHRLAVVDPLFGMQPIRVKKYPYLWLCYNGEIYNHKKV

SEQ ID NO: 6680 - protein, 28 aa, Homo sapiens
  Payload ID: 1438;
  Gene Symbol: ASNS;
  Gene Name: asparagine synthetase (glutamine-hydrolyzing);
  ENSP ID: ENSP00000413797
MCGIWALFGSDDCLSVQCLSAMKIAHRG

SEQ ID NO: 6681 - protein, 478 aa, Homo sapiens; identical to SEQ ID NO: 6678
  Payload ID: 1438;
  Gene Symbol: ASNS;
  Gene Name: asparagine synthetase (glutamine-hydrolyzing);
  Uniprot ID:  P08243;
  ENSP ID: ENSP00000414379

SEQ ID NO: 6682 - protein, 540 aa, Homo sapiens; identical to SEQ ID NO: 6677
  Payload ID: 1438;
  Gene Symbol: ASNS;
  Gene Name: asparagine synthetase (glutamine-hydrolyzing);
  Uniprot ID:  P08243;
  ENSP ID: ENSP00000414901

SEQ ID NO: 6683 - protein, 643 aa, Homo sapiens
  Payload ID: 1439;
  Gene Symbol: ASNSD1;
  Gene Name: asparagine synthetase domain containing 1;
  Uniprot ID:  Q9NWL6;
  ENSP ID: ENSP00000260952
MCGICCSVNFSAEHFSQDLKEDLLYNLKQRGPNSSKQLLKSDVNYQCLFSAHVLHLRGVLTTQPVEDERGNVFLWNGEIFSGIKVEAEENDTQILFNYLSSCKNESEILSLFSEVQGPWSFIYYQASSHYLWFGRDFFGRRSLLWHFSNLGKSFCLSSVGTQTSGLANQWQEVPASGLFRIDLKSTVISGCIILQLYPWKYISRENIIEENVNSLSQISADLPAFVSVVANEAKLYLEKPVVPLNMMLPQAALETHCSNISNVPPTREILQVFLTDVHMKEVIQQFIDVLSVAVKKRVLCLPRDENLTANEVLKTCDRKANVAILFSGGIDSMVIATLADRHIPLDEPIDLLNVAFIAEEKTMPTTFNREGNKQKNKCEIPSEEFSKDVAAAAADSPNKHVSVPDRITGRAGLKELQAVSPSRIWNFVEINVSMEELQKLRRTRICHLIRPLDTVLDDSIGCAVWFASRGIGWLVAQEGVKSYQSNAKVVLTGIGADEQLAGYSRHRVRFQSHGLEGLNKEIMMELGRISSRNLGRDDRVIGDHGKEARFPFLDENVVSFLNSLPIWEKANLTLPRGIGEKLLLRLAAVELGLTASALLPKRAMQFGSRIAKMEKINEKASDKCGRLQIMSLENLSIEKETKL

SEQ ID NO: 6684 - protein, 73 aa, Homo sapiens
  Payload ID: 1439;
  Gene Symbol: ASNSD1;
  Gene Name: asparagine synthetase domain containing 1;
  ENSP ID: ENSP00000398129
MCGICCSVNFSAEHFSQDLKEDLLYNLKQRGPNSSKQLLKSDVNYQCLFSAHVLHLRGVLTTQPVEDERGNVF

SEQ ID NO: 6685 - protein, 618 aa, Homo sapiens
  Payload ID: 1439;
  Gene Symbol: ASNSD1;
  Gene Name: asparagine synthetase domain containing 1;
  ENSP ID: ENSP00000406790
MCGICCSVNFSAEHFSQDLKEDLLYNLKQRGPNSSKQLLKSDVNYQCLFSAHVLHLRGVLTTQPVEDERGNVFLWNGEIFSGIKVEAEENDTQILFNYLSSCKNESEILSLFSEVQGPWSFIYYQASSHYLWFGRDFFGRRSLLWHFSNLGKSFCLSSVGTQTSGLANQWQEVPASGLFRIDLKSTVISGCIILQLYPWKYISRENIIEENVNSLSQISADLPAFVSVVANEAKLYLEKPVVPLNMMLPQAALETHCSNISNVPPTREILQVFLTDVHMKEVIQQFIDVLSVAVKKRVLCLPRDENLTANEVLKTCDRKANVAILFSGGIDSMVIATLADRHIPLDEPIDLLNVAFIAEEKTMPTTFNREGNKQKNKCEIPSEEFSKDVAAAAADSPNKHVSVPDRITGRAGLKELQAVSPSRIWNFVEINVSMEELQKLRRTRICHLIRPLDTVLDDSIGCAVWFASRGIGWLVAQEGVKSYQSNAKVVLTGIGADEQLAGYSRHRVRFQSHGLEGLNKEIMMELGRISSRNLGRDDRVIGDHGKEARFPFLDENVVSFLNSLPIWEKANLTLPRGIGEKLLLRLAAVELGLTASALLPKRAMQFGSRIAKMEKINE

SEQ ID NO: 6686 - protein, 96 aa, Homo sapiens
  Payload ID: 1439;
  Gene Symbol: ASNSD1;
  Gene Name: asparagine synthetase domain containing 1;
  ENSP ID: ENSP00000475224
MPSRGTRPEDSSVLIPTDNSTPHKEDLSSKIKEQKIVVDELSNLKKNRKVYRQQQNSNIFFLADRTEMLSESKNILDELKKEYQEIENLDKTKIKK

SEQ ID NO: 6687 - protein, 63 aa, Homo sapiens
  Payload ID: 1439;
  Gene Symbol: ASNSD1;
  Gene Name: asparagine synthetase domain containing 1;
  ENSP ID: ENSP00000475546
MPSRGTRPEDSSVLIPTDNSTPHKEDLSSKIKEQKIVVDELSNLKKNRTEQKCCLRARIYWMN

SEQ ID NO: 6688 - protein, 45 aa, Homo sapiens
  Payload ID: 1439;
  Gene Symbol: ASNSD1;
  Gene Name: asparagine synthetase domain containing 1;
  ENSP ID: ENSP00000475805
MPSRGTRPEDSSVLIPTDNSTPHKEDLSSKTEQKCCLRARIYWMN

SEQ ID NO: 6689 - protein, 162 aa, Homo sapiens
  Payload ID: 1439;
  Gene Symbol: ASNSD1;
  Gene Name: asparagine synthetase domain containing 1;
  ENSP ID: ENSP00000475970
MCGICCSVVLTGIGADEQLAGYSRHRVRFQSHGLEGLNKEIMMELGRISSRNLGRDDRVIGDHGKEARFPFLDENVVSFLNSLPIWEKANLTLPRGIGEKLLLRLAAVELGLTASALLPKRAMQFGSRIAKMEKINEKASDKCGRLQIMSLENLSIEKETKL

SEQ ID NO: 6690 - protein, 246 aa, Homo sapiens
  Payload ID: 1439;
  Gene Symbol: ASNSD1;
  Gene Name: asparagine synthetase domain containing 1;
  ENSP ID: ENSP00000476091
MPSRGTRPEDSSVLIPTDNSTPHKEDLSSKIKEQKIVVDELSNLKKNRKVYRQQQNSNIFFLADRTEMLSESKTFIAEEKTMPTTFNREGNKQKNKCEIPSEEFSKDVAAAAADSPNKHVSVPDRITGRAGLKELQAVSPSRIWNFVEINVSMEELQKLRRTRICHLIRPLDTVLDDSIGCAVWFASRGIGWLVAQEGVKSYQSNAKVVLTGIGADEQLAGYSRHRVRFQSHGLEGLNKEIMMELG

SEQ ID NO: 6691 - protein, 57 aa, Homo sapiens
  Payload ID: 1439;
  Gene Symbol: ASNSD1;
  Gene Name: asparagine synthetase domain containing 1;
  ENSP ID: ENSP00000476099
MPSRGTRPEDSSVLIPTDNSTPHKEDLSSKIKEQKIVVDELSNLKKNRPKLCFPESI

SEQ ID NO: 6692 - protein, 548 aa, Homo sapiens
  Payload ID: 1440;
  Gene Symbol: NARS;
  Gene Name: asparaginyl-tRNA synthetase;
  Uniprot ID:  O43776;
  ENSP ID: ENSP00000256854
MVLAELYVSDREGSDATGDGTKEKPFKTGLKALMTVGKEPFPTIYVDSQKENERWNVISKSQLKNIKKMWHREQMKSESREKKEAEDSLRREKNLEEAKKITIKNDPSLPEPKCVKIGALEGYRGQRVKVFGWVHRLRRQGKNLMFLVLRDGTGYLQCVLADELCQCYNGVLLSTESSVAVYGMLNLTPKGKQAPGGHELSCDFWELIGLAPAGGADNLINEESDVDVQLNNRHMMIRGENMSKILKARSMVTRCFRDHFFDRGYYEVTPPTLVQTQVEGGATLFKLDYFGEEAFLTQSSQLYLETCLPALGDVFCIAQSYRAEQSRTRRHLAEYTHVEAECPFLTFDDLLNRLEDLVCDVVDRILKSPAGSIVHELNPNFQPPKRPFKRMNYSDAIVWLKEHDVKKEDGTFYEFGEDIPEAPERLMTDTINEPILLCRFPVEIKSFYMQRCPEDSRLTESVDVLMPNVGEIVGGSMRIFDSEEILAGYKREGIDPTPYYWYTDQRKYGTCPHGGYGLGLERFLTWILNRYHIRDVCLYPRFVQRCTP

SEQ ID NO: 6693 - protein, 174 aa, Homo sapiens
  Payload ID: 1440;
  Gene Symbol: NARS;
  Gene Name: asparaginyl-tRNA synthetase;
  Uniprot ID:  O43776;
  ENSP ID: ENSP00000442496
MVLAELYVSDREGSDATGDGTKEKPFKTGLKALMTVGKEPFPTIYVDSQKENERWNVISKSQLKNIKKMWHREQMKSESREKKEAEDSLRREKNLEEAKKITIKNDPSLPEPKCVKIGALEGYRGQRVKVFGWVHRLRRQVSVLQWSSLVHGEQCCSVWNAKSYPKGQAGSRWP

SEQ ID NO: 6694 - protein, 162 aa, Homo sapiens
  Payload ID: 1440;
  Gene Symbol: NARS;
  Gene Name: asparaginyl-tRNA synthetase;
  ENSP ID: ENSP00000464899
MVLAELYVSDREGSDATGDGTKEKPFKTGLKALMTVGKEPFPTIYVDSQKENERWNVISKSQLKNIKKMWHREQMKSESREKKEAEDSLRREKNLEEAKKITIKNDPSLPEPKCVKIGALEGYRGQRVKVFGWVHRLRRQVSVLQWSSLVHGEQCCSVWNAK

SEQ ID NO: 6695 - protein, 136 aa, Homo sapiens
  Payload ID: 1440;
  Gene Symbol: NARS;
  Gene Name: asparaginyl-tRNA synthetase;
  ENSP ID: ENSP00000464988
MVLAELYVSDREGSDATGDGTKEKPFKTGLKALMTVGKEPFPTIYVDSQKENERWNVISKSQLKNIKKMWHREQMKSESREKKEAEDSLRREKNLEEAKKITIKNDPSLPEPKCVKIGALEITSLIGGTMKLLLQH

SEQ ID NO: 6696 - protein, 128 aa, Homo sapiens
  Payload ID: 1440;
  Gene Symbol: NARS;
  Gene Name: asparaginyl-tRNA synthetase;
  ENSP ID: ENSP00000466606
MWHREQMKSESREKKEAEDSLRREKNLEEAKKITIKNDPSLPEPKCVKIGALEGYRGQRVKVFGWVHRLRRQGKNLMFLVLRDGTGYLQCVLADELCQCYNGVLLSTESSVAVYGMLNLTPKGKQAPG

SEQ ID NO: 6697 - protein, 47 aa, Homo sapiens
  Payload ID: 1440;
  Gene Symbol: NARS;
  Gene Name: asparaginyl-tRNA synthetase;
  ENSP ID: ENSP00000466919
MVLELYVSDREGSDATGDGTKEKPFKTGLKYCTMFKNCLFSPPYPRL

SEQ ID NO: 6698 - protein, 163 aa, Homo sapiens
  Payload ID: 1440;
  Gene Symbol: NARS;
  Gene Name: asparaginyl-tRNA synthetase;
  ENSP ID: ENSP00000467421
MTVGKEPFPTIYVDSQKENERWNVISKSQLKNIKKMWHREQMKSESREKKEAEDSLRREKNLEEAKKITIKNDPSLPEPKCVKIGALEGYRGQRVKVFGWVHRLRRQGKNLMFLVLRDGTGYLQCVLADELCQCYNGVLLSTESSVAVYGMLNLTPKGKQAPG

SEQ ID NO: 6699 - protein, 167 aa, Homo sapiens
  Payload ID: 1440;
  Gene Symbol: NARS;
  Gene Name: asparaginyl-tRNA synthetase;
  ENSP ID: ENSP00000467651
MVLAELYVSDREGSDATGDGTKEKPFKTGLKALMTVGKEPFPTIYVDSQKENERWNVISKSQLKNIKKMWHREQMKSESREKKEVKIGALEGYRGQRVKVFGWVHRLRRQGKNLMFLVLRDGTGYLQCVLADELCQCYNGVLLSTESSVAVYGMLNLTPKGKQAPGG

SEQ ID NO: 6700 - protein, 477 aa, Homo sapiens
  Payload ID: 1441;
  Gene Symbol: NARS2;
  Gene Name: asparaginyl-tRNA synthetase 2, mitochondrial (putative);
  Uniprot ID:  Q96I59;
  ENSP ID: ENSP00000281038
MLGVRCLLRSVRFCSSAPFPKHKPSAKLSVRDALGAQNASGERIKIQGWIRSVRSQKEVLFLHVNDGSSLESLQVVADSGLDSRELNFGSSVEVQGQLIKSPSKRQNVELKAEKIKVIGNCDAKDFPIKYKERHPLEYLRQYPHFRCRTNVLGSILRIRSEATAAIHSFFKDSGFVHIHTPIITSNDSEGAGELFQLEPSGKLKVPEENFFNVPAFLTVSGQLHLEVMSGAFTQVFTFGPTFRAENSQSRRHLAEFYMIEAEISFVDSLQDLMQVIEELFKATTMMVLSKCPEDVELCHKFIAPGQKDRLEHMLKNNFLIISYTEAVEILKQASQNFTFTPEWGADLRTEHEKYLVKHCGNIPVFVINYPLTLKPFYMRDNEDGPQHTVAAVDLLVPGVGELFGGGLREERYHFLEERLARSGLTEVYQWYLDLRRFGSVPHGGFGMGFERYLQCILGVDNIKDVIPFPRFPHSCLL

SEQ ID NO: 6701 - protein, 241 aa, Homo sapiens
  Payload ID: 1441;
  Gene Symbol: NARS2;
  Gene Name: asparaginyl-tRNA synthetase 2, mitochondrial (putative);
  ENSP ID: ENSP00000432240
MLGVRCLLRSVRFCSSAPFPKHKPSAKLSVRDALGAQNASGERIKIQGWIRSVRSQKEVLFLHVNDGSSLESLQVVADSGLDSRELNFGSSVEVQGQLIKSPSKRQNVELKAEKIKVIGNCDAKDFPIKYKERHPLEYLRQYPHFRCRTNVLGSILRIRSEATAAIHSFFKDSGFVHIHTPIITSNDSEGAGELFQLEWGADLRTEHEKYLVKHCGNIPVFVINYPLTLKPFYMRDNEDGP

SEQ ID NO: 6702 - protein, 250 aa, Homo sapiens
  Payload ID: 1441;
  Gene Symbol: NARS2;
  Gene Name: asparaginyl-tRNA synthetase 2, mitochondrial (putative);
  Uniprot ID:  Q96I59;
  ENSP ID: ENSP00000432635
MSGAFTQVFTFGPTFRAENSQSRRHLAEFYMIEAEISFVDSLQDLMQVIEELFKATTMMVLSKCPEDVELCHKFIAPGQKDRLEHMLKNNFLIISYTEAVEILKQASQNFTFTPEWGADLRTEHEKYLVKHCGNIPVFVINYPLTLKPFYMRDNEDGPQHTVAAVDLLVPGVGELFGGGLREERYHFLEERLARSGLTEVYQWYLDLRRFGSVPHGGFGMGFERYLQCILGVDNIKDVIPFPRFPHSCLL

SEQ ID NO: 6703 - protein, 2 aa, Homo sapiens
  Payload ID: 1441;
  Gene Symbol: NARS2;
  Gene Name: asparaginyl-tRNA synthetase 2, mitochondrial (putative);
  ENSP ID: ENSP00000433478
MS

SEQ ID NO: 6704 - protein, 81 aa, Homo sapiens
  Payload ID: 1441;
  Gene Symbol: NARS2;
  Gene Name: asparaginyl-tRNA synthetase 2, mitochondrial (putative);
  ENSP ID: ENSP00000435298
  MOD_RES (1)..(1): Any amino acid
XVAAVDLLVPGVGELFGGGLREERYHFLEERLARYLDLRRFGSVPHGGFGMGFERYLQCILGVDNIKDVIPFPRFPHSCLL

SEQ ID NO: 6705 - protein, 106 aa, Homo sapiens
  Payload ID: 1441;
  Gene Symbol: NARS2;
  Gene Name: asparaginyl-tRNA synthetase 2, mitochondrial (putative);
  ENSP ID: ENSP00000436114
  MOD_RES (1)..(1): Any amino acid
XPIKYKERHPLEYLRQYPHFRCRTNVLGSILRIRSEATAAIHSFFKDSGFVHIHTPIITSNDSEGAGELFQLEPSGKLKVPEENFFNVPAFLTVSGQLHLEVMSGL

SEQ ID NO: 6706 - protein, 313 aa, Homo sapiens
  Payload ID: 1442;
  Gene Symbol: ASPH;
  Gene Name: aspartate beta-hydroxylase;
  Uniprot ID:  Q12797;
  ENSP ID: ENSP00000348841
MAQRKNAKSSGNSSSSGSGSGSTSAGSSSPGARRETKHGGHKNGRKGGLSGTSFFTWFMVIALLGVWTSVAVVWFDLVDYEEVLGKLGIYDADGDGDFDVDDAKVLLGLKERSTSEPAVPPEEAEPHTEPEEQVPVEAEPQNIEDEAKEQIQSLLHEMVHAEHVEGEDLQQEDGPTGEPQQEDDEFLMATDVDDRFETLEPEVSHEETEHSYHVEETVSQDCNQDMEEMMSEQENPDSSEPVVEDERLHHDTDDVTYQVYEEQAVYEPLENEGIEITEVTAPPEDNPVEDSQVIVEEVSIFPVEEQQEVPPDT

SEQ ID NO: 6707 - protein, 203 aa, Homo sapiens
  Payload ID: 1442;
  Gene Symbol: ASPH;
  Gene Name: aspartate beta-hydroxylase;
  Uniprot ID:  Q12797;
  ENSP ID: ENSP00000368762
MAQRKNAKSSGNSSSSGSGSGSTSAGSSSPGARRETKHGGHKNGRKGGLSGTSFFTWFMVIALLGVWTSVAVVWFDLVDYEEVLAKAKDFRYNLSEVLQGKLGIYDADGDGDFDVDDAKVLLGLTKDGSNENIDSLEEVLNILAEESSDWFYGFLSFLYDIMTPFEMLEEEEEESETADGVDGTSQNEGVQGKTCVILDLHNQ

SEQ ID NO: 6708 - protein, 758 aa, Homo sapiens
  Payload ID: 1442;
  Gene Symbol: ASPH;
  Gene Name: aspartate beta-hydroxylase;
  Uniprot ID:  Q12797;
  ENSP ID: ENSP00000368767
MAQRKNAKSSGNSSSSGSGSGSTSAGSSSPGARRETKHGGHKNGRKGGLSGTSFFTWFMVIALLGVWTSVAVVWFDLVDYEEVLGKLGIYDADGDGDFDVDDAKVLLGLKERSTSEPAVPPEEAEPHTEPEEQVPVEAEPQNIEDEAKEQIQSLLHEMVHAEHVEGEDLQQEDGPTGEPQQEDDEFLMATDVDDRFETLEPEVSHEETEHSYHVEETVSQDCNQDMEEMMSEQENPDSSEPVVEDERLHHDTDDVTYQVYEEQAVYEPLENEGIEITEVTAPPEDNPVEDSQVIVEEVSIFPVEEQQEVPPETNRKTDDPEQKAKVKKKKPKLLNKFDKTIKAELDAAEKLRKRGKIEEAVNAFKELVRKYPQSPRARYGKAQCEDDLAEKRRSNEVLRGAIETYQEVASLPDVPADLLKLSLKRRSDRQQFLGHMRGSLLTLQRLVQLFPNDTSLKNDLGVGYLLIGDNDNAKKVYEEVLSVTPNDGFAKVHYGFILKAQNKIAESIPYLKEGIESGDPGTDDGRFYFHLGDAMQRVGNKEAYKWYELGHKRGHFASVWQRSLYNVNGLKAQPWWTPKETGYTELVKSLERNWKLIRDEGLAVMDKAKGLFLPEDENLREKGDWSQFTLWQQGRRNENACKGAPKTCTLLEKFPETTGCRRGQIKYSIMHPGTHVWPHTGPTNCRLRMHLGLVIPKEGCKIRCANETKTWEEGKVLIFDDSFEHEVWQDASSFRLIFIVDVWHPELTPQQRRSLPAI

SEQ ID NO: 6709 - protein, 225 aa, Homo sapiens
  Payload ID: 1442;
  Gene Symbol: ASPH;
  Gene Name: aspartate beta-hydroxylase;
  Uniprot ID:  Q12797;
  ENSP ID: ENSP00000373856
MAEDKETKHGGHKNGRKGGLSGTSFFTWFMVIALLGVWTSVAVVWFDLVDYEEVLAKAKDFRYNLSEVLQGKLGIYDADGDGDFDVDDAKVLLEGPSGVAKRKTKAKVKELTKEELKKEKEKPESRKESKNEERKKGKKEDVRKDKKIADADLSRKESPKGKKDREKEKVDLEKSAKTKENRKKSTNMKDVSSKMASRDKDDRKESRSSTRYAHLTKGNTQKRNG

SEQ ID NO: 6710 - protein, 294 aa, Homo sapiens
  Payload ID: 1442;
  Gene Symbol: ASPH;
  Gene Name: aspartate beta-hydroxylase;
  ENSP ID: ENSP00000394013
MAQRKNAKSSGNSSSSGSGSGSTSAGSSSPGARRETKHGGHKNGRKGGLSGTSFFTWFMVIALLGVWTSVAVVWFDLVDYEEVLGKLGIYDADGDGDFDVDDAKVLLGLKERSTSEPAVPPEEAEPHTEPEEQVPVEAEPQNIEDEAKEQIQSLLHEMVHAEHVEGEDLQQEDGPTGEPQQEDDEFLMATDVDDRFETLEPEVSHEETEHSYHVEETDSSEPVVEDERLHHDTDDVTYQVYEEQAVYEPLENEGIEITEVTAPPEDNPVEDSQVIVEEVSIFPVEEQQEVPPDT

SEQ ID NO: 6711 - protein, 327 aa, Homo sapiens
  Payload ID: 1442;
  Gene Symbol: ASPH;
  Gene Name: aspartate beta-hydroxylase;
  ENSP ID: ENSP00000427823
MAQRKNAKSSGNSSSSGSGSGSTSAGSSSPGARRETKHGGHKNGRKGGLSGTSFFTWFMVIALLGVWTSVAVVWFDLVDYEEVLAKAKDFRYNLSEVLQGKLGIYDADGDGDFDVDDAKVLLGLKERSTSEPAVPPEEAEPHTEPEEQVPVEAEPQNIEDEAKEQIQSLLHEMVHAEHVEGEDLQQEDGPTGEPQQEDDEFLMATDVDDRFETLEPEVSHEETEHSYHVEETVSQDCNQDMEEMMSEQENPDSSEPVVEDERLHHDTDDVTYQVYEEQVYEPLENEGIEITEVTAPPEDNPVEDSQVIVEEVSIFPVEEQQEVPPDT

SEQ ID NO: 6712 - protein, 198 aa, Homo sapiens
  Payload ID: 1442;
  Gene Symbol: ASPH;
  Gene Name: aspartate beta-hydroxylase;
  ENSP ID: ENSP00000427877
MAEDKETKHGGHKNGRKGGLSGTSFFTWFMVIALLGVWTSVAVVWFDLVDYEEVLGKLGIYDADGDGDFDVDDAKVLLGLKERSTSEPAVPPEEAEPHTEPEEQVPVEAEPQNIEDEAKEQIQSLLHEMVHAEHETEHSYHVEETDSSEPVVEDERLHHDTDDVTYQVYEEQAVYEPLENEGIEITEVTAPPEDNPVE

SEQ ID NO: 6713 - protein, 174 aa, Homo sapiens
  Payload ID: 1442;
  Gene Symbol: ASPH;
  Gene Name: aspartate beta-hydroxylase;
  ENSP ID: ENSP00000428060
MAEDKETKHGGHKNGRKGGLSGTSFFTWFMVIALLGVWTSVAVVWFDLVDYEEVLAKAKDFRYNLSEVLQGKLGIYDADGDGDFDVDDAKVLLGLTKDGSNENIDSLEEVLNILAEESSDWFYGFLSFLYDIMTPFEMLEEEEEESETADGVDGTSQNEGVQGKTCVILDLHNQ

SEQ ID NO: 6714 - protein, 256 aa, Homo sapiens
  Payload ID: 1442;
  Gene Symbol: ASPH;
  Gene Name: aspartate beta-hydroxylase;
  Uniprot ID:  Q12797;
  ENSP ID: ENSP00000429160
MAEDKETKHGGHKNGRKGGLSGTSFFTWFMVIALLGVWTSVAVVWFDLVDYEEVLAKAKDFRYNLSEVLQGKLGIYDADGDGDFDVDDAKVLLGLKERSTSEPAVPPEEAEPHTEPEEQVPVEAEPQNIEDEAKEQIQSLLHEMVHAEHETEHSYHVEETVSQDCNQDMEEMMSEQENPDSSEPVVEDERLHHDTDDVTYQVYEEQAVYEPLENEGIEITEVTAPPEDNPVEDSQVIVEEVSIFPVEEQQEVPPDT

SEQ ID NO: 6715 - protein, 270 aa, Homo sapiens
  Payload ID: 1442;
  Gene Symbol: ASPH;
  Gene Name: aspartate beta-hydroxylase;
  Uniprot ID:  Q12797;
  ENSP ID: ENSP00000429286
MAQRKNAKSSGNSSSSGSGSGSTSAGSSSPGARRETKHGGHKNGRKGGLSGTSFFTWFMVIALLGVWTSVAVVWFDLVDYEEVLGKLGIYDADGDGDFDVDDAKVLLGLKERSTSEPAVPPEEAEPHTEPEEQVPVEAEPQNIEDEAKEQIQSLLHEMVHAEHETEHSYHVEETVSQDCNQDMEEMMSEQENPDSSEPVVEDERLHHDTDDVTYQVYEEQAVYEPLENEGIEITEVTAPPEDNPVEDSQVIVEEVSIFPVEEQQEVPPDT

SEQ ID NO: 6716 - protein, 136 aa, Homo sapiens
  Payload ID: 1442;
  Gene Symbol: ASPH;
  Gene Name: aspartate beta-hydroxylase;
  ENSP ID: ENSP00000429718
MAEDKETKHGGHKNGRKGGLSGTSFFTWFMVIALLGVWTSVAVVWFDLVDYEEVLGKLGIYDADGDGDFDVDDAKVLLVKKKKPKLLNKFDKTIKAELDAAEKLRKRGKIEEAVNAFKELVRKYPQSPRARYGKAQ

SEQ ID NO: 6717 - protein, 113 aa, Homo sapiens
  Payload ID: 1442;
  Gene Symbol: ASPH;
  Gene Name: aspartate beta-hydroxylase;
  ENSP ID: ENSP00000429743
MAQRKNAKSSGNSSSSGSGSGSTSAGSSSPGARRETKHGGHKNGRKGGLSGTSFFTWFMVIALLGVWTSVAVVWFDLVDYEEVLGKLGIYDADGDGDFDVDDAKVLLGNLHCI

SEQ ID NO: 6718 - protein, 299 aa, Homo sapiens
  Payload ID: 1442;
  Gene Symbol: ASPH;
  Gene Name: aspartate beta-hydroxylase;
  Uniprot ID:  Q12797;
  ENSP ID: ENSP00000429954
MAEDKETKHGGHKNGRKGGLSGTSFFTWFMVIALLGVWTSVAVVWFDLVDYEEVLAKAKDFRYNLSEVLQGKLGIYDADGDGDFDVDDAKVLLGLKERSTSEPAVPPEEAEPHTEPEEQVPVEAEPQNIEDEAKEQIQSLLHEMVHAEHVEGEDLQQEDGPTGEPQQEDDEFLMATDVDDRFETLEPEVSHEETEHSYHVEETVSQDCNQDMEEMMSEQENPDSSEPVVEDERLHHDTDDVTYQVYEEQAVYEPLENEGIEITEVTAPPEDNPVEDSQVIVEEVSIFPVEEQQEVPPDT

SEQ ID NO: 6719 - protein, 298 aa, Homo sapiens
  Payload ID: 1442;
  Gene Symbol: ASPH;
  Gene Name: aspartate beta-hydroxylase;
  Uniprot ID:  Q12797;
  ENSP ID: ENSP00000430245
MAEDKETKHGGHKNGRKGGLSGTSFFTWFMVIALLGVWTSVAVVWFDLVDYEEVLAKAKDFRYNLSEVLQGKLGIYDADGDGDFDVDDAKVLLGLKERSTSEPAVPPEEAEPHTEPEEQVPVEAEPQNIEDEAKEQIQSLLHEMVHAEHVEGEDLQQEDGPTGEPQQEDDEFLMATDVDDRFETLEPEVSHEETEHSYHVEETVSQDCNQDMEEMMSEQENPDSSEPVVEDERLHHDTDDVTYQVYEEQVYEPLENEGIEITEVTAPPEDNPVEDSQVIVEEVSIFPVEEQQEVPPDT

SEQ ID NO: 6720 - protein, 163 aa, Homo sapiens
  Payload ID: 1442;
  Gene Symbol: ASPH;
  Gene Name: aspartate beta-hydroxylase;
  ENSP ID: ENSP00000430516
MATDVDDRFETLEPEVSHEETEHSYHVEETVSQDCNQDMEEMMSEQENPDSSEPVVEDERLHHDTDDVTYQVYEEQAVYEPLENEGIEITEVTAPPEDNPVEDSQVIVEEVSIFPVEEQQEVPPETNRKTDDPEQKAKEDSFASGESQAACTMSWDFSHPFMC

SEQ ID NO: 6721 - protein, 210 aa, Homo sapiens
  Payload ID: 1442;
  Gene Symbol: ASPH;
  Gene Name: aspartate beta-hydroxylase;
  Uniprot ID:  Q12797;
  ENSP ID: ENSP00000436188
MAEDKETKHGGHKNGRKGGLSGTSFFTWFMVIALLGVWTSVAVVWFDLVDYEEVLGKLGIYDADGDGDFDVDDAKVLLEGPSGVAKRKTKAKVKELTKEELKKEKEKPESRKESKNEERKKGKKEDVRKDKKIADADLSRKESPKGKKDREKEKVDLEKSAKTKENRKKSTNMKDVSSKMASRDKDDRKESRSSTRYAHLTKGNTQKRNG

SEQ ID NO: 6722 - protein, 729 aa, Homo sapiens
  Payload ID: 1442;
  Gene Symbol: ASPH;
  Gene Name: aspartate beta-hydroxylase;
  Uniprot ID:  Q12797;
  ENSP ID: ENSP00000437864
MAEDKETKHGGHKNGRKGGLSGTSFFTWFMVIALLGVWTSVAVVWFDLVDYEEVLGKLGIYDADGDGDFDVDDAKVLLGLKERSTSEPAVPPEEAEPHTEPEEQVPVEAEPQNIEDEAKEQIQSLLHEMVHAEHVEGEDLQQEDGPTGEPQQEDDEFLMATDVDDRFETLEPEVSHEETEHSYHVEETVSQDCNQDMEEMMSEQENPDSSEPVVEDERLHHDTDDVTYQVYEEQAVYEPLENEGIEITEVTAPPEDNPVEDSQVIVEEVSIFPVEEQQEVPPETNRKTDDPEQKAKVKKKKPKLLNKFDKTIKAELDAAEKLRKRGKIEEAVNAFKELVRKYPQSPRARYGKAQCEDDLAEKRRSNEVLRGAIETYQEVASLPDVPADLLKLSLKRRSDRQQFLGHMRGSLLTLQRLVQLFPNDTSLKNDLGVGYLLIGDNDNAKKVYEEVLSVTPNDGFAKVHYGFILKAQNKIAESIPYLKEGIESGDPGTDDGRFYFHLGDAMQRVGNKEAYKWYELGHKRGHFASVWQRSLYNVNGLKAQPWWTPKETGYTELVKSLERNWKLIRDEGLAVMDKAKGLFLPEDENLREKGDWSQFTLWQQGRRNENACKGAPKTCTLLEKFPETTGCRRGQIKYSIMHPGTHVWPHTGPTNCRLRMHLGLVIPKEGCKIRCANETKTWEEGKVLIFDDSFEHEVWQDASSFRLIFIVDVWHPELTPQQRRSLPAI

SEQ ID NO: 6723 - protein, 186 aa, Homo sapiens
  Payload ID: 1442;
  Gene Symbol: ASPH;
  Gene Name: aspartate beta-hydroxylase;
  ENSP ID: ENSP00000478706
  MOD_RES (1)..(1): Any amino acid
XFDVDDAKVLLGLKERSTSEPAVPPEEAEPHTEPEEQVPVEAEPQNIEDEAKEQIQSLLHEMVHAEHETEHSYHVEETVSQDCNQDMEEMMSEQENPDSSEPVVEDERLHHDTDDVTYQVYEEQAVYEPLENEGIEITEVTAPPEDNPVEDSQVIVEVKKKKPKLLNKFDKTIKAELDAAEKLRKR

SEQ ID NO: 6724 - protein, 44 aa, Homo sapiens
  Payload ID: 1442;
  Gene Symbol: ASPH;
  Gene Name: aspartate beta-hydroxylase;
  ENSP ID: ENSP00000479830
EDNPVEDSQVIVEEVSIFPVEEQQEVPPGYLMENMESELPWDES

SEQ ID NO: 6725 - protein, 195 aa, Homo sapiens
  Payload ID: 1442;
  Gene Symbol: ASPH;
  Gene Name: aspartate beta-hydroxylase;
  ENSP ID: ENSP00000479945
QSLLHEMVHAEHETEHSYHVEETVSQDCNQDMEEMMSEQENPDSSEPVVEDERLHHDTDDVTYQVYEEQAVYEPLENEGIEITEVTAPPEDNPVEDSQVIVEEVSIFPVEEQQEVPPVKKKKPKLLNKFDKTIKAELDAAEKLRKRGKIEEAVNAFKELVRKYPQSPRARYGKAQCEDDLAEKRRSNEVLRGAIE

SEQ ID NO: 6726 - protein, 134 aa, Homo sapiens
  Payload ID: 1442;
  Gene Symbol: ASPH;
  Gene Name: aspartate beta-hydroxylase;
  ENSP ID: ENSP00000483443
  MOD_RES (1)..(1): Any amino acid
XEDLQQEDGPTGEPQQEDDEFLMATDVDDRFETLEPEVSHEETEHSYHVEETVSQDCNQDMEEMMSEQENPDSSEPVVEDERLHHDTDDVTYQVYEEQEVTAPPEDNPVEDSQVIVEEVSIFPVEEQQEVPPDT

SEQ ID NO: 6727 - protein, 390 aa, Homo sapiens
  Payload ID: 1443;
  Gene Symbol: ASPHD1;
  Gene Name: aspartate beta-hydroxylase domain containing 1;
  Uniprot ID:  Q5U4P2;
  ENSP ID: ENSP00000311447
MKEGRGSFSVERGPRKERETAQSGMWKGNSPAGSQGAAMEGTGGELGGQGNWGPEDAPGLLARASLIMLPWPLPLASSALTLLFGALTSLFLWYCYRLGSQDMQALGAGSRAGGVRGGPVGCSEAGGPSPGGPGDPGEGPRTEGLVSRRLRAYARRYSWAGMGRVRRAAQGGPGPGRGPGVLGIQRPGLLFLPDLPSAPFVPRDAQRHDVELLESSFPAILRDFGAVSWDFSGTTPPPRGWSPPLAPGCYQLLLYQAGRCQPSNCRRCPGAYRALRGLRSFMSANTFGNAGFSVLLPGARLEGRCGPTNARVRCHLGLKIPPGCELVVGGEPQCWAEGHCLLVDDSFLHTVAHNGSPEDGPRVVFIVDLWHPNVAGAERQALDFVFAPDP

SEQ ID NO: 6728 - protein, 390 aa, Homo sapiens; identical to SEQ ID NO: 6727
  Payload ID: 1443;
  Gene Symbol: ASPHD1;
  Gene Name: aspartate beta-hydroxylase domain containing 1;
  Uniprot ID:  Q5U4P2;
  ENSP ID: ENSP00000388036

SEQ ID NO: 6729 - protein, 390 aa, Homo sapiens; identical to SEQ ID NO: 6727
  Payload ID: 1443;
  Gene Symbol: ASPHD1;
  Gene Name: aspartate beta-hydroxylase domain containing 1;
  Uniprot ID:  Q5U4P2;
  ENSP ID: ENSP00000456801

SEQ ID NO: 6730 - protein, 109 aa, Homo sapiens
  Payload ID: 1443;
  Gene Symbol: ASPHD1;
  Gene Name: aspartate beta-hydroxylase domain containing 1;
  ENSP ID: ENSP00000459527
MSANTFGNAGFSVLLPGARLEGRCGPTNARVRCHLGLKIPPGCELVVGGEPQCWAEGHCLLVDDSFLHTVAHNGSPEDGPRVVFIVDLWHPNVAGAERQALDFVFAPDP

SEQ ID NO: 6731 - protein, 106 aa, Homo sapiens
  Payload ID: 1443;
  Gene Symbol: ASPHD1;
  Gene Name: aspartate beta-hydroxylase domain containing 1;
  ENSP ID: ENSP00000460020
MSANTFGNAGFSVLLPGARLEGRCGPTNARVRCHLGLKIPPGCELVVGGEPQCWAEGHCLLVDDSFLHTVAHNGSPEDGPRVVFIVDLWHPNVAGAERQALDFVFA

SEQ ID NO: 6732 - protein, 369 aa, Homo sapiens
  Payload ID: 1444;
  Gene Symbol: ASPHD2;
  Gene Name: aspartate beta-hydroxylase domain containing 2;
  Uniprot ID:  Q6ICH7;
  ENSP ID: ENSP00000215906
MVWAPLGPPRTDCLTLLHTPSKDSPKMSLEWLVAWSWSLDGLRDCIATGIQSVRDCDTTAVITVACLLVLFVWYCYHVGREQPRPYVSVNSLMQAADANGLQNGYVYCQSPECVRCTHNEGLNQKLYHNLQEYAKRYSWSGMGRIHKGIREQGRYLNSRPSIQKPEVFFLPDLPTTPYFSRDAQKHDVEVLERNFQTILCEFETLYKAFSNCSLPQGWKMNSTPSGEWFTFYLVNQGVCVPRNCRKCPRTYRLLGSLRTCIGNNVFGNACISVLSPGTVITEHYGPTNIRIRCHLGLKTPNGCELVVGGEPQCWAEGRCLLFDDSFLHAAFHEGSAEDGPRVVFMVDLWHPNVAAAERQALDFIFAPGR

SEQ ID NO: 6733 - protein, 178 aa, Homo sapiens
  Payload ID: 1445;
  Gene Symbol: ASPDH;
  Gene Name: aspartate dehydrogenase domain containing;
  Uniprot ID:  A6ND91;
  ENSP ID: ENSP00000366114
MGDRVKGSKSRRPDLVVEVAHPKIIHESGAQILRHANLLSLRVTMATHPDGFRLEGPLAAAHSPGPCTVLYEGPVRGLCPFAPRNSNTMAAAALAAPSLGFDGVIGVLVADTSLTDMHVVDVELSGPRGPTGRSFAVHTRRENPAEPGAVTGSATVTAFWQSLLACCQLPSRPGIHLC

SEQ ID NO: 6734 - protein, 283 aa, Homo sapiens
  Payload ID: 1445;
  Gene Symbol: ASPDH;
  Gene Name: aspartate dehydrogenase domain containing;
  Uniprot ID:  A6ND91;
  ENSP ID: ENSP00000373860
MADRGPWRVGVVGYGRLGQSLVSRLLAQGPELGLELVFVWNRDPGRMAGSVPPSLQLQNLAALGERRPDLVVEVAHPKIIHESGAQILRHANLLVGSPSALSDQTTERQLLEASQHWDHAVFVARGALWGAEDIRRLDAAGGLRSLRVTMATHPDGFRLEGPLAAAHSPGPCTVLYEGPVRGLCPFAPRNSNTMAAAALAAPSLGFDGVIGVLVADTSLTDMHVVDVELSGPRGPTGRSFAVHTRRENPAEPGAVTGSATVTAFWQSLLACCQLPSRPGIHLC

SEQ ID NO: 6735 - protein, 51 aa, Homo sapiens
  Payload ID: 1445;
  Gene Symbol: ASPDH;
  Gene Name: aspartate dehydrogenase domain containing;
  ENSP ID: ENSP00000469754
MGDRVKGSKSRRPDLVVEVAHPKIIHESGAQILRHANLLVGSPSALSDQTT

SEQ ID NO: 6736 - protein, 134 aa, Homo sapiens
  Payload ID: 1445;
  Gene Symbol: ASPDH;
  Gene Name: aspartate dehydrogenase domain containing;
  ENSP ID: ENSP00000470360
MATHPDGFRLEGPLAAAHSPGPCTVLYEGPVRGLCPFAPRNSNTMAAAALAAPSLGFDGVIGVLVADTSLTDMHVVDVELSGPRGPTGRSFAVHTRRENPAEPGAVTGSATVTAFWQSLLACCQLPSRPGIHLC

SEQ ID NO: 6737 - protein, 229 aa, Homo sapiens
  Payload ID: 1446;
  Gene Symbol: DRICH1;
  Gene Name: aspartate-rich 1;
  Uniprot ID:  Q6PGQ1;
  ENSP ID: ENSP00000316137
MGNILTCCINSHCGWPRGKDAPCYESDTDIYETVAAATSESTTVEPGKLDVGATEGQDLQHISNQKMPTGPPEDRLSLKFLPSSEEDNDDAKILPSPVQGSSEDNLSLVCLPRSEDDDCDDDDDDDAQILPSRVQGGCYRFDSSSCSSEDNLSLVCLPRSEDDDCDDDDDDAQILPSPVQACSEDSLFLRCSLRHKDEEEEDDDDIHITARIESDLTLESLSDEEIHPG

SEQ ID NO: 6738 - protein, 229 aa, Homo sapiens; identical to SEQ ID NO: 6737
  Payload ID: 1446;
  Gene Symbol: DRICH1;
  Gene Name: aspartate-rich 1;
  Uniprot ID:  Q6PGQ1;
  ENSP ID: ENSP00000483208

SEQ ID NO: 6739 - protein, 343 aa, Homo sapiens
  Payload ID: 1447;
  Gene Symbol: ASPRV1;
  Gene Name: aspartic peptidase, retroviral-like 1;
  Uniprot ID:  Q53RT3;
  ENSP ID: ENSP00000315383
MGSPGASLGIKKALQSEQATALPASAPAVSQPTAPAPSCLPKAGQVIPTLLREAPFSSVIAPTLLCGFLFLAWVAAEVPEESSRMAGSGARSEEGRRQHAFVPEPFDGANVVPNLWLHSFEVINDLNHWDHITKLRFLKESLRGEALGVYNRLSPQDQGDYGTVKEALLKAFGVPGAAPSHLPKEIVFANSMGKGYYLKGKIGKVPVRFLVDSGAQVSVVHPNLWEEVTDGDLDTLQPFENVVKVANGAEMKILGVWDTAVSLGKLKLKAQFLVANASAEEAIIGTDVLQDHNAILDFEHRTCTLKGKKFRLLPVGGSLEDEFDLELIEEDPSSEEGRQELSH

SEQ ID NO: 6740 - protein, 313 aa, Homo sapiens
  Payload ID: 1448;
  Gene Symbol: ASPA;
  Gene Name: aspartoacylase;
  Uniprot ID:  P45381;
  ENSP ID: ENSP00000263080
MTSCHIAEEHIQKVAIFGGTHGNELTGVFLVKHWLENGAEIQRTGLEVKPFITNPRAVKKCTRYIDCDLNRIFDLENLGKKMSEDLPYEVRRAQEINHLFGPKDSEDSYDIIFDLHNTTSNMGCTLILEDSRNNFLIQMFHYIKTSLAPLPCYVYLIEHPSLKYATTRSIAKYPVGIEVGPQPQGVLRADILDQMRKMIKHALDFIHHFNEGKEFPPCAIEVYKIIEKVDYPRDENGEIAAIIHPNLQDQDWKPLHPGDPMFLTLDGKTIPLGGDCTVYPVFVNEAAYYEKKEAFAKTTKLTLNAKSIRCCLH

SEQ ID NO: 6741 - protein, 313 aa, Homo sapiens; identical to SEQ ID NO: 6740
  Payload ID: 1448;
  Gene Symbol: ASPA;
  Gene Name: aspartoacylase;
  Uniprot ID:  P45381;
  ENSP ID: ENSP00000409976

SEQ ID NO: 6742 - protein, 78 aa, Homo sapiens
  Payload ID: 1448;
  Gene Symbol: ASPA;
  Gene Name: aspartoacylase;
  ENSP ID: ENSP00000458324
MTSCHIAEEHIQKVAIFGGTHGNELTGVFLVKHWLENGAEIQRTGLEVKPFITNPRAVKKCTRYIDCDLNRIFDLENL

SEQ ID NO: 6743 - protein, 56 aa, Homo sapiens
  Payload ID: 1448;
  Gene Symbol: ASPA;
  Gene Name: aspartoacylase;
  ENSP ID: ENSP00000461358
MTSCHIAEEHIQKVAIFGGTHGNELTGVFLVKHWLENGAEIQRTGLEQKNVRRFAI

SEQ ID NO: 6744 - protein, 485 aa, Homo sapiens [sequence omitted]

SEQ ID NO: 6745 - protein, 270 aa, Homo sapiens
  Payload ID: 1449;
  Gene Symbol: DNPEP;
  Gene Name: aspartyl aminopeptidase;
  ENSP ID: ENSP00000317252
MSGHSPTRGAMQVAMNGKARKEAVQTAAKELLKFVNRSPSPFHAVAECRNRLLQAGFSELKETEKWNIKPESKYFMTRNSSTIIAFAVGGQYVPGNGFSLIGAHTDSPCLRVKRRSRRSQVGFQQVGVETYGGGIWSTWFDRDLTLAGRVIVKCPTSGRLEQQLVHVERPILRIPHLAIHLQRNINENFGPNTEMHLCALLAIPPQPTSPHRVPILATAIQEELEKGTPEPGPLNAVDERHHSVLMSLLCAHLGLSPKDIVEMELCLADT

SEQ ID NO: 6746 - protein, 47 aa, Homo sapiens
  Payload ID: 1449;
  Gene Symbol: DNPEP;
  Gene Name: aspartyl aminopeptidase;
  ENSP ID: ENSP00000363074
MSGHSPTRGAMQVAMNGKARKEAVQTAAKELLKFVNRSPSPFHGWLQ

SEQ ID NO: 6747 - protein, 36 aa, Homo sapiens
  Payload ID: 1449;
  Gene Symbol: DNPEP;
  Gene Name: aspartyl aminopeptidase;
  ENSP ID: ENSP00000363077
MSGHSPTRGAMQVSGSRRPHLNFDPRPGPAPSGAQA

SEQ ID NO: 6748 - protein, 410 aa, Homo sapiens
  Payload ID: 1449;
  Gene Symbol: DNPEP;
  Gene Name: aspartyl aminopeptidase;
  ENSP ID: ENSP00000363083
MTRNSSTIIAFAVGGQYVPGNGFSLIGAHTDSPCLRVKRRSRRSQVGFQQVGVETYGGGIWSTWFDRDLTLAGRVIVKCPTSGRLEQQLVHVERPILRIPHLAIHLQRNINENFGPNTEMHLVPILATAIQEELEKGTPEPGPLNAVDERHHSVLMSLLCAHLGLSPKDIVEMELCLADTQPAVLGGAYDEFIFAPRLDNLHSCFCALQALIDSCAGPGSLATEPHVRMVTLYDNEEVGSESAQGAQSLLTELVLRRISASCQHPTAFEEAIPKSFMISADMAHAVHPNYLDKHEENHRPLFHKGPVIKVNSKQRYASNAVSEALIREVANKVKVPLQDLMVRNDTPCGTTIGPILASRLGLRVLDLGSPQLAMHSIREMACTTGVLQTLTLFKGFFELFPSLSHNLLVD

SEQ ID NO: 6749 - protein, 273 aa, Homo sapiens
  Payload ID: 1449;
  Gene Symbol: DNPEP;
  Gene Name: aspartyl aminopeptidase;
  ENSP ID: ENSP00000400944
MNGKARKEAVQTAAKELLKFVNRSPSPFHAVAECRNRLLQAGFSELKETEKWNIKPESKYFMTRNSSTIIAFAVGGQYVPGNGFSLIGAHTDSPCLRVKRRSRRSQVGFQQVGVETYGGGIWSTWFDRDLTLAGRVIVKCPTSGRLEQQLVHVERPILRIPHLAIHLQRNINENFGPNTEMHLVPILATAIQEELEKGTPEPGPLNAVDERHHSVLMSLLCAHLGLSPKDIVEMELCLADTQPAVLGGAYDEFIFAPRLDNLHSCFCALQALI

SEQ ID NO: 6750 - protein, 331 aa, Homo sapiens
  Payload ID: 1449;
  Gene Symbol: DNPEP;
  Gene Name: aspartyl aminopeptidase;
  ENSP ID: ENSP00000410684
MARSLSIMFVPNSWLNGYHKVAMNGKARKEAVQTAAKELLKFVNRSPSPFHAVAECRNRLLQAGFSELKETEKWNIKPESKYFMTRNSSTIIAFAVGGQYVPGNGFSLIGAHTDSPCLRVKRRSRRSQVGFQQVGVETYGGGIWSTWFDRDLTLAGRVIVKCPTSGRLEQQLVHVERPILRIPHLAIHLQRNINENFGPNTEMHLVPILATAIQEELEKGTPEPGPLNAVVLGGAYDEFIFAPRLDNLHSCFCALQALIDSCAGPGSLATEPHVRMVTLYDNEEVGSESAQGAQSLLTELVLRRISASCQHPTAFEEAIPKSFMISADMAH

SEQ ID NO: 6751 - protein, 137 aa, Homo sapiens
  Payload ID: 1449;
  Gene Symbol: DNPEP;
  Gene Name: aspartyl aminopeptidase;
  ENSP ID: ENSP00000412003
MTRNSSTIIAFAVGGQYVPGNGFSLIGAHTDSPCLRVKRRSRRSQVGFQQVGVETYGGGIWSTWFDRDLTLAGRVIVKCPTSGRLEQQLVHVERPILRIPHLAIHLQRNINENFGPNTEMHLVPILATAIQEELEKG

SEQ ID NO: 6752 - protein, 117 aa, Homo sapiens
  Payload ID: 1449;
  Gene Symbol: DNPEP;
  Gene Name: aspartyl aminopeptidase;
  ENSP ID: ENSP00000414739
MTRNSSTIIAFAVGGQYVPGNGFSLIGAHTDSPCLRVKRRSRRSQVGFQQVGVETYGGGIWSTWFDRDLTLAGRVIVKCPTSGRLEQQLVHVERPILRIPHLAIHLQRNINENFGPN

SEQ ID NO: 6753 - protein, 45 aa, Homo sapiens
  Payload ID: 1449;
  Gene Symbol: DNPEP;
  Gene Name: aspartyl aminopeptidase;
  ENSP ID: ENSP00000428531
MARSLSIMFVPNSWLNGYHKHLLKVEIPGPQPKSSKSGVSGGHER

SEQ ID NO: 6754 - protein, 36 aa, Homo sapiens; identical to SEQ ID NO: 6747
  Payload ID: 1449;
  Gene Symbol: DNPEP;
  Gene Name: aspartyl aminopeptidase;
  ENSP ID: ENSP00000429468

SEQ ID NO: 6755 - protein, 224 aa, Homo sapiens
  Payload ID: 1449;
  Gene Symbol: DNPEP;
  Gene Name: aspartyl aminopeptidase;
  ENSP ID: ENSP00000429960
MSGHSPTRGAMQVAMNGKARKEAVQTAAKELLKFVNRSPSPFHAVAECRNRLLQAGFSELKETEKWNIKPESKYFMTRNSSTIIAFAVGGQYVPGNGFSLIGAHTDSPCLRVKRRSRRSQVGFQQVGVETYGGGIWSTWFDRDLTLAGRVIVKCPTSGRLEQQLVHVERPILRIPHLAIHLQRNINENFGPNTEMHLSWVVPMMSSSLLLGWTICTAASVPCRP

SEQ ID NO: 6756 - protein, 89 aa, Homo sapiens
  Payload ID: 1449;
  Gene Symbol: DNPEP;
  Gene Name: aspartyl aminopeptidase;
  ENSP ID: ENSP00000430630
MNGKARKEAVQTAAKELLKFVNRSPSPFHAVAECRNRLLQAGFSELKETEKWNIKPESKYFMTRNSSTIIAFAVGGQYVPGNGFSLIGA

SEQ ID NO: 6757 - protein, 493 aa, Homo sapiens
  Payload ID: 1449;
  Gene Symbol: DNPEP;
  Gene Name: aspartyl aminopeptidase;
  ENSP ID: ENSP00000431076
MARSLSIMFVPNSWLNGYHKVAMNGKARKEAVQTAAKELLKFVNRSPSPFHAVAECRNRLLQAGFSELKETEKWNIKPESKYFMTRNSSTIIAFAVGGQYVPGNGFSLIGAHTDSPCLRVKRRSRRSQVGFQQVGVETYGGGIWSTWFDRDLTLAGRVIVKCPTSGRLEQQLVHVERPILRIPHLAIHLQRNINENFGPNTEMHLVPILATAIQEELEKGTPEPGPLNAVDERHHSVLMSLLCAHLGLSPKDIVEMELCLADTQPAVLGGAYDEFIFAPRLDNLHSCFCALQALIDSCAGPGSLATEPHVRMVTLYDNEEVGSESAQGAQSLLTELVLRRISASCQHPTAFEEAIPKSFMISADMAHAVHPNYLDKHEENHRPLFHKGPVIKVNSKQRYASNAVSEALIREVANKVKVPLQDLMVRNDTPCGTTIGPILASRLGLRVLDLGSPQLAMHSIREMACTTGVLQTLTLFKGFFELFPSLSHNLLVD

SEQ ID NO: 6758 - protein, 346 aa, Homo sapiens
  Payload ID: 1450;
  Gene Symbol: AGA;
  Gene Name: aspartylglucosaminidase;
  Uniprot ID:  P20933;
  ENSP ID: ENSP00000264595
MARKSNLPVLLVPFLLCQALVRCSSPLPLVVNTWPFKNATEAAWRALASGGSALDAVESGCAMCEREQCDGSVGFGGSPDELGETTLDAMIMDGTTMDVGAVGDLRRIKNAIGVARKVLEHTTHTLLVGESATTFAQSMGFINEDLSTTASQALHSDWLARNCQPNYWRNVIPDPSKYCGPYKPPGILKQDIPIHKETEDDRGHDTIGMVVIHKTGHIAAGTSTNGIKFKIHGRVGDSPIPGAGAYADDTAGAAAATGNGDILMRFLPSYQAVEYMRRGEDPTIACQKVISRIQKHFPEFFGAVICANVTGSYGAACNKLSTFTQFSFMVYNSEKNQPTEEKVDCI

SEQ ID NO: 6759 - protein, 138 aa, Homo sapiens
  Payload ID: 1450;
  Gene Symbol: AGA;
  Gene Name: aspartylglucosaminidase;
  ENSP ID: ENSP00000421471
  MOD_RES (1)..(1): Any amino acid
XGDLRRIKNAIGVARKVLEHTTHTLLVGESATTFAQSMGFINEDLSTTASQALHSDWLARNCQPNYWRNVIPDPSKYCGPYKPPGILKQDIPIHKETEDDRGHDTIGMVVIHKTGHIAAGTSTNGDSPIPGAGAYADD

SEQ ID NO: 6760 - protein, 154 aa, Homo sapiens
  Payload ID: 1450;
  Gene Symbol: AGA;
  Gene Name: aspartylglucosaminidase;
  ENSP ID: ENSP00000423798
RKVLEHTTHTLLVGESATTFAQSMGFINEDLSTTASQALHSDWLARNCQPNYWRNVIPDPSKYCGPYKPPGILKQDIPIHKETEDDRGHDTIGDSPIPGAGAYADDTAGAAAATGNGDILMRFLPSYQAVEYMRRGEDPTIACQKVISRIQKHF

SEQ ID NO: 6761 - protein, 501 aa, Homo sapiens
  Payload ID: 1451;
  Gene Symbol: DARS;
  Gene Name: aspartyl-tRNA synthetase;
  Uniprot ID:  P14868;
  ENSP ID: ENSP00000264161
MPSASASRKSQEKPREIMDAAEDYAKERYGISSMIQSQEKPDRVLVRVRDLTIQKADEVVWVRARVHTSRAKGKQCFLVLRQQQFNVQALVAVGDHASKQMVKFAANINKESIVDVEGVVRKVNQKIGSCTQQDVELHVQKIYVISLAEPRLPLQLDDAVRPEAEGEEEGRATVNQDTRLDNRVIDLRTSTSQAVFRLQSGICHLFRETLINKGFVEIQTPKIISAASEGGANVFTVSYFKNNAYLAQSPQLYKQMCICADFEKVFSIGPVFRAEDSNTHRHLTEFVGLDIEMAFNYHYHEVMEEIADTMVQIFKGLQERFQTEIQTVNKQFPCEPFKFLEPTLRLEYCEALAMLREAGVEMGDEDDLSTPNEKLLGHLVKEKYDTDFYILDKYPLAVRPFYTMPDPRNPKQSNSYDMFMRGEEILSGAQRIHDPQLLTERALHHGIDLEKIKAYIDSFRFGAPPHAGGGIGLERVTMLFLGLHNVRQTSMFPRDPKRLTP

SEQ ID NO: 6762 - protein, 188 aa, Homo sapiens
  Payload ID: 1451;
  Gene Symbol: DARS;
  Gene Name: aspartyl-tRNA synthetase;
  ENSP ID: ENSP00000387508
VGLDIEMAFNYHYHEVMEEIADTMVQIFKGLQERFQTEIQTVNKQFPCEPFKFLEPTLRLEYCEALAMLREAGVEMGDEDDLSTPNEKLLGHLVKEKKQSNSYDMFMRGEEILSGAQRIHDPQLLTERALHHGIDLEKIKAYIDSFRFGAPPHAGGGIGLERVTMLFLGLHNVRQTSMFPRDPKRLTP

SEQ ID NO: 6763 - protein, 135 aa, Homo sapiens
  Payload ID: 1451;
  Gene Symbol: DARS;
  Gene Name: aspartyl-tRNA synthetase;
  ENSP ID: ENSP00000388801
MIQSQEKPDRVLVRVRDLTIQKADEVVWVRARVHTSRAKGKQCFLVLRQQQFNVQALVAVGDHASKQMVKFAANINKESIVDVEGVVRKVNQKIGSCTQQDVELHVQKIYVISLAEPRLPLQLDDAVRPEAEGEE

SEQ ID NO: 6764 - protein, 182 aa, Homo sapiens
  Payload ID: 1451;
  Gene Symbol: DARS;
  Gene Name: aspartyl-tRNA synthetase;
  ENSP ID: ENSP00000389867
MIQSQEKPDRVLVRVRDLTIQKADEVVWVRARVHTSRAKGKQCFLVLRQQQFNVQALVAVGDHASKQMVKFAANINKESIVDVEGVVRKVNQKIGSCTQQDVELHVQKIYVISLAEPRLPLQLDDAVRPEAEGEEEGRATVNQDTRLDNRVIDLRTSTSQAVFRLQSGICHLFRETLINKGF

SEQ ID NO: 6765 - protein, 175 aa, Homo sapiens
  Payload ID: 1451;
  Gene Symbol: DARS;
  Gene Name: aspartyl-tRNA synthetase;
  ENSP ID: ENSP00000397616
MIQSQEKPDRVLVRVRDLTIQKADEVVWVRARVHTSRAKGKQCFLVLRQQQFNVQALVAVGDHASKQMVKFAANINKESIVDVEGVVRKVNQKIGSCTQQDVELHVQKIYVISLAEPRLPLQLDDAVRPEAEGEEEGRATVNQDTRLDNRVIDLRTSTSQAVFRLQSGICHLFRE

SEQ ID NO: 6766 - protein, 179 aa, Homo sapiens
  Payload ID: 1451;
  Gene Symbol: DARS;
  Gene Name: aspartyl-tRNA synthetase;
  ENSP ID: ENSP00000404445
  MOD_RES (1)..(1): Any amino acid
XGGDWEGGRSPFGLPYGSLRGRVVSTAQFRVPMPSASASRKSQEKPREIMDAAEDYAKERYGISSMIQSQEKPDRVLVRVRDLTIQKADEVVWVRARVHTSRAKGKQCFLVLRQQQFNVQALVAVGDHASKQMVKFAANINKESIVDVEGVVRKVNQKIGSCTQQDVELHVQKVSFFKI

SEQ ID NO: 6767 - protein, 645 aa, Homo sapiens
  Payload ID: 1452;
  Gene Symbol: DARS2;
  Gene Name: aspartyl-tRNA synthetase 2, mitochondrial;
  Uniprot ID:  Q6PI48;
  ENSP ID: ENSP00000355086
MYFPSWLSQLYRGLSRPIRRTTQPIWGSLYRSLLQSSQRRIPEFSSFVVRTNTCGELRSSHLGQEVTLCGWIQYRRQNTFLVLRDFDGLVQVIIPQDESAASVKKILCEAPVESVVQVSGTVISRPAGQENPKMPTGEIEIKVKTAELLNACKKLPFEIKNFVKKTEALRLQYRYLDLRSFQMQYNLRLRSQMVMKMREYLCNLHGFVDIETPTLFKRTPGGAKEFLVPSREPGKFYSLPQSPQQFKQLLMVGGLDRYFQVARCYRDEGSRPDRQPEFTQIDIEMSFVDQTGIQSLIEGLLQYSWPNDKDPVVVPFPTMTFAEVLATYGTDKPDTRFGMKIIDISDVFRNTEIGFLQDALSKPHGTVKAICIPEGAKYLKRKDIESIRNFAADHFNQEILPVFLNANRNWNSPVANFIMESQRLELIRLMETQEEDVVLLTAGEHNKACSLLGKLRLECADLLETRGVVLRDPTLFSFLWVVDFPLFLPKEENPRELESAHHPFTAPHPSDIHLLYTEPKKARSQHYDLVLNGNEIGGGSIRIHNAELQRYILATLLKEDVKMLSHLLQALDYGAPPHGGIALGLDRLICLVTGSPSIRDVIAFPKSFRGHDLMSNTPDSVPPEELKPYHIRVSKPTDSKAERAH

SEQ ID NO: 6768 - protein, 243 aa, Homo sapiens
  Payload ID: 1453;
  Gene Symbol: ASPN;
  Gene Name: asporin;
  ENSP ID: ENSP00000364693
MKEYVLLLFLALCSAKPFFSPSHIALKNMMLKDMEDTDDDDDDDDDDDDDDEDNSLFPTREPRSHFFPFDLFPMCPFGCQCYSRVVHCSDLGLTSVPTNIPFDTRMLDLQNNKIKEIKENDFKGLTSLYGLILNNNKLTKIHPKAFLTTKKLRRLYLSHNQLSEIPLNLPKSLAELRIHENKVKKIQKDTFKGMNALHVLEMSANPLDNNGIEPGAFEGVTVFHIRIAEAKLTSVPKDNLPSF

SEQ ID NO: 6769 - protein, 380 aa, Homo sapiens
  Payload ID: 1453;
  Gene Symbol: ASPN;
  Gene Name: asporin;
  Uniprot ID:  Q9BXN1;
  ENSP ID: ENSP00000364694
MKEYVLLLFLALCSAKPFFSPSHIALKNMMLKDMEDTDDDDDDDDDDDDDDEDNSLFPTREPRSHFFPFDLFPMCPFGCQCYSRVVHCSDLGLTSVPTNIPFDTRMLDLQNNKIKEIKENDFKGLTSLYGLILNNNKLTKIHPKAFLTTKKLRRLYLSHNQLSEIPLNLPKSLAELRIHENKVKKIQKDTFKGMNALHVLEMSANPLDNNGIEPGAFEGVTVFHIRIAEAKLTSVPKGLPPTLLELHLDYNKISTVELEDFKRYKELQRLGLGNNKITDIENGSLANIPRVREIHLENNKLKKIPSGLPELKYLQIIFLHSNSIARVGVNDFCPTVPKMKKSLYSAISLFNNPVKYWEMQPATFRCVLSRMSVQLGNFGM

SEQ ID NO: 6770 - protein, 431 aa, Homo sapiens
  Payload ID: 1454;
  Gene Symbol: ASTL;
  Gene Name: astacin-like metallo-endopeptidase (M12 family);
  Uniprot ID:  Q6HA08;
  ENSP ID: ENSP00000343674
MEGVGGLWPWVLGLLSLPGVILGAPLASSCAGACGTSFPDGLTPEGTQASGDKDIPAINQGLILEETPESSFLIEGDIIRPSPFRLLSATSNKWPMGGSGVVEVPFLLSSKYDEPSRQVILEALAEFERSTCIRFVTYQDQRDFISIIPMYGCFSSVGRSGGMQVVSLAPTCLQKGRGIVLHELMHVLGFWHEHTRADRDRYIRVNWNEILPGFEINFIKSQSSNMLTPYDYSSVMHYGRLAFSRRGLPTITPLWAPSVHIGQRWNLSASDITRVLKLYGCSPSGPRPRGRGSHAHSTGRSPAPASLSLQRLLEALSAESRSPDPSGSSAGGQPVPAGPGESPHGWESPALKKLSAEASARQPQTLASSPRSRPGAGAPGVAQEQSWLAGVSTKPTVPSSEAGIQPVPVQGSPALPGGCVPRNHFKGMSED

SEQ ID NO: 6771 - protein, 679 aa, Homo sapiens
  Payload ID: 1455;
  Gene Symbol: ASTE1;
  Gene Name: asteroid homolog 1 (Drosophila);
  Uniprot ID:  Q2TB18;
  ENSP ID: ENSP00000264992
MGIRGLMSFVEDHSNEFFTDLKLRDTKIVIDGYALFHRLCFSSNLDLRYGGDYDSFADVVQKFFESLFACNICPYVVLDGGCDISDKKLTTLKDRAREKIQMAHSLSVGGSGYVCPLLIREVFIQVLIKLRVCFVQCFSEADRDIMTLANHWNCPVLSSDSDFCIFDLKTGFCPLNSFQWRNMNTIKGTQNYIPAKCFSLDAFCHHFSNMNKALLPLFAVLCGNDHVNLPIMETFLSKARLPLGATSSKGRRHHRILGLLNWLSHFANPTEALDNVLKYLPKKDRENVKELLCCSMEEYQQSQVKLQDFFQCGTYVCPDALNLGLPEWVLVALAKGQLSPFISDALVLRRTILPTQVENMQQPNAHRISQPIRQIIYGLLLNASPHLDKTSWNALPPQPLAFSEVERINKNIRTSIIDAVELAKDHSDLSRLTELSLRRRQMLLLETLKVKQTILEPIPTSLKLPIAVSCYWLQHTETKAKLHHLQSLLLTMLVGPLIAIINSPGKEELQEDGAKMLYAEFQRVKAQTRLGTRLDLDTAHIFCQWQSCLQMGMYLNQLLSTPLPEPDLTRLYSGSLVHGLCQQLLASTSVESLLSICPEAKQLYEYLFNATRSYAPAEIFLPKGRSNSKKKRQKKQNTSCSKNRGRTTAHTKCWYEGNNRFGLLMVENLEEHSEASNIE

SEQ ID NO: 6772 - protein, 520 aa, Homo sapiens
  Payload ID: 1455;
  Gene Symbol: ASTE1;
  Gene Name: asteroid homolog 1 (Drosophila);
  Uniprot ID:  Q2TB18;
  ENSP ID: ENSP00000421019
MGIRGLMSFVEDHSNEFFTDLKLRDTKIVIDGYALFHRLCFSSNLDLRYGGDYDSFADVVQKFFESLFACNICPYVVLDGGCDISDKKLTTLKDRAREKIQMAHSLSVGGSGYVCPLLIREVFIQVLIKLRVCFVQCFSEADRDIMTLANHWNCPVLSSDSDFCIFDLKTGFCPLNSFQWRNMNTIKGTQNYIPAKCFSLDAFCHHFSNMNKALLPLFAVLCGNDHVNLPIMETFLSKARLPLGATSSKGRRHHRILGLLNWLSHFANPTEALDNVLKYLPKKDRENVKELLCCSMEEYQQSQVKLQDFFQCGTYVCPDALNLGLPEWVLVALAKGQLSPFISDALVLRRTILPTQVENMQQPNAHRISQPIRQIIYGLLLNASPHLDKTSWNALPPQPLAFSEVERINKNIRTSIIDAVELAKDHSDLSRLTELSLRRRQMLLLETLKVKQTILEPIPTSLKLPIAVSCYWLQHTETKAKLHHLQSLLLTMLVGPLIAIINSPGNVDPVPRQAQCLAPR

SEQ ID NO: 6773 - protein, 48 aa, Homo sapiens
  Payload ID: 1455;
  Gene Symbol: ASTE1;
  Gene Name: asteroid homolog 1 (Drosophila);
  ENSP ID: ENSP00000422851
MGIRGLMSFVEDHSNEFFTDLKLRDTKIVIDGYALFHRLCFSSNLDLR

SEQ ID NO: 6774 - protein, 97 aa, Homo sapiens
  Payload ID: 1455;
  Gene Symbol: ASTE1;
  Gene Name: asteroid homolog 1 (Drosophila);
  ENSP ID: ENSP00000423347
  MOD_RES (1)..(1): Any amino acid
XNVKELLCCSMEEYQQSQMLLLETLKVKQTILEPIPTSLKLPIAVSCYWLQHTETKAKLHHLQSLLLTMLVGPLIAIINSPGKEELQEDGAKMLYAE

SEQ ID NO: 6775 - protein, 49 aa, Homo sapiens
  Payload ID: 1455;
  Gene Symbol: ASTE1;
  Gene Name: asteroid homolog 1 (Drosophila);
  ENSP ID: ENSP00000425683
MGIRGLMSFVEDHSNEFFTDLKLRDTKIVIDGYALFHRLCFSSNLDLRY

SEQ ID NO: 6776 - protein, 72 aa, Homo sapiens
  Payload ID: 1455;
  Gene Symbol: ASTE1;
  Gene Name: asteroid homolog 1 (Drosophila);
  ENSP ID: ENSP00000426363
MGIRGLMSFVEDHSNEFFTDLKLRDTKIVIDGYALFHRLCFSSNLDLRWKTCSNQMPTEYLSPSGKSSMGFF

SEQ ID NO: 6777 - protein, 704 aa, Homo sapiens
  Payload ID: 1455;
  Gene Symbol: ASTE1;
  Gene Name: asteroid homolog 1 (Drosophila);
  ENSP ID: ENSP00000426421
MGIRGLMSFVEDHSNEFFTDLKLRDTKIVIDGYALFHRLCFSSNLDLRYGGDYDSFADVVQKFFESLFACNICPYVVLDGGCDISDKKLTTLKDRAREKIQMAHSLSVGGSGYVCPLLIREVFIQVLIKLRVCFVQCFSEADRDIMTLANHWNCPVLSSDSDFCIFDLKTGFCPLNSFQWRNMNTIKGTQNYIPAKCFSLDAFCHHFSNMNKALLPLFAVLCGNDHVNLPIMETFLSKARLPLGATSSKGRRHHRILGLLNWLSHFANPTEALDNVLKYLPKKDRENVKELLCCSMEEYQQSQVKLQDFFQCGTYVCPDALNLGLPEWVLVALAKGQLSPFISDALVLRRTILPTQVENMQQPNAHRISQPIRQIIYGLLLNASPHLDKTSWNALPPQPLAFSEVERINKNIRTSIIDAVELAKDHSDLSRLTELSLRRRQMLLLETLKVKQTILEPIPTSLKLPIAVSCYWLQHTETKAKLHHLQSLLLTMLVGPLIAIINSPGKEELQEDGAKMLYAEFQRVKAQTRLGTRLDLDTAHIFCQWQSCLQMGMYLNQLLSTPLPEPDLTRPSAFNTLNEDIWTHTKYGGTLHVSRLYSGSLVHGLCQQLLASTSVESLLSICPEAKQLYEYLFNATRSYAPAEIFLPKGRSNSKKKRQKKQNTSCSKNRGRTTAHTKCWYEGNNRFGLLMVENLEEHSEASNIE

SEQ ID NO: 6778 - protein, 7 aa, Homo sapiens
  Payload ID: 1455;
  Gene Symbol: ASTE1;
  Gene Name: asteroid homolog 1 (Drosophila);
  ENSP ID: ENSP00000427303
MGIRGLM

SEQ ID NO: 6779 - protein, 1294 aa, Homo sapiens
  Payload ID: 1456;
  Gene Symbol: ASTN1;
  Gene Name: astrotactin 1;
  Uniprot ID:  O14525;
  ENSP ID: ENSP00000354536
MALAGLCALLACCWGPAAVLATAAGDVDPSKELECKLKSITVSALPFLRENDLSIMHSPSASEPKLLFSVRNDFPGEMVVVDDLENTELPYFVLEISGNTEDIPLVRWRQQWLENGTLLFHIHHQDGAPSLPGQDPTEEPQHESAEEELRILHISVMGGMIALLLSILCLVMILYTRRRWCKRRRVPQPQKSASAEAANEIHYIPSVLIGGHGRESLRNARVQGHNSSGTLSIRETPILDGYEYDITDLRHHLQRECMNGGEDFASQVTRTLDSLQGCNEKSGMDLTPGSDNAKLSLMNKYKDNIIATSPVDSNHQQATLLSHTSSSQRKRINNKARAGSAFLNPEGDSGTEAENDPQLTFYTDPSRSRRRSRVGSPRSPVNKTTLTLISITSCVIGLVCSSHVNCPLVVKITLHVPEHLIADGSRFILLEGSQLDASDWLNPAQVVLFSQQNSSGPWAMDLCARRLLDPCEHQCDPETGECLCYEGYMKDPVHKHLCIRNEWGTNQGPWPYTIFQRGFDLVLGEQPSDKIFRFTYTLGEGMWLPLSKSFVIPPAELAINPSAKCKTDMTVMEDAVEVREELMTSSSFDSLEVLLDSFGPVRDCSKDNGGCSKNFRCISDRKLDSTGCVCPSGLSPMKDSSGCYDRHIGVDCSDGFNGGCEQLCLQQMAPFPDDPTLYNILMFCGCIEDYKLGVDGRSCQLITETCPEGSDCGESRELPMNQTLFGEMFFGYNNHSKEVAAGQVLKGTFRQNNFARGLDQQLPDGLVVATVPLENQCLEEISEPTPDPDFLTGMVNFSEVSGYPVLQHWKVRSVMYHIKLNQVAISQALSNALHSLDGATSRADFVALLDQFGNHYIQEAIYGFEESCSIWYPNKQVQRRLWLEYEDISKGNSPSDESEERERDPKVLTFPEYITSLSDSGTKHMAAGVRMECHSKGRCPSSCPLCHVTSSPDTPAEPVLLEVTKAAPIYELVTNNQTQRLLQEATMSSLWCSGTGDVIEDWCRCDSTAFGADGLPTCAPLPQPVLRLSTVHEPSSTLVVLEWEHSEPPIGVQIVDYLLRQEKVTDRMDHSKVETETVLSFVDDIISGAKSPCAMPSQVPDKQLTTISLIIRCLEPDTIYMFTLWGVDNTGRRSRPSDVIVKTPCPVVDDVKAQEIADKIYNLFNGYTSGKEQQTAYNTLLDLGSPTLHRVLYHYNQHYESFGEFTWRCEDELGPRKAGLILSQLGDLSSWCNGLLQEPKISLRRSSLKYLGCRYSEIKPYGLDWAELSRDLRKTCEEQTLSIPYNDYGDSKEI

SEQ ID NO: 6780 - protein, 1228 aa, Homo sapiens
  Payload ID: 1456;
  Gene Symbol: ASTN1;
  Gene Name: astrotactin 1;
  ENSP ID: ENSP00000356629
MALAGLCALLACCWGPAAVLATAAGDVDPSKELECKLKSITVSALPFLRENDLSIMHSPSASEPKLLFSVRNDFPGEMVVVDDLENTELPYFVLEISGNTEDIPLVRWRQQWLENGTLLFHIHHQDGAPSLPGQDPTEEPQHESAEEELRILHISVMGGMIALLLSILCLVMILYTRRRWCKRRRVPQPQKSASAEAANEIHYIPSVLIGGHGRESLRNARVQGHNSSGTLSIRETPILDGYEYDITDLRHHLQRECMNGGEDFASQVTRTLDSLQGCNEKSGMDLTPGSDNAKLSLMNKYKDNIIATSPVDSNHQQATLLSHTSSSQRKRINNKARAGSAFLNPEGDSGTEAENDPQLTFYTDPSRSRRRSRVGSPRSPVNKTTLTLISITSCVIGLVCSSHVNCPLVVKITLHVPEHLIADGSRFILLEGSQLDASDWLNPAQVVLFSQQNSSGPWAMDLCARRLLDPCEHQCDPETGECLCYEGYMKDPVHKHLCIRNEWGTNQGPWPYTIFQRGFDLVLGEQPSDKIFRFTYTLGEGMWLPLSKSFVIPPAELAINPSAKCKTDMTVMEDAVEVREELMTSSSFDSLEVLLDSFGPVRDCSKDNGGCSKNFRCISDRKLDSTGCVCPSGLSPMKDSSGCYDRHIGVDCSDGFNGGCEQLCLQQMAPFPDDPTLYNILMFCGCIEDYKLGVDGRSCQLITETCPEGSDCGESRELPMNQTLFGEMFFGYNNHSKEVAAGQVLKGTFRQNNFARGLDQQLPDGLVVATVPLENQCLEEISEPTPDPDFLTGMVNFSEVSGYPVLQHWKVRSVMYHIKLNQVAISQALSNALHSLDGATSRADFVALLDQFGNHYIQEAIYGFEESCSIWYPNKQVQRRLWLEYEDISKGNSPSDESEERERDPKVLTFPEYITSLSDSGTKHMAAGVRMECHSKGRCPSSCPLCHVTSSPDTPAEPVLLEVTKAAPIYELVTNNQTQRLLQEATMSSLWCSGTGDVIEDWCRCDSTAFGADGLPTCAPLPQPVLRLSTVHEPSSTLVVLEWEHSEPPIGVQIVDYLLRQEKVTDRMDHSKVETETVLSFVDDIISGAKSPCAMPSQVPDKQLTTISLIIRCLEPDTIYMFTLWGVDNTGRRSRPSDVIVKTPCPVVDDVKAQEIADKIYNLFNGYTSGKEQQTAYNTLLDLGSPTLHRVLYHYNQHYESFGEFTWRCEDELGPRLPACWDSQRSCR

SEQ ID NO: 6781 - protein, 1216 aa, Homo sapiens
  Payload ID: 1456;
  Gene Symbol: ASTN1;
  Gene Name: astrotactin 1;
  Uniprot ID:  O14525;
  ENSP ID: ENSP00000395041
MALAGLCALLACCWGPAAVLATAAGDVDPSKELECKLKSITVSALPFLRENDLSIMHSPSASEPKLLFSVRNDFPGEMVVVDDLENTELPYFVLEISGNTEDIPLVRWRQQWLENGTLLFHIHHQDGAPSLPGQDPTEEPQHESAEEELRILHISVMGGMIALLLSILCLVMILYTRRRWCKRRRVPQPQKSASAEAANEIHYIPSVLIGGHGRESLRNARVQGHNSSGTLSIRETPILDGYEYDITDLRHHLQRECMNGGEDFASQVTRTLDSLQGCNEKSGMDLTPGSDNAKLSLMNKYKDNIIATSPVDSNHQQATLLSHTSSSQRKRINNKARAGSAFLNPEGDSGTEAENDPQLTFYTDPSRSRRRSRVGSPRSPVNKTTLTLISITSCVIGLVCSSHVNCPLVVKITLHVPEHLIADGSRFILLEGSQLDASDWLNPAQVVLFSQQNSSGPWAMDLCARRLLDPCEHQCDPETGECLCYEGYMKDPVHKHLCIRNEWGTNQGPWPYTIFQRGFDLVLGEQPSDKIFRFTYTLGEGMWLPLSKSFVIPPAELAINPSAKCKTDMTVMEDAVEVREELMTSSSFDSLEVLLDSFGPVRDCSKDNGGCSKNFRCISDRKLDSTGCVCPSGLSPMKDSSGCYDRHIGVDCSDGFNGGCEQLCLQQMAPFPDDPTLYNILMFCGCIEDYKLGVDGRSCQLITETCPEGSDCGESRELPMNQTLFGEMFFGYNNHSKEVAAGQVLKGTFRQNNFARGLDQQLPDGLVVATVPLENQCLEEISEPTPDPDFLTGMVNFSEVSGYPVLQHWKVRSVMYHIKLNQVAISQALSNALHSLDGATSRADFVALLDQFGNHYIQEAIYGFEESCSIWYPNKQVQRRLWLEYEDISKGNSPSDESEERERDPKVLTFPEYITSLSDSGTKHMAAGVRMECHSKGRCPSSCPLCHVTSSPDTPAEPVLLEVTKAAPIYELVTNNQTQRLLQEATMSSLWCSGTGDVIEDWCRCDSTAFGADGLPTCAPLPQPVLRLSTVHEPSSTLVVLEWEHSEPPIGVQIVDYLLRQEKVTDRMDHSKVETETVLSFVDDIISGAKSPCAMPSQVPDKQLTTISLIIRCLEPDTIYMFTLWGVDNTGRRSRPSDVIVKTPCPVVDDVKAQEIADKIYNLFNGYTSGKEQQTAYNTLLDLGSPTLHRVLYHYNQHYESFGEFTWRCEDELGPR

SEQ ID NO: 6782 - protein, 440 aa, Homo sapiens
  Payload ID: 1457;
  Gene Symbol: ASTN2;
  Gene Name: astrotactin 2;
  Uniprot ID:  O75129;
  ENSP ID: ENSP00000288520
MNTLLCKGMFCLLSWEADSRGRLGEYTLQPLSLQTEETTELGSKKELKSMPFITYLSGLLTAQMLSDDQLISGVEIRCEEKGRCPSTCHLCRRPGKEQLSPTPVLLEINRVVPLYTLIQDNGTKEAFKSALMSSYWCSGKGDVIDDWCRCDLSAFDANGLPNCSPLLQPVLRLSPTVEPSSTVVSLEWVDVQPAIGTKVSDYILQHKKVDEYTDTDLYTGEFLSFADDLLSGLGTSCVAAGRSHGEVPEVSIYSVIFKCLEPDGLYKFTLYAVDTRGRHSELSTVTLRTACPLVDDNKAEEIADKIYNLYNGYTSGKEQQMAYNTLMEVSASMLFRVQHHYNSHYEKFGDFVWRSEDELGPRKAHLILRRLERVSSHCSSLLRSAYIQSRVETVPYLFCRSEEVRPAGMVWYSILKDTKITCEEKMVSMARNTYGESKGR

SEQ ID NO: 6783 - protein, 1339 aa, Homo sapiens
  Payload ID: 1457;
  Gene Symbol: ASTN2;
  Gene Name: astrotactin 2;
  Uniprot ID:  O75129;
  ENSP ID: ENSP00000314038
MAAAGARLSPGPGSGLRGRPRLCFHPGPPPLLPLLLLFLLLLPPPPLLAGATAAASREPDSPCRLKTVTVSTLPALRESDIGWSGARAGAGAGTGAGAAAAAASPGSPGSAGTAAESRLLLFVRNELPGRIAVQDDLDNTELPFFTLEMSGTAADISLVHWRQQWLENGTLYFHVSMSSSGQLAQATAPTLQEPSEIVEEQMHILHISVMGGLIALLLLLLVFTVALYAQRRWQKRRRIPQKSASTEATHEIHYIPSVLLGPQARESFRSSRLQTHNSVIGVPIRETPILDDYDCEEDEEPPRRANHVSREDEFGSQVTHTLDSLGHPGEEKVDFEKKAAAEATQETVESLMQKFKESFRANTPIEIGQLQPPLRSTSAGKRKRRSKSRGGISFGRAKGTSGSEADDETQLTFYTEQYRSRRRSKGLLKSPVNKTALTLIAVSSCILAMVCGSQMSCPLTVKVTLHVPEHFIADGSSFVVSEGSYLDISDWLNPAKLSLYYQINATSPWVRDLCGQRTTDACEQLCDPETGECSCHEGYAPDPVHRHLCVRSDWGQSEGPWPYTTLERGYDLVTGEQAPEKILRSTFSLGQGLWLPVSKSFVVPPVELSINPLASCKTDVLVTEDPADVREEAMLSTYFETINDLLSSFGPVRDCSRNNGGCTRNFKCVSDRQVDSSGCVCPEELKPMKDGSGCYDHSKGIDCSDGFNGGCEQLCLQQTLPLPYDATSSTIFMFCGCVEEYKLAPDGKSCLMLSDVCEGPKCLKPDSKFNDTLFGEMLHGYNNRTQHVNQGQVFQMTFRENNFIKDFPQLADGLLVIPLPVEEQCRGVLSEPLPDLQLLTGDIRYDEAMGYPMVQQWRVRSNLYRVKLSTITLAAGFTNVLKILTKESSREELLSFIQHYGSHYIAEALYGSELTCIIHFPSKKVQQQLWLQYQKETTELGSKKELKSMPFITYLSGLLTAQMLSDDQLISGVEIRCEEKGRCPSTCHLCRRPGKEQLSPTPVLLEINRVVPLYTLIQDNGTKEAFKSALMSSYWCSGKGDVIDDWCRCDLSAFDANGLPNCSPLLQPVLRLSPTVEPSSTVVSLEWVDVQPAIGTKVSDYILQHKKVDEYTDTDLYTGEFLSFADDLLSGLGTSCVAAGRSHGEVPEVSIYSVIFKCLEPDGLYKFTLYAVDTRGRHSELSTVTLRTACPLVDDNKAEEIADKIYNLYNGYTSGKEQQMAYNTLMEVSASMLFRVQHHYNSHYEKFGDFVWRSEDELGPRKAHLILRRLERVSSHCSSLLRSAYIQSRVETVPYLFCRSEEVRPAGMVWYSILKDTKITCEEKMVSMARNTYGESKGR

SEQ ID NO: 6784 - protein, 395 aa, Homo sapiens
  Payload ID: 1457;
  Gene Symbol: ASTN2;
  Gene Name: astrotactin 2;
  Uniprot ID:  O75129;
  ENSP ID: ENSP00000339925
MPFITYLSGLLTAQMLSDDQLISGVEIRCEEKGRCPSTCHLCRRPGKEQLSPTPVLLEINRVVPLYTLIQDNGTKEAFKSALMSSYWCSGKGDVIDDWCRCDLSAFDANGLPNCSPLLQPVLRLSPTVEPSSTVVSLEWVDVQPAIGTKVSDYILQHKKVDEYTDTDLYTGEFLSFADDLLSGLGTSCVAAGRSHGEVPEVSIYSVIFKCLEPDGLYKFTLYAVDTRGRHSELSTVTLRTACPLVDDNKAEEIADKIYNLYNGYTSGKEQQMAYNTLMEVSASMLFRVQHHYNSHYEKFGDFVWRSEDELGPRKAHLILRRLERVSSHCSSLLRSAYIQSRVETVPYLFCRSEEVRPAGMVWYSILKDTKITCEEKMVSMARNTYYLTLSKVSPF

SEQ ID NO: 6785 - protein, 194 aa, Homo sapiens
  Payload ID: 1457;
  Gene Symbol: ASTN2;
  Gene Name: astrotactin 2;
  ENSP ID: ENSP00000351460
MPFITYLSGLLTAQMLSDDQLISGVEIRCEEKGRCPSTCHLCRRPGKEQLSPTPVLLEINRVVPLYTLIQDNGTKEAFKSALMSSYWCSGKGDVIDDWCRCDLSAFDANGLPNCSPLLQPVLRLSPTVEPSSTVVSLEWVDVQPAIGTKVSDYILQHKKVDEYTDTDLYTVYCWITFIDLRILNQPCIPGMKPT

SEQ ID NO: 6786 - protein, 1288 aa, Homo sapiens
  Payload ID: 1457;
  Gene Symbol: ASTN2;
  Gene Name: astrotactin 2;
  Uniprot ID:  O75129;
  ENSP ID: ENSP00000354504
MAAAGARLSPGPGSGLRGRPRLCFHPGPPPLLPLLLLFLLLLPPPPLLAGATAAASREPDSPCRLKTVTVSTLPALRESDIGWSGARAGAGAGTGAGAAAAAASPGSPGSAGTAAESRLLLFVRNELPGRIAVQDDLDNTELPFFTLEMSGTAADISLVHWRQQWLENGTLYFHVSMSSSGQLAQATAPTLQEPSEIVEEQMHILHISVMGGLIALLLLLLVFTVALYAQRRWQKRRRIPQKSASTEATHEIHYIPSVLLGPQARESFRSSRLQTHNSVIGVPIRETPILDDYDCEEDEEPPRRANHVSREDEFGSQVTHTLDSLGHPGEEKVDFEKKGGISFGRAKGTSGSEADDETQLTFYTEQYRSRRRSKGLLKSPVNKTALTLIAVSSCILAMVCGSQMSCPLTVKVTLHVPEHFIADGSSFVVSEGSYLDISDWLNPAKLSLYYQINATSPWVRDLCGQRTTDACEQLCDPETGECSCHEGYAPDPVHRHLCVRSDWGQSEGPWPYTTLERGYDLVTGEQAPEKILRSTFSLGQGLWLPVSKSFVVPPVELSINPLASCKTDVLVTEDPADVREEAMLSTYFETINDLLSSFGPVRDCSRNNGGCTRNFKCVSDRQVDSSGCVCPEELKPMKDGSGCYDHSKGIDCSDGFNGGCEQLCLQQTLPLPYDATSSTIFMFCGCVEEYKLAPDGKSCLMLSDVCEGPKCLKPDSKFNDTLFGEMLHGYNNRTQHVNQGQVFQMTFRENNFIKDFPQLADGLLVIPLPVEEQCRGVLSEPLPDLQLLTGDIRYDEAMGYPMVQQWRVRSNLYRVKLSTITLAAGFTNVLKILTKESSREELLSFIQHYGSHYIAEALYGSELTCIIHFPSKKVQQQLWLQYQKETTELGSKKELKSMPFITYLSGLLTAQMLSDDQLISGVEIRCEEKGRCPSTCHLCRRPGKEQLSPTPVLLEINRVVPLYTLIQDNGTKEAFKSALMSSYWCSGKGDVIDDWCRCDLSAFDANGLPNCSPLLQPVLRLSPTVEPSSTVVSLEWVDVQPAIGTKVSDYILQHKKVDEYTDTDLYTGEFLSFADDLLSGLGTSCVAAGRSHGEVPEVSIYSVIFKCLEPDGLYKFTLYAVDTRGRHSELSTVTLRTACPLVDDNKAEEIADKIYNLYNGYTSGKEQQMAYNTLMEVSASMLFRVQHHYNSHYEKFGDFVWRSEDELGPRKAHLILRRLERVSSHCSSLLRSAYIQSRVETVPYLFCRSEEVRPAGMVWYSILKDTKITCEEKMVSMARNTYGESKGR

SEQ ID NO: 6787 - protein, 402 aa, Homo sapiens
  Payload ID: 1457;
  Gene Symbol: ASTN2;
  Gene Name: astrotactin 2;
  ENSP ID: ENSP00000355116
MPFITYLSGLLTAQMLSDDQLISGVEIRCEEKGRCPSTCHLCRRPGKEQLSPTPVLLEINRVVPLYTLIQDNGTKEAFKSALMSSYWCSGKGDVIDDWCRCDLSAFDANGLPNCSPLLQPVLRLSPTVEPSSTVVSLEWVDVQPAIGTKVSDYILQHKKVDEYTDTDLYTGEFLSFADDLLSGLGTSCVAAGRSHGEVPEVSIYSVIFKCLEPDGLYKFTLYAVDTRGRHSELSTVTLRTACPLVDDNKAEEIADKIYNLYNGYTSGKEQQMAYNTLMEVSASMLFRVQHHYNSHYEKFGDFVWRSEDELGPRKAHLILRRLERVSSHCSSLLRSAYIQSRVETVPYLFCRSEEVRPAGMVWYSILKDTKITCEEKMVSMARNTYGESKGRYYLTLSKVSPF

SEQ ID NO: 6788 - protein, 1062 aa, Homo sapiens
  Payload ID: 1457;
  Gene Symbol: ASTN2;
  Gene Name: astrotactin 2;
  ENSP ID: ENSP00000363098
QTHNSVIGVPIRETPILDDYDCEEDEEPPRRANHVSREDEFGSQVTHTLDSLGHPGEEKVDFEKKAAAEATQETVESLMQKFKESFRANTPIEIGQLQPPLRSTSAGKRKRRSKSRGGISFGRAKGTSGSEADDETQLTFYTEQYRSRRRSKGLLKSPVNKTALTLIAVSSCILAMVCGSQMSCPLTVKVTLHVPEHFIADGSSFVVSEGSYLDISDWLNPAKLSLYYQINATSPWVRDLCGQRTTDACEQLCDPETGECSCHEGYAPDPVHRHLCVRSDWGQSEGPWPYTTLERGYDLVTGEQAPEKILSLGQGLWLPVSKSFVVPPVELSINPLASCKTDVLVTEDPADVREEAMLSTYFETINDLLSSFGPVRDCSRNNGGCTRNFKCVSDRQVDSSGCVCPEELKPMKDGSGCYDHSKGIDCSDGFNGGCEQLCLQQTLPLPYDATSSTIFMFCGCVEEYKLAPDGKSCLMLSDVCEGPKCLKPDSKFNDTLFGEMLHGYNNRTQHVNQGQVFQMTFRENNFIKDFPQLADGLLVIPLPVEEQCRGVLSEPLPDLQLLTGDIRYDEAMGYPMVQQWRVRSNLYRVKLSTITLAAGFTNVLKILTKESSREELLSFIQHYGSHYIAEALYGSELTCIIHFPSKKVQQQLWLQYQKETTELGSKKELKSMPFITYLSGLLTAQMLSDDQLISGVEIRCEEKGRCPSTCHLCRRPGKEQLSPTPVLLEINRVVPLYTLIQDNGTKEAFKSALMSSYWCSGKGDVIDDWCRCDLSAFDANGLPNCSPLLQPVLRLSPTVEPSSTVVSLEWVDVQPAIGTKVSDYILQHKKVDEYTDTDLYTGEFLSFADDLLSGLGTSCVAAGRSHGEVPEVSIYSVIFKCLEPDGLYKFTLYAVDTRGRHSELSTVTLRTACPLVDDNKAEEIADKIYNLYNGYTSGKEQQMAYNTLMEVSASMLFRVQHHYNSHYEKFGDFVWRSEDELGPRKAHLILRRLERVSSHCSSLLRSAYIQSRVETVPYLFCRSEEVRPAGMVWYSILKDTKITCEEKMVSMARNTYGESKGR

SEQ ID NO: 6789 - protein, 98 aa, Homo sapiens
  Payload ID: 1457;
  Gene Symbol: ASTN2;
  Gene Name: astrotactin 2;
  ENSP ID: ENSP00000412099
  MOD_RES (1)..(1): Any amino acid
XMAYNTLMEVSASMLFRVQHHYNSHYEKFGDFVWRSEDELGPSLLESFMSLQDINLLERRPGRPQRPGNPLSNVSWRISEIAPTSHTDMSAGIKETAS

SEQ ID NO: 6790 - protein, 706 aa, Homo sapiens
  Payload ID: 1458;
  Gene Symbol: ASUN;
  Gene Name: asunder spermatogenesis regulator;
  Uniprot ID:  Q9NVM9;
  ENSP ID: ENSP00000261191
MKIFSESHKTVFVVDHCPYMAESCRQHVEFDMLVKNRTQGIIPLAPISKSLWTCSVESSMEYCRIMYDIFPFKKLVNFIVSDSGAHVLNSWTQEDQNLQELMAALAAVGPPNPRADPECCSILHGLVAAVETLCKITEYQHEARTLLMENAERVGNRGRIICITNAKSDSHVRMLEDCVQETIHEHNKLAANSDHLMQIQKCELVLIHTYPVGEDSLVSDRSKKELSPVLTSEVHSVRAGRHLATKLNILVQQHFDLASTTITNIPMKEEQHANTSANYDVELLHHKDAHVDFLKSGDSHLGGGSREGSFKETITLKWCTPRTNNIELHYCTGAYRISPVDVNSRPSSCLTNFLLNGRSVLLEQPRKSGSKVISHMLSSHGGEIFLHVLSSSRSILEDPPSISEGCGGRVTDYRITDFGEFMRENRLTPFLDPRYKIDGSLEVPLERAKDQLEKHTRYWPMIISQTTIFNMQAVVPLASVIVKESLTEEDVLNCQKTIYNLVDMERKNDPLPISTVGTRGKGPKRDEQYRIMWNELETLVRAHINNSEKHQRVLECLMACRSKPPEEEERKKRGRKREDKEDKSEKAVKDYEQEKSWQDSERLKGILERGKEELAEAEIIKDSPDSPEPPNKKPLVEMDETPQVEKSKGPVSLLSLWSNRINTANSRKHQEFAGRLNSVNNRAELYQHLKEENGMETTENGKASRQ

SEQ ID NO: 6791 - protein, 163 aa, Homo sapiens
  Payload ID: 1458;
  Gene Symbol: ASUN;
  Gene Name: asunder spermatogenesis regulator;
  ENSP ID: ENSP00000443066
MKIFSESHKTVFVVDHCPYMAESCRQHVEFDMLVKNRTQGIIPLAPISKSLWTCSVESSMEYCRIMYDIFPFKKLVNFIVSDSGAHVLNSWTQEDQNLQELMAALAAVGPPNPRADPECCSILHGLVAAVETLCKITEYQHEARTLLMENAERVGNRGRIICI

SEQ ID NO: 6792 - protein, 353 aa, Homo sapiens
  Payload ID: 1458;
  Gene Symbol: ASUN;
  Gene Name: asunder spermatogenesis regulator;
  ENSP ID: ENSP00000445645
GDSHLGGGSREGSFKETITLKWCTPRTNNIELHYCTGAYRISPVDVNSRPSSCLTNFLLNGRSVLLEQPRKSGSKVISHMLSSHGGEIFLHVLSSSRSILEDPPSISEGCGGRVTDYRITVVPLASVIVKESLTEEDVLNCQKTIYNLVDMERKNDPLPISTVGTRGKGPKRDEQYRIMWNELETLVRAHINNSEKHQRVLECLMACRSKPPEEEERKKRGRKREDKEDKSEKAVKDYEQEKSWQDSERLKGILERGKEELAEAEIIKDSPDSPEPPNKKPLVEMDETPQVEKSKGPVSLLSLWSNRINTANSRKHQEFAGRLNSVNNRAELYQHLKEENGMETTENGKASRQ

SEQ ID NO: 6793 - protein, 225 aa, Homo sapiens
  Payload ID: 1458;
  Gene Symbol: ASUN;
  Gene Name: asunder spermatogenesis regulator;
  ENSP ID: ENSP00000446183
MKIFSESHKTVFVVDHCPYMAESCRQHVEFDMLVKNRTQGIIPLAPISKSLWTCSVESSMEYCRIMYDIFPFKKLVNFIVSDSGAHVLNSWTQEDQNLQELMAALAAVGPPNPRADPECCSILHGLVAAVETLCKITEYQHEARTLLMENAERVGNRGRIICITNAKSDSHVRMLEDCVQETIHEHNKLAANSDHLMQIQKCELVLIHTYPVGEDSLVSDRSKKE

SEQ ID NO: 6794 - protein, 124 aa, Homo sapiens
  Payload ID: 1458;
  Gene Symbol: ASUN;
  Gene Name: asunder spermatogenesis regulator;
  ENSP ID: ENSP00000448467
MAALAAVGPPNPRADPECCSILHGLVAAVETLCKITEYQHEARTLLMENAERVGNRGRIICITNAKSDSHVRMLEDCVQETIHEHNKLAANSDHLMQIQKCELVLIHTYPVGEDSLVSDRSKKE

SEQ ID NO: 6795 - protein, 153 aa, Homo sapiens
  Payload ID: 1458;
  Gene Symbol: ASUN;
  Gene Name: asunder spermatogenesis regulator;
  ENSP ID: ENSP00000448985
  MOD_RES (1)..(1): Any amino acid
XATKLNILVQQHFDLASTTITNIPMKEEQHANTSANYDVELLHHKDAHVDFLKSELHYCTGAYRISPVDVNSRPSSCLTNFLLNDPRYKIDGSLEVPLERAKDQLEKHTRYWPMIISQTTIFNMQAVVPLASVIVKESLTEEDVLNCQKTIYN

SEQ ID NO: 6796 - protein, 2301 aa, Homo sapiens
  Payload ID: 1459;
  Gene Symbol: AHCTF1;
  Gene Name: AT hook containing transcription factor 1;
  Uniprot ID:  Q8WYP5;
  ENSP ID: ENSP00000355464
MDSLAGLSPREAAGVLSLSCVGVCSTCAWAWPHGSMRDLRAQVTSGLLPFPEVTLQALGEDEITLESVLRGKFAAGKNGLACLACGPQLEVVNSITGERLSAYRFSGVNEQPPVVLAVKEFSWQKRTGLLIGLEETEGSVLCLYDLGISKVVKAVVLPGRVTAIEPIINHGGASASTQHLHPSLRWLFGVAAVVTDVGQILLVDLCLDDLSCNQNEVEASDLEVLTGIPAEVPHIRESVMRQGRHLCFQLVSPTGTAVSTLSYISRTNQLAVGFSDGYLALWNMKSMKREYYIQLESGQVPVYAVTFQEPENDPRNCCYLWAVQSTQDSEGDVLSLHLLQLAFGNRKCLASGQILYEGLEYCEERYTLDLTGGMFPLRGQTSNTKLLGCQSIEKFRSHGDREEGVNEALSPDTSVSVFTWQVNIYGQGKPSVYLGLFDINRWYHAQMPDSLRSGEYLHNCSYFALWSLESVVSRTSPHGILDILVHERSLNRGVPPSYPPPEQFFNPSTYNFDATCLLNSGVVHLTCTGFQKETLTFLKKSGPSLNELIPDGYNRCLVAGLLSPRFVDVQPSSLSQEEQLEAILSAAIQTSSLGLLTGYIRRWITEEQPNSATNLRFVLEWTWNKVVLTKEEFDRLCVPLFDGSCHFMDPQTIQSIQQCYLLLSNLNIVLSCFASEAREITERGLIDLSNKFVVSHLICQYAQVVLWFSHSGLLPEGIDDSVQLSRLCYNYPVIQNYYTSRRQKFERLSRGKWNPDCLMIDGLVSQLGERIEKLWKRDEGGTGKYPPASLHAVLDMYLLDGVTEAAKHSITIYLLLDIMYSFPNKTDTPIESFPTVFAISWGQVKLIQGFWLIDHNDYESGLDLLFHPATAKPLSWQHSKIIQAFMSQGEHRQALRYIQTMKPTVSSGNDVILHLTVLLFNRCMVEAWNFLRQHCNRLNIEELLKHMYEVCQEMGLMEDLLKLPFTDTEQECLVKFLQSSASVQNHEFLLVHHLQRANYVPALKLNQTLKINVMNDRDPRLRERSLARNSILDQYGKILPRVHRKLAIERAKPYHLSTSSVFRLVSRPKPLSAVPKQVVTGTVLTRSVFINNVLSKIGEVWASKEPINSTTPFNSSKIEEPSPIVYSLPAPELPEAFFGTPISKASQKISRLLDLVVQPVPRPSQCSEFIQQSSMKSPLYLVSRSLPSSSQLKGSPQAISRASELHLLETPLVVKKAKSLAMSVTTSGFSEFTPQSILRSTLRSTPLASPSPSPGRSPQRLKETRISFVEEDVHPKWIPGAADDSKLEVFTTPKKCAVPVETEWLKSKDRTTSFFLNSPEKEHQEMDEGSQSLEKLDVSKGNSSVSITSDETTLEYQDAPSPEDLEETVFTASKPKSSSTALTTNVTEQTEKDGDKDVFASEVTPSDLQKQMGNLEDAETKDLLVAAEAFSELNHLSPVQGTEASLCAPSVYEGKIFTQKSKVPVLDEGLTSVETYTPAIRANDNKSMADVLGDGGNSSLTISEGPIVSERRLNQEVALNLKEDHEVEVGVLKESVDLPEEKLPISDSPPDTQEIHVIEQEKLEAQDSGEEARNLSFNELYPSGTLKLQYNFDTIDQQFCDLADNKDTAECDIAEVDGELFVAQSNFTLILEGEEGEVEPGDFASSDVLPKAANTATEEKLVCSGENDNHGQIANLPSAVTSDQKSQKVDTLPYVPEPIKVAIAENLLDVIKDTRSKEITSDTMEQSIHETIPLVSQNIMCPTKLVKSAFKTAQETSTMTMNVSQVDDVVSSKTRTRGQRIQNVNVKSAQQEASADVATPKMPGQSVRKKTRKAKEISEASENIYSDVRGLSQNQQIPQNSVTPRRGRRKKEVNQDILENTSSVEQELQITTGRESKRLKSSQLLEPAVEETTKKEVKVSSVTKRTPRRIKRSVENQESVEIINDLKVSTVTSPSRMIRKLRSTNLDASENTGNKQDDKSSDKQLRIKHVRRVRGREVSPSDVREDSNLESSQLTVQAEFDMSAIPRKRGRPRKINPSEDVGSKAVKEERSPKKKEAPSIRRRSTRNTPAKSENVDVGKPALGKSILVPNEELSMVMSSKKKLTKKTESQSQKRSLHSVSEERTDEMTHKETNEQEERLLATASFTKSSRSSRTRSSKAILLPDLSEPNNEPLFSPASEVPRKAKAKKIEVPAQLKELVSDLSSQFVISPPALRSRQKNTSNKNKLEDELKDDAQSVETLGKPKAKRIRTSKTKQASKNTEKESAWSPPPIEIRLISPLASPADGVKSKPRKTTEVTGTGLGRNRKKLSSYPKQILRRKML

SEQ ID NO: 6797 - protein, 2275 aa, Homo sapiens
  Payload ID: 1459;
  Gene Symbol: AHCTF1;
  Gene Name: AT hook containing transcription factor 1;
  Uniprot ID:  Q8WYP5;
  ENSP ID: ENSP00000355465
MAAERRCGSMRDLRAQVTSGLLPFPEVTLQALGEDEITLESVLRGKFAAGKNGLACLACGPQLEVVNSITGERLSAYRFSGVNEQPPVVLAVKEFSWQKRTGLLIGLEETEGSVLCLYDLGISKVVKAVVLPGRVTAIEPIINHGGASASTQHLHPSLRWLFGVAAVVTDVGQILLVDLCLDDLSCNQNEVEASDLEVLTGIPAEVPHIRESVMRQGRHLCFQLVSPTGTAVSTLSYISRTNQLAVGFSDGYLALWNMKSMKREYYIQLESGQVPVYAVTFQEPENDPRNCCYLWAVQSTQDSEGDVLSLHLLQLAFGNRKCLASGQILYEGLEYCEERYTLDLTGGMFPLRGQTSNTKLLGCQSIEKFRSHGDREEGVNEALSPDTSVSVFTWQVNIYGQGKPSVYLGLFDINRWYHAQMPDSLRSGEYLHNCSYFALWSLESVVSRTSPHGILDILVHERSLNRGVPPSYPPPEQFFNPSTYNFDATCLLNSGVVHLTCTGFQKETLTFLKKSGPSLNELIPDGYNRCLVAGLLSPRFVDVQPSSLSQEEQLEAILSAAIQTSSLGLLTGYIRRWITEEQPNSATNLRFVLEWTWNKVVLTKEEFDRLCVPLFDGSCHFMDPQTIQSIQQCYLLLSNLNIVLSCFASEAREITERGLIDLSNKFVVSHLICQYAQVVLWFSHSGLLPEGIDDSVQLSRLCYNYPVIQNYYTSRRQKFERLSRGKWNPDCLMIDGLVSQLGERIEKLWKRDEGGTGKYPPASLHAVLDMYLLDGVTEAAKHSITIYLLLDIMYSFPNKTDTPIESFPTVFAISWGQVKLIQGFWLIDHNDYESGLDLLFHPATAKPLSWQHSKIIQAFMSQGEHRQALRYIQTMKPTVSSGNDVILHLTVLLFNRCMVEAWNFLRQHCNRLNIEELLKHMYEVCQEMGLMEDLLKLPFTDTEQECLVKFLQSSASVQNHEFLLVHHLQRANYVPALKLNQTLKINVMNDRDPRLRERSLARNSILDQYGKILPRVHRKLAIERAKPYHLSTSSVFRLVSRPKPLSAVPKQVVTGTVLTRSVFINNVLSKIGEVWASKEPINSTTPFNSSKIEEPSPIVYSLPAPELPEAFFGTPISKASQKISRLLDLVVQPVPRPSQCSEFIQQSSMKSPLYLVSRSLPSSSQLKGSPQAISRASELHLLETPLVVKKAKSLAMSVTTSGFSEFTPQSILRSTLRSTPLASPSPSPGRSPQRLKETRISFVEEDVHPKWIPGAADDSKLEVFTTPKKCAVPVETEWLKSKDRTTSFFLNSPEKEHQEMDEGSQSLEKLDVSKGNSSVSITSDETTLEYQDAPSPEDLEETVFTASKPKSSSTALTTNVTEQTEKDGDKDVFASEVTPSDLQKQMGNLEDAETKDLLVAAEAFSELNHLSPVQGTEASLCAPSVYEGKIFTQKSKVPVLDEGLTSVETYTPAIRANDNKSMADVLGDGGNSSLTISEGPIVSERRLNQEVALNLKEDHEVEVGVLKESVDLPEEKLPISDSPPDTQEIHVIEQEKLEAQDSGEEARNLSFNELYPSGTLKLQYNFDTIDQQFCDLADNKDTAECDIAEVDGELFVAQSNFTLILEGEEGEVEPGDFASSDVLPKAANTATEEKLVCSGENDNHGQIANLPSAVTSDQKSQKVDTLPYVPEPIKVAIAENLLDVIKDTRSKEITSDTMEQSIHETIPLVSQNIMCPTKLVKSAFKTAQETSTMTMNVSQVDDVVSSKTRTRGQRIQNVNVKSAQQEASADVATPKMPGQSVRKKTRKAKEISEASENIYSDVRGLSQNQQIPQNSVTPRRGRRKKEVNQDILENTSSVEQELQITTGRESKRLKSSQLLEPAVEETTKKEVKVSSVTKRTPRRIKRSVENQESVEIINDLKVSTVTSPSRMIRKLRSTNLDASENTGNKQDDKSSDKQLRIKHVRRVRGREVSPSDVREDSNLESSQLTVQAEFDMSAIPRKRGRPRKINPSEDVGSKAVKEERSPKKKEAPSIRRRSTRNTPAKSENVDVGKPALGKSILVPNEELSMVMSSKKKLTKKTESQSQKRSLHSVSEERTDEMTHKETNEQEERLLATASFTKSSRSSRTRSSKAILLPDLSEPNNEPLFSPASEVPRKAKAKKIEVPAQLKELVSDLSSQFVISPPALRSRQKNTSNKNKLEDELKDDAQSVETLGKPKAKRIRTSKTKQASKNTEKESAWSPPPIEIRLISPLASPADGVKSKPRKTTEVTGTGLGRNRKKLSSYPKQILRRKML

SEQ ID NO: 6798 - protein, 67 aa, Homo sapiens
  Payload ID: 1459;
  Gene Symbol: AHCTF1;
  Gene Name: AT hook containing transcription factor 1;
  ENSP ID: ENSP00000417115
MRDLRAQVTSGLLPFPEVTLQALGEDEITLESVLRGKFAAGKNGLACLACGPQLEVVNSITGERLSA

SEQ ID NO: 6799 - protein, 80 aa, Homo sapiens
  Payload ID: 1459;
  Gene Symbol: AHCTF1;
  Gene Name: AT hook containing transcription factor 1;
  ENSP ID: ENSP00000418007
ESQSQKRSLHSVSEERTDEMTHKETNEQEERLLATASFTKSSRSSRTRSSKAILLPDLSEPNNEPLFSPASEVPRKAKER

SEQ ID NO: 6800 - protein, 1603 aa, Homo sapiens
  Payload ID: 1460;
  Gene Symbol: AHDC1;
  Gene Name: AT hook, DNA binding motif, containing 1;
  Uniprot ID:  Q5TGY3;
  ENSP ID: ENSP00000247087
MRVKPQGLVVTSSAVCSSPDYLREPKYYPGGPPTPRPLLPTRPPASPPDKAFSTHAFSENPRPPPRRDPSTRRPPVLAKGDDPLPPRAARPVSQARCPTPVGDGSSSRRCWDNGRVNLRPVVQLIDIMKDLTRLSQDLQHSGVHLDCGGLRLSRPPAPPPGDLQYSFFSSPSLANSIRSPEERATPHAKSERPSHPLYEPEPEPRDSPQPGQGHSPGATAAATGLPPEPEPDSTDYSELADADILSELASLTCPEAQLLEAQALEPPSPEPEPQLLDPQPRFLDPQALEPLGEALELPPLQPLADPLGLPGLALQALDTLPDSLESQLLDPQALDPLPKLLDVPGRRLEPQQPLGHCPLAEPLRLDLCSPHGPPGPEGHPKYALRRTDRPKILCRRRKAGRGRKADAGPEGRLLPLPMPTGLVAALAEPPPPPPPPPPALPGPGPVSVPELKPESSQTPVVSTRKGKCRGVRRMVVKMAKIPVSLGRRNKTTYKVSSLSSSLSVEGKELGLRVSAEPTPLLKMKNNGRNVVVVFPPGEMPIILKRKRGRPPKNLLLGPGKPKEPAVVAAEAATVAAATMAMPEVKKRRRRKQKLASPQPSYAADANDSKAEYSDVLAKLAFLNRQSQCAGRCSPPRCWTPSEPESVHQAPDTQSISHFLHRVQGFRRRGGKAGGFGGRGGGHAAKSARCSFSDFFEGIGKKKKVVAVAAAGVGGPGLTELGHPRKRGRGEVDAVTGKPKRKRRSRKNGTLFPEQVPSGPGFGEAGAEWAGDKGGGWAPHHGHPGGQAGRNCGFQGTEARAFASTGLESGASGRGSYYSTGAPSGQTELSQERQNLFTGYFRSLLDSDDSSDLLDFALSASRPESRKASGTYAGPPTSALPAQRGLATFPSRGAKASPVAVGSSGAGADPSFQPVLSARQTFPPGRAASYGLTPAASDCRAAETFPKLVPPPSAMARSPTTHPPANTYLPQYGGYGAGQSVFAPTKPFTGQDCANSKDCSFAYGSGNSLPASPSSAHSAGYAPPPTGGPCLPPSKASFFSSSEGAPFSGSAPTPLRCDSRASTVSPGGYMVPKGTTASATSAASAASSSSSSFQPSPENCRQFAGASQWPFRQGYGGLDWASEAFSQLYNPSFDCHVSEPNVILDISNYTPQKVKQQTAVSETFSESSSDSTQFNQPVGGGGFRRANSEASSSEGQSSLSSLEKLMMDWNEASSAPGYNWNQSVLFQSSSKPGRGRRKKVDLFEASHLGFPTSASAAASGYPSKRSTGPRQPRGGRGGGACSAKKERGGAAAKAKFIPKPQPVNPLFQDSPDLGLDYYSGDSSMSPLPSQSRAFGVGERDPCDFIGPYSMNPSTPSDGTFGQGFHCDSPSLGAPELDGKHFPPLAHPPTVFDAGLQKAYSPTCSPTLGFKEELRPPPTKLAACEPLKHGLQGASLGHAAAAQAHLSCRDLPLGQPHYDSPSCKGTAYWYPPGSAARSPPYEGKVGTGLLADFLGRTEAACLSAPHLASPPATPKADKEPLEMARPPGPPRGPAAAAAGYGCPLLSDLTLSPVPRDSLLPLQDTAYRYPGFMPQAHPGLGGGPKSGFLGPMAEPHPEDTFTVTSL

SEQ ID NO: 6801 - protein, 1603 aa, Homo sapiens; identical to SEQ ID NO: 6800
  Payload ID: 1460;
  Gene Symbol: AHDC1;
  Gene Name: AT hook, DNA binding motif, containing 1;
  Uniprot ID:  Q5TGY3;
  ENSP ID: ENSP00000363123

SEQ ID NO: 6802 - protein, 2285 aa, Homo sapiens
  Payload ID: 1461;
  Gene Symbol: ARID1A;
  Gene Name: AT rich interactive domain 1A (SWI-like);
  Uniprot ID:  O14497;
  ENSP ID: ENSP00000320485
MAAQVAPAAASSLGNPPPPPPSELKKAEQQQREEAGGEAAAAAAAERGEMKAAAGQESEGPAVGPPQPLGKELQDGAESNGGGGGGGAGSGGGPGAEPDLKNSNGNAGPRPALNNNLTEPPGGGGGGSSDGVGAPPHSAAAALPPPAYGFGQPYGRSPSAVAAAAAAVFHQQHGGQQSPGLAALQSGGGGGLEPYAGPQQNSHDHGFPNHQYNSYYPNRSAYPPPAPAYALSSPRGGTPGSGAAAAAGSKPPPSSSASASSSSSSFAQQRFGAMGGGGPSAAGGGTPQPTATPTLNQLLTSPSSARGYQGYPGGDYSGGPQDGGAGKGPADMASQCWGAAAAAAAAAAASGGAQQRSHHAPMSPGSSGGGGQPLARTPQPSSPMDQMGKMRPQPYGGTNPYSQQQGPPSGPQQGHGYPGQPYGSQTPQRYPMTMQGRAQSAMGGLSYTQQIPPYGQQGPSGYGQQGQTPYYNQQSPHPQQQQPPYSQQPPSQTPHAQPSYQQQPQSQPPQLQSSQPPYSQQPSQPPHQQSPAPYPSQQSTTQQHPQSQPPYSQPQAQSPYQQQQPQQPAPSTLSQQAAYPQPQSQQSQQTAYSQQRFPPPQELSQDSFGSQASSAPSMTSSKGGQEDMNLSLQSRPSSLPDLSGSIDDLPMGTEGALSPGVSTSGISSSQGEQSNPAQSPFSPHTSPHLPGIRGPSPSPVGSPASVAQSRSGPLSPAAVPGNQMPPRPPSGQSDSIMHPSMNQSSIAQDRGYMQRNPQMPQYSSPQPGSALSPRQPSGGQIHTGMGSYQQNSMGSYGPQGGQYGPQGGYPRQPNYNALPNANYPSAGMAGGINPMGAGGQMHGQPGIPPYGTLPPGRMSHASMGNRPYGPNMANMPPQVGSGMCPPPGGMNRKTQETAVAMHVAANSIQNRPPGYPNMNQGGMMGTGPPYGQGINSMAGMINPQGPPYSMGGTMANNSAGMAASPEMMGLGDVKLTPATKMNNKADGTPKTESKSKKSSSSTTTNEKITKLYELGGEPERKMWVDRYLAFTEEKAMGMTNLPAVGRKPLDLYRLYVSVKEIGGLTQVNKNKKWRELATNLNVGTSSSAASSLKKQYIQCLYAFECKIERGEDPPPDIFAAADSKKSQPKIQPPSPAGSGSMQGPQTPQSTSSSMAEGGDLKPPTPASTPHSQIPPLPGMSRSNSVGIQDAFNDGSDSTFQKRNSMTPNPGYQPSMNTSDMMGRMSYEPNKDPYGSMRKAPGSDPFMSSGQGPNGGMGDPYSRAAGPGLGNVAMGPRQHYPYGGPYDRVRTEPGIGPEGNMSTGAPQPNLMPSNPDSGMYSPSRYPPQQQQQQQQRHDSYGNQFSTQGTPSGSPFPSQQTTMYQQQQQNYKRPMDGTYGPPAKRHEGEMYSVPYSTGQGQPQQQQLPPAQPQPASQQQAAQPSPQQDVYNQYGNAYPATATAATERRPAGGPQNQFPFQFGRDRVSAPPGTNAQQNMPPQMMGGPIQASAEVAQQGTMWQGRNDMTYNYANRQSTGSAPQGPAYHGVNRTDEMLHTDQRANHEGSWPSHGTRQPPYGPSAPVPPMTRPPPSNYQPPPSMQNHIPQVSSPAPLPRPMENRTSPSKSPFLHSGMKMQKAGPPVPASHIAPAPVQPPMIRRDITFPPGSVEATQPVLKQRRRLTMKDIGTPEAWRVMMSLKSGLLAESTWALDTINILLYDDNSIMTFNLSQLPGLLELLVEYFRRCLIEIFGILKEYEVGDPGQRTLLDPGRFSKVSSPAPMEGGEEEEELLGPKLEEEEEEEVVENDEEIAFSGKDKPASENSEEKLISKFDKLPVKIVQKNDPFVVDCSDKLGRVQEFDSGLLHWRIGGGDTTEHIQTHFESKTELLPSRPHAPCPPAPRKHVTTAEGTPGTTDQEGPPPDGPPEKRITATMDDMLSTRSSTLTEDGAKSSEAIKESSKFPFGISPAQSHRNIKILEDEPHSKDETPLCTLLDWQDSLAKRCVCVSNTIRSLSFVPGNDFEMSKHPGLLLILGKLILLHHKHPERKQAPLTYEKEEEQDQGVSCNKVEWWWDCLEMLRENTLVTLANISGQLDLSPYPESICLPVLDGLLHWAVCPSAEAQDPFSTLGPNAVLSPQRLVLETLSKLSIQDNNVDLILATPPFSRLEKLYSTMVRFLSDRKNPVCREMAVVLLANLAQGDSLAARAIAVQKGSIGNLLGFLEDSLAATQFQQSQASLLHMQNPPFEPTSVDMMRRAARALLALAKVDENHSEFTLYESRLLDISVSPLMNSLVSQVICDVLFLIGQS

SEQ ID NO: 6803 - protein, 1902 aa, Homo sapiens
  Payload ID: 1461;
  Gene Symbol: ARID1A;
  Gene Name: AT rich interactive domain 1A (SWI-like);
  Uniprot ID:  O14497;
  ENSP ID: ENSP00000363267
MDQMGKMRPQPYGGTNPYSQQQGPPSGPQQGHGYPGQPYGSQTPQRYPMTMQGRAQSAMGGLSYTQQIPPYGQQGPSGYGQQGQTPYYNQQSPHPQQQQPPYSQQPPSQTPHAQPSYQQQPQSQPPQLQSSQPPYSQQPSQPPHQQSPAPYPSQQSTTQQHPQSQPPYSQPQAQSPYQQQQPQQPAPSTLSQQAAYPQPQSQQSQQTAYSQQRFPPPQELSQDSFGSQASSAPSMTSSKGGQEDMNLSLQSRPSSLPDLSGSIDDLPMGTEGALSPGVSTSGISSSQGEQSNPAQSPFSPHTSPHLPGIRGPSPSPVGSPASVAQSRSGPLSPAAVPGNQMPPRPPSGQSDSIMHPSMNQSSIAQDRGYMQRNPQMPQYSSPQPGSALSPRQPSGGQIHTGMGSYQQNSMGSYGPQGGQYGPQGGYPRQPNYNALPNANYPSAGMAGGINPMGAGGQMHGQPGIPPYGTLPPGRMSHASMGNRPYGPNMANMPPQVGSGMCPPPGGMNRKTQETAVAMHVAANSIQNRPPGYPNMNQGGMMGTGPPYGQGINSMAGMINPQGPPYSMGGTMANNSAGMAASPEMMGLGDVKLTPATKMNNKADGTPKTESKSKKSSSSTTTNEKITKLYELGGEPERKMWVDRYLAFTEEKAMGMTNLPAVGRKPLDLYRLYVSVKEIGGLTQVNKNKKWRELATNLNVGTSSSAASSLKKQYIQCLYAFECKIERGEDPPPDIFAAADSKKSQPKIQPPSPAGSGSMQGPQTPQSTSSSMAEGGDLKPPTPASTPHSQIPPLPGMSRSNSVGIQDAFNDGSDSTFQKRNSMTPNPGYQPSMNTSDMMGRMSYEPNKDPYGSMRKAPGSDPFMSSGQGPNGGMGDPYSRAAGPGLGNVAMGPRQHYPYGGPYDRVRTEPGIGPEGNMSTGAPQPNLMPSNPDSGMYSPSRYPPQQQQQQQQRHDSYGNQFSTQGTPSGSPFPSQQTTMYQQQQQNYKRPMDGTYGPPAKRHEGEMYSVPYSTGQGQPQQQQLPPAQPQPASQQQAAQPSPQQDVYNQYGNAYPATATAATERRPAGGPQNQFPFQFGRDRVSAPPGTNAQQNMPPQMMGGPIQASAEVAQQGTMWQGRNDMTYNYANRQSTGSAPQGPAYHGVNRTDEMLHTDQRANHEGSWPSHGTRQPPYGPSAPVPPMTRPPPSNYQPPPSMQNHIPQVSSPAPLPRPMENRTSPSKSPFLHSGMKMQKAGPPVPASHIAPAPVQPPMIRRDITFPPGSVEATQPVLKQRRRLTMKDIGTPEAWRVMMSLKSGLLAESTWALDTINILLYDDNSIMTFNLSQLPGLLELLVEYFRRCLIEIFGILKEYEVGDPGQRTLLDPGRFSKVSSPAPMEGGEEEEELLGPKLEEEEEEEVVENDEEIAFSGKDKPASENSEEKLISKFDKLPVKIVQKNDPFVVDCSDKLGRVQEFDSGLLHWRIGGGDTTEHIQTHFESKTELLPSRPHAPCPPAPRKHVTTAEGTPGTTDQEGPPPDGPPEKRITATMDDMLSTRSSTLTEDGAKSSEAIKESSKFPFGISPAQSHRNIKILEDEPHSKDETPLCTLLDWQDSLAKRCVCVSNTIRSLSFVPGNDFEMSKHPGLLLILGKLILLHHKHPERKQAPLTYEKEEEQDQGVSCNKVEWWWDCLEMLRENTLVTLANISGQLDLSPYPESICLPVLDGLLHWAVCPSAEAQDPFSTLGPNAVLSPQRLVLETLSKLSIQDNNVDLILATPPFSRLEKLYSTMVRFLSDRKNPVCREMAVVLLANLAQGDSLAARAIAVQKGSIGNLLGFLEDSLAATQFQQSQASLLHMQNPPFEPTSVDMMRRAARALLALAKVDENHSEFTLYESRLLDISVSPLMNSLVSQVICDVLFLIGQS

SEQ ID NO: 6804 - protein, 2068 aa, Homo sapiens
  Payload ID: 1461;
  Gene Symbol: ARID1A;
  Gene Name: AT rich interactive domain 1A (SWI-like);
  Uniprot ID:  O14497;
  ENSP ID: ENSP00000387636
MAAQVAPAAASSLGNPPPPPPSELKKAEQQQREEAGGEAAAAAAAERGEMKAAAGQESEGPAVGPPQPLGKELQDGAESNGGGGGGGAGSGGGPGAEPDLKNSNGNAGPRPALNNNLTEPPGGGGGGSSDGVGAPPHSAAAALPPPAYGFGQPYGRSPSAVAAAAAAVFHQQHGGQQSPGLAALQSGGGGGLEPYAGPQQNSHDHGFPNHQYNSYYPNRSAYPPPAPAYALSSPRGGTPGSGAAAAAGSKPPPSSSASASSSSSSFAQQRFGAMGGGGPSAAGGGTPQPTATPTLNQLLTSPSSARGYQGYPGGDYSGGPQDGGAGKGPADMASQCWGAAAAAAAAAAASGGAQQRSHHAPMSPGSSGGGGQPLARTPQPSSPMDQMGKMRPQPYGGTNPYSQQQGPPSGPQQGHGYPGQPYGSQTPQRYPMTMQGRAQSAMGGLSYTQQIPPYGQQGPSGYGQQGQTPYYNQQSPHPQQQQPPYSQQPPSQTPHAQPSYQQQPQSQPPQLQSSQPPYSQQPSQPPHQQSPAPYPSQQSTTQQHPQSQPPYSQPQAQSPYQQQQPQQPAPSTLSQQAAYPQPQSQQSQQTAYSQQRFPPPQELSQDSFGSQASSAPSMTSSKGGQEDMNLSLQSRPSSLPDLSGSIDDLPMGTEGALSPGVSTSGISSSQGEQSNPAQSPFSPHTSPHLPGIRGPSPSPVGSPASVAQSRSGPLSPAAVPGNQMPPRPPSGQSDSIMHPSMNQSSIAQDRGYMQRNPQMPQYSSPQPGSALSPRQPSGGQIHTGMGSYQQNSMGSYGPQGGQYGPQGGYPRQPNYNALPNANYPSAGMAGGINPMGAGGQMHGQPGIPPYGTLPPGRMSHASMGNRPYGPNMANMPPQVGSGMCPPPGGMNRKTQETAVAMHVAANSIQNRPPGYPNMNQGGMMGTGPPYGQGINSMAGMINPQGPPYSMGGTMANNSAGMAASPEMMGLGDVKLTPATKMNNKADGTPKTESKSKKSSSSTTTNEKITKLYELGGEPERKMWVDRYLAFTEEKAMGMTNLPAVGRKPLDLYRLYVSVKEIGGLTQVNKNKKWRELATNLNVGTSSSAASSLKKQYIQCLYAFECKIERGEDPPPDIFAAADSKKSQPKIQPPSPAGSGSMQGPQTPQSTSSSMAEGGDLKPPTPASTPHSQIPPLPGMSRSNSVGIQDAFNDGSDSTFQKRNSMTPNPGYQPSMNTSDMMGRMSYEPNKDPYGSMRKAPGSDPFMSSGQGPNGGMGDPYSRAAGPGLGNVAMGPRQHYPYGGPYDRVRTEPGIGPEGNMSTGAPQPNLMPSNPDSGMYSPSRYPPQQQQQQQQRHDSYGNQFSTQGTPSGSPFPSQQTTMYQQQQQVSSPAPLPRPMENRTSPSKSPFLHSGMKMQKAGPPVPASHIAPAPVQPPMIRRDITFPPGSVEATQPVLKQRRRLTMKDIGTPEAWRVMMSLKSGLLAESTWALDTINILLYDDNSIMTFNLSQLPGLLELLVEYFRRCLIEIFGILKEYEVGDPGQRTLLDPGRFSKVSSPAPMEGGEEEEELLGPKLEEEEEEEVVENDEEIAFSGKDKPASENSEEKLISKFDKLPVKIVQKNDPFVVDCSDKLGRVQEFDSGLLHWRIGGGDTTEHIQTHFESKTELLPSRPHAPCPPAPRKHVTTAEGTPGTTDQEGPPPDGPPEKRITATMDDMLSTRSSTLTEDGAKSSEAIKESSKFPFGISPAQSHRNIKILEDEPHSKDETPLCTLLDWQDSLAKRCVCVSNTIRSLSFVPGNDFEMSKHPGLLLILGKLILLHHKHPERKQAPLTYEKEEEQDQGVSCNKVEWWWDCLEMLRENTLVTLANISGQLDLSPYPESICLPVLDGLLHWAVCPSAEAQDPFSTLGPNAVLSPQRLVLETLSKLSIQDNNVDLILATPPFSRLEKLYSTMVRFLSDRKNPVCREMAVVLLANLAQGDSLAARAIAVQKGSIGNLLGFLEDSLAATQFQQSQASLLHMQNPPFEPTSVDMMRRAARALLALAKVDENHSEFTLYESRLLDISVSPLMNSLVSQVICDVLFLIGQS

SEQ ID NO: 6805 - protein, 1182 aa, Homo sapiens
  Payload ID: 1461;
  Gene Symbol: ARID1A;
  Gene Name: AT rich interactive domain 1A (SWI-like);
  ENSP ID: ENSP00000390317
  MOD_RES (1)..(1): Any amino acid
XECKIERGEDPPPDIFAAADSKKSQPKIQPPSPAGSGSMQGPQTPQSTSSSMAEGGDLKPPTPASTPHSQIPPLPGMRSNSVGIQDAFNDGSDSTFQKRNSMTPNPGYQPSMNTSDMMGRMSYEPNKDPYGSMRKAPGSDPFMSSGQGPNGGMGDPYSRAAGPGLGNVAMGPRQHYPYGGPYDRVRTEPGIGPEGNMSTGAPQPNLMPSNPDSGMYSPSRYPPQQQQQQQQRHDSYGNQFSTQGTPSGSPFPSQQTTMYQQQQQNYKRPMDGTYGPPAKRHEGEMYSVPYSTGQGQPQQQQLPPAQPQPASQQQAAQPSPQQDVYNQYGNAYPATATAATERRPAGGPQNQFPFQFGRDRVSAPPGTNAQQNMPPQMMGGPIQASAEVAQQGTMWQGRNDMTYNYANRQSTGSAPQGPAYHGVNRTDEMLHTDQRANHEGSWPSHGTRQPPYGPSAPVPPMTRPPPSNYQPPPSMQNHIPQVSSPAPLPRPMENRTSPSKSPFLHSGMKMQKAGPPVPASHIAPAPVQPPMIRRDITFPPGSVEATQPVLKQRRRLTMKDIGTPEAWRVMMSLKSGLLAESTWALDTINILLYDDNSIMTFNLSQLPGLLELLVEYFRRCLIEIFGILKEYEVGDPGQRTLLDPGRFSKVSSPAPMEGGEEEEELLGPKLEEEEEEEVVENDEEIAFSGKDKPASENSEEKLISKFDKLPVKIVQKNDPFVVDCSDKLGRVQEFDSGLLHWRIGGGDTTEHIQTHFESKTELLPSRPHAPCPPAPRKHVTTAEGTPGTTDQEGPPPDGPPEKRITATMDDMLSTRSSTLTEDGAKSSEAIKESSKFPFGISPAQSHRNIKILEDEPHSKDETPLCTLLDWQDSLAKRCVCVSNTIRSLSFVPGNDFEMSKHPGLLLILGKLILLHHKHPERKQAPLTYEKEEEQDQGVSCNKVEWWWDCLEMLRENTLVTLANISGQLDLSPYPESICLPVLDGLLHWAVCPSAEAQDPFSTLGPNAVLSPQRLVLETLSKLSIQDNNVDLILATPPFSRLEKLYSTMVRFLSDRKNPVCREMAVVLLANLAQGDSLAARAIAVQKGSIGNLLGFLEDSLAATQFQQSQASLLHMQNPPFEPTSVDMMRRAARALLALAKVDENHSEFTLYESRLLDISVSPLMNSLVSQVICDVLFLIGQS

SEQ ID NO: 6806 - protein, 144 aa, Homo sapiens
  Payload ID: 1461;
  Gene Symbol: ARID1A;
  Gene Name: AT rich interactive domain 1A (SWI-like);
  ENSP ID: ENSP00000432368
  MOD_RES (1)..(1): Any amino acid
XPYGSMRKAPGSDPFMSSGQGPNGGMGDPYSRAAGPGLGNVAMGPRQHYPYGGPYDRVRTEPGIGPEGNMSTGAPQPNLMPSNPDSGMYSPSRYPPQQQQQQQQRHDSYGNQFSTQGTPSGSPFPSQQTTMYQQQQQEPRRHGG

SEQ ID NO: 6807 - protein, 122 aa, Homo sapiens
  Payload ID: 1461;
  Gene Symbol: ARID1A;
  Gene Name: AT rich interactive domain 1A (SWI-like);
  ENSP ID: ENSP00000432473
MDQMGKMRPQPYGGTNPYSQQQGPPSGPQQGHGYPGQPYGSQTPQRYPMTMQGRAQSAMGGLSYTQQIPPYGQQGPSGYGQQGQTPYYNQQSPHPQQQQPPYSQQPPSQTPHAQPSYQQQPQ

SEQ ID NO: 6808 - protein, 188 aa, Homo sapiens
  Payload ID: 1461;
  Gene Symbol: ARID1A;
  Gene Name: AT rich interactive domain 1A (SWI-like);
  ENSP ID: ENSP00000436692
  MOD_RES (1)..(1): Any amino acid
XGTRQPPYGPSAPVPPMTRPPPSNYQPPPSMQNHIPQVSSPAPLPRPMENRTSPSKSPFLHSGMKMQKAGPPVPASHIAPAPVQPPMIRRDITFPPGSVEATQPVLKQRRRLTMKDIGTPEAWRVMMSLKSGLLAESTWALDTINILLYDDNSIMTFNLSQISSMPVLCFLCLWARAQDFDSNNNLFT

SEQ ID NO: 6809 - protein, 1141 aa, Homo sapiens [sequence omitted]

SEQ ID NO: 6810 - protein, 2236 aa, Homo sapiens
  Payload ID: 1462;
  Gene Symbol: ARID1B;
  Gene Name: AT rich interactive domain 1B (SWI 1-like);
  Uniprot ID:  Q8NFD5;
  ENSP ID: ENSP00000055163
MAHNAGAAAAAGTHSAKSGGSEAALKEGGSAAALSSSSSSSAAAAAASSSSSSGPGSAMETGLLPNHKLKTVGEAPAAPPHQQHHHHHHAHHHHHHAHHLHHHHALQQQLNQFQQQQQQQQQQQQQQQQQQHPISNNNSLGGAGGGAPQPGPDMEQPQHGGAKDSAAGGQADPPGPPLLSKPGDEDDAPPKMGEPAGGRYEHPGLGALGTQQPPVAVPGGGGGPAAVPEFNNYYGSAAPASGGPGGRAGPCFDQHGGQQSPGMGMMHSASAAAAGAPGSMDPLQNSHEGYPNSQCNHYPGYSRPGAGGGGGGGGGGGGGSGGGGGGGGAGAGGAGAGAVAAAAAAAAAAAGGGGGGGYGGSSAGYGVLSSPRQQGGGMMMGPGGGGAASLSKAAAGSAAGGFQRFAGQNQHPSGATPTLNQLLTSPSPMMRSYGGSYPEYSSPSAPPPPPSQPQSQAAAAGAAAGGQQAAAGMGLGKDMGAQYAAASPAWAAAQQRSHPAMSPGTPGPTMGRSQGSPMDPMVMKRPQLYGMGSNPHSQPQQSSPYPGGSYGPPGPQRYPIGIQGRTPGAMAGMQYPQQQMPPQYGQQGVSGYCQQGQQPYYSQQPQPPHLPPQAQYLPSQSQQRYQPQQDMSQEGYGTRSQPPLAPGKPNHEDLNLIQQERPSSLPDLSGSIDDLPTGTEATLSSAVSASGSTSSQGDQSNPAQSPFSPHASPHLSSIPGGPSPSPVGSPVGSNQSRSGPISPASIPGSQMPPQPPGSQSESSSHPALSQSPMPQERGFMAGTQRNPQMAQYGPQQTGPSMSPHPSPGGQMHAGISSFQQSNSSGTYGPQMSQYGPQGNYSRPPAYSGVPSASYSGPGPGMGISANNQMHGQGPSQPCGAVPLGRMPSAGMQNRPFPGNMSSMTPSSPGMSQQGGPGMGPPMPTVNRKAQEAAAAVMQAAANSAQSRQGSFPGMNQSGLMASSSPYSQPMNNSSSLMNTQAPPYSMAPAMVNSSAASVGLADMMSPGESKLPLPLKADGKEEGTPQPESKSKKSSSSTTTGEKITKVYELGNEPERKLWVDRYLTFMEERGSPVSSLPAVGKKPLDLFRLYVCVKEIGGLAQVNKNKKWRELATNLNVGTSSSAASSLKKQYIQYLFAFECKIERGEEPPPEVFSTGDTKKQPKLQPPSPANSGSLQGPQTPQSTGSNSMAEVPGDLKPPTPASTPHGQMTPMQGGRSSTISVHDPFSDVSDSSFPKRNSMTPNAPYQQGMSMPDVMGRMPYEPNKDPFGGMRKVPGSSEPFMTQGQMPNSSMQDMYNQSPSGAMSNLGMGQRQQFPYGASYDRRHEPYGQQYPGQGPPSGQPPYGGHQPGLYPQQPNYKRHMDGMYGPPAKRHEGDMYNMQYSSQQQEMYNQYGGSYSGPDRRPIQGQYPYPYSRERMQGPGQIQTHGIPPQMMGGPLQSSSSEGPQQNMWAARNDMPYPYQNRQGPGGPTQAPPYPGMNRTDDMMVPDQRINHESQWPSHVSQRQPYMSSSASMQPITRPPQPSYQTPPSLPNHISRAPSPASFQRSLENRMSPSKSPFLPSMKMQKVMPTVPTSQVTGPPPQPPPIRREITFPPGSVEASQPVLKQRRKITSKDIVTPEAWRVMMSLKSGLLAESTWALDTINILLYDDSTVATFNLSQLSGFLELLVEYFRKCLIDIFGILMEYEVGDPSQKALDHNAARKDDSQSLADDSGKEEEDAECIDDDEEDEEDEEEDSEKTESDEKSSIALTAPDAAADPKEKPKQASKFDKLPIKIVKKNNLFVVDRSDKLGRVQEFNSGLLHWQLGGGDTTEHIQTHFESKMEIPPRRRPPPPLSSAGRKKEQEGKGDSEEQQEKSIIATIDDVLSARPGALPEDANPGPQTESSKFPFGIQQAKSHRNIKLLEDEPRSRDETPLCTIAHWQDSLAKRCICVSNIVRSLSFVPGNDAEMSKHPGLVLILGKLILLHHEHPERKRAPQTYEKEEDEDKGVACSKDEWWWDCLEVLRDNTLVTLANISGQLDLSAYTESICLPILDGLLHWMVCPSAEAQDPFPTVGPNSVLSPQRLVLETLCKLSIQDNNVDLILATPPFSRQEKFYATLVRYVGDRKNPVCREMSMALLSNLAQGDALAARAIAVQKGSIGNLISFLEDGVTMAQYQQSQHNLMHMQPPPLEPPSVDMMCRAAKALLAMARVDENRSEFLLHEGRLLDISISAVLNSLVASVICDVLFQIGQL

SEQ ID NO: 6811 - protein, 728 aa, Homo sapiens
  Payload ID: 1462;
  Gene Symbol: ARID1B;
  Gene Name: AT rich interactive domain 1B (SWI 1-like);
  ENSP ID: ENSP00000313006
QMPPQYGQQGVSGYCQQGQQPYYSQQPQPPHLPPQAQYLPSQSQQRYQPQQDMSQEGYGTRSQPPLAPGKPNHEDLNLIQQERPSSLPDLSGSIDDLPTGTEATLSSAVSASGSTSSQGDQSNPAQSPFSPHASPHLSSIPGGPSPSPVGSPVGSNQSRSGPISPASIPGSQMPPQPPGSQSESSSHPALSQSPMPQERGFMAGTQRNPQMAQYGPQQTGPSMSPHPSPGGQMHAGISSFQQSNSSGTYGPQMSQYGPQGNYSRPPAYSGVPSASYSGPGPGMGISANNQMHGQGPSQPCGAVPLGRMPSAGMQNRPFPGNMSSMTPSSPGMSQQGGPGMGPPMPTVNRKAQEAAAAVMQAAANSAQSRQGSFPGMNQSGLMASSSPYSQPMNNSSSLMNTQAPPYSMAPAMVNSSAASVGLADMMSPGESKLPLPLKADGKEEGTPQPESKSKDSYSSQGISQPPTPGNLPVPSPMSPSSASISSFHGDESDSISSPGWPKTPSSPKSSSSTTTGEKITKVYELGNEPERKLWVDRYLTFMEERGSPVSSLPAVGKKPLDLFRLYVCVKEIGGLAQVNKNKKWRELATNLNVGTSSSAASSLKKQYIQYLFAFECKIERGEEPPPEVFSTGDTKKQPKLQPPSPVVQMEPRACDTGGSGRKASWSRPAPRARAGGSRHTQASGGRRQRHPGLQKPLDSLPPTQQVASPIPVPSLGKVSGNIFVVKGK

SEQ ID NO: 6812 - protein, 2249 aa, Homo sapiens
  Payload ID: 1462;
  Gene Symbol: ARID1B;
  Gene Name: AT rich interactive domain 1B (SWI 1-like);
  Uniprot ID:  Q8NFD5;
  ENSP ID: ENSP00000344546
MAHNAGAAAAAGTHSAKSGGSEAALKEGGSAAALSSSSSSSAAAAAASSSSSSGPGSAMETGLLPNHKLKTVGEAPAAPPHQQHHHHHHAHHHHHHAHHLHHHHALQQQLNQFQQQQQQQQQQQQQQQQQQHPISNNNSLGGAGGGAPQPGPDMEQPQHGGAKDSAAGGQADPPGPPLLSKPGDEDDAPPKMGEPAGGRYEHPGLGALGTQQPPVAVPGGGGGPAAVPEFNNYYGSAAPASGGPGGRAGPCFDQHGGQQSPGMGMMHSASAAAAGAPGSMDPLQNSHEGYPNSQCNHYPGYSRPGAGGGGGGGGGGGGGSGGGGGGGGAGAGGAGAGAVAAAAAAAAAAAGGGGGGGYGGSSAGYGVLSSPRQQGGGMMMGPGGGGAASLSKAAAGSAAGGFQRFAGQNQHPSGATPTLNQLLTSPSPMMRSYGGSYPEYSSPSAPPPPPSQPQSQAAAAGAAAGGQQAAAGMGLGKDMGAQYAAASPAWAAAQQRSHPAMSPGTPGPTMGRSQGSPMDPMVMKRPQLYGMGSNPHSQPQQSSPYPGGSYGPPGPQRYPIGIQGRTPGAMAGMQYPQQQDSGDATWKETFWLMPPQYGQQGVSGYCQQGQQPYYSQQPQPPHLPPQAQYLPSQSQQRYQPQQDMSQEGYGTRSQPPLAPGKPNHEDLNLIQQERPSSLPDLSGSIDDLPTGTEATLSSAVSASGSTSSQGDQSNPAQSPFSPHASPHLSSIPGGPSPSPVGSPVGSNQSRSGPISPASIPGSQMPPQPPGSQSESSSHPALSQSPMPQERGFMAGTQRNPQMAQYGPQQTGPSMSPHPSPGGQMHAGISSFQQSNSSGTYGPQMSQYGPQGNYSRPPAYSGVPSASYSGPGPGMGISANNQMHGQGPSQPCGAVPLGRMPSAGMQNRPFPGNMSSMTPSSPGMSQQGGPGMGPPMPTVNRKAQEAAAAVMQAAANSAQSRQGSFPGMNQSGLMASSSPYSQPMNNSSSLMNTQAPPYSMAPAMVNSSAASVGLADMMSPGESKLPLPLKADGKEEGTPQPESKSKKSSSSTTTGEKITKVYELGNEPERKLWVDRYLTFMEERGSPVSSLPAVGKKPLDLFRLYVCVKEIGGLAQVNKNKKWRELATNLNVGTSSSAASSLKKQYIQYLFAFECKIERGEEPPPEVFSTGDTKKQPKLQPPSPANSGSLQGPQTPQSTGSNSMAEVPGDLKPPTPASTPHGQMTPMQGGRSSTISVHDPFSDVSDSSFPKRNSMTPNAPYQQGMSMPDVMGRMPYEPNKDPFGGMRKVPGSSEPFMTQGQMPNSSMQDMYNQSPSGAMSNLGMGQRQQFPYGASYDRRHEPYGQQYPGQGPPSGQPPYGGHQPGLYPQQPNYKRHMDGMYGPPAKRHEGDMYNMQYSSQQQEMYNQYGGSYSGPDRRPIQGQYPYPYSRERMQGPGQIQTHGIPPQMMGGPLQSSSSEGPQQNMWAARNDMPYPYQNRQGPGGPTQAPPYPGMNRTDDMMVPDQRINHESQWPSHVSQRQPYMSSSASMQPITRPPQPSYQTPPSLPNHISRAPSPASFQRSLENRMSPSKSPFLPSMKMQKVMPTVPTSQVTGPPPQPPPIRREITFPPGSVEASQPVLKQRRKITSKDIVTPEAWRVMMSLKSGLLAESTWALDTINILLYDDSTVATFNLSQLSGFLELLVEYFRKCLIDIFGILMEYEVGDPSQKALDHNAARKDDSQSLADDSGKEEEDAECIDDDEEDEEDEEEDSEKTESDEKSSIALTAPDAAADPKEKPKQASKFDKLPIKIVKKNNLFVVDRSDKLGRVQEFNSGLLHWQLGGGDTTEHIQTHFESKMEIPPRRRPPPPLSSAGRKKEQEGKGDSEEQQEKSIIATIDDVLSARPGALPEDANPGPQTESSKFPFGIQQAKSHRNIKLLEDEPRSRDETPLCTIAHWQDSLAKRCICVSNIVRSLSFVPGNDAEMSKHPGLVLILGKLILLHHEHPERKRAPQTYEKEEDEDKGVACSKDEWWWDCLEVLRDNTLVTLANISGQLDLSAYTESICLPILDGLLHWMVCPSAEAQDPFPTVGPNSVLSPQRLVLETLCKLSIQDNNVDLILATPPFSRQEKFYATLVRYVGDRKNPVCREMSMALLSNLAQGDALAARAIAVQKGSIGNLISFLEDGVTMAQYQQSQHNLMHMQPPPLEPPSVDMMCRAAKALLAMARVDENRSEFLLHEGRLLDISISAVLNSLVASVICDVLFQIGQL

SEQ ID NO: 6813 - protein, 273 aa, Homo sapiens
  Payload ID: 1462;
  Gene Symbol: ARID1B;
  Gene Name: AT rich interactive domain 1B (SWI 1-like);
  ENSP ID: ENSP00000383596
AAVMQAAANSAQSRQGSFPGMNQSGLMASSSPYSQPMNNSSSLMNTQAPPYSMAPAMVNSSAASVGLADMMSPGESKLPLPLKADGKEEGTPQPESKSKKSSSSTTTGEKITKVYELGNEPERKLWVDRYLTFMEERGSPVSSLPAVGKKPLDLFRLYVCVKEIGGLAQVNKNKKWRELATNLNVGTSSSAASSLKKQYIQYLFAFECKIERGEEPPPEVFSTGDTKKQPKLQPPSPGKWRRCSHWPRKAQAPGLGGSGKVVSQSGQQGTWDF

SEQ ID NO: 6814 - protein, 1758 aa, Homo sapiens
  Payload ID: 1462;
  Gene Symbol: ARID1B;
  Gene Name: AT rich interactive domain 1B (SWI 1-like);
  ENSP ID: ENSP00000412835
SPGTPGPTMGRSQGSPMDPMVMKRPQLYGMGSNPHSQPQQSSPYPGGSYGPPGPQRYPIGIQGRTPGAMAGMQYPQQQMPPQYGQQGVSGYCQQGQQPYYSQQPQPPHLPPQAQYLPSQSQQRYQPQQDMSQEGYGTRSQPPLAPGKPNHEDLNLIQQERPSSLPDLSGSIDDLPTGTEATLSSAVSASGSTSSQGDQSNPAQSPFSPHASPHLSSIPGGPSPSPVGSPVGSNQSRSGPISPASIPGFMAGTQRNPQMAQYGPQQTGPSMSPHPSPGGQMHAGISSFQQSNSSGTYGPQMSQYGPQGNYSRPPAYSGVPSASYSGPGPGMGISANNQMHGQGPSQPCGAVPLGRMPSAGMQNRPFPGNMSSMTPSSPGMSQQGGPGMGPPMPTVNRKAQEAAAAVMQAAANSAQSRQGSFPGMNQSGLMASSSPYSQPMNNSSSLMNTQAPPYSMAPAMVNSSAASVGLADMMSPGESKLPLPLKADGKEEGTPQPESKSKDSYSSQGISQPPTPGNLPVPSPMSPSSASISSFHGDESDSISSPGWPKTPSSPKSSSSTTTGEKITKVYELGNEPERKLWVDRYLTFMEERGSPVSSLPAVGKKPLDLFRLYVCVKEIGGLAQVNKNKKWRELATNLNVGTSSSAASSLKKQYIQYLFAFECKIERGEEPPPEVFSTGDTKKQPKLQPPSPANSGSLQGPQTPQSTGSNSMAEVPGDLKPPTPASTPHGQMTPMQGGRSSTISVHDPFSDVSDSSFPKRNSMTPNAPYQQGMSMPDVMGRMPYEPNKDPFGGMRKVPGSSEPFMTQGQMPNSSMQDMYNQSPSGAMSNLGMGQRQQFPYGASYDRRHEPYGQQYPGQGPPSGQPPYGGHQPGLYPQQPNYKRHMDGMYGPPAKRHEGDMYNMQYSSQQQEMYNQYGGSYSGPDRRPIQGQYPYPYSRERMQGPGQIQTHGIPPQMMGGPLQSSSSEGPQQNMWAARNDMPYPYQNRQGPGGPTQAPPYPGMNRTDDMMVPDQRINHESQWPSHVSQRQPYMSSSASMQPITRPPQPSYQTPPSLPNHISRAPSPASFQRSLENRMSPSKSPFLPSMKMQKVMPTVPTSQVTGPPPQPPPIRREITFPPGSVEASQPVLKQRRKITSKDIVTPEAWRVMMSLKSGLLAESTWALDTINILLYDDSTVATFNLSQLSGFLELLVEYFRKCLIDIFGILMEYEVGDPSQKALDHNAARKDDSQSLADDSGKEEEDAECIDDDEEDEEDEEEDSEKTESDEKSSIALTAPDAAADPKEKPKQASKFDKLPIKIVKKNNLFVVDRSDKLGRVQEFNSGLLHWQLGGGDTTEHIQTHFESKMEIPPRRRPPPPLSSAGRKKEQEGKGDSEEQQEKSIIATIDDVLSARPGALPEDANPGPQTESSKFPFGIQQAKSHRNIKLLEDEPRSRDETPLCTIAHWQDSLAKRCICVSNIVRSLSFVPGNDAEMSKHPGLVLILGKLILLHHEHPERKRAPQTYEKEEDEDKGVACSKDEWWWDCLEVLRDNTLVTLANISGQLDLSAYTESICLPILDGLLHWMVCPSAEAQDPFPTVGPNSVLSPQRLVLETLCKLSIQDNNVDLILATPPFSRQEKFYATLVRYVGDRKNPVCREMSMALLSNLAQGDALAARAIAVQKGSIGNLISFLEDGVTMAQYQQSQHNLMHMQPPPLEPPSVDMMCRAAKALLAMARVDENRSEFLLHEGRLLDISISAVLNSLVASVICDVLFQIGQL

SEQ ID NO: 6815 - protein, 306 aa, Homo sapiens
  Payload ID: 1462;
  Gene Symbol: ARID1B;
  Gene Name: AT rich interactive domain 1B (SWI 1-like);
  ENSP ID: ENSP00000488727
  MOD_RES (1)..(1): Any amino acid
XRPFPGNMSSMTPSSPGMSQQGGPGMGPPMPTVNRKAQEAAAAVMQAAANSAQSRPPYIRSPAYPSQSGAGGRPMFSSQHPNYGNSQAPMVHQPDQYGQGSFPGMNQSGLMASSSPYSQPMNNSSSLMNTQAPPYSMAPAMVNSSAASVGLADMMSPGESKLPLPLKADGKEEGTPQPESKSKDSYSSQGISQPPTPGNLPVPSPMSPSSASISSFHGDESDSISSPGWPKTPSSPKSSSSTTTGEKITKVYELGNEPERKLWVDRYLTFMEERGSPVSSLPAVGKKPLDLFRLYVCVKEIGGLAQ

SEQ ID NO: 6816 - protein, 1835 aa, Homo sapiens
  Payload ID: 1463;
  Gene Symbol: ARID2;
  Gene Name: AT rich interactive domain 2 (ARID, RFX-like);
  Uniprot ID:  Q68CP9;
  ENSP ID: ENSP00000335044
MANSTGKAPPDERRKGLAFLDELRQFHHSRGSPFKKIPAVGGKELDLHGLYTRVTTLGGFAKVSEKNQWGEIVEEFNFPRSCSNAAFALKQYYLRYLEKYEKVHHFGEDDDEVPPGNPKPQLPIGAIPSSYNYQQHSVSDYLRQSYGLSMDFNSPNDYNKLVLSLLSGLPNEVDFAINVCTLLSNESKHVMQLEKDPKIITLLLANAGVFDDTLGSFSTVFGEEWKEKTDRDFVKFWKDIVDDNEVRDLISDRNKSHEGTSGEWIWESLFHPPRKLGINDIEGQRVLQIAVILRNLSFEEGNVKLLAANRTCLRFLLLSAHSHFISLRQLGLDTLGNIAAELLLDPVDFKTTHLMFHTVTKCLMSRDRFLKMRGMEILGNLCKAEDNGVLICEYVDQDSYREIICHLTLPDVLLVISTLEVLYMLTEMGDVACTKIAKVEKSIDMLVCLVSMDIQMFGPDALAAVKLIEHPSSSHQMLSEIRPQAIEQVQTQTHVASAPASRAVVAQHVAPPPGIVEIDSEKFACQWLNAHFEVNPDCSVSRAEMYSEYLSTCSKLARGGILTSTGFYKCLRTVFPNHTVKRVEDSSSNGQAHIHVVGVKRRAIPLPIQMYYQQQPVSTSVVRVDSVPDVSPAPSPAGIPHGSQTIGNHFQRTPVANQSSNLTATQMSFPVQGVHTVAQTVSRIPQNPSPHTHQQQNAPVTVIQSKAPIPCEVVKATVIQNSIPQTGVPVSIAVGGGPPQSSVVQNHSTGPQPVTVVNSQTLLHHPSVIPQQSPLHTVVPGQIPSGTPVTVIQQAVPQSHMFGRVQNIPACTSTVSQGQQLITTSPQPVQTSSQQTSAGSQSQDTVIIAPPQYVTTSASNIVSATSVQNFQVATGQMVTIAGVPSPQASRVGFQNIAPKPLPSQQVSSTVVQQPIQQPQQPTQQSVVIVSQPAQQGQTYAPAIHQIVLANPAALPAGQTVQLTGQPNITPSSSPSPVPATNNQVPTAMSSSSTPQSQGPPPTVSQMLSVKRQQQQQHSPAPPPQQVQVQVQQPQQVQMQVQPQQSNAGVGQPASGESSLIKQLLLPKRGPSTPGGKLILPAPQIPPPNNARAPSPQVVYQVASNQAAGFGVQGQTPAQQLLVGQQNVQLVPSAMPPSGGVQTVPISNLQILPGPLISNSPATIFQGTSGNQVTITVVPNTSFAPATVSQGNATQLIAPAGITMSGTQTGVGLPVQTLPATQASPAGQSSCTTATPPFKGDKIICQKEEEAKEATGLHVHERKIEVMENPSCRRGATNTSNGDTKENEMHVGSLLNGRKYSDSSLPPSNSGKIQSETNQCSLISNGPSLELGENGASGKQNSEQIDMQDIKSDLRKPLVNGICDFDKGDGSHLSKNIPNHKTSNHVGNGEISPMEPQGTLDITQQDTAKGDQLERISNGPVLTLGGSSVSSIQEASNAATQQFSGTDLLNGPLASSLNSDVPQQRPSVVVSPHSTTSVIQGHQIIAVPDSGSKVSHSPALSSDVRSTNGTAECKTVKRPAEDTDRETVAGIPNKVGVRIVTISDPNNAGCSATMVAVPAGADPSTVAKVAIESAVQQKQQHPPTYVQNVVPQNTPMPPSPAVQVQGQPNSSQPSPFSGSSQPGDPMRKPGQNFMCLWQSCKKWFQTPSQVFYHAATEHGGKDVYPGQCLWEGCEPFQRQRFSFITHLQDKHCSKDALLAGLKQDEPGQAGSQKSSTKQPTVGGTSSTPRAQKAIVNHPSAALMALRRGSRNLVFRDFTDEKEGPITKHIRLTAALILKNIGKYSECGRRLLKRHENNLSVLAISNMEASSTLAKCLYELNFTVQSKEQEKDSEMLQ

SEQ ID NO: 6817 - protein, 401 aa, Homo sapiens
  Payload ID: 1463;
  Gene Symbol: ARID2;
  Gene Name: AT rich interactive domain 2 (ARID, RFX-like);
  ENSP ID: ENSP00000388357
MEPQGTLDITQQDTAKGDQLERISNGPVLTLGGSSVSSIQEASNAATQQFSGTDLLNGPLASSLNSDVPQQRPSVVVSPHSTTSVIQGHQIIAVPDSGSKVSHSPALSSDVRSTNGTAECKTVKRPAEDTDRETVAGIPNKVGVRIVTISDPNNAGCSATMVAVPAGADPSTVAKVAIESAVQQKQQHPPTYVQNVVPQNTPMPPSPAVQVQGQPNSSQPSPFSGSSQPGDPMRKPGQNFMCLWQSCKKWFQTPSQVFYHAATEHGGKDVYPGQCLWEGCEPFQRQRFSFITHLQDKHCSKDALLAGLKQDEPGQAGSQKSSTKQPTVGGTSSTPRAQKAIVNHPSAALMALRRGSRNLVFRDFTDEKEGPITKHIRLTAALILKNIGKYSECGRRNMNED

SEQ ID NO: 6818 - protein, 1445 aa, Homo sapiens
  Payload ID: 1463;
  Gene Symbol: ARID2;
  Gene Name: AT rich interactive domain 2 (ARID, RFX-like);
  ENSP ID: ENSP00000397307
MRGMEILGNLCKAEDNGVLICEYVDQDSYREIICHLTLPDVLLVISTLEVLYMLTEMGDVACTKIAKVEKSIAAVKLIEHPSSSHQMLSEIRPQAIEQVQTQTHVASAPASRAVVAQHVAPPPGIVEIDSEKFACQWLNAHFEVNPDCSVSRAEMYSEYLSTCSKLARGGILTSTGFYKCLRTVFPNHTVKRVEDSSSNGQAHIHVVGVKRRAIPLPIQMYYQQQPVSTSVVRVDSVPDVSPAPSPAGIPHGSQTIGNHFQRTPVANQSSNLTATQMSFPVQGVHTVAQTVSRIPQNPSPHTHQQQNAPVTVIQSKAPIPCEVVKATVIQNSIPQTGVPVSIAVGGGPPQSSVVQNHSTGPQPVTVVNSQTLLHHPSVIPQQSPLHTVVPGQIPSGTPVTVIQQAVPQSHMFGRVQNIPACTSTVSQGQQLITTSPQPVQTSSQQTSAGSQSQDTVIIAPPQYVTTSASNIVSATSVQNFQVATGQMVTIAGVPSPQASRVGFQNIAPKPLPSQQVSSTVVQQPIQQPQQPTQQSVVIVSQPAQQGQTYAPAIHQIVLANPAALPAGQTVQLTGQPNITPSSSPSPVPATNNQVPTAMSSSSTPQSQGPPPTVSQMLSVKRQQQQQHSPAPPPQQVQVQVQQPQQVQMQVQPQQSNAGVGQPASGESSLIKQLLLPKRGPSTPGGKLILPAPQIPPPNNARAPSPQVVYQVASNQAAGFGVQGQTPAQQLLVGQQNVQLVPSAMPPSGGVQTVPISNLQILPGPLISNSPATIFQGTSGNQVTITVVPNTSFAPATVSQGNATQLIAPAGITMSGTQTGVGLPVQTLPATQASPAGQSSCTTATPPFKGDKIICQKEEEAKEATGLHVHERKIEVMENPSCRRGATNTSNGDTKENEMHVGSLLNGRKYSDSSLPPSNSGKIQSETNQCSLISNGPSLELGENGASGKQNSEQIDMQDIKSDLRKPLVNGICDFDKGDGSHLSKNIPNHKTSNHVGNGEISPMEPQGTLDITQQDTAKGDQLERISNGPVLTLGGSSVSSIQEASNAATQQFSGTDLLNGPLASSLNSDVPQQRPSVVVSPHSTTSVIQGHQIIAVPDSGSKVSHSPALSSDVRSTNGTAECKTVKRPAEDTDRETVAGIPNKVGVRIVTISDPNNAGCSATMVAVPAGADPSTVAKVAIESAVQQKQQHPPTYVQNVVPQNTPMPPSPAVQVQGQPNSSQPSPFSGSSQPGDPMRKPGQNFMCLWQSCKKWFQTPSQVFYHAATEHGGKDVYPGQCLWEGCEPFQRQRFSFITHLQDKHCSKDALLAGLKQDEPGQAGSQKSSTKQPTVGGTSSTPRAQKAIVNHPSAALMALRRGSRNLVFRDFTDEKEGPITKHIRLTAALILKNIGKYSECGRRLLKRHENNLSVLAISNMEASSTLAKCLYELNFTVQSKEQEKDSEMLQ

SEQ ID NO: 6819 - protein, 1639 aa, Homo sapiens
  Payload ID: 1463;
  Gene Symbol: ARID2;
  Gene Name: AT rich interactive domain 2 (ARID, RFX-like);
  ENSP ID: ENSP00000415650
MDFNSPNDYNKLVLSLLSGLPNEVDFAINVCTLLSNESKHVMQLEKDPKIITLLLANAGVFDDTLGSFSTVFGEEWKEKTDRDFVKFWKDIVDDNEVRDLISDRNKSHEGTSGEWIWESLFHPPRKLGINDIEGQRVLQIAVILRNLSFEEGNVKLLAANRTCLRFLLLSAHSHFISLRQLGLDTLGNIAAELLLDPVDFKTTHLMFHTVTKCLMSRDRFLKMRGMEILGNLCKAEDNGVLICEYVDQDSYREIICHLTLPDVLLVISTLEVLYMLTEMGDVACTKIAKVEKSIDMLVCLVSMDIQMFGPDALAAVKLIEHPSSSHQMLSEIRPQAIEQVQTQTHVASAPASRAVVAQHVAPPPGIVEIDSEKFACQWLNAHFEVNPDCSVSRAEMYSEYLSTCSKLARGGILTSTGFYKCLRTVFPNHTVKRVEDSSSNGQAHIHVVGVKRRAIPLPIQMYYQQQPVSTSVVRVDSVPDVSPAPSPAGIPHGSQTIGNHFQRTPVANQSSNLTATQMSFPVQGVHTVAQTVSRIPQNPSPHTHQQQNAPVTVIQSKAPIPCEVVKATVIQNSIPQTGVPVSIAVGGGPPQSSVVQNHSTGPQPVTVVNSQTLLHHPSVIPQQSPLHTVVPGQIPSGTPVTVIQQAVPQSHMFGRVQNIPACTSTVSQGQQLITTSPQPVQTSSQQTSAGSQSQDTVIIAPPQYVTTSASNIVSATSVQNFQVATGQMVTIAGVPSPQASRVGFQNIAPKPLPSQQVSSTVVQQPIQQPQQPTQQSVVIVSQPAQQGQTYAPAIHQIVLANPAALPAGQTVQLTGQPNITPSSSPSPVPATNNQVPTAMSSSSTPQSQGPPPTVSQMLSVKRQQQQQHSPAPPPQQVQVQVQQPQQVQMQVQPQQSNAGVGQPASGESSLIKQLLLPKRGPSTPGGKLILPAPQIPPPNNARAPSPQVVYQVASNQAAGFGVQGQTPAQQLLVGQQNVQLVPSAMPPSGGVQTVPISNLQILPGPLISNSPATIFQGTSGNQVTITVVPNTSFAPATVSQGNATQLIAPAGITMSGTQTGVGLPVQTLPATQASPAGQSSCTTATPPFKGDKIICQKEEEAKEATGLHVHERKIEVMENPSCRRGATNTSNGDTKENEMHVGSLLNGRKYSDSSLPPSNSGKIQSETNQCSLISNGPSLELGENGASGKQNSEQIDMQDIKSDLRKPLVNGICDFDKGDGSHLSKNIPNHKTSNHVGNGEISPMEPQGTLDITQQDTAKGDQLERISNGPVLTLGGSSVSSIQEASNAATQQFSGTDLLNGPLASSLNSDVPQQRPSVVVSPHSTTSVIQGHQIIAVPDSGSKVSHSPALSSDVRSTNGTAECKTVKRPAEDTDRETVAGIPNKVGVRIVTISDPNNAGCSATMVAVPAGADPSTVAKVAIESAVQQKQQHPPTYVQNVVPQNTPMPPSPAVQVQGQPNSSQPSPFSGSSQPGDPMRKPGQNFMCLWQSCKKWFQTPSQVFYHAATEHGGKDVYPGQCLWEGCEPFQRQRFSFITHLQDKHCSKDALLAGLKQDEPGQAGSQKSSTKQPTVGGTSSTPRAQKAIVNHPSAALMALRRGSRNLVFRDFTDEKEGPITKHIRLTAALILKNIGKYSECGRR

SEQ ID NO: 6820 - protein, 64 aa, Homo sapiens
  Payload ID: 1463;
  Gene Symbol: ARID2;
  Gene Name: AT rich interactive domain 2 (ARID, RFX-like);
  ENSP ID: ENSP00000481488
  MOD_RES (1)..(1): Any amino acid
XGLKQDEPGQAGSQKSSTKQPTVGGTSSTPRAQKAIVNHPSAALMALRRGSRNLVFRDFTVSMP

SEQ ID NO: 6821 - protein, 593 aa, Homo sapiens
  Payload ID: 1464;
  Gene Symbol: ARID3A;
  Gene Name: AT rich interactive domain 3A (BRIGHT-like);
  Uniprot ID:  Q99856;
  ENSP ID: ENSP00000263620
MKLQAVMETLLQRQQRARQELEARQQLPPDPPAAPPGRARAAPDEDREPESARMQRAQMAALAAMRAAAAGLGHPASPGGSEDGPPGSEEEDAAREGTPGSPGRGREGPGEEHFEDMASDEDMKPKWEEEEMEEDLGEDEEEEEEDYEDEEEEEDEEGLGPPGPASLGTTALFPRKAQPPQAFRGDGVPRVLGGQERPGPGPAHPGGAAHVAPQLQPPDHGDWTYEEQFKQLYELDGDPKRKEFLDDLFSFMQKRGTPVNRIPIMAKQVLDLFMLYVLVTEKGGLVEVINKKLWREITKGLNLPTSITSAAFTLRTQYMKYLYPYECEKRGLSNPNELQAAIDSNRREGRRQSFGGSLFAYSPGGAHGMLSSPKLPVSSLGLAASTNGSSITPAPKIKKEEDSAIPITVPGRLPVSLAGHPVVAAQAAAVQAAAAQAAVAAQAAALEQLREKLESAEPPEKKMALVADEQQRLMQRALQQNFLAMAAQLPMSIRINSQASESRQDSAVNLTGTNGSNSISMSVEINGIMYTGVLFAQPPAPTPTSAPNKGGGGGGGSSSNAGGRGGNTGTSGGQAGPAGLSTPSTSTSNNSLP

SEQ ID NO: 6822 - protein, 96 aa, Homo sapiens
  Payload ID: 1464;
  Gene Symbol: ARID3A;
  Gene Name: AT rich interactive domain 3A (BRIGHT-like);
  ENSP ID: ENSP00000440911
  MOD_RES (1)..(1): Any amino acid
XFPRKAQPPQAFRGDGVPRVLGGQERPGPGPAHPGGAAHVAPQLQPPDHGDWTYEEQFKQLYELDGDPKRKEFLDDLFSFMQKRVQKLTRRGGRRL

SEQ ID NO: 6823 - protein, 338 aa, Homo sapiens
  Payload ID: 1464;
  Gene Symbol: ARID3A;
  Gene Name: AT rich interactive domain 3A (BRIGHT-like);
  ENSP ID: ENSP00000464969
EDEEGLGPPGPASLGTTALFPRKAQPPQAFRGDGVPRVLGGQERPGPGPAHPGGAAHVAPQLQPPDHGDWTYEEQFKQLYELDGDPKRKEFLDDLFSFMQKRGTPVNRIPIMAKQVLDLFMLYVLVTEKGGLVEVINKKLWREITKGLNLPTSITSAAFTLRTQYMKYLYPYECEKRGLSNPNELQAAIDSNRREGRRQSFGGSLFAYSPGGAHGMLSSPKLPVSSLGLAASTNGSSITPAPKIKKASESRQDSAVNLTGTNGSNSISMSVEINGIMYTGVLFAQPPAPTPTSAPNKGGGGGGGSSSNAGGRGGNTGTSGGQAGPAGLSTPSTSTSNN

SEQ ID NO: 6824 - protein, 560 aa, Homo sapiens
  Payload ID: 1465;
  Gene Symbol: ARID3B;
  Gene Name: AT rich interactive domain 3B (BRIGHT-like);
  Uniprot ID:  Q8IVW6;
  ENSP ID: ENSP00000343126
MEPLQQQQQQQQQQQKQPHLAPLQMDAREKQGQQMREAQFLYAQKLVTQPTLLSATAGRPSGSTPLGPLARVPPTAAVAQVFERGNMNSEPEEEDGGLEDEDGDDEVAEVAEKETQAASKYFHVQKVARQDPRVAPMSNLLPAPGLPPHGQQAKEDHTKDASKASPSVSTAGQPNWNLDEQLKQNGGLAWSDDADGGRGREISRDFAKLYELDGDPERKEFLDDLFVFMQKRGTPINRIPIMAKQILDLYMLYKLVTEKGGLVEIINKKIWREITKGLNLPTSITSAAFTLRTQYMKYLYAYECEKKALSSPAELQAAIDGNRREGRRPSYSSSLFGYSPAAATAAAAAGAPALLSPPKIRFPILGLGSSSGTNTSSPRISPATTLRKGDGAPVTTVPVPNRLAVPVTLASQQAGTRTAALEQLRERLESGEPAEKKASRLSEEEQRLVQQAFQRNFFSMARQLPMKIRINGREDRAEASAAALNLTTSSIGSINMSVDIDGTTYAGVLFAQKPVVHLITGSAPQSLGSSASSSSSSHCSPSPTSSRGTPSAEPSTSWSL

SEQ ID NO: 6825 - protein, 138 aa, Homo sapiens
  Payload ID: 1465;
  Gene Symbol: ARID3B;
  Gene Name: AT rich interactive domain 3B (BRIGHT-like);
  ENSP ID: ENSP00000455668
MAKQILDLYMLYKLVTEKGGLVEIINKKIWREITKGLNLPTSITSAAFTLRTQYMKYLYAYECEKKALSSPAELQAAIDGNRREGRRPSYSSSLFGYSPAAATAAAAAGAPALLSPPKIRFPILGLGSSSGTNTSSPR

SEQ ID NO: 6826 - protein, 561 aa, Homo sapiens
  Payload ID: 1465;
  Gene Symbol: ARID3B;
  Gene Name: AT rich interactive domain 3B (BRIGHT-like);
  Uniprot ID:  Q8IVW6;
  ENSP ID: ENSP00000477878
MEPLQQQQQQQQQQQKQPHLAPLQMDAREKQGQQMREAQFLYAQKLVTQPTLLSATAGRPSGSTPLGPLARVPPTAAVAQVFERGNMNSEPEEEDGGLEDEDGDDEVAEVAEKETQAASKYFHVQKVARQDPRVAPMSNLLPAPGLPPHGQQAKEDHTKDASKASPSVSTAGQPNWNLDEQLKQNGGLAWSDDADGGRGREISRDFAKLYELDGDPERKEFLDDLFVFMQKRGTPINRIPIMAKQILDLYMLYKLVTEKGGLVEIINKKIWREITKGLNLPTSITSAAFTLRTQYMKYLYAYECEKKALSSPAELQAAIDGNRREGRRPSYSSSLFGYSPAAATAAAAAGAPALLSPPKIRFPILGLGSSSGTNTSSPRISPATTLRKGDGAPVTTVPVPNRLAVPVTLASQQAGTRTAALEQLRERLESGEPAEKKASRLSEEEQRLVQQAFQRNFFSMARQLPMKIRINGRAEDRAEASAAALNLTTSSIGSINMSVDIDGTTYAGVLFAQKPVVHLITGSAPQSLGSSASSSSSSHCSPSPTSSRGTPSAEPSTSWSL

SEQ ID NO: 6827 - protein, 412 aa, Homo sapiens
  Payload ID: 1466;
  Gene Symbol: ARID3C;
  Gene Name: AT rich interactive domain 3C (BRIGHT-like);
  Uniprot ID:  A6NKF2;
  ENSP ID: ENSP00000368189
MEALQKQQAARLAQGVGPLAPACPLLPPQPPLPDHRTLQAPEGALGNVGAEEEEDAEEDEEKREEAGAEEEAAEESRPGAQGPSSPSSQPPGLHPHEWTYEEQFKQLYELDADPKRKEFLDDLFSFMQKRGTPVNRVPIMAKQVLDLYALFRLVTAKGGLVEVINRKVWREVTRGLSLPTTITSAAFTLRTQYMKYLYPYECETRALSSPGELQAAIDSNRREGRRQAYTATPLFGLAGPPPRGAQDPALGPGPAPPATQSSPGPAQGSTSGLPAHACAQLSPSPIKKEESGIPNPCLALPVGLALGPTREKLAPEEPPEKRAVLMGPMDPPRPCMPPSFLPRGKVPLREERLDGPLNLAGSGISSINMALEINGVVYTGVLFARRQPVPASQGPTNPAPPPSTGPPSSILP

SEQ ID NO: 6828 - protein, 1188 aa, Homo sapiens
  Payload ID: 1467;
  Gene Symbol: ARID4A;
  Gene Name: AT rich interactive domain 4A (RBP 1-like);
  Uniprot ID:  P29374;
  ENSP ID: ENSP00000344556
MKAADEPAYLTVGTDVSAKYRGAFCEAKIKTVKRLVKVKVLLKQDNTTQLVQDDQVKGPLRVGAIVETRTSDGSFQEAIISKLTDASWYTVVFDDGDERTLRRTSLCLKGERHFAESETLDQLPLTNPEHFGTPVIAKKTNRGRRSSLPVTEDEKEEESSEEEDEDKRRLNDELLGKVVSVVSATERTEWYPALVISPSCNDDITVKKDQCLVRSFIDSKFYSIARKDIKEVDILNLPESELSTKPGLQKASIFLKTRVVPDNWKMDISEILESSSSDDEDGPAEENDEEKEKEAKKTEEEVPEEELDPEERDNFLQQLYKFMEDRGTPINKPPVLGYKDLNLFKLFRLVYHQGGCDNIDSGAVWKQIYMDLGIPILNSAASYNVKTAYRKYLYGFEEYCRSANIQFRTVHHHEPKVKEEKKDLEESMEEALKLDQEMPLTEVKSEPEENIDSNSESEREEIELKSPRGRRRIARDVNSIKKEIEEEKTEDKLKDNDTENKDVDDDYETAEKKENELLLGRKNTPKQKEKKIKKQEDSDKDSDEEEEKSQEREETESKCDSEGEEDEEDMEPCLTGTKVKVKYGRGKTQKIYEASIKSTEIDDGEVLYLVHYYGWNVRYDEWVKADRIIWPLDKGGPKKKQKKKAKNKEDSEKDEKRDEERQKSKRGRPPLKSTLSSNMPYGLSKTANSEGKSDSCSSDSETEDALEKNLINEELSLKDELEKNENLNDDKLDEENPKISAHILKENDRTQMQPLETLKLEVGENEQIVQIFGNKMEKTEEVKKEAEKSPKGKGRRSKTKDLSLEIIKISSFGQNEAGSEPHIEAHSLELSSLDNKNFSSATEDEIDQCVKEKKLKRKILGQSSPEKKIRIENGMEMTNTVSQERTSDCIGSEGMKNLNFEQHFERENEGMPSLIAESNQCIQQLTSERFDSPAEETVNIPLKEDEDAMPLIGPETLVCHEVDLDDLDEKDKTSIEDVAVESSESNSLVSIPPALPPVVQHNFSVASPLTLSQDESRSVKSESDITIEVDSIAEESQEGLCERESANGFETNVASGTCSIIVQERESREKGQKRPSDGNSGLMAKKQKRTPKRTSAAAKNEKNGTDELDNMNSTERISFLQEKLQEIRKYYMSLKSEVATIDRRRKRLKKKDREVSHAGASMSSASSDTGMSPSSSSPPQNVLAVECR

SEQ ID NO: 6829 - protein, 1257 aa, Homo sapiens
  Payload ID: 1467;
  Gene Symbol: ARID4A;
  Gene Name: AT rich interactive domain 4A (RBP 1-like);
  Uniprot ID:  P29374;
  ENSP ID: ENSP00000347602
MKAADEPAYLTVGTDVSAKYRGAFCEAKIKTVKRLVKVKVLLKQDNTTQLVQDDQVKGPLRVGAIVETRTSDGSFQEAIISKLTDASWYTVVFDDGDERTLRRTSLCLKGERHFAESETLDQLPLTNPEHFGTPVIAKKTNRGRRSSLPVTEDEKEEESSEEEDEDKRRLNDELLGKVVSVVSATERTEWYPALVISPSCNDDITVKKDQCLVRSFIDSKFYSIARKDIKEVDILNLPESELSTKPGLQKASIFLKTRVVPDNWKMDISEILESSSSDDEDGPAEENDEEKEKEAKKTEEEVPEEELDPEERDNFLQQLYKFMEDRGTPINKPPVLGYKDLNLFKLFRLVYHQGGCDNIDSGAVWKQIYMDLGIPILNSAASYNVKTAYRKYLYGFEEYCRSANIQFRTVHHHEPKVKEEKKDLEESMEEALKLDQEMPLTEVKSEPEENIDSNSESEREEIELKSPRGRRRIARDVNSIKKEIEEEKTEDKLKDNDTENKDVDDDYETAEKKENELLLGRKNTPKQKEKKIKKQEDSDKDSDEEEEKSQEREETESKCDSEGEEDEEDMEPCLTGTKVKVKYGRGKTQKIYEASIKSTEIDDGEVLYLVHYYGWNVRYDEWVKADRIIWPLDKGGPKKKQKKKAKNKEDSEKDEKRDEERQKSKRGRPPLKSTLSSNMPYGLSKTANSEGKSDSCSSDSETEDALEKNLINEELSLKDELEKNENLNDDKLDEENPKISAHILKENDRTQMQPLETLKLEVGENEQIVQIFGNKMEKTEEVKKEAEKSPKGKGRRSKTKDLSLEIIKISSFGQNEAGSEPHIEAHSLELSSLDNKNFSSATEDEIDQCVKEKKLKRKILGQSSPEKKIRIENGMEMTNTVSQERTSDCIGSEGMKNLNFEQHFERENEGMPSLIAESNQCIQQLTSERFDSPAEETVNIPLKEDEDAMPLIGPETLVCHEVDLDDLDEKDKTSIEDVAVESSESNSLVSIPPALPPVVQHNFSVASPLTLSQDESRSVKSESDITIEVDSIAEESQEGLCERESANGFETNVASGTCSIIVQERESREKGQKRPSDGNSGLMAKKQKRTPKRTSAAAKNEKNGTGQSSDSEDLPVLDNSSKCTPVKHLNVSKPQKLARSPARISPHIKDGEKDKHREKHPNSSPRTYKWSFQLNELDNMNSTERISFLQEKLQEIRKYYMSLKSEVATIDRRRKRLKKKDREVSHAGASMSSASSDTGMSPSSSSPPQNVLAVECR

SEQ ID NO: 6830 - protein, 1203 aa, Homo sapiens
  Payload ID: 1467;
  Gene Symbol: ARID4A;
  Gene Name: AT rich interactive domain 4A (RBP 1-like);
  Uniprot ID:  P29374;
  ENSP ID: ENSP00000378597
MKAADEPAYLTVGTDVSAKYRGAFCEAKIKTVKRLVKVKVLLKQDNTTQLVQDDQVKGPLRVGAIVETRTSDGSFQEAIISKLTDASWYTVVFDDGDERTLRRTSLCLKGERHFAESETLDQLPLTNPEHFGTPVIAKKTNRGRRSSLPVTEDEKEEESSEEEDEDKRRLNDELLGKVVSVVSATERTEWYPALVISPSCNDDITVKKDQCLVRSFIDSKFYSIARKDIKEVDILNLPESELSTKPGLQKASIFLKTRVVPDNWKMDISEILESSSSDDEDGPAEENDEEKEKEAKKTEEEVPEEELDPEERDNFLQQLYKFMEDRGTPINKPPVLGYKDLNLFKLFRLVYHQGGCDNIDSGAVWKQIYMDLGIPILNSAASYNVKTAYRKYLYGFEEYCRSANIQFRTVHHHEPKVKEEKKDLEESMEEALKLDQEMPLTEVKSEPEENIDSNSESEREEIELKSPRGRRRIARDVNSIKKEIEEEKTEDKLKDNDTENKDVDDDYETAEKKENELLLGRKNTPKQKEKKIKKQEDSDKDSDEEEEKSQEREETESKCDSEGEEDEEDMEPCLTGTKVKVKYGRGKTQKIYEASIKSTEIDDGEVLYLVHYYGWNVRYDEWVKADRIIWPLDKGGPKKKQKKKAKNKEDSEKDEKRDEERQKSKRGRPPLKSTLSSNMPYGLSKTANSEGKSDSCSSDSETEDALEKNLINEELSLKDELEKNENLNDDKLDEENPKISAHILKENDRTQMQPLETLKLEVGENEQIVQIFGNKMEKTEEVKKEAEKSPKGKGRRSKTKDLSLEIIKISSFGQNEAGSEPHIEAHSLELSSLDNKNFSSATEDEIDQCVKEKKLKRKILGQSSPEKKIRIENGMEMTNTVSQERTSDCIGSEGMKNLNFEQHFERENEGMPSLIAESNQCIQQLTSERFDSPAEETVNIPLKEDEDAMPLIGPETLVCHEVDLDDLDEKDKTSIEDVAVESSESNSLVSIPPALPPVVQHNFSVASPLTLSQDESRSVKSESDITIEVDSIAEESQEGLCERESANGFETNVASGTCSIIVQERESREKGQKRPSDGNSGLMAKKQKRTPKRTSAAAKNEKNGTGQSSDSEDLPVLDNSNELDNMNSTERISFLQEKLQEIRKYYMSLKSEVATIDRRRKRLKKKDREVSHAGASMSSASSDTGMSPSSSSPPQNVLAVECR

SEQ ID NO: 6831 - protein, 265 aa, Homo sapiens
  Payload ID: 1467;
  Gene Symbol: ARID4A;
  Gene Name: AT rich interactive domain 4A (RBP 1-like);
  ENSP ID: ENSP00000392567
MKVLLKQDNTTQLVQDDQVKGPLRVGAIVETRTSDGSFQEAIISKLTDASWYTVVFDDGDERTLRRTSLCLKGERHFAESETLDQLPLTNPEHFGTPVIAKKTNRGRRSSLPVTEDEKEEESSEEEDEDKRRLNDELLGKVVSVVSATERTEWYPALVISPSCNDDITVKKDQCLVRSFIDSKFYSIARKDIKEVDILNLPESELSTKPGLQKASIFLKTRVVPDNWKMDISEILESSSSDDEDGPAEENDEEKEKEAKKTEEEV

SEQ ID NO: 6832 - protein, 1188 aa, Homo sapiens; identical to SEQ ID NO: 6828
  Payload ID: 1467;
  Gene Symbol: ARID4A;
  Gene Name: AT rich interactive domain 4A (RBP 1-like);
  Uniprot ID:  P29374;
  ENSP ID: ENSP00000397368

SEQ ID NO: 6833 - protein, 40 aa, Homo sapiens
  Payload ID: 1467;
  Gene Symbol: ARID4A;
  Gene Name: AT rich interactive domain 4A (RBP 1-like);
  ENSP ID: ENSP00000410417
MKAADEPAYLTVGTDVSAKYRGAFCEAKIKTVKRLVKVKN

SEQ ID NO: 6834 - protein, 54 aa, Homo sapiens
  Payload ID: 1467;
  Gene Symbol: ARID4A;
  Gene Name: AT rich interactive domain 4A (RBP 1-like);
  ENSP ID: ENSP00000415872
MKAADEPAYLTVGTDVSAKYRGAFCEAKIKTVKRLVKVKVLLKQDNTTQLVQDD

SEQ ID NO: 6835 - protein, 748 aa, Homo sapiens
  Payload ID: 1467;
  Gene Symbol: ARID4A;
  Gene Name: AT rich interactive domain 4A (RBP 1-like);
  ENSP ID: ENSP00000416053
MEDRGTPINKPPVLGYKDLNLFKLFRLVYHQGGCDNIDSGAVWKQIYMDLGIPILNSAASYNVKTAYRKYLYGFEEYCRSANIQFRTVHHHEPKVKEEKKDLEESMEEALKLDQEMPLTEVKSEPEENIDSNSESEREEIELKSPRGRRRIARDVNSIKKEIEEEKTEDKLKDNDTENKDVDDDYETAEKKENELLLGRKNTPKQKEKKIKKQEDSDKDSDEEEEKSQEREETESKCDSEGEEDEEDMEPCLTGTKVKVKYGRGKTQKIYEASIKSTEIDDGEVLYLVHYYGWNVRYDEWVKADRIIWPLDKGGPKKKQKKKAKNKEDSEKDEKRDEERQKSKRGRPPLKSTLSSNMPYGLSKTANSEGKSDSCSSDSETEDALEKNLINEELSLKDELEKNENLNDDKLDEENPKISAHILKENDRTQMQPLETLKLEVGENEQIVQIFGNKMEKTEEVKKEAEKSPKGKGRRSKTKDLSLEIIKISSFGQNEAGSEPHIEAHSLELSSLDNKNFSSATEDEIDQCVKEKKLKRKILGQSSPEKKIRIENGMEMTNTVSQERTSDCIGSEGMKNLNFEQHFERENEGMPSLIAESNQCIQQLTSERFDSPAEETVNIPLKEDEDAMPLIGPETLVCHEVDLDDLDEKDKTSIEDVAVESSESNSLVSIPPALPPVVQHNFSVASPLTLSQDESRSVKSESDITIEVDSIAEESQEGLCERESANGFETNVASGTCSIIVQERESREK

SEQ ID NO: 6836 - protein, 1312 aa, Homo sapiens
  Payload ID: 1468;
  Gene Symbol: ARID4B;
  Gene Name: AT rich interactive domain 4B (RBP 1-like);
  Uniprot ID:  Q4LE39;
  ENSP ID: ENSP00000264183
MKALDEPPYLTVGTDVSAKYRGAFCEAKIKTAKRLVKVKVTFRHDSSTVEVQDDHIKGPLKVGAIVEVKNLDGAYQEAVINKLTDASWYTVVFDDGDEKTLRRSSLCLKGERHFAESETLDQLPLTNPEHFGTPVIGKKTNRGRRSNHIPEEESSSSSSDEDEDDRKQIDELLGKVVCVDYISLDKKKALWFPALVVCPDCSDEIAVKKDNILVRSFKDGKFTSVPRKDVHEITSDTAPKPDAVLKQAFEQALEFHKSRTIPANWKTELKEDSSSSEAEEEEEEEDDEKEKEDNSSEEEEEIEPFPEERENFLQQLYKFMEDRGTPINKRPVLGYRNLNLFKLFRLVHKLGGFDNIESGAVWKQVYQDLGIPVLNSAAGYNVKCAYKKYLYGFEEYCRSANIEFQMALPEKVVNKQCKECENVKEIKVKEENETEIKEIKMEEERNIIPREEKPIEDEIERKENIKPSLGSKKNLLESIPTHSDQEKEVNIKKPEDNENLDDKDDDTTRVDESLNIKVEAEEEKAKSGDETNKEEDEDDEEAEEEEEEEEEEEDEDDDDNNEEEEFECYPPGMKVQVRYGRGKNQKMYEASIKDSDVEGGEVLYLVHYCGWNVRYDEWIKADKIVRPADKNVPKIKHRKKIKNKLDKEKDKDEKYSPKNCKLRRLSKPPFQTNPSPEMVSKLDLTDAKNSDTAHIKSIEITSILNGLQASESSAEDSEQEDERGAQDMDNNGKEESKIDHLTNNRNDLISKEEQNSSSLLEENKVHADLVISKPVSKSPERLRKDIEVLSEDTDYEEDEVTKKRKDVKKDTTDKSSKPQIKRGKRRYCNTEECLKTGSPGKKEEKAKNKESLCMENSSNSSSDEDEEETKAKMTPTKKYNGLEEKRKSLRTTGFYSGFSEVAEKRIKLLNNSDERLQNSRAKDRKDVWSSIQGQWPKKTLKELFSDSDTEAAASPPHPAPEEGVAEESLQTVAEEESCSPSVELEKPPPVNVDSKPIEEKTVEVNDRKAEFPSSGSNSVLNTPPTTPESPSSVTVTEGSRQQSSVTVSEPLAPNQEEVRSIKSETDSTIEVDSVAGELQDLQSEGNSSPAGFDASVSSSSSNQPEPEHPEKACTGQKRVKDAQGGGSSSKKQKRSHKATVVNNKKKGKGTNSSDSEELSAGESITKSQPVKSVSTGMKSHSTKSPARTQSPGKCGKNGDKDPDLKEPSNRLPKVYKWSFQMSDLENMTSAERITILQEKLQEIRKHYLSLKSEVASIDRRRKRLKKKERESAATSSSSSSPSSSSITAAVMLTLAEPSMSSASQNGMSVECR

SEQ ID NO: 6837 - protein, 1226 aa, Homo sapiens
  Payload ID: 1468;
  Gene Symbol: ARID4B;
  Gene Name: AT rich interactive domain 4B (RBP 1-like);
  Uniprot ID:  Q4LE39;
  ENSP ID: ENSP00000264184
MKALDEPPYLTVGTDVSAKYRGAFCEAKIKTAKRLVKVKVTFRHDSSTVEVQDDHIKGPLKVGAIVEVKNLDGAYQEAVINKLTDASWYTVVFDDGDEKTLRRSSLCLKGERHFAESETLDQLPLTNPEHFGTPVIGKKTNRGRRSNHIPEEESSSSSSDEDEDDRKQIDELLGKVVCVDYISLDKKKALWFPALVVCPDCSDEIAVKKDNILVRSFKDGKFTSVPRKDVHEITSDTAPKPDAVLKQAFEQALEFHKSRTIPANWKTELKEDSSSSEAEEEEEEEDDEKEKEDNSSEEEEEIEPFPEERENFLQQLYKFMEDRGTPINKRPVLGYRNLNLFKLFRLVHKLGGFDNIESGAVWKQVYQDLGIPVLNSAAGYNVKCAYKKYLYGFEEYCRSANIEFQMALPEKVVNKQCKECENVKEIKVKEENETEIKEIKMEEERNIIPREEKPIEDEIERKENIKPSLGSKKNLLESIPTHSDQEKEVNIKKPEDNENLDDKDDDTTRVDESLNIKVEAEEEKAKSGYDEWIKADKIVRPADKNVPKIKHRKKIKNKLDKEKDKDEKYSPKNCKLRRLSKPPFQTNPSPEMVSKLDLTDAKNSDTAHIKSIEITSILNGLQASESSAEDSEQEDERGAQDMDNNGKEESKIDHLTNNRNDLISKEEQNSSSLLEENKVHADLVISKPVSKSPERLRKDIEVLSEDTDYEEDEVTKKRKDVKKDTTDKSSKPQIKRGKRRYCNTEECLKTGSPGKKEEKAKNKESLCMENSSNSSSDEDEEETKAKMTPTKKYNGLEEKRKSLRTTGFYSGFSEVAEKRIKLLNNSDERLQNSRAKDRKDVWSSIQGQWPKKTLKELFSDSDTEAAASPPHPAPEEGVAEESLQTVAEEESCSPSVELEKPPPVNVDSKPIEEKTVEVNDRKAEFPSSGSNSVLNTPPTTPESPSSVTVTEGSRQQSSVTVSEPLAPNQEEVRSIKSETDSTIEVDSVAGELQDLQSEGNSSPAGFDASVSSSSSNQPEPEHPEKACTGQKRVKDAQGGGSSSKKQKRSHKATVVNNKKKGKGTNSSDSEELSAGESITKSQPVKSVSTGMKSHSTKSPARTQSPGKCGKNGDKDPDLKEPSNRLPKVYKWSFQMSDLENMTSAERITILQEKLQEIRKHYLSLKSEVASIDRRRKRLKKKERESAATSSSSSSPSSSSITAAVMLTLAEPSMSSASQNGMSVECR

SEQ ID NO: 6838 - protein, 1312 aa, Homo sapiens; identical to SEQ ID NO: 6836
  Payload ID: 1468;
  Gene Symbol: ARID4B;
  Gene Name: AT rich interactive domain 4B (RBP 1-like);
  Uniprot ID:  Q4LE39;
  ENSP ID: ENSP00000355562

SEQ ID NO: 6839 - protein, 483 aa, Homo sapiens
  Payload ID: 1468;
  Gene Symbol: ARID4B;
  Gene Name: AT rich interactive domain 4B (RBP 1-like);
  ENSP ID: ENSP00000391497
MKALDEPPYLTVGTDVSAKYRGAFCEAKIKTAKRLVKVKVTFRHDSSTVEVQDDHIKGPLKVGAIVEVKNLDGAYQEAVINKLTDASWYTVVFDDGDEKTLRRSSLCLKGERHFAESETLDQLPLTNPEHFGTPVIGKKTNRGRRSNHIPEEESSSSSSDEDEDDRKQIDELLGKVVCVDYISLDKKKALWFPALVVCPDCSDEIAVKKDNILVRSFKDGKFTSVPRKDVHEITSDTAPKPDAVLKQAFEQALEFHKSRTIPANWKTELKEDSSSSEAEEEEEEEDDEKEKEDNSSEEEEEIEPFPEERENFLQQLYKFMEDRGTPINKRPVLGYRNLNLFKLFRLVHKLGGFDNIESGAVWKQVYQDLGIPVLNSAAGYNVKCAYKKYLYGFEEYCRSANIEFQMALPEKVVNKQCKECENVKEIKVKEENETEIKEIKMEEERNIIPREEKPIEDEIERKENIKPSLGSKKNLLESIPTHS

SEQ ID NO: 6840 - protein, 1153 aa, Homo sapiens
  Payload ID: 1468;
  Gene Symbol: ARID4B;
  Gene Name: AT rich interactive domain 4B (RBP 1-like);
  Uniprot ID:  Q4LE39;
  ENSP ID: ENSP00000394663
MKALDEPPYLTVGTDVSAKYRGAFCEAKIKTAKRLVKVKVTFRHDSSTVEVQDDHIKGPLKVGAIVEVKNLDGAYQEAVINKLTDASWYTVVFDDGDEKTLRRSSLCLKGERHFAESETLDQLPLTNPEHFGTPVIGKKTNRGRRSNHIPEEESSSSSSDEDEDDRKQIDELLGKVVCVDYISLDKKKALWFPALVVCPDCSDEIAVKKDNILVRSFKDGKFTSVPRKDVHEITSDTAPKPDAVLKQAFEQALEFHKSRTIPANWKTELKEDSSSSEAEEEEEEEDDEKEKEDNSSEEEEEIEPFPEERENFLQQLYKFMEDRGTPINKRPVLGYRNLNLFKLFRLVHKLGGFDNIESGAVWKQVYQDLGIPVLNSAAGYNVKCAYKKYLYGFEEYCRSANIEFQMALPEKVVNKQCKECENVKEIKVKEENETEIKEIKMEEERNIIPREEKPIEDEIERKENIKPSLGSKKNLLESIPTHSDQEKEVNIKKPEDNENLDDKDDDTTRVDESLNIKVEAEEEKAKSGDETNKEEDEDDEEAEEEEEEEEEEEDEDDDDNNEEEEFECYPPGMKVQVRYGRGKNQKMYEASIKDSDVEGGEVLYLVHYCGWNVRYDEWIKADKIVRPADKNVPKIKHRKKIKNKLDKEKDKDEKYSPKNCKLRRLSKPPFQTNPSPEMVSKLDLTDAKNSDTAHIKSIEITSILNGLQASESSAEDSEQEDERGAQDMDNNGKEESKIDHLTNNRNDLISKEEQNSSSLLEENKVHADLVISKPVSKSPERLRKDIEVLSEDTDYEEDEVTKKRKDVKKDTTDKSSKPQIKRGKRRYCNTEECLKTGSPGKKEEKAKNKESLCMENSSNSSSDEDEEETKAKMTPTKKYNGLEEKRKSLRTTGFYSGFSEVAEKRIKLLNNSDERLQNSRAKDRKDVWSSIQGQWPKKTLKELFSDSDTEAAASPPHPAPEEGVAEESLQTVAEEESCSPSVELEKPPPVNVDSKPIEEKTVEVNDRKAEFPSSGSNSVLNTPPTTPESPSSVTVTEGSRQQSSVTVSEPLAPNQEEVRSIKSETDSTIEVDSVAGELQDLQSEGNSSPAGFDASVSSSSSNQPEPEHPEKACTGQKRVKDAQGGGSSSKKQKRSHKATVVNNKKKGKGSAPH

SEQ ID NO: 6841 - protein, 553 aa, Homo sapiens
  Payload ID: 1468;
  Gene Symbol: ARID4B;
  Gene Name: AT rich interactive domain 4B (RBP 1-like);
  ENSP ID: ENSP00000416063
  MOD_RES (1)..(1): Any amino acid
XFECYPPGMKVQVRYDEWIKADKIVRPADKNVPKIKHRKKIKNKLDKEKDKDEKYSPKNCKLRRLSKPPFQTNPSPEMVSKLDLTDAKNSDTAHIKSIEITSILNGLQASESSAEDSEQEDERGAQDMDNNGKEESKIDHLTNNRNDLISKEEQNSSSLLEENKVHADLVISKPVSKSPERLRKDIEVLSEDTDYEEDEVTKKRKDVKKDTTDKSSKPQIKRGKRRYCNTEECLKTGSPGKKEEKAKNKESLCMENSSNSSSDEDEEETKAKMTPTKKYNGLEEKRKSLRTTGFYSGFSEVAEKRIKLLNNSDERLQNSRAKDRKDVWSSIQGQWPKKTLKELFSDSDTEAAASPPHPAPEEGVAEESLQTVAEEESCSPSVELEKPPPVNVDSKPIEEKTVEVNDRKAEFPSSGSNSVLNTPPTTPESPSSVTVTEGSRQQSSVTVSEPLAPNQEEVRSIKSETDSTIEVDSVAGELQDLQSEGNSSPAGFDASVSSSSSNQPEPEHPEKACTGQKRVKDAQGGGSSSKKQKRSHKATVVNNKKKGKGSKCE

SEQ ID NO: 6842 - protein, 696 aa, Homo sapiens
  Payload ID: 1468;
  Gene Symbol: ARID4B;
  Gene Name: AT rich interactive domain 4B (RBP 1-like);
  ENSP ID: ENSP00000420620
  MOD_RES (1)..(1): Any amino acid
XKNSDTAHIKSIEITSILNGLQASESSAEDSEQEDERGAQDMDNNGKEESKIDHLTNNRNDLISKEEQNSSSLLEENKVHADLVISKPVSKSPERLRKDIEVLSEDTDYEEDEVTKKRKDVKKDTTDKSSKPQIKRGKRRYCNTEECLKTGSPGKKEEKAKNKESLCMENSSNSSSDEDEEETKAKMTPTKKYNGLEEKRKSLRTTGFYSGFSEVAEKRIKLLNNSDERLQNSRAKDRKDVWSSIQGQWPKKTLKELFSDSDTEAAASPPHPAPEEGVAEESLQTVAEEESCSPSVELEKPPPVNVDSKPIEEKTVEVNDRKAEFPSSGSNSVLNTPPTTPESPSSVTVTEGSRQQSSVTVSEPLAPNQEEVRSIKSETDSTIEVDSVAGELQDLQSEGNSSPAGFDASVSSSSSNQPEPEHPEKACTGQKRVKDAQGGGSSSKKQKRSHKATVVNNKKKGKGTNSSDSEELSAGESITKSQPVKSVSTGMKSHSTKSPARTQSPGKCGKNGDKDPDLKEPSNRLPKVYKWSFQMSDLENMTSAERITILQEKLQEIRKHYLSLKSEVASIDRRRKRLKKKERESAATSSSSSSPSSSSITAAVMLTLAEPSMSSASQNGMLQPLPEDVLHSQNEAFLKRRGPPTDGDKPAPSPSASLRRRPAADCRRGGGVARERKCPEPGSASWRAAAVWESLE

SEQ ID NO: 6843 - protein, 594 aa, Homo sapiens
  Payload ID: 1469;
  Gene Symbol: ARID5A;
  Gene Name: AT rich interactive domain 5A (MRF 1-like);
  Uniprot ID:  Q03989;
  ENSP ID: ENSP00000350078
MAAPVKGNRKQSTEGDALDPPASPKPAGKQNGIQNPISLEDSPEAGGEREEEQEREEEQAFLVSLYKFMKERHTPIERVPHLGFKQINLWKIYKAVEKLGAYELVTGRRLWKNVYDELGGSPGSTSAATCTRRHYERLVLPYVRHLKGEDDKPLPTSKPRKQYKMAKENRGDDGATERPKKAKEERRMDQMMPGKTKADAADPAPLPSQEPPRNSTEQQGLASGSSVSFVGASGCPEAYKRLLSSFYCKGTHGIMSPLAKKKLLAQVSKVEALQCQEEGCRHGAEPQASPAVHLPESPQSPKGLTENSRHRLTPQEGLQAPGGSLREEAQAGPCPAAPIFKGCFYTHPTEVLKPVSQHPRDFFSRLKDGVLLGPPGKEGLSVKEPQLVWGGDANRPSAFHKGGSRKGILYPKPKACWVSPMAKVPAESPTLPPTFPSSPGLGSKRSLEEEGAAHSGKRLRAVSPFLKEADAKKCGAKPAGSGLVSCLLGPALGPVPPEAYRGTMLHCPLNFTGTPGPLKGQAALPFSPLVIPAFPAHFLATAGPSPMAAGLMHFPPTSFDSALRHRLCPASSAWHAPPVTTYAAPHFFHLNTKL

SEQ ID NO: 6844 - protein, 58 aa, Homo sapiens
  Payload ID: 1469;
  Gene Symbol: ARID5A;
  Gene Name: AT rich interactive domain 5A (MRF 1-like);
  ENSP ID: ENSP00000397286
MAAPVKGNRKQSTEGDALDPPASPKPAGKQNGIQNPISLELTCGRSTKQWRSWGPMSW

SEQ ID NO: 6845 - protein, 526 aa, Homo sapiens
  Payload ID: 1469;
  Gene Symbol: ARID5A;
  Gene Name: AT rich interactive domain 5A (MRF 1-like);
  ENSP ID: ENSP00000400785
MKERHTPIERVPHLGFKQINLWKIYKAVEKLGAYELVTGRRLWKNVYDELGGSPGSTSAATCTRRHYERLVLPYVRHLKGEDDKPLPTSKPRKQYKMAKENRGDDGATERPKKAKEERRMDQMMPGKTKADAADPAPLPSQEPPRNSTEQQGLASGSSVSFVGASGCPEAYKRLLSSFYCKGTHGIMSPLAKKKLLAQVSKVEALQCQEEGCRHGAEPQASPAVHLPESPQSPKGLTENSRHRLTPQEGLQAPGGSLREEAQAGPCPAAPIFKGCFYTHPTEVLKPVSQHPRDFFSRLKDGVLLGPPGKEGLSVKEPQLVWGGDANRPSAFHKGGSRKGILYPKPKACWVSPMAKVPAESPTLPPTFPSSPGLGSKRSLEEEGAAHSGKRLRAVSPFLKEADAKKCGAKPAGSGLVSCLLGPALGPVPPEAYRGTMLHCPLNFTGTPGPLKGQAALPFSPLVIPAFPAHFLATAGPSPMAAGLMHFPPTSFDSALRHRLCPASSAWHAPPVTTYAAPHFFHLNTKL

SEQ ID NO: 6846 - protein, 1188 aa, Homo sapiens
  Payload ID: 1470;
  Gene Symbol: ARID5B;
  Gene Name: AT rich interactive domain 5B (MRF 1-like);
  Uniprot ID:  Q14865;
  ENSP ID: ENSP00000279873
MEPNSLQWVGSPCGLHGPYIFYKAFQFHLEGKPRILSLGDFFFVRCTPKDPICIAELQLLWEERTSRQLLSSSKLYFLPEDTPQGRNSDHGEDEVIAVSEKVIVKLEDLVKWVHSDFSKWRCGFHAGPVKTEALGRNGQKEALLKYRQSTLNSGLNFKDVLKEKADLGEDEEETNVIVLSYPQYCRYRSMLKRIQDKPSSILTDQFALALGGIAVVSRNPQILYCRDTFDHPTLIENESICDEFAPNLKGRPRKKKPCPQRRDSFSGVKDSNNNSDGKAVAKVKCEARSALTKPKNNHNCKKVSNEEKPKVAIGEECRADEQAFLVALYKYMKERKTPIERIPYLGFKQINLWTMFQAAQKLGGYETITARRQWKHIYDELGGNPGSTSAATCTRRHYERLILPYERFIKGEEDKPLPPIKPRKQENSSQENENKTKVSGTKRIKHEIPKSKKEKENAPKPQDAAEVSSEQEKEQETLISQKSIPEPLPAADMKKKIEGYQEFSAKPLASRVDPEKDNETDQGSNSEKVAEEAGEKGPTPPLPSAPLAPEKDSALVPGASKQPLTSPSALVDSKQESKLCCFTESPESEPQEASFPSFPTTQPPLANQNETEDDKLPAMADYIANCTVKVDQLGSDDIHNALKQTPKVLVVQSFDMFKDKDLTGPMNENHGLNYTPLLYSRGNPGIMSPLAKKKLLSQVSGASLSSSYPYGSPPPLISKKKLIARDDLCSSLSQTHHGQSTDHMAVSRPSVIQHVQSFRSKPSEERKTINDIFKHEKLSRSDPHRCSFSKHHLNPLADSYVLKQEIQEGKDKLLEKRALPHSHMPSFLADFYSSPHLHSLYRHTEHHLHNEQTSKYPSRDMYRESENSSFPSHRHQEKLHVNYLTSLHLQDKKSAAAEAPTDDQPTDLSLPKNPHKPTGKVLGLAHSTTGPQESKGISQFQVLGSQSRDCHPKACRVSPMTMSGPKKYPESLSRSGKPHHVRLENFRKMEGMVHPILHRKMSPQNIGAARPIKRSLEDLDLVIAGKKARAVSPLDPSKEVSGKEKASEQESEGSKAAHGGHSGGGSEGHKLPLSSPIFPGLYSGSLCNSGLNSRLPAGYSHSLQYLKNQTVLSPLMQPLAFHSLVMQRGIFTSPTNSQQLYRHLAAATPVGSSYGDLLHNSIYPLAAINPQAAFPSSQLSSVHPSTKL

SEQ ID NO: 6847 - protein, 945 aa, Homo sapiens
  Payload ID: 1470;
  Gene Symbol: ARID5B;
  Gene Name: AT rich interactive domain 5B (MRF 1-like);
  Uniprot ID:  Q14865;
  ENSP ID: ENSP00000308862
MAPNLKGRPRKKKPCPQRRDSFSGVKDSNNNSDGKAVAKVKCEARSALTKPKNNHNCKKVSNEEKPKVAIGEECRADEQAFLVALYKYMKERKTPIERIPYLGFKQINLWTMFQAAQKLGGYETITARRQWKHIYDELGGNPGSTSAATCTRRHYERLILPYERFIKGEEDKPLPPIKPRKQENSSQENENKTKVSGTKRIKHEIPKSKKEKENAPKPQDAAEVSSEQEKEQETLISQKSIPEPLPAADMKKKIEGYQEFSAKPLASRVDPEKDNETDQGSNSEKVAEEAGEKGPTPPLPSAPLAPEKDSALVPGASKQPLTSPSALVDSKQESKLCCFTESPESEPQEASFPSFPTTQPPLANQNETEDDKLPAMADYIANCTVKVDQLGSDDIHNALKQTPKVLVVQSFDMFKDKDLTGPMNENHGLNYTPLLYSRGNPGIMSPLAKKKLLSQVSGASLSSSYPYGSPPPLISKKKLIARDDLCSSLSQTHHGQSTDHMAVSRPSVIQHVQSFRSKPSEERKTINDIFKHEKLSRSDPHRCSFSKHHLNPLADSYVLKQEIQEGKDKLLEKRALPHSHMPSFLADFYSSPHLHSLYRHTEHHLHNEQTSKYPSRDMYRESENSSFPSHRHQEKLHVNYLTSLHLQDKKSAAAEAPTDDQPTDLSLPKNPHKPTGKVLGLAHSTTGPQESKGISQFQVLGSQSRDCHPKACRVSPMTMSGPKKYPESLSRSGKPHHVRLENFRKMEGMVHPILHRKMSPQNIGAARPIKRSLEDLDLVIAGKKARAVSPLDPSKEVSGKEKASEQESEGSKAAHGGHSGGGSEGHKLPLSSPIFPGLYSGSLCNSGLNSRLPAGYSHSLQYLKNQTVLSPLMQPLAFHSLVMQRGIFTSPTNSQQLYRHLAAATPVGSSYGDLLHNSIYPLAAINPQAAFPSSQLSSVHPSTKL

SEQ ID NO: 6848 - protein, 371 aa, Homo sapiens
  Payload ID: 1471;
  Gene Symbol: ATCAY;
  Gene Name: ataxia, cerebellar, Cayman type;
  Uniprot ID:  Q86WG3;
  ENSP ID: ENSP00000390941
MGTTEATLRMENVDVKEEWQDEDLPRPLPEETGVELLGSPVEDTSSPPNTLNFNGAHRKRKTLVAPEINISLDQSEGSLLSDDFLDTPDDLDINVDDIETPDETDSLEFLGNGNELEWEDDTPVATAKNMPGDSADLFGDGTTEDGSAANGRLWRTVIIGEQEHRIDLHMIRPYMKVVTHGGYYGEGLNAIIVFAACFLPDSSLPDYHYIMENLFLYVISSLELLVAEDYMIVYLNGATPRRRMPGIGWLKKCYQMIDRRLRKNLKSLIIVHPSWFIRTVLAISRPFISVKFINKIQYVHSLEDLEQLIPMEHVQIPDCVLQYEEERLKARRESARPQPEFVLPRSEEKPEVAPVENRSALVSEDQETSMS

SEQ ID NO: 6849 - protein, 377 aa, Homo sapiens
  Payload ID: 1471;
  Gene Symbol: ATCAY;
  Gene Name: ataxia, cerebellar, Cayman type;
  Uniprot ID:  Q86WG3;
  ENSP ID: ENSP00000470842
MGTTEATLRMENVDVKEEWQDEDLPRPLPEETGVELLGSPVEDTSSPPNTLNFNGAHRKRKTLVAPEINISLDQSEGSLLSDDFLDTPDDLDINVDDIETPDETDSLEFLGNGNELEWEDDTPVATAKNMPGDSADLFGDGTTEDGSAANGRLWRTVIIGEQEHRIDLHMIRPYMKVVTHGGYYGEGLNAIIVFAACFLPDSSLPDYHYIMENLFLYVISSLELLVAEDYMIVYLNGATPRRRMPGIGWLKKCYQMIDRRLRKNLKSLIIVHPSWFIRTVLAISRPFISVKFINKIQYVHSLEDLEQLIPMEHVQIPDCVLQYEEERLKARRESARPQPEFVLPRSEEKPEVAPVENRSALVSEDQETSLQPLHRSS

SEQ ID NO: 6850 - protein, 99 aa, Homo sapiens
  Payload ID: 1471;
  Gene Symbol: ATCAY;
  Gene Name: ataxia, cerebellar, Cayman type;
  ENSP ID: ENSP00000471731
MGTTEATLRMENVDVKEEWQDEDLPRPLPEETGVELLGSPVEDTSSPPNTLNFNGAHRKRKTLVAPEINISLDQSEGSLLSDDFLDTPDDLDINVDDIE

SEQ ID NO: 6851 - protein, 74 aa, Homo sapiens
  Payload ID: 1471;
  Gene Symbol: ATCAY;
  Gene Name: ataxia, cerebellar, Cayman type;
  ENSP ID: ENSP00000472263
MGTTEATLRMENVDVKEEWQDEDLPSQELLCTILGTTKSKIHRAGWKLSGHSQKRRGWNCLAARWKTHPLLPTR

SEQ ID NO: 6852 - protein, 815 aa, Homo sapiens
  Payload ID: 1472;
  Gene Symbol: ATXN1;
  Gene Name: ataxin 1;
  Uniprot ID:  P54253;
  ENSP ID: ENSP00000244769
MKSNQERSNECLPPKKREIPATSRSSEEKAPTLPSDNHRVEGTAWLPGNPGGRGHGGGRHGPAGTSVELGLQQGIGLHKALSTGLDYSPPSAPRSVPVATTLPAAYATPQPGTPVSPVQYAHLPHTFQFIGSSQYSGTYASFIPSQLIPPTANPVTSAVASAAGATTPSQRSQLEAYSTLLANMGSLSQTPGHKAEQQQQQQQQQQQQHQHQQQQQQQQQQQQQQHLSRAPGLITPGSPPPAQQNQYVHISSSPQNTGRTASPPAIPVHLHPHQTMIPHTLTLGPPSQVVMQYADSGSHFVPREATKKAESSRLQQAIQAKEVLNGEMEKSRRYGAPSSADLGLGKAGGKSVPHPYESRHVVVHPSPSDYSSRDPSGVRASVMVLPNSNTPAADLEVQQATHREASPSTLNDKSGLHLGKPGHRSYALSPHTVIQTTHSASEPLPVGLPATAFYAGTQPPVIGYLSGQQQAITYAGSLPQHLVIPGTQPLLIPVGSTDMEASGAAPAIVTSSPQFAAVPHTFVTTALPKSENFNPEALVTQAAYPAMVQAQIHLPVVQSVASPAAAPPTLPPYFMKGSIIQLANGELKKVEDLKTEDFIQSAEISNDLKIDSSTVERIEDSHSPGVAVIQFAVGEHRAQVSVEVLVEYPFFVFGQGWSSCCPERTSQLFDLPCSKLSVGDVCISLTLKNLKNGSVKKGQPVDPASVLLKHSKADGLAGSRHRYAEQENGINQGSAQMLSENGELKFPEKMGLPAAPFLTKIEPSKPAATRKRRWSAPESRKLEKSEDEPPLTLPKPSLIPQEVKICIEGRSNVGK

SEQ ID NO: 6853 - protein, 815 aa, Homo sapiens; identical to SEQ ID NO: 6852
  Payload ID: 1472;
  Gene Symbol: ATXN1;
  Gene Name: ataxin 1;
  Uniprot ID:  P54253;
  ENSP ID: ENSP00000416360

SEQ ID NO: 6854 - protein, 475 aa, Homo sapiens
  Payload ID: 1473;
  Gene Symbol: ATXN10;
  Gene Name: ataxin 10;
  Uniprot ID:  Q9UBB4;
  ENSP ID: ENSP00000252934
MAAPRPPPARLSGVMVPAPIQDLEALRALTALFKEQRNRETAPRTIFQRVLDILKKSSHAVELACRDPSQVENLASSLQLITECFRCLRNACIECSVNQNSIRNLDTIGVAVDLILLFRELRVEQESLLTAFRCGLQFLGNIASRNEDSQSIVWVHAFPELFLSCLNHPDKKIVAYSSMILFTSLNHERMKELEENLNIAIDVIDAYQKHPESEWPFLIITDLFLKSPELVQAMFPKLNNQERVTLLDLMIAKITSDEPLTKDDIPVFLRHAELIASTFVDQCKTVLKLASEEPPDDEEALATIRLLDVLCEMTVNTELLGYLQVFPGLLERVIDLLRVIHVAGKETTNIFSNCGCVRAEGDISNVANGFKSHLIRLIGNLCYKNKDNQDKVNELDGIPLILDNCNISDSNPFLTQWVIYAIRNLTEDNSQNQDLIAKMEEQGLADASLLKKVGFEVEKKGEKLILKSTRDTPKP

SEQ ID NO: 6855 - protein, 411 aa, Homo sapiens
  Payload ID: 1473;
  Gene Symbol: ATXN10;
  Gene Name: ataxin 10;
  Uniprot ID:  Q9UBB4;
  ENSP ID: ENSP00000370449
MAAPRPPPARLSGVMVPAPIQDLEALRALTALFKEQRNRNLDTIGVAVDLILLFRELRVEQESLLTAFRCGLQFLGNIASRNEDSQSIVWVHAFPELFLSCLNHPDKKIVAYSSMILFTSLNHERMKELEENLNIAIDVIDAYQKHPESEWPFLIITDLFLKSPELVQAMFPKLNNQERVTLLDLMIAKITSDEPLTKDDIPVFLRHAELIASTFVDQCKTVLKLASEEPPDDEEALATIRLLDVLCEMTVNTELLGYLQVFPGLLERVIDLLRVIHVAGKETTNIFSNCGCVRAEGDISNVANGFKSHLIRLIGNLCYKNKDNQDKVNELDGIPLILDNCNISDSNPFLTQWVIYAIRNLTEDNSQNQDLIAKMEEQGLADASLLKKVGFEVEKKGEKLILKSTRDTPKP

SEQ ID NO: 6856 - protein, 126 aa, Homo sapiens
  Payload ID: 1473;
  Gene Symbol: ATXN10;
  Gene Name: ataxin 10;
  ENSP ID: ENSP00000385624
MQVPQHLKRSHQSHSSMLRPSCLLLRSSCHPRFLPFPSDAGQVNELDGIPLILDNCNISDSNPFLTQWVIYAIRNLTEDNSQNQDLIAKMEEQGLADASLLKKVGFEVEKKGEKLILKSTRDTPKP

SEQ ID NO: 6857 - protein, 197 aa, Homo sapiens
  Payload ID: 1473;
  Gene Symbol: ATXN10;
  Gene Name: ataxin 10;
  ENSP ID: ENSP00000391117
LMIAKITSDEPLTKDDIPVFLRHAELIASTFVDQCKTVLKLASEEPPDDEEALATIRLLDVLCEMTVNTELLGYLQVFPGLLERVIDLLRVIHVAGKETTNIFSNCGCVRAEGDISNVANGFKSHLIRLIGNLCYKNKDNQDKVNELDGIPLILDNCNISDSNPYVCTHHPDGNTEHAHLPRRLLECPVSLTANPQM

SEQ ID NO: 6858 - protein, 689 aa, Homo sapiens
  Payload ID: 1474;
  Gene Symbol: ATXN1L;
  Gene Name: ataxin 1-like;
  Uniprot ID:  P0C7T5;
  ENSP ID: ENSP00000415822
MKPVHERSQECLPPKKRDLPVTSEDMGRTTSCSTNHTPSSDASEWSRGVVVAGQSQAGARVSLGGDGAEAITGLTVDQYGMLYKVAVPPATFSPTGLPSVVNMSPLPPTFNVASSLIQHPGIHYPPLHYAQLPSTSLQFIGSPYSLPYAVPPNFLPSPLLSPSANLATSHLPHFVPYASLLAEGATPPPQAPSPAHSFNKAPSATSPSGQLPHHSSTQPLDLAPGRMPIYYQMSRLPAGYTLHETPPAGASPVLTPQESQSALEAAAANGGQRPRERNLVRRESEALDSPNSKGEGQGLVPVVECVVDGQLFSGSQTPRVEVAAPAHRGTPDTDLEVQRVVGALASQDYRVVAAQRKEEPSPLNLSHHTPDHQGEGRGSARNPAELAEKSQARGFYPQSHQEPVKHRPLPKAMVVANGNLVPTGTDSGLLPVGSEILVASSLDVQARATFPDKEPTPPPITSSHLPSHFMKGAIIQLATGELKRVEDLQTQDFVRSAEVSGGLKIDSSTVVDIQESQWPGFVMLHFVVGEQQSKVSIEVPPEHPFFVYGQGWSSCSPGRTTQLFSLPCHRLQVGDVCISISLQSLNSNSVSQASCAPPSQLGPPRERPERTVLGSRELCDSEGKSQPAGEGSRVVEPSQPESGAQACWPAPSFQRYSMQGEEARAALLRPSFIPQEVKLSIEGRSNAGK

SEQ ID NO: 6859 - protein, 1313 aa, Homo sapiens
  Payload ID: 1475;
  Gene Symbol: ATXN2;
  Gene Name: ataxin 2;
  Uniprot ID:  Q99700;
  ENSP ID: ENSP00000366843
MRSAAAAPRSPAVATESRRFAAARWPGWRSLQRPARRSGRGGGGAAPGPYPSAAPPPPGPGPPPSRQSSPPSASDCFGSNGNGGGAFRPGSRRLLGLGGPPRPFVVLLLPLASPGAPPAAPTRASPLGARASPPRSGVSLARPAPGCPRPACEPVYGPLTMSLKPQQQQQQQQQQQQQQQQQQQQQQQPPPAAANVRKPGGSGLLASPAAAPSPSSSSVSSSSATAPSSVVAATSGGGRPGLGRGRNSNKGLPQSTISFDGIYANMRMVHILTSVVGSKCEVQVKNGGIYEGVFKTYSPKCDLVLDAAHEKSTESSSGPKREEIMESILFKCSDFVVVQFKDMDSSYAKRDAFTDSAISAKVNGEHKEKDLEPWDAGELTANEELEALENDVSNGWDPNDMFRYNEENYGVVSTYDSSLSSYTVPLERDNSEEFLKREARANQLAEEIESSAQYKARVALENDDRSEEEKYTAVQRNSSEREGHSINTRENKYIPPGQRNREVISWGSGRQNSPRMGQPGSGSMPSRSTSHTSDFNPNSGSDQRVVNGGVPWPSPCPSPSSRPPSRYQSGPNSLPPRAATPTRPPSRPPSRPSRPPSHPSAHGSPAPVSTMPKRMSSEGPPRMSPKAQRHPRNHRVSAGRGSISSGLEFVSHNPPSEAATPPVARTSPSGGTWSSVVSGVPRLSPKTHRPRSPRQNSIGNTPSGPVLASPQAGIIPTEAVAMPIPAASPTPASPASNRAVTPSSEAKDSRLQDQRQNSPAGNKENIKPNETSPSFSKAENKGISPVVSEHRKQIDDLKKFKNDFRLQPSSTSESMDQLLNKNREGEKSRDLIKDKIEPSAKDSFIENSSSNCTSGSSKPNSPSISPSILSNTEHKRGPEVTSQGVQTSSPACKQEKDDKEEKKDAAEQVRKSTLNPNAKEFNPRSFSQPKPSTTPTSPRPQAQPSPSMVGHQQPTPVYTQPVCFAPNMMYPVPVSPGVQPLYPIPMTPMPVNQAKTYRAVPNMPQQRQDQHHQSAMMHPASAAGPPIAATPPAYSTQYVAYSPQQFPNQPLVQHVPHYQSQHPHVYSPVIQGNARMMAPPTHAQPGLVSSSATQYGAHEQTHAMYACPKLPYNKETSPSFYFAISTGSLAQQYAHPNATLHPHTPHPQPSATPTGQQQSQHGGSHPAPSPVQHHQHQAAQALHLASPQQQSAIYHAGLAPTPPSMTPASNTQSPQNSFPAAQQTVFTIHPSHVQPAYTNPPHMAHVPQAHVQSGMVPSHPTAHAPMMLMTTQPPGGPQAALAQSALQPIPVSTTAHFPYMTHPSVQAHHQQQL

SEQ ID NO: 6860 - protein, 1050 aa, Homo sapiens
  Payload ID: 1475;
  Gene Symbol: ATXN2;
  Gene Name: ataxin 2;
  ENSP ID: ENSP00000373805
MRMVHILTSVVGSKCEVQVKNGGIYEGVFKTYSPKCDLVLDAAHEKSTESSSGPKREEIMESILFKCSDFVVVQFKDMDSSYAKRDAFTDSAISAKVNGEHKEKDLEPWDAGELTANEELEALENDVSNGWDPNDMFRYNEENYGVVSTYDSSLSSYTVPLERDNSEEFLKREARANQLAEEIESSAQYKARVALENDDRSEEEKYTAVQRNSSEREGHSINTRENKYIPPGQRNREVISWGSGRQNSPRMGQPGSGSMPSRSTSHTSDFNPNSGSDQRVVNGGVPWPSPCPSPSSRPPSRYQSGPNSLPPRAATPTRPPSRPPSRPSRPPSHPSAHGSPAPVSTMPKRMSSEGPPRMSPKAQRHPRNHRVSAGRGSISSGLEFVSHNPPSEAATPPVARTSPSGGTWSSVVSGVPRLSPKTHRPRSPRQNSIGNTPSGPVLASPQAGIIPTEAVAMPIPAASPTPASPASNRAVTPSSEAKDSRLQDQRQNSPAGNKENIKPNETSPSFSKAENKGISPVVSEHRKQIDDLKKFKNDFRLQPSSTSESMDQLLNKNREGEKSRDLIKDKIEPSAKDSFIENSSSNCTSGSSKPNSPSISPSILSNTEHKRGPEVTSQGVQTSSPACKQEKDDKEEKKDAAEQVRKSTLNPNAKEFNPRSFSQPKPSTTPTSPRPQAQPSPSMVGHQQPTPVYTQPVCFAPNMMYPVPVSPGVQPLYPIPMTPMPVNQAKTYRAGKVPNMPQQRQDQHHQSAMMHPASAAGPPIAATPPAYSTQYVAYSPQQFPNQPLVQHVPHYQSQHPHVYSPVIQGNARMMAPPTHAQPGLVSSSATQYGAHEQTHAMYACPKLPYNKETSPSFYFAISTGSLAQQYAHPNATLHPHTPHPQPSATPTGQQQSQHGGSHPAPSPVQHHQHQAAQALHLASPQQQSAIYHAGLAPTPPSMTPASNTQSPQNSFPAAQQTVFTIHPSHVQPAYTNPPHMAHVPQAHVQSGMVPSHPTAHAPMMLMTTQPPGGPQAALAQSALQPIPVSTTAHFPYMTHPSVQAHHQQQL

SEQ ID NO: 6861 - protein, 424 aa, Homo sapiens
  Payload ID: 1475;
  Gene Symbol: ATXN2;
  Gene Name: ataxin 2;
  ENSP ID: ENSP00000373806
PSISPSILSNTEHKRGPEVTSQGVQTSSPACKQEKDDKEEKKDAAEQVRKSTLNPNAKEFNPRSFSQPKPSTTPTSPRPQAQPSPSMVGHQQPTPVYTQPVCFAPNMMYPVPVSPGVQPLYPIPMTPMPVNQAKTYRAGKVPNMPQQRQDQHHQSAMMHPASAAGPPIAATPPAYSTQYVAYSPQQFPNQPLVQHVPHYQSQHPHVYSPVIQGNARMMAPPTHAQPGLVSSSATQYGAHEQTHAMYACPKLPYNKETSPSFYFAISTGSLAQQYAHPNATLHPHTPHPQPSATPTGQQQSQHGGSHPAPSPVQHHQHQAAQALHLASPQQQSAIYHAGLAPTPPSMTPASNTQSPQNSFPAAQQTVFTIHPSHVQPAYTNPPHMAHVPQYKPTTNSSCKAALEEPKGQIPSSLLLLLPTGSTEN

SEQ ID NO: 6862 - protein, 1006 aa, Homo sapiens
  Payload ID: 1475;
  Gene Symbol: ATXN2;
  Gene Name: ataxin 2;
  Uniprot ID:  Q99700;
  ENSP ID: ENSP00000439338
MRMVHILTSVVCDLVLDAAHEKSTESSSGPKREEIMESILFKCSDFVVVQFKDMDSSYAKRDAFTDSAISAKVNGEHKEKDLEPWDAGELTANEELEALENDVSNGWDPNDMFRYNEENYGVVSTYDSSLSSYTVPLERDNSEEFLKREARANQLAEEIESSAQYKARVALENDDRSEEEKYTAVQRNSSEREGHSINTRENKYIPPGQRNREVISWGSGRQNSPRMGQPGSGSMPSRSTSHTSDFNPNSGSDQRVVNGGVPWPSPCPSPSSRPPSRYQSGPNSLPPRAATPTRPPSRPPSRPSRPPSHPSAHGSPAPVSTMPKRMSSEGPPRMSPKAQRHPRNHRVSAGRGSISSGLEFVSHNPPSEAATPPVARTSPSGGTWSSVVSGVPRLSPKTHRPRSPRQNSIGNTPSGPVLASPQAGIIPTEAVAMPIPAASPTPASPASNRAVTPSSEAKDSRLQDQRQNSPAGNKENIKPNETSPSFSKAENKGISPVVSEHRKQIDDLKKFKNDFRLQPSSTSESMDQLLNKNREGEKSRDLIKDKIEPSAKDSFIENSSSNCTSGSSKPNSPSISPSILSNTEHKRGPEVTSQGVQTSSPACKQEKDDKEEKKDAAEQVRKSTLNPNAKEFNPRSFSQPKPSTTPTSPRPQAQPSPSMVGHQQPTPVYTQPVCFAPNMMYPVPVSPGVQPLYPIPMTPMPVNQAKTYRAVPNMPQQRQDQHHQSAMMHPASAAGPPIAATPPAYSTQYVAYSPQQFPNQPLVQHVPHYQSQHPHVYSPVIQGNARMMAPPTHAQPGLVSSSATQYGAHEQTHAMYVSTGSLAQQYAHPNATLHPHTPHPQPSATPTGQQQSQHGGSHPAPSPVQHHQHQAAQALHLASPQQQSAIYHAGLAPTPPSMTPASNTQSPQNSFPAAQQTVFTIHPSHVQPAYTNPPHMAHVPQAHVQSGMVPSHPTAHAPMMLMTTQPPGGPQAALAQSALQPIPVSTTAHFPYMTHPSVQAHHQQQL

SEQ ID NO: 6863 - protein, 1073 aa, Homo sapiens
  Payload ID: 1475;
  Gene Symbol: ATXN2;
  Gene Name: ataxin 2;
  ENSP ID: ENSP00000445583
MRMVHILTSVVGSKCEVQVKNGGIYEGVFKTYSPKCDLVLDAAHEKSTESSSGPKREEIMESILFKCSDFVVVQFKDMDSSYAKRDAFTDSAISAKVNGEHKEKDLEPWDAGELTANEELEALENDVSNGWDPNDMFRYNEENYGVVSTYDSSLSSYTVPLERDNSEEFLKREARANQLAEEIESSAQYKARVALENDDRSEEEKYTAVQRNSSEREGHSINTRENKYIPPGQRNREVISWGSGRQNSPRMGQPGSGSMPSRSTSHTSDFNPNSGSDQRVVNGGVPWPSPCPSPSSRPPSRYQSGPNSLPPRAATPTRPPSRPPSRPSRPPSHPSAHGSPAPVSTMPKRMSSEGPPRMSPKAQRHPRNHRVSAGRGSISSGLEFVSHNPPSEAATPPVARTSPSGGTWSSVVSGVPRLSPKTHRPRSPRQNSIGNTPSGPVLASPQAGIIPTEAVAMPIPAASPTPASPASNRAVTPSSEAKDSRLQDQRQNSPAGNKENIKPNETSPSFSKAENKGISPVVSEHRKQIDDLKKFKNDFRLQPSSTSESMDQLLNKNREGEKSRDLIKDKIEPSAKDSFIENSSSNCTSGSSKPNSPSISPSILSNTEHKRGPEVTSQGVQTSSPACKQEKDDKEEKKDAAEQVRKSTLNPNAKEFNPRSFSQPKPSTTPTSPRPQAQPSPSMVGHQQPTPVYTQPVCFAPNMMYPVPVSPGVQPLYPIPMTPMPVNQAKTYRAVPNMPQQRQDQHHQSAMMHPASAAGPPIAATPPAYSTQYVAYSPQQFPNQPLVQHVPHYQSQHPHVYSPVIQGNARMMAPPTHAQPGLVSSSATQYGAHEQTHAMYACPKLPYNKETSPSFYFAISTGSLAQQYAHPNATLHPHTPHPQPSATPTGQQQSQHGGSHPAPSPVQHHQHQAAQALHLASPQQQSAIYHAGLAPTPPSMTPASNTQSPQNSFPAAQQTVFTIHPSHVQPAYTNPPHMAHVPQCASEALARCGLEMRLSWIYLSEGYLAHVQSGMVPSHPTAHAPMMLMTTQPPGGPQAALAQSALQPIPVSTTAHFPYMTHPSVQAHHQQQL

SEQ ID NO: 6864 - protein, 916 aa, Homo sapiens
  Payload ID: 1475;
  Gene Symbol: ATXN2;
  Gene Name: ataxin 2;
  ENSP ID: ENSP00000446512
  MOD_RES (1)..(1): Any amino acid
XGNGGGAFRPGSRRLLGLGGPPRPFVVLLLPLASPGAPPAAPTRASPLGARASPPRSGVSLARPAPGCPRPACEPVYGPLTMSLKPQQQQQQQQQQQQQQQQQQQQQQQPPPAAANVRKPGGSGLLASPAAAPSPSSSSVSSSSATAPSSVVAATSGGGRPGLGRGRNSNKGLPQSTISFDGIYANMRMVHILTSVVGSKCEVQVKNGGIYEGVFKTYSPKCDLVLDAAHEKSTESSSGPKREEIMESILFKCSDFVVVQFKDMDSSYAKRDAFTDSAISAKVNGEHKEKDLEPWDAGELTANEELEALENDVSNGWDPNDMFRYNEENYGVVSTYDSSLSSYTVPLERDNSEEFLKREARANQLAEEIESSAQYKARVALENDDRSEEEKYTAVQRNSSEREGHSINTRENKYIPPGQRNREVISWGSGRQNSPRMGQPGSGSMPSRSTSHTSDFNPNSGSDQRVVNGGVPWPSPCPSPSSRPPSRYQSGPNSLPPRAATPTRPPSRPPSRPSRPPSHPSAHGSPAPVSTMPKRMSSEGPPRMSPKAQRHPRNHRVSAGRGSISSGLEFVSHNPPSEAATPPVARTSPSGGTWSSVVSGVPRLSPKTHRPRSPRQNSIGNTPSGPVLASPQAGIIPTEAVAMPIPAASPTPASPASNRAVTPSSEAKDSRLQDQRQNSPAGNKENIKPNETSPSFSKAENKGISPVVSEHRKQIDDLKKFKNDFRLQPSSTSESMDQLLNKNREGEKSRDLIKDKIEPSAKDSFIENSSSNCTSGSSKPNSPSISPSILSNTEHKRGPEVTSQGVQTSSPACKQEKDDKEEKKDAAEQVRKSTLNPNAKEFNPRSFSQPKPSTTPTSPRPQAQPSPSMVGHQQPTPVYTQPVCFAPNMMYPVPVSPGVQYQICPNSGKTSIIRVP

SEQ ID NO: 6865 - protein, 1313 aa, Homo sapiens; identical to SEQ ID NO: 6859
  Payload ID: 1475;
  Gene Symbol: ATXN2;
  Gene Name: ataxin 2;
  Uniprot ID:  Q99700;
  ENSP ID: ENSP00000446576

SEQ ID NO: 6866 - protein, 296 aa, Homo sapiens
  Payload ID: 1475;
  Gene Symbol: ATXN2;
  Gene Name: ataxin 2;
  ENSP ID: ENSP00000447225
  MOD_RES (1)..(1): Any amino acid
XSPSSRPPSRYQSGPNSLPPRAATPTRPPSRPPSRPSRPPSHPSAHGSPAPVSTMPKRMSSEGPPRMSPKAQRHPRNHRVSAGRGSISSGLEFVSHNPPSEAATPPVARTSPSGGTWSSVVSGAKDSRLQDQRQNSPAGNKENIKPNETSPSFSKAENKGISPVVSEHRKQIDDLKKFKNDFRLQPSSTSESMDQLLNKNREGEKSRDLIKDKIEPSAKDSFIENSSSNCTSGSSKPNSPSISPSILSNTEHKRGPEVTSQGVQTSSPACKQEKDDKEEKKDAAEQVRKSTLNPNA

SEQ ID NO: 6867 - protein, 196 aa, Homo sapiens
  Payload ID: 1475;
  Gene Symbol: ATXN2;
  Gene Name: ataxin 2;
  ENSP ID: ENSP00000447741
HPHVYSPVIQGNARMMAPPTHAQPGLVSSSATQYGAHEQTHAMYACPKLPYNKETSPSFYFAISTGSLAQQYAHPNATLHPHTPHPQPSATPTGQQQSQHGGSHPAPSPVQHHQHQAAQALHLASPQQQSAIYHAGLAPTPPSMTPASNTQSPQNSFPAAQQTVFTIHPSHVQPAYTNPPHMAHVPQVIPALANFL

SEQ ID NO: 6868 - protein, 235 aa, Homo sapiens
  Payload ID: 1475;
  Gene Symbol: ATXN2;
  Gene Name: ataxin 2;
  ENSP ID: ENSP00000448640
  MOD_RES (1)..(1): Any amino acid
XRYNEENYGVVSTYDSSLSSYTVPLERDNSEEFLKREARANQLAEEIESSAQYKARVALENDDRSEEEKYTAVQRNSSEREGHSINTRENKYIPPGQRNREVISWGSGRQNSPRMGQPGSGSMPSRSTSHTSDFNPNSGSDQRVVNGGPPRMSPKAQRHPRNHRVSAGRGSISSGLEFVSHNPPSEAATPPVARTSPSGGTWSSVVSGAKDSRLQDQRQNSPAGNKENIKPNETS

SEQ ID NO: 6869 - protein, 184 aa, Homo sapiens
  Payload ID: 1475;
  Gene Symbol: ATXN2;
  Gene Name: ataxin 2;
  ENSP ID: ENSP00000449566
MLGERDCSRGRGRVPEGRKGSKCEVQVKNGGIYEGVFKTYSPKCDLVLDAAHEKSTESSSGPKREEIMESILFKCSDFVVVQFKDMDSSYAKRDAFTDSAISAKVNGEHKEKDLEPWDAGELTANEELEALENDVSNGWDPNDMFRYNEENYGVVSTYDSSLSSYTVPLERDNSEEFLKREARA

SEQ ID NO: 6870 - protein, 107 aa, Homo sapiens
  Payload ID: 1475;
  Gene Symbol: ATXN2;
  Gene Name: ataxin 2;
  ENSP ID: ENSP00000474442
  MOD_RES (1)..(1): Any amino acid
XQVRKSTLNPNAKEFNPRSFSQPKPSTTPTSPRPQAQPSPSMVGHQQPTPVYTQPVCFAPNMMYPVPVSPGVQPLYPIPMTPMPVNQAKTYRAALEHMNLLKELCLK

SEQ ID NO: 6871 - protein, 119 aa, Homo sapiens
  Payload ID: 1475;
  Gene Symbol: ATXN2;
  Gene Name: ataxin 2;
  ENSP ID: ENSP00000474645
AQQTVFTIHPSHVQPAYTNPPHMAHVPQAHVQSGMVPSHPTAHAPMMLMTTQPPGGPQAALAQSALQPIPVSTTAHFPYMTHPSGEACVCRGRRGTPKHSARTGGMAGRASASSPAFEN

SEQ ID NO: 6872 - protein, 1153 aa, Homo sapiens
  Payload ID: 1475;
  Gene Symbol: ATXN2;
  Gene Name: ataxin 2;
  ENSP ID: ENSP00000476504
MSLKPQQQQQQQQQQQQQQQQQQQQQQQPPPAAANVRKPGGSGLLASPAAAPSPSSSSVSSSSATAPSSVVAATSGGGRPGLGRGRNSNKGLPQSTISFDGIYANMRMVHILTSVVGSKCEVQVKNGGIYEGVFKTYSPKCDLVLDAAHEKSTESSSGPKREEIMESILFKCSDFVVVQFKDMDSSYAKRDAFTDSAISAKVNGEHKEKDLEPWDAGELTANEELEALENDVSNGWDPNDMFRYNEENYGVVSTYDSSLSSYTVPLERDNSEEFLKREARANQLAEEIESSAQYKARVALENDDRSEEEKYTAVQRNSSEREGHSINTRENKYIPPGQRNREVISWGSGRQNSPRMGQPGSGSMPSRSTSHTSDFNPNSGSDQRVVNGGVPWPSPCPSPSSRPPSRYQSGPNSLPPRAATPTRPPSRPPSRPSRPPSHPSAHGSPAPVSTMPKRMSSEGPPRMSPKAQRHPRNHRVSAGRGSISSGLEFVSHNPPSEAATPPVARTSPSGGTWSSVVSGVPRLSPKTHRPRSPRQNSIGNTPSGPVLASPQAGIIPTEAVAMPIPAASPTPASPASNRAVTPSSEAKDSRLQDQRQNSPAGNKENIKPNETSPSFSKAENKGISPVVSEHRKQIDDLKKFKNDFRLQPSSTSESMDQLLNKNREGEKSRDLIKDKIEPSAKDSFIENSSSNCTSGSSKPNSPSISPSILSNTEHKRGPEVTSQGVQTSSPACKQEKDDKEEKKDAAEQVRKSTLNPNAKEFNPRSFSQPKPSTTPTSPRPQAQPSPSMVGHQQPTPVYTQPVCFAPNMMYPVPVSPGVQPLYPIPMTPMPVNQAKTYRAVPNMPQQRQDQHHQSAMMHPASAAGPPIAATPPAYSTQYVAYSPQQFPNQPLVQHVPHYQSQHPHVYSPVIQGNARMMAPPTHAQPGLVSSSATQYGAHEQTHAMYACPKLPYNKETSPSFYFAISTGSLAQQYAHPNATLHPHTPHPQPSATPTGQQQSQHGGSHPAPSPVQHHQHQAAQALHLASPQQQSAIYHAGLAPTPPSMTPASNTQSPQNSFPAAQQTVFTIHPSHVQPAYTNPPHMAHVPQAHVQSGMVPSHPTAHAPMMLMTTQPPGGPQAALAQSALQPIPVSTTAHFPYMTHPSVQAHHQQQL

SEQ ID NO: 6873 - protein, 1006 aa, Homo sapiens; identical to SEQ ID NO: 6862
  Payload ID: 1475;
  Gene Symbol: ATXN2;
  Gene Name: ataxin 2;
  Uniprot ID:  Q99700;
  ENSP ID: ENSP00000481448

SEQ ID NO: 6874 - protein, 1062 aa, Homo sapiens
  Payload ID: 1476;
  Gene Symbol: ATXN2L;
  Gene Name: ataxin 2-like;
  Uniprot ID:  Q8WWM7;
  ENSP ID: ENSP00000315650
MLKPQPLQQPSQPQQPPPTQQAVARRPPGGTSPPNGGLPGPLATSAAPPGPPAAASPCLGPVAAAGSGLRRGAEGILAPQPPPPQQHQERPGAAAIGSARGQSTGKGPPQSPVFEGVYNNSRMLHFLTAVVGSTCDVKVKNGTTYEGIFKTLSSKFELAVDAVHRKASEPAGGPRREDIVDTMVFKPSDVMLVHFRNVDFNYATKDKFTDSAIAMNSKVNGEHKEKVLQRWEGGDSNSDDYDLESDMSNGWDPNEMFKFNEENYGVKTTYDSSLSSYTVPLEKDNSEEFRQRELRAAQLAREIESSPQYRLRIAMENDDGRTEEEKHSAVQRQGSGRESPSLASREGKYIPLPQRVREGPRGGVRCSSSRGGRPGLSSLPPRGPHHLDNSSPGPGSEARGINGGPSRMSPKAQRPLRGAKTLSSPSNRPSGETSVPPPPAVGRMYPPRSPKSAAPAPISASCPEPPIGSAVPTSSASIPVTSSVSDPGVGSISPASPKISLAPTDVKELSTKEPGRTLEPQELARIAGKVPGLQNEQKRFQLEELRKFGAQFKLQPSSSPENSLDPFPPRILKEEPKGKEKEVDGLLTSEPMGSPVSSKTESVSDKEDKPPLAPSGGTEGPEQPPPPCPSQTGSPPVGLIKGEDKDEGPVAEQVKKSTLNPNAKEFNPTKPLLSVNKSTSTPTSPGPRTHSTPSIPVLTAGQSGLYSPQYISYIPQIHMGPAVQAPQMYPYPVSNSVPGQQGKYRGAKGSLPPQRSDQHQPASAPPMMQAAAAAGPPLVAATPYSSYIPYNPQQFPGQPAMMQPMAHYPSQPVFAPMLQSNPRMLTSGSHPQAIVSSSTPQYPSAEQPTPQALYATVHQSYPHHATQLHAHQPQPATTPTGSQPQSQHAAPSPVQHQAGQAPHLGSGQPQQNLYHPGALTGTPPSLPPGPSAQSPQSSFPQPAAVYAIHHQQLPHGFTNMAHVTQAHVQTGITAAPPPHPGAPHPPQVMLLHPPQSHGGPPQGAVPQSGVPALSASTPSPYPYIGHPQGEQPGQAPGFPGGADDRIPPLPPPGELKIVLAAT

SEQ ID NO: 6875 - protein, 1075 aa, Homo sapiens
  Payload ID: 1476;
  Gene Symbol: ATXN2L;
  Gene Name: ataxin 2-like;
  Uniprot ID:  Q8WWM7;
  ENSP ID: ENSP00000338718
MLKPQPLQQPSQPQQPPPTQQAVARRPPGGTSPPNGGLPGPLATSAAPPGPPAAASPCLGPVAAAGSGLRRGAEGILAPQPPPPQQHQERPGAAAIGSARGQSTGKGPPQSPVFEGVYNNSRMLHFLTAVVGSTCDVKVKNGTTYEGIFKTLSSKFELAVDAVHRKASEPAGGPRREDIVDTMVFKPSDVMLVHFRNVDFNYATKDKFTDSAIAMNSKVNGEHKEKVLQRWEGGDSNSDDYDLESDMSNGWDPNEMFKFNEENYGVKTTYDSSLSSYTVPLEKDNSEEFRQRELRAAQLAREIESSPQYRLRIAMENDDGRTEEEKHSAVQRQGSGRESPSLASREGKYIPLPQRVREGPRGGVRCSSSRGGRPGLSSLPPRGPHHLDNSSPGPGSEARGINGGPSRMSPKAQRPLRGAKTLSSPSNRPSGETSVPPPPAVGRMYPPRSPKSAAPAPISASCPEPPIGSAVPTSSASIPVTSSVSDPGVGSISPASPKISLAPTDVKELSTKEPGRTLEPQELARIAGKVPGLQNEQKRFQLEELRKFGAQFKLQPSSSPENSLDPFPPRILKEEPKGKEKEVDGLLTSEPMGSPVSSKTESVSDKEDKPPLAPSGGTEGPEQPPPPCPSQTGSPPVGLIKGEDKDEGPVAEQVKKSTLNPNAKEFNPTKPLLSVNKSTSTPTSPGPRTHSTPSIPVLTAGQSGLYSPQYISYIPQIHMGPAVQAPQMYPYPVSNSVPGQQGKYRGAKGSLPPQRSDQHQPASAPPMMQAAAAAGPPLVAATPYSSYIPYNPQQFPGQPAMMQPMAHYPSQPVFAPMLQSNPRMLTSGSHPQAIVSSSTPQYPSAEQPTPQALYATVHQSYPHHATQLHAHQPQPATTPTGSQPQSQHAAPSPVQHQAGQAPHLGSGQPQQNLYHPGALTGTPPSLPPGPSAQSPQSSFPQPAAVYAIHHQQLPHGFTNMAHVTQAHVQTGITAAPPPHPGAPHPPQVMLLHPPQSHGGPPQGAVPQSGVPALSASTPSPYPYIGHPQGEQPGQAPGFPGGADDRIREFSLAGGIWHGRAEGLQVGQDARVLGGE

SEQ ID NO: 6876 - protein, 1044 aa, Homo sapiens
  Payload ID: 1476;
  Gene Symbol: ATXN2L;
  Gene Name: ataxin 2-like;
  Uniprot ID:  Q8WWM7;
  ENSP ID: ENSP00000341459
MLKPQPLQQPSQPQQPPPTQQAVARRPPGGTSPPNGGLPGPLATSAAPPGPPAAASPCLGPVAAAGSGLRRGAEGILAPQPPPPQQHQERPGAAAIGSARGQSTGKGPPQSPVFEGVYNNSRMLHFLTAVVGSTCDVKVKNGTTYEGIFKTLSSKFELAVDAVHRKASEPAGGPRREDIVDTMVFKPSDVMLVHFRNVDFNYATKDKFTDSAIAMNSKVNGEHKEKVLQRWEGGDSNSDDYDLESDMSNGWDPNEMFKFNEENYGVKTTYDSSLSSYTVPLEKDNSEEFRQRELRAAQLAREIESSPQYRLRIAMENDDGRTEEEKHSAVQRQGSGRESPSLASREGKYIPLPQRVREGPRGGVRCSSSRGGRPGLSSLPPRGPHHLDNSSPGPGSEARGINGGPSRMSPKAQRPLRGAKTLSSPSNRPSGETSVPPPPAVGRMYPPRSPKSAAPAPISASCPEPPIGSAVPTSSASIPVTSSVSDPGVGSISPASPKISLAPTDVKELSTKEPGRTLEPQELARIAGKVPGLQNEQKRFQLEELRKFGAQFKLQPSSSPENSLDPFPPRILKEEPKGKEKEVDGLLTSEPMGSPVSSKTESVSDKEDKPPLAPSGGTEGPEQPPPPCPSQTGSPPVGLIKGEDKDEGPVAEQVKKSTLNPNAKEFNPTKPLLSVNKSTSTPTSPGPRTHSTPSIPVLTAGQSGLYSPQYISYIPQIHMGPAVQAPQMYPYPVSNSVPGQQGKYRGAKGSLPPQRSDQHQPASAPPMMQAAAAAGPPLVAATPYSSYIPYNPQQFPGQPAMMQPMAHYPSQPVFAPMLQSNPRMLTSGSHPQAIVSSSTPQYPSAEQPTPQALYATVHQSYPHHATQLHAHQPQPATTPTGSQPQSQHAAPSPVQHQAGQAPHLGSGQPQQNLYHPGALTGTPPSLPPGPSAQSPQSSFPQPAAVYAIHHQQLPHGFTNMAHVTQAHVQTGITAAPPPHPGAPHPPQVMLLHPPQSHGGPPQGAVPQSGVPALSASTPSPYPYIGHPQVQSHPSQQLPFHPPGN

SEQ ID NO: 6877 - protein, 1044 aa, Homo sapiens
  Payload ID: 1476;
  Gene Symbol: ATXN2L;
  Gene Name: ataxin 2-like;
  Uniprot ID:  Q8WWM7;
  ENSP ID: ENSP00000372133
MLKPQPLQQPSQPQQPPPTQQAVARRPPGGTSPPNGGLPGPLATSAAPPGPPAAASPCLGPVAAAGSGLRRGAEGILAPQPPPPQQHQERPGAAAIGSARGQSTGKGPPQSPVFEGVYNNSRMLHFLTAVVGSTCDVKVKNGTTYEGIFKTLSSKFELAVDAVHRKASEPAGGPRREDIVDTMVFKPSDVMLVHFRNVDFNYATKDKFTDSAIAMNSKVNGEHKEKVLQRWEGGDSNSDDYDLESDMSNGWDPNEMFKFNEENYGVKTTYDSSLSSYTVPLEKDNSEEFRQRELRAAQLAREIESSPQYRLRIAMENDDGRTEEEKHSAVQRQGSGRESPSLASREGKYIPLPQRVREGPRGGVRCSSSRGGRPGLSSLPPRGPHHLDNSSPGPGSEARGINGGPSRMSPKAQRPLRGAKTLSSPSNRPSGETSVPPPPAVGRMYPPRSPKSAAPAPISASCPEPPIGSAVPTSSASIPVTSSVSDPGVGSISPASPKISLAPTDVKELSTKEPGRTLEPQELARIAGKVPGLQNEQKRFQLEELRKFGAQFKLQPSSSPENSLDPFPPRILKEEPKGKEKEVDGLLTSEPMGSPVSSKTESVSDKEDKPPLAPSGGTEGPEQPPPPCPSQTGSPPVGLIKGEDKDEGPVAEQVKKSTLNPNAKEFNPTKPLLSVNKSTSTPTSPGPRTHSTPSIPVLTAGQSGLYSPQYISYIPQIHMGPAVQAPQMYPYPVSNSVPGQQGKYRGAKGSLPPQRSDQHQPASAPPMMQAAAAAGPPLVAATPYSSYIPYNPQQFPGQPAMMQPMAHYPSQPVFAPMLQSNPRMLTSGSHPQAIVSSSTPQYPSAEQPTPQALYATVHQSYPHHATQLHAHQPQPATTPTGSQPQSQHAAPSPVQHQAGQAPHLGSGQPQQNLYHPGALTGTPPSLPPGPSAQSPQSSFPQPAAVYAIHHQQLPHGFTNMAHVTQAHVQTGITAAPPPHPGAPHPPQVMLLHPPQSHGGPPQGAVPQSGVPALSASTPSPYPYIGHPQAPLPPPGELKIVLAAT

SEQ ID NO: 6878 - protein, 1097 aa, Homo sapiens
  Payload ID: 1476;
  Gene Symbol: ATXN2L;
  Gene Name: ataxin 2-like;
  Uniprot ID:  Q8WWM7;
  ENSP ID: ENSP00000378917
MLKPQPLQQPSQPQQPPPTQQAVARRPPGGTSPPNGGLPGPLATSAAPPGPPAAASPCLGPVAAAGSGLRRGAEGILAPQPPPPQQHQERPGAAAIGSARGQSTGKGPPQSPVFEGVYNNSRMLHFLTAVVGSTCDVKVKNGTTYEGIFKTLSSKFELAVDAVHRKASEPAGGPRREDIVDTMVFKPSDVMLVHFRNVDFNYATKDKFTDSAIAMNSKVNGEHKEKVLQRWEGGDSNSDDYDLESDMSNGWDPNEMFKFNEENYGVKTTYDSSLSSYTVPLEKDNSEEFRQRELRAAQLAREIESSPQYRLRIAMENDDGRTEEEKHSAVQRQGSGRESPSLASREGKYIPLPQRVREGPRGGVRCSSSRGGRPGLSSLPPRGPHHLDNSSPGPGSEARGINGGPSRMSPKAQRPLRGAKTLSSPSNRPSGETSVPPPPAVGRMYPPRSPKSAAPAPISASCPEPPIGSAVPTSSASIPVTSSVSDPGVGSISPASPKISLAPTDVKELSTKEPGRTLEPQELARIAGKVPGLQNEQKRFQLEELRKFGAQFKLQPSSSPENSLDPFPPRILKEEPKGKEKEVDGLLTSEPMGSPVSSKTESVSDKEDKPPLAPSGGTEGPEQPPPPCPSQTGSPPVGLIKGEDKDEGPVAEQVKKSTLNPNAKEFNPTKPLLSVNKSTSTPTSPGPRTHSTPSIPVLTAGQSGLYSPQYISYIPQIHMGPAVQAPQMYPYPVSNSVPGQQGKYRGAKGSLPPQRSDQHQPASAPPMMQAAAAAGPPLVAATPYSSYIPYNPQQFPGQPAMMQPMAHYPSQPVFAPMLQSNPRMLTSGSHPQAIVSSSTPQYPSAEQPTPQALYATVHQSYPHHATQLHAHQPQPATTPTGSQPQSQHAAPSPVQHQAGQAPHLGSGQPQQNLYHPGALTGTPPSLPPGPSAQSPQSSFPQPAAVYAIHHQQLPHGFTNMAHVTQAHVQTGITAAPPPHPGAPHPPQVMLLHPPQSHGGPPQGAVPQSGVPALSASTPSPYPYIGHPQGEQPGQAPGFPGGADDRILCRVGRSHSRRRQGLAPGSVLCFPPSSLSCDPAAPLPTASPALSDPDCLLT

SEQ ID NO: 6879 - protein, 1062 aa, Homo sapiens
  Payload ID: 1476;
  Gene Symbol: ATXN2L;
  Gene Name: ataxin 2-like;
  Uniprot ID:  Q8WWM7;
  ENSP ID: ENSP00000454516
MLKPQPLQQPSQPQQPPPTQQAVARRPPGGTSPPNGGLPGPLATSAAPPGPPAAASPCLGPVAAAGSGLRRGAEGILAPQPPPPQQHQERPGAAAIGSARGQSTGKGPPQSPVFEGVYNNSRMLHFLTAVVGSTCDVKVKNGTTYEGIFKTLSSKFELAVDAVHRKASEPAGGPRREDIVDTMVFKPSDVMLVHFRNVDFNYATKDKFTDSAIAMNSKVNGEHKEKVLQRWEGGDSNSDDYDLESDMSNGWDPNEMFKFNEENYGVKTTYDSSLSSYTVPLEKDNSEEFRQRELRAAQLAREIESSPQYRLRIAMENDDGRTEEEKHSAVQRQGSGRESPSLASREGKYIPLPQRVREGPRGGVRCSSSRGGRPGLSSLPPRGPHHLDNSSPGPGSEARGINGGPSRMSPKAQRPLRGAKTLSSPSNRPSGETSVPPPPAVGRMYPPRSPKSAAPAPISASCPEPPIGSAVPTSSASIPVTSSVSDPGVGSISPASPKISLAPTDVKELSTKEPGRTLEPQELARIAGKVPGLQNEQKRFQLEELRKFGAQFKLQPSSSPENSLDPFPPRILKEEPKGKEKEVDGLLTSEPMGSPVSSKTESVSDKEDKPPLAPSGGTEGPEQPPPPCPSQTGSPPVGLIKGEDKDEGPVAEQVKKSTLNPNAKEFNPTKPLLSVNKSTSTPTSPGPRTHSTPSIPVLTAGQSGLYSPQYISYIPQIHMGPAVQAPQMYPYPVSNSVPGQQGKYRGAKGSLPPQRSDQHQPASAPPMMQAAAAAGPPLVAATPYSSYIPYNPQQFPGQPAMMQPMAHYPSQPVFAPMLQSNPRMLTSGSHPQAIVSSSTPQYPSAEQPTPQALYATVHQSYPHHATQLHAHQPQPATTPTGSQPQSQHAAPSPVQHQAGQAPHLGSGQPQQNLYHPGALTGTPPSLPPGPSAQSPQSSFPQPAAVYAIHHQQLPHGFTNMAHVTQAHVQTGITAAPPPHPGAPHPPQVMLLHPPQSHGGPPQGAVPQSGVPALSASTPSPYPYIGHPQGEQPGQAPGFPGGADDRILQSHPSQQLPFHPPGN

SEQ ID NO: 6880 - protein, 187 aa, Homo sapiens
  Payload ID: 1476;
  Gene Symbol: ATXN2L;
  Gene Name: ataxin 2-like;
  ENSP ID: ENSP00000454588
  MOD_RES (1)..(1): Any amino acid
XTSGSHPQAIVSSSTPQYPSAEQPTPQALYATVHQSYPHHATQLHAHQPQPATTPTGSQPQSQHAAPSPVQAGQAPHLGSGQPQQNLYHPGALTGTPPSLPPGPSAQSPQSSFPQPAAVYAIHHQQLPHGFTNMAHVTQAHVQTGITAAPPPHPGAPHPPQVMLLHPPQSHGGPPQGAVPQSGVPAL

SEQ ID NO: 6881 - protein, 401 aa, Homo sapiens
  Payload ID: 1476;
  Gene Symbol: ATXN2L;
  Gene Name: ataxin 2-like;
  ENSP ID: ENSP00000454757
NKSTSTPTSPGPRTHSTPSIPVLTAGQSGLYSPQYISYIPQIHMGPAVQAPQMYPYPVSNSVPGQQGKYRGAKGSLPPQRSDQHQPASAPPMMQAAAAAGPPLVAATPYSSYIPYNPQQFPGQPAMMQPMAHYPSQPVFAPMLQSNPRMLTSGSHPQAIVSSSTPQYPSAEQPTPQALYATVHQSYPHHATQLHAHQPQPATTPTGSQPQSQHAAPSPVQQHQAGQAPHLGSGQPQQNLYHPGALTGTPPSLPPGPSAQSPQSSFPQPAAVYAIHHQQLPHGFTNMAHVTQAHVQTGITAAPPPHPGAPHPPQVMLLHPPQSHGGPPQGAVPQSGVPALSASTPSPYPYIGHPQGEQPGQAPGFPGGADDRIREFSLAGGIWHGRAEGLQVGQDARVLGGE

SEQ ID NO: 6882 - protein, 110 aa, Homo sapiens
  Payload ID: 1476;
  Gene Symbol: ATXN2L;
  Gene Name: ataxin 2-like;
  ENSP ID: ENSP00000455427
QSSFPQPAAVYAIHHQQLPHGFTNMAHVTQAHVQTGITAAPPPHPGAPHPPQVMLLHPPQSHGGPPQGAVPQSGVPALSASTPSPYPYIGHPQAAPLPPPGELKIVLAAT

SEQ ID NO: 6883 - protein, 11 aa, Homo sapiens
  Payload ID: 1476;
  Gene Symbol: ATXN2L;
  Gene Name: ataxin 2-like;
  ENSP ID: ENSP00000455560
  MOD_RES (1)..(1): Any amino acid
XALSDPDCLLT

SEQ ID NO: 6884 - protein, 128 aa, Homo sapiens
  Payload ID: 1476;
  Gene Symbol: ATXN2L;
  Gene Name: ataxin 2-like;
  ENSP ID: ENSP00000455981
  MOD_RES (1)..(1): Any amino acid
XNLYHPGALTGTPPSLPPGPSAQSPQSSFPQPAAVYAIHHQQLPHGFTNMAHVTQAHVQTGITAAPPPHPGAPHPPQVMLLHPPQSHGGPPQGAVPQSGVPALSASTPSPYPYIGHPQALSDPDCLLT

SEQ ID NO: 6885 - protein, 400 aa, Homo sapiens
  Payload ID: 1476;
  Gene Symbol: ATXN2L;
  Gene Name: ataxin 2-like;
  ENSP ID: ENSP00000456162
NKSTSTPTSPGPRTHSTPSIPVLTAGQSGLYSPQYISYIPQIHMGPAVQAPQMYPYPVSNSVPGQQGKYRGAKGSLPPQRSDQHQPASAPPMMQAAAAAGPPLVAATPYSSYIPYNPQQFPGQPAMMQPMAHYPSQPVFAPMLQSNPRMLTSGSHPQAIVSSSTPQYPSAEQPTPQALYATVHQSYPHHATQLHAHQPQPATTPTGSQPQSQHAAPSPVQHQAGQAPHLGSGQPQQNLYHPGALTGTPPSLPPGPSAQSPQSSFPQPAAVYAIHHQQLPHGFTNMAHVTQAHVQTGITAAPPPHPGAPHPPQVMLLHPPQSHGGPPQGAVPQSGVPALSASTPSPYPYIGHPQGEQPGQAPGFPGGADDRIREFSLAGGIWHGRAEGLQVGQDARVLGGE

SEQ ID NO: 6886 - protein, 336 aa, Homo sapiens
  Payload ID: 1476;
  Gene Symbol: ATXN2L;
  Gene Name: ataxin 2-like;
  ENSP ID: ENSP00000456752
MAFAAALSPSPASGPLFALNRRLHQPATSRVTWRLVIPAEGQSTGKGPPQSPVFEGVYNNSRMLHFLTAVVGSTCDVKVKNGTTYEGIFKTLSSKFELAVDAVHRKASEPAGGPRREDIVDTMVFKPSDVMLVHFRNVDFNYATKDKFTDSAIAMNSKVNGEHKEKVLQRWEGGDSNSDDYDLESDMSNGWDPNEMFKFNEENYGVKTTYDSSLSSYTVPLEKDNSEEFRQRELRAAQLAREIESSPQYRLRIAMENDDGRTEEEKHSAVQRQGSGRESPSLASREGKYIPLPQRVREGPRGGVRCSSSRGGRPGLSSLPPRGPHHLDNSSPGPGS

SEQ ID NO: 6887 - protein, 91 aa, Homo sapiens
  Payload ID: 1476;
  Gene Symbol: ATXN2L;
  Gene Name: ataxin 2-like;
  ENSP ID: ENSP00000456812
MLHFLTAVVGSTCDVKVKNGTTYEGIFKTLSSKFELAVDAVHRKASEPAGGPRREDIVDTMVFKPSDVMLVHFRNVDFNYATKDKFTDSAI

SEQ ID NO: 6888 - protein, 217 aa, Homo sapiens
  Payload ID: 1476;
  Gene Symbol: ATXN2L;
  Gene Name: ataxin 2-like;
  ENSP ID: ENSP00000457599
GSTCDVKVKNGTTYEGIFKTLSSKFELAVDAVHRKASEPAGGPRREDIVDTMVFKPSDVMLVHFRNVDFNYATKDKFTDSAIAMNSKVNGEHKEKKRTTQKSFVSESCVRPSWLERLNQAPSTAYGSPWRTTMGALKRRSTVQSSGRAQGGRAPAWHPGRGSISLCLNESGKVPGEEFDAAALGAVGLALALCHLVALTIWTTAALAQVLRPVVSME

SEQ ID NO: 6889 - protein, 1068 aa, Homo sapiens
  Payload ID: 1476;
  Gene Symbol: ATXN2L;
  Gene Name: ataxin 2-like;
  ENSP ID: ENSP00000457613
MLKPQPLQQPSQPQQPPPTQQAVARRPPGGTSPPNGGLPGPLATSAAPPGPPAAASPCLGPVAAAGSGLRRGAEGILAPQPPPPQQHQERPGAAAIGSARGQSTGKGPPQSPVFEGVYNNSRMLHFLTAVVGSTCDVKVKNGTTYEGIFKTLSSKFELAVDAVHRKASEPAGGPRREDIVDTMVFKPSDVMLVHFRNVDFNYATKDKFTDSAIAMNSKVNGEHKEKVLQRWEGGDSNSDDYDLESDMSNGWDPNEMFKFNEENYGVKTTYDSSLSSYTVPLEKDNSEEFRQRELRAAQLAREIESSPQYRLRIAMENDDGRTEEEKHSAVQRQGSGRESPSLASREGKYIPLPQRVREGPRGGVRCSSSRGGRPGLSSLPPRGPHHLDNSSPGPGSEARGINGGPSRMSPKAQRPLRGAKTLSSPSNRPSGETSVPPPPAAPPFLPVGRMYPPRSPKSAAPAPISASCPEPPIGSAVPTSSASIPVTSSVSDPGVGSISPASPKISLAPTDVKELSTKEPGRTLEPQELARIAGKVPGLQNEQKRFQLEELRKFGAQFKLQPSSSPENSLDPFPPRILKEEPKGKEKEVDGLLTSEPMGSPVSSKTESVSDKEDKPPLAPSGGTEGPEQPPPPCPSQTGSPPVGLIKGEDKDEGPVAEQVKKSTLNPNAKEFNPTKPLLSVNKSTSTPTSPGPRTHSTPSIPVLTAGQSGLYSPQYISYIPQIHMGPAVQAPQMYPYPVSNSVPGQQGKYRGAKGSLPPQRSDQHQPASAPPMMQAAAAAGPPLVAATPYSSYIPYNPQQFPGQPAMMQPMAHYPSQPVFAPMLQSNPRMLTSGSHPQAIVSSSTPQYPSAEQPTPQALYATVHQSYPHHATQLHAHQPQPATTPTGSQPQSQHAAPSPVQHQAGQAPHLGSGQPQQNLYHPGALTGTPPSLPPGPSAQSPQSSFPQPAAVYAIHHQQLPHGFTNMAHVTQAHVQTGITAAPPPHPGAPHPPQVMLLHPPQSHGGPPQGAVPQSGVPALSASTPSPYPYIGHPQGEQPGQAPGFPGGADDRILQSHPSQQLPFHPPGN

SEQ ID NO: 6890 - protein, 306 aa, Homo sapiens
  Payload ID: 1477;
  Gene Symbol: ATXN3;
  Gene Name: ataxin 3;
  Uniprot ID:  P54252;
  ENSP ID: ENSP00000339110
MESIFHEKQPSGNMDDSGFFSIQVISNALKVWGLELILFNSPEYQRLRIDPINERSFICNYKEHWFTVRKLGKQWFNLNSLLTGPELISDTYLALFLAQLQQEGYSIFVVKGDLPDCEADQLLQMIRVQQMHRPKLIGEELAQLKEQRVHKTDLERVLEANDGSGMLDEDEEDLQRALALSRQEIDMEDEEADLRRAIQLSMQGSSRNISQDMTQTSGTNLTSEELRKRREAYFEKQQQKQQQQQQQQQQGDLSGQSSHPCERPATSSGALGSDLGDAMSEEDMLQAAVTMSLETVRNDLKTEGKK

SEQ ID NO: 6891 - protein, 79 aa, Homo sapiens
  Payload ID: 1477;
  Gene Symbol: ATXN3;
  Gene Name: ataxin 3;
  ENSP ID: ENSP00000352324
MESIFHEKQEGSLCAQHCLNNLLQGEYFSPVELSSIAHQLDEEERMRMAEGGVTSEDYRTFLQQPSGNMDDSGFFSIQK

SEQ ID NO: 6892 - protein, 310 aa, Homo sapiens
  Payload ID: 1477;
  Gene Symbol: ATXN3;
  Gene Name: ataxin 3;
  ENSP ID: ENSP00000376965
MESIFHEKQEGSLCAQHCLNNLLQGEYFSPVELSSIAHQLDEEERMRMAEGGVTSEDYRTFLQQPSGNMDDSGFFSIQWFNLNSLLTGPELISDTYLALFLAQLQQEGYSIFVVKGDLPDCEADQLLQMIRVQQMHRPKLIGEELAQLKEQRVHKTDLERVLEANDGSGMLDEDEEDLQRALALSRQEIDMEDEEADLRRAIQLSMQGSSRNISQDMTQTSGTNLTSEELRKRREAYFEKQQQKQQQQQQQQQQGDLSGQSSHPCERPATSSGALGSDLGDAMSEEDMLQAAVTMSLETVRNDLKTEGKK

SEQ ID NO: 6893 - protein, 291 aa, Homo sapiens
  Payload ID: 1477;
  Gene Symbol: ATXN3;
  Gene Name: ataxin 3;
  ENSP ID: ENSP00000389376
MESIFHEKVISNALKVWGLELILFNSPEYQRLRIDPINERSFICNYKEHWFTVRKLGKQWFNLNSLLTGPELISDTYLALFLAQLQQEGYSIFVVKGDLPDCEADQLLQMIRVQQMHRPKLIGEELAQLKEQRVHKTDLERVLEANDGSGMLDEDEEDLQRALALSRQEIDMEDEEADLRRAIQLSMQGSSRNISQDMTQTSGTNLTSEELRKRREAYFEKQQQKQQQQQQQQQQGDLSGQSSHPCERPATSSGALGSDLGDAMSEEDMLQAAVTMSLETVRNDLKTEGKK

SEQ ID NO: 6894 - protein, 99 aa, Homo sapiens
  Payload ID: 1477;
  Gene Symbol: ATXN3;
  Gene Name: ataxin 3;
  ENSP ID: ENSP00000422073
MESIFHEKQEGSLCAQHCLNNLLQGEYFSPVELSSIAHQLDEEERMRMAEGGVTSEDYRTFLQQPSGNMDDSGFFSIQVILYLSLRVICQIAKLTNSCR

SEQ ID NO: 6895 - protein, 182 aa, Homo sapiens
  Payload ID: 1477;
  Gene Symbol: ATXN3;
  Gene Name: ataxin 3;
  Uniprot ID:  P54252;
  ENSP ID: ENSP00000425322
MIRVQQMHRPKLIGEELAQLKEQRVHKTDLERVLEANDGSGMLDEDEEDLQRALALSRQEIDMEDEEADLRRAIQLSMQGSSRNISQDMTQTSGTNLTSEELRKRREAYFEKQQQKQQQQQQQQQQGDLSGQSSHPCERPATSSGALGSDLGDAMSEEDMLQAAVTMSLETVRNDLKTEGKK

SEQ ID NO: 6896 - protein, 346 aa, Homo sapiens
  Payload ID: 1477;
  Gene Symbol: ATXN3;
  Gene Name: ataxin 3;
  Uniprot ID:  P54252;
  ENSP ID: ENSP00000426697
MESIFHEKQEGSLCAQHCLNNLLQGEYFSPVELSSIAHQLDEEERMRMAEGGVTSEDYRTFLQVISNALKVWGLELILFNSPEYQRLRIDPINERSFICNYKEHWFTVRKLGKQWFNLNSLLTGPELISDTYLALFLAQLQQEGYSIFVVKGDLPDCEADQLLQMIRVQQMHRPKLIGEELAQLKEQRVHKTDLERVLEANDGSGMLDEDEEDLQRALALSRQEIDMEDEEADLRRAIQLSMQGSSRNISQDMTQTSGTNLTSEELRKRREAYFEKQQQKQQQQQQQQQQGDLSGQSSHPCERPATSSGALGSDLGDAMSEEDMLQAAVTMSLETVRNDLKTEGKK

SEQ ID NO: 6897 - protein, 205 aa, Homo sapiens
  Payload ID: 1477;
  Gene Symbol: ATXN3;
  Gene Name: ataxin 3;
  ENSP ID: ENSP00000435571
MESIFHEKQEGSLCAQHCLNNLLQGEYFSPVELSSIAHQLDEEERMRMAEGGVTSEDYRTFLQWFNLNSLLTGPELISDTYLALFLAQLQQEGYSIFVVKGDLPDCEADQLLQMIRVQQMHRPKLIGEELAQLKEQRVHKTDLERVLEANDGSGMLDEDEEDLQRALALSRQEIDMEDEEADLRRAIQLSMQGSSRNISQDMTQT

SEQ ID NO: 6898 - protein, 364 aa, Homo sapiens
  Payload ID: 1477;
  Gene Symbol: ATXN3;
  Gene Name: ataxin 3;
  Uniprot ID:  P54252;
  ENSP ID: ENSP00000437157
MESIFHEKQEGSLCAQHCLNNLLQGEYFSPVELSSIAHQLDEEERMRMAEGGVTSEDYRTFLQQPSGNMDDSGFFSIQVISNALKVWGLELILFNSPEYQRLRIDPINERSFICNYKEHWFTVRKLGKQWFNLNSLLTGPELISDTYLALFLAQLQQEGYSIFVVKGDLPDCEADQLLQMIRVQQMHRPKLIGEELAQLKEQRVHKTDLERVLEANDGSGMLDEDEEDLQRALALSRQEIDMEDEEADLRRAIQLSMQGSSRNISQDMTQTSGTNLTSEELRKRREAYFEKQQQKQQQQQQQQQQGDLSGQSSHPCERPATSSGALGSDLGKACSPFIMFATFTLYLTYELHVIFALHYSSFPL

SEQ ID NO: 6899 - protein, 370 aa, Homo sapiens
  Payload ID: 1477;
  Gene Symbol: ATXN3;
  Gene Name: ataxin 3;
  ENSP ID: ENSP00000445618
MESIFHEKQEGSLCAQHCLNNLLQGEYFSPVELSSIAHQLDEEERMRMAEGGVTSEDYRTFLQQPSGNMDDSGFFSIQVISNALKVWGLELILFNSPEYQRLRIDPINERSFICNYKEHWFTVRKLGKQWFNLNSLLTGPELISDTYLALFLAQLQQEGYSIFVVKGDLPDCEADQLLQMIRVQQMHRPKLIGEELAQLKEQRVHKTDLERVLEANDGSGMLDEDEEDLQRALALSRQEIDMEDEEADLRRAIQLSMQGSSRNISQDMTQTSGTNLTSEELRKRREAYFEKVRLRLQKYIQQQKQQQQQQQQQQGDLSGQSSHPCERPATSSGALGSDLGDAMSEEDMLQAAVTMSLETVRNDLKTEGKK

SEQ ID NO: 6900 - protein, 79 aa, Homo sapiens; identical to SEQ ID NO: 6891
  Payload ID: 1477;
  Gene Symbol: ATXN3;
  Gene Name: ataxin 3;
  ENSP ID: ENSP00000450492

SEQ ID NO: 6901 - protein, 79 aa, Homo sapiens; identical to SEQ ID NO: 6891
  Payload ID: 1477;
  Gene Symbol: ATXN3;
  Gene Name: ataxin 3;
  ENSP ID: ENSP00000450566

SEQ ID NO: 6902 - protein, 223 aa, Homo sapiens
  Payload ID: 1477;
  Gene Symbol: ATXN3;
  Gene Name: ataxin 3;
  ENSP ID: ENSP00000450641
MESIFHEKQPSGNMDDSGFFSIQWFNLNSLLTGPELISDTYLALFLAQLQQEGYSIFVVKGDLPDCEADQLLQMIRVQQMHRPKLIGEELAQLKEQRVHKTDLERVLEANDGSGMLDEDEEDLQRALALSRQEIDMEDEEADLRRAIQLSMQGSSRNISQDMTQTSGTNLTSEELRKRREAYFEKQQQKQQQQQQQQQQGDLSGQSSHPCERPATSSGALGSD

SEQ ID NO: 6903 - protein, 151 aa, Homo sapiens
  Payload ID: 1477;
  Gene Symbol: ATXN3;
  Gene Name: ataxin 3;
  ENSP ID: ENSP00000450642
MIRVQQMHRPKLIGEELAQLKEQRVHKTDLERVLEANDGSGMLDEDEEDLQRALALSRQEIDMEDEEADLRRAIQLSMQGSSRNISQDMTQTSGTNLTSEELRKRREAYFEKQQQKQQQQQQQQQQGDLSGQSSHPCERPATSSGALGSDL

SEQ ID NO: 6904 - protein, 260 aa, Homo sapiens
  Payload ID: 1477;
  Gene Symbol: ATXN3;
  Gene Name: ataxin 3;
  ENSP ID: ENSP00000451001
MESIFHEKVISNALKVWGLELILFNSPEYQRLRIDPINERSFICNYKEHWFTVRKLGKQWFNLNSLLTGPELISDTYLALFLAQLQQEGYSIFVVKGDLPDCEADQLLQMIRVQQMHRPKLIGEELAQLKEQRVHKTDLERVLEANDGSGMLDEDEEDLQRALALSRQEIDMEDEEADLRRAIQLSMQGSSRNISQDMTQTSGTNLTSEELRKRREAYFEKQQQKQQQQQQQQQQGDLSGQSSHPCERPATSSGALGSDL

SEQ ID NO: 6905 - protein, 110 aa, Homo sapiens
  Payload ID: 1477;
  Gene Symbol: ATXN3;
  Gene Name: ataxin 3;
  ENSP ID: ENSP00000451103
MESIFHEKQEGSLCAQHCLNNLLQGEYFSPVELSSIAHQLDEEERMRMAEGGVTSEDYRTFLQQPSGNMDDSGFFSIQVISNALKVWGLELILFNSPEYQRLRIDPIGLT

SEQ ID NO: 6906 - protein, 78 aa, Homo sapiens
  Payload ID: 1477;
  Gene Symbol: ATXN3;
  Gene Name: ataxin 3;
  ENSP ID: ENSP00000451132
MESIFHEKQEGSLCAQHCLNNLLQGEYFSPVELSSIAHQLDEEERMRMAEGGVTSEDYRTFLQPSGNMDDSGFFSIQK

SEQ ID NO: 6907 - protein, 329 aa, Homo sapiens
  Payload ID: 1477;
  Gene Symbol: ATXN3;
  Gene Name: ataxin 3;
  ENSP ID: ENSP00000451385
MESIFHEKQEGSLCAQHCLNNLLQGEYFSPVELSSIAHQLDEEERMRMAEGGVTSEDYRTFLQPSGNMDDSGFFSIQVISNALKVWGLELILFNSPEYQRLRIDPINERSFICNYKEHWFTVRKLGKQWFNLNSLLTGPELISDTYLALFLAQLQQEGYSIFVVKGDLPDCEADQLLQMIRVQQMHRPKLIGEELAQLKEQRVHKTDLERVLEANDGSGMLDEDEEDLQRALALSRQEIDMEDEEADLRRAIQLSMQGSSRNISQDMTQTSGTNLTSEELRKRREAYFEKQQQKQQQQQQQQQQGDLSGQSSHPCERPATSSGALGSDL

SEQ ID NO: 6908 - protein, 114 aa, Homo sapiens
  Payload ID: 1477;
  Gene Symbol: ATXN3;
  Gene Name: ataxin 3;
  ENSP ID: ENSP00000451399
MESIFHEKQEGSLCAQHCLNNLLQGEYFSPVELSSIAHQLDEEERMRMAEGGVTSEDYRTFLQQPSGNMDDSGFFSIQLLFFLTGYKQCLESLGFRTNPVQQSRVSEAQDRSYK

SEQ ID NO: 6909 - protein, 95 aa, Homo sapiens
  Payload ID: 1477;
  Gene Symbol: ATXN3;
  Gene Name: ataxin 3;
  ENSP ID: ENSP00000451405
MESIFHEKQPSGNMDDSGFFSIQVISNALKVWGLELILFNSPEYQRLRIDPINERSFICNYKEHWFTVRKLGKQVILYLSLRVICQIAKLTNSCR

SEQ ID NO: 6910 - protein, 232 aa, Homo sapiens
  Payload ID: 1477;
  Gene Symbol: ATXN3;
  Gene Name: ataxin 3;
  ENSP ID: ENSP00000451417
MTVVFSLFRNERSFICNYKEHWFTVRKLGKQWFNLNSLLTGPELISDTYLALFLAQLQQEGYSIFVVKGDLPDCEADQLLQMIRVQQMHRPKLIGEELAQLKEQRVHKTDLERVLEANDGSGMLDEDEEDLQRALALSRQEIDMEDEEADLRRAIQLSMQGSSRNISQDMTQTSGTNLTSEELRKRREAYFEKQQQKQQQQQQQQQQGDLSGQSSHPCERPATSSGALGSDL

SEQ ID NO: 6911 - protein, 110 aa, Homo sapiens
  Payload ID: 1477;
  Gene Symbol: ATXN3;
  Gene Name: ataxin 3;
  ENSP ID: ENSP00000451693
MESIFHEKQEGSLCAQHCLNNLLQGEYFSPVELSSIAHQLDEEERMRMAEGGVTSEDYRTFLQQPSGNMDDSGFFSIQWFNLNSLLTGPELISDTYLALFLAQLQQEVTQ

SEQ ID NO: 6912 - protein, 79 aa, Homo sapiens; identical to SEQ ID NO: 6891
  Payload ID: 1477;
  Gene Symbol: ATXN3;
  Gene Name: ataxin 3;
  ENSP ID: ENSP00000451733

SEQ ID NO: 6913 - protein, 159 aa, Homo sapiens
  Payload ID: 1477;
  Gene Symbol: ATXN3;
  Gene Name: ataxin 3;
  ENSP ID: ENSP00000451769
MESIFHEKQEGSLCAQHCLNNLLQGEYFSPVELSSIAHQLDEEERMRMAEGGVTSEDYRTFLQQPSGNMDDSGFFSIQVISNALKVWGLELILFNSPEYQRLRIDPINERSFICNYKEHWFTVRKLGKQWFNLNSLLTGPELISDTYLALFLAQLQQEG

SEQ ID NO: 6914 - protein, 150 aa, Homo sapiens
  Payload ID: 1477;
  Gene Symbol: ATXN3;
  Gene Name: ataxin 3;
  ENSP ID: ENSP00000451771
MESIFHEKQEGSLCAQHCLNNLLQGEYFSPVELSSIAHQLDEEERMRMAEGGVTSEDYRTFLQQPSGNMDDSGFFSIQVISNALKVWGLELILFNSPEYQRLRIDPINERSFICNYKEHWFTVRKLGKQVILYLSLRVICQIAKLTNSCR

SEQ ID NO: 6915 - protein, 79 aa, Homo sapiens; identical to SEQ ID NO: 6891
  Payload ID: 1477;
  Gene Symbol: ATXN3;
  Gene Name: ataxin 3;
  ENSP ID: ENSP00000451910

SEQ ID NO: 6916 - protein, 278 aa, Homo sapiens
  Payload ID: 1477;
  Gene Symbol: ATXN3;
  Gene Name: ataxin 3;
  ENSP ID: ENSP00000451996
MESIFHEKQEGSLCAQHCLNNLLQGEYFSPVELSSIAHQLDEEERMRMAEGGVTSEDYRTFLQQPSGNMDDSGFFSIQWFNLNSLLTGPELISDTYLALFLAQLQQEGYSIFVVKGDLPDCEADQLLQMIRVQQMHRPKLIGEELAQLKEQRVHKTDLERVLEANDGSGMLDEDEEDLQRALALSRQEIDMEDEEADLRRAIQLSMQGSSRNISQDMTQTSGTNLTSEELRKRREAYFEKQQQKQQQQQQQQQQGDLSGQSSHPCERPATSSGALGSD

SEQ ID NO: 6917 - protein, 200 aa, Homo sapiens
  Payload ID: 1477;
  Gene Symbol: ATXN3;
  Gene Name: ataxin 3;
  ENSP ID: ENSP00000452139
MESIFHEKQEGSLCAQHCLNNLLQGEYFSPVELSSIAHQLDEEERMRMAEGGVTSEDYRTFLQWFNLNSLLTGPELISDTYLALFLAQLQQEGYSIFVVKGDLPDCEADQLLQMIRVQQMHRPKLIGEELAQLKEQRVHKTDLERVLEANDGSGMLDEDEEDLQRALALSRQEIDMEDEEADLRRAIQLSMQVPETYLKI

SEQ ID NO: 6918 - protein, 161 aa, Homo sapiens
  Payload ID: 1477;
  Gene Symbol: ATXN3;
  Gene Name: ataxin 3;
  ENSP ID: ENSP00000452356
MESIFHEKQEGSLCAQHCLNNLLQGEYFSPVELSSIAHQLDEEERMRMAEGGVTSEDYRTFLQQPSGNMDDSGFFSIQVISNALKVWGLELILFNSPEYQRLRIDPINERSFICNYKEHWFTVRKLGKQWFNLNSLLTGPELISDTYLALFLAQLQQEVTQ

SEQ ID NO: 6919 - protein, 79 aa, Homo sapiens; identical to SEQ ID NO: 6891
  Payload ID: 1477;
  Gene Symbol: ATXN3;
  Gene Name: ataxin 3;
  ENSP ID: ENSP00000452461

SEQ ID NO: 6920 - protein, 99 aa, Homo sapiens; identical to SEQ ID NO: 6894
  Payload ID: 1477;
  Gene Symbol: ATXN3;
  Gene Name: ataxin 3;
  ENSP ID: ENSP00000452532

SEQ ID NO: 6921 - protein, 199 aa, Homo sapiens
  Payload ID: 1477;
  Gene Symbol: ATXN3;
  Gene Name: ataxin 3;
  ENSP ID: ENSP00000474067
QEGSLCAQHCLNNLLQGEYFSPVELSSIAHQLDEEERMRMAEGGVTSEDYRTFLQQPSGNMDDSGFFSIQVISNALKVWGLELILFNSPEYQRLRIDPINERSFICNYKEHWFTVRKLGKQGDLPDCEADQLLQMIRVQQMHRPKLIGEELAQLKEQRVHKTDLERVLEANDGSGMLDEDEEDLQRALALSRQEIDMED

SEQ ID NO: 6922 - protein, 361 aa, Homo sapiens
  Payload ID: 1477;
  Gene Symbol: ATXN3;
  Gene Name: ataxin 3;
  Uniprot ID:  P54252;
  ENSP ID: ENSP00000478320
MESIFHEKQEGSLCAQHCLNNLLQGEYFSPVELSSIAHQLDEEERMRMAEGGVTSEDYRTFLQQPSGNMDDSGFFSIQVISNALKVWGLELILFNSPEYQRLRIDPINERSFICNYKEHWFTVRKLGKQWFNLNSLLTGPELISDTYLALFLAQLQQEGYSIFVVKGDLPDCEADQLLQMIRVQQMHRPKLIGEELAQLKEQRVHKTDLERVLEANDGSGMLDEDEEDLQRALALSRQEIDMEDEEADLRRAIQLSMQGSSRNISQDMTQTSGTNLTSEELRKRREAYFEKQQQKQQQQQQQQQQGDLSGQSSHPCERPATSSGALGSDLGDAMSEEDMLQAAVTMSLETVRNDLKTEGKK

SEQ ID NO: 6923 - protein, 288 aa, Homo sapiens
  Payload ID: 1477;
  Gene Symbol: ATXN3;
  Gene Name: ataxin 3;
  ENSP ID: ENSP00000481390
MESIFHEKQEGSLCAQHCLNNLLQGEYFSPVELSSIAHQLDEEERMRMAEGGVTSEDYRTFLQQPSGNMDDSGFFSIQVISNALKVWGLELILFNSPEYQRLRIDPINERSFICNYKEHWFTVRKLGKQWFNLNSLLTGPELISDTYLALFLAQLQQEGYSIFVVKGDLPDCEADQLLQMIRVQQMHRPKLIGEELAQLKEQRVHKTDLERVLEANDGSGMLDEDEEDLQRALALSRQEIDMEDEEADLRRAIQLSMQGSSRNISQDMTQTSGTNLTSEESEETRSLL

SEQ ID NO: 6924 - protein, 301 aa, Homo sapiens
  Payload ID: 1477;
  Gene Symbol: ATXN3;
  Gene Name: ataxin 3;
  ENSP ID: ENSP00000481998
MESIFHEKQEGSLCAQHCLNNLLQGEYFSPVELSSIAHQLDEEERMRMAEGGVTSEDYRTFLQQPSGNMDDSGFFSIQVISNALKVWGLELILFNSPEYQRLRIDPINERSFICNYKEHWFTVRKLGKQWFNLNSLLTGPELISDTYLALFLAQLQQEGYSIFVVKGDLPDCEADQLLQMIRVQQMHRPKLIGEELAQLKEQRVHKTDLERVLEANDGSGMLDEDEEDLQRALALSRQEIDMEDEEADLRRAIQLSMQGSSRNISQDMTQTSGTNLTSEELRKRREAYFENHNSEVDEGKF

SEQ ID NO: 6925 - protein, 324 aa, Homo sapiens
  Payload ID: 1477;
  Gene Symbol: ATXN3;
  Gene Name: ataxin 3;
  ENSP ID: ENSP00000484016
MESIFHEKQEGSLCAQHCLNNLLQGEYFSPVELSSIAHQLDEEERMRMAEGGVTSEDYRTFLQQPSGNMDDSGFFSIQVISNALKVWGLELILFNSPEYQRLRIDPINERSFICNYKEHWFTVRKLGKQWFNLNSLLTGPELISDTYLALFLAQLQQEGYSIFVVKGDLPDCEADQLLQMIRVQQMHRPKLIGEELAQLKEQRVHKTDLERVLEANDGSGMLDEDEEDLQRALALSRQEIDMEDEEADLRRAIQLSMQGSSRNISQDMTQTSGTNLTSEELRKRREAYFEKPRQADYERQQQQKQQQQQQQQQQGPIRTEFTSM

SEQ ID NO: 6926 - protein, 355 aa, Homo sapiens
  Payload ID: 1478;
  Gene Symbol: ATXN3L;
  Gene Name: ataxin 3-like;
  Uniprot ID:  Q9H3M9;
  ENSP ID: ENSP00000369996
MDFIFHEKQEGFLCAQHCLNNLLQGEYFSPVELASIAHQLDEEERMRMAEGGVTSEEYLAFLQQPSENMDDTGFFSIQVISNALKFWGLEIIHFNNPEYQKLGIDPINERSFICNYKQHWFTIRKFGKHWFNLNSLLAGPELISDTCLANFLARLQQQAYSVFVVKGDLPDCEADQLLQIISVEEMDTPKLNGKKLVKQKEHRVYKTVLEKVSEESDESGTSDQDEEDFQRALELSRQETNREDEHLRSTIELSMQGSSGNTSQDLPKTSCVTPASEQPKKIKEDYFEKHQQEQKQQQQQSDLPGHSSYLHERPTTSSRAIESDLSDDISEGTVQAAVDTILEIMRKNLKIKGEK

SEQ ID NO: 6927 - protein, 162 aa, Homo sapiens [sequence omitted]

SEQ ID NO: 6928 - protein, 892 aa, Homo sapiens
  Payload ID: 1479;
  Gene Symbol: ATXN7;
  Gene Name: ataxin 7;
  Uniprot ID:  O15265;
  ENSP ID: ENSP00000295900
MSERAADDVRGEPRRAAAAAGGAAAAAARQQQQQQQQQQPPPPQPQRQQHPPPPPRRTRPEDGGPGAASTSAAAMATVGERRPLPSPEVMLGQSWNLWVEASKLPGKDGTELDESFKEFGKNREVMGLCREDMPIFGFCPAHDDFYLVVCNDCNQVVKPQAFQSHYERRHSSSSKPPLAVPPTSVFSFFPSLSKSKGGSASGSNRSSSGGVLSASSSSSKLLKSPKEKLQLRGNTRPMHPIQQSRVPHGRIMTPSVKVEKIHPKMDGTLLKSAVGPTCPATVSSLVKPGLNCPSIPKPTLPSPGQILNGKGLPAPPTLEKKPEDNSNNRKFLNKRLSEREFDPDIHCGVIDLDTKKPCTRSLTCKTHSLTQRRAVQGRRKRFDVLLAEHKNKTREKELIRHPDSQQPPQPLRDPHPAPPRTSQEPHQNPHGVIPSESKPFVASKPKPHTPSLPRPPGCPAQQGGSAPIDPPPVHESPHPPLPATEPASRLSSEEGEGDDKEESVEKLDCHYSGHHPQPASFCTFGSRQIGRGYYVFDSRWNRLRCALNLMVEKHLNAQLWKKIPPVPSTTSPISTRIPHRTNSVPTSQCGVSYLAAATVSTSPVLLSSTCISPNSKSVPAHGTTLNAQPAASGAMDPVCSMQSRQVSSSSSSPSTPSGLSSVPSSPMSRKPQKLKSSKSLRPKESSGNSTNCQNASSSTSGGSGKKRKNSSPLLVHSSSSSSSSSSSSHSMESFRKNCVAHSGPPYPSTVTSSHSIGLNCVTNKANAVNVRHDQSGRGPPTGSPAESIKRMSVMVNSSDSTLSLGPFIHQSNELPVNSHGSFSHSHTPLDKLIGKKRKCSPSSSSINNSSSKPTKVAKVPAVNNVHMKHTGTIPGAQGLMNSSLLHQPKARP

SEQ ID NO: 6929 - protein, 25 aa, Homo sapiens
  Payload ID: 1479;
  Gene Symbol: ATXN7;
  Gene Name: ataxin 7;
  ENSP ID: ENSP00000418203
MSERAADDVRGEPRRAAAAAGGAAA

SEQ ID NO: 6930 - protein, 892 aa, Homo sapiens; identical to SEQ ID NO: 6928
  Payload ID: 1479;
  Gene Symbol: ATXN7;
  Gene Name: ataxin 7;
  Uniprot ID:  O15265;
  ENSP ID: ENSP00000420234

SEQ ID NO: 6931 - protein, 115 aa, Homo sapiens
  Payload ID: 1479;
  Gene Symbol: ATXN7;
  Gene Name: ataxin 7;
  ENSP ID: ENSP00000428067
DKLIGKKRKCSPSSSSINNSSSKPTKVAKVPAVNNVHMKHTGTIPGAQGLMNSSLLHQDISSPCLRTGISATSPQSPDLKSKGTSLTAENSTGRNNADTFEDKLHLHSALWTPRC

SEQ ID NO: 6932 - protein, 747 aa, Homo sapiens
  Payload ID: 1479;
  Gene Symbol: ATXN7;
  Gene Name: ataxin 7;
  Uniprot ID:  O15265;
  ENSP ID: ENSP00000428277
MEGSKTPLQSSPSAQELKAPLERRHSSSSKPPLAVPPTSVFSFFPSLSKSKGGSASGSNRSSSGGVLSASSSSSKLLKSPKEKLQLRGNTRPMHPIQQSRVPHGRIMTPSVKVEKIHPKMDGTLLKSAVGPTCPATVSSLVKPGLNCPSIPKPTLPSPGQILNGKGLPAPPTLEKKPEDNSNNRKFLNKRLSEREFDPDIHCGVIDLDTKKPCTRSLTCKTHSLTQRRAVQGRRKRFDVLLAEHKNKTREKELIRHPDSQQPPQPLRDPHPAPPRTSQEPHQNPHGVIPSESKPFVASKPKPHTPSLPRPPGCPAQQGGSAPIDPPPVHESPHPPLPATEPASRLSSEEGEGDDKEESVEKLDCHYSGHHPQPASFCTFGSRQIGRGYYVFDSRWNRLRCALNLMVEKHLNAQLWKKIPPVPSTTSPISTRIPHRTNSVPTSQCGVSYLAAATVSTSPVLLSSTCISPNSKSVPAHGTTLNAQPAASGAMDPVCSMQSRQVSSSSSSPSTPSGLSSVPSSPMSRKPQKLKSSKSLRPKESSGNSTNCQNASSSTSGGSGKKRKNSSPLLVHSSSSSSSSSSSSHSMESFRKNCVAHSGPPYPSTVTSSHSIGLNCVTNKANAVNVRHDQSGRGPPTGSPAESIKRMSVMVNSSDSTLSLGPFIHQSNELPVNSHGSFSHSHTPLDKLIGKKRKCSPSSSSINNSSSKPTKVAKVPAVNNVHMKHTGTIPGAQGLMNSSLLHQPKARP

SEQ ID NO: 6933 - protein, 945 aa, Homo sapiens
  Payload ID: 1479;
  Gene Symbol: ATXN7;
  Gene Name: ataxin 7;
  Uniprot ID:  O15265;
  ENSP ID: ENSP00000439585
MSERAADDVRGEPRRAAAAAGGAAAAAARQQQQQQQQQQPPPPQPQRQQHPPPPPRRTRPEDGGPGAASTSAAAMATVGERRPLPSPEVMLGQSWNLWVEASKLPGKDGTELDESFKEFGKNREVMGLCREDMPIFGFCPAHDDFYLVVCNDCNQVVKPQAFQSHYERRHSSSSKPPLAVPPTSVFSFFPSLSKSKGGSASGSNRSSSGGVLSASSSSSKLLKSPKEKLQLRGNTRPMHPIQQSRVPHGRIMTPSVKVEKIHPKMDGTLLKSAVGPTCPATVSSLVKPGLNCPSIPKPTLPSPGQILNGKGLPAPPTLEKKPEDNSNNRKFLNKRLSEREFDPDIHCGVIDLDTKKPCTRSLTCKTHSLTQRRAVQGRRKRFDVLLAEHKNKTREKELIRHPDSQQPPQPLRDPHPAPPRTSQEPHQNPHGVIPSESKPFVASKPKPHTPSLPRPPGCPAQQGGSAPIDPPPVHESPHPPLPATEPASRLSSEEGEGDDKEESVEKLDCHYSGHHPQPASFCTFGSRQIGRGYYVFDSRWNRLRCALNLMVEKHLNAQLWKKIPPVPSTTSPISTRIPHRTNSVPTSQCGVSYLAAATVSTSPVLLSSTCISPNSKSVPAHGTTLNAQPAASGAMDPVCSMQSRQVSSSSSSPSTPSGLSSVPSSPMSRKPQKLKSSKSLRPKESSGNSTNCQNASSSTSGGSGKKRKNSSPLLVHSSSSSSSSSSSSHSMESFRKNCVAHSGPPYPSTVTSSHSIGLNCVTNKANAVNVRHDQSGRGPPTGSPAESIKRMSVMVNSSDSTLSLGPFIHQSNELPVNSHGSFSHSHTPLDKLIGKKRKCSPSSSSINNSSSKPTKVAKVPAVNNVHMKHTGTIPGAQGLMNSSLLHQDISSPCLRTGISATSPQSPDLKSKGTSLTAENSTGRNNADTFEDKLHLHSALWTPRCL

SEQ ID NO: 6934 - protein, 146 aa, Homo sapiens
  Payload ID: 1480;
  Gene Symbol: ATXN7L1;
  Gene Name: ataxin 7-like 1;
  Uniprot ID:  Q9ULK2;
  ENSP ID: ENSP00000326344
MTSERSRIPCLSAAAAEGTGKKQQEGRAMATLDRKVPSPEAFLGKPWSSWIDAAKLHCSDNVDLEEAGKEGGKSREVMRLNKEDMHLFGHYPAHDDFYLVVCSACNQVVKPQVFQSHCGRKQDNRRNEGISRSGPESSQAIEKHQV

SEQ ID NO: 6935 - protein, 861 aa, Homo sapiens
  Payload ID: 1480;
  Gene Symbol: ATXN7L1;
  Gene Name: ataxin 7-like 1;
  Uniprot ID:  Q9ULK2;
  ENSP ID: ENSP00000410759
MTSERSRIPCLSAAAAEGTGKKQQEGRAMATLDRKVPSPEAFLGKPWSSWIDAAKLHCSDNVDLEEAGKEGGKSREVMRLNKEDMHLFGHYPAHDDFYLVVCSACNQVVKPQVFQSHCERRHGSMCRPSPSPVSPASNPRTSLVQVKTKACLSGHHSASSTSKPFKTPKDNLLTSSSKQHTVFPAKGSRDKPCVPVPVVSLEKIPNLVKADGANVKMNSTTTTAVSASSTSSSAVSTPPLIKPVLMSKSVPPSPEKILNGKGILPTTIDKKHQNGTKNSNKPYRRLSEREFDPNKHCGVLDPETKKPCTRSLTCKTHSLSHRRAVPGRKKQFDLLLAEHKAKSREKEVKDKEHLLTSTREILPSQSGPAQDSLLGSSGSSGPEPKVASPAKSRPPNSVLPRPSSANSISSSTSSNHSGHTPEPPLPPVGGDLASRLSSDEGEMDGADESEKLDCQFSTHHPRPLAFCSFGSRLMGRGYYVFDRRWDRFRFALNSMVEKHLNSQMWKKIPPAADSPLPSPAAHITTPVPASVLQPFSNPSAVYLPSAPISSRLTSSYIMTSAMLSNAAFVTSPDPSALMSHTTAFPHVAATLSIMDSTFKAPSAVSPIPAVIPSPSHKPSKTKTSKSSKVKDLSTRSDESPSNKKRKPQSSTSSSSSSSSSSLQTSLSSPLSGPHKKNCVLNASSALNSYQAAPPYNSLSVHNSNNGVSPLSAKLEPSGRTSLPGGPADIVRQVGAVGGSSDSCPLSVPSLALHAGDLSLASHNAVSSLPLSFDKSEGKKRKNSSSSSKACKITKMPGMNSVHKKNPPSLLAPVPDPVNSTSSRQVGKNSSLALSQSSPSSISSPGHSRQNTNRTGRIRTLP

SEQ ID NO: 6936 - protein, 738 aa, Homo sapiens
  Payload ID: 1480;
  Gene Symbol: ATXN7L1;
  Gene Name: ataxin 7-like 1;
  Uniprot ID:  Q9ULK2;
  ENSP ID: ENSP00000418476
MCRPSPSPVSPASNPRTSLVQVKTKACLSGHHSASSTSKPFKTPKDNLLTSSSKQHTVFPAKGSRDKPCVPVPVVSLEKIPNLVKADGANVKMNSTTTTAVSASSTSSSAVSTPPLIKPVLMSKSVPPSPEKILNGKGILPTTIDKKHQNGTKNSNKPYRRLSEREFDPNKHCGVLDPETKKPCTRSLTCKTHSLSHRRAVPGRKKQFDLLLAEHKAKSREKEVKDKEHLLTSTREILPSQSGPAQDSLLGSSGSSGPEPKVASPAKSRPPNSVLPRPSSANSISSSTSSNHSGHTPEPPLPPVGGDLASRLSSDEGEMDGADESEKLDCQFSTHHPRPLAFCSFGSRLMGRGYYVFDRRWDRFRFALNSMVEKHLNSQMWKKIPPAADSPLPSPAAHITTPVPASVLQPFSNPSAVYLPSAPISSRLTSSYIMTSAMLSNAAFVTSPDPSALMSHTTAFPHVAATLSIMDSTFKAPSAVSPIPAVIPSPSHKPSKTKTSKSSKVKDLSTRSDESPSNKKRKPQSSTSSSSSSSSSSLQTSLSSPLSGPHKKNCVLNASSALNSYQAAPPYNSLSVHNSNNGVSPLSAKLEPSGRTSLPGGPADIVRQVGAVGGSSDSCPLSVPSLALHAGDLSLASHNAVSSLPLSFDKSEGKKRKNSSSSSKACKITKMPGMNSVHKKNPPSLLAPVPDPVNSTSSRQVGKNSSLALSQSSPSSISSPGHSRQKNTNRTGRIRTLP

SEQ ID NO: 6937 - protein, 95 aa, Homo sapiens
  Payload ID: 1480;
  Gene Symbol: ATXN7L1;
  Gene Name: ataxin 7-like 1;
  ENSP ID: ENSP00000418679
MATLDRKVPSPEAFLGKPWSSWIDAAKLHCSDNMHLFGHYPAHDDFYLVVCSACNQVVKPQVFQSHCGRKQDNRRNEGISRSGPESSQAIEKHQV

SEQ ID NO: 6938 - protein, 574 aa, Homo sapiens
  Payload ID: 1480;
  Gene Symbol: ATXN7L1;
  Gene Name: ataxin 7-like 1;
  ENSP ID: ENSP00000418900
PSSANSISSSTSSNHSGHTPEPPLPPVGGDLASRLSSDEGEMDGADESEKLDCQFSTHHPRPLAFCSFGSRLMGRGYYVFDRRWDRFRFALNSMVEKHLNSQMWKHRNPSHRASGPSPLFRTCLTNLLSLSNIGAAWVSTLESVAPRYPLNLAAQTPGPGGPEPGGMAADGGVEDIRKKRNGQDSFFFNKHLTLHQEPPTQYSLSARKIPPAADSPLPSPAAHITTPVPASVLQPFSNPSAVYLPSAPISSRLTSSYIMTSAMLSNAAFVTSPDPSALMSHTTAFPHVAATLSIMDSTFKAPSAVSPIPAVIPSPSHKPSKTKTSKSSKVKDLSTRSDESPSNKKRKPQSSTSSSSSSSSSSLQTSLSSPLSGPHKKNCVLNASSALNSYQAAPPYNSLSVHNSNNGVSPLSAKLEPSGRTSLPGGPADIVRQVGAVGGSSDSCPLSVPSLALHAGDLSLASHNAVSSLPLSFDKSEGKKRKNSSSSSKACKITKMPGMNSVHKKNPPSLLAPVPDPVNSTSSRQVRDLLAPPSPALGGRGSWAAPLLSRAAPTGNTSLIPVLVFPEGSFHPLL

SEQ ID NO: 6939 - protein, 743 aa, Homo sapiens
  Payload ID: 1480;
  Gene Symbol: ATXN7L1;
  Gene Name: ataxin 7-like 1;
  ENSP ID: ENSP00000419566
MCRPSPSPVSPASNPRTSLVQVKTKACLSGHHSASSTSKPFKTPKDNLLTSSSKQHTVFPAKGSRDKPCVPVPVVSLEKIPNLVKADGANVKMNSTTTTAVSASSTSSSAVSTPPLIKPVLMSKSVPPSPEKILNGKGILPTTIDKKHQNGTKNSNKPYRRLSEREFDPNKHCGVLDPETKKPCTRSLTCKTHSLSHRRAVPGRKKQFDLLLAEHKAKSREKEVKDKEHLLTSTREILPSQSGPAQDSLLGSSGSSGPEPKVASPAKSRPPNSVLPRPSSANSISSSTSSNHSGHTPEPPLPPVGGDLASRLSSDEGEMDGADESEKLDCQFSTHHPRPLAFCSFGSRLMGRGYYVFDRRWDRFRFALNSMVEKHLNSQMWKKIPPAADSPLPSPAAHITTPVPASVLQPFSNPSAVYLPSAPISSRLTSSYIMTSAMLSNAAFVTSPDPSALMSHTTAFPHVAATLSIMDSTFKAPSAVSPIPAVIPSPSHKPSKTKTSKSSKVKDLSTRSDESPSNKKRKPQSSTSSSSSSSSSSLQTSLSSPLSGPHKKNCVLNASSALNSYQAAPPYNSLSVHNSNNGVSPLSAKLEPSGRTSLPGGPADIVRQVGAVGGSSDSCPLSVPSLALHAGDLSLASHNAVSSLPLSFDKSEGKKRKNSSSSSKACKITKMPGMNSVHKKNPPSLLAPVPDPVNSTSSRQVRDLLAPPSPALGGRGSWAAPLLSRAAPTGNTSLIPVLVFPEG

SEQ ID NO: 6940 - protein, 68 aa, Homo sapiens
  Payload ID: 1480;
  Gene Symbol: ATXN7L1;
  Gene Name: ataxin 7-like 1;
  ENSP ID: ENSP00000420483
MCRPSPSPVSPASNPRTSLVQVKTKACLSGHHSASSTSKPFKTPKDNLLTSSSKQHTVFPAKGSRDKP

SEQ ID NO: 6941 - protein, 722 aa, Homo sapiens
  Payload ID: 1481;
  Gene Symbol: ATXN7L2;
  Gene Name: ataxin 7-like 2;
  Uniprot ID:  Q5T6C5;
  ENSP ID: ENSP00000358886
MAVRERAAAAMAALERRVPSLDDFAGQSWSSWVERADLPAADGAELEESSKNTKKLDAMTLIKEDMSIFGHCPAHDDFYLVVCNHCSQVVKPQAFQKHCERRHGPLSKLYGRAPPPPPAPASSQKCHVVNGQGPACRAPGSTKTSSREKGQGSRSRGHQPPEKTQKDNLCQPGGLTKDSPGKPPMAPPSKEPPGRENIEIIPSEGSSHWAEGSPPEKEPSGTRLPPKTHRKMARKECDLNRQCGVINPETKKICTRLLTCKIHSVHQRREVQGRAKDFDVLVAELKANSRKGESPKEKSPGRKEQVLERPSQELPSSVQVVAAVAAPSSTFSVRAKQTYPYCALPRSRASSESELDDEGPCGGDGDPGLFPFPMPRGGTQASSEESEEEGTSDDLHPPPDCHYATRPPRPQAFCTFGSRLVSPGCYVFSRRLDRFCSALSSMLERHLSTHMWKKIPPAAEPPAHLVNSPLSAPLSPSSTGTCPRLPGPTLRPACPASMPPTKDNLVPSYPAGSPSVAAACSQAECMGGSQAITSPLPANTPSPSFSKLPPSKASKSSKGKDGVEVEAPSRKRKLSPGPTTLKRTCILEPTGKGKPSGCRGLSAKTKTALSMGLNGTMGPRVKRAGPLDCRGSPHQLPTPVKASQLENRGAAGHPAKALPTNCLSEEEVAKKRKNLATYCRPVKAKHCQAGAPADVACSVRRKKPGPALAFEEKCSTLKSKAH

SEQ ID NO: 6942 - protein, 103 aa, Homo sapiens
  Payload ID: 1481;
  Gene Symbol: ATXN7L2;
  Gene Name: ataxin 7-like 2;
  ENSP ID: ENSP00000474312
MAVRERAAAAMAALERRVPSLDDFAGQSWSSWVERADLPAADETEVQGQPLPKGPLRRGGTCIADQGDFEDAQGPKTAVSLLCDHPISAGPEKLGVTLTMLWG

SEQ ID NO: 6943 - protein, 580 aa, Homo sapiens
  Payload ID: 1481;
  Gene Symbol: ATXN7L2;
  Gene Name: ataxin 7-like 2;
  ENSP ID: ENSP00000484134
MAVRERAAAAMAALERRVPSLDDFAGQSWSSWVERADLPAADGAELEESSKNTKKLDAMTLIKEDMSIFGHCPAHDDFYLVVCNHCSQVVKPQAFQKHCERRHGPLSKLYGRAPPPPPAPASSQKCHVVNGQGPACRAPGSTKTSSREKGQGSRSRGHQPPEKTQKDNLCQPGGLTKDSPGKPPMAPPSKEPPGRENIEIIPSEGSSHWAEGSPPEKEPSGTRLPPKTHRKMARKECDLNRQCGVINPETKKICTRLLTCKIHSVHQRREVQGRAKDFDVLVAELKANSRKGESPKEKSPGRKEQVLERPSQELPSSVQVVAAVAAPSSTFSVRAKQTYPYCALPRSRASSESELDDEGPCGGDGDPGLFPFPMPRGGTQASSEESEEEGTSDDLHPPPDCHYATRPPRPQAFCTFGSRLVSPGCYVFSRRLDRFCSALSSMLERHLSTHMWKKIPPAAEPPAHLVNSPLSAPLSPSSTGTCPRLPGPTLRPACPASMPPTKDNLVPSYPAGSPSVAAACSQAECMGEPGYHLTTACQHAIPVLQQAAAFQGQQVIQRQGRGGGGGPFSKAEVIPWPYHS

SEQ ID NO: 6944 - protein, 347 aa, Homo sapiens
  Payload ID: 1482;
  Gene Symbol: ATXN7L3;
  Gene Name: ataxin 7-like 3;
  Uniprot ID:  Q14CW9;
  ENSP ID: ENSP00000374035
MKMEEMSLSGLDNSKLEAIAQEIYADLVEDSCLGFCFEVHRAVKCGYFFLDDTDPDSMKDFEIVDQPGLDIFGQVFNQWKSKECVCPNCSRSIAASRFAPHLEKCLGMGRNSSRIANRRIANSNNMNKSESDQEDNDDINDNDWSYGSEKKAKKRKSDKNPNSPRRSKSLKHKNGELSNSDPFKYNNSTGISYETLGPEELRSLLTTQCGVISEHTKKMCTRSLRCPQHTDEQRRTVRIYFLGPSAVLPEVESSLDNDSFDMTDSQALISRLQWDGSSDLSPSDSGSSKTSENQGWGLGTNSSESRKTKKKKSHLSLVGTASGLGSNKKKKPKPPAPPTPSIYDDIN

SEQ ID NO: 6945 - protein, 354 aa, Homo sapiens
  Payload ID: 1482;
  Gene Symbol: ATXN7L3;
  Gene Name: ataxin 7-like 3;
  Uniprot ID:  Q14CW9;
  ENSP ID: ENSP00000397259
MKMEEMSLSGLDNSKLEAIAQEIYADLVEDSCLGFCFEVHRAVKCGYFFLDDTDPDSMKDFEIVDQPGLDIFGQVFNQWKSKECVCPNCSRSIAASRFAPHLEKCLGMGRNSSRIANRRIANSNNMNKSESDQEDNDDINDNDWSYGSEKKAKKRKSDKLWYLPFQNPNSPRRSKSLKHKNGELSNSDPFKYNNSTGISYETLGPEELRSLLTTQCGVISEHTKKMCTRSLRCPQHTDEQRRTVRIYFLGPSAVLPEVESSLDNDSFDMTDSQALISRLQWDGSSDLSPSDSGSSKTSENQGWGLGTNSSESRKTKKKKSHLSLVGTASGLGSNKKKKPKPPAPPTPSIYDDIN

SEQ ID NO: 6946 - protein, 72 aa, Homo sapiens
  Payload ID: 1482;
  Gene Symbol: ATXN7L3;
  Gene Name: ataxin 7-like 3;
  ENSP ID: ENSP00000465210
MCTRSLRCPQHTDEQRRTVRIYFLGPSAVLPEVESSLDNDSFDMTDSQALISRLQWDGSSDLSPSDSGSSKT

SEQ ID NO: 6947 - protein, 308 aa, Homo sapiens
  Payload ID: 1482;
  Gene Symbol: ATXN7L3;
  Gene Name: ataxin 7-like 3;
  ENSP ID: ENSP00000465614
MKMEEMSLSGLDNSKLEAIAQEIYADLVEDSCLGFCFEVHRAVKCGYFFLDDTDPDSMKDFEIVDQPGLDIFGQVFNQWKSKECVCPNCSRSIAASRFAPHLEKCLGMGRNSSRIANRRIANSNNMNKSESDQEDNDDINDNDWSYGSEKKAKKRKSDKNPNSPRRSKSLKHKNGELSNSDPFKYNNSTGISYETLGPEELRSLLTTQCGVISEHTKKMCTRSLRCPQHTDEQRRTVRIYFLGPSAVLPEVESSLDNDSFDMTDSQALISRLQWDGSSDLSPSDSGSSKTSENQGWGLGTNSSESRKT

SEQ ID NO: 6948 - protein, 139 aa, Homo sapiens
  Payload ID: 1482;
  Gene Symbol: ATXN7L3;
  Gene Name: ataxin 7-like 3;
  ENSP ID: ENSP00000466717
MKMEEMSLSGLDNSKLEAIAQEIYADLVEDSCLGFCFEVHRAVKCGYFFLDDTDPDSMKDFEIVDQPGLDIFGQVFNQWKSKECVCPNCSRSIAASRFAPHLEKCLGMGRNSSRIANRRIANSNNMNKSESDQEDNDDI

SEQ ID NO: 6949 - protein, 186 aa, Homo sapiens
  Payload ID: 1482;
  Gene Symbol: ATXN7L3;
  Gene Name: ataxin 7-like 3;
  ENSP ID: ENSP00000467092
  MOD_RES (1)..(1): Any amino acid
XSLKHKNGELSNSDPFKYNNSTGISYETLGPEELRSLLTTLIFLFQQCGVISEHTKKMCTRSLRCPQHTDEQRRTVRIYFLGPSAVLPEVESSLDNDSFDMTDSQALISRLQWDGSSDLSPSDSGSSKTSENQGWGLGTNSSESRKTKKKKSHLSLVGTASGLGSNKKKKPKPPAPPTPSIYDDIN

SEQ ID NO: 6950 - protein, 147 aa, Homo sapiens
  Payload ID: 1482;
  Gene Symbol: ATXN7L3;
  Gene Name: ataxin 7-like 3;
  ENSP ID: ENSP00000467153
MKMEEMSLSGLDNSKLEAIAQEIYADLVEDSCLGFCFEVHRAVKCGYFFLDDTDPDSMKDFEIVDQPGLDIFGQVFNQWKSKECVCPNCSRSIAASRFAPHLEKCLGMGRNSSRIANRRIANSNNMNKSESDQEDNDDINDNDWSYG

SEQ ID NO: 6951 - protein, 97 aa, Homo sapiens
  Payload ID: 1483;
  Gene Symbol: ATXN7L3B;
  Gene Name: ataxin 7-like 3B;
  Uniprot ID:  Q96GX2;
  ENSP ID: ENSP00000430000
MEEISLANLDTNKLEAIAQEIYVDLIEDSCLGFCFEVHRAVKCGYFYLEFAETGSVKDFGIQPVEDKGACRLPLCSLPGEPGNGPDQQLQRSPPEFQ

SEQ ID NO: 6952 - protein, 193 aa, Homo sapiens
  Payload ID: 1484;
  Gene Symbol: ATHL1;
  Gene Name: ATH1, acid trehalase-like 1 (yeast);
  ENSP ID: ENSP00000380780
  MOD_RES (1)..(1): Any amino acid
XEIYEAVTSPQGPAMTWSMFAVGWMELKDAVRARGLLDRSFANMAEPFKVWTENADGSGAVNFLTGMGGFLQAVVFGCTGFRVSVSGIFYQGNKLNFSFSEDSVTVEVTARAGPWAPHLEAELWPSQSRLSLLPGHKVSFPRSAGRIQMSPPKLPGSSSSEFPGRTFSDVRDPLQSPLWVTLGSSSPTESLTV

SEQ ID NO: 6953 - protein, 489 aa, Homo sapiens
  Payload ID: 1484;
  Gene Symbol: ATHL1;
  Gene Name: ATH1, acid trehalase-like 1 (yeast);
  ENSP ID: ENSP00000386297
MLWTPAPPDLTLGEGEEARTWDFLTAVGGSQAEAQACLTEALQLQARGALYTAHAQAWAQLWVECGLDVVGPLQLRQALRGSLYYLLSALPQPKAPGYICHGLSPGGLSNGSREECYWGHVFWDQDLWMFPSILMFHPEAARAILEYRIRTLDGALENAQNLGYQGAKFAWESADSGLEVCPEDIYGVQEVHVNGAVVLAFELYYHTTQDLQLFREAGGWDVVRAVAEFWCSRVEWSPREEKYHLRGVMSPDEYHSGVNNSVYTNVLVQNRKNLEIYEAVTSPQGPAMTWSMFAVGWMELKDAVRARGLLDRSFANMAEPFKVWTENADGSGAVNFLTGMGGFLQAVVFGCTGFRVTRAGVTFDPVCLSGISRVSVSGIFYQGNKLNFSFSEDSVTVEVTARAGPWAPHLEAELWPSQSRLSLLPGHKVSFPRSAGRIQMSPPKLPGSSSSEFPGRTFSDVRDPLQSPLWVTLGSSSPTESLTVDPASE

SEQ ID NO: 6954 - protein, 764 aa, Homo sapiens
  Payload ID: 1484;
  Gene Symbol: ATHL1;
  Gene Name: ATH1, acid trehalase-like 1 (yeast);
  ENSP ID: ENSP00000387099
MEDAGEDPTTFAAHSLPSDPRLLATVTNAYLGTRVFHDTLHVSGVYNGAGGDTHRAMLPSPLNVRLEAPAGMGEQLTETFALDTNTGSFLHTLEGPRFRASQCIYAHRTLPHVLAFRVSIARLAPGSGPITLLLRSAFSPESPDLDLHQGPDFQGARYLYGHTLTPEQPGGPQQEVHMLWTPAPPDLTLGEGEEARTWDFLTAVGGSQAEAQACLTEALQLQARGALYTAHAQAWAQLWVECGLDVVGPLQLRQALRGSLYYLLSALPQPKAPGYICHGLSPGGLSNGSREECYWGHVFWDQDLWMFPSILMFHPEAARAILEYRIRTLDGALENAQNLGYQGAKFAWESADSGLEVCPEDIYGVQEVHVNGAVVLAFELYYHTTQDLQLFREAGGWDVVRAVAEFWCSRVEWSPREEKHLTCASPTLTTGVEGRPLRLCTEHHLGLVCPGVMSPDEYHSGVNNSVYTNVLVQNSLRFAAALAQDLGLPIPSQWLAVADKIKVPFDVEQNFHPEFDGYEPGEVVKQADVVLLGYPVPFSLSPDVRRKNLEIYEAVTSPQGPAMTWSMFAVGWMELKDAVRARGLLDRSFANMAEPFKVWTENADGSGAVNFLTGMGGFLQAVVFGCTGFRVTRAGVTFDPVCLSGISRVSVSGIFYQGNKLNFSFSEDSVTVEVTARAGPWAPHLEAELWPSQSRLSLLPGHKVSFPRSAGRIQMSPPKLPGSSSSEFPGRTFSDVRDPLQSPLWVTLGSSSPTESLTVDPASE

SEQ ID NO: 6955 - protein, 737 aa, Homo sapiens
  Payload ID: 1484;
  Gene Symbol: ATHL1;
  Gene Name: ATH1, acid trehalase-like 1 (yeast);
  Uniprot ID:  Q32M88;
  ENSP ID: ENSP00000387185
MEDAGEDPTTFAAHSLPSDPRLLATVTNAYLGTRVFHDTLHVSGVYNGAGGDTHRAMLPSPLNVRLEAPAGMGEQLTETFALDTNTGSFLHTLEGPRFRASQCIYAHRTLPHVLAFRVSIARLAPGSGPITLLLRSAFSPESPDLDLHQGPDFQGARYLYGHTLTPEQPGGPQQEVHMLWTPAPPDLTLGEGEEARTWDFLTAVGGSQAEAQACLTEALQLQARGALYTAHAQAWAQLWVECGLDVVGPLQLRQALRGSLYYLLSALPQPKAPGYICHGLSPGGLSNGSREECYWGHVFWDQDLWMFPSILMFHPEAARAILEYRIRTLDGALENAQNLGYQGAKFAWESADSGLEVCPEDIYGVQEVHVNGAVVLAFELYYHTTQDLQLFREAGGWDVVRAVAEFWCSRVEWSPREEKYHLRGVMSPDEYHSGVNNSVYTNVLVQNSLRFAAALAQDLGLPIPSQWLAVADKIKVPFDVEQNFHPEFDGYEPGEVVKQADVVLLGYPVPFSLSPDVRRKNLEIYEAVTSPQGPAMTWSMFAVGWMELKDAVRARGLLDRSFANMAEPFKVWTENADGSGAVNFLTGMGGFLQAVVFGCTGFRVTRAGVTFDPVCLSGISRVSVSGIFYQGNKLNFSFSEDSVTVEVTARAGPWAPHLEAELWPSQSRLSLLPGHKVSFPRSAGRIQMSPPKLPGSSSSEFPGRTFSDVRDPLQSPLWVTLGSSSPTESLTVDPASE

SEQ ID NO: 6956 - protein, 203 aa, Homo sapiens
  Payload ID: 1484;
  Gene Symbol: ATHL1;
  Gene Name: ATH1, acid trehalase-like 1 (yeast);
  ENSP ID: ENSP00000431881
  MOD_RES (1)..(1): Any amino acid
XFHDTLHVSGVYNGAGGDTHRAMLPSPLNVRLEAPAGMGEQLTETFALDTNTGSFLHTLEGPRFRASQCIYAHRTLPHVLAFRVSIARLAPGSGPITLLLRSAFSPESPDLDLHQGPDFQGARYLYGHTLTPEQPGGPQQEVHMLWTPAPPDLTLGEVPCPSPRPQDTSAMASVLGASPMGAVRNATGATSSGTRTSGCSRVS

SEQ ID NO: 6957 - protein, 899 aa, Homo sapiens
  Payload ID: 1485;
  Gene Symbol: AKNA;
  Gene Name: AT-hook transcription factor;
  Uniprot ID:  Q7Z591;
  ENSP ID: ENSP00000223791
MPTLGWLPENRDISEDQSSAEQTQALASQASQFLAKVESFERLIQAGRLMPQDQVKGFQRLKAAHAALEEEYLKACREQHPAQPLAGSKGTPGRFDPRRELEAEIYRLGSCLEELKEHIDQTQQEPEPPGSDSALDSTPALPCLHQPTHLPAPSGQAPMPAIKTSCPEPATTTAAASTGPCPLHVNVEVSSGNSEVEDRPQDPLARLRHKELQMEQVYHGLMERYLSVKSLPEAMRMEEEEEGEEEEEEEGGGDSLEVDGVAATPGKAEATRVLPRQCPVQAEKSHGAPLEEATEKMVSMKPPGFQASLARDGHMSGLGKAEAAPPGPGVPPHPPGTKSAASHQSSMTSLEGSGISERLPQKPLHRGGGPHLEETWMASPETDSGFVGSETSRVSPLTQTPEHRLSHISTAGTLAQPFAASVPRDGASYPKARGSLIPRRATEPSTPRSQAQRYLSSPSGPLRQRAPNFSLERTLAAEMAVPGSEFEGHKRISEQPLPNKTISPPPAPAPAAAPLPCGPTETIPSFLLTRAGRDQAICELQEEVSRLRLRLEDSLHQPLQGSPTRPASAFDRPARTRGRPADSPATWGSHYGSKSTERLPGEPRGEEQIVPPGRQRARSSSVPREVLRLSLSSESELPSLPLFSEKSKTTKDSPQAARDGKRGVGSAGWPDRVTFRGQYTGHEYHVLSPKAVPKGNGTVSCPHCRPIRTQDAGGAVTGDPLGPPPADTLQCPLCGQVGSPPEADGPGSATSGAEKATTRRKASSTPSPKQRSKQAGSSPRPPPGLWYLATAPPAPAPPAFAYISSVPIMPYPPAAVYYAPAGPTSAQPAAKWPPTASPPPARRHRHSIQLDLGDLEELNKALSRAVQAAESVRSTTRQMRSSLSADLRQAHSLRGSCLF

SEQ ID NO: 6958 - protein, 1439 aa, Homo sapiens
  Payload ID: 1485;
  Gene Symbol: AKNA;
  Gene Name: AT-hook transcription factor;
  Uniprot ID:  Q7Z591;
  ENSP ID: ENSP00000303769
MASSETEIRWAEPGLGKGPQRRRWAWAEDKRDVDRSSSQSWEEERLFPNATSPELLEDFRLAQQHLPPLEWDPHPQPDGHQDSESGETSGEEAEAEDVDSPASSHEPLAWLPQQGRQLDMTEEEPDGTLGSLEVEEAGESSSRLGYEAGLSLEGHGNTSPMALGHGQARGWVASGEQASGDKLSEHSEVNPSVELSPARSWSSGTVSLDHPSDSLDSTWEGETDGPQPTALAETLPEGPSHHLLSPDGRTGGSVARATPMEFQDSSAPPAQSPQHATDRWRRETTRFFCPQPKEHIWKQTKTSPKPLPSRFIGSISPLNPQPRPTRQGRPLPRQGATLAGRSSSNAPKYGRGQLNYPLPDFSKVGPRVRFPKDESYRPPKSRSHNRKPQAPARPLIFKSPAEIVQEVLLSSGEAALAKDTPPAHPITRVPQEFQTPEQATELVHQLQEDYHRLLTKYAEAENTIDQLRLGAKVNLFSDPPQPNHSIHTGMVPQGTKVLSFTIPQPRSAEWWPGPAEDPQASAASGWPSARGDLSPSSLTSMPTLGWLPENRDISEDQSSAEQTQALASQASQFLAKVESFERLIQAGRLMPQDQVKGFQRLKAAHAALEEEYLKACREQHPAQPLAGSKGTPGRFDPRRELEAEIYRLGSCLEELKEHIDQTQQEPEPPGSDSALDSTPALPCLHQPTHLPAPSGQAPMPAIKTSCPEPATTTAAASTGPCPLHVNVEVSSGNSEVEDRPQDPLARLRHKELQMEQVYHGLMERYLSVKSLPEAMRMEEEEEGEEEEEEEGGGDSLEVDGVAATPGKAEATRVLPRQCPVQAEKSHGAPLEEATEKMVSMKPPGFQASLARDGHMSGLGKAEAAPPGPGVPPHPPGTKSAASHQSSMTSLEGSGISERLPQKPLHRGGGPHLEETWMASPETDSGFVGSETSRVSPLTQTPEHRLSHISTAGTLAQPFAASVPRDGASYPKARGSLIPRRATEPSTPRSQAQRYLSSPSGPLRQRAPNFSLERTLAAEMAVPGSEFEGHKRISEQPLPNKTISPPPAPAPAAAPLPCGPTETIPSFLLTRAGRDQAICELQEEVSRLRLRLEDSLHQPLQGSPTRPASAFDRPARTRGRPADSPATWGSHYGSKSTERLPGEPRGEEQIVPPGRQRARSSSVPREVLRLSLSSESELPSLPLFSEKSKTTKDSPQAARDGKRGVGSAGWPDRVTFRGQYTGHEYHVLSPKAVPKGNGTVSCPHCRPIRTQDAGGAVTGDPLGPPPADTLQCPLCGQVGSPPEADGPGSATSGAEKATTRRKASSTPSPKQRSKQAGSSPRPPPGLWYLATAPPAPAPPAFAYISSVPIMPYPPAAVYYAPAGPTSAQPAAKWPPTASPPPARRHRHSIQLDLGDLEELNKALSRAVQAAESVRSTTRQMRSSLSADLRQAHSLRGSCLF

SEQ ID NO: 6959 - protein, 831 aa, Homo sapiens
  Payload ID: 1485;
  Gene Symbol: AKNA;
  Gene Name: AT-hook transcription factor;
  Uniprot ID:  Q7Z591;
  ENSP ID: ENSP00000309222
MASSETEIRWAEPGLGKGPQRRRWAWAEDKRDVDRSSSQSWEEERLFPNATSPELLEDFRLAQQHLPPLEWDPHPQPDGHQDSESGETSGEEAEAEDVDSPASSHEPLAWLPQQGRQLDMTEEEPDGTLGSLEVEEAGESSSRLGYEAGLSLEGHGNTSPMALGHGQARGWVASGEQASGDKLSEHSEVNPSVELSPARSWSSGTVSLDHPSDSLDSTWEGETDGPQPTALAETLPEGPSHHLLSPDGRTGGSVARATPMEFQDSSAPPAQSPQHATDRWRRETTRFFCPQPKEHIWKQTKTSPKPLPSRFIGSISPLNPQPRPTRQGRPLPRQGATLAGRSSSNAPKYGRGQLNYPLPDFSKVGPRVRFPKDESYRPPKSRSHNRKPQAPARPLIFKSPAEIVQEVLLSSGEAALAKDTPPAHPITRVPQEFQTPEQATELVHQLQEDYHRLLTKYAEAENTIDQLRLGAKVNLFSDPPQPNHSIHTGMVPQGTKVLSFTIPQPRSAEWWPGPAEDPQASAASGWPSARGDLSPSSLTSMPTLGWLPENRDISEDQSSAEQTQALASQASQFLAKVESFERLIQAGRLMPQDQVKGFQRLKAAHAALEEEYLKACREQHPAQPLAGSKGTPGRFDPRRELEAEIYRLGSCLEELKEHIDQTQQEPEPPGSDSALDSTPALPCLHQPTHLPAPSGQAPMPAIKTSCPEPATTTAAASTGPCPLHVNVEVSSGNSEVEDRPQDPLARLRHKELQMEQVYHGLMERYLSVKSLPEAMRMEEEEEGEEEEEEEGGGDSLEVDGVAATPGKAEATRVLPRQCPVQAEKSHGAPLE

SEQ ID NO: 6960 - protein, 1358 aa, Homo sapiens
  Payload ID: 1485;
  Gene Symbol: AKNA;
  Gene Name: AT-hook transcription factor;
  Uniprot ID:  Q7Z591;
  ENSP ID: ENSP00000363188
MLRSEWPVFPEAEAEDVDSPASSHEPLAWLPQQGRQLDMTEEEPDGTLGSLEVEEAGESSSRLGYEAGLSLEGHGNTSPMALGHGQARGWVASGEQASGDKLSEHSEVNPSVELSPARSWSSGTVSLDHPSDSLDSTWEGETDGPQPTALAETLPEGPSHHLLSPDGRTGGSVARATPMEFQDSSAPPAQSPQHATDRWRRETTRFFCPQPKEHIWKQTKTSPKPLPSRFIGSISPLNPQPRPTRQGRPLPRQGATLAGRSSSNAPKYGRGQLNYPLPDFSKVGPRVRFPKDESYRPPKSRSHNRKPQAPARPLIFKSPAEIVQEVLLSSGEAALAKDTPPAHPITRVPQEFQTPEQATELVHQLQEDYHRLLTKYAEAENTIDQLRLGAKVNLFSDPPQPNHSIHTGMVPQGTKVLSFTIPQPRSAEWWPGPAEDPQASAASGWPSARGDLSPSSLTSMPTLGWLPENRDISEDQSSAEQTQALASQASQFLAKVESFERLIQAGRLMPQDQVKGFQRLKAAHAALEEEYLKACREQHPAQPLAGSKGTPGRFDPRRELEAEIYRLGSCLEELKEHIDQTQQEPEPPGSDSALDSTPALPCLHQPTHLPAPSGQAPMPAIKTSCPEPATTTAAASTGPCPLHVNVEVSSGNSEVEDRPQDPLARLRHKELQMEQVYHGLMERYLSVKSLPEAMRMEEEEEGEEEEEEEGGGDSLEVDGVAATPGKAEATRVLPRQCPVQAEKSHGAPLEEATEKMVSMKPPGFQASLARDGHMSGLGKAEAAPPGPGVPPHPPGTKSAASHQSSMTSLEGSGISERLPQKPLHRGGGPHLEETWMASPETDSGFVGSETSRVSPLTQTPEHRLSHISTAGTLAQPFAASVPRDGASYPKARGSLIPRRATEPSTPRSQAQRYLSSPSGPLRQRAPNFSLERTLAAEMAVPGSEFEGHKRISEQPLPNKTISPPPAPAPAAAPLPCGPTETIPSFLLTRAGRDQAICELQEEVSRLRLRLEDSLHQPLQGSPTRPASAFDRPARTRGRPADSPATWGSHYGSKSTERLPGEPRGEEQIVPPGRQRARSSSVPREVLRLSLSSESELPSLPLFSEKSKTTKDSPQAARDGKRGVGSAGWPDRVTFRGQYTGHEYHVLSPKAVPKGNGTVSCPHCRPIRTQDAGGAVTGDPLGPPPADTLQCPLCGQVGSPPEADGPGSATSGAEKATTRRKASSTPSPKQRSKQAGSSPRPPPGLWYLATAPPAPAPPAFAYISSVPIMPYPPAAVYYAPAGPTSAQPAAKWPPTASPPPARRHRHSIQLDLGDLEELNKALSRAVQAAESVRSTTRQMRSSLSADLRQAHSLRGSCLF

SEQ ID NO: 6961 - protein, 384 aa, Homo sapiens
  Payload ID: 1485;
  Gene Symbol: AKNA;
  Gene Name: AT-hook transcription factor;
  Uniprot ID:  Q7Z591;
  ENSP ID: ENSP00000363192
MSAGGGTRGYSPRSPGATSQAICELQEEVSRLRLRLEDSLHQPLQGSPTRPASAFDRPARTRGRPADSPATWGSHYGSKSTERLPGEPRGEEQIVPPGRQRARSSSVPREVLRLSLSSESELPSLPLFSEKSKTTKDSPQAARDGKRGVGSAGWPDRVTFRGQYTGHEYHVLSPKAVPKGNGTVSCPHCRPIRTQDAGGAVTGDPLGPPPADTLQCPLCGQVGSPPEADGPGSATSGAEKATTRRKASSTPSPKQRSKQAGSSPRPPPGLWYLATAPPAPAPPAFAYISSVPIMPYPPAAVYYAPAGPTSAQPAAKWPPTASPPPARRHRHSIQLDLGDLEELNKALSRAVQAAESVRSTTRQMRSSLSADLRQAHSLRGSCLF

SEQ ID NO: 6962 - protein, 1439 aa, Homo sapiens; identical to SEQ ID NO: 6958
  Payload ID: 1485;
  Gene Symbol: AKNA;
  Gene Name: AT-hook transcription factor;
  Uniprot ID:  Q7Z591;
  ENSP ID: ENSP00000363201

SEQ ID NO: 6963 - protein, 558 aa, Homo sapiens
  Payload ID: 1486;
  Gene Symbol: ATL1;
  Gene Name: atlastin GTPase 1;
  Uniprot ID:  Q8WXF7;
  ENSP ID: ENSP00000351155
MAKNRRDRNSWGGFSEKTYEWSSEEEEPVKKAGPVQVLIVKDDHSFELDETALNRILLSEAVRDKEVVAVSVAGAFRKGKSFLMDFMLRYMYNQESVDWVGDYNEPLTGFSWRGGSERETTGIQIWSEIFLINKPDGKKVAVLLMDTQGTFDSQSTLRDSATVFALSTMISSIQVYNLSQNVQEDDLQHLQLFTEYGRLAMEETFLKPFQSLIFLVRDWSFPYEFSYGADGGAKFLEKRLKVSGNQHEELQNVRKHIHSCFTNISCFLLPHPGLKVATNPNFDGKLKEIDDEFIKNLKILIPWLLSPESLDIKEINGNKITCRGLVEYFKAYIKIYQGEELPHPKSMLQATAEANNLAAVATAKDTYNKKMEEICGGDKPFLAPNDLQTKHLQLKEESVKLFRGVKKMGGEEFSRRYLQQLESEIDELYIQYIKHNDSKNIFHAARTPATLFVVIFITYVIAGVTGFIGLDIIASLCNMIMGLTLITLCTWAYIRYSGEYRELGAVIDQVAAALWDQGSTNEALYKLYSAAATHRHLYHQAFPTPKSESTEQSEKKKM

SEQ ID NO: 6964 - protein, 553 aa, Homo sapiens
  Payload ID: 1486;
  Gene Symbol: ATL1;
  Gene Name: atlastin GTPase 1;
  Uniprot ID:  Q8WXF7;
  ENSP ID: ENSP00000413675
MAKNRRDRNSWGGFSEKTYEWSSEEEEPVKKAGPVQVLIVKDDHSFELDETALNRILLSEAVRDKEVVAVSVAGAFRKGKSFLMDFMLRYMYNQESVDWVGDYNEPLTGFSWRGGSERETTGIQIWSEIFLINKPDGKKVAVLLMDTQGTFDSQSTLRDSATVFALSTMISSIQVYNLSQNVQEDDLQHLQLFTEYGRLAMEETFLKPFQSLIFLVRDWSFPYEFSYGADGGAKFLEKRLKVSGNQHEELQNVRKHIHSCFTNISCFLLPHPGLKVATNPNFDGKLKEIDDEFIKNLKILIPWLLSPESLDIKEINGNKITCRGLVEYFKAYIKIYQGEELPHPKSMLQATAEANNLAAVATAKDTYNKKMEEICGGDKPFLAPNDLQTKHLQLKEESVKLFRGVKKMGGEEFSRRYLQQLESEIDELYIQYIKHNDSKNIFHAARTPATLFVVIFITYVIAGVTGFIGLDIIASLCNMIMGLTLITLCTWAYIRYSGEYRELGAVIDQVAAALWDQALYKLYSAAATHRHLYHQAFPTPKSESTEQSEKKKM

SEQ ID NO: 6965 - protein, 52 aa, Homo sapiens
  Payload ID: 1486;
  Gene Symbol: ATL1;
  Gene Name: atlastin GTPase 1;
  ENSP ID: ENSP00000450897
GNQHEELQNVRKHIHSCFTNISCFLLPHPGLKVATNPNFDGKLKGLYKDLSR

SEQ ID NO: 6966 - protein, 29 aa, Homo sapiens
  Payload ID: 1486;
  Gene Symbol: ATL1;
  Gene Name: atlastin GTPase 1;
  ENSP ID: ENSP00000450989
MAKNRRDRNSWGGFSEKTYEWSSEEEEPV

SEQ ID NO: 6967 - protein, 47 aa, Homo sapiens
  Payload ID: 1486;
  Gene Symbol: ATL1;
  Gene Name: atlastin GTPase 1;
  ENSP ID: ENSP00000451015
MDFMLRYMYNQESVDWVGDYNEPLTGFSWRGGSERETTGIQIWSEIF

SEQ ID NO: 6968 - protein, 105 aa, Homo sapiens
  Payload ID: 1486;
  Gene Symbol: ATL1;
  Gene Name: atlastin GTPase 1;
  ENSP ID: ENSP00000451100
QQLESEIDELYIQYIKHNDSKNIFHAARTPATLFVVIFITYVIAGVTGFIGLDIIASLCNMIMGLTLITLCTWAYIRYSGEYRELGAVIDQVAAALWDQGSTNEI

SEQ ID NO: 6969 - protein, 75 aa, Homo sapiens
  Payload ID: 1486;
  Gene Symbol: ATL1;
  Gene Name: atlastin GTPase 1;
  ENSP ID: ENSP00000452074
MDTQGTFDSQSTLRDSATVFALSTMISSIQVYNLSQNVQEDDLQHLQLFTEYGRLAMEETFLKPFQSLIFLVRDW

SEQ ID NO: 6970 - protein, 99 aa, Homo sapiens
  Payload ID: 1486;
  Gene Symbol: ATL1;
  Gene Name: atlastin GTPase 1;
  ENSP ID: ENSP00000452506
MAKNRRDRNSWGGFSEKTYEWSSEEEEPVKKAGPVQVLIVKDDHSFELDETALNRILLSEAVRDKEVVAVSVAGAFRKGKSFLMDFMLRYMYNQESVDW

SEQ ID NO: 6971 - protein, 583 aa, Homo sapiens
  Payload ID: 1487;
  Gene Symbol: ATL2;
  Gene Name: atlastin GTPase 2;
  Uniprot ID:  Q8NHH9;
  ENSP ID: ENSP00000368237
MAEGDEAARGQQPHQGLWRRRRTSDPSAAVNHVSSTTSLGENYEDDDLVNSDEVMKKPCPVQIVLAHEDDHNFELDEEALEQILLQEHIRDLNIVVVSVAGAFRKGKSFLLDFMLRYMYNKDSQSWIGGNNEPLTGFTWRGGCERETTGIQVWNEVFVIDRPNGTKVAVLLMDTQGAFDSQSTIKDCATVFALSTMTSSVQVYNLSQNIQEDDLQHLQLFTEYGRLAMEEIYQKPFQTLMFLIRDWSYPYEHSYGLEGGKQFLEKRLQVKQNQHEELQNVRKHIHNCFSNLGCFLLPHPGLKVATNPSFDGRLKDIDEDFKRELRNLVPLLLAPENLVEKEISGSKVTCRDLVEYFKAYIKIYQGEELPHPKSMLQATAEANNLAAVAGARDTYCKSMEQVCGGDKPYIAPSDLERKHLDLKEVAIKQFRSVKKMGGDEFCRRYQDQLEAEIEETYANFIKHNDGKNIFYAARTPATLFAVMFAMYIISGLTGFIGLNSIAVLCNLVMGLALIFLCTWAYVKYSGEFREIGTVIDQIAETLWEQVLKPLGDNLMEENIRQSVTNSIKAGLTDQVSHHARLKTD

SEQ ID NO: 6972 - protein, 49 aa, Homo sapiens
  Payload ID: 1487;
  Gene Symbol: ATL2;
  Gene Name: atlastin GTPase 2;
  ENSP ID: ENSP00000383944
MAEGDEAARGQQPHQGLWRRRRTSDPSAAVNHVSSTTSLGFSKLDWWKQ

SEQ ID NO: 6973 - protein, 412 aa, Homo sapiens
  Payload ID: 1487;
  Gene Symbol: ATL2;
  Gene Name: atlastin GTPase 2;
  Uniprot ID:  Q8NHH9;
  ENSP ID: ENSP00000384062
MDTQGAFDSQSTIKDCATVFALSTMTSSVQVYNLSQNIQEDDLQHLQLFTEYGRLAMEEIYQKPFQTLMFLIRDWSYPYEHSYGLEGGKQFLEKRLQVKQNQHEELQNVRKHIHNCFSNLGCFLLPHPGLKVATNPSFDGRLKDIDEDFKRELRNLVPLLLAPENLVEKEISGSKVTCRDLVEYFKAYIKIYQGEELPHPKSMLQATAEANNLAAVAGARDTYCKSMEQVCGGDKPYIAPSDLERKHLDLKEVAIKQFRSVKKMGGDEFCRRYQDQLEAEIEETYANFIKHNDGKNIFYAARTPATLFAVMFAMYIISGLTGFIGLNSIAVLCNLVMGLALIFLCTWAYVKYSGEFREIGTVIDQIAETLWEQVLKPLGDNLMEENIRQSVTNSIKAGLTDQVSHHARLKTD

SEQ ID NO: 6974 - protein, 413 aa, Homo sapiens
  Payload ID: 1487;
  Gene Symbol: ATL2;
  Gene Name: atlastin GTPase 2;
  ENSP ID: ENSP00000385446
MDTQGAFDSQSTIKDCATVFALSTMTSSVQVYNLSQNIQEDDLQHLQLFTEYGRLAMEEIYQKPFQTLMFLIRDWSYPYEHSYGLEGGKQFLEKRLQVKQNQHEELQNVRKHIHNCFSNLGCFLLPHPGLKVATNPSFDGRLKDIDEDFKRELRNLVPLLLAPENLVEKEISGSKVTCRDLVEYFKAYIKIYQGEELPHPKSMLQATAEANNLAAVAGARDTYCKSMEQVCGGDKPYIAPSDLERKHLDLKEVAIKQFRSVKKMGGDEFCRRYQDQLEAEIEETYANFIKHNDGKNIFYAARTPATLFAVMFAMYIISGLTGFIGLNSIAVLCNLVMGLALIFLCTWAYVKYSGEFREIGTVIDQIAETLWEQRSPRKVFSKLFEVTRRRMVHRALSSAQRQRLSSNNNKKKN

SEQ ID NO: 6975 - protein, 565 aa, Homo sapiens
  Payload ID: 1487;
  Gene Symbol: ATL2;
  Gene Name: atlastin GTPase 2;
  Uniprot ID:  Q8NHH9;
  ENSP ID: ENSP00000390743
MVLKKGIKFFQRLINSKSLRFGENYEDDDLVNSDEVMKKPCPVQIVLAHEDDHNFELDEEALEQILLQEHIRDLNIVVVSVAGAFRKGKSFLLDFMLRYMYNKDSQSWIGGNNEPLTGFTWRGGCERETTGIQVWNEVFVIDRPNGTKVAVLLMDTQGAFDSQSTIKDCATVFALSTMTSSVQVYNLSQNIQEDDLQHLQLFTEYGRLAMEEIYQKPFQTLMFLIRDWSYPYEHSYGLEGGKQFLEKRLQVKQNQHEELQNVRKHIHNCFSNLGCFLLPHPGLKVATNPSFDGRLKDIDEDFKRELRNLVPLLLAPENLVEKEISGSKVTCRDLVEYFKAYIKIYQGEELPHPKSMLQATAEANNLAAVAGARDTYCKSMEQVCGGDKPYIAPSDLERKHLDLKEVAIKQFRSVKKMGGDEFCRRYQDQLEAEIEETYANFIKHNDGKNIFYAARTPATLFAVMFAMYIISGLTGFIGLNSIAVLCNLVMGLALIFLCTWAYVKYSGEFREIGTVIDQIAETLWEQVLKPLGDNLMEENIRQSVTNSIKAGLTDQVSHHARLKTD

SEQ ID NO: 6976 - protein, 185 aa, Homo sapiens
  Payload ID: 1487;
  Gene Symbol: ATL2;
  Gene Name: atlastin GTPase 2;
  ENSP ID: ENSP00000404921
MAEGDEAARGQQPHQGLWRRRRTSDPSAAVNHVSSTTSLESCSVARLECSGTIFAYCNLPGSSDSSASASQVAGITGENYEDDDLVNSDEVMKKPCPVQIVLAHEDDHNFELDEEALEQILLQEHIRDLNIVVVSVAGAFRKGKSFLLDFMLRYMYNKDSQSWIGGNNEPLTGFTWRGGCERETT

SEQ ID NO: 6977 - protein, 93 aa, Homo sapiens
  Payload ID: 1487;
  Gene Symbol: ATL2;
  Gene Name: atlastin GTPase 2;
  ENSP ID: ENSP00000406004
MAEGDEAARGQQPHQGLWRRRRTSDPSAAVNHVSSTTSLDGVSLCRPGWGAVARSRLTASSASWVHAILRPQPPEYLGLQAPATVSGLLFLYF

SEQ ID NO: 6978 - protein, 175 aa, Homo sapiens
  Payload ID: 1487;
  Gene Symbol: ATL2;
  Gene Name: atlastin GTPase 2;
  ENSP ID: ENSP00000409811
MAEGDEAARGQQPHQGLWRRRRTSDPSAAVNHVSSTTSLEYGRLAMEEIYQKPFQTLMFLIRDWSYPYEHSYGLEGGKQFLEKRLQVKQNQHEELQNVRKHIHNCFSNLGCFLLPHPGLKVATNPSFDGRLKDIDEDFKRELRNLVPLLLAPENLVEKEISGSKVTCRDLVEYFK

SEQ ID NO: 6979 - protein, 258 aa, Homo sapiens
  Payload ID: 1487;
  Gene Symbol: ATL2;
  Gene Name: atlastin GTPase 2;
  ENSP ID: ENSP00000410592
  MOD_RES (1)..(1): Any amino acid
XEGDEAARGQQPHQGLWRRRRTSDPSAAVNHVSSTTSLGENYEDDDLVNSDEVMKKPCPVQIVLAHEDDHNFELDEEALEQILLQEHIRDLNIVVVSVAGAFRKGKSFLLDFMLRYMYNKVYNLSQNIQEDDLQHLQLFTEYGRLAMEEIYQKPFQTLMFLIRDWSYPYEHSYGLEGGKQFLEKRLQVKQNQHEELQNVRKHIHNCFSNLGCFLLPHPGLKVATNPSFDGRLKDIDEDFKRELRNLVPLLLAPENLVE

SEQ ID NO: 6980 - protein, 86 aa, Homo sapiens
  Payload ID: 1487;
  Gene Symbol: ATL2;
  Gene Name: atlastin GTPase 2;
  ENSP ID: ENSP00000413216
MAEGDEAARGQQPHQGLWRRRRTSDPSAAVNHVSSTTSLESCSVARLECSGTIFAYCNLPGSSDSSASASQVAGITGFSKLDWWKQ

SEQ ID NO: 6981 - protein, 579 aa, Homo sapiens
  Payload ID: 1487;
  Gene Symbol: ATL2;
  Gene Name: atlastin GTPase 2;
  Uniprot ID:  Q8NHH9;
  ENSP ID: ENSP00000415336
MAEGDEAARGQQPHQGLWRRRRTSDPSAAVNHVSSTTSLGENYEDDDLVNSDEVMKKPCPVQIVLAHEDDHNFELDEEALEQILLQEHIRDLNIVVVSVAGAFRKGKSFLLDFMLRYMYNKDSQSWIGGNNEPLTGFTWRGGCERETTGIQVWNEVFVIDRPNGTKVAVLLMDTQGAFDSQSTIKDCATVFALSTMTSSVQVYNLSQNIQEDDLQHLQLFTEYGRLAMEEIYQKPFQTLMFLIRDWSYPYEHSYGLEGGKQFLEKRLQVKQNQHEELQNVRKHIHNCFSNLGCFLLPHPGLKVATNPSFDGRLKDIDEDFKRELRNLVPLLLAPENLVEKEISGSKVTCRDLVEYFKAYIKIYQGEELPHPKSMLQATAEANNLAAVAGARDTYCKSMEQVCGGDKPYIAPSDLERKHLDLKEVAIKQFRSVKKMGGDEFCRRYQDQLEAEIEETYANFIKHNDGKNIFYAARTPATLFAVMFAMYIISGLTGFIGLNSIAVLCNLVMGLALIFLCTWAYVKYSGEFREIGTVIDQIAETLWEQVFSKLFEVTRRRMVHRALSSAQRQRLSSNNNKKKN

SEQ ID NO: 6982 - protein, 413 aa, Homo sapiens; identical to SEQ ID NO: 6974
  Payload ID: 1487;
  Gene Symbol: ATL2;
  Gene Name: atlastin GTPase 2;
  ENSP ID: ENSP00000486809

SEQ ID NO: 6983 - protein, 541 aa, Homo sapiens
  Payload ID: 1488;
  Gene Symbol: ATL3;
  Gene Name: atlastin GTPase 3;
  Uniprot ID:  Q6DD88;
  ENSP ID: ENSP00000381844
MLSPQRVAAAASRGADDAMESSKPGPVQVVLVQKDQHSFELDEKALASILLQDHIRDLDVVVVSVAGAFRKGKSFILDFMLRYLYSQKESGHSNWLGDPEEPLTGFSWRGGSDPETTGIQIWSEVFTVEKPGGKKVAVVLMDTQGAFDSQSTVKDCATIFALSTMTSSVQIYNLSQNIQEDDLQQLQLFTEYGRLAMDEIFQKPFQTLMFLVRDWSFPYEYSYGLQGGMAFLDKRLQVKEHQHEEIQNVRNHIHSCFSDVTCFLLPHPGLQVATSPDFDGKLKDIAGEFKEQLQALIPYVLNPSKLMEKEINGSKVTCRGLLEYFKAYIKIYQGEDLPHPKSMLQATAEANNLAAAASAKDIYYNNMEEVCGGEKPYLSPDILEEKHCEFKQLALDHFKKTKKMGGKDFSFRYQQELEEEIKELYENFCKHNGSKNVFSTFRTPAVLFTGIVALYIASGLTGFIGLEVVAQLFNCMVGLLLIALLTWGYIRYSGQYRELGGAIDFGAAYVLEQASSHIGNSTQATVRDAVVGRPSMDKKAQ

SEQ ID NO: 6984 - protein, 523 aa, Homo sapiens
  Payload ID: 1488;
  Gene Symbol: ATL3;
  Gene Name: atlastin GTPase 3;
  ENSP ID: ENSP00000437593
MESSKPGPVQVVLVQKDQHSFELDEKALASILLQDHIRDLDVVVVSVAGAFRKGKSFILDFMLRYLYSQKESGHSNWLGDPEEPLTGFSWRGGSDPETTGIQIWSEVFTVEKPGGKKVAVVLMDTQGAFDSQSTVKDCATIFALSTMTSSVQIYNLSQNIQEDDLQQLQLFTEYGRLAMDEIFQKPFQTLMFLVRDWSFPYEYSYGLQGGMAFLDKRLQVKEHQHEEIQNVRNHIHSCFSDVTCFLLPHPGLQVATSPDFDGKLKDIAGEFKEQLQALIPYVLNPSKLMEKEINGSKVTCRGLLEYFKAYIKIYQGEDLPHPKSMLQATAEANNLAAAASAKDIYYNNMEEVCGGEKPYLSPDILEEKHCEFKQLALDHFKKTKKMGGKDFSFRYQQELEEEIKELYENFCKHNGSKNVFSTFRTPAVLFTGIVALYIASGLTGFIGLEVVAQLFNCMVGLLLIALLTWGYIRYSGQYRELGGAIDFGAAYVLEQASSHIGNSTQATVRDAVVGRPSMDKKAQ

SEQ ID NO: 6985 - protein, 169 aa, Homo sapiens
  Payload ID: 1488;
  Gene Symbol: ATL3;
  Gene Name: atlastin GTPase 3;
  ENSP ID: ENSP00000441842
MRTAGRDPVSAGLQFPKDGSTQRPANRARFVPARTRPSPLHPCCFCFEGGGSMLSPQRVAAAASRGADDAMESSKPGPVQVVLVQKDQHSFELDEKALASILLQDHIRDLDVVVVSVAGAFRKGKSFILDFMLRYLYSQKESGHSNWLGDPEEPLTGFSWRGGSDPETT

SEQ ID NO: 6986 - protein, 823 aa, Homo sapiens
  Payload ID: 1489;
  Gene Symbol: ATMIN;
  Gene Name: ATM interactor;
  Uniprot ID:  O43313;
  ENSP ID: ENSP00000299575
MAASEAAAAAGSAALAAGARAVPAATTGAAAAASGPWVPPGPRLRGSRPRPAGATQQPAVPAPPAGELIQPSVSELSRAVRTNILCTVRGCGKILPNSPALNMHLVKSHRLQDGIVNPTIRKDLKTGPKFYCCPIEGCPRGPERPFSQFSLVKQHFMKMHAEKKHKCSKCSNSYGTEWDLKRHAEDCGKTFRCTCGCPYASRTALQSHIYRTGHEIPAEHRDPPSKKRKMENCAQNQKLSNKTIESLNNQPIPRPDTQELEASEIKLEPSFEDSCGSNTDKQTLTTPPRYPQKLLLPKPKVALVKLPVMQFSVMPVFVPTADSSAQPVVLGVDQGSATGAVHLMPLSVGTLILGLDSEACSLKESLPLFKIANPIAGEPISTGVQVNFGKSPSNPLQELGNTCQKNSISSINVQTDLSYASQNFIPSAQWATADSSVSSCSQTDLSFDSQVSLPISVHTQTFLPSSKVTSSIAAQTDAFMDTCFQSGGVSRETQTSGIESPTDDHVQMDQAGMCGDIFESVHSSYNVATGNIISNSLVAETVTHSLLPQNEPKTLNQDIEKSAPIINFSAQNSMLPSQNMTDNQTQTIDLLSDLENILSSNLPAQTLDHRSLLSDTNPGPDTQLPSGPAQNPGIDFDIEEFFSASNIQTQTEESELSTMTTEPVLESLDIETQTDFLLADTSAQSYGCRGNSNFLGLEMFDTQTQTDLNFFLDSSPHLPLGSILKHSSFSVSTDSSDTETQTEGVSTAKNIPALESKVQLNSTETQTMSSGFETLGSLFFTSNETQTAMDDFLLADLAWNTMESQFSSVETQTSAEPHTVSNF

SEQ ID NO: 6987 - protein, 667 aa, Homo sapiens
  Payload ID: 1489;
  Gene Symbol: ATMIN;
  Gene Name: ATM interactor;
  Uniprot ID:  O43313;
  ENSP ID: ENSP00000455497
MKMHAEKKHKCSKCSNSYGTEWDLKRHAEDCGKTFRCTCGCPYASRTALQSHIYRTGHEIPAEHRDPPSKKRKMENCAQNQKLSNKTIESLNNQPIPRPDTQELEASEIKLEPSFEDSCGSNTDKQTLTTPPRYPQKLLLPKPKVALVKLPVMQFSVMPVFVPTADSSAQPVVLGVDQGSATGAVHLMPLSVGTLILGLDSEACSLKESLPLFKIANPIAGEPISTGVQVNFGKSPSNPLQELGNTCQKNSISSINVQTDLSYASQNFIPSAQWATADSSVSSCSQTDLSFDSQVSLPISVHTQTFLPSSKVTSSIAAQTDAFMDTCFQSGGVSRETQTSGIESPTDDHVQMDQAGMCGDIFESVHSSYNVATGNIISNSLVAETVTHSLLPQNEPKTLNQDIEKSAPIINFSAQNSMLPSQNMTDNQTQTIDLLSDLENILSSNLPAQTLDHRSLLSDTNPGPDTQLPSGPAQNPGIDFDIEEFFSASNIQTQTEESELSTMTTEPVLESLDIETQTDFLLADTSAQSYGCRGNSNFLGLEMFDTQTQTDLNFFLDSSPHLPLGSILKHSSFSVSTDSSDTETQTEGVSTAKNIPALESKVQLNSTETQTMSSGFETLGSLFFTSNETQTAMDDFLLADLAWNTMESQFSSVETQTSAEPHTVSNF

SEQ ID NO: 6988 - protein, 667 aa, Homo sapiens; identical to SEQ ID NO: 6987
  Payload ID: 1489;
  Gene Symbol: ATMIN;
  Gene Name: ATM interactor;
  Uniprot ID:  O43313;
  ENSP ID: ENSP00000463478

SEQ ID NO: 6989 - protein, 54 aa, Homo sapiens
  Payload ID: 1489;
  Gene Symbol: ATMIN;
  Gene Name: ATM interactor;
  ENSP ID: ENSP00000464427
MKMHAEKKHKCSKCSNSYGTEWDLKRHAEDCGKTFRCTCGCPYASRTALQSHIY

SEQ ID NO: 6990 - protein, 3056 aa, Homo sapiens
  Payload ID: 1490;
  Gene Symbol: ATM;
  Gene Name: ATM serine/threonine kinase;
  Uniprot ID:  Q13315;
  ENSP ID: ENSP00000278616
MSLVLNDLLICCRQLEHDRATERKKEVEKFKRLIRDPETIKHLDRHSDSKQGKYLNWDAVFRFLQKYIQKETECLRIAKPNVSASTQASRQKKMQEISSLVKYFIKCANRRAPRLKCQELLNYIMDTVKDSSNGAIYGADCSNILLKDILSVRKYWCEISQQQWLELFSVYFRLYLKPSQDVHRVLVARIIHAVTKGCCSQTDGLNSKFLDFFSKAIQCARQEKSSSGLNHILAALTIFLKTLAVNFRIRVCELGDEILPTLLYIWTQHRLNDSLKEVIIELFQLQIYIHHPKGAKTQEKGAYESTKWRSILYNLYDLLVNEISHIGSRGKYSSGFRNIAVKENLIELMADICHQVFNEDTRSLEISQSYTTTQRESSDYSVPCKRKKIELGWEVIKDHLQKSQNDFDLVPWLQIATQLISKYPASLPNCELSPLLMILSQLLPQQRHGERTPYVLRCLTEVALCQDKRSNLESSQKSDLLKLWNKIWCITFRGISSEQIQAENFGLLGAIIQGSLVEVDREFWKLFTGSACRPSCPAVCCLTLALTTSIVPGTVKMGIEQNMCEVNRSFSLKESIMKWLLFYQLEGDLENSTEVPPILHSNFPHLVLEKILVSLTMKNCKAAMNFFQSVPECEHHQKDKEELSFSEVEELFLQTTFDKMDFLTIVRECGIEKHQSSIGFSVHQNLKESLDRCLLGLSEQLLNNYSSEITNSETLVRCSRLLVGVLGCYCYMGVIAEEEAYKSELFQKAKSLMQCAGESITLFKNKTNEEFRIGSLRNMMQLCTRCLSNCTKKSPNKIASGFFLRLLTSKLMNDIADICKSLASFIKKPFDRGEVESMEDDTNGNLMEVEDQSSMNLFNDYPDSSVSDANEPGESQSTIGAINPLAEEYLSKQDLLFLDMLKFLCLCVTTAQTNTVSFRAADIRRKLLMLIDSSTLEPTKSLHLHMYLMLLKELPGEEYPLPMEDVLELLKPLSNVCSLYRRDQDVCKTILNHVLHVVKNLGQSNMDSENTRDAQGQFLTVIGAFWHLTKERKYIFSVRMALVNCLKTLLEADPYSKWAILNVMGKDFPVNEVFTQFLADNHHQVRMLAAESINRLFQDTKGDSSRLLKALPLKLQQTAFENAYLKAQEGMREMSHSAENPETLDEIYNRKSVLLTLIAVVLSCSPICEKQALFALCKSVKENGLEPHLVKKVLEKVSETFGYRRLEDFMASHLDYLVLEWLNLQDTEYNLSSFPFILLNYTNIEDFYRSCYKVLIPHLVIRSHFDEVKSIANQIQEDWKSLLTDCFPKILVNILPYFAYEGTRDSGMAQQRETATKVYDMLKSENLLGKQIDHLFISNLPEIVVELLMTLHEPANSSASQSTDLCDFSGDLDPAPNPPHFPSHVIKATFAYISNCHKTKLKSILEILSKSPDSYQKILLAICEQAAETNNVYKKHRILKIYHLFVSLLLKDIKSGLGGAWAFVLRDVIYTLIHYINQRPSCIMDVSLRSFSLCCDLLSQVCQTAVTYCKDALENHLHVIVGTLIPLVYEQVEVQKQVLDLLKYLVIDNKDNENLYITIKLLDPFPDHVVFKDLRITQQKIKYSRGPFSLLEEINHFLSVSVYDALPLTRLEGLKDLRRQLELHKDQMVDIMRASQDNPQDGIMVKLVVNLLQLSKMAINHTGEKEVLEAVGSCLGEVGPIDFSTIAIQHSKDASYTKALKLFEDKELQWTFIMLTYLNNTLVEDCVKVRSAAVTCLKNILATKTGHSFWEIYKMTTDPMLAYLQPFRTSRKKFLEVPRFDKENPFEGLDDINLWIPLSENHDIWIKTLTCAFLDSGGTKCEILQLLKPMCEVKTDFCQTVLPYLIHDILLQDTNESWRNLLSTHVQGFFTSCLRHFSQTSRSTTPANLDSESEHFFRCCLDKKSQRTMLAVVDYMRRQKRPSSGTIFNDAFWLDLNYLEVAKVAQSCAAHFTALLYAEIYADKKSMDDQEKRSLAFEEGSQSTTISSLSEKSKEETGISLQDLLLEIYRSIGEPDSLYGCGGGKMLQPITRLRTYEHEAMWGKALVTYDLETAIPSSTRQAGIIQALQNLGLCHILSVYLKGLDYENKDWCPELEELHYQAAWRNMQWDHCTSVSKEVEGTSYHESLYNALQSLRDREFSTFYESLKYARVKEVEEMCKRSLESVYSLYPTLSRLQAIGELESIGELFSRSVTHRQLSEVYIKWQKHSQLLKDSDFSFQEPIMALRTVILEILMEKEMDNSQRECIKDILTKHLVELSILARTFKNTQLPERAIFQIKQYNSVSCGVSEWQLEEAQVFWAKKEQSLALSILKQMIKKLDASCAANNPSLKLTYTECLRVCGNWLAETCLENPAVIMQTYLEKAVEVAGNYDGESSDELRNGKMKAFLSLARFSDTQYQRIENYMKSSEFENKQALLKRAKEEVGLLREHKIQTNRYTVKVQRELELDELALRALKEDRKRFLCKAVENYINCLLSGEEHDMWVFRLCSLWLENSGVSEVNGMMKRDGMKIPTYKFLPLMYQLAARMGTKMMGGLGFHEVLNNLISRISMDHPHHTLFIILALANANRDEFLTKPEVARRSRITKNVPKQSSQLDEDRTEAANRIICTIRSRRPQMVRSVEALCDAYIILANLDATQWKTQRKGINIPADQPITKLKNLEDVVVPTMEIKVDHTGEYGNLVTIQSFKAEFRLAGGVNLPKIIDCVGSDGKERRQLVKGRDDLRQDAVMQQVFQMCNTLLQRNTETRKRKLTICTYKVVPLSQRSGVLEWCTGTVPIGEFLVNNEDGAHKRYRPNDFSAFQCQKKMMEVQKKSFEEKYEVFMDVCQNFQPVFRYFCMEKFLDPAIWFEKRLAYTRSVATSSIVGYILGLGDRHVQNILINEQSAELVHIDLGVAFEQGKILPTPETVPFRLTRDIVDGMGITGVEGVFRRCCEKTMEVMRNSQETLLTIVEVLLYDPLFDWTMNPLKALYLQQRPEDETELHPTLNADDQECKRNLSDIDQSFNKVAERVLMRLQEKLKGVEEGTVLSVGGQVNLLIQQAIDPKNLSRLFPGWKAWV

SEQ ID NO: 6991 - protein, 3056 aa, Homo sapiens; identical to SEQ ID NO: 6990
  Payload ID: 1490;
  Gene Symbol: ATM;
  Gene Name: ATM serine/threonine kinase;
  Uniprot ID:  Q13315;
  ENSP ID: ENSP00000388058

SEQ ID NO: 6992 - protein, 93 aa, Homo sapiens
  Payload ID: 1490;
  Gene Symbol: ATM;
  Gene Name: ATM serine/threonine kinase;
  ENSP ID: ENSP00000432318
MSLVLNDLLICCRQLEHDRATERKKEVEKFKRLIRDPETIKHLDRHSDSKQGKYLNWDAVFRFLQKYIQKETECLRIAKPNVSASTQASRQKK

SEQ ID NO: 6993 - protein, 154 aa, Homo sapiens
  Payload ID: 1490;
  Gene Symbol: ATM;
  Gene Name: ATM serine/threonine kinase;
  ENSP ID: ENSP00000433955
MSLVLNDLLICCRQLEHDRATERKKEVEKFKRLIRDPETIKHLDRHSDSKQGKYLNWDAVFRFLQKYIQKETECLRIAKPNVSASTQASRQKKMQEISSLVKYFIKCANRKLFSVYFRLYLKPSQDVHRVLVARIIHAVTKGCCSQTDGLNSKF

SEQ ID NO: 6994 - protein, 155 aa, Homo sapiens
  Payload ID: 1490;
  Gene Symbol: ATM;
  Gene Name: ATM serine/threonine kinase;
  ENSP ID: ENSP00000434327
IDHLFISNLPEIVVELLMTLHEPANSSASQSTDLCDFSGDLDPAPNPPHFPSHVIKATFAYISNCHKTKLKSILEILSKSPDSYQKILLAICEQAAETNNVYKKHRILKIYHLFVSLLLKDIKSGLGGAWAFVLRDVIYTLIHYINQRKLTIFSQ

SEQ ID NO: 6995 - protein, 77 aa, Homo sapiens
  Payload ID: 1490;
  Gene Symbol: ATM;
  Gene Name: ATM serine/threonine kinase;
  ENSP ID: ENSP00000435524
  MOD_RES (1)..(1): Any amino acid
XCEVKTDFCQTVLPYLIHDILLQDTNESWRNLLSTHVQGFFTSCLRHFSQTSRSTTPANLDSDLLQEQFLMMLSGWI

SEQ ID NO: 6996 - protein, 1369 aa, Homo sapiens
  Payload ID: 1490;
  Gene Symbol: ATM;
  Gene Name: ATM serine/threonine kinase;
  ENSP ID: ENSP00000435747
MSLVLNDLLICCRQLEHDRATERKKEVEKFKRLIRDPETIKHLDRHSDSKQGKYLNWDAVFRFLQKYIQKETECLRIAKPNVSASTQASRQKKMQEISSLVKYFIKCANRRAPRLKCQELLNYIMDTVKDSSNGAIYGADCSNILLKDILSVRKYWCEISQQQWLELFSVYFRLYLKPSQDVHRVLVARIIHAVTKGCCSQTDGLNSKFLDFFSKAIQCARQEKSSSGLNHILAALTIFLKTLAVNFRIRVCELGDEILPTLLYIWTQHRLNDSLKEVIIELFQLQIYIHHPKGAKTQEKGAYESTKWRSILYNLYDLLVNEISHIGSRGKYSSGFRNIAVKENLIELMADICHQVFNEDTRSLEISQSYTTTQRESSDYSVPCKRKKIELGWEVIKDHLQKSQNDFDLVPWLQIATQLISKYPASLPNCELSPLLMILSQLLPQQRHGERTPYVLRCLTEVALCQDKRSNLESSQKSDLLKLWNKIWCITFRGISSEQIQAENFGLLGAIIQGSLVEVDREFWKLFTGSACRPSCPAVCCLTLALTTSIVPGTVKMGIEQNMCEVNRSFSLKESIMKWLLFYQLEGDLENSTEVPPILHSNFPHLVLEKILVSLTMKNCKAAMNFFQSVPECEHHQKDKEELSFSEVEELFLQTTFDKMDFLTIVRECGIEKHQSSIGFSVHQNLKESLDRCLLGLSEQLLNNYSSEITNSETLVRCSRLLVGVLGCYCYMGVIAEEEAYKSELFQKAKSLMQCAGESITLFKNKTNEEFRIGSLRNMMQLCTRCLSNCTKKSPNKIASGFFLRLLTSKLMNDIADICKSLASFIKKPFDRGEVESMEDDTNGNLMEVEDQSSMNLFNDYPDSSVSDANEPGESQSTIGAINPLAEEYLSKQDLLFLDMLKFLCLCVTTAQTNTVSFRAADIRRKLLMLIDSSTLEPTKSLHLHMYLMLLKELPGEEYPLPMEDVLELLKPLSNVCSLYRRDQDVCKTILNHVLHVVKNLGQSNMDSENTRDAQGQFLTVIGAFWHLTKERKYIFSVRMALVNCLKTLLEADPYSKWAILNVMGKDFPVNEVFTQFLADNHHQVRMLAAESINRLFQDTKGDSSRLLKALPLKLQQTAFENAYLKAQEGMREMSHSAENPETLDEIYNRKSVLLTLIAVVLSCSPICEKQALFALCKSVKENGLEPHLVKKVLEKVSETFGYRRLEDFMASHLDYLVLEWLNLQDTEYNLSSFPFILLNYTNIEDFYRSCYKVLIPHLVIRSHFDEVKSIANQIQEDWKSLLTDCFPKILVNILPYFAYEGTRDSGMAQQRETATKVYDMLKSENLLGKQIDHLFISNLPEIVVELLMTLHEPANSSASQSTDLCDFS

SEQ ID NO: 6997 - protein, 135 aa, Homo sapiens
  Payload ID: 1490;
  Gene Symbol: ATM;
  Gene Name: ATM serine/threonine kinase;
  ENSP ID: ENSP00000469471
MSLVLNDLLICCRQLEHDRATERKKEVEKFKRLIRDPETIKHLDRHSDSKQGKYLNWDAVFRFLQKYIQKETECLRIAKPNVSASTQASRQKKMQEISSLVKYFIKCANRRAPRLKCQELLNYIMDTVKDSSNGA

SEQ ID NO: 6998 - protein, 112 aa, Homo sapiens
  Payload ID: 1490;
  Gene Symbol: ATM;
  Gene Name: ATM serine/threonine kinase;
  ENSP ID: ENSP00000480205
MSLVLNDLLICCRQLEHDRATERKKEVEKFKRLIRDPETIKHLDRHSDSKQGKYLNWDAVFRFLQKYIQKETECLRIAKPNVSASTQASRQKKMQEISSLVKYFIKCANRSK

SEQ ID NO: 6999 - protein, 168 aa, Homo sapiens
  Payload ID: 1490;
  Gene Symbol: ATM;
  Gene Name: ATM serine/threonine kinase;
  ENSP ID: ENSP00000483338
MSLVLNDLLICCRQLEHDRATERKKEVEKFKRLIRDPETIKHLDRHSDSKQGKYLNWDAVFRFLQKYIQKETECLRIAKPNVSASTQASRQKKMQEISSLVKYFIKCANRRAPRLKCQELLNYIMDTVKDSSNGAIYGADCSNILLKDILSVRKYWCEISQQQWLGMF

SEQ ID NO: 7000 - protein, 354 aa, Homo sapiens
  Payload ID: 1491;
  Gene Symbol: ATOH1;
  Gene Name: atonal bHLH transcription factor 1;
  Uniprot ID:  Q92858;
  ENSP ID: ENSP00000302216
MSRLLHAEEWAEVKELGDHHRQPQPHHLPQPPPPPQPPATLQAREHPVYPPELSLLDSTDPRAWLAPTLQGICTARAAQYLLHSPELGASEAAAPRDEVDGRGELVRRSSGGASSSKSPGPVKVREQLCKLKGGVVVDELGCSRQRAPSSKQVNGVQKQRRLAANARERRRMHGLNHAFDQLRNVIPSFNNDKKLSKYETLQMAQIYINALSELLQTPSGGEQPPPPPASCKSDHHHLRTAASYEGGAGNATAAGAQQASGGSQRPTPPGSCRTRFSAPASAGGYSVQLDALHFSTFEDSALTAMMAQKNLSPSLPGSILQPVQEENSKTSPRSHRSDGEFSPHSHYSDSDEAS

SEQ ID NO: 7001 - protein, 152 aa, Homo sapiens
  Payload ID: 1492;
  Gene Symbol: ATOH7;
  Gene Name: atonal bHLH transcription factor 7;
  Uniprot ID:  Q8N100;
  ENSP ID: ENSP00000362777
MKSCKPSGPPAGARVAPPCAGGTECAGTCAGAGRLESAARRRLAANARERRRMQGLNTAFDRLRRVVPQWGQDKKLSKYETLQMALSYIMALTRILAEAERFGSERDWVGLHCEHFGRDHYLPFPGAKLPGESELYSQRLFGFQPEPFQMAT

SEQ ID NO: 7002 - protein, 321 aa, Homo sapiens
  Payload ID: 1493;
  Gene Symbol: ATOH8;
  Gene Name: atonal bHLH transcription factor 8;
  Uniprot ID:  Q96SQ7;
  ENSP ID: ENSP00000304676
MKHIPVLEDGPWKTVCVKELNGLKKLKRKGKEPARRANGYKTFRLDLEAPEPRAVATNGLRDRTHRLQPVPVPVPVPVPVAPAVPPRGGTDTAGERGGSRAPEVSDARKRCFALGAVGPGLPTPPPPPPPAPQSQAPGGPEAQPFREPGLRPRILLCAPPARPAPSAPPAPPAPPESTVRPAPPTRPGESSYSSISHVIYNNHQDSSASPRKRPGEATAASSEIKALQQTRRLLANARERTRVHTISAAFEALRKQVPCYSYGQKLSKLAILRIACNYILSLARLADLDYSADHSNLSFSECVQRCTRTLQAEGRAKKRKE

SEQ ID NO: 7003 - protein, 1101 aa, Homo sapiens
  Payload ID: 1494;
  Gene Symbol: ACLY;
  Gene Name: ATP citrate lyase;
  Uniprot ID:  P53396;
  ENSP ID: ENSP00000253792
MSAKAISEQTGKELLYKFICTTSAIQNRFKYARVTPDTDWARLLQDHPWLLSQNLVVKPDQLIKRRGKLGLVGVNLTLDGVKSWLKPRLGQEATVGKATGFLKNFLIEPFVPHSQAEEFYVCIYATREGDYVLFHHEGGVDVGDVDAKAQKLLVGVDEKLNPEDIKKHLLVHAPEDKKEILASFISGLFNFYEDLYFTYLEINPLVVTKDGVYVLDLAAKVDATADYICKVKWGDIEFPPPFGREAYPEEAYIADLDAKSGASLKLTLLNPKGRIWTMVAGGGASVVYSDTICDLGGVNELANYGEYSGAPSEQQTYDYAKTILSLMTREKHPDGKILIIGGSIANFTNVAATFKGIVRAIRDYQGPLKEHEVTIFVRRGGPNYQEGLRVMGEVGKTTGIPIHVFGTETHMTAIVGMALGHRPIPNQPPTAAHTANFLLNASGSTSTPAPSRTASFSESRADEVAPAKKAKPAMPQDSVPSPRSLQGKSTTLFSRHTKAIVWGMQTRAVQGMLDFDYVCSRDEPSVAAMVYPFTGDHKQKFYWGHKEILIPVFKNMADAMRKHPEVDVLINFASLRSAYDSTMETMNYAQIRTIAIIAEGIPEALTRKLIKKADQKGVTIIGPATVGGIKPGCFKIGNTGGMLDNILASKLYRPGSVAYVSRSGGMSNELNNIISRTTDGVYEGVAIGGDRYPGSTFMDHVLRYQDTPGVKMIVVLGEIGGTEEYKICRGIKEGRLTKPIVCWCIGTCATMFSSEVQFGHAGACANQASETAVAKNQALKEAGVFVPRSFDELGEIIQSVYEDLVANGVIVPAQEVPPPTVPMDYSWARELGLIRKPASFMTSICDERGQELIYAGMPITEVFKEEMGIGGVLGLLWFQKRLPKYSCQFIEMCLMVTADHGPAVSGAHNTIICARAGKDLVSSLTSGLLTIGDRFGGALDAAAKMFSKAFDSGIIPMEFVNKMKKEGKLIMGIGHRVKSINNPDMRVQILKDYVRQHFPATPLLDYALEVEKITTSKKPNLILNVDGLIGVAFVDMLRNCGSFTREEADEYIDIGALNGIFVLGRSMGFIGHYLDQKRLKQGLYRHPWDDISYVLPEHMSM

SEQ ID NO: 7004 - protein, 1091 aa, Homo sapiens
  Payload ID: 1494;
  Gene Symbol: ACLY;
  Gene Name: ATP citrate lyase;
  Uniprot ID:  P53396;
  ENSP ID: ENSP00000345398
MSAKAISEQTGKELLYKFICTTSAIQNRFKYARVTPDTDWARLLQDHPWLLSQNLVVKPDQLIKRRGKLGLVGVNLTLDGVKSWLKPRLGQEATVGKATGFLKNFLIEPFVPHSQAEEFYVCIYATREGDYVLFHHEGGVDVGDVDAKAQKLLVGVDEKLNPEDIKKHLLVHAPEDKKEILASFISGLFNFYEDLYFTYLEINPLVVTKDGVYVLDLAAKVDATADYICKVKWGDIEFPPPFGREAYPEEAYIADLDAKSGASLKLTLLNPKGRIWTMVAGGGASVVYSDTICDLGGVNELANYGEYSGAPSEQQTYDYAKTILSLMTREKHPDGKILIIGGSIANFTNVAATFKGIVRAIRDYQGPLKEHEVTIFVRRGGPNYQEGLRVMGEVGKTTGIPIHVFGTETHMTAIVGMALGHRPIPNQPPTAAHTANFLLNASGSTSTPAPSRTASFSESRADEVAPAKKAKPAMPQGKSTTLFSRHTKAIVWGMQTRAVQGMLDFDYVCSRDEPSVAAMVYPFTGDHKQKFYWGHKEILIPVFKNMADAMRKHPEVDVLINFASLRSAYDSTMETMNYAQIRTIAIIAEGIPEALTRKLIKKADQKGVTIIGPATVGGIKPGCFKIGNTGGMLDNILASKLYRPGSVAYVSRSGGMSNELNNIISRTTDGVYEGVAIGGDRYPGSTFMDHVLRYQDTPGVKMIVVLGEIGGTEEYKICRGIKEGRLTKPIVCWCIGTCATMFSSEVQFGHAGACANQASETAVAKNQALKEAGVFVPRSFDELGEIIQSVYEDLVANGVIVPAQEVPPPTVPMDYSWARELGLIRKPASFMTSICDERGQELIYAGMPITEVFKEEMGIGGVLGLLWFQKRLPKYSCQFIEMCLMVTADHGPAVSGAHNTIICARAGKDLVSSLTSGLLTIGDRFGGALDAAAKMFSKAFDSGIIPMEFVNKMKKEGKLIMGIGHRVKSINNPDMRVQILKDYVRQHFPATPLLDYALEVEKITTSKKPNLILNVDGLIGVAFVDMLRNCGSFTREEADEYIDIGALNGIFVLGRSMGFIGHYLDQKRLKQGLYRHPWDDISYVLPEHMSM

SEQ ID NO: 7005 - protein, 1091 aa, Homo sapiens; identical to SEQ ID NO: 7004
  Payload ID: 1494;
  Gene Symbol: ACLY;
  Gene Name: ATP citrate lyase;
  Uniprot ID:  P53396;
  ENSP ID: ENSP00000377474

SEQ ID NO: 7006 - protein, 830 aa, Homo sapiens
  Payload ID: 1494;
  Gene Symbol: ACLY;
  Gene Name: ATP citrate lyase;
  Uniprot ID:  P53396;
  ENSP ID: ENSP00000445349
MSAKAISEQTGKELLYKFICTTSAIQNRFKYARVTPDTDWARLLQDHPWLLSQNLVVKPDQLIKRRGKLGLVGVNLTLDGVKSWLKPRLGQEATGIVRAIRDYQGPLKEHEVTIFVRRGGPNYQEGLRVMGEVGKTTGIPIHVFGTETHMTAIVGMALGHRPIPNQPPTAAHTANFLLNASGSTSTPAPSRTASFSESRADEVAPAKKAKPAMPQGKSTTLFSRHTKAIVWGMQTRAVQGMLDFDYVCSRDEPSVAAMVYPFTGDHKQKFYWGHKEILIPVFKNMADAMRKHPEVDVLINFASLRSAYDSTMETMNYAQIRTIAIIAEGIPEALTRKLIKKADQKGVTIIGPATVGGIKPGCFKIGNTGGMLDNILASKLYRPGSVAYVSRSGGMSNELNNIISRTTDGVYEGVAIGGDRYPGSTFMDHVLRYQDTPGVKMIVVLGEIGGTEEYKICRGIKEGRLTKPIVCWCIGTCATMFSSEVQFGHAGACANQASETAVAKNQALKEAGVFVPRSFDELGEIIQSVYEDLVANGVIVPAQEVPPPTVPMDYSWARELGLIRKPASFMTSICDERGQELIYAGMPITEVFKEEMGIGGVLGLLWFQKRLPKYSCQFIEMCLMVTADHGPAVSGAHNTIICARAGKDLVSSLTSGLLTIGDRFGGALDAAAKMFSKAFDSGIIPMEFVNKMKKEGKLIMGIGHRVKSINNPDMRVQILKDYVRQHFPATPLLDYALEVEKITTSKKPNLILNVDGLIGVAFVDMLRNCGSFTREEADEYIDIGALNGIFVLGRSMGFIGHYLDQKRLKQGLYRHPWDDISYVLPEHMSM

SEQ ID NO: 7007 - protein, 133 aa, Homo sapiens
  Payload ID: 1494;
  Gene Symbol: ACLY;
  Gene Name: ATP citrate lyase;
  ENSP ID: ENSP00000464717
MTREKHPDGKILIIGGSIANFTNVAATFKGIVRAIRDYQGPLKEHEVTIFVRRGGPNYQEGLRVMGEVGKTTGIPIHVFGTETHMTAIVGMALGHRPIPNQPPTAAHTANFLLNASGSTSTPAPSRTASFSES

SEQ ID NO: 7008 - protein, 1101 aa, Homo sapiens; identical to SEQ ID NO: 7003
  Payload ID: 1494;
  Gene Symbol: ACLY;
  Gene Name: ATP citrate lyase;
  Uniprot ID:  P53396;
  ENSP ID: ENSP00000466259

SEQ ID NO: 7009 - protein, 109 aa, Homo sapiens
  Payload ID: 1494;
  Gene Symbol: ACLY;
  Gene Name: ATP citrate lyase;
  ENSP ID: ENSP00000468705
MSAKAISEQTGKELLYKFICTTSAIQNRFKYARVTPDTDWARLLQDHPWLLSQNLVVKPDQLIKRRGKLGLVGVNLTLDGVKSWLKPRLGQEATVGKATGFLKNFLIEP

SEQ ID NO: 7010 - protein, 283 aa, Homo sapiens
  Payload ID: 1495;
  Gene Symbol: ATPAF1;
  Gene Name: ATP synthase mitochondrial F1 complex assembly  factor 1;
  ENSP ID: ENSP00000330685
MERARGPRAEADAPEEEEEAGAAMAAVVVAAAGGAGPAVLQVAGLYRGLCAVRSRALGLGLVSPAQLRVFPVRPGSGRPEGGADSSGVGAEAELQANPFYDRYRDKIQLLRRSDPAAFESRLEKRSEFRKQPVGHSRQGDFIKCVEQKTDALGKQSVNRGFTKDKTLSSIFNIEMVKEKTAEEIKQIWQQYFAAKDTVYAVIPAEKFDLIWNRAQSCPTNVAEAQCIANQVQLFYATDRKETYGLVETFNLRPNEFKYMSVIAELEQSGLGAELKCAQNQNKT

SEQ ID NO: 7011 - protein, 351 aa, Homo sapiens
  Payload ID: 1495;
  Gene Symbol: ATPAF1;
  Gene Name: ATP synthase mitochondrial F1 complex assembly  factor 1;
  ENSP ID: ENSP00000361005
MERARGPRAEADAPEEEEEAGAAMAAVVVAAAGGAGPAVLQVAGLYRGLCAVRSRALGLGLVSPAQLRVFPVRPGSGRPEGGADSSGVGAEAELQANPFYDRYRDKIQLLRRSDPAAFESRLEKRSEFRKQPVGHSRQGDFIKCVEQKTDALGKQSVNRGFTKDKTLSSIFNIEMVKEKTAEEIKQIWQQYFAAKDTVYAVIPAEKFDLIWNRAQSCPTFLCALPRREGYEFFVGQWTGTELHFTALINIQTRGEAAASQLILYHYPELKEEKGIVLMTAEMDSTFLNVAEAQCIANQVQLFYATDRKETYGLVETFNLRPNEFKYMSVIAELEQSGLGAELKCAQNQNKT

SEQ ID NO: 7012 - protein, 113 aa, Homo sapiens
  Payload ID: 1495;
  Gene Symbol: ATPAF1;
  Gene Name: ATP synthase mitochondrial F1 complex assembly  factor 1;
  ENSP ID: ENSP00000431258
FLCALPRREGYEFFVGQWTGTELHFTALINIQTRGEAAASQLILYHYPELKEEKGIVLMTAEMDSTFLNVAEAQCIANQVQLFYATDRKETYGWAQLLAIHSTLIHLHQRVRK

SEQ ID NO: 7013 - protein, 183 aa, Homo sapiens
  Payload ID: 1495;
  Gene Symbol: ATPAF1;
  Gene Name: ATP synthase mitochondrial F1 complex assembly  factor 1;
  ENSP ID: ENSP00000432771
  MOD_RES (1)..(1): Any amino acid
XGKQSVNRGFTKDKTLSSIFNIEMVKEKTAEEIKQAEKFDLIWNRAQSCPTFLCALPRREGYEFFVGQWTGTELHFTALINIQTRGEAAASQLILYHYPELKEEKGIVLMTAEMDSTFLNVAEAQCIANQVQLFYATDRKETYGLVETFNLRPNEFKYMSVIAELEQSGLGAELKCAQNQNKT

SEQ ID NO: 7014 - protein, 86 aa, Homo sapiens
  Payload ID: 1495;
  Gene Symbol: ATPAF1;
  Gene Name: ATP synthase mitochondrial F1 complex assembly  factor 1;
  ENSP ID: ENSP00000433437
  MOD_RES (1)..(1): Any amino acid
XVRPGSGRPEGGADSSGVGAEAELQANPFYDRYRDKIQLLRRSDPAAFESRLEKRSEFRKQPVGHSRQGDFIKCVEQKDGAQNKLV

SEQ ID NO: 7015 - protein, 240 aa, Homo sapiens
  Payload ID: 1495;
  Gene Symbol: ATPAF1;
  Gene Name: ATP synthase mitochondrial F1 complex assembly  factor 1;
  Uniprot ID:  Q5TC12;
  ENSP ID: ENSP00000435732
MSDPAAFESRLEKRSEFRKQPVGHSRQGDFIKCVEQKTDALGKQSVNRGFTKDKTLSSIFNIEMVKEKTAEEIKQIWQQYFAAKDTVYAVIPAEKFDLIWNRAQSCPTFLCALPRREGYEFFVGQWTGTELHFTALINIQTRGEAAASQLILYHYPELKEEKGIVLMTAEMDSTFLNVAEAQCIANQVQLFYATDRKETYGLVETFNLRPNEFKYMSVIAELEQSGLGAELKCAQNQNKT

SEQ ID NO: 7016 - protein, 45 aa, Homo sapiens
  Payload ID: 1495;
  Gene Symbol: ATPAF1;
  Gene Name: ATP synthase mitochondrial F1 complex assembly  factor 1;
  ENSP ID: ENSP00000436267
MSDPAAFESRLEKRSEFRKQPVGHSRQGDFIKCVEQKDGAQNKLV

SEQ ID NO: 7017 - protein, 174 aa, Homo sapiens
  Payload ID: 1495;
  Gene Symbol: ATPAF1;
  Gene Name: ATP synthase mitochondrial F1 complex assembly  factor 1;
  ENSP ID: ENSP00000436690
LIRSDPAAFESRLEKRSEFRKQPVGHSRQGDFIKCVEQKTDALGKQSVNRGFTKDKTLSSIFNIEMVKEKTAEEIKQIWQQYFAAKDTVYAVIPAEKFDLIWNRAQSCPTNVAEAQCIANQVQLFYATDRKETYGLVETFNLRPNEFKYMSVIAELEQSGLGAELKCAQNQNKT

SEQ ID NO: 7018 - protein, 177 aa, Homo sapiens
  Payload ID: 1495;
  Gene Symbol: ATPAF1;
  Gene Name: ATP synthase mitochondrial F1 complex assembly  factor 1;
  Uniprot ID:  Q5TC12;
  ENSP ID: ENSP00000443588
MVKEKTAEEIKQIWQQYFAAKDTVYAVIPAEKFDLIWNRAQSCPTFLCALPRREGYEFFVGQWTGTELHFTALINIQTRGEAAASQLILYHYPELKEEKGIVLMTAEMDSTFLNVAEAQCIANQVQLFYATDRKETYGLVETFNLRPNEFKYMSVIAELEQSGLGAELKCAQNQNKT

SEQ ID NO: 7019 - protein, 328 aa, Homo sapiens
  Payload ID: 1495;
  Gene Symbol: ATPAF1;
  Gene Name: ATP synthase mitochondrial F1 complex assembly  factor 1;
  Uniprot ID:  Q5TC12;
  ENSP ID: ENSP00000459167
MAAVVVAAAGGAGPAVLQVAGLYRGLCAVRSRALGLGLVSPAQLRVFPVRPGSGRPEGGADSSGVGAEAELQANPFYDRYRDKIQLLRRSDPAAFESRLEKRSEFRKQPVGHSRQGDFIKCVEQKTDALGKQSVNRGFTKDKTLSSIFNIEMVKEKTAEEIKQIWQQYFAAKDTVYAVIPAEKFDLIWNRAQSCPTFLCALPRREGYEFFVGQWTGTELHFTALINIQTRGEAAASQLILYHYPELKEEKGIVLMTAEMDSTFLNVAEAQCIANQVQLFYATDRKETYGLVETFNLRPNEFKYMSVIAELEQSGLGAELKCAQNQNKT

SEQ ID NO: 7020 - protein, 351 aa, Homo sapiens; identical to SEQ ID NO: 7011
  Payload ID: 1495;
  Gene Symbol: ATPAF1;
  Gene Name: ATP synthase mitochondrial F1 complex assembly  factor 1;
  ENSP ID: ENSP00000460964

SEQ ID NO: 7021 - protein, 205 aa, Homo sapiens
  Payload ID: 1496;
  Gene Symbol: ATPAF2;
  Gene Name: ATP synthase mitochondrial F1 complex assembly  factor 2;
  ENSP ID: ENSP00000397198
MWRSCLRLRDGGRRLLNRPAGGPSASMSPGPTIPSPARAYAPPTERKRFYQNVSITQGEGGFEINLDHRKLKTPQAKLFTVPSEALAIAVATEWDSQQDTIKYYTMHLTTLCNTSLDNPTQRNKDQLIRAAVKFLDTDTICYRVEEPETLVELQRNEWDPIIEWAEKRYGVEISSSTSIMGPSIPAKTREVLVSHLASYNTWALQ

SEQ ID NO: 7022 - protein, 289 aa, Homo sapiens
  Payload ID: 1496;
  Gene Symbol: ATPAF2;
  Gene Name: ATP synthase mitochondrial F1 complex assembly  factor 2;
  Uniprot ID:  Q8N5M1;
  ENSP ID: ENSP00000417190
MWRSCLRLRDGGRRLLNRPAGGPSASMSPGPTIPSPARAYAPPTERKRFYQNVSITQGEGGFEINLDHRKLKTPQAKLFTVPSEALAIAVATEWDSQQDTIKYYTMHLTTLCNTSLDNPTQRNKDQLIRAAVKFLDTDTICYRVEEPETLVELQRNEWDPIIEWAEKRYGVEISSSTSIMGPSIPAKTREVLVSHLASYNTWALQGIEFVAAQLKSMVLTLGLIDLRLTVEQAVLLSRLEEEYQIQKWGNIEWAHDYELQELRARTAAGTLFIHLCSESTTVKHKLLKE

SEQ ID NO: 7023 - protein, 107 aa, Homo sapiens
  Payload ID: 1496;
  Gene Symbol: ATPAF2;
  Gene Name: ATP synthase mitochondrial F1 complex assembly  factor 2;
  ENSP ID: ENSP00000462899
MWRSCLRLRDGGRRLLNRPAGGPSASMSPGPTIPSPARAYAPPTERKRFYQNVSITQGEDHIVQHIIGQPNPEKQGSADPGSREVSGHRHHLLQGGGARDISGTSKE

SEQ ID NO: 7024 - protein, 107 aa, Homo sapiens; identical to SEQ ID NO: 7023
  Payload ID: 1496;
  Gene Symbol: ATPAF2;
  Gene Name: ATP synthase mitochondrial F1 complex assembly  factor 2;
  ENSP ID: ENSP00000463861

SEQ ID NO: 7025 - protein, 107 aa, Homo sapiens; identical to SEQ ID NO: 7023
  Payload ID: 1496;
  Gene Symbol: ATPAF2;
  Gene Name: ATP synthase mitochondrial F1 complex assembly  factor 2;
  ENSP ID: ENSP00000463920

SEQ ID NO: 7026 - protein, 59 aa, Homo sapiens
  Payload ID: 1496;
  Gene Symbol: ATPAF2;
  Gene Name: ATP synthase mitochondrial F1 complex assembly  factor 2;
  ENSP ID: ENSP00000466008
  MOD_RES (1)..(1): Any amino acid
XLQRNEWDPIIEWAEKRSRSGATLSGPMTMSCRSCGPAPPPAPSSSISAPRAPQSSTSS

SEQ ID NO: 7027 - protein, 553 aa, Homo sapiens
  Payload ID: 1497;
  Gene Symbol: ATP5A1;
  Gene Name: ATP synthase, H+ transporting, mitochondrial F1 complex, alpha subunit 1, cardiac muscle;
  Uniprot ID:  P25705;
  ENSP ID: ENSP00000282050
MLSVRVAAAVVRALPRRAGLVSRNALGSSFIAARNFHASNTHLQKTGTAEMSSILEERILGADTSVDLEETGRVLSIGDGIARVHGLRNVQAEEMVEFSSGLKGMSLNLEPDNVGVVVFGNDKLIKEGDIVKRTGAIVDVPVGEELLGRVVDALGNAIDGKGPIGSKTRRRVGLKAPGIIPRISVREPMQTGIKAVDSLVPIGRGQRELIIGDRQTGKTSIAIDTIINQKRFNDGSDEKKKLYCIYVAIGQKRSTVAQLVKRLTDADAMKYTIVVSATASDAAPLQYLAPYSGCSMGEYFRDNGKHALIIYDDLSKQAVAYRQMSLLLRRPPGREAYPGDVFYLHSRLLERAAKMNDAFGGGSLTALPVIETQAGDVSAYIPTNVISITDGQIFLETELFYKGIRPAINVGLSVSRVGSAAQTRAMKQVAGTMKLELAQYREVAAFAQFGSDLDAATQQLLSRGVRLTELLKQGQYSPMAIEEQVAVIYAGVRGYLDKLEPSKITKFENAFLSHVVSQHQALLGTIRADGKISEQSDAKLKEIVTNFLAGFEA

SEQ ID NO: 7028 - protein, 553 aa, Homo sapiens; identical to SEQ ID NO: 7027
  Payload ID: 1497;
  Gene Symbol: ATP5A1;
  Gene Name: ATP synthase, H+ transporting, mitochondrial F1 complex, alpha subunit 1, cardiac muscle;
  Uniprot ID:  P25705;
  ENSP ID: ENSP00000381736

SEQ ID NO: 7029 - protein, 144 aa, Homo sapiens
  Payload ID: 1497;
  Gene Symbol: ATP5A1;
  Gene Name: ATP synthase, H+ transporting, mitochondrial F1 complex, alpha subunit 1, cardiac muscle;
  ENSP ID: ENSP00000465259
MSSILEERILGADTSVDLEETGRVLSIGDGIARVHGLRNVQAEEMVEFSSGLKGMSLNLEPDNVGVVVFGNDKLIKEGDIVKRTGAIVDVPVGEELLGRVVDALGNAIDGKGPIGSKTRRRVGLKAPGIIPRISVREPMQTGIK

SEQ ID NO: 7030 - protein, 503 aa, Homo sapiens
  Payload ID: 1497;
  Gene Symbol: ATP5A1;
  Gene Name: ATP synthase, H+ transporting, mitochondrial F1 complex, alpha subunit 1, cardiac muscle;
  Uniprot ID:  P25705;
  ENSP ID: ENSP00000465477
MSSILEERILGADTSVDLEETGRVLSIGDGIARVHGLRNVQAEEMVEFSSGLKGMSLNLEPDNVGVVVFGNDKLIKEGDIVKRTGAIVDVPVGEELLGRVVDALGNAIDGKGPIGSKTRRRVGLKAPGIIPRISVREPMQTGIKAVDSLVPIGRGQRELIIGDRQTGKTSIAIDTIINQKRFNDGSDEKKKLYCIYVAIGQKRSTVAQLVKRLTDADAMKYTIVVSATASDAAPLQYLAPYSGCSMGEYFRDNGKHALIIYDDLSKQAVAYRQMSLLLRRPPGREAYPGDVFYLHSRLLERAAKMNDAFGGGSLTALPVIETQAGDVSAYIPTNVISITDGQIFLETELFYKGIRPAINVGLSVSRVGSAAQTRAMKQVAGTMKLELAQYREVAAFAQFGSDLDAATQQLLSRGVRLTELLKQGQYSPMAIEEQVAVIYAGVRGYLDKLEPSKITKFENAFLSHVVSQHQALLGTIRADGKISEQSDAKLKEIVTNFLAGFEA

SEQ ID NO: 7031 - protein, 207 aa, Homo sapiens
  Payload ID: 1497;
  Gene Symbol: ATP5A1;
  Gene Name: ATP synthase, H+ transporting, mitochondrial F1 complex, alpha subunit 1, cardiac muscle;
  ENSP ID: ENSP00000465497
MSSILEERILGADTSVDLEETGRVLSIGDGIARVHGLRNVQAEEMVEFSSGLKGMSLNLEPDNVGVVVFGNDKLIKEGDIVKRTGAIVDVPVGEELLGRVVDALGNAIDGKGPIGSKTRRRVGLKAPGIIPRISVREPMQTGIKAVDSLVPIGRGQRELIIGDRQTGKTSIAIDTIINQKRFNDGSDEKKKLYCIYVAIGQKRSTVA

SEQ ID NO: 7032 - protein, 44 aa, Homo sapiens
  Payload ID: 1497;
  Gene Symbol: ATP5A1;
  Gene Name: ATP synthase, H+ transporting, mitochondrial F1 complex, alpha subunit 1, cardiac muscle;
  ENSP ID: ENSP00000465805
MLSVRVAAAVVRALPRRAGLNTFALGLQKCFGFIFHCCKELPCL

SEQ ID NO: 7033 - protein, 90 aa, Homo sapiens
  Payload ID: 1497;
  Gene Symbol: ATP5A1;
  Gene Name: ATP synthase, H+ transporting, mitochondrial F1 complex, alpha subunit 1, cardiac muscle;
  ENSP ID: ENSP00000466275
MLSVRVAAAVVRALPRRAGLVSTEGRHDAGGRVGLQGGGAPARALSAGGRGAVANAAILHPWLLRLDRAGDTGALLLVTCAEAEWYRADS

SEQ ID NO: 7034 - protein, 58 aa, Homo sapiens
  Payload ID: 1497;
  Gene Symbol: ATP5A1;
  Gene Name: ATP synthase, H+ transporting, mitochondrial F1 complex, alpha subunit 1, cardiac muscle;
  ENSP ID: ENSP00000466309
MLSVRVAAAVVRALPRRAGLVSRNALGSSFIAARNFHASNTHLQKTGKLLFLSLRRTY

SEQ ID NO: 7035 - protein, 199 aa, Homo sapiens
  Payload ID: 1497;
  Gene Symbol: ATP5A1;
  Gene Name: ATP synthase, H+ transporting, mitochondrial F1 complex, alpha subunit 1, cardiac muscle;
  ENSP ID: ENSP00000466975
MLSVRVAAAVVRALPRRAGLVSRNALGSSFIAARNFHASNTHLQKTAIVDVPVGEELLGRVVDALGNAIDGKGPIGSKTRRRVGLKAPGIIPRISVREPMQTGIKAVDSLVPIGRGQRELIIGDRQTGKTSIAIDTIINQKRFNDGSDEKKKLYCIYVAIGQKRSTVAQLVKRLTDADAMKYTIVVSATASDAAPLQYL

SEQ ID NO: 7036 - protein, 531 aa, Homo sapiens
  Payload ID: 1497;
  Gene Symbol: ATP5A1;
  Gene Name: ATP synthase, H+ transporting, mitochondrial F1 complex, alpha subunit 1, cardiac muscle;
  Uniprot ID:  P25705;
  ENSP ID: ENSP00000467037
MLSVRVAAAVVRALPRRAGLVSRNALGSSFIAARNFHASNTHLQKTGTAEMSSILEERILGADTSVDLEETGRVLSIGDGIARVHGLRNVQAEEMVEFSSGLKGMSLNLEPDNVGVVVFGNDKLIKEGDIVKRTGAIVDGPIGSKTRRRVGLKAPGIIPRISVREPMQTGIKAVDSLVPIGRGQRELIIGDRQTGKTSIAIDTIINQKRFNDGSDEKKKLYCIYVAIGQKRSTVAQLVKRLTDADAMKYTIVVSATASDAAPLQYLAPYSGCSMGEYFRDNGKHALIIYDDLSKQAVAYRQMSLLLRRPPGREAYPGDVFYLHSRLLERAAKMNDAFGGGSLTALPVIETQAGDVSAYIPTNVISITDGQIFLETELFYKGIRPAINVGLSVSRVGSAAQTRAMKQVAGTMKLELAQYREVAAFAQFGSDLDAATQQLLSRGVRLTELLKQGQYSPMAIEEQVAVIYAGVRGYLDKLEPSKITKFENAFLSHVVSQHQALLGTIRADGKISEQSDAKLKEIVTNFLAGFEA

SEQ ID NO: 7037 - protein, 111 aa, Homo sapiens
  Payload ID: 1497;
  Gene Symbol: ATP5A1;
  Gene Name: ATP synthase, H+ transporting, mitochondrial F1 complex, alpha subunit 1, cardiac muscle;
  ENSP ID: ENSP00000467830
MSSILEERILGADTSVDLEETGRVLSIGDGIARVHGLRNVQAEEMVEFSSGLKGMSLNLEPDNVGVVVFGNDKLIKEGDIVKRTGAIVDVPVGEELLGRVVDALGNAIDGK

SEQ ID NO: 7038 - protein, 78 aa, Homo sapiens
  Payload ID: 1497;
  Gene Symbol: ATP5A1;
  Gene Name: ATP synthase, H+ transporting, mitochondrial F1 complex, alpha subunit 1, cardiac muscle;
  ENSP ID: ENSP00000467983
MVILWRKKKSPSRSPEMLWVHLSLLQGTSMPLTLIFKRLRWDFAVLARLVQTLGLKWSARLPKCWYYWREPLHPTPVC

SEQ ID NO: 7039 - protein, 205 aa, Homo sapiens
  Payload ID: 1497;
  Gene Symbol: ATP5A1;
  Gene Name: ATP synthase, H+ transporting, mitochondrial F1 complex, alpha subunit 1, cardiac muscle;
  ENSP ID: ENSP00000468458
MLSVRVAAAVVRALPRRAGLVSRNALGSSFIAARNFHASNTHLQKTGTAEMSSILEERILGADTSVDLEETGRVLSIGDGIARVHGLRNVQAEEMVEFSSGLKGMSLNLEPDNVGVVVFGNDKLIKEGDIVKRTGAIVDVPVGEELLGRVVDALGNAIDGKGPIGSKTRRRVGLKAPGIIPRISVREPMQTGIKAVDSLVPIGRG

SEQ ID NO: 7040 - protein, 77 aa, Homo sapiens
  Payload ID: 1497;
  Gene Symbol: ATP5A1;
  Gene Name: ATP synthase, H+ transporting, mitochondrial F1 complex, alpha subunit 1, cardiac muscle;
  ENSP ID: ENSP00000468618
MLSVRVAAAVVRALPRRAGLVSRNALGSSFIAARNFHASNTHLQKTGTAEMSSILEERILGADTSVDLEETGRVLSW

SEQ ID NO: 7041 - protein, 529 aa, Homo sapiens
  Payload ID: 1498;
  Gene Symbol: ATP5B;
  Gene Name: ATP synthase, H+ transporting, mitochondrial F1 complex, beta polypeptide;
  Uniprot ID:  P06576;
  ENSP ID: ENSP00000262030
MLGFVGRVAAAPASGALRRLTPSASLPPAQLLLRAAPTAVHPVRDYAAQTSPSPKAGAATGRIVAVIGAVVDVQFDEGLPPILNALEVQGRETRLVLEVAQHLGESTVRTIAMDGTEGLVRGQKVLDSGAPIKIPVGPETLGRIMNVIGEPIDERGPIKTKQFAPIHAEAPEFMEMSVEQEILVTGIKVVDLLAPYAKGGKIGLFGGAGVGKTVLIMELINNVAKAHGGYSVFAGVGERTREGNDLYHEMIESGVINLKDATSKVALVYGQMNEPPGARARVALTGLTVAEYFRDQEGQDVLLFIDNIFRFTQAGSEVSALLGRIPSAVGYQPTLATDMGTMQERITTTKKGSITSVQAIYVPADDLTDPAPATTFAHLDATTVLSRAIAELGIYPAVDPLDSTSRIMDPNIVGSEHYDVARGVQKILQDYKSLQDIIAILGMDELSEEDKLTVSRARKIQRFLSQPFQVAEVFTGHMGKLVPLKETIKGFQQILAGEYDHLPEQAFYMVGPIEEAVAKADKLAEEHSS

SEQ ID NO: 7042 - protein, 362 aa, Homo sapiens
  Payload ID: 1498;
  Gene Symbol: ATP5B;
  Gene Name: ATP synthase, H+ transporting, mitochondrial F1 complex, beta polypeptide;
  ENSP ID: ENSP00000446489
  MOD_RES (1)..(1): Any amino acid
XFVGRVAAAPASGALRRLTPSASLPPAQLLLRAAPTAVHPGESTVRTIAMDGTEGLVRGQKVLDSGAPIKIPVGPETLGRIMNVIGEPIDERGPIKTKQFAPIHAEAPEFMEMSVEQEILVTGIKVVDLLAPYAKGGKIGLFGGAGVGKTVLIMELINNVAKAHGGYSVFAGVGERTREGNDLYHEMIESGVINLKDATSKVALVYGQMNEPPGARARVALTGLTVAEYFRDQEGQDVLLFIDNIFRFTQAGSEVSALLGRIPSAVGYQPTLATDMGTMQERITTTKKGSITSVQAIYVPADDLTDPAPATTFAHLDATTVLSRAIAELGIYPAVDPLDSTSRIMDPNIVGSEHYDVARGVQ

SEQ ID NO: 7043 - protein, 284 aa, Homo sapiens
  Payload ID: 1498;
  Gene Symbol: ATP5B;
  Gene Name: ATP synthase, H+ transporting, mitochondrial F1 complex, beta polypeptide;
  ENSP ID: ENSP00000446677
MLGFVGRVAAAPASGALRRLTPSASLPPAQLLLRAAPTAVHPGESTVRTIAMDGTEGLVRGQKVLDSGAPIKIPVGPETLGRIMNVIGEPIDERGPIKTKQFAPIHAEAPEFMEMSVEQEILVTGIKVVDLLAPYAKGGKIGLFGGAGVGKTVLIMELINNVAKAHGGYSVFAGVGERTREGNDLYHEMIESGVINLKDATSKVSALLGRIPSAVGYQPTLATDMGTMQERITTTKKGSITSVQDYKSLQDIIAILGMDELSEEDKLTVSRARKIQRFLSQPFQ

SEQ ID NO: 7044 - protein, 270 aa, Homo sapiens
  Payload ID: 1498;
  Gene Symbol: ATP5B;
  Gene Name: ATP synthase, H+ transporting, mitochondrial F1 complex, beta polypeptide;
  ENSP ID: ENSP00000447571
MLGFVGRVAAAPASGALRRLTPSASLPPAQLLLRAAPTAVHPVRDYAAQTSPSPKAGAATGRIVAVIGAVVDVQFDEGLPPILNALEVQGRETRLVLEVAQHLGLFGGAGVGKTVLIMELINNVAKAHGGYSVFAGVGERTREGNDLYHEMIESGVINLKDATSKVALVYGQMNEPPGARARVALTGLTVAEYFRDQEGQDVLLFIDNIFRFTQAGSEVSALLGRIPSAVGYQPTLATDMGTMQERITTTKKGSITSVQAIYVPADDLTD

SEQ ID NO: 7045 - protein, 133 aa, Homo sapiens
  Payload ID: 1498;
  Gene Symbol: ATP5B;
  Gene Name: ATP synthase, H+ transporting, mitochondrial F1 complex, beta polypeptide;
  ENSP ID: ENSP00000448428
AGVGKTVLIMELINNVAKAHGGYSVFAGVGERTREGNDLYHEMIESGVINLKDATSKAGSEVSALLGRIPSAVGYQPTLATDMGTMQERITTTKKGSITSVQAIYVPADDLTDPAPATTFAHLDATTVLSRAI

SEQ ID NO: 7046 - protein, 168 aa, Homo sapiens
  Payload ID: 1499;
  Gene Symbol: ATP5D;
  Gene Name: ATP synthase, H+ transporting, mitochondrial F1 complex, delta subunit;
  Uniprot ID:  P30049;
  ENSP ID: ENSP00000215375
MLPAALLRRPGLGRLVRHARAYAEAAAAPAAASGPNQMSFTFASPTQVFFNGANVRQVDVPTLTGAFGILAAHVPTLQVLRPGLVVVHAEDGTTSKYFVSSGSIAVNADSSVQLLAEEAVTLDMLDLGAAKANLEKAQAELVGTADEATRAEIQIRIEANEALVKALE

SEQ ID NO: 7047 - protein, 168 aa, Homo sapiens; identical to SEQ ID NO: 7046
  Payload ID: 1499;
  Gene Symbol: ATP5D;
  Gene Name: ATP synthase, H+ transporting, mitochondrial F1 complex, delta subunit;
  Uniprot ID:  P30049;
  ENSP ID: ENSP00000378995

SEQ ID NO: 7048 - protein, 168 aa, Homo sapiens; identical to SEQ ID NO: 7046
  Payload ID: 1499;
  Gene Symbol: ATP5D;
  Gene Name: ATP synthase, H+ transporting, mitochondrial F1 complex, delta subunit;
  Uniprot ID:  P30049;
  ENSP ID: ENSP00000464863

SEQ ID NO: 7049 - protein, 99 aa, Homo sapiens
  Payload ID: 1499;
  Gene Symbol: ATP5D;
  Gene Name: ATP synthase, H+ transporting, mitochondrial F1 complex, delta subunit;
  ENSP ID: ENSP00000477964
  MOD_RES (1)..(1): Any amino acid
XGAFGILAAHVPTLQVLRPGLVVVHAEDGTTSKYFVSSGSIAVNADSSVQLLAEEAVTLDMLDLGPRQTWRRPRRSWWGQLTRPRGQRSRSESRPTRPW

SEQ ID NO: 7050 - protein, 51 aa, Homo sapiens
  Payload ID: 1500;
  Gene Symbol: ATP5E;
  Gene Name: ATP synthase, H+ transporting, mitochondrial F1 complex, epsilon subunit;
  Uniprot ID:  P56381;
  ENSP ID: ENSP00000243997
MVAYWRQAGLSYIRYSQICAKAVRDALKTEFKANAEKTSGSNVKIVKVKKE

SEQ ID NO: 7051 - protein, 51 aa, Homo sapiens; identical to SEQ ID NO: 7050
  Payload ID: 1500;
  Gene Symbol: ATP5E;
  Gene Name: ATP synthase, H+ transporting, mitochondrial F1 complex, epsilon subunit;
  Uniprot ID:  P56381;
  ENSP ID: ENSP00000379019

SEQ ID NO: 7052 - protein, 51 aa, Homo sapiens; identical to SEQ ID NO: 7050
  Payload ID: 1500;
  Gene Symbol: ATP5E;
  Gene Name: ATP synthase, H+ transporting, mitochondrial F1 complex, epsilon subunit;
  Uniprot ID:  P56381;
  ENSP ID: ENSP00000379023

SEQ ID NO: 7053 - protein, 51 aa, Homo sapiens
  Payload ID: 1501;
  Gene Symbol: ATP5EP2;
  Gene Name: ATP synthase, H+ transporting, mitochondrial F1 complex, epsilon subunit pseudogene 2;
  Uniprot ID:  Q5VTU8;
  ENSP ID: ENSP00000370414
MVAYWRQAGLSYIRYSQICAKVVRDALKTEFKANAKKTSGNSVKIVKVKKE

SEQ ID NO: 7054 - protein, 297 aa, Homo sapiens
  Payload ID: 1502;
  Gene Symbol: ATP5C1;
  Gene Name: ATP synthase, H+ transporting, mitochondrial F1 complex, gamma polypeptide 1;
  Uniprot ID:  P36542;
  ENSP ID: ENSP00000338568
MFSRAGVAGLSAWTLQPQWIQVRNMATLKDITRRLKSIKNIQKITKSMKMVAAAKYARAERELKPARIYGLGSLALYEKADIKGPEDKKKHLLIGVSSDRGLCGAIHSSIAKQMKSEVATLTAAGKEVMLVGIGDKIRGILYRTHSDQFLVAFKEVGRKPPTFGDASVIALELLNSGYEFDEGSIIFNKFRSVISYKTEEKPIFSLNTVASADSMSIYDDIDADVLQNYQEYNLANIIYYSLKESTTSEQSARMTAMDNASKNASEMIDKLTLTFNRTRQAVITKELIEIISGAAAL

SEQ ID NO: 7055 - protein, 298 aa, Homo sapiens
  Payload ID: 1502;
  Gene Symbol: ATP5C1;
  Gene Name: ATP synthase, H+ transporting, mitochondrial F1 complex, gamma polypeptide 1;
  Uniprot ID:  P36542;
  ENSP ID: ENSP00000349142
MFSRAGVAGLSAWTLQPQWIQVRNMATLKDITRRLKSIKNIQKITKSMKMVAAAKYARAERELKPARIYGLGSLALYEKADIKGPEDKKKHLLIGVSSDRGLCGAIHSSIAKQMKSEVATLTAAGKEVMLVGIGDKIRGILYRTHSDQFLVAFKEVGRKPPTFGDASVIALELLNSGYEFDEGSIIFNKFRSVISYKTEEKPIFSLNTVASADSMSIYDDIDADVLQNYQEYNLANIIYYSLKESTTSEQSARMTAMDNASKNASEMIDKLTLTFNRTRQAVITKELIEIISGAAALD

SEQ ID NO: 7056 - protein, 213 aa, Homo sapiens
  Payload ID: 1503;
  Gene Symbol: ATP5O;
  Gene Name: ATP synthase, H+ transporting, mitochondrial F1 complex, O subunit;
  Uniprot ID:  P48047;
  ENSP ID: ENSP00000290299
MAAPAVSGLSRQVRCFSTSVVRPFAKLVRPPVQVYGIEGRYATALYSAASKQNKLEQVEKELLRVAQILKEPKVAASVLNPYVKRSIKVKSLNDITAKERFSPLTTNLINLLAENGRLSNTQGVVSAFSTMMSVHRGEVPCTVTSASPLEEATLSELKTVLKSFLSQGQVLKLEAKTDPSILGGMIVRIGEKYVDMSVKTKIQKLGRAMREIV

SEQ ID NO: 7057 - protein, 86 aa, Homo sapiens
  Payload ID: 1503;
  Gene Symbol: ATP5O;
  Gene Name: ATP synthase, H+ transporting, mitochondrial F1 complex, O subunit;
  ENSP ID: ENSP00000393211
  MOD_RES (1)..(1): Any amino acid
XTNLINLLAENGRLSNTQGVVSAFSTMMSVHRGEVPCTVTSASPLEEATLSELKTVLKSFLSQGQVLKLEAKSYFFCRLIRQSWVE

SEQ ID NO: 7058 - protein, 74 aa, Homo sapiens
  Payload ID: 1503;
  Gene Symbol: ATP5O;
  Gene Name: ATP synthase, H+ transporting, mitochondrial F1 complex, O subunit;
  ENSP ID: ENSP00000393496
  MOD_RES (1)..(1): Any amino acid
XAAPAVSGLSRQVRCFSTSVVRPFAKLVRPPVQVYGIEGRYATALYSAASKQNKLEQVEKELLRVAICLLKMVD

SEQ ID NO: 7059 - protein, 26 aa, Homo sapiens
  Payload ID: 1503;
  Gene Symbol: ATP5O;
  Gene Name: ATP synthase, H+ transporting, mitochondrial F1 complex, O subunit;
  ENSP ID: ENSP00000403964
  MOD_RES (1)..(1): Any amino acid
XGVVSAFSTMMSVHRGEVPCTVTSAS

SEQ ID NO: 7060 - protein, 40 aa, Homo sapiens
  Payload ID: 1503;
  Gene Symbol: ATP5O;
  Gene Name: ATP synthase, H+ transporting, mitochondrial F1 complex, O subunit;
  ENSP ID: ENSP00000407220
VVSAFSTMMSVHRGEVPCTVTSASACLELLGSSDPPALAS

SEQ ID NO: 7061 - protein, 256 aa, Homo sapiens
  Payload ID: 1504;
  Gene Symbol: ATP5F1;
  Gene Name: ATP synthase, H+ transporting, mitochondrial Fo complex, subunit B1;
  Uniprot ID:  P24539;
  ENSP ID: ENSP00000358737
MLSRVVLSAAATAAPSLKNAAFLGPGVLQATRTFHTGQPHLVPVPPLPEYGGKVRYGLIPEEFFQFLYPKTGVTGPYVLGTGLILYALSKEIYVISAETFTALSVLGVMVYGIKKYGPFVADFADKLNEQKLAQLEEAKQASIQHIQNAIDTEKSQQALVQKRHYLFDVQRNNIAMALEVTYRERLYRVYKEVKNRLDYHISVQNMMRRKEQEHMINWVEKHVVQSISTQQEKETIAKCIADLKLLAKKAQAQPVM

SEQ ID NO: 7062 - protein, 195 aa, Homo sapiens
  Payload ID: 1504;
  Gene Symbol: ATP5F1;
  Gene Name: ATP synthase, H+ transporting, mitochondrial Fo complex, subunit B1;
  ENSP ID: ENSP00000420366
MLSRVVLSAAATAGPYVLGTGLILYALSKEIYVISAETFTALSVLGVMVYGIKKYGPFVADFADKLNEQKLAQLEEAKQASIQHIQNAIDTEKSQQALVQKRHYLFDVQRNNIAMALEVTYRERLYRVYKEVKNRLDYHISVQNMMRRKEQEHMINWVEKHVVQSISTQQEKETIAKCIADLKLLAKKAQAQPVM

SEQ ID NO: 7063 - protein, 136 aa, Homo sapiens
  Payload ID: 1505;
  Gene Symbol: ATP5G1;
  Gene Name: ATP synthase, H+ transporting, mitochondrial Fo complex, subunit C1 (subunit 9);
  Uniprot ID:  P05496;
  ENSP ID: ENSP00000348205
MQTAGALFISPALIRCCTRGLIRPVSASFLNSPVNSSKQPSYSNFPLQVARREFQTSVVSRDIDTAAKFIGAGAATVGVAGSGAGIGTVFGSLIIGYARNPSLKQQLFSYAILGFALSEAMGLFCLMVAFLILFAM

SEQ ID NO: 7064 - protein, 136 aa, Homo sapiens; identical to SEQ ID NO: 7063
  Payload ID: 1505;
  Gene Symbol: ATP5G1;
  Gene Name: ATP synthase, H+ transporting, mitochondrial Fo complex, subunit C1 (subunit 9);
  Uniprot ID:  P05496;
  ENSP ID: ENSP00000377033

SEQ ID NO: 7065 - protein, 99 aa, Homo sapiens
  Payload ID: 1505;
  Gene Symbol: ATP5G1;
  Gene Name: ATP synthase, H+ transporting, mitochondrial Fo complex, subunit C1 (subunit 9);
  ENSP ID: ENSP00000422086
MQTAGALFISPALIRCCTRGLIRPVSASFLNSPVNSSKQPSYSNFPLQVARREFQTSVVSRDIDTAAKFIGAGAATVGVAGSGAGIGTVFGSLIIGYAR

SEQ ID NO: 7066 - protein, 110 aa, Homo sapiens
  Payload ID: 1505;
  Gene Symbol: ATP5G1;
  Gene Name: ATP synthase, H+ transporting, mitochondrial Fo complex, subunit C1 (subunit 9);
  ENSP ID: ENSP00000422950
MQTAGALFISPALPSYSNFPLQVARREFQTSVVSRDIDTAAKFIGAGAATVGVAGSGAGIGTVFGSLIIGYARNPSLKQQLFSYAILGFALSEAMGLFCLMVAFLILFAM

SEQ ID NO: 7067 - protein, 127 aa, Homo sapiens
  Payload ID: 1505;
  Gene Symbol: ATP5G1;
  Gene Name: ATP synthase, H+ transporting, mitochondrial Fo complex, subunit C1 (subunit 9);
  ENSP ID: ENSP00000426094
MQTAGALFISPALIRCCTRGLIRPVSASFLNSPVNSSKQVARREFQTSVVSRDIDTAAKFIGAGAATVGVAGSGAGIGTVFGSLIIGYARNPSLKQQLFSYAILGFALSEAMGLFCLMVAFLILFAM

SEQ ID NO: 7068 - protein, 98 aa, Homo sapiens
  Payload ID: 1505;
  Gene Symbol: ATP5G1;
  Gene Name: ATP synthase, H+ transporting, mitochondrial Fo complex, subunit C1 (subunit 9);
  ENSP ID: ENSP00000458423
MQTAGALFISPALIRCCTRGLIRPVSASFLNSPVNSSKQPSYSNFPLQVARREFQTSVVSRDIDTAAKFIGAGAATVGVAGSGAGIGTVFGSLIIGYA

SEQ ID NO: 7069 - protein, 157 aa, Homo sapiens
  Payload ID: 1506;
  Gene Symbol: ATP5G2;
  Gene Name: ATP synthase, H+ transporting, mitochondrial Fo complex, subunit C2 (subunit 9);
  Uniprot ID:  Q06055;
  ENSP ID: ENSP00000340315
MPELILSPATAPHPLKMFACSKFVSTPSLVKSTSQLLSRPLSAVVLKRPEILTDESLSSLAVSCPLTSLVSSRSFQTSAISRDIDTAAKFIGAGAATVGVAGSGAGIGTVFGSLIIGYARNPSLKQQLFSYAILGFALSEAMGLFCLMVAFLILFAM

SEQ ID NO: 7070 - protein, 198 aa, Homo sapiens
  Payload ID: 1506;
  Gene Symbol: ATP5G2;
  Gene Name: ATP synthase, H+ transporting, mitochondrial Fo complex, subunit C2 (subunit 9);
  Uniprot ID:  Q06055;
  ENSP ID: ENSP00000377878
MPELILYVAITLSVAERLVGPGHACAEPSFRSSRCSAPLCLLCSGSSSPATAPHPLKMFACSKFVSTPSLVKSTSQLLSRPLSAVVLKRPEILTDESLSSLAVSCPLTSLVSSRSFQTSAISRDIDTAAKFIGAGAATVGVAGSGAGIGTVFGSLIIGYARNPSLKQQLFSYAILGFALSEAMGLFCLMVAFLILFAM

SEQ ID NO: 7071 - protein, 141 aa, Homo sapiens
  Payload ID: 1506;
  Gene Symbol: ATP5G2;
  Gene Name: ATP synthase, H+ transporting, mitochondrial Fo complex, subunit C2 (subunit 9);
  Uniprot ID:  Q06055;
  ENSP ID: ENSP00000447317
MFACSKFVSTPSLVKSTSQLLSRPLSAVVLKRPEILTDESLSSLAVSCPLTSLVSSRSFQTSAISRDIDTAAKFIGAGAATVGVAGSGAGIGTVFGSLIIGYARNPSLKQQLFSYAILGFALSEAMGLFCLMVAFLILFAM

SEQ ID NO: 7072 - protein, 16 aa, Homo sapiens
  Payload ID: 1506;
  Gene Symbol: ATP5G2;
  Gene Name: ATP synthase, H+ transporting, mitochondrial Fo complex, subunit C2 (subunit 9);
  ENSP ID: ENSP00000447643
MGLFCLMVAFLILFAM

SEQ ID NO: 7073 - protein, 141 aa, Homo sapiens; identical to SEQ ID NO: 7071
  Payload ID: 1506;
  Gene Symbol: ATP5G2;
  Gene Name: ATP synthase, H+ transporting, mitochondrial Fo complex, subunit C2 (subunit 9);
  Uniprot ID:  Q06055;
  ENSP ID: ENSP00000448801

SEQ ID NO: 7074 - protein, 141 aa, Homo sapiens; identical to SEQ ID NO: 7071
  Payload ID: 1506;
  Gene Symbol: ATP5G2;
  Gene Name: ATP synthase, H+ transporting, mitochondrial Fo complex, subunit C2 (subunit 9);
  Uniprot ID:  Q06055;
  ENSP ID: ENSP00000473535

SEQ ID NO: 7075 - protein, 142 aa, Homo sapiens
  Payload ID: 1507;
  Gene Symbol: ATP5G3;
  Gene Name: ATP synthase, H+ transporting, mitochondrial Fo complex, subunit C3 (subunit 9);
  Uniprot ID:  P48201;
  ENSP ID: ENSP00000284727
MFACAKLACTPSLIRAGSRVAYRPISASVLSRPEASRTGEGSTVFNGAQNGVSQLIQREFQTSAISRDIDTAAKFIGAGAATVGVAGSGAGIGTVFGSLIIGYARNPSLKQQLFSYAILGFALSEAMGLFCLMVAFLILFAM

SEQ ID NO: 7076 - protein, 142 aa, Homo sapiens; identical to SEQ ID NO: 7075
  Payload ID: 1507;
  Gene Symbol: ATP5G3;
  Gene Name: ATP synthase, H+ transporting, mitochondrial Fo complex, subunit C3 (subunit 9);
  Uniprot ID:  P48201;
  ENSP ID: ENSP00000376324

SEQ ID NO: 7077 - protein, 142 aa, Homo sapiens; identical to SEQ ID NO: 7075
  Payload ID: 1507;
  Gene Symbol: ATP5G3;
  Gene Name: ATP synthase, H+ transporting, mitochondrial Fo complex, subunit C3 (subunit 9);
  Uniprot ID:  P48201;
  ENSP ID: ENSP00000387317

SEQ ID NO: 7078 - protein, 161 aa, Homo sapiens
  Payload ID: 1508;
  Gene Symbol: ATP5H;
  Gene Name: ATP synthase, H+ transporting, mitochondrial Fo complex, subunit d;
  Uniprot ID:  O75947;
  ENSP ID: ENSP00000301587
MAGRKLALKTIDWVAFAEIIPQNQKAIASSLKSWNETLTSRLAALPENPPAIDWAYYKANVAKAGLVDDFEKKFNALKVPVPEDKYTAQVDAEEKEDVKSCAEWVSLSKARIVEYEKEMEKMKNLIPFDQMTIEDLNEAFPETKLDKKKYPYWPHQPIENL

SEQ ID NO: 7079 - protein, 137 aa, Homo sapiens
  Payload ID: 1508;
  Gene Symbol: ATP5H;
  Gene Name: ATP synthase, H+ transporting, mitochondrial Fo complex, subunit d;
  Uniprot ID:  O75947;
  ENSP ID: ENSP00000344230
MAGRKLALKTIDWVAFAEIIPQNQKAIASSLKSWNETLTSRLAALPENPPAIDWAYYKANVAKAGLVDDFEKKVKSCAEWVSLSKARIVEYEKEMEKMKNLIPFDQMTIEDLNEAFPETKLDKKKYPYWPHQPIENL

SEQ ID NO: 7080 - protein, 81 aa, Homo sapiens
  Payload ID: 1508;
  Gene Symbol: ATP5H;
  Gene Name: ATP synthase, H+ transporting, mitochondrial Fo complex, subunit d;
  ENSP ID: ENSP00000437996
MAGRKLALKTIDWVAFAEIIPQNQKAIASSLKSWNETLTSRLAALPENPPAIDWAYYKANVAKAGLVDDFEKKLSIIAKLS

SEQ ID NO: 7081 - protein, 69 aa, Homo sapiens
  Payload ID: 1509;
  Gene Symbol: ATP5I;
  Gene Name: ATP synthase, H+ transporting, mitochondrial Fo complex, subunit E;
  Uniprot ID:  P56385;
  ENSP ID: ENSP00000306003
MVPPVQVSPLIKLGRYSALFLGVAYGATRYNYLKPRAEEERRIAAEEKKKQDELKRIARELAEDDSILK

SEQ ID NO: 7082 - protein, 94 aa, Homo sapiens
  Payload ID: 1510;
  Gene Symbol: ATP5J2;
  Gene Name: ATP synthase, H+ transporting, mitochondrial Fo complex, subunit F2;
  Uniprot ID:  P56134;
  ENSP ID: ENSP00000292475
MASVGECPAPVPVKDKKLLEVKLGELPSWILMRDFSPSGIFGAFQRGYYRYYNKYINVKKGSISGITMVLACYVLFSYSFSYKHLKHERLRKYH

SEQ ID NO: 7083 - protein, 55 aa, Homo sapiens
  Payload ID: 1510;
  Gene Symbol: ATP5J2;
  Gene Name: ATP synthase, H+ transporting, mitochondrial Fo complex, subunit F2;
  Uniprot ID:  P56134;
  ENSP ID: ENSP00000352890
MASVGECPAPVPVKDKKLLEVKLGELPSWILMRDFSPSGIFGAFQREHERLRKYH

SEQ ID NO: 7084 - protein, 88 aa, Homo sapiens
  Payload ID: 1510;
  Gene Symbol: ATP5J2;
  Gene Name: ATP synthase, H+ transporting, mitochondrial Fo complex, subunit F2;
  Uniprot ID:  P56134;
  ENSP ID: ENSP00000377740
MASVVPVKDKKLLEVKLGELPSWILMRDFSPSGIFGAFQRGYYRYYNKYINVKKGSISGITMVLACYVLFSYSFSYKHLKHERLRKYH

SEQ ID NO: 7085 - protein, 98 aa, Homo sapiens
  Payload ID: 1510;
  Gene Symbol: ATP5J2;
  Gene Name: ATP synthase, H+ transporting, mitochondrial Fo complex, subunit F2;
  ENSP ID: ENSP00000407540
MASVVGIFSHSSVSVPVKDKKLLEVKLGELPSWILMRDFSPSGIFGAFQRGYYRYYNKYINVKKGSISGITMVLACYVLFSYSFSYKHLKHERLRKYH

SEQ ID NO: 7086 - protein, 49 aa, Homo sapiens
  Payload ID: 1510;
  Gene Symbol: ATP5J2;
  Gene Name: ATP synthase, H+ transporting, mitochondrial Fo complex, subunit F2;
  Uniprot ID:  P56134;
  ENSP ID: ENSP00000412149
MASVVPVKDKKLLEVKLGELPSWILMRDFSPSGIFGAFQREHERLRKYH

SEQ ID NO: 7087 - protein, 49 aa, Homo sapiens; identical to SEQ ID NO: 7086
  Payload ID: 1510;
  Gene Symbol: ATP5J2;
  Gene Name: ATP synthase, H+ transporting, mitochondrial Fo complex, subunit F2;
  Uniprot ID:  P56134;
  ENSP ID: ENSP00000418197

SEQ ID NO: 7088 - protein, 19 aa, Homo sapiens
  Payload ID: 1510;
  Gene Symbol: ATP5J2;
  Gene Name: ATP synthase, H+ transporting, mitochondrial Fo complex, subunit F2;
  ENSP ID: ENSP00000430398
MASVGECPAPGYYRYYNKY

SEQ ID NO: 7089 - protein, 108 aa, Homo sapiens
  Payload ID: 1511;
  Gene Symbol: ATP5J;
  Gene Name: ATP synthase, H+ transporting, mitochondrial Fo complex, subunit F6;
  Uniprot ID:  P18859;
  ENSP ID: ENSP00000284971
MILQRLFRFSSVIRSAVSVHLRRNIGVTAVAFNKELDPIQKLFVDKIREYKSKRQTSGGPVDASSEYQQELERELFKLKQMFGNADMNTFPTFKFEDPKFEVIEKPQA

SEQ ID NO: 7090 - protein, 108 aa, Homo sapiens; identical to SEQ ID NO: 7089
  Payload ID: 1511;
  Gene Symbol: ATP5J;
  Gene Name: ATP synthase, H+ transporting, mitochondrial Fo complex, subunit F6;
  Uniprot ID:  P18859;
  ENSP ID: ENSP00000382959

SEQ ID NO: 7091 - protein, 108 aa, Homo sapiens; identical to SEQ ID NO: 7089
  Payload ID: 1511;
  Gene Symbol: ATP5J;
  Gene Name: ATP synthase, H+ transporting, mitochondrial Fo complex, subunit F6;
  Uniprot ID:  P18859;
  ENSP ID: ENSP00000382962

SEQ ID NO: 7092 - protein, 108 aa, Homo sapiens; identical to SEQ ID NO: 7089
  Payload ID: 1511;
  Gene Symbol: ATP5J;
  Gene Name: ATP synthase, H+ transporting, mitochondrial Fo complex, subunit F6;
  Uniprot ID:  P18859;
  ENSP ID: ENSP00000382965

SEQ ID NO: 7093 - protein, 108 aa, Homo sapiens; identical to SEQ ID NO: 7089
  Payload ID: 1511;
  Gene Symbol: ATP5J;
  Gene Name: ATP synthase, H+ transporting, mitochondrial Fo complex, subunit F6;
  Uniprot ID:  P18859;
  ENSP ID: ENSP00000382966

SEQ ID NO: 7094 - protein, 119 aa, Homo sapiens
  Payload ID: 1511;
  Gene Symbol: ATP5J;
  Gene Name: ATP synthase, H+ transporting, mitochondrial Fo complex, subunit F6;
  ENSP ID: ENSP00000382971
MILQRLFRFSSVIRSAVSVHLRRNIGVTAVAFNKELDPIQKLFVDKIREYKSKRQTSGGPVDASSEYQQELERELFKLKQMFGNADMNTFPTFKFEEHFSQHLRSWQPSRDDDILILSS

SEQ ID NO: 7095 - protein, 116 aa, Homo sapiens
  Payload ID: 1511;
  Gene Symbol: ATP5J;
  Gene Name: ATP synthase, H+ transporting, mitochondrial Fo complex, subunit F6;
  Uniprot ID:  P18859;
  ENSP ID: ENSP00000389649
MHCDGGISMILQRLFRFSSVIRSAVSVHLRRNIGVTAVAFNKELDPIQKLFVDKIREYKSKRQTSGGPVDASSEYQQELERELFKLKQMFGNADMNTFPTFKFEDPKFEVIEKPQA

SEQ ID NO: 7096 - protein, 103 aa, Homo sapiens
  Payload ID: 1512;
  Gene Symbol: ATP5L;
  Gene Name: ATP synthase, H+ transporting, mitochondrial Fo complex, subunit G;
  Uniprot ID:  O75964;
  ENSP ID: ENSP00000300688
MAQFVRNLVEKTPALVNAAVTYSKPRLATFWYYAKVELVPPTPAEIPRAIQSLKKIVNSAQTGSFKQLTVKEAVLNGLVATEVLMWFYVGEIIGKRGIIGYDV

SEQ ID NO: 7097 - protein, 76 aa, Homo sapiens
  Payload ID: 1512;
  Gene Symbol: ATP5L;
  Gene Name: ATP synthase, H+ transporting, mitochondrial Fo complex, subunit G;
  ENSP ID: ENSP00000434865
MAQFVRNLVEKTPALVNAAVTYSKPRLATFWYYAKVELVPPTPAEIPRAIQSLKKIVNSAQTGSFKQLTVKKKSST

SEQ ID NO: 7098 - protein, 100 aa, Homo sapiens
  Payload ID: 1513;
  Gene Symbol: ATP5L2;
  Gene Name: ATP synthase, H+ transporting, mitochondrial Fo complex, subunit G2;
  Uniprot ID:  Q7Z4Y8;
  ENSP ID: ENSP00000421076
MAPFVRNLVEKTPALVNAAVTYLKPRLAAFWYYTTVELVPPTPAEIPRAIQSLKKIVSSAQTGSFKQLTVKEALLNGLVATEVSTWFYVREITGKRGIIG

SEQ ID NO: 7099 - protein, 127 aa, Homo sapiens
  Payload ID: 1514;
  Gene Symbol: ATP5S;
  Gene Name: ATP synthase, H+ transporting, mitochondrial Fo complex, subunit s (factor B);
  Uniprot ID:  Q99766;
  ENSP ID: ENSP00000245448
MCCAVSEQRLTCADQMMPFGKISQQLCGVKKLPWSCDSRYFWGWLNAVFNKVDYDRIRDVGPDRAASEWLLRCGAMVRYHGQERWQKDYNHLPTGPLDKYKIQAIDATDSCIMSIGFDHMETSNICC

SEQ ID NO: 7100 - protein, 215 aa, Homo sapiens
  Payload ID: 1514;
  Gene Symbol: ATP5S;
  Gene Name: ATP synthase, H+ transporting, mitochondrial Fo complex, subunit s (factor B);
  Uniprot ID:  Q99766;
  ENSP ID: ENSP00000308334
MCCAVSEQRLTCADQMMPFGKISQQLCGVKKLPWSCDSRYFWGWLNAVFNKVDYDRIRDVGPDRAASEWLLRCGAMVRYHGQERWQKDYNHLPTGPLDKYKIQAIDATDSCIMSIGFDHMEGLEHVEKIRLCKCHYIEDDCLLRLSQLENLQKTILEMEIISCGNITDKGIIALRHLRNLKYLLLSDLPGVREKENLVQAFKTALPSLELKLQLK

SEQ ID NO: 7101 - protein, 266 aa, Homo sapiens
  Payload ID: 1514;
  Gene Symbol: ATP5S;
  Gene Name: ATP synthase, H+ transporting, mitochondrial Fo complex, subunit s (factor B);
  ENSP ID: ENSP00000351258
MIRGSGAEACSNEDGCSEKGMKGVDYDRIRDVGPDRAASEWLLRCGAMVRYHGQERWQKDYNHLPTGPLDKYKIQAIDATDSCIMSIGFDHMEGLEHVEKIRLCKCHYIEDDCLLRLSQLENLQKTILEMEIISCGNITDKGIIALRHLRNLKYLLLSDLPGAGNPGPCVASGSSRTRAPLGFRERGLQETDVPGALVDRSYDLSPSAGMRMLELKATTAILKSRFQLSVPGGSLLFKQSPVGHSSISFWPYKAILRQSRAGDNQE

SEQ ID NO: 7102 - protein, 136 aa, Homo sapiens
  Payload ID: 1514;
  Gene Symbol: ATP5S;
  Gene Name: ATP synthase, H+ transporting, mitochondrial Fo complex, subunit s (factor B);
  Uniprot ID:  Q99766;
  ENSP ID: ENSP00000389246
MCCAVSEQRLTCADQMMPFGKISQQLCGVKKLPWSCDSRYFWGWLNAVFNKVDYDRIRDVGPDRAASEWLLRCGAMVRYHGQERWQKDYNHLPTGPLDKYKIQAIDATDSCIMSIGFDHMGNYPIVLLIENADDLQ

SEQ ID NO: 7103 - protein, 14 aa, Homo sapiens
  Payload ID: 1514;
  Gene Symbol: ATP5S;
  Gene Name: ATP synthase, H+ transporting, mitochondrial Fo complex, subunit s (factor B);
  ENSP ID: ENSP00000451583
MCCAVSEQRLTCAG

SEQ ID NO: 7104 - protein, 1278 aa, Homo sapiens
  Payload ID: 1515;
  Gene Symbol: AGTPBP1;
  Gene Name: ATP/GTP binding prt 1;
  ENSP ID: ENSP00000338512
MRTGSAASSAAAAAAAAAASASPATGVCMKTPGGGRRGIRRDPGAEPGAAALRGPRQRPILSRLTNNSRIVGLLAQLEKINAEPSESDTARYVTSKILHLAQSQEKTRREMTAKGSTGMEILLSTLENTKDLQTTLNILSILVELVSAGGGRRVSFLVTKGGSQILLQLLMNASKESPPHEDLMVQIHSILAKIGPKDKKFGVKARINGALNITLNLVKQNLQNHRLVLPCLQLLRVYSANSVNSVSLGKNGVVELMFKIIGPFSKKNSSLIKVALDTLAALLKSKTNARRAVDRGYVQVLLTIYVDWHRHDNRHRNMLIRKGILQSLKSVTNIKLGRKAFIDANGMKILYNTSQECLAVRTLDPLVNTSSLIMRKCFPKNRLPLPTIKSSFHFQLPVIPVTGPVAQLYSLPPEVDDVVDESDDNDDIDVEAENETENEDDLDQNFKNDDIETDINKLKPQQEPGRTIEDLKMYEHLFPELVDDFQDYDLISKEPKPFVFEGKVRGPIVVPTAGEETSGNSGNLRKVVMKENISSKGDEGEKKSTFMDLAKEDIKDNDRTLQQQPGDQNRTISSVHGLNNDIVKALDRITLQNIPSQTAPGFTAEMKKDCSLPLTVLTCAKACPHMATCGNVLFEGRTVQLGKLCCTGVETEDDEDTESNSSVEQASVEVPDGPTLHDPDLYIEIVKNTKSVPEYSEVAYPDYFGHIPPPFKEPILERPYGVQRTKIAQDIERLIHQSDIIDRVVYDLDNPNYTIPEEGDILKFNSKFESGNLRKVIQIRKNEYDLILNSDINSNHYHQWFYFEVSGMRPGVAYRFNIINCEKSNSQFNYGMQPLMYSVQEALNARPWWIRMGTDICYYKNHFSRSSVAAGGQKGKSYYTITFTVNFPHKDDVCYFAYHYPYTYSTLQMHLQKLESAHNPQQIYFRKDVLCETLSGNSCPLVTITAMPESNYYEHICHFRNRPYVFLSARVHPGETNASWVMKGTLEYLMSNNPTAQSLRESYIFKIVPMLNPDGVINGNHRCSLSGEDLNRQWQSPSPDLHPTIYHAKGLLQYLAAVKRLPLVYCDYHGHSRKKNVFMYGCSIKETVWHTNDNATSCDVVEDTGYRTLPKILSHIAPAFCMSSCSFVVEKSKESTARVVVWREIGVQRSYTMESTLCGCDQGKYKGLQIGTRELEEMGAKFCVGLLRLKRLTSPLEYNLPSSLLDFENDLIESSCKVTSPTTYVLDEDEPRFLEEVDYSAESNDELDIELAENVGDYEPSAQEEVLSDSELSRTYLP

SEQ ID NO: 7105 - protein, 1226 aa, Homo sapiens
  Payload ID: 1515;
  Gene Symbol: AGTPBP1;
  Gene Name: ATP/GTP binding prt 1;
  Uniprot ID:  Q9UPW5;
  ENSP ID: ENSP00000349592
MSKLKVIPEKSLTNNSRIVGLLAQLEKINAEPSESDTARYVTSKILHLAQSQEKTRREMTAKGSTGMEILLSTLENTKDLQTTLNILSILVELVSAGGGRRVSFLVTKGGSQILLQLLMNASKESPPHEDLMVQIHSILAKIGPKDKKFGVKARINGALNITLNLVKQNLQNHRLVLPCLQLLRVYSANSVNSVSLGKNGVVELMFKIIGPFSKKNSSLIKVALDTLAALLKSKTNARRAVDRGYVQVLLTIYVDWHRHDNRHRNMLIRKGILQSLKSVTNIKLGRKAFIDANGMKILYNTSQECLAVRTLDPLVNTSSLIMRKCFPKNRLPLPTIKSSFHFQLPVIPVTGPVAQLYSLPPEVDDVVDESDDNDDIDVEAENETENEDDLDQNFKNDDIETDINKLKPQQEPGRTIEDLKMYEHLFPELVDDFQDYDLISKEPKPFVFEGKVRGPIVVPTAGEETSGNSGNLRKVVMKENISSKGDEGEKKSTFMDLAKEDIKDNDRTLQQQPGDQNRTISSVHGLNNDIVKALDRITLQNIPSQTAPGFTAEMKKDCSLPLTVLTCAKACPHMATCGNVLFEGRTVQLGKLCCTGVETEDDEDTESNSSVEQASVEVPDGPTLHDPDLYIEIVKNTKSVPEYSEVAYPDYFGHIPPPFKEPILERPYGVQRTKIAQDIERLIHQSDIIDRVVYDLDNPNYTIPEEGDILKFNSKFESGNLRKVIQIRKNEYDLILNSDINSNHYHQWFYFEVSGMRPGVAYRFNIINCEKSNSQFNYGMQPLMYSVQEALNARPWWIRMGTDICYYKNHFSRSSVAAGGQKGKSYYTITFTVNFPHKDDVCYFAYHYPYTYSTLQMHLQKLESAHNPQQIYFRKDVLCETLSGNSCPLVTITAMPESNYYEHICHFRNRPYVFLSARVHPGETNASWVMKGTLEYLMSNNPTAQSLRESYIFKIVPMLNPDGVINGNHRCSLSGEDLNRQWQSPSPDLHPTIYHAKGLLQYLAAVKRLPLVYCDYHGHSRKKNVFMYGCSIKETVWHTNDNATSCDVVEDTGYRTLPKILSHIAPAFCMSSCSFVVEKSKESTARVVVWREIGVQRSYTMESTLCGCDQGKYKGLQIGTRELEEMGAKFCVGLLRLKRLTSPLEYNLPSSLLDFENDLIESSCKVTSPTTYVLDEDEPRFLEEVDYSAESNDELDIELAENVGDYEPSAQEEVLSDSELSRTYLP

SEQ ID NO: 7106 - protein, 1186 aa, Homo sapiens
  Payload ID: 1515;
  Gene Symbol: AGTPBP1;
  Gene Name: ATP/GTP binding prt 1;
  Uniprot ID:  Q9UPW5;
  ENSP ID: ENSP00000365251
MSKLKVIPEKSLTNNSRIVGLLAQLEKINAEPSESDTARYVTSKILHLAQSQEKTRREMTAKGSTGMEILLSTLENTKDLQTTLNILSILVELVSAGGGRRVSFLVTKGGSQILLQLLMNASKESPPHEDLMVQIHSILAKIGPKDKKFGVKARINGALNITLNLVKQNLQNHRLVLPCLQLLRVYSANSVNSVSLGKNGVVELMFKIIGPFSKKNSSLIKVALDTLAALLKSKTNARRAVDRGYVQVLLTIYVDWHRHDNRHRNMLIRKGILQSLKSVTNIKLGRKAFIDANGMKILYNTSQLPVIPVTGPVAQLYSLPPEVDDVVDESDDNDDIDVEAENETENEDDLDQNFKNDDIETDINKLKPQQEPGRTIEDLKMYEHLFPELVDDFQDYDLISKEPKPFVFEGKVRGPIVVPTAGEETSGNSGNLRKVVMKENISSKGDEGEKKSTFMDLAKEDIKDNDRTLQQQPGDQNRTISSVHGLNNDIVKALDRITLQNIPSQTAPGFTAEMKKDCSLPLTVLTCAKACPHMATCGNVLFEGRTVQLGKLCCTGVETEDDEDTESNSSVEQASVEVPDGPTLHDPDLYIEIVKNTKSVPEYSEVAYPDYFGHIPPPFKEPILERPYGVQRTKIAQDIERLIHQSDIIDRVVYDLDNPNYTIPEEGDILKFNSKFESGNLRKVIQIRKNEYDLILNSDINSNHYHQWFYFEVSGMRPGVAYRFNIINCEKSNSQFNYGMQPLMYSVQEALNARPWWIRMGTDICYYKNHFSRSSVAAGGQKGKSYYTITFTVNFPHKDDVCYFAYHYPYTYSTLQMHLQKLESAHNPQQIYFRKDVLCETLSGNSCPLVTITAMPESNYYEHICHFRNRPYVFLSARVHPGETNASWVMKGTLEYLMSNNPTAQSLRESYIFKIVPMLNPDGVINGNHRCSLSGEDLNRQWQSPSPDLHPTIYHAKGLLQYLAAVKRLPLVYCDYHGHSRKKNVFMYGCSIKETVWHTNDNATSCDVVEDTGYRTLPKILSHIAPAFCMSSCSFVVEKSKESTARVVVWREIGVQRSYTMESTLCGCDQGKYKGLQIGTRELEEMGAKFCVGLLRLKRLTSPLEYNLPSSLLDFENDLIESSCKVTSPTTYVLDEDEPRFLEEVDYSAESNDELDIELAENVGDYEPSAQEEVLSDSELSRTYLP

SEQ ID NO: 7107 - protein, 1238 aa, Homo sapiens
  Payload ID: 1515;
  Gene Symbol: AGTPBP1;
  Gene Name: ATP/GTP binding prt 1;
  Uniprot ID:  Q9UPW5;
  ENSP ID: ENSP00000487074
MRTGSAASSAAAAAAAAAASASPATGVCMKTPGGGRRGIRRDPGAEPGAAALRGPRQRPILSRLTNNSRIVGLLAQLEKINAEPSESDTARYVTSKILHLAQSQEKTRREMTAKGSTGMEILLSTLENTKDLQTTLNILSILVELVSAGGGRRVSFLVTKGGSQILLQLLMNASKESPPHEDLMVQIHSILAKIGPKDKKFGVKARINGALNITLNLVKQNLQNHRLVLPCLQLLRVYSANSVNSVSLGKNGVVELMFKIIGPFSKKNSSLIKVALDTLAALLKSKTNARRAVDRGYVQVLLTIYVDWHRHDNRHRNMLIRKGILQSLKSVTNIKLGRKAFIDANGMKILYNTSQLPVIPVTGPVAQLYSLPPEVDDVVDESDDNDDIDVEAENETENEDDLDQNFKNDDIETDINKLKPQQEPGRTIEDLKMYEHLFPELVDDFQDYDLISKEPKPFVFEGKVRGPIVVPTAGEETSGNSGNLRKVVMKENISSKGDEGEKKSTFMDLAKEDIKDNDRTLQQQPGDQNRTISSVHGLNNDIVKALDRITLQNIPSQTAPGFTAEMKKDCSLPLTVLTCAKACPHMATCGNVLFEGRTVQLGKLCCTGVETEDDEDTESNSSVEQASVEVPDGPTLHDPDLYIEIVKNTKSVPEYSEVAYPDYFGHIPPPFKEPILERPYGVQRTKIAQDIERLIHQSDIIDRVVYDLDNPNYTIPEEGDILKFNSKFESGNLRKVIQIRKNEYDLILNSDINSNHYHQWFYFEVSGMRPGVAYRFNIINCEKSNSQFNYGMQPLMYSVQEALNARPWWIRMGTDICYYKNHFSRSSVAAGGQKGKSYYTITFTVNFPHKDDVCYFAYHYPYTYSTLQMHLQKLESAHNPQQIYFRKDVLCETLSGNSCPLVTITAMPESNYYEHICHFRNRPYVFLSARVHPGETNASWVMKGTLEYLMSNNPTAQSLRESYIFKIVPMLNPDGVINGNHRCSLSGEDLNRQWQSPSPDLHPTIYHAKGLLQYLAAVKRLPLVYCDYHGHSRKKNVFMYGCSIKETVWHTNDNATSCDVVEDTGYRTLPKILSHIAPAFCMSSCSFVVEKSKESTARVVVWREIGVQRSYTMESTLCGCDQGKYKGLQIGTRELEEMGAKFCVGLLRLKRLTSPLEYNLPSSLLDFENDLIESSCKVTSPTTYVLDEDEPRFLEEVDYSAESNDELDIELAENVGDYEPSAQEEVLSDSELSRTYLP

SEQ ID NO: 7108 - protein, 1032 aa, Homo sapiens
  Payload ID: 1516;
  Gene Symbol: AGBL1;
  Gene Name: ATP/GTP binding prt-like 1;
  ENSP ID: ENSP00000397173
MISKGGSEALLQTLVDTARTAPPDYDILLPLFRLLAKVGLRDKKIGRKALELEALDVTLILARKNLSHGQNLLHCLWALRVFASSVSMGAMLGINGAMELLFKVITPYTRKRTQAIRAATEVLAALLKSKSNGRRAVNRGYVTSLLGLHQDWHSHDTANAYVQIRRGLLLCLRHIAALRSGREAFLAAQGMEILFSTTQNCLDDKSMEPVISVVLQILRQCYPTSPLPLVTASSAYAFPVPGCITTEPPHDLPEEDFEDDGDDEVDKDSDTEDGKVEDDDLETDVNKLSSKPGLDRPEEELMQYEVMCLELSYSFEELQSKLGDDLNSEKTQYANHHHIPAAASSKQHCYSKDQSSCGQEREYAVQTSLLCRVKTGRSTVHLGSKKNPGVNLYQNVQSNSLRRDSSESEIPDIQASPKADAWDVDAIFCPRMSASFSNSTRTREVVKVIDKLLQTHLKRVPFHDPYLYMAKARRTSSVVDFKMMAFPDVWGHCPPPTTQPMLERKCGVQRIRIFEDIRRLIQPSDVINKVVFSLDEPWPLQDNASNCLRFFSKFESGNLRKAIQVREFEYDLLVNADVNSTQHQQWFYFKVSGMQAAIPYHFNIINCEKPNSQFNYGMQPTLYSVKEALLGKPTWIRTGHEICYYKNHYRQSTAVAGGASGKCYYTLTFAVTFPHSEDVCYLAYHYPYTYTALMTHLDILEKSVNLKEVYFRQDVLCQTLGGNPCPLVTITAMPESNSDEHLEQFRHRPYQVITARVHPGESNASWVMKGTLEFLVSSDPVARLLRENFIFKIIPMLNPDGVINGNHRCSLSGEDLNRQWLSPSAHLQPTIYHAKGLLYHLSSIGRSPVVFCDFHGHSQKKNVFLYGCSIKETLWQAACTVGTSTILEEVNYRTLPKILDKLAPAFTMSSCSFLVEKSRASTARVVVWREMGVSRSYTMESSYCGCNQGPYQCTQRLLERTKNERAHPVDGLQGLQFGTRELEEMGAMFCLGLLILELKSASCSHQLLAQAATLLSAEEDALDQHLQRDAPK

SEQ ID NO: 7109 - protein, 1066 aa, Homo sapiens
  Payload ID: 1516;
  Gene Symbol: AGBL1;
  Gene Name: ATP/GTP binding prt-like 1;
  Uniprot ID:  Q96MI9;
  ENSP ID: ENSP00000413001
MISKGGSEALLQTLVDTARTAPPDYDILLPLFRLLAKVGLRDKKIGRKALELEALDVTLILARKNLSHGQNLLHCLWALRVFASSVSMGAMLGINGAMELLFKVITPYTRKRTQAIRAATEVLAALLKSKSNGRRAVNRGYVTSLLGLHQDWHSHDTANAYVQIRRGLLLCLRHIAALRSGREAFLAAQGMEILFSTTQNCLDDKSMEPVISVVLQILRQCYPTSPLPLVTASSAYAFPVPGCITTEPPHDLPEEDFEDDGDDEVDKDSDTEDGKVEDDDLETDVNKLSSKPGLDRPEEELMQYEVMCLELSYSFEELQSKLGDDLNSEKTQYANHHHIPAAASSKQHCYSKDQSSCGQEREYAVQTSLLCRVKTGRSTVHLGSKKNPGVNLYQNVQSNSLRRDSSESEIPDIQASPKADAWDVDAIFCPRMSASFSNSTRTREVVKVIDKLLQTHLKRVPFHDPYLYMAKARRTSSVVDFKMMAFPDVWGHCPPPTTQPMLERKCGVQRIRIFEDIRRLIQPSDVINKVVFSLDEPWPLQDNASNCLRFFSKFESGNLRKAIQVREFEYDLLVNADVNSTQHQQWFYFKVSGMQAAIPYHFNIINCEKPNSQFNYGMQPTLYSVKEALLGKPTWIRTGHEICYYKNHYRQSTAVAGGASGKCYYTLTFAVTFPHSEDVCYLAYHYPYTYTALMTHLDILEKSVNLKEVYFRQDVLCQTLGGNPCPLVTITAMPESNSDEHLEQFRHRPYQVITARVHPGESNASWVMKGTLEFLVSSDPVARLLRENFIFKIIPMLNPDGVINGNHRCSLSGEDLNRQWLSPSAHLQPTIYHAKGLLYHLSSIGRSPVVFCDFHGHSQKKNVFLYGCSIKETLWQAACTVGTSTILEEVNYRTLPKILDKLAPAFTMSSCSFLVEKSRASTARVVVWREMGVSRSYTMESSYCGCNQGPYQCTQRLLERTKNERAHPVDGLQGLQFGTRELEEMGAMFCLGLLILELKSASCSHQLLAQAATLLSAEEDALDQHLQRLKSSNFLPKHIWFAYHFFAITNFFKMNLLLHVSPVCDT

SEQ ID NO: 7110 - protein, 904 aa, Homo sapiens
  Payload ID: 1517;
  Gene Symbol: AGBL2;
  Gene Name: ATP/GTP binding prt-like 2;
  ENSP ID: ENSP00000350228
MFPALETHLKQTIPDPYEDFMYRHLQYYGYFKAQRGSLPNSATHQHVRKNNPQCLLNGSLGEKDDLIPDTLQKEKLLWPISLSSAVHRQIEAINRDFHSCLGWMQWRGLSSLQPPPPRFKDSPASAFRVAGITDSHMLSLPHLRSRQLLYDELDEVNPRLREPQELFSILSTKRPLQAPRWPIECEVIKENIHHIEWAPPQPEYFYQPKGNEKVPEIVGEKKGTVVYQLDSVPIEGSYFTSSRVGGKRGIVKELAVTLQGPEDNTLLFESRFESGNLQKAVRVDTYEYELTLRTDLYTNKHTQWFYFRVQNTRKDATYRFTIVNLLKPKSLYTVGMKPLLYSQLDANTRNIGWRREGNEIKYYKNNTDDGQQPFYCLTWTIQFPYDQDTCFFAHFYPYTYTDLQCYLLSVANNPIQSQFCKLQTLCRSLAGNTVYLLTITNPSQTPQEAAAKKAVVLSARVHPGESNGSWVMKGFLDFILSNSPDAQLLRDIFVFKVLPMLNPDGVIVGNYRCSLAGRDLNRHYKTILKESFPCIWYTRNMIKRLLEEREVLLYCDFHGHSRKNNIFLYGCNNNNRKYWLHERVFPLMLCKNAPDKFSFHSCNFKVQKCKEGTGRVVMWRMGILNSYTMESTFGGSTLGNKRDTHFTIEDLKSLGYHVCDTLLDFCDPDQMKFTQCLAELKELLRQEIHKKFHELGQDVDLEGSWSDISLSDIESRNSTSGSDSSLSDGLPVHLANIADELTQKKKMFKKKKKKSLQTRKQRNEQYQKKNLMQKLKLTEDTSEKAGFASTLQKQPTFFKNSENSSFLPMKNENPRLNETNLNRRDKDTPLDPSMATLILPKNKGRMQNKKPGFTVSCSPKRTINSSQEPAPGMKPNWPRSRYPATKRGCAAMAAYPSLHIYTYP

SEQ ID NO: 7111 - protein, 32 aa, Homo sapiens
  Payload ID: 1517;
  Gene Symbol: AGBL2;
  Gene Name: ATP/GTP binding prt-like 2;
  ENSP ID: ENSP00000431835
MFPALETHLKQTIPDPYEDFMYRHLQYYGYFK

SEQ ID NO: 7112 - protein, 126 aa, Homo sapiens
  Payload ID: 1517;
  Gene Symbol: AGBL2;
  Gene Name: ATP/GTP binding prt-like 2;
  ENSP ID: ENSP00000431912
  MOD_RES (1)..(1): Any amino acid
XQEAAAKKAVVLSARVHPGESNGSWVMKGFLDFILSNSPDAQLLRDIFVFKVLPMLNPDGVIVGNYRCSLAGRDLNRHYKTILKESFPCIWYTRNMIKSSLFTVVILRSKNAKKEQDELLCGGWES

SEQ ID NO: 7113 - protein, 61 aa, Homo sapiens
  Payload ID: 1517;
  Gene Symbol: AGBL2;
  Gene Name: ATP/GTP binding prt-like 2;
  ENSP ID: ENSP00000432090
MFPALETHLKQTIPDPYEDFMYRHLQYYGYFKGSRSVTQAGGQWPPHPRLKQPSQPLAIIF

SEQ ID NO: 7114 - protein, 148 aa, Homo sapiens
  Payload ID: 1517;
  Gene Symbol: AGBL2;
  Gene Name: ATP/GTP binding prt-like 2;
  ENSP ID: ENSP00000432264
MYRHLQYYGYFKAQRGSLPNSATHQHVRKNNPQCLLNGSLGEKDDLIPDTLQKEKLLWPISLSSAVHRQIEAINRDSHMLSLPHLRSRQLLYDELDEVNPRLREPQELFSILSTKRPLQAPRWPIECEVIKENIHHIEWAPPQPEYFY

SEQ ID NO: 7115 - protein, 902 aa, Homo sapiens
  Payload ID: 1517;
  Gene Symbol: AGBL2;
  Gene Name: ATP/GTP binding prt-like 2;
  Uniprot ID:  Q5U5Z8;
  ENSP ID: ENSP00000435582
MFPALETHLKQTIPDPYEDFMYRHLQYYGYFKAQRGSLPNSATHQHVRKNNPQCLLNGSLGEKDDLIPDTLQKEKLLWPISLSSAVHRQIEAINRDFHSCLGWMQWRGLSSLQPPPPRFKDSPASAFRVAGITDSHMLSLPHLRSRQLLYDELDEVNPRLREPQELFSILSTKRPLQAPRWPIECEVIKENIHHIEWAPPQPEYFYQPKGNEKVPEIVGEKKGTVVYQLDSVPIEGSYFTSSRVGGKRGIVKELAVTLQGPEDNTLLFESRFESGNLQKAVRVDTYEYELTLRTDLYTNKHTQWFYFRVQNTRKDATYRFTIVNLLKPKSLYTVGMKPLLYSQLDANTRNIGWRREGNEIKYYKNNTDDGQQPFYCLTWTIQFPYDQDTCFFAHFYPYTYTDLQCYLLSVANNPIQSQFCKLQTLCRSLAGNTVYLLTITNPSQTPQEAAAKKAVVLSARVHPGESNGSWVMKGFLDFILSNSPDAQLLRDIFVFKVLPMLNPDGVIVGNYRCSLAGRDLNRHYKTILKESFPCIWYTRNMIKRLLEEREVLLYCDFHGHSRKNNIFLYGCNNNNRKYWLHERVFPLMLCKNAPDKFSFHSCNFKVQKCKEGTGRVVMWRMGILNSYTMESTFGGSTLGNKRDTHFTIEDLKSLGYHVCDTLLDFCDPDQMKFTQCLAELKELLRQEIHKKFHELGQDVDLEGSWSDISLSDIESSTSGSDSSLSDGLPVHLANIADELTQKKKMFKKKKKKSLQTRKQRNEQYQKKNLMQKLKLTEDTSEKAGFASTLQKQPTFFKNSENSSFLPMKNENPRLNETNLNRRDKDTPLDPSMATLILPKNKGRMQNKKPGFTVSCSPKRTINSSQEPAPGMKPNWPRSRYPATKRGCAAMAAYPSLHIYTYP

SEQ ID NO: 7116 - protein, 331 aa, Homo sapiens
  Payload ID: 1517;
  Gene Symbol: AGBL2;
  Gene Name: ATP/GTP binding prt-like 2;
  ENSP ID: ENSP00000436063
MFPALETHLKQTIPDPYEDFMYRHLQYYGYFKAQRGSLPNSATHQHVRKNNPQCLLNGSLGEKDDLIPDTLQKEKLLYSHMLSLPHLRSRQLLYDELDEVNPRLREPQELFSILSTKRPLQAPRWPIECEVIKENIHHIEWAPPQPEYFYQPKGNEKVPEIVGEKKGTVVYQLDSVPIEGSYFTSSRVGGKRGIVKELAVTLQGPEDNTLLFESRFESGNLQKAVRVDTYEYELTLRTDLYTNKHTQWFYFRVQNTRKDATYRFTIVNLLKPKSLYTVGMKPLLYSQLDANTRNIGWRREGNEIKYYKNNTDDGQQPFYCLTWTIQFPYDQ

SEQ ID NO: 7117 - protein, 95 aa, Homo sapiens
  Payload ID: 1517;
  Gene Symbol: AGBL2;
  Gene Name: ATP/GTP binding prt-like 2;
  ENSP ID: ENSP00000436518
MFPALETHLKQTIPDPYEDFMYRHLQYYGYFKAQRGSLPNSATHQHVRKNNPQCLLNGSLGEKDDLIPDTLQKEKLLWPISLSSAVHRQIEAINR

SEQ ID NO: 7118 - protein, 824 aa, Homo sapiens
  Payload ID: 1517;
  Gene Symbol: AGBL2;
  Gene Name: ATP/GTP binding prt-like 2;
  ENSP ID: ENSP00000436630
MFPALETHLKQTIPDPYEDFMYRHLQYYGYFKAQRGSLPNSATHQHVRKNNPQCLLNGSLGEKDDLIPDTLQKEKLLWPISLSSAVHRQIEAINRDSHMLSLPHLRSRQLLYDELDEVNPRLREPQELFSILSTKRPLQAPRWPIECEVIKENIHHIEWAPPQPEYFYQPKGNEKVPEIVGEKKGTVVYQLDSVPIEGSYFTSSRVGGKRGIVKELAVTLQGPEDNTLLFESRFESGNLQKAVRVDTYEYELTLRTDLYTNKHTQWFYFRVQNTRKDATYRFTIVNLLKPKSLYTVGMKPLLYSQLDANTRNIGWRREGNEIKYYKNNTDDGQQPFYCLTWTIQFPYDQDTCFFAHFYPYTYTDLQCYLLSVANNPIQSQFCKLQTLCRSLAGNTVYLLTITNPSQTPQEAAAKKAVVLSARVHPGESNGSWVMKGFLDFILSNSPDAQLLRDIFVFKVLPMLNPDGVIVGNYRCSLAGRDLNRHYKTILKESFPCIWYTRNMIKRLLEEREVLLYCDFHGHSRKNNIFLYGCNNNNRKYWLHERVFPLMLCKNAPDKFSFHSCNFKVQKCKEGTGRVVMWRMGILNSYTMESTFGGSTLGNKRDTHFTIEDLKSLGYHVCDTLLDFCDPDQMKFTQCLAELKELLRQEIHKKFHELGQDVDLEGSWSDISLSDIESSTSGSDSSLSDGLPVHLANIADELTQKKKMFKKKKKKSLQTRKQRNEQYQKKNLMQKLKLTEDTSEKAGFASTLQKQPTFFKNSENSSFLPMKNENPRLNEVVFLFLTLCHTDSLTSRISTSLPQCDKCNSHLRYPNLTVPLGARKH

SEQ ID NO: 7119 - protein, 621 aa, Homo sapiens
  Payload ID: 1518;
  Gene Symbol: AGBL3;
  Gene Name: ATP/GTP binding prt-like 3;
  Uniprot ID:  Q8NEM8;
  ENSP ID: ENSP00000275763
MSEDSEKEDYSDRTISDEDESDEDMFMKFVSEDLHRCALLTADSFGDPFFPRTTQILLEYQLGRWVPRLREPRDLYGVSSSGPLSPTRWPYHCEVIDEKVQHIDWTPSCPEPVYIPTGLETEPLYPDSKEATVVYLAEDAYKEPCFVYSRVGGNRTPLKQPVDYRDNTLMFEARFESGNLQKVVKVAEYEYQLTVRPDLFTNKHTQWYYFQVTNMRAGIVYRFTIVNFTKPASLYSRGMRPLFYSEKEAKAHHIGWQRIGDQIKYYRNNPGQDGRHYFSLTWTFQFPHNKDTCYFAHCYPYTYTNLQEYLSGINNDPVRSKFCKIRVLCHTLARNMVYILTITTPLKNSDSRKRKAVILTARVHPGETNSSWIMKGFLDYILGNSSDAQLLRDTFVFKVVPMLNPDGVIVGNYRCSLAGRDLNRNYTSLLKESFPSVWYTRNMVHRLMEKREVILYCDLHGHSRKENIFMYGCDGSDRSKTLYLQQRIFPLMLSKNCPDKFSFSACKFNVQKSKEGTGRVVMWKMGIRNSFTMEATFCGSTLGNKRGTHFSTKDLESMGYHFCDSLLDYCDPDRTKYYRCLKELEEMERHITLEKVFEDSDTPVIDITLDVESRELTFLLR

SEQ ID NO: 7120 - protein, 920 aa, Homo sapiens
  Payload ID: 1518;
  Gene Symbol: AGBL3;
  Gene Name: ATP/GTP binding prt-like 3;
  Uniprot ID:  Q8NEM8;
  ENSP ID: ENSP00000388275
MSEDSEKEDYSDRTISDEDESDEDMFMKFVSEDLHRCALLTADSFGDPFFPRTTQILLEYQLGRWVPRLREPRDLYGVSSSGPLSPTRWPYHCEVIDEKVQHIDWTPSCPEPVYIPTGLETEPLYPDSKEATVVYLAEDAYKEPCFVYSRVGGNRTPLKQPVDYRDNTLMFEARFESGNLQKVVKVAEYEYQLTVRPDLFTNKHTQWYYFQVTNMRAGIVYRFTIVNFTKPASLYSRGMRPLFYSEKEAKAHHIGWQRIGDQIKYYRNNPGQDGRHYFSLTWTFQFPHNKDTCYFAHCYPYTYTNLQEYLSGINNDPVRSKFCKIRVLCHTLARNMVYILTITTPLKNSDSRKRKAVILTARVHPGETNSSWIMKGFLDYILGNSSDAQLLRDTFVFKVVPMLNPDGVIVGNYRCSLAGRDLNRNYTSLLKESFPSVWYTRNMVHRLMEKREVILYCDLHGHSRKENIFMYGCDGSDRSKTLYLQQRIFPLMLSKNCPDKFSFSACKFNVQKSKEGTGRVVMWKMGIRNSFTMEATFCGSTLGNKRGTHFSTKDLESMGYHFCDSLLDYCDPDRTKYYRCLKELEEMERHITLEKVFEDSDTPVIDITLDVESSSRGSDSSESIDSLTYLLKLTSQKKHLKTKKERNSTIASHQNARGQEVYDRGHLLQRHTQSNSDVKDTRPNEPDDYMVDYFRRQLPNQGLDLHHNLKSKIKECISFQSKKTGINWTDDEKRSYKDKGIVQTQEILQYLLPIVHSTKNMQTTQIKQLFNPRTNFQIQHQLNPATCRNIKKYSTSWTAPRNHPFVIQGDVMANSSEWVQSKPHRSLESLSPLKGPKKNKHSQIWAIKNEDIKPLSSKWETASSSFGMDANVLKYKSLQAEETNQQSSKHTALHLTKNKDEQANKNDGQPTLYLKFQRES

SEQ ID NO: 7121 - protein, 704 aa, Homo sapiens
  Payload ID: 1518;
  Gene Symbol: AGBL3;
  Gene Name: ATP/GTP binding prt-like 3;
  ENSP ID: ENSP00000401220
MSEDSEKEDYSDRTISDEDESDEDMFMKFVSEDLHRCALLTADSFGDPFFPRTTQILLEYQLGRWVPRLREPRDLYGVSSSGPLSPTRWPYHCEVIDEKVQHIDWTPSCPEPVYIPTGLETEPLYPDSKEATVVYLAEDAYKEPCFVYSRVGGNRTPLKQPVDYRDNTLMFEARFESGNLQKVVKVAEYEYQLTVRPDLFTNKHTQWYYFQVTNMRAGIVYRFTIVNFTKPASLYSRGMRPLFYSEKEAKAHHIGWQRIGDQIKYYRNNPGQDGRHYFSLTWTFQFPHNKDTCYFAHCYPYTYTNLQEYLSGINNDPVRSKFCKIRVLCHTLARNMVYILTITTPLKNSDSRKRKAVILTARVHPGETNSSWIMKGFLDYILGNSSDAQLLRDTFVFKVVPMLNPDGVIVGNYRCSLAGRDLNRNYTSLLKESFPSVWYTRNMVHRLMEKREVILYCDLHGHSRKENIFMYGCDGSDRSKTLYLQQRIFPLMLSKNCPDKFSFSACKFNVQKSKEGTGRVVMWKMGIRNSFTMEATFCGSTLGNKRGTHFSTKDLESMGYHFCDSLLDYCDPDRTKYYRCLKELEEMERHITLEKVFEDSDTPVIDITLDVESSSRGSDSSESIDSLTYLLKLTSQKKHLKTKKERNSTIASHQNARGQEVYDRGHLLQRHTQSNSDVKDTRPNEPDDYMVDYFRRQLPNQGLV

SEQ ID NO: 7122 - protein, 93 aa, Homo sapiens
  Payload ID: 1518;
  Gene Symbol: AGBL3;
  Gene Name: ATP/GTP binding prt-like 3;
  ENSP ID: ENSP00000412700
MSEDSEKEDYSDRTISDEDESDEDMFMKFVSEDLHRCALLTDWTPSCPEPVYIPTGLETEPLYPDSKEATVVYLAEDGEHIMTHVAVKYNLVL

SEQ ID NO: 7123 - protein, 292 aa, Homo sapiens
  Payload ID: 1519;
  Gene Symbol: AGBL4;
  Gene Name: ATP/GTP binding prt-like 4;
  ENSP ID: ENSP00000335516
DNLREGAEQKVVFITGRVHPGETPSSFVCQGIIDFLVSQHPIACVLREYLVFKIAPMLNPDGVYLGNYRCSLMGFDLNRHWLDPSPWVHPTLHGVKQLIVQMYNDPKTSLEFYIDIHAHSTMMNGFMYGNIFEDEERFQRQAIFPKLLCQNAEDFSYSSTSFNRDAVKAGTGRRFLGGLLDHTSYCYTLEVSFYSYIISGTTAAVPYTEEAYMKLGRNVARTFLDYYRLNPVVEKVAIPMPRLRNKEIEVQRRKEKSPPYKHPLLRGPASNYPNSKGDKKSSVNHKDPSTPF

SEQ ID NO: 7124 - protein, 217 aa, Homo sapiens
  Payload ID: 1519;
  Gene Symbol: AGBL4;
  Gene Name: ATP/GTP binding prt-like 4;
  ENSP ID: ENSP00000360902
MAEGSQSAPEAGNDMGNDDAIGGNVSKYIVLPTGYCGQPKKGHLIFDACFESGNLGRVDQVSEFEYDLFIRPDTCNPRFRVWFNFTVENVKESQRVIFNIVNFSKTKSLYRDGMAPMVKSTSRPKWQRLPPKNVYYYRCPDHRKNYVMSFAFCFDREEDIYQFAYCYPYTYTRFQHYLDSLQKRNMDYFFREQLGQSVQQRKLDLLTITSPAGRWSW

SEQ ID NO: 7125 - protein, 320 aa, Homo sapiens
  Payload ID: 1519;
  Gene Symbol: AGBL4;
  Gene Name: ATP/GTP binding prt-like 4;
  ENSP ID: ENSP00000360904
MAEGSQSAPEAGNDMGNDDAIGGNVSKYIVLPTGYCGQPKKGHLIFDACFESGNLGRVDQVSEFEYDLFIRPDTCNPRFRVWFNFTVENVKESQRVIFNIVNFSKTKSLYRDGMAPMVKSTSRPKWQRLPPKNVYYYRCPDHRKNYVMSFAFCFDREEDIYQFAYCYPYTYTRFQHYLDSLQKRNMDYFFREQLGQSVQQRKLDLLTITSPDNLREGAEQKVVFITGRVHPGETPSSFVCQGIIDFLVSQHPIACVLREYLVFKIAPMLNPDGVYLGNYRCSLMGFDLNRHWLDPSPWVHPTLHGVKQLIVQMYNDPVSN

SEQ ID NO: 7126 - protein, 503 aa, Homo sapiens
  Payload ID: 1519;
  Gene Symbol: AGBL4;
  Gene Name: ATP/GTP binding prt-like 4;
  Uniprot ID:  Q5VU57;
  ENSP ID: ENSP00000360905
MAEGSQSAPEAGNDMGNDDAIGGNVSKYIVLPTGYCGQPKKGHLIFDACFESGNLGRVDQVSEFEYDLFIRPDTCNPRFRVWFNFTVENVKESQRVIFNIVNFSKTKSLYRDGMAPMVKSTSRPKWQRLPPKNVYYYRCPDHRKNYVMSFAFCFDREEDIYQFAYCYPYTYTRFQHYLDSLQKRNMDYFFREQLGQSVQQRKLDLLTITSPDNLREGAEQKVVFITGRVHPGETPSSFVCQGIIDFLVSQHPIACVLREYLVFKIAPMLNPDGVYLGNYRCSLMGFDLNRHWLDPSPWVHPTLHGVKQLIVQMYNDPKTSLEFYIDIHAHSTMMNGFMYGNIFEDEERFQRQAIFPKLLCQNAEDFSYSSTSFNRDAVKAGTGRRFLGGLLDHTSYCYTLEVSFYSYIISGTTAAVPYTEEAYMKLGRNVARTFLDYYRLNPVVEKVAIPMPRLRNKEIEVQRRKEKSPPYKHPLLRGPASNYPNSKGDKKSSVNHKDPSTPF

SEQ ID NO: 7127 - protein, 299 aa, Homo sapiens
  Payload ID: 1519;
  Gene Symbol: AGBL4;
  Gene Name: ATP/GTP binding prt-like 4;
  ENSP ID: ENSP00000401622
  MOD_RES (1)..(1): Any amino acid
XREEDIYQFAYCYPYTYTRFQHYLDSLQKRNMDYFFREQLGQSVQQRKLDLLTITSPDNLREGAEQKVVFITGRVHPGETPSSFVCQGIIDFLVSQHPIACVLREYLVFKIAPMLNPDGVYLGNYRCSLMGFDLNRHWLDPSPWVHPTLHGVKQLIVQMYNDPKTSLEFYIDIHAHSTMMNGFMYGNIFEDEERFQRQAIFPKLLCQNAEDFSYSSTSFNRDAVKAGTGRRFLGGLLDHTSYCYTLEVSFYSYIISGTTAAVPYTEEACILSPHPALGQPSSSREYPSLTGQELGPQLR

SEQ ID NO: 7128 - protein, 717 aa, Homo sapiens
  Payload ID: 1520;
  Gene Symbol: AGBL5;
  Gene Name: ATP/GTP binding prt-like 5;
  Uniprot ID:  Q8NDL9;
  ENSP ID: ENSP00000323681
MELRCGGLLFSSRFDSGNLAHVEKVESLSSDGEGVGGGASALTSGIASSPDYEFNVWTRPDCAETEFENGNRSWFYFSVRGGMPGKLIKINIMNMNKQSKLYSQGMAPFVRTLPTRPRWERIRDRPTFEMTETQFVLSFVHRFVEGRGATTFFAFCYPFSYSDCQELLNQLDQRFPENHPTHSSPLDTIYYHRELLCYSLDGLRVDLLTITSCHGLREDREPRLEQLFPDTSTPRPFRFAGKRIFFLSSRVHPGETPSSFVFNGFLDFILRPDDPRAQTLRRLFVFKLIPMLNPDGVVRGHYRTDSRGVNLNRQYLKPDAVLHPAIYGAKAVLLYHHVHSRLNSQSSSEHQPSSCLPPDAPVSDLEKANNLQNEAQCGHSADRHNAEAWKQTEPAEQKLNSVWIMPQQSAGLEESAPDTIPPKESGVAYYVDLHGHASKRGCFMYGNSFSDESTQVENMLYPKLISLNSAHFDFQGCNFSEKNMYARDRRDGQSKEGSGRVAIYKASGIIHSYTLECNYNTGRSVNSIPAACHDNGRASPPPPPAFPSRYTVELFEQVGRAMAIAALDMAECNPWPRIVLSEHSSLTNLRAWMLKHVRNSRGLSSTLNVGVNKKRGLRTPPKSHNGLPVSCSENTLSRARSFSTGTSAGGSSSSQQNSPQMKNSPSFPFHGSRPAGLPGLGSSTQKVTHRVLGPVRGKPVWEPLQHVFGCLGHCWGK

SEQ ID NO: 7129 - protein, 886 aa, Homo sapiens
  Payload ID: 1520;
  Gene Symbol: AGBL5;
  Gene Name: ATP/GTP binding prt-like 5;
  Uniprot ID:  Q8NDL9;
  ENSP ID: ENSP00000353249
MELRCGGLLFSSRFDSGNLAHVEKVESLSSDGEGVGGGASALTSGIASSPDYEFNVWTRPDCAETEFENGNRSWFYFSVRGGMPGKLIKINIMNMNKQSKLYSQGMAPFVRTLPTRPRWERIRDRPTFEMTETQFVLSFVHRFVEGRGATTFFAFCYPFSYSDCQELLNQLDQRFPENHPTHSSPLDTIYYHRELLCYSLDGLRVDLLTITSCHGLREDREPRLEQLFPDTSTPRPFRFAGKRIFFLSSRVHPGETPSSFVFNGFLDFILRPDDPRAQTLRRLFVFKLIPMLNPDGVVRGHYRTDSRGVNLNRQYLKPDAVLHPAIYGAKAVLLYHHVHSRLNSQSSSEHQPSSCLPPDAPVSDLEKANNLQNEAQCGHSADRHNAEAWKQTEPAEQKLNSVWIMPQQSAGLEESAPDTIPPKESGVAYYVDLHGHASKRGCFMYGNSFSDESTQVENMLYPKLISLNSAHFDFQGCNFSEKNMYARDRRDGQSKEGSGRVAIYKASGIIHSYTLECNYNTGRSVNSIPAACHDNGRASPPPPPAFPSRYTVELFEQVGRAMAIAALDMAECNPWPRIVLSEHSSLTNLRAWMLKHVRNSRGLSSTLNVGVNKKRGLRTPPKSHNGLPVSCSENTLSRARSFSTGTSAGGSSSSQQNSPQMKNSPSFPFHGSRPAGLPGLGSSTQKVTHRVLGPVREPRSQDRRRQQQPLNHRPAGSLAPSPAPTSSGPASSHKLGSCLLPDSFNIPGSSCSLLSSGDKPEAVMVIGKGLLGTGARMPCIKTRLQARPRLGRGSPPTRRGMKGSSGPTSPTPRTRESSELELGSCSATPGLPQARPPRPRSAPAFSPISCSLSDSPSWNCYSRGPLGQPEVCFVPKSPPLTVSPRV

SEQ ID NO: 7130 - protein, 157 aa, Homo sapiens
  Payload ID: 1520;
  Gene Symbol: AGBL5;
  Gene Name: ATP/GTP binding prt-like 5;
  ENSP ID: ENSP00000394730
MELRCGGLLFSSRFDSGNLAHVEKVESLSSDGEGVGGGASALTSGIASSPDYEFNVWTRPDCAETEFENGNRSWFYFSVRGGMPGKLIKINIMNMNKQSKLYSQGMAPFVRTLPTRPRWERIRDRPTFEMTETQFVLSFVHRFVEGRGATTFFAFCY

SEQ ID NO: 7131 - protein, 65 aa, Homo sapiens
  Payload ID: 1520;
  Gene Symbol: AGBL5;
  Gene Name: ATP/GTP binding prt-like 5;
  ENSP ID: ENSP00000395266
MELRCGGLLFSSRFDSGNLAHVEKVESLSSDGEGVGGGASALTSGIASSPDYEFNVWTRPDCAET

SEQ ID NO: 7132 - protein, 25 aa, Homo sapiens
  Payload ID: 1520;
  Gene Symbol: AGBL5;
  Gene Name: ATP/GTP binding prt-like 5;
  ENSP ID: ENSP00000395721
MELRCGGLLFSSRFDSGNLAHVEKV

SEQ ID NO: 7133 - protein, 137 aa, Homo sapiens
  Payload ID: 1520;
  Gene Symbol: AGBL5;
  Gene Name: ATP/GTP binding prt-like 5;
  ENSP ID: ENSP00000400905
SSSSQQNSPQMKNSPSFPFHGSRPAGLPGLGSSTQKVTHRVLGPVREPRSQDRRRQQQPLNHRPAGSLAPSPAPTSSGPASSHKLGSCLLPDSFNIPGLYPLPLKSGFASLLHGQARFFKPSWETRGITYPLGILNL

SEQ ID NO: 7134 - protein, 66 aa, Homo sapiens
  Payload ID: 1520;
  Gene Symbol: AGBL5;
  Gene Name: ATP/GTP binding prt-like 5;
  ENSP ID: ENSP00000407584
MELRCGGLLFSSRFDSGNLAHVEKVESLSSDGEGVGGGASALTSGIASSPDYEFNVWTRPDCAETE

SEQ ID NO: 7135 - protein, 816 aa, Homo sapiens
  Payload ID: 1520;
  Gene Symbol: AGBL5;
  Gene Name: ATP/GTP binding prt-like 5;
  Uniprot ID:  Q8NDL9;
  ENSP ID: ENSP00000433830
MELRCGGLLFSSRFDSGNLAHVEKVESLSSDGEGVGGGASALTSGIASSPDYEFNVWTRPDCAETEFENGNRSWFYFSVRGGMPGKLIKINIMNMNKQSKLYSQGMAPFVRTLPTRPRWERIRDRPTFEMTETQFVLSFVHRFVEGRGATTFFAFCYPFSYSDCQELLNQLDQRFPENHPTHSSPLDTIYYHRELLCYSLDGLRVDLLTITSCHGLREDREPRLEQLFPDTSTPRPFRFAGKRIFFLSSRVHPGETPSSFVFNGFLDFILRPDDPRAQTLRRLFVFKLIPMLNPDGVVRGHYRTDSRGVNLNRQYLKPDAVLHPAIYGAKAVLLYHHVHSRLNSQSSSEHQPSSCLPPDAPVSDLEKANNLQNEAQCGHSADRHNAEAWKQTEPAEQKLNSVWIMPQQSAGLEESAPDTIPPKESGVAYYVDLHGHASKRGCFMYGNSFSDESTQVENMLYPKLISLNSAHFDFQGCNFSEKNMYARDRRDGQSKEGSGRVAIYKASGIIHSYTLECNYNTGRSVNSIPAACHDNGRASPPPPPAFPSRYTVELFEQVGRAMAIAALDMAECNPWPRIVLSEHSSLTNLRAWMLKHVRNSRGLSSTLNVGVNKKRGLRTPPKSHNGLPVSCSENTLSRARSFSTGTSAGGSSSSQQNSPQMKNSPSFPFHGSRPAGLPGLGSSTQKVTHRVLGPVREPRSQDRRRQQQPLNHRPAGSLAPSPAPTSSGPASSHKLGSCLLPDSFNIPGSSCSLLSSGDKPEAVMVIGKGLLGTGARMPCIKTRLQTCPRRVSARRGPGFPRLGPGWAGAHRRLAEG

SEQ ID NO: 7136 - protein, 749 aa, Homo sapiens
  Payload ID: 1521;
  Gene Symbol: ATP5J2-PTCD1;
  Gene Name: ATP5J2-PTCD1 readthrough;
  ENSP ID: ENSP00000400168
MASVVPVKDKKLLEVKLGELPSWILMRDFSPSGIFGAFQRGPGGTGKPEMDFVRLARLFARARPMGLFILQHLDPCRARWAGGREGLMRPMWAPFSSSSSQLPLGQERQENTGSLGSDPSHSNSTATQEEDEEEEESFGTLSDKYSSRRLFRKSAAQFHNLRFGERRDEQMEPEPKLWRGRRNTPYWYFLQCKHLIKEGKLVEALDLFERQMLKEERLQPMESNYTVLIGGCGRVGYLKKAFNLYNQMKKRDLEPSDATYTALFNVCAESPWKDSALQSALKLRQQLQAKNFELNLKTYHALLKMAAKCADLRMCLDVFKEIIHKGHVVTEETFSFLLMGCIQDKKTGFRYALQVWRLMLSLGLQPSRDSYNLLLVAARDCGLGDPQVASELLLKPREEATVLQPPVSRQRPRRTAQAKAGNLMSAMLHVEALERQLFLEPSQALGPPEPPEARVPGKAQPEVDTKAEPSHTAALTAVALKPPPVELEVNLLTPGAVPPTVVSFGTVTTPADRLALIGGLEGFLSKMAEHRQQPDIRTLTLLAEVVESGSPAESLLLALLDEHQVEADLTFFNTLVRKKSKLGDLEGAKALLPVLAKRGLVPNLQTFCNLAIGCHRPKDGLQLLTDMKKSQVTPNTHIYSALINAAIRKLNYTYLISILKDMKQNRVPVNEVVIRQLEFAAQYPPTFDRYQGKNTYLEKIDGFRAYYKQWLTVMPAEETPHPWQKFRTKPQGDQDTGKEADDGCALGGR

SEQ ID NO: 7137 - protein, 54 aa, Homo sapiens
  Payload ID: 1521;
  Gene Symbol: ATP5J2-PTCD1;
  Gene Name: ATP5J2-PTCD1 readthrough;
  ENSP ID: ENSP00000416954
MASVVPVKDKKLLEVKLGELPSWILMRDFSPSGIFGAFQRGYGQAASVEGAYRL

SEQ ID NO: 7138 - protein, 257 aa, Homo sapiens
  Payload ID: 1522;
  Gene Symbol: ATP5SL;
  Gene Name: ATP5S-like;
  Uniprot ID:  Q9NW81;
  ENSP ID: ENSP00000221943
MAAPWASLRLVAPMWNGRIRGIHRLGAAVAPEGNQKKKRTILQFLTNYFYDVEALRDYLLQREMYKVHEKNRSYTWLEKQHGPYGAGAFFILKQGGAVKFRDKEWIRPDKYGHFSQEFWNFCEVPVEAVDAGDCDINYEGLDNLLRLKELQSLSLQRCCHVDDWCLSRLYPLADSLQELSLAGCPRISERGLACLHHLQNLRRLDISDLPAVSNPGLTQILVEEMLPNCEVVGVDWAEGLKSGPEEQPRDTASPVPA

SEQ ID NO: 7139 - protein, 191 aa, Homo sapiens
  Payload ID: 1522;
  Gene Symbol: ATP5SL;
  Gene Name: ATP5S-like;
  Uniprot ID:  Q9NW81;
  ENSP ID: ENSP00000301183
MWDLVLEDRRMNSLRLVAPMWNGRIRGIHRLGAAVAPEGNQKKKRTILQFLTNYFYDVEALRDYLLQREMYKVHEKNRSYTWLEKQHGPYGAGAFFILKQGGAVKFRDKEWIRPDKYGHFSQEFWNFCEVPVEAVDAGDCDINYEGLDNLRTSAGWTSRTSLPCPTLASLRYWWRRCCPIARLWESTGLRA

SEQ ID NO: 7140 - protein, 158 aa, Homo sapiens
  Payload ID: 1522;
  Gene Symbol: ATP5SL;
  Gene Name: ATP5S-like;
  Uniprot ID:  Q9NW81;
  ENSP ID: ENSP00000397413
MAAPWASLRLVAPMWNGRIRGIHRLGAAVAPEGNQKKKRTILQFLTNYFYDVEALRDYLLQREMYKVHEKNRFRDKEWIRPDKYGHFSQEFWNFCEVPVEAVDAGDCDINYEGLDNLRTSAGWTSRTSLPCPTLASLRYWWRRCCPIARLWESTGLRA

SEQ ID NO: 7141 - protein, 263 aa, Homo sapiens
  Payload ID: 1522;
  Gene Symbol: ATP5SL;
  Gene Name: ATP5S-like;
  Uniprot ID:  Q9NW81;
  ENSP ID: ENSP00000403910
MWDLVLEDRRMNSLRLVAPMWNGRIRGIHRLGAAVAPEGNQKKKRTILQFLTNYFYDVEALRDYLLQREMYKVHEKNRSYTWLEKQHGPYGAGAFFILKQGGAVKFRDKEWIRPDKYGHFSQEFWNFCEVPVEAVDAGDCDINYEGLDNLLRLKELQSLSLQRCCHVDDWCLSRLYPLADSLQELSLAGCPRISERGLACLHHLQNLRRLDISDLPAVSNPGLTQILVEEMLPNCEVVGVDWAEGLKSGPEEQPRDTASPVPA

SEQ ID NO: 7142 - protein, 176 aa, Homo sapiens
  Payload ID: 1522;
  Gene Symbol: ATP5SL;
  Gene Name: ATP5S-like;
  ENSP ID: ENSP00000464907
MAAPWASLRLVAPMWNGRIRGIHRLGAAVAPEGNQKKKRTILQFLTNYFYDVEALRDYLLQREMYKILHLAGEATWSIRRRFRDKEWIRPDKYGHFSQEFWNFCEVPVEAVDAGDCDINYEGLDNLLRLKELQSLSLQRCCHVDDWCLSRLYPLADSLQELSLAGCPRISERGLAC

SEQ ID NO: 7143 - protein, 185 aa, Homo sapiens
  Payload ID: 1522;
  Gene Symbol: ATP5SL;
  Gene Name: ATP5S-like;
  Uniprot ID:  Q9NW81;
  ENSP ID: ENSP00000466485
MAAPWASLRLVAPMWNGRIRGIHRLGAAVAPEGNQKKKRTILQFLTNYFYDVEALRDYLLQREMYKVHEKNRSYTWLEKQHGPYGAGAFFILKQGGAVKFRDKEWIRPDKYGHFSQEFWNFCEVPVEAVDAGDCDINYEGLDNLRTSAGWTSRTSLPCPTLASLRYWWRRCCPIARLWESTGLRA

SEQ ID NO: 7144 - protein, 230 aa, Homo sapiens
  Payload ID: 1522;
  Gene Symbol: ATP5SL;
  Gene Name: ATP5S-like;
  Uniprot ID:  Q9NW81;
  ENSP ID: ENSP00000467205
MAAPWASLRLVAPMWNGRIRGIHRLGAAVAPEGNQKKKRTILQFLTNYFYDVEALRDYLLQREMYKVHEKNRFRDKEWIRPDKYGHFSQEFWNFCEVPVEAVDAGDCDINYEGLDNLLRLKELQSLSLQRCCHVDDWCLSRLYPLADSLQELSLAGCPRISERGLACLHHLQNLRRLDISDLPAVSNPGLTQILVEEMLPNCEVVGVDWAEGLKSGPEEQPRDTASPVPA

SEQ ID NO: 7145 - protein, 178 aa, Homo sapiens
  Payload ID: 1522;
  Gene Symbol: ATP5SL;
  Gene Name: ATP5S-like;
  ENSP ID: ENSP00000468059
MWDLVLEDRRMNSLRLVAPMWNGRIRGIHRLGAAVAPEGNQKKKRTILQFLTNYFYDVEALRDYLLQREMYKVHEKNRFRDKEWIRPDKYGHFSQEFWNFCEVPVEAVDAGDCDINYEGLDNLLRLKELQSLSLQRCCHVDDWCLSRLYPLADSLQELSLAGCPRISERGLACLHHLQ

SEQ ID NO: 7146 - protein, 101 aa, Homo sapiens
  Payload ID: 1522;
  Gene Symbol: ATP5SL;
  Gene Name: ATP5S-like;
  ENSP ID: ENSP00000468796
MWNGRIRGIHRLGAAVAPEGNQKKKRTILQFLTNYFYDVEALRDYLLQREMYKVHEKNRSYTWLEKQHGPYGAGAFFILKQGGAVKFRDKEWIRPDKYGHF

SEQ ID NO: 7147 - protein, 22 aa, Homo sapiens
  Payload ID: 1522;
  Gene Symbol: ATP5SL;
  Gene Name: ATP5S-like;
  ENSP ID: ENSP00000468966
MWDLVLEDRRMNVSRQGVDQAR

SEQ ID NO: 7148 - protein, 172 aa, Homo sapiens
  Payload ID: 1522;
  Gene Symbol: ATP5SL;
  Gene Name: ATP5S-like;
  ENSP ID: ENSP00000470444
MAAPWASLRLVAPMWNGRIRGIHRLGAAVAPEGNQKKKRTILQFLTNYFYDVEALRDYLLQREMYKVHEKNRFRDKEWIRPDKYGHFSQEFWNFCEVPVEAVDAGDCDINYEGLDNLLRLKELQSLSLQRCCHVDDWCLSRLYPLADSLQELSLAGCPRISERGLACLHHLQ

SEQ ID NO: 7149 - protein, 150 aa, Homo sapiens
  Payload ID: 1522;
  Gene Symbol: ATP5SL;
  Gene Name: ATP5S-like;
  ENSP ID: ENSP00000470684
  MOD_RES (1)..(1): Any amino acid
XYGAGAFFILKQGGAVKFRDKEWIRPDKYGHFSQEFWNFCEVPVEAVDAGDCDINYEGLDNLLRLKELQSLSLQRCCHVDDWCLSRLYPLADSLQELSLAGCPRISERGLACLHHLQNLRRLDISDLPAVSNPGLTQILVEEMLPNCEGP

SEQ ID NO: 7150 - protein, 121 aa, Homo sapiens
  Payload ID: 1522;
  Gene Symbol: ATP5SL;
  Gene Name: ATP5S-like;
  ENSP ID: ENSP00000471068
MAAPWASLRLVAPMWNGRIRGIHRLGAAVAPEGNQKKKRTILQFLTNYFYDVEALRDYLLQREMYKVHEKNRFRDKEWIRPDKYGHFSQEFWNFCEVPVEAVDAGDCDINYEGLDNLLKTV

SEQ ID NO: 7151 - protein, 99 aa, Homo sapiens
  Payload ID: 1523;
  Gene Symbol: ATP6V1G2-DDX39B;
  Gene Name: ATP6V1G2-DDX39B readthrough (NMD candidate);
  ENSP ID: ENSP00000365356
MASQSQGIQQLLQAEKRAAEKVADARKRKARRLKQAKEEAQMEVEQYRREREHEFQSKQQATGIFQRQAWSARICITAEGPVSGPLRLRSCSQEGGRLE

SEQ ID NO: 7152 - protein, 99 aa, Homo sapiens; identical to SEQ ID NO: 7151
  Payload ID: 1523;
  Gene Symbol: ATP6V1G2-DDX39B;
  Gene Name: ATP6V1G2-DDX39B readthrough (NMD candidate);
  ENSP ID: ENSP00000420191

SEQ ID NO: 7153 - protein, 361 aa, Homo sapiens
  Payload ID: 1524;
  Gene Symbol: ATAD1;
  Gene Name: ATPase family, AAA domain containing 1;
  Uniprot ID:  Q8NBU5;
  ENSP ID: ENSP00000339016
MVHAEAFSRPLSRNEVVGLIFRLTIFGAVTYFTIKWMVDAIDPTRKQKVEAQKQAEKLMKQIGVKNVKLSEYEMSIAAHLVDPLNMHVTWSDIAGLDDVITDLKDTVILPIKKKHLFENSRLLQPPKGVLLYGPPGCGKTLIAKATAKEAGCRFINLQPSTLTDKWYGESQKLAAAVFSLAIKLQPSIIFIDEIDSFLRNRSSSDHEATAMMKAQFMSLWDGLDTDHSCQVIVMGATNRPQDLDSAIMRRMPTRFHINQPALKQREAILKLILKNENVDRHVDLLEVAQETDGFSGSDLKEMCRDAALLCVREYVNSTSEESHDEDEIRPVQQQDLHRAIEKMKKSKDAAFQNVLTHVCLD

SEQ ID NO: 7154 - protein, 361 aa, Homo sapiens; identical to SEQ ID NO: 7153
  Payload ID: 1524;
  Gene Symbol: ATAD1;
  Gene Name: ATPase family, AAA domain containing 1;
  Uniprot ID:  Q8NBU5;
  ENSP ID: ENSP00000339017

SEQ ID NO: 7155 - protein, 361 aa, Homo sapiens; identical to SEQ ID NO: 7153
  Payload ID: 1524;
  Gene Symbol: ATAD1;
  Gene Name: ATPase family, AAA domain containing 1;
  ENSP ID: ENSP00000489353

SEQ ID NO: 7156 - protein, 361 aa, Homo sapiens; identical to SEQ ID NO: 7153
  Payload ID: 1524;
  Gene Symbol: ATAD1;
  Gene Name: ATPase family, AAA domain containing 1;
  ENSP ID: ENSP00000489455

SEQ ID NO: 7157 - protein, 1390 aa, Homo sapiens
  Payload ID: 1525;
  Gene Symbol: ATAD2;
  Gene Name: ATPase family, AAA domain containing 2;
  Uniprot ID:  Q6PL18;
  ENSP ID: ENSP00000287394
MVVLRSSLELHNHSAASATGSLDLSSDFLSLEHIGRRRLRSAGAAQKKPAATTAKAGDGSSVKEVETYHRTRALRSLRKDAQNSSDSSFEKNVEITEQLANGRHFTRQLARQQADKKKEEHREDKVIPVTRSLRARNIVQSTEHLHEDNGDVEVRRSCRIRSRYSGVNQSMLFDKLITNTAEAVLQKMDDMKKMRRQRMRELEDLGVFNETEESNLNMYTRGKQKDIQRTDEETTDNQEGSVESSEEGEDQEHEDDGEDEDDEDDDDDDDDDDDDDDEDDEDEEDGEEENQKRYYLRQRKATVYYQAPLEKPRHQRKPNIFYSGPASPARPRYRLSSAGPRSPYCKRMNRRRHAIHSSDSTSSSSSEDEQHFERRRKRSRNRAINRCLPLNFRKDELKGIYKDRMKIGASLADVDPMQLDSSVRFDSVGGLSNHIAALKEMVVFPLLYPEVFEKFKIQPPRGCLFYGPPGTGKTLVARALANECSQGDKRVAFFMRKGADCLSKWVGESERQLRLLFDQAYQMRPSIIFFDEIDGLAPVRSSRQDQIHSSIVSTLLALMDGLDSRGEIVVIGATNRLDSIDPALRRPGRFDREFLFSLPDKEARKEILKIHTRDWNPKPLDTFLEELAENCVGYCGADIKSICAEAALCALRRRYPQIYTTSEKLQLDLSSINISAKDFEVAMQKMIPASQRAVTSPGQALSTVVKPLLQNTVDKILEALQRVFPHAEFRTNKTLDSDISCPLLESDLAYSDDDVPSVYENGLSQKSSHKAKDNFNFLHLNRNACYQPMSFRPRILIVGEPGFGQGSHLAPAVIHALEKFTVYTLDIPVLFGVSTTSPEETCAQVIREAKRTAPSIVYVPHIHVWWEIVGPTLKATFTTLLQNIPSFAPVLLLATSDKPHSALPEEVQELFIRDYGEIFNVQLPDKEERTKFFEDLILKQAAKPPISKKKAVLQALEVLPVAPPPEPRSLTAEEVKRLEEQEEDTFRELRIFLRNVTHRLAIDKRFRVFTKPVDPDEVPDYVTVIKQPMDLSSVISKIDLHKYLTVKDYLRDIDLICSNALEYNPDRDPGDRLIRHRACALRDTAYAIIKEELDEDFEQLCEEIQESRKKRGCSSSKYAPSYYHVMPKQNSTLVGDKRSDPEQNEKLKTPSTPVACSTPAQLKRKIRKKSNWYLGTIKKRRKISQAKDDSQNAIDHKIESDTEETQDTSVDHNETGNTGESSVEENEKQQNASESKLELRNNSNTCNIENELEDSRKTTACTELRDKIACNGDASSSQIIHISDENEGKEMCVLRMTRARRSQVEQQQLITVEKALAILSQPTPSLVVDHERLKNLLKTVVKKSQNYNIFQLENLYAVISQCIYRHRKDHDKTSLIQKMEQEVENFSCSR

SEQ ID NO: 7158 - protein, 708 aa, Homo sapiens
  Payload ID: 1525;
  Gene Symbol: ATAD2;
  Gene Name: ATPase family, AAA domain containing 2;
  ENSP ID: ENSP00000429213
MQKMIPASQRAVTSPGQALSTVVKPLLQNTVDKILEALQRVFPHAEFRTNKTLDSDISCPLLESDLAYSDDDVPSVYENGLSQKSSHKAKDNFNFLHLNRNACYQPMSFRPRILIVGEPGFGQGSHLAPAVIHALEKFTVYTLDIPVLFGVSTTSPEETCAQVIREAKRTAPSIVYVPHIHVWWEIVGPTLKATFTTLLQNIPSFAPVLLLATSDKPHSALPEEVQELFIRDYGEIFNVQLPDKEERTKFFEDLILKQAAKPPISKKKAVLQALEVLPVAPPPEPRSLTAEEVKRLEEQEEDTFRELRIFLRNVTHRLAIDKRFRVFTKPVDPDEVPDYVTVIKQPMDLSSVISKIDLHKYLTVKDYLRDIDLICSNALEYNPDRDPGDRLIRHRACALRDTAYAIIKEELDEDFEQLCEEIQESRKKRGCSSSKYAPSYYHVMPKQNSTLVGDKRSDPEQNEKLKTPSTPVACSTPAQLKRKIRKKSNWYLGTIKKRRKISQAKDDSQNAIDHKIESDTEETQDTSVDHNETGNTGESSVEENEKQQNASESKLELRNNSNTCNIENELEDSRKTTACTELRDKIACNGDASSSQIIHISDENEGKEMCVLRMTRARRSQVEQQQLITVEKALAILSQPTPSLVVDHERLKNLLKTVVKKSQNYNIFQLENLYAVISQCIYRHRKDHDKTSLIQKMEQEVENFSCSR

SEQ ID NO: 7159 - protein, 64 aa, Homo sapiens
  Payload ID: 1525;
  Gene Symbol: ATAD2;
  Gene Name: ATPase family, AAA domain containing 2;
  ENSP ID: ENSP00000429331
MVVLRSSLELHNHSAASATGSLDLSSDFLSLEHIGRRRLRSAGAAQKKPAATTAKAGAVGQTAG

SEQ ID NO: 7160 - protein, 63 aa, Homo sapiens
  Payload ID: 1525;
  Gene Symbol: ATAD2;
  Gene Name: ATPase family, AAA domain containing 2;
  ENSP ID: ENSP00000429617
MVVLRSSLELHNHSAASATGSLDLSSDFLSLEHIGRRRLRSAGAAQKKPAATTAKAGVRWVIS

SEQ ID NO: 7161 - protein, 1458 aa, Homo sapiens
  Payload ID: 1526;
  Gene Symbol: ATAD2B;
  Gene Name: ATPase family, AAA domain containing 2B;
  Uniprot ID:  Q9ULI0;
  ENSP ID: ENSP00000238789
MVNTRKSSLRLLGSKSPGPGPGPGAGAEPGATGGSSHFISSRTRSSKTRAASCPAAKAGGSGGAGVTLDEARKVEVDGSLSDSHVSPPAKRTLKQPDSVCKDKSKSRSTGQREEWNLSTGQARLTSQPGATLPNGHSGLSLRSHPLRGEKKGDGDLSCINGDMEVRKSCRSRKNRFESVNQSLLFDQLVNSTAEAVLQEMDNINIRRNRRSGEVERLRMWTDTEFENMDMYSRVKRRRKSLRRNSYGIQNHHEVSTEGEEEESQEEDGDIEVEEAEGEENDRPYNLRQRKTVDRYQAPPIVPAHQKKRENTLFDIHRSPARRSHIRRKKHAIHSSDTTSSDEERFERRKSKSMARARNRCLPMNFRAEDLASGILRERVKVGASLADVDPMNIDKSVRFDSIGGLSHHIHALKEMVVFPLLYPEIFEKFKIQPPRGCLFYGPPGTGKTLVARALANECSQGDKKVAFFMRKGADCLSKWVGESERQLRLLFDQAYLMRPSIIFFDEIDGLAPVRSSRQDQIHSSIVSTLLALMDGLDNRGEIVVIGATNRLDSIDPALRRPGRFDREFLFNLPDQKARKHILQIHTRDWNPKLSDAFLGELAEKCVGYCGADIKALCTEAALIALRRRYPQIYASSHKLQLDVSSIVLSAQDFYHAMQNIVPASQRAVMSSGHALSPIIRPLLERSFNNILAVLQKVFPHAEISQSDKKEDIETLILEDSEDENALSIFETNCHSGSPKKQSSSAAIHKPYLHFTMSPYHQPTSYRPRLLLSGERGSGQTSHLAPALLHTLERFSVHRLDLPALYSVSAKTPEESCAQIFREARRTVPSIVYMPHIGDWWEAVSETVRATFLTLLQDIPSFSPIFLLSTSETMYSELPEEVKCIFRIQYEEVLYIQRPIEEDRRKFFQELILNQASMAPPRRKHAALCAMEVLPLALPSPPRQLSESEKSRMEDQEENTLRELRLFLRDVTKRLATDKRFNIFSKPVDIEEVSDYLEVIKEPMDLSTVITKIDKHNYLTAKDFLKDIDLICSNALEYNPDKDPGDKIIRHRACTLKDTAHAIIAAELDPEFNKLCEEIKEARIKRGLSVTSEQINPHSTGARKTETRVEEAFRHKQRNPMDVWHNSANKCAFRVRRKSRRRSQWGKGIIKKRKVNNLKKDEEDTKFADYENHTEDRKLLENGEFEVSTDCHEENGEETGDLSMTNDESSCDIMDLDQGQRLNNGAGTKENFASTEEESSNESLLVNSSSSLNPEQTSRKETFLKGNCLNGEASTDSFEGIPVLECQNGKLEVVSFCDSGDKCSSEQKILLEDQSKEKPETSTENHGDDLEKLEALECSNNEKLEPGSDVEVKDAELDKEGASKVKKYRKLILEQAKTTSLELVPEEPSEPVPPLIVDRERLKKLLDLLVDKSNNLAVDQLERLYSLLSQCIYRHRKDYDKSQLVEEMERTVHMFETFL

SEQ ID NO: 7162 - protein, 734 aa, Homo sapiens
  Payload ID: 1526;
  Gene Symbol: ATAD2B;
  Gene Name: ATPase family, AAA domain containing 2B;
  ENSP ID: ENSP00000370412
  MOD_RES (1)..(1): Any amino acid
XEDENALSIFETNCHSGSPKKQSSSAAIHKPYLHFTMSPYHQPTSYRPRLLLSGERGSGQTSHLAPALLHTLERFSVHRLDLPALYSVSAKTPEESCAQIFREARRTVPSIVYMPHIGDWWEAVSETVRATFLTLLQDIPSFSPIFLLSTSETMYSELPEEVKCIFRIQYEEVLYIQRPIEEDRRKFFQELILNQASMAPPRRKHAALCAMEVLPLALPSPPRQLSESEKSRMEDQEENTLRELRLFLRDVTKRLATDKRFNIFSKPVSDYLEVIKEPMDLSTVITKIDKHNYLTAKDFLKDIDLICSNALEYNPDKDPGDKIIRHRACTLKDTAHAIIAAELDPEFNKLCEEIKEARIKRGLSVTSEQINPHSTGARKTETRVEEAFRHKQRNPMDVWHNSANKCAFRVRRKSRRRSQWGKGIIKKRKVNNLKKDEEDTKFADYENHTEDRKLLENGEFEVSTDCHEENGEETGDLSMTNDESSCDIMDLDQGQRLNNGAGTKENFASTEEESSNESLLVNSSSSLNPEQTSRKETFLKGNCLNGEASTDSFEGIPVLECQNGKLEVVSFCDSGDKCSSEQKILLEDQSKEKPETSTENHGDDLEKLEALECSNNEKLEPGSDVEVKDAELDKEGASKVKKYRKLILEQAKTTSLELVPEEPSEPVPPLIVDRERLKKLLDLLVDKSNNLAVDQLERLYSLLSQCIYRHRKDYDKSQLVEEMERTVHMFETFL

SEQ ID NO: 7163 - protein, 64 aa, Homo sapiens
  Payload ID: 1526;
  Gene Symbol: ATAD2B;
  Gene Name: ATPase family, AAA domain containing 2B;
  ENSP ID: ENSP00000392764
MRLPSLLSYRAVSKARKHILQIHTRDWNPKLSDAFLGELAEKCVGYCGADIKALCTEAALIALR

SEQ ID NO: 7164 - protein, 370 aa, Homo sapiens
  Payload ID: 1526;
  Gene Symbol: ATAD2B;
  Gene Name: ATPase family, AAA domain containing 2B;
  ENSP ID: ENSP00000403177
MVNTRKSSLRLLGSKSPGPGPGPGAGAEPGATGGSSHFISSRTRSSKTRAASCPAAKAGGSGGAGVTLDEARKVEVDGSLSDSHVSPPAKRTLKQPDSVCKDKSKSRSTGQREEWNLSTGQARLTSQPGATLPNGHSGLSLRSHPLRGEKKGDGDLSCINGDMEVRKSCRSRKNRFESVNQSLLFDQLVNSTAEAVLQEMDNINIRRNRRSGEVERLRMWTDTEFENMDMYSRVKRRRKSLRRNSYGIQNHHEVSTEGEEEARTSKLLPLEKISIESQEEDGDIEVEEAEGEENDRPYNLRQRKTVDRYQAPPIVPAHQKKRENTLFDIHRSPARRSHIRRKKHAIHSSDTTSSDEERFERRKSKSMARA

SEQ ID NO: 7165 - protein, 572 aa, Homo sapiens
  Payload ID: 1527;
  Gene Symbol: ATAD3A;
  Gene Name: ATPase family, AAA domain containing 3A;
  ENSP ID: ENSP00000339421
  MOD_RES (1)..(1): Any amino acid
XGALALAAPRRCRQPLPGRDCAPGAPPAGAVSRAGRIGLFPSPVCTSAAVRSGSGYAKDALNLAQMQEQTLQLEQQSKLKEYEAAVEQLKSEQIRAQAEERRKTLSEETRQHQARAQYQDKLARQRYEDQLKQQQLLNEENLRKQEESVQKQEAMRRATVEREMELRHKNEMLRVEAEARARAKAERENADIIREQIRLKAAEHRQTVLESIRTAGTLFGEGFRAFVTDWDKVTATVAGLTLLAVGVYSAKNATLVAGRFIEARLGKPSLVRETSRITVLEALRHPIQVSRRLLSRPQDALEGVVLSPSLEARVRDIAIATRNTKKNRSLYRNILMYGPPGTGKTLFAKKLALHSGMDYAIMTGGDVAPMGREGVTAMHKLFDWANTSRRGLLLFVDEADAFLRKRATEKISEDLRATLNAFLYRTGQHSNKFMLVLASNQPEQFDWAINDRINEMVHFDLPGQEERERLVRMYFDKYVLKPATEGKQRLKLAQFDYGRKCSEVARLTEGMSGREIAQLAVSWQATAYASEDGVLTEAMMDTRVQDAVQQHQQKMCWLKAEGPGRGDEPSPS

SEQ ID NO: 7166 - protein, 634 aa, Homo sapiens
  Payload ID: 1527;
  Gene Symbol: ATAD3A;
  Gene Name: ATPase family, AAA domain containing 3A;
  Uniprot ID:  Q9NVI7;
  ENSP ID: ENSP00000368030
MSWLFGINKGPKGEGAGPPPPLPPAQPGAEGGGDRGLGDRPAPKDKWSNFDPTGLERAAKAARELEHSRYAKDALNLAQMQEQTLQLEQQSKLKMRLEALSLLHTLVWAWSLCRAGAVQTQERLSGSASPEQVPAGECCALQEYEAAVEQLKSEQIRAQAEERRKTLSEETRQHQARAQYQDKLARQRYEDQLKQQQLLNEENLRKQEESVQKQEAMRRATVEREMELRHKNEMLRVEAEARARAKAERENADIIREQIRLKAAEHRQTVLESIRTAGTLFGEGFRAFVTDWDKVTATVAGLTLLAVGVYSAKNATLVAGRFIEARLGKPSLVRETSRITVLEALRHPIQVSRRLLSRPQDALEGVVLSPSLEARVRDIAIATRNTKKNRSLYRNILMYGPPGTGKTLFAKKLALHSGMDYAIMTGGDVAPMGREGVTAMHKLFDWANTSRRGLLLFVDEADAFLRKRATEKISEDLRATLNAFLYRTGQHSNKFMLVLASNQPEQFDWAINDRINEMVHFDLPGQEERERLVRMYFDKYVLKPATEGKQRLKLAQFDYGRKCSEVARLTEGMSGREIAQLAVSWQATAYASEDGVLTEAMMDTRVQDAVQQHQQKMCWLKAEGPGRGDEPSPS

SEQ ID NO: 7167 - protein, 586 aa, Homo sapiens
  Payload ID: 1527;
  Gene Symbol: ATAD3A;
  Gene Name: ATPase family, AAA domain containing 3A;
  Uniprot ID:  Q9NVI7;
  ENSP ID: ENSP00000368031
MSWLFGINKGPKGEGAGPPPPLPPAQPGAEGGGDRGLGDRPAPKDKWSNFDPTGLERAAKAARELEHSRYAKDALNLAQMQEQTLQLEQQSKLKEYEAAVEQLKSEQIRAQAEERRKTLSEETRQHQARAQYQDKLARQRYEDQLKQQQLLNEENLRKQEESVQKQEAMRRATVEREMELRHKNEMLRVEAEARARAKAERENADIIREQIRLKAAEHRQTVLESIRTAGTLFGEGFRAFVTDWDKVTATVAGLTLLAVGVYSAKNATLVAGRFIEARLGKPSLVRETSRITVLEALRHPIQVSRRLLSRPQDALEGVVLSPSLEARVRDIAIATRNTKKNRSLYRNILMYGPPGTGKTLFAKKLALHSGMDYAIMTGGDVAPMGREGVTAMHKLFDWANTSRRGLLLFVDEADAFLRKRATEKISEDLRATLNAFLYRTGQHSNKFMLVLASNQPEQFDWAINDRINEMVHFDLPGQEERERLVRMYFDKYVLKPATEGKQRLKLAQFDYGRKCSEVARLTEGMSGREIAQLAVSWQATAYASEDGVLTEAMMDTRVQDAVQQHQQKMCWLKAEGPGRGDEPSPS

SEQ ID NO: 7168 - protein, 201 aa, Homo sapiens
  Payload ID: 1527;
  Gene Symbol: ATAD3A;
  Gene Name: ATPase family, AAA domain containing 3A;
  ENSP ID: ENSP00000383631
KLALHSGMDYAIMTGGDVAPMGREGVTAMHKLFDWANTSRRGLLLFVDEADAFLRKRATEKISEDLRATLNAFLYRTGQHSNNPSHVSHGGSSPAGRPWLTPQARWAPRFMLVLASNQPEQFDWAINDRINEMVHFDLPGQEERERLVRMYFDKYVLKPATEGKQRLKLAQFDYGRKCSEVARLTEGMSGREIAQLAVSWQ

SEQ ID NO: 7169 - protein, 507 aa, Homo sapiens
  Payload ID: 1527;
  Gene Symbol: ATAD3A;
  Gene Name: ATPase family, AAA domain containing 3A;
  Uniprot ID:  Q9NVI7;
  ENSP ID: ENSP00000439290
MQEQTLQLEQQSKLKEYEAAVEQLKSEQIRAQAEERRKTLSEETRQHQARAQYQDKLARQRYEDQLKQQQLLNEENLRKQEESVQKQEAMRRATVEREMELRHKNEMLRVEAEARARAKAERENADIIREQIRLKAAEHRQTVLESIRTAGTLFGEGFRAFVTDWDKVTATVAGLTLLAVGVYSAKNATLVAGRFIEARLGKPSLVRETSRITVLEALRHPIQVSRRLLSRPQDALEGVVLSPSLEARVRDIAIATRNTKKNRSLYRNILMYGPPGTGKTLFAKKLALHSGMDYAIMTGGDVAPMGREGVTAMHKLFDWANTSRRGLLLFVDEADAFLRKRATEKISEDLRATLNAFLYRTGQHSNKFMLVLASNQPEQFDWAINDRINEMVHFDLPGQEERERLVRMYFDKYVLKPATEGKQRLKLAQFDYGRKCSEVARLTEGMSGREIAQLAVSWQATAYASEDGVLTEAMMDTRVQDAVQQHQQKMCWLKAEGPGRGDEPSPS

SEQ ID NO: 7170 - protein, 648 aa, Homo sapiens
  Payload ID: 1528;
  Gene Symbol: ATAD3B;
  Gene Name: ATPase family, AAA domain containing 3B;
  Uniprot ID:  Q5T9A4;
  ENSP ID: ENSP00000311766
MSWLFGVNKGPKGEGAGPPPPLPPAQPGAEGGGDRGLGDRPAPKDKWSNFDPTGLERAAKAARELEHSRYAKEALNLAQMQEQTLQLEQQSKLKEYEAAVEQLKSEQIRAQAEERRKTLSEETRQHQARAQYQDKLARQRYEDQLKQQQLLNEENLRKQEESVQKQEAMRRATVEREMELRHKNEMLRVETEARARAKAERENADIIREQIRLKASEHRQTVLESIRTAGTLFGEGFRAFVTDRDKVTATVAGLTLLAVGVYSAKNATAVTGRFIEARLGKPSLVRETSRITVLEALRHPIQVSRRLLSRPQDVLEGVVLSPSLEARVRDIAIATRNTKKNRGLYRHILLYGPPGTGKTLFAKKLALHSGMDYAIMTGGDVAPMGREGVTAMHKLFDWANTSRRGLLLFMDEADAFLRKRATEEISKDLRATLNAFLYHMGQHSNKFMLVLASNLPEQFDCAINSRIDVMVHFDLPQQEERERLVRLHFDNCVLKPATEGKRRLKLAQFDYGRKCSEVARLTEGMSGREIAQLAVSWQATAYASKDGVLTEAMMDACVQDAVQQYRQKMRWLKAEGPGRGVEHPLSGVQGETLTSWSLATDPSYPCLAGPCTFRICSWMGTGLCPGPLSPRMSCGGGRPFCPPGHPLL

SEQ ID NO: 7171 - protein, 411 aa, Homo sapiens
  Payload ID: 1529;
  Gene Symbol: ATAD3C;
  Gene Name: ATPase family, AAA domain containing 3C;
  Uniprot ID:  Q5T2N8;
  ENSP ID: ENSP00000368062
MSKDALNLAQMQEQTLQLEQQSKLKQLVNEDLRKQEESVQKHHQTFLESIRAAGTLFGEGFRAFVTDRDKVTATVAGLTLLAVGVYSAKNATAVTGRYIEARLGKPSLVRETSRITVLEALRHPIQQVSRRLLSRPQDVLEGVVLSPSLEARVRDIAIMTRNIKKNRGLYRHILLYGPPGTGKTLFAKKLALHSGMDYAIMTGGDVAPMGREGVTAMHKLFDWANTSRRGLLLFVDEADAFLRKRATEKISEDLRATLNAFLYRTGQHSNKFMLILASCHPEQFDWAINACIDVMVHFDLPGQEERARLVRMYLNEYVLKPATEGKRRLKLAQFDYGRKCLEIARLTEGMSCRKIAQLAVSWQATAYASKDGVLTEAMMDACVQDFVQQHQQMMRWLKGERPGPEDEQPSS

SEQ ID NO: 7172 - protein, 131 aa, Homo sapiens
  Payload ID: 1529;
  Gene Symbol: ATAD3C;
  Gene Name: ATPase family, AAA domain containing 3C;
  ENSP ID: ENSP00000464661
MSKDALNLAQMQEQTLQLEQQSKLKQLVNEDLRKQEESVQKHHQTFLESIRAAGTLFGEGFRAFVTDRDKVTATQVSRRLLSRPQDVLEGVVLSPSLEARVRDIAIMTRNIKKNRGLYRHILLYGPPGTGK

SEQ ID NO: 7173 - protein, 1844 aa, Homo sapiens
  Payload ID: 1530;
  Gene Symbol: ATAD5;
  Gene Name: ATPase family, AAA domain containing 5;
  Uniprot ID:  Q96QE3;
  ENSP ID: ENSP00000313171
MVGVLAMAAAAAPPPVKDCEIEPCKKRKKDDDTSTCKTITKYLSPLGKTRDRVFAPPKPSNILDYFRKTSPTNEKTQLGKECKIKSPESVPVDSNKDCTTPLEMFSNVEFKKKRKRVNLSHQLNNIKTENEAPIEISSDDSKEDYSLNNDFVESSTSVLRYKKQVEVLAENIQDTKSQPNTMTSLQNSKKVNPKQGTTKNDFKKLRKRKCRDVVDLSESLPLAEELNLLKKDGKDTKQMENTTSHANSRDNVTEAAQLNDSIITVSYEEFLKSHKENKVEEIPDSTMSICVPSETVDEIVKSGYISESENSEISQQVRFKTVTVLAQVHPIPPKKTGKIPRIFLKQKQFEMENSLSDPENEQTVQKRKSNVVIQEEELELAVLEAGSSEAVKPKCTLEERQQFMKAFRQPASDALKNGVKKSSDKQKDLNEKCLYEVGRDDNSKKIMENSGIQMVSKNGNLQLHTDKGSFLKEKNKKLKKKNKKTLDTGAIPGKNREGNTQKKETTFFLKEKQYQNRMSLRQRKTEFFKSSTLFNNESLVYEDIANDDLLKVSSLCNNNKLSRKTSIPVKDIKLTQSKAESEASLLNVSTPKSTRRSGRISSTPTTETIRGIDSDDVQDNSQLKASTQKAANLSEKHSLYTAELITVPFDSESPIRMKFTRISTPKKSKKKSNKRSEKSEATDGGFTSQIRKASNTSKNISKAKQLIEKAKALHISRSKVTEEIAIPLRRSSRHQTLPERKKLSETEDSVIIIDSSPTALKHPEKNQKKLQCLNDVLGKKLNTSTKNVPGKMKVAPLFLVRKAQKAADPVPSFDESSQDTSEKSQDCDVQCKAKRDFLMSGLPDLLKRQIAKKAAALDVYNAVSTSFQRVVHVQQKDDGCCLWHLKPPSCPLLTKFKELNTKVIDLSKCGIALGEFSTLNSKLKSGNSAAVFMRTRKEFTEEVRNLLLEEIRWSNPEFSLKKYFPLLLKKQIEHQVLSSECHSKQELEADVSHKETKRKLVEAENSKSKRKKPNEYSKNLEKTNRKSEELSKRNNSSGIKLDSSKDSGTEDMLWTEKYQPQTASELIGNELAIKKLHSWLKDWKRRAELEERQNLKGKRDEKHEDFSGGIDFKGSSDDEEESRLCNTVLITGPTGVGKTAAVYACAQELGFKIFEVNASSQRSGRQILSQLKEATQSHQVDKQGVNSQKPCFFNSYYIGKSPKKISSPKKVVTSPRKVPPPSPKSSGPKRALPPKTLANYFKVSPKPKNNEEIGMLLENNKGIKNSFEQKQITQTKSTNATNSNVKDVGAEEPSRKNATSLILFEEVDVIFDEDAGFLNAIKTFMATTKRPVILTTSDPTFSLMFDGCFEEIKFSTPSLLNVASYLQMICLTENFRTDVKDFVTLLTANTCDIRKSILYLQFWIRSGGGVLEERPLTLYRGNSRNVQLVCSEHGLDNKIYPKNTKKKRVDLPKCDSGCAETLFGLKNIFSPSEDLFSFLKHKITMKEEWHKFIQLLTEFQMRNVDFLYSNLEFILPLPVDTIPETKNFCGPSVTVDASAATKSMNCLARKHSEREQPLKKSQKKKQKKTLVILDDSDLFDTDLDFPDQSISLSSVSSSSNAEESKTGDEESKARDKGNNPETKKSIPCPPKTTAGKKCSALVSHCLNSLSEFMDNMSFLDALLTDVREQNKYGRNDFSWTNGKVTSGLCDEFSLESNDGWTSQSSGELKAAAEALSFTKCSSAISKALETLNSCKKLGRDPTNDLTFYVSQKRNNVYFSQSAANLDNAWKRISVIKSVFSSRSLLYVGNRQASIIEYLPTLRNICKTEKLKEQGKSKRRFLHYFEGIHLDIPKETVNTLAADFP

SEQ ID NO: 7174 - protein, 1224 aa, Homo sapiens
  Payload ID: 1530;
  Gene Symbol: ATAD5;
  Gene Name: ATPase family, AAA domain containing 5;
  ENSP ID: ENSP00000463102
MVGVLAMAAAAAPPPVKDCEIEPCKKRKKDDDTSTCKTITKYLSPLGKTRDRVFAPPKPSNILDYFRKTSPTNEKTQLGKECKIKSPESVPVDSNKDCTTPLEMFSNVEFKKKRKRVNLSHQLNNIKTENEAPIEISSDDSKEDYSLNNDFVESSTSVLRYKKQVEVLAENIQDTKSQPNTMTSLQNSKKVNPKQGTTKNDFKKLRKRKCRDVVDLSESLPLAEELNLLKKDGKDTKQMENTTSHANSRDNVTEAAQLNDSIITVSYEEFLKSHKENKVEEIPDSTMSICVPSETVDEIVKSGYISESENSEISQQVRFKTVTVLAQVHPIPPKKTGKIPRIFLKQKQFEMENSLSDPENEQTVQKRKSNVVIQEEELELAVLEAGSSEAVKPKCTLEERQQFMKAFRQPASDALKNGVKKSSDKQKDLNEKCLYEVGRDDNSKKIMENSGIQMVSKNGNLQLHTDKGSFLKEKNKKLKKKNKKTLDTGAIPGKNREGNTQKKETTFFLKEKQYQNRMSLRQRKTEFFKSSTLFNNESLVYEDIANDDLLKVSSLCNNNKLSRKTSIPVKDIKLTQSKAESEASLLNVSTPKSTRRSGRISSTPTTETIRGIDSDDVQDNSQLKASTQKAANLSEKHSLYTAELITVPFDSESPIRMKFTRISTPKKSKKKSNKRSEKSEATDGGFTSQIRKASNTSKNISKAKQLIEKAKALHISRSKVTEEIAIPLRRSSRHQTLPERKKLSETEDSVIIIDSSPTALKHPEKNQKKLQCLNDVLGKKLNTSTKNVPGKMKVAPLFLVRKAQKAADPVPSFDESSQDTSEKSQDCDVQCKAKRDFLMSGLPDLLKRQIAKKAAALDVYNAVSTSFQRVVHVQQKDDGCCLWHLKPPSCPLLTKFKELNTKVIDLSKCGIALGEFSTLNSKLKSGNSAAVFMRTRKEFTEEVRNLLLEEIRWSNPEFSLKKYFPLLLKKQIEHQVLSSECHSKQELEADVSHKETKRKLVEAENSKSKRKKPNEYSKNLEKTNRKSEELSKRNNSSGIKLDSSKDSGTEDMLWTEKYQPQTASELIGNELAIKKLHSWLKDWKRRAELEERQNLKGKRDEKHEDFSGGIDFKGSSDDEEESRLCNTVLITGPTGVGKTAAVYACAQELGFKIFEVNASSQRSGRQILSQLKEATQSHQVDKQGVNSQKPCFFNSYYIGKSPKKISSPKKVVTSPRKVPPPSPK

SEQ ID NO: 7175 - protein, 106 aa, Homo sapiens
  Payload ID: 1531;
  Gene Symbol: ATPIF1;
  Gene Name: ATPase inhibitory  factor 1;
  Uniprot ID:  Q9UII2;
  ENSP ID: ENSP00000335203
MAVTALAARTWLGVWGVRTMQARGFGSDQSENVDRGAGSIREAGGAFGKREQAEEERYFRAQSREQLAALKKHHEEEIVHHKKEIERLQKEIERHKQKIKMLKHDD

SEQ ID NO: 7176 - protein, 75 aa, Homo sapiens
  Payload ID: 1531;
  Gene Symbol: ATPIF1;
  Gene Name: ATPase inhibitory  factor 1;
  ENSP ID: ENSP00000435341
MAVTALAARTWLGVWGVRTMQARGFGSDQSENVDRGAGSIREAGGAFGKREQAEEERYFRALGATFCFFAVEAVV

SEQ ID NO: 7177 - protein, 71 aa, Homo sapiens
  Payload ID: 1531;
  Gene Symbol: ATPIF1;
  Gene Name: ATPase inhibitory  factor 1;
  Uniprot ID:  Q9UII2;
  ENSP ID: ENSP00000435579
MAVTALAARTWLGVWGVRTMQARGFGSDQSENVDRGAGSIREAGGAFGKREQAEEERYFRHYRLCFEISLG

SEQ ID NO: 7178 - protein, 60 aa, Homo sapiens
  Payload ID: 1531;
  Gene Symbol: ATPIF1;
  Gene Name: ATPase inhibitory  factor 1;
  Uniprot ID:  Q9UII2;
  ENSP ID: ENSP00000437337
MAVTALAARTWLGVWGVRTMQARGFGSDQSENVDRGAGSIREAGGAFGKREQAEEERYFR

SEQ ID NO: 7179 - protein, 1086 aa, Homo sapiens
  Payload ID: 1532;
  Gene Symbol: ATP13A1;
  Gene Name: ATPase type 13A1;
  Uniprot ID:  Q9HD20;
  ENSP ID: ENSP00000291503
MEKWEELNSHQPGEEYDPSKATFVKVVPTPNNGSTELVALHRNEGEDGLEVLSFEFQKIKYSYDALEKKQFLPVAFPVGNAFSYYQSNRGFQEDSEIRAAEKKFGSNKAEMVVPDFSELFKERATAPFFVFQVFCVGLWCLDEYWYYSVFTLSMLVAFEASLVQQQMRNMSEIRKMGNKPHMIQVYRSRKWRPIASDEIVPGDIVSIGRSPQENLVPCDVLLLRGRCIVDEAMLTGESVPQMKEPIEDLSPDRVLDLQADSRLHVIFGGTKVVQHIPPQKATTGLKPVDSGCVAYVLRTGFNTSQGKLLRTILFGVKRVTANNLETFIFILFLLVFAIAAAAYVWIEGTKDPSRNRYKLFLECTLILTSVVPPELPIELSLAVNTSLIALAKLYMYCTEPFRIPFAGKVEVCCFDKTGTLTSDSLVVRGVAGLRDGKEVTPVSSIPVETHRALASCHSLMQLDDGTLVGDPLEKAMLTAVDWTLTKDEKVFPRSIKTQGLKIHQRFHFASALKRMSVLASYEKLGSTDLCYIAAVKGAPETLHSMFSQCPPDYHHIHTEISREGARVLALGYKELGHLTHQQAREVKREALECSLKFVGFIVVSCPLKADSKAVIREIQNASHRVVMITGDNPLTACHVAQELHFIEKAHTLILQPPSEKGRQCEWRSIDGSIVLPLARGSPKALALEYALCLTGDGLAHLQATDPQQLLRLIPHVQVFARVAPKQKEFVITSLKELGYVTLMCGDGTNDVGALKHADVGVALLANAPERVVERRRRPRDSPTLSNSGIRATSRTAKQRSGLPPSEEQPTSQRDRLSQVLRDLEDESTPIVKLGDASIAAPFTSKLSSIQCICHVIKQGRCTLVTTLQMFKILALNALILAYSQSVLYLEGVKFSDFQATLQGLLLAGCFLFISRSKPLKTLSRERPLPNIFNLYTILTVMLQFFVHFLSLVYLYREAQARSPEKQEQFVDLYKEFEPSLVNSTVYIMAMAMQMATFAINYKGPPFMESLPENKPLVWSLAVSLLAIIGLLLGSSPDFNSQFGLVDIPVEFKLVIAQVLLLDFCLALLADRVLQFFLGTPKLKVPS

SEQ ID NO: 7180 - protein, 1204 aa, Homo sapiens
  Payload ID: 1532;
  Gene Symbol: ATP13A1;
  Gene Name: ATPase type 13A1;
  Uniprot ID:  Q9HD20;
  ENSP ID: ENSP00000349877
MAAAAAVGNAVPCGARPCGVRPDGQPKPGPQPRALLAAGPALIANGDELVAAVWPYRRLALLRRLTVLPFAGLLYPAWLGAAAAGCWGWGSSWVQIPEAALLVLATICLAHALTVLSGHWSVHAHCALTCTPEYDPSKATFVKVVPTPNNGSTELVALHRNEGEDGLEVLSFEFQKIKYSYDALEKKQFLPVAFPVGNAFSYYQSNRGFQEDSEIRAAEKKFGSNKAEMVVPDFSELFKERATAPFFVFQVFCVGLWCLDEYWYYSVFTLSMLVAFEASLVQQQMRNMSEIRKMGNKPHMIQVYRSRKWRPIASDEIVPGDIVSIGRSPQENLVPCDVLLLRGRCIVDEAMLTGESVPQMKEPIEDLSPDRVLDLQADSRLHVIFGGTKVVQHIPPQKATTGLKPVDSGCVAYVLRTGFNTSQGKLLRTILFGVKRVTANNLETFIFILFLLVFAIAAAAYVWIEGTKDPSRNRYKLFLECTLILTSVVPPELPIELSLAVNTSLIALAKLYMYCTEPFRIPFAGKVEVCCFDKTGTLTSDSLVVRGVAGLRDGKEVTPVSSIPVETHRALASCHSLMQLDDGTLVGDPLEKAMLTAVDWTLTKDEKVFPRSIKTQGLKIHQRFHFASALKRMSVLASYEKLGSTDLCYIAAVKGAPETLHSMFSQCPPDYHHIHTEISREGARVLALGYKELGHLTHQQAREVKREALECSLKFVGFIVVSCPLKADSKAVIREIQNASHRVVMITGDNPLTACHVAQELHFIEKAHTLILQPPSEKGRQCEWRSIDGSIVLPLARGSPKALALEYALCLTGDGLAHLQATDPQQLLRLIPHVQVFARVAPKQKEFVITSLKELGYVTLMCGDGTNDVGALKHADVGVALLANAPERVVERRRRPRDSPTLSNSGIRATSRTAKQRSGLPPSEEQPTSQRDRLSQVLRDLEDESTPIVKLGDASIAAPFTSKLSSIQCICHVIKQGRCTLVTTLQMFKILALNALILAYSQSVLYLEGVKFSDFQATLQGLLLAGCFLFISRSKPLKTLSRERPLPNIFNLYTILTVMLQFFVHFLSLVYLYREAQARSPEKQEQFVDLYKEFEPSLVNSTVYIMAMAMQMATFAINYKGPPFMESLPENKPLVWSLAVSLLAIIGLLLGSSPDFNSQFGLVDIPVEFKLVIAQVLLLDFCLALLADRVLQFFLGTPKLKVPS

SEQ ID NO: 7181 - protein, 185 aa, Homo sapiens
  Payload ID: 1532;
  Gene Symbol: ATP13A1;
  Gene Name: ATPase type 13A1;
  ENSP ID: ENSP00000411891
  MOD_RES (1)..(1): Any amino acid
XASPWVPAAAFLSVTIATWATHLPGLDSQGHPLHFGAGLIMTPLLTCCACLEYDPSKATFVKVVPTPNNGSTELVALHRNEGEDGLEVLSFEFQKIKYSYDALEKKQFLPVAFPVGNAFSYYQSNRGFQEDSEIRAAEKKFGSNKAEMVVPDFSELFKERATAPFFVFQVFCVGLWCLDEYWYYS

SEQ ID NO: 7182 - protein, 1180 aa, Homo sapiens
  Payload ID: 1533;
  Gene Symbol: ATP13A2;
  Gene Name: ATPase type 13A2;
  Uniprot ID:  Q9NQ11;
  ENSP ID: ENSP00000327214
MSADSSPLVGSTPTGYGTLTIGTSIDPLSSSVSSVRLSGYCGSPWRVIGYHVVVWMMAGIPLLLFRWKPLWGVRLRLRPCNLAHAETLVIEIRDKEDSSWQLFTVQVQTEAIGEGSLEPSPQSQAEDGRSQAAVGAVPEGAWKDTAQLHKSEEAVSVGQKRVLRYYLFQGQRYIWIETQQAFYQVSLLDHGRSCDDVHRSRHGLSLQDQMVRKAIYGPNVISIPVKSYPQLLVDEALNPYYGFQAFSIALWLADHYYWYALCIFLISSISICLSLYKTRKQSQTLRDMVKLSMRVCVCRPGGEEEWVDSSELVPGDCLVLPQEGGLMPCDAALVAGECMVNESSLTGESIPVLKTALPEGLGPYCAETHRRHTLFCGTLILQARAYVGPHVLAVVTRTGFCTAKGGLVSSILHPRPINFKFYKHSMKFVAALSVLALLGTIYSIFILYRNRVPLNEIVIRALDLVTVVVPPALPAAMTVCTLYAQSRLRRQGIFCIHPLRINLGGKLQLVCFDKTGTLTEDGLDVMGVVPLKGQAFLPLVPEPRRLPVGPLLRALATCHALSRLQDTPVGDPMDLKMVESTGWVLEEEPAADSAFGTQVLAVMRPPLWEPQLQAMEEPPVPVSVLHRFPFSSALQRMSVVVAWPGATQPEAYVKGSPELVAGLCNPETVPTDFAQMLQSYTAAGYRVVALASKPLPTVPSLEAAQQLTRDTVEGDLSLLGLLVMRNLLKPQTTPVIQALRRTRIRAVMVTGDNLQTAVTVARGCGMVAPQEHLIIVHATHPERGQPASLEFLPMESPTAVNGVKDPDQAASYTVEPDPRSRHLALSGPTFGIIVKHFPKLLPKVLVQGTVFARMAPEQKTELVCELQKLQYCVGMCGDGANDCGALKAADVGISLSQAEASVVSPFTSSMASIECVPMVIREGRCSLDTSFSVFKYMALYSLTQFISVLILYTINTNLGDLQFLAIDLVITTTVAVLMSRTGPALVLGRVRPPGALLSVPVLSSLLLQMVLVTGVQLGGYFLTLAQPWFVPLNRTVAAPDNLPNYENTVVFSLSSFQYLILAAAVSKGAPFRRPLYTNVPFLVALALLSSVLVGLVLVPGLLQGPLALRNITDTGFKLLLLGLVTLNFVGAFMLESVLDQCLPACLRRLRPKRASKKRFKQLERELAEQPWPPLPAGPLR

SEQ ID NO: 7183 - protein, 1158 aa, Homo sapiens
  Payload ID: 1533;
  Gene Symbol: ATP13A2;
  Gene Name: ATPase type 13A2;
  Uniprot ID:  Q9NQ11;
  ENSP ID: ENSP00000341115
MSADSSPLVGSTPTGYGTLTIGTSIDPLSSSVSSVRLSGYCGSPWRVIGYHVVVWMMAGIPLLLFRWKPLWGVRLRLRPCNLAHAETLVIEIRDKEDSSWQLFTVQVQTEAIGEGSLEPSPQSQAEDGRSQAAVGAVPEGAWKDTAQLHKSEEAKRVLRYYLFQGQRYIWIETQQAFYQVSLLDHGRSCDDVHRSRHGLSLQDQMVRKAIYGPNVISIPVKSYPQLLVDEALNPYYGFQAFSIALWLADHYYWYALCIFLISSISICLSLYKTRKQSQTLRDMVKLSMRVCVCRPGGEEEWVDSSELVPGDCLVLPQEGGLMPCDAALVAGECMVNESSLTGESIPVLKTALPEGLGPYCAETHRRHTLFCGTLILQARAYVGPHVLAVVTRTGFCTAKGGLVSSILHPRPINFKFYKHSMKFVAALSVLALLGTIYSIFILYRNRVPLNEIVIRALDLVTVVVPPALPAAMTVCTLYAQSRLRRQGIFCIHPLRINLGGKLQLVCFDKTGTLTEDGLDVMGVVPLKGQAFLPLVPEPRRLPVGPLLRALATCHALSRLQDTPVGDPMDLKMVESTGWVLEEEPAADSAFGTQVLAVMRPPLWEPQLQAMEEPPVPVSVLHRFPFSSALQRMSVVVAWPGATQPEAYVKGSPELVAGLCNPETVPTDFAQMLQSYTAAGYRVVALASKPLPTVPSLEAAQQLTRDTVEGDLSLLGLLVMRNLLKPQTTPVIQALRRTRIRAVMVTGDNLQTAVTVARGCGMVAPQEHLIIVHATHPERGQPASLEFLPMESPTAVNGVKVLVQGTVFARMAPEQKTELVCELQKLQYCVGMCGDGANDCGALKAADVGISLSQAEASVVSPFTSSMASIECVPMVIREGRCSLDTSFSVFKYMALYSLTQFISVLILYTINTNLGDLQFLAIDLVITTTVAVLMSRTGPALVLGRVRPPGALLSVPVLSSLLLQMVLVTGVQLGGYFLTLAQPWFVPLNRTVAAPDNLPNYENTVVFSLSSFQYLILAAAVSKGAPFRRPLYTNERARPVPPRLPAPPPAQAGLQEALQAAGTRAGRAALAAAARRPPEVVQAHGHPRHWNSLPLSHQLDPSPATPPPPPPTSLRLATVYTPPPRPPPPWGSVDYCPLPWTIPRRGGSPQLPSVLLSV

SEQ ID NO: 7184 - protein, 1175 aa, Homo sapiens
  Payload ID: 1533;
  Gene Symbol: ATP13A2;
  Gene Name: ATPase type 13A2;
  Uniprot ID:  Q9NQ11;
  ENSP ID: ENSP00000413307
MSADSSPLVGSTPTGYGTLTIGTSIDPLSSSVSSVRLSGYCGSPWRVIGYHVVVWMMAGIPLLLFRWKPLWGVRLRLRPCNLAHAETLVIEIRDKEDSSWQLFTVQVQTEAIGEGSLEPSPQSQAEDGRSQAAVGAVPEGAWKDTAQLHKSEEAKRVLRYYLFQGQRYIWIETQQAFYQVSLLDHGRSCDDVHRSRHGLSLQDQMVRKAIYGPNVISIPVKSYPQLLVDEALNPYYGFQAFSIALWLADHYYWYALCIFLISSISICLSLYKTRKQSQTLRDMVKLSMRVCVCRPGGEEEWVDSSELVPGDCLVLPQEGGLMPCDAALVAGECMVNESSLTGESIPVLKTALPEGLGPYCAETHRRHTLFCGTLILQARAYVGPHVLAVVTRTGFCTAKGGLVSSILHPRPINFKFYKHSMKFVAALSVLALLGTIYSIFILYRNRVPLNEIVIRALDLVTVVVPPALPAAMTVCTLYAQSRLRRQGIFCIHPLRINLGGKLQLVCFDKTGTLTEDGLDVMGVVPLKGQAFLPLVPEPRRLPVGPLLRALATCHALSRLQDTPVGDPMDLKMVESTGWVLEEEPAADSAFGTQVLAVMRPPLWEPQLQAMEEPPVPVSVLHRFPFSSALQRMSVVVAWPGATQPEAYVKGSPELVAGLCNPETVPTDFAQMLQSYTAAGYRVVALASKPLPTVPSLEAAQQLTRDTVEGDLSLLGLLVMRNLLKPQTTPVIQALRRTRIRAVMVTGDNLQTAVTVARGCGMVAPQEHLIIVHATHPERGQPASLEFLPMESPTAVNGVKDPDQAASYTVEPDPRSRHLALSGPTFGIIVKHFPKLLPKVLVQGTVFARMAPEQKTELVCELQKLQYCVGMCGDGANDCGALKAADVGISLSQAEASVVSPFTSSMASIECVPMVIREGRCSLDTSFSVFKYMALYSLTQFISVLILYTINTNLGDLQFLAIDLVITTTVAVLMSRTGPALVLGRVRPPGALLSVPVLSSLLLQMVLVTGVQLGGYFLTLAQPWFVPLNRTVAAPDNLPNYENTVVFSLSSFQYLILAAAVSKGAPFRRPLYTNVPFLVALALLSSVLVGLVLVPGLLQGPLALRNITDTGFKLLLLGLVTLNFVGAFMLESVLDQCLPACLRRLRPKRASKKRFKQLERELAEQPWPPLPAGPLR

SEQ ID NO: 7185 - protein, 258 aa, Homo sapiens
  Payload ID: 1533;
  Gene Symbol: ATP13A2;
  Gene Name: ATPase type 13A2;
  ENSP ID: ENSP00000421126
YSIFILYRNRVPLNEIVIRALDLVTVVVPPALPAAMTVCTLYAQSRLRRQGIFCIHPLRINLGGKLQLVCFDKVLEEEPAADSAFGTQVLAVMRPPLWEPQLQAMRMSVVVAWPGATQPEAYVKGSPELVAGLCNPETVPTDFAQMLQSYTAAGYRVVALASKPLPTVPSLEAAQQLTRDTVEGDLSLLGLLVMRNLLKPQTTPVIQALRRTRIRAVMVTGDNLQTAVTVARGCGMVAPQEHLIIVHATHPERGQPAS

SEQ ID NO: 7186 - protein, 188 aa, Homo sapiens
  Payload ID: 1533;
  Gene Symbol: ATP13A2;
  Gene Name: ATPase type 13A2;
  ENSP ID: ENSP00000422227
  MOD_RES (1)..(1): Any amino acid
XIEIRDKEDSSWQLFTVQVQTEAIGEGSLEPSPQSQAEDGRSQAAVGAVPEGAWKDTAQLHKSEEAKRVLRYYLFQGQRYIWIETQQAFYQVSLLDHGRSCDDVHRSRHGLSLQDQMVRKAIYGPNVISIPVKSYPQLLVDEAFSIALWLADHYYWYALCIFLISSISICLSLYKTRKQSQTLRDMVK

SEQ ID NO: 7187 - protein, 190 aa, Homo sapiens
  Payload ID: 1533;
  Gene Symbol: ATP13A2;
  Gene Name: ATPase type 13A2;
  ENSP ID: ENSP00000422668
  MOD_RES (1)..(1): Any amino acid
XVGSTPTGYGTLTIGTSIDPLSSSVSSVRLSGYCGSPWRVIGYHVVVWMMAGIPLLLFRWKPLWGVRLRLRPCNLAHAETLVIEIRDKEDSSWQLFTVQVQTEAIGEGSLEPSPQSQAEDGRSQAAVGAVPEGAWKDTAQLHKSEEARVLRYYLFQGQRYIWIETQQAFYQVSLLDHGRSCDDVHRSRHG

SEQ ID NO: 7188 - protein, 398 aa, Homo sapiens
  Payload ID: 1533;
  Gene Symbol: ATP13A2;
  Gene Name: ATPase type 13A2;
  ENSP ID: ENSP00000423065
DPDQAASYTVEPDPRSRHLALSGPTFGIIVKHFPKLLPKVLVQGTVFARMAPEQKTELVCELQKLQYCVGMCGDGANDCGALKAADVGISLSQAEASVVSPFTSSMASIECVPMVIREGRCSLDTSFSVFKYMALYSLTQFISVLILYTINTNLGDLQFLAIDLVITTTVAVLMSRTGPALVLGRVRPPGALLSVPVLSSLLLQMVLVTGVQLGGYFLTLAQPWFVPLNRTVAAPDNLPNYENTVVFSLSSFQYLILAAAVSKGAPFRRPLYTNERARPVPPRLPAPPPAQAGLQEALQAAGTRAGRAALAAAARRPPEVVQAHGHPRHWNSLPLSHQLDPSPATPPPPPPTSLRLATVYTPPPRPPPPWGSVDYCPLPWTIPRRGGSPQLPSVLLSV

SEQ ID NO: 7189 - protein, 321 aa, Homo sapiens
  Payload ID: 1533;
  Gene Symbol: ATP13A2;
  Gene Name: ATPase type 13A2;
  ENSP ID: ENSP00000424313
  MOD_RES (1)..(1): Any amino acid
XDPLSSSVSSVRLSGYCGSPWRVIGYHVVVWMMAGIPLLLFRWKPLWGVRLRLRPCNLAHAETLVIEIRDKEDSSWQLFTVQVQTEAIGEGSLEPSPQSQAEDGRSQAAVGAVPEGAWKDTAQLHKSEEAVSVGQRVLRYYLFQGQRYIWIETQQAFYQVSLLDHGRSCDDVHRSRHGLSLQDQMVRKAIYGPNVISIPVKSYPQLLVDEALNPYYGFQAFSIALWLADHYYWYALCIFLISSISICLSLYKTRKQSQTLRDMVKLSMRVCVCRPGGEEEWVDSSELVPGDCLVLPQEGGLMPCDAALVAGECMVNESSLT

SEQ ID NO: 7190 - protein, 191 aa, Homo sapiens
  Payload ID: 1533;
  Gene Symbol: ATP13A2;
  Gene Name: ATPase type 13A2;
  ENSP ID: ENSP00000424393
QSQTLRDMVKLSMRVCVCRPGGEEEWVDSSELVPGDCLVLPQEGGLMPCDAALVAGECMVNESSLTGESIPVLKTALPEGLGPYCAETHRRHTLFCGTLILQARAYVGPHVLAVVTRTGGLVSSILHPRPINFKFYKHSMKFVAALSVLALLGTIYSIFILYRNRVPLNEIVIRALDLVTVVVPPALPAAM

SEQ ID NO: 7191 - protein, 189 aa, Homo sapiens
  Payload ID: 1533;
  Gene Symbol: ATP13A2;
  Gene Name: ATPase type 13A2;
  ENSP ID: ENSP00000427241
DSSWQLFTVQVQTEAIGEGSLEPSPQSQAEDGRSQAAVGAVPEGAWKDTAQLHKSEEAVSVGQKRVLRYYLFQGQRYIWIETQQAFYQVSLLDHGRSCDDVHRSRHGLSLQDQMVRKAIYGPNVISIPVKSYPQLLVDEAFSIALWLADHYYWYALCIFLISSISICLSLYKTRKQSQTLRDMVKLSMR

SEQ ID NO: 7192 - protein, 228 aa, Homo sapiens
  Payload ID: 1533;
  Gene Symbol: ATP13A2;
  Gene Name: ATPase type 13A2;
  ENSP ID: ENSP00000478781
MVKLSMRVCVCRPGGEEEWVDSSELVPGDCLVLPQEGGLMPCDAALVAGECMVNESSLTGESIPVLKTALPEGLGPYCAETHRRHTLFCGTLILQARAYVGPHVLAVVTRTALLGTIYSIFILYRNRVPLNEIVIRALDLVTVVVPPALPAAMTVCTLYAQSRLRRQGIFCIHPLRINLGGKLQLVCFDKVGPQVGLVQGSGTATGAPVRPPHPRYSLSSTHRMPGPV

SEQ ID NO: 7193 - protein, 1226 aa, Homo sapiens
  Payload ID: 1534;
  Gene Symbol: ATP13A3;
  Gene Name: ATPase type 13A3;
  Uniprot ID:  Q9H7F0;
  ENSP ID: ENSP00000256031
MDREERKTINQGQEDEMEIYGYNLSRWKLAIVSLGVICSGGFLLLLLYWMPEWRVKATCVRAAIKDCEVVLLRTTDEFKMWFCAKIRVLSLETYPVSSPKSMSNKLSNGHAVCLIENPTEENRHRISKYSQTESQQIRYFTHHSVKYFWNDTIHNFDFLKGLDEGVSCTSIYEKHSAGLTKGMHAYRKLLYGVNEIAVKVPSVFKLLIKEVLNPFYIFQLFSVILWSTDEYYYYALAIVVMSIVSIVSSLYSIRKQYVMLHDMVATHSTVRVSVCRVNEEIEEIFSTDLVPGDVMVIPLNGTIMPCDAVLINGTCIVNESMLTGESVPVTKTNLPNPSVDVKGIGDELYNPETHKRHTLFCGTTVIQTRFYTGELVKAIVVRTGFSTSKGQLVRSILYPKPTDFKLYRDAYLFLLCLVAVAGIGFIYTIINSILNEVQVGVIIIESLDIITITVPPALPAAMTAGIVYAQRRLKKIGIFCISPQRINICGQLNLVCFDKTGTLTEDGLDLWGIQRVENARFLSPEENVCNEMLVKSQFVACMATCHSLTKIEGVLSGDPLDLKMFEAIGWILEEATEEETALHNRIMPTVVRPPKQLLPESTPAGNQEMELFELPATYEIGIVRQFPFSSALQRMSVVARVLGDRKMDAYMKGAPEAIAGLCKPETVPVDFQNVLEDFTKQGFRVIALAHRKLESKLTWHKVQNISRDAIENNMDFMGLIIMQNKLKQETPAVLEDLHKANIRTVMVTGDSMLTAVSVARDCGMILPQDKVIIAEALPPKDGKVAKINWHYADSLTQCSHPSAIDPEAIPVKLVHDSLEDLQMTRYHFAMNGKSFSVILEHFQDLVPKLMLHGTVFARMAPDQKTQLIEALQNVDYFVGMCGDGANDCGALKRAHGGISLSELEASVASPFTSKTPSISCVPNLIREGRAALITSFCVFKFMALYSIIQYFSVTLLYSILSNLGDFQFLFIDLAIILVVVFTMSLNPAWKELVAQRPPSGLISGALLFSVLSQIIICIGFQSLGFFWVKQQPWYEVWHPKSDACNTTGSGFWNSSHVDNETELDEHNIQNYENTTVFFISSFQYLIVAIAFSKGKPFRQPCYKNYFFVFSVIFLYIFILFIMLYPVASVDQVLQIVCVPYQWRVTMLIIVLVNAFVSITVEESVDRWGKCCLPWALGCRKKTPKAKYMYLAQELLVDPEWPPKPQTTTEAKALVKENGSCQIITIT

SEQ ID NO: 7194 - protein, 162 aa, Homo sapiens
  Payload ID: 1534;
  Gene Symbol: ATP13A3;
  Gene Name: ATPase type 13A3;
  ENSP ID: ENSP00000402550
  MOD_RES (1)..(1): Any amino acid
XPFRQPCYKNYFFVFSVIFLYIFILFIMLYPVASVDQVLQIVCVPYQWRVTMLIIVLVNAFVSITVENFFLDMVLWKVVFNRDKQGEYRFSTTQPPQESVDRWGKCCLPWALGCRKKTPKAKYMYLAQELLVDPEWPPKPQTTTEAKALVKENGSCQIITIT

SEQ ID NO: 7195 - protein, 102 aa, Homo sapiens
  Payload ID: 1534;
  Gene Symbol: ATP13A3;
  Gene Name: ATPase type 13A3;
  ENSP ID: ENSP00000406234
MDREERKTINQGQEDEMEIYGYNLSRWKLAIVSLGVICSGGFLLLLLYWMPEWRVKATCVRAAIKDCEVVLLRTTDEFKMWFCAKIRVLSLETYPVSSPKSM

SEQ ID NO: 7196 - protein, 46 aa, Homo sapiens
  Payload ID: 1534;
  Gene Symbol: ATP13A3;
  Gene Name: ATPase type 13A3;
  ENSP ID: ENSP00000410767
MDREERKTINQGQEDEMEIYGYNLSRWKLAIVSLGVICSGGFLLLL

SEQ ID NO: 7197 - protein, 1226 aa, Homo sapiens; identical to SEQ ID NO: 7193
  Payload ID: 1534;
  Gene Symbol: ATP13A3;
  Gene Name: ATPase type 13A3;
  Uniprot ID:  Q9H7F0;
  ENSP ID: ENSP00000416508

SEQ ID NO: 7198 - protein, 701 aa, Homo sapiens
  Payload ID: 1534;
  Gene Symbol: ATP13A3;
  Gene Name: ATPase type 13A3;
  ENSP ID: ENSP00000482200
ISEIEEIFSTDLVPGDVMVIPLNGTIMPCDAVLINGTCIVNESMLTGESVPVTKTNLPNPSVDVKGIGDELYNPETHKRHTLFCGTTVIQTRFYTGELVKAIVVRTGFSTSKGQLVRSILYPKPTDFKLYRDAYLFLLCLVAVAGIGFIYTIINSILNEVQVGVIIIESLDIITITVPPALPAAMTAGIVYAQRRLKKIGIFCISPQRINICGQLNLVCFDKTGTLTEDGLDLWGIQRVENARFLSPEENVCNEMLVKSQFVACMATCHSLTKIEGVLSGDPLDLKMFEAIGWILEEATEEETALHNRIMPTVVRPPKQLLPESTPAGNQEMELFELPATYEIGIVRQFPFSSALQRMSVVARVLGDRKMDAYMKGAPEAIAGLCKPETVPVDFQNVLEDFTKQGFRVIALAHRKLESKLTWHKVQNISRDAIENNMDFMGLIIMQNKLKQETPAVLEDLHKANIRTVMVTGDSMLTAVSVARDCGMILPQDKVIIAEALPPKDGKVAKINWHYADSLTQCSHPSAIDPEAIPVKLVHDSLEDLQMTRYHFAMNGKSFSVILEHFQDLVPKLMLHGTVFARMAPDQKTQLIEALQNVDYFVGMCGDGANDCGALKRAHGGISLSELEASVASPFTSKTPSISCVPNLIREGRAALITSFCELALFSIVTYSLDHFIISILISNMLVLFFSDFHNCAFYSLV

SEQ ID NO: 7199 - protein, 576 aa, Homo sapiens
  Payload ID: 1535;
  Gene Symbol: ATP13A4;
  Gene Name: ATPase type 13A4;
  Uniprot ID:  Q4VNC1;
  ENSP ID: ENSP00000295548
MGHFEKGQHALLNEGEENEMEIFGYRTQGCRKSLCLAGSIFSFGILPLVFYWRPAWHVWAHCVPCSLQEADTVLLRTTDEFQIYSWKKVIWIYLSALNSAFGLTPDHPLMTDEEYIINRAIRKPDLKVRCIKVQKIRYVWNYLEGQFQKIGSLEDWLSSAKIHQKFGSGLTREEQEIRRLICGPNTIDVEVTPIWKLLIKEVLNPFYIFQLFSVCLWFSEDYKEYAFAIIIMSIISISLTVYDLREQSVKLHHLVESHNSITVSVCGRKAGVQELESRVLVPGDLLILTGNKVLMPCDAVLIEGSCVVDEGMLTGESIPVTKTPLPKMDSSVPWKTQSEADYKRHVLFCGTEVIQAKAACSGTVRAVVLQTGFNTAKGDLVRSILYPKPVNFQLYRDAIRFLLCLVGTATIGMIYTLCVYVLSGEPPEEVVRKALDVITIAVPPALPAALTTGIIYAQRRLKKRGIFCISPQRINVCGQLNLVCFDKTGTLTRDGLDLWGVVSCDRNGFQEVHSFASGQALPWGPLCAAMASCHSLILLDGTIQGDPLDLKMFEATTWVSLCSSENLRSFFNARAT

SEQ ID NO: 7200 - protein, 1196 aa, Homo sapiens
  Payload ID: 1535;
  Gene Symbol: ATP13A4;
  Gene Name: ATPase type 13A4;
  Uniprot ID:  Q4VNC1;
  ENSP ID: ENSP00000339182
MGHFEKGQHALLNEGEENEMEIFGYRTQGCRKSLCLAGSIFSFGILPLVFYWRPAWHVWAHCVPCSLQEADTVLLRTTDEFQIYSWKKVIWIYLSALNSAFGLTPDHPLMTDEEYIINRAIRKPDLKVRCIKVQKIRYVWNYLEGQFQKIGSLEDWLSSAKIHQKFGSGLTREEQEIRRLICGPNTIDVEVTPIWKLLIKEVLNPFYIFQLFSVCLWFSEDYKEYAFAIIIMSIISISLTVYDLREQSVKLHHLVESHNSITVSVCGRKAGVQELESRVLVPGDLLILTGNKVLMPCDAVLIEGSCVVDEGMLTGESIPVTKTPLPKMDSSVPWKTQSEADYKRHVLFCGTEVIQAKAACSGTVRAVVLQTGFNTAKGDLVRSILYPKPVNFQLYRDAIRFLLCLVGTATIGMIYTLCVYVLSGEPPEEVVRKALDVITIAVPPALPAALTTGIIYAQRRLKKRGIFCISPQRINVCGQLNLVCFDKTGTLTRDGLDLWGVVSCDRNGFQEVHSFASGQALPWGPLCAAMASCHSLILLDGTIQGDPLDLKMFEATTWEMAFSGDDFHIKGVPAHAMVVKPCRTASQVPVEGIAILHQFPFSSALQRMTVIVQEMGGDRLAFMKGAPERVASFCQPETVPTSFVSELQIYTTQGFRVIALAYKKLENDHHATTLTRETVESDLIFLGLLILENRLKEETKPVLEELISARIRTVMITGDNLQTAITVARKSGMVSESQKVILIEANETTGSSSASISWTLVEEKKHIMYGNQDNYINIRDEVSDKGREGSYHFALTGKSFHVISQHFSSLLPKILINGTIFARMSPGQKSSLVEEFQKLDYFVGMCGDGANDCGALKMAHVGISLSEQEASVASPFTSKTPNIECVPHLIKEGRAALVTSFCMFKYMALYSMIQYVGVLLLYWETNSLSNYQFLFQDLAITTLIGVTMNLNGAYPKLVPFRPAGRLISPPLLLSVIFNILLSLAMHIAGFILVQRQPWYSVEIHSACTVQNESISELTMSPTAPEKMESNSTFTSFENTTVWFLGTINCITVALVFSKGKPFRQPTYTNYIFVLVLIIQLGVCLFILFADIPELYRRLDLLCTPVLWRASIVIMLSLNFIVSLVAEEAVIENRALWMMIKRCFGYQSKSQYRIWQRDLANDPSWPPLNQTSHSDMPECGRGVSYSNPVFESNEEQL

SEQ ID NO: 7201 - protein, 1177 aa, Homo sapiens
  Payload ID: 1535;
  Gene Symbol: ATP13A4;
  Gene Name: ATPase type 13A4;
  ENSP ID: ENSP00000376238
MGHFEKGQHALLNEGEENEMEIFGYRTQGCRKSLCLAGSIFSFGILPLVFYWRPAWHVWAHCVPCSLQEADTVLLRTTDEFQIYSWKKVIWIYLSALNSAFGLTPDHPLMTDEEYIINRAIRKPDLKVRCIKVQKIRYVWNYLEGQFQKIGSLEDWLSSAKIHQKFGSGLTREEQEIRRLICGPNTIDVEVTPIWKLLIKEVLNPFYIFQLFSVCLWFSEDYKEYAFAIIIMSIISISLTVYDLREQSVKLHHLVESHNSITVSVCGRKAGVQELESRVLVPGDLLILTGNKVLMPCDAVLIEGSCVVDEGMLTGESIPVTKTPLPKMDSSVPWKTQSEADYKRHVLFCGTEVIQAKAACSGTVRAVVLQTGFNTAKGDLVRSILYPKPVNFQLYRDAIRFLLCLEPPEEVVRKALDVITIAVPPALPAALTTGIIYAQRRLKKRGIFCISPQRINVCGQLNLVCFDKTGTLTRDGLDLWGVVSCDRNGFQEVHSFASGQALPWGPLCAAMASCHSLILLDGTIQGDPLDLKMFEATTWEMAFSGDDFHIKGVPAHAMVVKPCRTASQVPVEGIAILHQFPFSSALQRMTVIVQEMGGDRLAFMKGAPERVASFCQPETVPTSFVSELQIYTTQGFRVIALAYKKLENDHHATTLTRETVESDLIFLGLLILENRLKEETKPVLEELISARIRTVMITGDNLQTAITVARKSGMVSESQKVILIEANETTGSSSASISWTLVEEKKHIMYGNQDNYINIRDEVSDKGREGSYHFALTGKSFHVISQHFSSLLPKILINGTIFARMSPGQKSSLVEEFQKLDYFVGMCGDGANDCGALKMAHVGISLSEQEASVASPFTSKTPNIECVPHLIKEGRAALVTSFCMFKYMALYSMIQYVGVLLLYWETNSLSNYQFLFQDLAITTLIGVTMNLNGAYPKLVPFRPAGRLISPPLLLSVIFNILLSLAMHIAGFILVQRQPWYSVEIHSACTVQNESISELTMSPTAPEKMESNSTFTSFENTTVWFLGTINCITVALVFSKGKPFRQPTYTNYIFVLVLIIQLGVCLFILFADIPELYRRLDLLCTPVLWRASIVIMLSLNFIVSLVAEEAVIENRALWMMIKRCFGYQSKSQYRIWQRDLANDPSWPPLNQTSHSDMPECGRGVSYSNPVFESNEEQL

SEQ ID NO: 7202 - protein, 212 aa, Homo sapiens
  Payload ID: 1535;
  Gene Symbol: ATP13A4;
  Gene Name: ATPase type 13A4;
  Uniprot ID:  Q4VNC1;
  ENSP ID: ENSP00000383129
MHIAGFILVQRQPWYSVEIHSACTVQNESISELTMSPTAPEKMESNSTFTSFENTTVWFLGTINCITVALVFSKGKPFRQPTYTNYIFVLVLIIQLGVCLFILFADIPELYRRLDLLCTPVLWRASIVIMLSLNFIVSLVAEEAVIENRALWMMIKRCFGYQSKSQYRIWQRDLANDPSWPPLNQTSHSDMPECGRGVSYSNPVFESNEEQL

SEQ ID NO: 7203 - protein, 576 aa, Homo sapiens
  Payload ID: 1535;
  Gene Symbol: ATP13A4;
  Gene Name: ATPase type 13A4;
  ENSP ID: ENSP00000395367
  MOD_RES (1)..(1): Any amino acid
XGTVRAVVLQTGFNTAKGDLVRSILYPKPVNFQLYRDAIRFLLCLVGTATIGMIYTLCVYVLSGEPPEEVVRKALDVITIAVPPALPAALTTGIIYAQRRLKKRGIFCISPQRINVCGQLNLVCFDKTGTLTRDGLDLWGVVSCDRNGFQEVHSFASGQALPWGPLCAAMASCHSLILLDGTIQGDPLDLKMFEATTWEMAFSGDDFHIKGVPAHAMVVKPCRTASQVPVEGIAILHQFPFSSALQRMTVIVQEMGGDRLAFMKGAPERVASFCQPETVPTSFVSELQIYTTQGFRVIALAYKKLENDHHATTLTRETVESDLIFLGLLILENRLKEETKPVLEELISARIRTVMITGDNLQTAITVARKSGMVSESQKVILIEANETTGSSSASISWTLVEEKKHIMYGNQDNYINIRDEVSDKGREGSYHFALTGKSFHVISQHFSSLLPKILINGTIFARMSPGQKSSLVEEFQKLDYFVGMCGDGANDCGALKMAHVGISLSEQEASVASPFTSKTPNIECVPHLIKEGRAALVTSFCMFKYMALYSMIQRQTAFQITSFCSRIWPLQLLLV

SEQ ID NO: 7204 - protein, 122 aa, Homo sapiens
  Payload ID: 1535;
  Gene Symbol: ATP13A4;
  Gene Name: ATPase type 13A4;
  ENSP ID: ENSP00000401481
  MOD_RES (1)..(1): Any amino acid
XNLQTAITVARKSGMVSESQKVILIEANETTGSSSASISWTLVEEKKHIMYGNQDNYINIRDEVSDKGREGSYHFALTGKSFHVISQHFSSLLPKILINGTIFARMSPGQKSSLVEEFQKLE

SEQ ID NO: 7205 - protein, 83 aa, Homo sapiens
  Payload ID: 1535;
  Gene Symbol: ATP13A4;
  Gene Name: ATPase type 13A4;
  ENSP ID: ENSP00000402023
MGHFEKGQHALLNEGEENEMEIFGYRTQGCRKSLCLAGSIFSFGILPLVFYWRPAWHVWAHCVPCSLQEADTVLLRTTMRSIS

SEQ ID NO: 7206 - protein, 1218 aa, Homo sapiens
  Payload ID: 1536;
  Gene Symbol: ATP13A5;
  Gene Name: ATPase type 13A5;
  Uniprot ID:  Q4VNC0;
  ENSP ID: ENSP00000341942
MEENSKKDHRALLNQGEEDELEVFGYRDHNVRKAFCLVASVLTCGGLLLVFYWRPQWRVWANCIPCPLQEADTVLLRTTDEFQRYMRKKVFCLYLSTLKFPVSKKWEESLVADRHSVINQALIKPELKLRCMEVQKIRYVWNDLEKRFQKVGLLEDSNSCSDIHQTFGLGLTSEEQEVRRLVCGPNAIEVEIQPIWKLLVKQVLNPFYVFQAFTLTLWLSQGYIEYSVAIIILTVISIVLSVYDLRQQSVKLHNLVEDHNKVQVTIIVKDKGLEELESRLLVPGDILILPGKFSLPCDAVLIDGSCVVNEGMLTGESIPVTKTPLPQMENTMPWKCHSLEDYRKHVLFCGTEVIQVKPSGQGPVRAVVLQTGYNTAKGDLVRSILYPRPLNFKLYSDAFKFIVFLACLGVMGFFYALGVYMYHGVPPKDTVTMALILLTVTVPPVLPAALTIGNVYAQKRLKKKKIFCISPQRINMCGQINLVCFDKTGTLTEDGLDLWGTVPTADNCFQEAHSFASGQAVPWSPLCAAMASCHSLILLNGTIQGDPLDLKMFEGTAWKMEDCIVDSCKFGTSVSNIIKPGPKASKSPVEAIITLCQFPFSSSLQRMSVIAQLAGENHFHVYMKGAPEMVARFCRSETVPKNFPQELRSYTVQGFRVIALAHKTLKMGNLSEVEHLAREKVESELTFLGLLIMENRLKKETKLVLKELSEARIRTVMITGDNLQTAITVAKNSEMIPPGSQVIIVEADEPEEFVPASVTWQLVENQETGPGKKEIYMHTGNSSTPRGEGGSCYHFAMSGKSYQVIFQHFNSLLPKILVNGTVFARMSPGQKSSLIEEFQKLNYYVGMCGDGANDCGALKAAHAGISLSEQEASVASPFTSKTTNIQCVPHLIREGRAALVSSFGVFKYLTMYGIIQFISALLLYWQLQLFGNYQYLMQDVAITLMVCLTMSSTHAYPKLAPYRPAGQLLSPPLLLSIFLNSCFSCIVQISAFLYVKQQPWYCEVYQYSECFLANQSNFSTNVSLERNWTGNATLIPGSILSFETTTLWPITTINYITVAFIFSKGKPFRKPIYTNYIFSFLLLAALGLTIFILFSDFQVIYRGMELIPTITSWRVLILVVALTQFCVAFFVEDSILQNHELWLLIKREFGFYSKSQYRTWQKKLAEDSTWPPINRTDYSGDGKNGFYINGGYESHEQIPKRKLKLGGQPTEQHFWARL

SEQ ID NO: 7207 - protein, 158 aa, Homo sapiens
  Payload ID: 1536;
  Gene Symbol: ATP13A5;
  Gene Name: ATPase type 13A5;
  ENSP ID: ENSP00000389416
MEENSKKDHRALLNQGEEDELVESCPGWSEMARSRLTATSASQEVFGYRDHNVRKAFCLVASVLTCGGLLLVFYWRPQWRVWANCIPCPLQEADTVLLRTTDEFQRYMRKKVFCLYLSTLKFPVSKKWEESLVADRHSVINQALIKPELKLRCMEVQK

SEQ ID NO: 7208 - protein, 114 aa, Homo sapiens
  Payload ID: 1536;
  Gene Symbol: ATP13A5;
  Gene Name: ATPase type 13A5;
  ENSP ID: ENSP00000483801
MELIPTITSWRVLILVVALTQFCGFLCRGFHLQNHELWLLIKREFGFYSKSQYRTWQKKLAEDSTWPPINRTDYSGDGKNGFYINGGYESHEQIPKRKLKLGGQPTEQHFWARL

SEQ ID NO: 7209 - protein, 1149 aa, Homo sapiens
  Payload ID: 1537;
  Gene Symbol: ATP8A1;
  Gene Name: ATPase, aminophospholipid transporter (APLT), class I, type 8A, member 1;
  Uniprot ID:  Q9Y2Q0;
  ENSP ID: ENSP00000264449
MPTMRRTVSEIRSRAEGYEKTDDVSEKTSLADQEEVRTIFINQPQLTKFCNNHVSTAKYNIITFLPRFLYSQFRRAANSFFLFIALLQQIPDVSPTGRYTTLVPLLFILAVAAIKEIIEDIKRHKADNAVNKKQTQVLRNGAWEIVHWEKVNVGDIVIIKGKEYIPADTVLLSSSEPQAMCYIETSNLDGETNLKIRQGLPATSDIKDVDSLMRISGRIECESPNRHLYDFVGNIRLDGHGTVPLGADQILLRGAQLRNTQWVHGIVVYTGHDTKLMQNSTSPPLKLSNVERITNVQILILFCILIAMSLVCSVGSAIWNRRHSGKDWYLNLNYGGASNFGLNFLTFIILFNNLIPISLLVTLEVVKFTQAYFINWDLDMHYEPTDTAAMARTSNLNEELGQVKYIFSDKTGTLTCNVMQFKKCTIAGVAYGQNSQFGDEKTFSDSSLLENLQNNHPTAPIICEFLTMMAVCHTAVPEREGDKIIYQAASPDEGALVRAAKQLNFVFTGRTPDSVIIDSLGQEERYELLNVLEFTSARKRMSVIVRTPSGKLRLYCKGADTVIYDRLAETSKYKEITLKHLEQFATEGLRTLCFAVAEISESDFQEWRAVYQRASTSVQNRLLKLEESYELIEKNLQLLGATAIEDKLQDQVPETIETLMKADIKIWILTGDKQETAINIGHSCKLLKKNMGMIVINEGSLDGTRETLSRHCTTLGDALRKENDFALIIDGKTLKYALTFGVRQYFLDLALSCKAVICCRVSPLQKSEVVEMVKKQVKVVTLAIGDGANDVSMIQTAHVGVGISGNEGLQAANSSDYSIAQFKYLKNLLMIHGAWNYNRVSKCILYCFYKNIVLYIIEIWFAFVNGFSGQILFERWCIGLYNVMFTAMPPLTLGIFERSCRKENMLKYPELYKTSQNALDFNTKVFWVHCLNGLFHSVILFWFPLKALQYGTAFGNGKTSDYLLLGNFVYTFVVITVCLKAGLETSYWTWFSHIAIWGSIALWVVFFGIYSSLWPAIPMAPDMSGEAAMLFSSGVFWMGLLFIPVASLLLDVVYKVIKRTAFKTLVDEVQELEAKSQDPGAVVLGKSLTERAQLLKNVFKKNHVNLYRSESLQQNLLHGYAFSQDENGIVSQSEVIRAYDTTKQRPDEW

SEQ ID NO: 7210 - protein, 1164 aa, Homo sapiens
  Payload ID: 1537;
  Gene Symbol: ATP8A1;
  Gene Name: ATPase, aminophospholipid transporter (APLT), class I, type 8A, member 1;
  Uniprot ID:  Q9Y2Q0;
  ENSP ID: ENSP00000371084
MPTMRRTVSEIRSRAEGYEKTDDVSEKTSLADQEEVRTIFINQPQLTKFCNNHVSTAKYNIITFLPRFLYSQFRRAANSFFLFIALLQQIPDVSPTGRYTTLVPLLFILAVAAIKEIIEDIKRHKADNAVNKKQTQVLRNGAWEIVHWEKVAVGEIVKVTNGEHLPADLISLSSSEPQAMCYIETSNLDGETNLKIRQGLPATSDIKDVDSLMRISGRIECESPNRHLYDFVGNIRLDGHGTVPLGADQILLRGAQLRNTQWVHGIVVYTGHDTKLMQNSTSPPLKLSNVERITNVQILILFCILIAMSLVCSVGSAIWNRRHSGKDWYLNLNYGGASNFGLNFLTFIILFNNLIPISLLVTLEVVKFTQAYFINWDLDMHYEPTDTAAMARTSNLNEELGQVKYIFSDKTGTLTCNVMQFKKCTIAGVAYGHVPEPEDYGCSPDEWQNSQFGDEKTFSDSSLLENLQNNHPTAPIICEFLTMMAVCHTAVPEREGDKIIYQAASPDEGALVRAAKQLNFVFTGRTPDSVIIDSLGQEERYELLNVLEFTSARKRMSVIVRTPSGKLRLYCKGADTVIYDRLAETSKYKEITLKHLEQFATEGLRTLCFAVAEISESDFQEWRAVYQRASTSVQNRLLKLEESYELIEKNLQLLGATAIEDKLQDQVPETIETLMKADIKIWILTGDKQETAINIGHSCKLLKKNMGMIVINEGSLDGTRETLSRHCTTLGDALRKENDFALIIDGKTLKYALTFGVRQYFLDLALSCKAVICCRVSPLQKSEVVEMVKKQVKVVTLAIGDGANDVSMIQTAHVGVGISGNEGLQAANSSDYSIAQFKYLKNLLMIHGAWNYNRVSKCILYCFYKNIVLYIIEIWFAFVNGFSGQILFERWCIGLYNVMFTAMPPLTLGIFERSCRKENMLKYPELYKTSQNALDFNTKVFWVHCLNGLFHSVILFWFPLKALQYGTAFGNGKTSDYLLLGNFVYTFVVITVCLKAGLETSYWTWFSHIAIWGSIALWVVFFGIYSSLWPAIPMAPDMSGEAAMLFSSGVFWMGLLFIPVASLLLDVVYKVIKRTAFKTLVDEVQELEAKSQDPGAVVLGKSLTERAQLLKNVFKKNHVNLYRSESLQQNLLHGYAFSQDENGIVSQSEVIRAYDTTKQRPDEW

SEQ ID NO: 7211 - protein, 142 aa, Homo sapiens
  Payload ID: 1537;
  Gene Symbol: ATP8A1;
  Gene Name: ATPase, aminophospholipid transporter (APLT), class I, type 8A, member 1;
  ENSP ID: ENSP00000421164
  MOD_RES (1)..(1): Any amino acid
XAVICCRVSPLQKSEVVEMVKKQVKVVTLAIGDGANDVSMIQTAHVGVGISGNEGLQAANSSDYSIAQFKYLKNLLMIHGAWNYNRVSKCILYCFYKNIVLYIIEIWFAFVNGFSGQILFERWCIGLYNVFVRFRCLQQCLL

SEQ ID NO: 7212 - protein, 75 aa, Homo sapiens
  Payload ID: 1537;
  Gene Symbol: ATP8A1;
  Gene Name: ATPase, aminophospholipid transporter (APLT), class I, type 8A, member 1;
  ENSP ID: ENSP00000426495
NLQLLGATAIEDKLQDQVPETIETLMKADIKIWILTGDKQETAINIGHSCKLLKKNMGMIVINEGSLDGFSSSKI

SEQ ID NO: 7213 - protein, 55 aa, Homo sapiens
  Payload ID: 1537;
  Gene Symbol: ATP8A1;
  Gene Name: ATPase, aminophospholipid transporter (APLT), class I, type 8A, member 1;
  ENSP ID: ENSP00000426636
MPTMRRTVSEIRSRAEGYEKTDDVSEKTSLADQEEVRTIFINQPQLTKFCNNHVR

SEQ ID NO: 7214 - protein, 113 aa, Homo sapiens
  Payload ID: 1537;
  Gene Symbol: ATP8A1;
  Gene Name: ATPase, aminophospholipid transporter (APLT), class I, type 8A, member 1;
  ENSP ID: ENSP00000426935
VSPLQKSEVVEMVKKQVKVVTLAIGDGANDVSMIQTAHVGVGISGNEGLQAANSSDYSIAQFKYLKNLLMIHGAWNYNRVSKCILYCFYKNIVLYIIENTDIQANNNLYSLFT

SEQ ID NO: 7215 - protein, 29 aa, Homo sapiens
  Payload ID: 1537;
  Gene Symbol: ATP8A1;
  Gene Name: ATPase, aminophospholipid transporter (APLT), class I, type 8A, member 1;
  ENSP ID: ENSP00000427295
KRHKADNAVNKKQTQVLRNGAWEIVHWEK

SEQ ID NO: 7216 - protein, 994 aa, Homo sapiens [sequence omitted]

SEQ ID NO: 7217 - protein, 643 aa, Homo sapiens
  Payload ID: 1538;
  Gene Symbol: ATP8A2;
  Gene Name: ATPase, aminophospholipid transporter, class I, type 8A, member 2;
  ENSP ID: ENSP00000281620
MWHTIMWKEVAVGDIVKVVNGQYLPADVVLLSSSEPQAMCYVETANLDGETNLKIRQGLSHTADMQTREVLMKLSGTIECEGPNRHLYDFTGNLNLDGKSLVALGPDQILLRGTQLRNTQWVFGIVVYTGHDTKLMQNSTKAPLKRSNVEKVTNVQILVLFGILLVMALVSSAGALYWNRSHGEKNWYIKKMDTTSDNFGYNLLTFIILYNNLIPISLLVTLEVVKYTQALFINWDTDMYYIGNDTPAMARTSNLNEELGQVKYLFSDKTGTLTCNIMNFKKCSIAGVTYGHFPELAREPSSDDFCRMPPPCSDSCDFDDPRLLKNIEDRHPTAPCIQEFLTLLAVCHTVVPEKDGDNIIYQASSPDEAALVKGAKKLGFVFTARTPFSVIIEAMGQEQTFGILNVLEFSSDRKRMSVIVRTPSGRLRLYCKGADNVIFERLSKDSKYMEETLCHLEYFATEGLRTLCVAYADLSENEYEEWLKVYQEASTILKDRAQRLEECYEIIEKNLLLLGATAIEDRLQAGVPETIATLLKAEIKIWVLTGDKQETAINIGYSCRLVSQNMALILLKEDSLDATRAAITQHCTDLGNLLGKENDVALIIDGHTLKYALSFEVRRSFLDLALSCKAVICCRSLFLSKWR

SEQ ID NO: 7218 - protein, 1188 aa, Homo sapiens
  Payload ID: 1538;
  Gene Symbol: ATP8A2;
  Gene Name: ATPase, aminophospholipid transporter, class I, type 8A, member 2;
  Uniprot ID:  Q9NTI2;
  ENSP ID: ENSP00000371070
MLNGAGLDKALKMSLPRRSRIRSSVGPVRSSLGYKKAEDEMSRATSVGDQLEAPARTIYLNQPHLNKFRDNQISTAKYSVLTFLPRFLYEQIRRAANAFFLFIALLQQIPDVSPTGRYTTLVPLIIILTIAGIKEIVEDFKRHKADNAVNKKKTIVLRNGMWHTIMWKEVAVGDIVKVVNGQYLPADVVLLSSSEPQAMCYVETANLDGETNLKIRQGLSHTADMQTREVLMKLSGTIECEGPNRHLYDFTGNLNLDGKSLVALGPDQILLRGTQLRNTQWVFGIVVYTGHDTKLMQNSTKAPLKRSNVEKVTNVQILVLFGILLVMALVSSAGALYWNRSHGEKNWYIKKMDTTSDNFGYNLLTFIILYNNLIPISLLVTLEVVKYTQALFINWDTDMYYIGNDTPAMARTSNLNEELGQVKYLFSDKTGTLTCNIMNFKKCSIAGVTYGHFPELAREPSSDDFCRMPPPCSDSCDFDDPRLLKNIEDRHPTAPCIQEFLTLLAVCHTVVPEKDGDNIIYQASSPDEAALVKGAKKLGFVFTARTPFSVIIEAMGQEQTFGILNVLEFSSDRKRMSVIVRTPSGRLRLYCKGADNVIFERLSKDSKYMEETLCHLEYFATEGLRTLCVAYADLSENEYEEWLKVYQEASTILKDRAQRLEECYEIIEKNLLLLGATAIEDRLQAGVPETIATLLKAEIKIWVLTGDKQETAINIGYSCRLVSQNMALILLKEDSLDATRAAITQHCTDLGNLLGKENDVALIIDGHTLKYALSFEVRRSFLDLALSCKAVICCRVSPLQKSEIVDVVKKRVKAITLAIGDGANDVGMIQTAHVGVGISGNEGMQATNNSDYAIAQFSYLEKLLLVHGAWSYNRVTKCILYCFYKNVVLYIIELWFAFVNGFSGQILFERWCIGLYNVIFTALPPFTLGIFERSCTQESMLRFPQLYKITQNGEGFNTKVFWGHCINALVHSLILFWFPMKALEHDTVLTSGHATDYLFVGNIVYTYVVVTVCLKAGLETTAWTKFSHLAVWGSMLTWLVFFGIYSTIWPTIPIAPDMRGQATMVLSSAHFWLGLFLVPTACLIEDVAWRAAKHTCKKTLLEEVQELETKSRVLGKAVLRDSNGKRLNERDRLIKRLGRKTPPTLFRGSSLQQGVPHGYAFSQEEHGAVSQEEVIRAYDTTKKKSRKK

SEQ ID NO: 7219 - protein, 1251 aa, Homo sapiens
  Payload ID: 1539;
  Gene Symbol: ATP8B1;
  Gene Name: ATPase, aminophospholipid transporter, class I, type 8B, member 1;
  Uniprot ID:  O43520;
  ENSP ID: ENSP00000283684
MSTERDSETTFDEDSQPNDEVVPYSDDETEDELDDQGSAVEPEQNRVNREAEENREPFRKECTWQVKANDRKYHEQPHFMNTKFLCIKESKYANNAIKTYKYNAFTFIPMNLFEQFKRAANLYFLALLILQAVPQISTLAWYTTLVPLLVVLGVTAIKDLVDDVARHKMDKEINNRTCEVIKDGRFKVAKWKEIQVGDVIRLKKNDFVPADILLLSSSEPNSLCYVETAELDGETNLKFKMSLEITDQYLQREDTLATFDGFIECEEPNNRLDKFTGTLFWRNTSFPLDADKILLRGCVIRNTDFCHGLVIFAGADTKIMKNSGKTRFKRTKIDYLMNYMVYTIFVVLILLSAGLAIGHAYWEAQVGNSSWYLYDGEDDTPSYRGFLIFWGYIIVLNTMVPISLYVSVEVIRLGQSHFINWDLQMYYAEKDTPAKARTTTLNEQLGQIHYIFSDKTGTLTQNIMTFKKCCINGQIYGDHRDASQHNHNKIEQVDFSWNTYADGKLAFYDHYLIEQIQSGKEPEVRQFFFLLAVCHTVMVDRTDGQLNYQAASPDEGALVNAARNFGFAFLARTQNTITISELGTERTYNVLAILDFNSDRKRMSIIVRTPEGNIKLYCKGADTVIYERLHRMNPTKQETQDALDIFANETLRTLCLCYKEIEEKEFTEWNKKFMAASVASTNRDEALDKVYEEIEKDLILLGATAIEDKLQDGVPETISKLAKADIKIWVLTGDKKETAENIGFACELLTEDTTICYGEDINSLLHARMENQRNRGGVYAKFAPPVQESFFPPGGNRALIITGSWLNEILLEKKTKRNKILKLKFPRTEEERRMRTQSKRRLEAKKEQRQKNFVDLACECSAVICCRVTPKQKAMVVDLVKRYKKAITLAIGDGANDVNMIKTAHIGVGISGQEGMQAVMSSDYSFAQFRYLQRLLLVHGRWSYIRMCKFLRYFFYKNFAFTLVHFWYSFFNGYSAQTAYEDWFITLYNVLYTSLPVLLMGLLDQDVSDKLSLRFPGLYIVGQRDLLFNYKRFFVSLLHGVLTSMILFFIPLGAYLQTVGQDGEAPSDYQSFAVTIASALVITVNFQIGLDTSYWTFVNAFSIFGSIALYFGIMFDFHSAGIHVLFPSAFQFTGTASNALRQPYIWLTIILAVAVCLLPVVAIRFLSMTIWPSESDKIQKHRKRLKAEEQWQRRQQVFRRGVSTRRSAYAFSHQRGYADLISSGRSIRKKRSPLDAIVADGTAEYRRTGDS

SEQ ID NO: 7220 - protein, 1251 aa, Homo sapiens; identical to SEQ ID NO: 7219
  Payload ID: 1539;
  Gene Symbol: ATP8B1;
  Gene Name: ATPase, aminophospholipid transporter, class I, type 8B, member 1;
  Uniprot ID:  O43520;
  ENSP ID: ENSP00000445359

SEQ ID NO: 7221 - protein, 61 aa, Homo sapiens
  Payload ID: 1539;
  Gene Symbol: ATP8B1;
  Gene Name: ATPase, aminophospholipid transporter, class I, type 8B, member 1;
  ENSP ID: ENSP00000467767
MSTERDSETTFDEDSQPNDEVVPYSDDETEDELDDQGSAVEPEQNRVNREAEENREPFRKE

SEQ ID NO: 7222 - protein, 92 aa, Homo sapiens
  Payload ID: 1539;
  Gene Symbol: ATP8B1;
  Gene Name: ATPase, aminophospholipid transporter, class I, type 8B, member 1;
  ENSP ID: ENSP00000468266
MYYAEKDTPAKARTTTLNEQLGQIHYIFSDKTGTLTQNIMTFKKCCINGQIYGDHRDASQHNHNKIEQVDFSWNTYADGKLAFYDHYLIEQI

SEQ ID NO: 7223 - protein, 11 aa, Homo sapiens
  Payload ID: 1539;
  Gene Symbol: ATP8B1;
  Gene Name: ATPase, aminophospholipid transporter, class I, type 8B, member 1;
  ENSP ID: ENSP00000468751
MSTERDSETTF

SEQ ID NO: 7224 - protein, 387 aa, Homo sapiens
  Payload ID: 1540;
  Gene Symbol: ATP8B2;
  Gene Name: ATPase, aminophospholipid transporter, class I, type 8B, member 2;
  Uniprot ID:  P98198;
  ENSP ID: ENSP00000357472
MAVCAKKRPPEEERRARANDREYNEKFQYASNCIKTSKYNILTFLPVNLFEQFQEVANTYFLFLLILQLIPQISSLSWFTTIVPLVLVLTITAVKDATDDYFRHKSDNQVNNRQSQVLINGILQQEQWMNVCVGDIIKLENNQFVAADLLLLSSSEPHGLCYIETAELDGETNMKVRQAIPVTSELGDISKLAKFDGEVICEPPNNKLDKFSGTLYWKENKFPLSNQNMLLRGCVLRNTEWCFGLVIFAGPDTKLMQNSGRTKFKRTSIDRLMNTLVLWIFGFLVCMGVILAIGNAIWEHEVGMRFQVYLPWDEAVDSAFFSGFLSFWSYIIILNTVVPISLYVRYVPSLTWGLSRESGGPIELFFSMKMKSLRSNEKSSSSCTVNI

SEQ ID NO: 7225 - protein, 1223 aa, Homo sapiens
  Payload ID: 1540;
  Gene Symbol: ATP8B2;
  Gene Name: ATPase, aminophospholipid transporter, class I, type 8B, member 2;
  Uniprot ID:  P98198;
  ENSP ID: ENSP00000357475
MDTLRAVPLFSISGLFSFPYRVSHGIAGILLGEMAVCAKKRPPEEERRARANDREYNEKFQYASNCIKTSKYNILTFLPVNLFEQFQEVANTYFLFLLILQLIPQISSLSWFTTIVPLVLVLTITAVKDATDDYFRHKSDNQVNNRQSQVLINGILQQEQWMNVCVGDIIKLENNQFVAADLLLLSSSEPHGLCYIETAELDGETNMKVRQAIPVTSELGDISKLAKFDGEVICEPPNNKLDKFSGTLYWKENKFPLSNQNMLLRGCVLRNTEWCFGLVIFAGPDTKLMQNSGRTKFKRTSIDRLMNTLVLWIFGFLVCMGVILAIGNAIWEHEVGMRFQVYLPWDEAVDSAFFSGFLSFWSYIIILNTVVPISLYVSVEVIRLGHSYFINWDKKMFCMKKRTPAEARTTTLNEELGQVEYIFSDKTGTLTQNIMVFNKCSINGHSYGDVFDVLGHKAELGERPEPVDFSFNPLADKKFLFWDPSLLEAVKIGDPHTHEFFRLLSLCHTVMSEEKNEGELYYKAQSPDEGALVTAARNFGFVFRSRTPKTITVHEMGTAITYQLLAILDFNNIRKRMSVIVRNPEGKIRLYCKGADTILLDRLHHSTQELLNTTMDHLNEYAGEGLRTLVLAYKDLDEEYYEEWAERRLQASLAQDSREDRLASIYEEVENNMMLLGATAIEDKLQQGVPETIALLTLANIKIWVLTGDKQETAVNIGYSCKMLTDDMTEVFIVTGHTVLEVREELRKAREKMMDSSRSVGNGFTYQDKLSSSKLTSVLEAVAGEYALVINGHSLAHALEADMELEFLETACACKAVICCRVTPLQKAQVVELVKKYKKAVTLAIGDGANDVSMIKTAHIGVGISGQEGIQAVLASDYSFSQFKFLQRLLLVHGRWSYLRMCKFLCYFFYKNFAFTMVHFWFGFFCGFSAQTVYDQYFITLYNIVYTSLPVLAMGVFDQDVPEQRSMEYPKLYEPGQLNLLFNKREFFICIAQGIYTSVLMFFIPYGVFADATRDDGTQLADYQSFAVTVATSLVIVVSVQIGLDTGYWTAINHFFIWGSLAVYFAILFAMHSNGLFDMFPNQFRFVGNAQNTLAQPTVWLTIVLTTVVCIMPVVAFRFLRLNLKPDLSDTVRYTQLVRKKQKAQHRCMRRVGRTGSRRSGYAFSHQEGFGELIMSGKNMRLSSLALSSFTTRSSSSWIESLRRKKSDSASSPSGGADKPLKG

SEQ ID NO: 7226 - protein, 1300 aa, Homo sapiens
  Payload ID: 1541;
  Gene Symbol: ATP8B3;
  Gene Name: ATPase, aminophospholipid transporter, class I, type 8B, member 3;
  Uniprot ID:  O60423;
  ENSP ID: ENSP00000311336
MGTGPAQTPRSTRAGPEPSPAPPGPGDTGDSDVTQEGSGPAGIRGGETVIRAGMGDSPGRGAPERRHKAQPGRARKYEWRPEGPTSMGSLGQREDLQDEDRNSAFTWKVQANNRAYNGQFKEKVILCWQRKKYKTNVIRTAKYNFYSFLPLNLYEQFHRVSNLFFLIIIILQSIPDISTLPWFSLSTPMVCLLFIRATRDLVDDMGRHKSDRAINNRPCQILMGKSFKQKKWQDLCVGDVVCLRKDNIVPADMLLLASTEPSSLCYVETVDIDGETNLKFRQALMVTHKELATIKKMASFQGTVTCEAPNSRMHHFVGCLEWNDKKYSLDIGNLLLRGCRIRNTDTCYGLVIYAGFDTKIMKNCGKIHLKRTKLDLLMNKLVVVIFISVVLVCLVLAFGFGFSVKEFKDHHYYLSGVHGSSVAAESFFVFWSFLILLSVTIPMSMFILSEFIYLGNSVFIDWDVQMYYKPQDVPAKARSTSLNDHLGQVEYIFSDKTGTLTQNILTFNKCCISGRVYGPDSEATTRPKENPYLWNKFADGKLLFHNAALLHLVRTNGDEAVREFWRLLAICHTVMVRESPRERPDQLLYQAASPDEGALVTAARNFGYVFLSRTQDTVTIMELGEERVYQVLAIMDFNSTRKRMSVLVRKPEGAICLYTKGADTVIFERLHRRGAMEFATEEALAAFAQETLRTLCLAYREVAEDIYEDWQQRHQEASLLLQNRAQALQQLLGATAIEDRLQDGVPETIKCLKKSNIKIWVLTGDKQETAVNIGFACELLSENMLILEEKEISRILETYWENSNNLLTRESLSQVKLALVINGDFLDKLLVSLRKEPRALAQNVNMDEAWQELGQSRRDFLYARRLSLLCRRFGLPLAAPPAQDSRARRSSEVLQERAFVDLASKCQAVICCRVTPKQKALIVALVKKYHQVVTLAIGDGANDINMIKTADVGVGLAGQEGMQAVQNSDFVLGQFCFLQRLLLVHGRWSYVRICKFLRYFFYKSMASMMVQVWFACYNGFTGQPLYEGWFLALFNLLYSTLPVLYIGLFEQDVSAEQSLEKPELYVVGQKDELFNYWVFVQAIAHGVTTSLVNFFMTLWISRDTAGPASFSDHQSFAVVVALSCLLSITMEVILIIKYWTALCVATILLSLGFYAIMTTTTQSFWLFRVSPTTFPFLYADLSVMSSPSILLVVLLSVSINTFPVLALRVIFPALKELRAKEEKVEEGPSEEIFTMEPLPHVHRESRARRSSYAFSHREGYANLITQGTILRRGPGVSSDIASESLDPSDEEAASSPKESQ

SEQ ID NO: 7227 - protein, 1263 aa, Homo sapiens
  Payload ID: 1541;
  Gene Symbol: ATP8B3;
  Gene Name: ATPase, aminophospholipid transporter, class I, type 8B, member 3;
  Uniprot ID:  O60423;
  ENSP ID: ENSP00000437115
MGDSPGRGAPERRHKAQPGRARKYEWRPEGPTSMGSLGQREDLQDEDRNSAFTWKVQANNRAYNGQFKEKVILCWQRKKYKTNVIRTAKYNFYSFLPLNLYEQFHRVSNLFFLIIIILQSIPDISTLPWFSLSTPMVCLLFIRATRDLVDDMGRHKSDRAINNRPCQILMGKSFKQKKWQDLCVGDVVCLRKDNIVPADMLLLASTEPSSLCYVETVDIDGETNLKFRQALMVTHKELATIKKMASFQGTVTCEAPNSRMHHFVGCLEWNDKKYSLDIGNLLLRGCRIRNTDTCYGLVIYADGYMFVGFDTKIMKNCGKIHLKRTKLDLLMNKLVVVIFISVVLVCLVLAFGFGFSVKEFKDHHYYLSGVHGSSVAAESFFVFWSFLILLSVTIPMSMFILSEFIYLGNSVFIDWDVQMYYKPQDVPAKARSTSLNDHLGQVEYIFSDKTGTLTQNILTFNKCCISGRVYGPDSEATTRPKENPYLWNKFADGKLLFHNAALLHLVRTNGDEAVREFWRLLAICHTVMVRESPRERPDQLLYQAASPDEGALVTAARNFGYVFLSRTQDTVTIMELGEERVYQVLAIMDFNSTRKRMSVLVRKPEGAICLYTKGADTVIFERLHRRGAMEFATEEALAAFAQETLRTLCLAYREVAEDIYEDWQQRHQEASLLLQNRAQALQQVYNEMEQDLRLLGATAIEDRLQDGVPETIKCLKKSNIKIWVLTGDKQETAVNIGFACELLSENMLILEEKEISRILETYWENSNNLLTRESLSQVKLALVINGDFLDKLLVSLRKEPRALAQNVNMDEAWQELGQSRRDFLYARRLSLLCRRFGLPLAAPPAQDSRARRSSEVLQERAFVDLASKCQAVICCRVTPKQKALIVALVKKYHQVVTLAIGDGANDINMIKTADVGVGLAGQEGMQAVQNSDFVLGQFCFLQRLLLVHGRWSYVRICKFLRYFFYKSMASMMVQVWFACYNGFTGQPLYEGWFLALFNLLYSTLPVLYIGLFEQDVSAEQSLEKPELYVVGQKDELFNYWVFVQAIAHGVTTSLVNFFMTLWISRDTAGPASFSDHQSFAVVVALSCLLSITMEVILIIKYWTALCVATILLSLGFYAIMTTTTQSFWLFRVSPTTFPFLYADLSVMSSPSILLVVLLSVSINTFPVLALRVIFPALKELRAKEEKVEEGPSEEIFTMEPLPHVHRESRARRSSYAFSHREGYANLITQGTILRRGPGVSSDIASESLDPSDEEAASSPKESQ

SEQ ID NO: 7228 - protein, 38 aa, Homo sapiens
  Payload ID: 1541;
  Gene Symbol: ATP8B3;
  Gene Name: ATPase, aminophospholipid transporter, class I, type 8B, member 3;
  ENSP ID: ENSP00000439993
  MOD_RES (1)..(1): Any amino acid
XGFACELLSENMLILEEKEIRTNCWCPCGRSRAPWRRT

SEQ ID NO: 7229 - protein, 86 aa, Homo sapiens
  Payload ID: 1541;
  Gene Symbol: ATP8B3;
  Gene Name: ATPase, aminophospholipid transporter, class I, type 8B, member 3;
  ENSP ID: ENSP00000444334
MGTGPAQTPRSTRAGPEPSPAPPGPGDTGDSDVTQEGSGPAGIRGAPPAWAASAREKISKMRTGTQHSPGRSRPTTVPTTGSSRRR

SEQ ID NO: 7230 - protein, 562 aa, Homo sapiens
  Payload ID: 1541;
  Gene Symbol: ATP8B3;
  Gene Name: ATPase, aminophospholipid transporter, class I, type 8B, member 3;
  ENSP ID: ENSP00000445204
MGDSPGRGAPERRHKAQPGRARKYEWRPEGPTSMGSLGQREDLQDEDRNSAFTWKVQANNRAYNGQFKEKVILCWQRKKYKTNVIRTAKYNFYSFLPLNLYEQFHRVSNLFFLIIIILQSIPDISTLPWFSLSTPMVCLLFIRATRDLVDDMGRHKSDRAINNRPCQILMGKSFKQKKWQDLCVGDVVCLRKDNIVPADMLLLASTEPSSLCYVETVDIDGETNLKFRQALMVTHKELATIKKMASFQGTVTCEAPNSRMHHFVGCLEWNDKKYSLDIGNLLLRGCRIRNTDTCYGLVIYAGFDTKIMKNCGKIHLKRTKLDLLMNKLVVVIFISVVLVCLVLAFGFGFSVKEFKDHHYYLSGVHGSSVAAESFFVFWSFLILLSVTIPMSMFILSEFIYLGNSVFIDWDVQMYYKPQDVPAKARSTSLNDHLGQVEYIFSDKTGTLTQNILTFNKCCISGRVYGAAPTPELPAGSSIFKGLRVPENQSHVWPHAQHLRPNLNQGTVARWPGFLWRGPGKFFFFFEAESHSVYPGRNAVVQSWLTAISTSQVQAILLAQPPE

SEQ ID NO: 7231 - protein, 205 aa, Homo sapiens
  Payload ID: 1541;
  Gene Symbol: ATP8B3;
  Gene Name: ATPase, aminophospholipid transporter, class I, type 8B, member 3;
  ENSP ID: ENSP00000465027
MGTGPAQTPRSTRAGPEPSPAPPGPGDTGDSDVTQEGSGPAGIRGGETVIRAGMGDSPGRGAPERRHKAQPGRARKYEWRPEGPTSMGSLGQREDLQDEDRNSAFTWKVQANNRAYNGQFKEKVILCWQRKKYKTNVIRTAKYNFYSFLPLNLYEQFHRVSNLFFLIIIILQSIPDISTLPWFSLSTPMVCLLFIRATRDLVDDM

SEQ ID NO: 7232 - protein, 1001 aa, Homo sapiens
  Payload ID: 1542;
  Gene Symbol: ATP2A1;
  Gene Name: ATPase, Ca++ transporting, cardiac muscle, fast twitch 1;
  Uniprot ID:  O14983;
  ENSP ID: ENSP00000349595
MEAAHAKTTEECLAYFGVSETTGLTPDQVKRNLEKYGLNELPAEEGKTLWELVIEQFEDLLVRILLLAACISFVLAWFEEGEETITAFVEPFVILLILIANAIVGVWQERNAENAIEALKEYEPEMGKVYRADRKSVQRIKARDIVPGDIVEVAVGDKVPADIRILAIKSTTLRVDQSILTGESVSVIKHTEPVPDPRAVNQDKKNMLFSGTNIAAGKALGIVATTGVGTEIGKIRDQMAATEQDKTPLQQKLDEFGEQLSKVISLICVAVWLINIGHFNDPVHGGSWFRGAIYYFKIAVALAVAAIPEGLPAVITTCLALGTRRMAKKNAIVRSLPSVETLGCTSVICSDKTGTLTTNQMSVCKMFIIDKVDGDICLLNEFSITGSTYAPEGEVLKNDKPVRPGQYDGLVELATICALCNDSSLDFNEAKGVYEKVGEATETALTTLVEKMNVFNTDVRSLSKVERANACNSVIRQLMKKEFTLEFSRDRKSMSVYCSPAKSSRAAVGNKMFVKGAPEGVIDRCNYVRVGTTRVPLTGPVKEKIMAVIKEWGTGRDTLRCLALATRDTPPKREEMVLDDSARFLEYETDLTFVGVVGMLDPPRKEVTGSIQLCRDAGIRVIMITGDNKGTAIAICRRIGIFGENEEVADRAYTGREFDDLPLAEQREACRRACCFARVEPSHKSKIVEYLQSYDEITAMTGDGVNDAPALKKAEIGIAMGSGTAVAKTASEMVLADDNFSTIVAAVEEGRAIYNNMKQFIRYLISSNVGEVVCIFLTAALGLPEALIPVQLLWVNLVTDGLPATALGFNPPDLDIMDRPPRSPKEPLISGWLFFRYMAIGGYVGAATVGAAAWWFLYAEDGPHVNYSQLTHFMQCTEDNTHFEGIDCEVFEAPEPMTMALSVLVTIEMCNALNSLSENQSLLRMPPWVNIWLLGSICLSMSLHFLILYVDPLPMIFKLRALDLTQWLMVLKISLPVIGLDEILKFVARNYLEDPEDERRK

SEQ ID NO: 7233 - protein, 994 aa, Homo sapiens
  Payload ID: 1542;
  Gene Symbol: ATP2A1;
  Gene Name: ATPase, Ca++ transporting, cardiac muscle, fast twitch 1;
  Uniprot ID:  O14983;
  ENSP ID: ENSP00000378879
MEAAHAKTTEECLAYFGVSETTGLTPDQVKRNLEKYGLNELPAEEGKTLWELVIEQFEDLLVRILLLAACISFVLAWFEEGEETITAFVEPFVILLILIANAIVGVWQERNAENAIEALKEYEPEMGKVYRADRKSVQRIKARDIVPGDIVEVAVGDKVPADIRILAIKSTTLRVDQSILTGESVSVIKHTEPVPDPRAVNQDKKNMLFSGTNIAAGKALGIVATTGVGTEIGKIRDQMAATEQDKTPLQQKLDEFGEQLSKVISLICVAVWLINIGHFNDPVHGGSWFRGAIYYFKIAVALAVAAIPEGLPAVITTCLALGTRRMAKKNAIVRSLPSVETLGCTSVICSDKTGTLTTNQMSVCKMFIIDKVDGDICLLNEFSITGSTYAPEGEVLKNDKPVRPGQYDGLVELATICALCNDSSLDFNEAKGVYEKVGEATETALTTLVEKMNVFNTDVRSLSKVERANACNSVIRQLMKKEFTLEFSRDRKSMSVYCSPAKSSRAAVGNKMFVKGAPEGVIDRCNYVRVGTTRVPLTGPVKEKIMAVIKEWGTGRDTLRCLALATRDTPPKREEMVLDDSARFLEYETDLTFVGVVGMLDPPRKEVTGSIQLCRDAGIRVIMITGDNKGTAIAICRRIGIFGENEEVADRAYTGREFDDLPLAEQREACRRACCFARVEPSHKSKIVEYLQSYDEITAMTGDGVNDAPALKKAEIGIAMGSGTAVAKTASEMVLADDNFSTIVAAVEEGRAIYNNMKQFIRYLISSNVGEVVCIFLTAALGLPEALIPVQLLWVNLVTDGLPATALGFNPPDLDIMDRPPRSPKEPLISGWLFFRYMAIGGYVGAATVGAAAWWFLYAEDGPHVNYSQLTHFMQCTEDNTHFEGIDCEVFEAPEPMTMALSVLVTIEMCNALNSLSENQSLLRMPPWVNIWLLGSICLSMSLHFLILYVDPLPMIFKLRALDLTQWLMVLKISLPVIGLDEILKFVARNYLEG

SEQ ID NO: 7234 - protein, 869 aa, Homo sapiens
  Payload ID: 1542;
  Gene Symbol: ATP2A1;
  Gene Name: ATPase, Ca++ transporting, cardiac muscle, fast twitch 1;
  Uniprot ID:  O14983;
  ENSP ID: ENSP00000443101
MGKVYRADRKSVQRIKARDIVPGDIVEVAVGDKVPADIRILAIKSTTLRVDQSILTGESVSVIKHTEPVPDPRAVNQDKKNMLFSGTNIAAGKALGIVATTGVGTEIGKIRDQMAATEQDKTPLQQKLDEFGEQLSKVISLICVAVWLINIGHFNDPVHGGSWFRGAIYYFKIAVALAVAAIPEGLPAVITTCLALGTRRMAKKNAIVRSLPSVETLGCTSVICSDKTGTLTTNQMSVCKMFIIDKVDGDICLLNEFSITGSTYAPEGEVLKNDKPVRPGQYDGLVELATICALCNDSSLDFNEAKGVYEKVGEATETALTTLVEKMNVFNTDVRSLSKVERANACNSVIRQLMKKEFTLEFSRDRKSMSVYCSPAKSSRAAVGNKMFVKGAPEGVIDRCNYVRVGTTRVPLTGPVKEKIMAVIKEWGTGRDTLRCLALATRDTPPKREEMVLDDSARFLEYETDLTFVGVVGMLDPPRKEVTGSIQLCRDAGIRVIMITGDNKGTAIAICRRIGIFGENEEVADRAYTGREFDDLPLAEQREACRRACCFARVEPSHKSKIVEYLQSYDEITAMTGDGVNDAPALKKAEIGIAMGSGTAVAKTASEMVLADDNFSTIVAAVEEGRAIYNNMKQFIRYLISSNVGEVVCIFLTAALGLPEALIPVQLLWVNLVTDGLPATALGFNPPDLDIMDRPPRSPKEPLISGWLFFRYMAIGGYVGAATVGAAAWWFLYAEDGPHVNYSQLTHFMQCTEDNTHFEGIDCEVFEAPEPMTMALSVLVTIEMCNALNSLSENQSLLRMPPWVNIWLLGSICLSMSLHFLILYVDPLPMIFKLRALDLTQWLMVLKISLPVIGLDEILKFVARNYLEG

SEQ ID NO: 7235 - protein, 41 aa, Homo sapiens
  Payload ID: 1542;
  Gene Symbol: ATP2A1;
  Gene Name: ATPase, Ca++ transporting, cardiac muscle, fast twitch 1;
  ENSP ID: ENSP00000457148
VICSDKTGTLTTNQMSVCKGLPLTSGQEPLPFTEFCGRLHP

SEQ ID NO: 7236 - protein, 128 aa, Homo sapiens
  Payload ID: 1542;
  Gene Symbol: ATP2A1;
  Gene Name: ATPase, Ca++ transporting, cardiac muscle, fast twitch 1;
  ENSP ID: ENSP00000457357
  MOD_RES (1)..(1): Any amino acid
XGAIYYFKIAVALAVAAIPEGLPAVITTCLALGTRRMAKKNAIVRSLPSVETLGCTSVICSDKTGTLTTNQMSVCKMFIIDKVDGDICLLNEFSITGSTYAPEGEVPKVSMRRSARPPRQHSPPWWRR

SEQ ID NO: 7237 - protein, 24 aa, Homo sapiens
  Payload ID: 1542;
  Gene Symbol: ATP2A1;
  Gene Name: ATPase, Ca++ transporting, cardiac muscle, fast twitch 1;
  ENSP ID: ENSP00000457793
  MOD_RES (1)..(1): Any amino acid
XKISLPVIGLDEILKFVARNYLEG

SEQ ID NO: 7238 - protein, 26 aa, Homo sapiens
  Payload ID: 1542;
  Gene Symbol: ATP2A1;
  Gene Name: ATPase, Ca++ transporting, cardiac muscle, fast twitch 1;
  ENSP ID: ENSP00000457798
MGKVYRADRKSVQRIKARDIVPGDIV

SEQ ID NO: 7239 - protein, 113 aa, Homo sapiens
  Payload ID: 1542;
  Gene Symbol: ATP2A1;
  Gene Name: ATPase, Ca++ transporting, cardiac muscle, fast twitch 1;
  ENSP ID: ENSP00000458035
MNLSFSSFSWVELPAEEGKTLWELVIEQFEDLLVRILLLAACISFVLAWFEEGEETITAFVEPFVILLILIANAIVGVWQERNAENAIEALKEYEPEMGKVYRADRKSVQRIK

SEQ ID NO: 7240 - protein, 997 aa, Homo sapiens
  Payload ID: 1543;
  Gene Symbol: ATP2A2;
  Gene Name: ATPase, Ca++ transporting, cardiac muscle, slow twitch 2;
  Uniprot ID:  P16615;
  ENSP ID: ENSP00000311186
MENAHTKTVEEVLGHFGVNESTGLSLEQVKKLKERWGSNELPAEEGKTLLELVIEQFEDLLVRILLLAACISFVLAWFEEGEETITAFVEPFVILLILVANAIVGVWQERNAENAIEALKEYEPEMGKVYRQDRKSVQRIKAKDIVPGDIVEIAVGDKVPADIRLTSIKSTTLRVDQSILTGESVSVIKHTDPVPDPRAVNQDKKNMLFSGTNIAAGKAMGVVVATGVNTEIGKIRDEMVATEQERTPLQQKLDEFGEQLSKVISLICIAVWIINIGHFNDPVHGGSWIRGAIYYFKIAVALAVAAIPEGLPAVITTCLALGTRRMAKKNAIVRSLPSVETLGCTSVICSDKTGTLTTNQMSVCRMFILDRVEGDTCSLNEFTITGSTYAPIGEVHKDDKPVNCHQYDGLVELATICALCNDSALDYNEAKGVYEKVGEATETALTCLVEKMNVFDTELKGLSKIERANACNSVIKQLMKKEFTLEFSRDRKSMSVYCTPNKPSRTSMSKMFVKGAPEGVIDRCTHIRVGSTKVPMTSGVKQKIMSVIREWGSGSDTLRCLALATHDNPLRREEMHLEDSANFIKYETNLTFVGCVGMLDPPRIEVASSVKLCRQAGIRVIMITGDNKGTAVAICRRIGIFGQDEDVTSKAFTGREFDELNPSAQRDACLNARCFARVEPSHKSKIVEFLQSFDEITAMTGDGVNDAPALKKAEIGIAMGSGTAVAKTASEMVLADDNFSTIVAAVEEGRAIYNNMKQFIRYLISSNVGEVVCIFLTAALGFPEALIPVQLLWVNLVTDGLPATALGFNPPDLDIMNKPPRNPKEPLISGWLFFRYLAIGCYVGAATVGAAAWWFIAADGGPRVSFYQLSHFLQCKEDNPDFEGVDCAIFESPYPMTMALSVLVTIEMCNALNSLSENQSLLRMPPWENIWLVGSICLSMSLHFLILYVEPLPLIFQITPLNVTQWLMVLKISLPVILMDETLKFVARNYLEPAILE

SEQ ID NO: 7241 - protein, 50 aa, Homo sapiens
  Payload ID: 1543;
  Gene Symbol: ATP2A2;
  Gene Name: ATPase, Ca++ transporting, cardiac muscle, slow twitch 2;
  ENSP ID: ENSP00000366913
MENAHTKTVEEVLGHFGVNESTGLSLEQVKKLKERWGSNGRCREKPCWNL

SEQ ID NO: 7242 - protein, 1042 aa, Homo sapiens
  Payload ID: 1543;
  Gene Symbol: ATP2A2;
  Gene Name: ATPase, Ca++ transporting, cardiac muscle, slow twitch 2;
  Uniprot ID:  P16615;
  ENSP ID: ENSP00000440045
MENAHTKTVEEVLGHFGVNESTGLSLEQVKKLKERWGSNELPAEEGKTLLELVIEQFEDLLVRILLLAACISFVLAWFEEGEETITAFVEPFVILLILVANAIVGVWQERNAENAIEALKEYEPEMGKVYRQDRKSVQRIKAKDIVPGDIVEIAVGDKVPADIRLTSIKSTTLRVDQSILTGESVSVIKHTDPVPDPRAVNQDKKNMLFSGTNIAAGKAMGVVVATGVNTEIGKIRDEMVATEQERTPLQQKLDEFGEQLSKVISLICIAVWIINIGHFNDPVHGGSWIRGAIYYFKIAVALAVAAIPEGLPAVITTCLALGTRRMAKKNAIVRSLPSVETLGCTSVICSDKTGTLTTNQMSVCRMFILDRVEGDTCSLNEFTITGSTYAPIGEVHKDDKPVNCHQYDGLVELATICALCNDSALDYNEAKGVYEKVGEATETALTCLVEKMNVFDTELKGLSKIERANACNSVIKQLMKKEFTLEFSRDRKSMSVYCTPNKPSRTSMSKMFVKGAPEGVIDRCTHIRVGSTKVPMTSGVKQKIMSVIREWGSGSDTLRCLALATHDNPLRREEMHLEDSANFIKYETNLTFVGCVGMLDPPRIEVASSVKLCRQAGIRVIMITGDNKGTAVAICRRIGIFGQDEDVTSKAFTGREFDELNPSAQRDACLNARCFARVEPSHKSKIVEFLQSFDEITAMTGDGVNDAPALKKAEIGIAMGSGTAVAKTASEMVLADDNFSTIVAAVEEGRAIYNNMKQFIRYLISSNVGEVVCIFLTAALGFPEALIPVQLLWVNLVTDGLPATALGFNPPDLDIMNKPPRNPKEPLISGWLFFRYLAIGCYVGAATVGAAAWWFIAADGGPRVSFYQLSHFLQCKEDNPDFEGVDCAIFESPYPMTMALSVLVTIEMCNALNSLSENQSLLRMPPWENIWLVGSICLSMSLHFLILYVEPLPLIFQITPLNVTQWLMVLKISLPVILMDETLKFVARNYLEPGKECVQPATKSCSFSACTDGISWPFVLLIMPLVIWVYSTDTNFSDMFWS

SEQ ID NO: 7243 - protein, 44 aa, Homo sapiens
  Payload ID: 1543;
  Gene Symbol: ATP2A2;
  Gene Name: ATPase, Ca++ transporting, cardiac muscle, slow twitch 2;
  ENSP ID: ENSP00000447406
MQLWVYGRKEMLKMPSKPLRNMSLKWAKCIDRTERVCSGLKLKT

SEQ ID NO: 7244 - protein, 933 aa, Homo sapiens
  Payload ID: 1543;
  Gene Symbol: ATP2A2;
  Gene Name: ATPase, Ca++ transporting, cardiac muscle, slow twitch 2;
  ENSP ID: ENSP00000449454
  MOD_RES (1)..(1): Any amino acid
XTITAFVEPFVILLILVANAIVGVWQERNAENAIEALKEYEPEMGKVYRQDRKSVQRIKAKDIVPGDIVEIAGESVSVIKHTDPVPDPRAVNQDKKNMLFSGTNIAAGKAMGVVVATGVNTEIGKIRDEMVATEQERTPLQQKLDEFGEQLSKVISLICIAVWIINIGHFNDPVHGGSWIRGAIYYFKIAVALAVAAIPEGLPAVITTCLALGTRRMAKKNAIVRSLPSVETLGCTSVICSDKTGTLTTNQMSVCRMFILDRVEGDTCSLNEFTITGSTYAPIGEVHKDDKPVNCHQYDGLVELATICALCNDSALDYNEAKGVYEKVGEATETALTCLVEKMNVFDTELKGLSKIERANACNSVIKQLMKKEFTLEFSRDRKSMSVYCTPNKPSRTSMSKMFVKGAPEGVIDRCTHIRVGSTKVPMTSGVKQKIMSVIREWGSGSDTLRCLALATHDNPLRREEMHLEDSANFIKYETNLTFVGCVGMLDPPRIEVASSVKLCRQAGIRVIMITGDNKGTAVAICRRIGIFGQDEDVTSKAFTGREFDELNPSAQRDACLNARCFARVEPSHKSKIVEFLQSFDEITAMTGDGVNDAPALKKAEIGIAMGSGTAVAKTASEMVLADDNFSTIVAAVEEGRAIYNNMKQFIRYLISSNVGEVVCIFLTAALGFPEALIPVQLLWVNLVTDGLPATALGFNPPDLDIMNKPPRNPKEPLISGWLFFRYLAIGCYVGAATVGAAAWWFIAADGGPRVSFYQLSHFLQCKEDNPDFEGVDCAIFESPYPMTMALSVLVTIEMCNALNSLSENQSLLRMPPWENIWLVGSICLSMSLHFLILYVEPLPLIFQITPLNVTQWLMVLKISLPVILMDETLKFVARNYLEPGKECVQPATKSCSFSACTDGISWPFVLLIMPLVIWVYSTDTNFSDMFWS

SEQ ID NO: 7245 - protein, 46 aa, Homo sapiens
  Payload ID: 1543;
  Gene Symbol: ATP2A2;
  Gene Name: ATPase, Ca++ transporting, cardiac muscle, slow twitch 2;
  ENSP ID: ENSP00000450407
LIFQITPLNVTQWLMVLKISLPVILMDETLKFVARNYLEPVLSSEL

SEQ ID NO: 7246 - protein, 1220 aa, Homo sapiens
  Payload ID: 1544;
  Gene Symbol: ATP2B1;
  Gene Name: ATPase, Ca++ transporting, plasma membrane 1;
  Uniprot ID:  P20020;
  ENSP ID: ENSP00000261173
MGDMANNSVAYSGVKNSLKEANHDGDFGITLAELRALMELRSTDALRKIQESYGDVYGICTKLKTSPNEGLSGNPADLERREAVFGKNFIPPKKPKTFLQLVWEALQDVTLIILEIAAIVSLGLSFYQPPEGDNALCGEVSVGEEEGEGETGWIEGAAILLSVVCVVLVTAFNDWSKEKQFRGLQSRIEQEQKFTVIRGGQVIQIPVADITVGDIAQVKYGDLLPADGILIQGNDLKIDESSLTGESDHVKKSLDKDPLLLSGTHVMEGSGRMVVTAVGVNSQTGIIFTLLGAGGEEEEKKDEKKKEKKNKKQDGAIENRNKAKAQDGAAMEMQPLKSEEGGDGDEKDKKKANLPKKEKSVLQGKLTKLAVQIGKAGLLMSAITVIILVLYFVIDTFWVQKRPWLAECTPIYIQYFVKFFIIGVTVLVVAVPEGLPLAVTISLAYSVKKMMKDNNLVRHLDACETMGNATAICSDKTGTLTMNRMTVVQAYINEKHYKKVPEPEAIPPNILSYLVTGISVNCAYTSKILPPEKEGGLPRHVGNKTECALLGLLLDLKRDYQDVRNEIPEEALYKVYTFNSVRKSMSTVLKNSDGSYRIFSKGASEIILKKCFKILSANGEAKVFRPRDRDDIVKTVIEPMASEGLRTICLAFRDFPAGEPEPEWDNENDIVTGLTCIAVVGIEDPVRPEVPDAIKKCQRAGITVRMVTGDNINTARAIATKCGILHPGEDFLCLEGKDFNRRIRNEKGEIEQERIDKIWPKLRVLARSSPTDKHTLVKGIIDSTVSDQRQVVAVTGDGTNDGPALKKADVGFAMGIAGTDVAKEASDIILTDDNFTSIVKAVMWGRNVYDSISKFLQFQLTVNVVAVIVAFTGACITQDSPLKAVQMLWVNLIMDTLASLALATEPPTESLLLRKPYGRNKPLISRTMMKNILGHAFYQLVVVFTLLFAGEKFFDIDSGRNAPLHAPPSEHYTIVFNTFVLMQLFNEINARKIHGERNVFEGIFNNAIFCTIVLGTFVVQIIIVQFGGKPFSCSELSIEQWLWSIFLGMGTLLWGQLISTIPTSRLKFLKEAGHGTQKEEIPEEELAEDVEEIDHAERELRRGQILWFRGLNRIQTQIRVVNAFRSSLYEGLEKPESRSSIHNFMTHPEFRIEDSEPHIPLIDDTDAEDDAPTKRNSSPPPSPNKNNNAVDSGIHLTIEMNKSATSSSPGSPLHSLETSL

SEQ ID NO: 7247 - protein, 1176 aa, Homo sapiens
  Payload ID: 1544;
  Gene Symbol: ATP2B1;
  Gene Name: ATPase, Ca++ transporting, plasma membrane 1;
  Uniprot ID:  P20020;
  ENSP ID: ENSP00000352054
MGDMANNSVAYSGVKNSLKEANHDGDFGITLAELRALMELRSTDALRKIQESYGDVYGICTKLKTSPNEGLSGNPADLERREAVFGKNFIPPKKPKTFLQLVWEALQDVTLIILEIAAIVSLGLSFYQPPEGDNALCGEVSVGEEEGEGETGWIEGAAILLSVVCVVLVTAFNDWSKEKQFRGLQSRIEQEQKFTVIRGGQVIQIPVADITVGDIAQVKYGDLLPADGILIQGNDLKIDESSLTGESDHVKKSLDKDPLLLSGTHVMEGSGRMVVTAVGVNSQTGIIFTLLGAGGEEEEKKDEKKKEKKNKKQDGAIENRNKAKAQDGAAMEMQPLKSEEGGDGDEKDKKKANLPKKEKSVLQGKLTKLAVQIGKAGLLMSAITVIILVLYFVIDTFWVQKRPWLAECTPIYIQYFVKFFIIGVTVLVVAVPEGLPLAVTISLAYSVKKMMKDNNLVRHLDACETMGNATAICSDKTGTLTMNRMTVVQAYINEKHYKKVPEPEAIPPNILSYLVTGISVNCAYTSKILPPEKEGGLPRHVGNKTECALLGLLLDLKRDYQDVRNEIPEEALYKVYTFNSVRKSMSTVLKNSDGSYRIFSKGASEIILKKCFKILSANGEAKVFRPRDRDDIVKTVIEPMASEGLRTICLAFRDFPAGEPEPEWDNENDIVTGLTCIAVVGIEDPVRPEVPDAIKKCQRAGITVRMVTGDNINTARAIATKCGILHPGEDFLCLEGKDFNRRIRNEKGEIEQERIDKIWPKLRVLARSSPTDKHTLVKGIIDSTVSDQRQVVAVTGDGTNDGPALKKADVGFAMGIAGTDVAKEASDIILTDDNFTSIVKAVMWGRNVYDSISKFLQFQLTVNVVAVIVAFTGACITQDSPLKAVQMLWVNLIMDTLASLALATEPPTESLLLRKPYGRNKPLISRTMMKNILGHAFYQLVVVFTLLFAGEKFFDIDSGRNAPLHAPPSEHYTIVFNTFVLMQLFNEINARKIHGERNVFEGIFNNAIFCTIVLGTFVVQIIIVQFGGKPFSCSELSIEQWLWSIFLGMGTLLWGQLISTIPTSRLKFLKEAGHGTQKEEIPEEELAEDVEEIDHAERELRRGQILWFRGLNRIQTQMDVVNAFQSGSSIQGALRRQPSIASQHHDVTNISTPTHVVFSSSTASTTVGYSSGECIS

SEQ ID NO: 7248 - protein, 963 aa, Homo sapiens [sequence omitted]

SEQ ID NO: 7249 - protein, 1220 aa, Homo sapiens; identical to SEQ ID NO: 7246
  Payload ID: 1544;
  Gene Symbol: ATP2B1;
  Gene Name: ATPase, Ca++ transporting, plasma membrane 1;
  Uniprot ID:  P20020;
  ENSP ID: ENSP00000392043

SEQ ID NO: 7250 - protein, 101 aa, Homo sapiens
  Payload ID: 1544;
  Gene Symbol: ATP2B1;
  Gene Name: ATPase, Ca++ transporting, plasma membrane 1;
  ENSP ID: ENSP00000447041
MGDMANNSVAYSGVKNSLKEANHDGDFGITLAELRALMELRSTDALRKIQESYGDVYGICTKLKTSPNEGEFYYACFWFFVQRVLYIWLINEHAYIILAIV

SEQ ID NO: 7251 - protein, 162 aa, Homo sapiens
  Payload ID: 1544;
  Gene Symbol: ATP2B1;
  Gene Name: ATPase, Ca++ transporting, plasma membrane 1;
  ENSP ID: ENSP00000447096
  MOD_RES (1)..(1): Any amino acid
XFNEINARKIHGERNVFEGIFNNAIFCTIVLGTFVVQLISTIPTSRLKFLKEAGHGTQKEEIPEEELAEDVEEIDHAERELRRGQILWFRGLNRIQTQIRVVNAFRSSLYEGLEKPESRSSIHNFMTHPEFRIEDSEPHIPLIDDTDAEDDAPTKRNSSPPP

SEQ ID NO: 7252 - protein, 300 aa, Homo sapiens
  Payload ID: 1544;
  Gene Symbol: ATP2B1;
  Gene Name: ATPase, Ca++ transporting, plasma membrane 1;
  ENSP ID: ENSP00000489171
  MOD_RES (1)..(1): Any amino acid
XEKFFDIDSGRNAPLHAPPSEHYTIVFNTFVLMQLFNEINARKIHGERNVFEGIFNNAIFCTIVLGTFVVQIIIVQFGGKPFSCSELSIEQWLWSIFLGMGTLLWGQLISTIPTSRLKFLKEAGHGTQKEEIPEEELAEDVEEIDHAERELRRGQILWFRGLNRIQTQMDVVNAFQSGSSIQGALRRQPSIASQHHDIRVVNAFRSSLYEGLEKPESRSSIHNFMTHPEFRIEDSEPHIPLIDDTDAEDDAPTKRNSSPPPSPNKNNNAVDSGIHLTIEMNKSATSSSPGSPLHSLETSL

SEQ ID NO: 7253 - protein, 1243 aa, Homo sapiens [sequence omitted]

SEQ ID NO: 7254 - protein, 1243 aa, Homo sapiens [sequence omitted]

SEQ ID NO: 7255 - protein, 1198 aa, Homo sapiens
  Payload ID: 1545;
  Gene Symbol: ATP2B2;
  Gene Name: ATPase, Ca++ transporting, plasma membrane 2;
  Uniprot ID:  Q01814;
  ENSP ID: ENSP00000373311
MGDMTNSDFYSKNQRNESSHGGEFGCTMEELRSLMELRGTEAVVKIKETYGDTEAICRRLKTSPVEGLPGTAPDLEKRKQIFGQNFIPPKKPKTFLQLVWEALQDVTLIILEIAAIISLGLSFYHPPGEGNEGCATAQGGAEDEGEAEAGWIEGAAILLSVICVVLVTAFNDWSKEKQFRGLQSRIEQEQKFTVVRAGQVVQIPVAEIVVGDIAQVKYGDLLPADGLFIQGNDLKIDESSLTGESDQVRKSVDKDPMLLSGTHVMEGSGRMLVTAVGVNSQTGIIFTLLGAGGEEEEKKDKKAKQQDGAAAMEMQPLKSAEGGDADDRKKASMHKKEKSVLQGKLTKLAVQIGKAGLVMSAITVIILVLYFTVDTFVVNKKPWLPECTPVYVQYFVKFFIIGVTVLVVAVPEGLPLAVTISLAYSVKKMMKDNNLVRHLDACETMGNATAICSDKTGTLTTNRMTVVQAYVGDVHYKEIPDPSSINTKTMELLINAIAINSAYTTKILPPEKEGALPRQVGNKTECGLLGFVLDLKQDYEPVRSQMPEEKLYKVYTFNSVRKSMSTVIKLPDESFRMYSKGASEIVLKKCCKILNGAGEPRVFRPRDRDEMVKKVIEPMACDGLRTICVAYRDFPSSPEPDWDNENDILNELTCICVVGIEDPVRPEVPEAIRKCQRAGITVRMVTGDNINTARAIAIKCGIIHPGEDFLCLEGKEFNRRIRNEKGEIEQERIDKIWPKLRVLARSSPTDKHTLVKGIIDSTHTEQRQVVAVTGDGTNDGPALKKADVGFAMGIAGTDVAKEASDIILTDDNFSSIVKAVMWGRNVYDSISKFLQFQLTVNVVAVIVAFTGACITQDSPLKAVQMLWVNLIMDTFASLALATEPPTETLLLRKPYGRNKPLISRTMMKNILGHAVYQLALIFTLLFVGEKMFQIDSGRNAPLHSPPSEHYTIIFNTFVMMQLFNEINARKIHGERNVFDGIFRNPIFCTIVLGTFAIQIVIVQFGGKPFSCSPLQLDQWMWCIFIGLGELVWGQVIATIPTSRLKFLKEAGRLTQKEEIPEEELNEDVEEIDHAERELRRGQILWFRGLNRIQTQIRVVKAFRSSLYEGLEKPESRTSIHNFMAHPEFRIEDSQPHIPLIDDTDLEEDAALKQNSSPPSSLNKNNSAIDSGINLTTDTSKSATSSSPGSPIHSLETSL

SEQ ID NO: 7256 - protein, 1198 aa, Homo sapiens; identical to SEQ ID NO: 7255
  Payload ID: 1545;
  Gene Symbol: ATP2B2;
  Gene Name: ATPase, Ca++ transporting, plasma membrane 2;
  Uniprot ID:  Q01814;
  ENSP ID: ENSP00000380267

SEQ ID NO: 7257 - protein, 1099 aa, Homo sapiens
  Payload ID: 1545;
  Gene Symbol: ATP2B2;
  Gene Name: ATPase, Ca++ transporting, plasma membrane 2;
  ENSP ID: ENSP00000414854
AAIISLGLSFYHPPGEGNEGCATAQGGAEDEGEAEAGWIEGAAILLSVICVVLVTAFNDWSKEKQFRGLQSRIEQEQKFTVVRAGQVVQIPVAEIVVGDIAQVKYGDLLPADGLFIQGNDLKIDESSLTGESDQVRKSVDKDPMLLSGTHVMEGSGRMLVTAVGVNSQTGIIFTLLGAGGEEEEKKDKKGKMQDGNVDASQSKAKQQDGAAAMEMQPLKSAEGGDADDRKKASMHKKEKSVLQGKLTKLAVQIGKAGLVMSAITVIILVLYFTVDTFVVNKKPWLPECTPVYVQYFVKFFIIGVTVLVVAVPEGLPLAVTISLAYSVKKMMKDNNLVRHLDACETMGNATAICSDKTGTLTTNRMTVVQAYVGDVHYKEIPDPSSINTKTMELLINAIAINSAYTTKILPPEKEGALPRQVGNKTECGLLGFVLDLKQDYEPVRSQMPEEKLYKVYTFNSVRKSMSTVIKLPDESFRMYSKGASEIVLKKCCKILNGAGEPRVFRPRDRDEMVKKVIEPMACDGLRTICVAYRDFPSSPEPDWDNENDILNELTCICVVGIEDPVRPEVPEAIRKCQRAGITVRMVTGDNINTARAIAIKCGIIHPGEDFLCLEGKEFNRRIRNEKGEIEQERIDKIWPKLRVLARSSPTDKHTLVKGIIDSTHTEQRQVVAVTGDGTNDGPALKKADVGFAMGIAGTDVAKEASDIILTDDNFSSIVKAVMWGRNVYDSISKFLQFQLTVNVVAVIVAFTGACITQDSPLKAVQMLWVNLIMDTFASLALATEPPTETLLLRKPYGRNKPLISRTMMKNILGHAVYQLALIFTLLFVGEKMFQIDSGRNAPLHSPPSEHYTIIFNTFVMMQLFNEINARKIHGERNVFDGIFRNPIFCTIVLGTFAIQIVIVQFGGKPFSCSPLQLDQWMWCIFIGLGELVWGQVIATIPTSRLKFLKEAGRLTQKEEIPEEELNEDVEEIDHAERELRRGQILWFRGLNRIQTQIRVVKAFRSSLYEGLEKPESRTSIHNFMAHPEFRIEDSQPHIPLIDDTDLEEDAALKQNSSPPSSLNKNNSAIDSGINLTTDTSKSATSSSPGSPIHSLETSL

SEQ ID NO: 7258 - protein, 1154 aa, Homo sapiens
  Payload ID: 1545;
  Gene Symbol: ATP2B2;
  Gene Name: ATPase, Ca++ transporting, plasma membrane 2;
  Uniprot ID:  Q01814;
  ENSP ID: ENSP00000424494
MGDMTNSDFYSKNQRNESSHGGEFGCTMEELRSLMELRGTEAVVKIKETYGDTEAICRRLKTSPVEGLPGTAPDLEKRKQIFGQNFIPPKKPKTFLQLVWEALQDVTLIILEIAAIISLGLSFYHPPGEGNEGCATAQGGAEDEGEAEAGWIEGAAILLSVICVVLVTAFNDWSKEKQFRGLQSRIEQEQKFTVVRAGQVVQIPVAEIVVGDIAQVKYGDLLPADGLFIQGNDLKIDESSLTGESDQVRKSVDKDPMLLSGTHVMEGSGRMLVTAVGVNSQTGIIFTLLGAGGEEEEKKDKKAKQQDGAAAMEMQPLKSAEGGDADDRKKASMHKKEKSVLQGKLTKLAVQIGKAGLVMSAITVIILVLYFTVDTFVVNKKPWLPECTPVYVQYFVKFFIIGVTVLVVAVPEGLPLAVTISLAYSVKKMMKDNNLVRHLDACETMGNATAICSDKTGTLTTNRMTVVQAYVGDVHYKEIPDPSSINTKTMELLINAIAINSAYTTKILPPEKEGALPRQVGNKTECGLLGFVLDLKQDYEPVRSQMPEEKLYKVYTFNSVRKSMSTVIKLPDESFRMYSKGASEIVLKKCCKILNGAGEPRVFRPRDRDEMVKKVIEPMACDGLRTICVAYRDFPSSPEPDWDNENDILNELTCICVVGIEDPVRPEVPEAIRKCQRAGITVRMVTGDNINTARAIAIKCGIIHPGEDFLCLEGKEFNRRIRNEKGEIEQERIDKIWPKLRVLARSSPTDKHTLVKGIIDSTHTEQRQVVAVTGDGTNDGPALKKADVGFAMGIAGTDVAKEASDIILTDDNFSSIVKAVMWGRNVYDSISKFLQFQLTVNVVAVIVAFTGACITQDSPLKAVQMLWVNLIMDTFASLALATEPPTETLLLRKPYGRNKPLISRTMMKNILGHAVYQLALIFTLLFVGEKMFQIDSGRNAPLHSPPSEHYTIIFNTFVMMQLFNEINARKIHGERNVFDGIFRNPIFCTIVLGTFAIQIVIVQFGGKPFSCSPLQLDQWMWCIFIGLGELVWGQVIATIPTSRLKFLKEAGRLTQKEEIPEEELNEDVEEIDHAERELRRGQILWFRGLNRIQTQIEVVNTFKSGASFQGALRRQSSVTSQSQDVANLSSPSRVSLSNALSSPTSLPPAAAGQG

SEQ ID NO: 7259 - protein, 1220 aa, Homo sapiens
  Payload ID: 1546;
  Gene Symbol: ATP2B3;
  Gene Name: ATPase, Ca++ transporting, plasma membrane 3;
  Uniprot ID:  Q16720;
  ENSP ID: ENSP00000263519
MGDMANSSIEFHPKPQQQRDVPQAGGFGCTLAELRTLMELRGAEALQKIEEAYGDVSGLCRRLKTSPTEGLADNTNDLEKRRQIYGQNFIPPKQPKTFLQLVWEALQDVTLIILEVAAIVSLGLSFYAPPGEESEACGNVSGGAEDEGEAEAGWIEGAAILLSVICVVLVTAFNDWSKEKQFRGLQSRIEQEQKFTVIRNGQLLQVPVAALVVGDIAQVKYGDLLPADGVLIQANDLKIDESSLTGESDHVRKSADKDPMLLSGTHVMEGSGRMVVTAVGVNSQTGIIFTLLGAGGEEEEKKDKKGKQQDGAMESSQTKAKKQDGAVAMEMQPLKSAEGGEMEEREKKKANAPKKEKSVLQGKLTKLAVQIGKAGLVMSAITVIILVLYFVIETFVVEGRTWLAECTPVYVQYFVKFFIIGVTVLVVAVPEGLPLAVTISLAYSVKKMMKDNNLVRHLDACETMGNATAICSDKTGTLTTNRMTVVQSYLGDTHYKEIPAPSALTPKILDLLVHAISINSAYTTKILPPEKEGALPRQVGNKTECALLGFVLDLKRDFQPVREQIPEDKLYKVYTFNSVRKSMSTVIRMPDGGFRLFSKGASEILLKKCTNILNSNGELRGFRPRDRDDMVRKIIEPMACDGLRTICIAYRDFSAGQEPDWDNENEVVGDLTCIAVVGIEDPVRPEVPEAIRKCQRAGITVRMVTGDNINTARAIAAKCGIIQPGEDFLCLEGKEFNRRIRNEKGEIEQERLDKVWPKLRVLARSSPTDKHTLVKGIIDSTTGEQRQVVAVTGDGTNDGPALKKADVGFAMGIAGTDVAKEASDIILTDDNFTSIVKAVMWGRNVYDSISKFLQFQLTVNVVAVIVAFTGACITQDSPLKAVQMLWVNLIMDTFASLALATEPPTESLLLRKPYGRDKPLISRTMMKNILGHAVYQLAIIFTLLFVGELFFDIDSGRNAPLHSPPSEHYTIIFNTFVMMQLFNEINARKIHGERNVFDGIFSNPIFCTIVLGTFGIQIVIVQFGGKPFSCSPLSTEQWLWCLFVGVGELVWGQVIATIPTSQLKCLKEAGHGPGKDEMTDEELAEGEEEIDHAERELRRGQILWFRGLNRIQTQIRVVKAFRSSLYEGLEKPESKTSIHNFMATPEFLINDYTHNIPLIDDTDVDENEERLRAPPPPSPNQNNNAIDSGIYLTTHVTKSATSSVFSSSPGSPLHSVETSL

SEQ ID NO: 7260 - protein, 1220 aa, Homo sapiens; identical to SEQ ID NO: 7259
  Payload ID: 1546;
  Gene Symbol: ATP2B3;
  Gene Name: ATPase, Ca++ transporting, plasma membrane 3;
  Uniprot ID:  Q16720;
  ENSP ID: ENSP00000343886

SEQ ID NO: 7261 - protein, 1173 aa, Homo sapiens
  Payload ID: 1546;
  Gene Symbol: ATP2B3;
  Gene Name: ATPase, Ca++ transporting, plasma membrane 3;
  Uniprot ID:  Q16720;
  ENSP ID: ENSP00000352062
MGDMANSSIEFHPKPQQQRDVPQAGGFGCTLAELRTLMELRGAEALQKIEEAYGDVSGLCRRLKTSPTEGLADNTNDLEKRRQIYGQNFIPPKQPKTFLQLVWEALQDVTLIILEVAAIVSLGLSFYAPPGEESEACGNVSGGAEDEGEAEAGWIEGAAILLSVICVVLVTAFNDWSKEKQFRGLQSRIEQEQKFTVIRNGQLLQVPVAALVVGDIAQVKYGDLLPADGVLIQANDLKIDESSLTGESDHVRKSADKDPMLLSGTHVMEGSGRMVVTAVGVNSQTGIIFTLLGAGGEEEEKKDKKGKQQDGAMESSQTKAKKQDGAVAMEMQPLKSAEGGEMEEREKKKANAPKKEKSVLQGKLTKLAVQIGKAGLVMSAITVIILVLYFVIETFVVEGRTWLAECTPVYVQYFVKFFIIGVTVLVVAVPEGLPLAVTISLAYSVKKMMKDNNLVRHLDACETMGNATAICSDKTGTLTTNRMTVVQSYLGDTHYKEIPAPSALTPKILDLLVHAISINSAYTTKILPPEKEGALPRQVGNKTECALLGFVLDLKRDFQPVREQIPEDKLYKVYTFNSVRKSMSTVIRMPDGGFRLFSKGASEILLKKCTNILNSNGELRGFRPRDRDDMVRKIIEPMACDGLRTICIAYRDFSAGQEPDWDNENEVVGDLTCIAVVGIEDPVRPEVPEAIRKCQRAGITVRMVTGDNINTARAIAAKCGIIQPGEDFLCLEGKEFNRRIRNEKGEIEQERLDKVWPKLRVLARSSPTDKHTLVKGIIDSTTGEQRQVVAVTGDGTNDGPALKKADVGFAMGIAGTDVAKEASDIILTDDNFTSIVKAVMWGRNVYDSISKFLQFQLTVNVVAVIVAFTGACITQDSPLKAVQMLWVNLIMDTFASLALATEPPTESLLLRKPYGRDKPLISRTMMKNILGHAVYQLAIIFTLLFVGELFFDIDSGRNAPLHSPPSEHYTIIFNTFVMMQLFNEINARKIHGERNVFDGIFSNPIFCTIVLGTFGIQIVIVQFGGKPFSCSPLSTEQWLWCLFVGVGELVWGQVIATIPTSQLKCLKEAGHGPGKDEMTDEELAEGEEEIDHAERELRRGQILWFRGLNRIQTQMEVVSTFKRSGSVQGAVRRRSSVLSQLHDVTNLSTPTHAILSAANPTSAAGNPGGESVP

SEQ ID NO: 7262 - protein, 1159 aa, Homo sapiens
  Payload ID: 1546;
  Gene Symbol: ATP2B3;
  Gene Name: ATPase, Ca++ transporting, plasma membrane 3;
  Uniprot ID:  Q16720;
  ENSP ID: ENSP00000359205
MGDMANSSIEFHPKPQQQRDVPQAGGFGCTLAELRTLMELRGAEALQKIEEAYGDVSGLCRRLKTSPTEGLADNTNDLEKRRQIYGQNFIPPKQPKTFLQLVWEALQDVTLIILEVAAIVSLGLSFYAPPGEESEACGNVSGGAEDEGEAEAGWIEGAAILLSVICVVLVTAFNDWSKEKQFRGLQSRIEQEQKFTVIRNGQLLQVPVAALVVGDIAQVKYGDLLPADGVLIQANDLKIDESSLTGESDHVRKSADKDPMLLSGTHVMEGSGRMVVTAVGVNSQTGIIFTLLGAGGEEEEKKDKKAKKQDGAVAMEMQPLKSAEGGEMEEREKKKANAPKKEKSVLQGKLTKLAVQIGKAGLVMSAITVIILVLYFVIETFVVEGRTWLAECTPVYVQYFVKFFIIGVTVLVVAVPEGLPLAVTISLAYSVKKMMKDNNLVRHLDACETMGNATAICSDKTGTLTTNRMTVVQSYLGDTHYKEIPAPSALTPKILDLLVHAISINSAYTTKILPPEKEGALPRQVGNKTECALLGFVLDLKRDFQPVREQIPEDKLYKVYTFNSVRKSMSTVIRMPDGGFRLFSKGASEILLKKCTNILNSNGELRGFRPRDRDDMVRKIIEPMACDGLRTICIAYRDFSAGQEPDWDNENEVVGDLTCIAVVGIEDPVRPEVPEAIRKCQRAGITVRMVTGDNINTARAIAAKCGIIQPGEDFLCLEGKEFNRRIRNEKGEIEQERLDKVWPKLRVLARSSPTDKHTLVKGIIDSTTGEQRQVVAVTGDGTNDGPALKKADVGFAMGIAGTDVAKEASDIILTDDNFTSIVKAVMWGRNVYDSISKFLQFQLTVNVVAVIVAFTGACITQDSPLKAVQMLWVNLIMDTFASLALATEPPTESLLLRKPYGRDKPLISRTMMKNILGHAVYQLAIIFTLLFVGELFFDIDSGRNAPLHSPPSEHYTIIFNTFVMMQLFNEINARKIHGERNVFDGIFSNPIFCTIVLGTFGIQIVIVQFGGKPFSCSPLSTEQWLWCLFVGVGELVWGQVIATIPTSQLKCLKEAGHGPGKDEMTDEELAEGEEEIDHAERELRRGQILWFRGLNRIQTQMEVVSTFKRSGSVQGAVRRRSSVLSQLHDVTNLSTPTHAILSAANPTSAAGNPGGESVP

SEQ ID NO: 7263 - protein, 1154 aa, Homo sapiens
  Payload ID: 1546;
  Gene Symbol: ATP2B3;
  Gene Name: ATPase, Ca++ transporting, plasma membrane 3;
  Uniprot ID:  Q16720;
  ENSP ID: ENSP00000377425
MGDMANSSIEFHPKPQQQRDVPQAGGFGCTLAELRTLMELRGAEALQKIEEAYGDVSGLCRRLKTSPTEGLADNTNDLEKRRQIYGQNFIPPKQPKTFLQLVWEALQDVTLIILEVAAIVSLGLSFYAPPGEESEACGNVSGGAEDEGEAEAGWIEGAAILLSVICVVLVTAFNDWSKEKQFRGLQSRIEQEQKFTVIRNGQLLQVPVAALVVGDIAQVKYGDLLPADGVLIQANDLKIDESSLTGESDHVRKSADKDPMLLSGTHVMEGSGRMVVTAVGVNSQTGIIFTLLGAGGEEEEKKDKKAKKQDGAVAMEMQPLKSAEGGEMEEREKKKANAPKKEKSVLQGKLTKLAVQIGKAGLVMSAITVIILVLYFVIETFVVEGRTWLAECTPVYVQYFVKFFIIGVTVLVVAVPEGLPLAVTISLAYSVKKMMKDNNLVRHLDACETMGNATAICSDKTGTLTTNRMTVVQSYLGDTHYKEIPAPSALTPKILDLLVHAISINSAYTTKILPPEKEGALPRQVGNKTECALLGFVLDLKRDFQPVREQIPEDKLYKVYTFNSVRKSMSTVIRMPDGGFRLFSKGASEILLKKCTNILNSNGELRGFRPRDRDDMVRKIIEPMACDGLRTICIAYRDFSAGQEPDWDNENEVVGDLTCIAVVGIEDPVRPEVPEAIRKCQRAGITVRMVTGDNINTARAIAAKCGIIQPGEDFLCLEGKEFNRRIRNEKGEIEQERLDKVWPKLRVLARSSPTDKHTLVKGIIDSTTGEQRQVVAVTGDGTNDGPALKKADVGFAMGIAGTDVAKEASDIILTDDNFTSIVKAVMWGRNVYDSISKFLQFQLTVNVVAVIVAFTGACITQDSPLKAVQMLWVNLIMDTFASLALATEPPTESLLLRKPYGRDKPLISRTMMKNILGHAVYQLAIIFTLLFVGELFFDIDSGRNAPLHSPPSEHYTIIFNTFVMMQLFNEINARKIHGERNVFDGIFSNPIFCTIVLGTFGIQIVIVQFGGKPFSCSPLSTEQWLWCLFVGVGELVWGQVIATIPTSQLKCLKEAGHGPGKDEMTDEELAEGEEEIDHAERELRRGQILWFRGLNRIQTQMEVVSTFKRSGSVQGAVRRRSSVLSQLHDVTNLSTPTHAILSAANPTSAAGSES

SEQ ID NO: 7264 - protein, 1170 aa, Homo sapiens
  Payload ID: 1547;
  Gene Symbol: ATP2B4;
  Gene Name: ATPase, Ca++ transporting, plasma membrane 4;
  Uniprot ID:  P23634;
  ENSP ID: ENSP00000340930
MTNPSDRVLPANSMAESREGDFGCTVMELRKLMELRSRDALTQINVHYGGVQNLCSRLKTSPVEGLSGNPADLEKRRQVFGHNVIPPKKPKTFLELVWEALQDVTLIILEIAAIISLVLSFYRPAGEENELCGQVATTPEDENEAQAGWIEGAAILFSVIIVVLVTAFNDWSKEKQFRGLQCRIEQEQKFSIIRNGQLIQLPVAEIVVGDIAQVKYGDLLPADGILIQGNDLKIDESSLTGESDHVKKSLDKDPMLLSGTHVMEGSGRMVVTAVGVNSQTGIILTLLGVNEDDEGEKKKKGKKQGVPENRNKAKTQDGVALEIQPLNSQEGIDNEEKDKKAVKVPKKEKSVLQGKLTRLAVQIGKAGLLMSALTVFILILYFVIDNFVINRRPWLPECTPIYIQYFVKFFIIGITVLVVAVPEGLPLAVTISLAYSVKKMMKDNNLVRHLDACETMGNATAICSDKTGTLTMNRMTVVQAYIGGIHYRQIPSPDVFLPKVLDLIVNGISINSAYTSKILPPEKEGGLPRQVGNKTECALLGFVTDLKQDYQAVRNEVPEEKLYKVYTFNSVRKSMSTVIRNPNGGFRMYSKGASEIILRKCNRILDRKGEAVPFKNKDRDDMVRTVIEPMACDGLRTICIAYRDFDDTEPSWDNENEILTELTCIAVVGIEDPVRPEVPDAIAKCKQAGITVRMVTGDNINTARAIATKCGILTPGDDFLCLEGKEFNRLIRNEKGEVEQEKLDKIWPKLRVLARSSPTDKHTLVKGIIDSTVGEHRQVVAVTGDGTNDGPALKKADVGFAMGIAGTDVAKEASDIILTDDNFTSIVKAVMWGRNVYDSISKFLQFQLTVNVVAVIVAFTGACITQDSPLKAVQMLWVNLIMDTFASLALATEPPTESLLKRRPYGRNKPLISRTMMKNILGHAFYQLIVIFILVFAGEKFFDIDSGRKAPLHSPPSQHYTIVFNTFVLMQLFNEINSRKIHGEKNVFSGIYRNIIFCSVVLGTFICQIFIVEFGGKPFSCTSLSLSQWLWCLFIGIGELLWGQFISAIPTRSLKFLKEAGHGTTKEEITKDAEGLDEIDHAEMELRRGQILWFRGLNRIQTQIDVINTFQTGASFKGVLRRQNMGQHLDVKLVPSSSYVAVAPVKSSPTTSVPAVSSPPMGNQSGQSVP

SEQ ID NO: 7265 - protein, 129 aa, Homo sapiens
  Payload ID: 1547;
  Gene Symbol: ATP2B4;
  Gene Name: ATPase, Ca++ transporting, plasma membrane 4;
  ENSP ID: ENSP00000349165
  MOD_RES (1)..(1): Any amino acid
XIGELLWGQFISAIPTRSLKFLKEAGHGTTKEEITKDAEGLDEIDHAEMELRRGQILWFRGLNRIQTQIDVINTFQTGASFKGVLRRQNMGQHLDVKLVPSSSYVAVAPVKSSPTTSVPAVSSPPMGSE

SEQ ID NO: 7266 - protein, 1205 aa, Homo sapiens
  Payload ID: 1547;
  Gene Symbol: ATP2B4;
  Gene Name: ATPase, Ca++ transporting, plasma membrane 4;
  Uniprot ID:  P23634;
  ENSP ID: ENSP00000350310
MTNPSDRVLPANSMAESREGDFGCTVMELRKLMELRSRDALTQINVHYGGVQNLCSRLKTSPVEGLSGNPADLEKRRQVFGHNVIPPKKPKTFLELVWEALQDVTLIILEIAAIISLVLSFYRPAGEENELCGQVATTPEDENEAQAGWIEGAAILFSVIIVVLVTAFNDWSKEKQFRGLQCRIEQEQKFSIIRNGQLIQLPVAEIVVGDIAQVKYGDLLPADGILIQGNDLKIDESSLTGESDHVKKSLDKDPMLLSGTHVMEGSGRMVVTAVGVNSQTGIILTLLGVNEDDEGEKKKKGKKQGVPENRNKAKTQDGVALEIQPLNSQEGIDNEEKDKKAVKVPKKEKSVLQGKLTRLAVQIGKAGLLMSALTVFILILYFVIDNFVINRRPWLPECTPIYIQYFVKFFIIGITVLVVAVPEGLPLAVTISLAYSVKKMMKDNNLVRHLDACETMGNATAICSDKTGTLTMNRMTVVQAYIGGIHYRQIPSPDVFLPKVLDLIVNGISINSAYTSKILPPEKEGGLPRQVGNKTECALLGFVTDLKQDYQAVRNEVPEEKLYKVYTFNSVRKSMSTVIRNPNGGFRMYSKGASEIILRKCNRILDRKGEAVPFKNKDRDDMVRTVIEPMACDGLRTICIAYRDFDDTEPSWDNENEILTELTCIAVVGIEDPVRPEVPDAIAKCKQAGITVRMVTGDNINTARAIATKCGILTPGDDFLCLEGKEFNRLIRNEKGEVEQEKLDKIWPKLRVLARSSPTDKHTLVKGIIDSTVGEHRQVVAVTGDGTNDGPALKKADVGFAMGIAGTDVAKEASDIILTDDNFTSIVKAVMWGRNVYDSISKFLQFQLTVNVVAVIVAFTGACITQDSPLKAVQMLWVNLIMDTFASLALATEPPTESLLKRRPYGRNKPLISRTMMKNILGHAFYQLIVIFILVFAGEKFFDIDSGRKAPLHSPPSQHYTIVFNTFVLMQLFNEINSRKIHGEKNVFSGIYRNIIFCSVVLGTFICQIFIVEFGGKPFSCTSLSLSQWLWCLFIGIGELLWGQFISAIPTRSLKFLKEAGHGTTKEEITKDAEGLDEIDHAEMELRRGQILWFRGLNRIQTQIKVVKAFHSSLHESIQKPYNQKSIHSFMTHPEFAIEEELPRTPLLDEEEEENPDKASKFGTRVLLLDGEVTPYANTNNNAVDCNQVQLPQSDSSLQSLETSV

SEQ ID NO: 7267 - protein, 1170 aa, Homo sapiens; identical to SEQ ID NO: 7264
  Payload ID: 1547;
  Gene Symbol: ATP2B4;
  Gene Name: ATPase, Ca++ transporting, plasma membrane 4;
  Uniprot ID:  P23634;
  ENSP ID: ENSP00000356187

SEQ ID NO: 7268 - protein, 117 aa, Homo sapiens
  Payload ID: 1547;
  Gene Symbol: ATP2B4;
  Gene Name: ATPase, Ca++ transporting, plasma membrane 4;
  ENSP ID: ENSP00000391150
  MOD_RES (1)..(1): Any amino acid
XGGKPFSCTSLSLSQWLWCLFIGIGELLWGQFISAIPTRSLKFLKEAGHGTTKEEITKDAEGLDEIDHAEMELRRGQILWFRGLNRIQTQHLLQDSDLLPDKEEAIISSSLFPSCNF

SEQ ID NO: 7269 - protein, 102 aa, Homo sapiens
  Payload ID: 1547;
  Gene Symbol: ATP2B4;
  Gene Name: ATPase, Ca++ transporting, plasma membrane 4;
  ENSP ID: ENSP00000433577
  MOD_RES (1)..(1): Any amino acid
XTKDAEGLDEIDHAEMELRRGQILWFRGLNRIQTQIDVINTFQTGASFKGVLRRQNMGQHLDVKLVPSSSYVAVAPVKSSPTTSVPAVSSPPMGNQSGQSVP

SEQ ID NO: 7270 - protein, 888 aa, Homo sapiens
  Payload ID: 1548;
  Gene Symbol: ATP2C1;
  Gene Name: ATPase, Ca++ transporting, type 2C, member 1;
  Uniprot ID:  P98194;
  ENSP ID: ENSP00000329664
MKVARFQKIPNGENETMIPVLTSKKASELPVSEVASILQADLQNGLNKCEVSHRRAFHGWNEFDISEDEPLWKKYISQFKNPLIMLLLASAVISVLMHQFDDAVSITVAILIVVTVAFVQEYRSEKSLEELSKLVPPECHCVREGKLEHTLARDLVPGDTVCLSVGDRVPADLRLFEAVDLSIDESSLTGETTPCSKVTAPQPAATNGDLASRSNIAFMGTLVRCGKAKGVVIGTGENSEFGEVFKMMQAEEAPKTPLQKSMDLLGKQLSFYSFGIIGIIMLVGWLLGKDILEMFTISVSLAVAAIPEGLPIVVTVTLALGVMRMVKKRAIVKKLPIVETLGCCNVICSDKTGTLTKNEMTVTHIFTSDGLHAEVTGVGYNQFGEVIVDGDVVHGFYNPAVSRIVEAGCVCNDAVIRNNTLMGKPTEGALIALAMKMGLDGLQQDYIRKAEYPFSSEQKWMAVKCVHRTQQDRPEICFMKGAYEQVIKYCTTYQSKGQTLTLTQQQRDVYQQEKARMGSAGLRVLALASGPELGQLTFLGLVGIIDPPRTGVKEAVTTLIASGVSIKMITGDSQETAVAIASRLGLYSKTSQSVSGEEIDAMDVQQLSQIVPKVAVFYRASPRHKMKIIKSLQKNGSVVAMTGDGVNDAVALKAADIGVAMGQTGTDVCKEAADMILVDDDFQTIMSAIEEGKGIYNNIKNFVRFQLSTSIAALTLISLATLMNFPNPLNAMQILWINIIMDGPPAQSLGVEPVDKDVIRKPPRNWKDSILTKNLILKILVSSIIIVCGTLFVFWRELRDNVITPRDTTMTFTCFVFFDMFNALSSRSQTKSVFEIGLCSNRMFCYAVLGSIMGQLLVIYFPPLQKVFQTESLSILGLALGEEWTAAG

SEQ ID NO: 7271 - protein, 949 aa, Homo sapiens
  Payload ID: 1548;
  Gene Symbol: ATP2C1;
  Gene Name: ATPase, Ca++ transporting, type 2C, member 1;
  Uniprot ID:  P98194;
  ENSP ID: ENSP00000352665
MKVARFQKIPNGENETMIPVLTSKKASELPVSEVASILQADLQNGLNKCEVSHRRAFHGWNEFDISEDEPLWKKYISQFKNPLIMLLLASAVISVLMHQFDDAVSITVAILIVVTVAFVQEYRSEKSLEELSKLVPPECHCVREGKLEHTLARDLVPGDTVCLSVGDRVPADLRLFEAVDLSIDESSLTGETTPCSKVTAPQPAATNGDLASRSNIAFMGTLVRCGKAKGVVIGTGENSEFGEVFKMMQAEEAPKTPLQKSMDLLGKQLSFYSFGIIGIIMLVGWLLGKDILEMFTISVSLAVAAIPEGLPIVVTVTLALGVMRMVKKRAIVKKLPIVETLGCCNVICSDKTGTLTKNEMTVTHIFTSDGLHAEVTGVGYNQFGEVIVDGDVVHGFYNPAVSRIVEAGCVCNDAVIRNNTLMGKPTEGALIALAMKMGLDGLQQDYIRKAEYPFSSEQKWMAVKCVHRTQQDRPEICFMKGAYEQVIKYCTTYQSKGQTLTLTQQQRDVYQQEKARMGSAGLRVLALASGPELGQLTFLGLVGIIDPPRTGVKEAVTTLIASGVSIKMITGDSQETAVAIASRLGLYSKTSQSVSGEEIDAMDVQQLSQIVPKVAVFYRASPRHKMKIIKSLQKNGSVVAMTGDGVNDAVALKAADIGVAMGQTGTDVCKEAADMILVDDDFQTIMSAIEEGKGIYNNIKNFVRFQLSTSIAALTLISLATLMNFPNPLNAMQILWINIIMDGPPAQSLGVEPVDKDVIRKPPRNWKDSILTKNLILKILVSSIIIVCGTLFVFWRELRDNVITPRDTTMTFTCFVFFDMFNALSSRSQTKSVFEIGLCSNRMFCYAVLGSIMGQLLVIYFPPLQKVFQTESLSILDLLFLLGLTSSVCIVAEIIKKVERSREKIQKHVSSTSSSFLEVWLWERSGQQLVEIHPHLETGLPLTEDVSCV

SEQ ID NO: 7272 - protein, 919 aa, Homo sapiens
  Payload ID: 1548;
  Gene Symbol: ATP2C1;
  Gene Name: ATPase, Ca++ transporting, type 2C, member 1;
  Uniprot ID:  P98194;
  ENSP ID: ENSP00000395809
MKVARFQKIPNGENETMIPVLTSKKASELPVSEVASILQADLQNGLNKCEVSHRRAFHGWNEFDISEDEPLWKKYISQFKNPLIMLLLASAVISVLMHQFDDAVSITVAILIVVTVAFVQEYRSEKSLEELSKLVPPECHCVREGKLEHTLARDLVPGDTVCLSVGDRVPADLRLFEAVDLSIDESSLTGETTPCSKVTAPQPAATNGDLASRSNIAFMGTLVRCGKAKGVVIGTGENSEFGEVFKMMQAEEAPKTPLQKSMDLLGKQLSFYSFGIIGIIMLVGWLLGKDILEMFTISVSLAVAAIPEGLPIVVTVTLALGVMRMVKKRAIVKKLPIVETLGCCNVICSDKTGTLTKNEMTVTHIFTSDGLHAEVTGVGYNQFGEVIVDGDVVHGFYNPAVSRIVEAGCVCNDAVIRNNTLMGKPTEGALIALAMKMGLDGLQQDYIRKAEYPFSSEQKWMAVKCVHRTQQDRPEICFMKGAYEQVIKYCTTYQSKGQTLTLTQQQRDVYQQEKARMGSAGLRVLALASGPELGQLTFLGLVGIIDPPRTGVKEAVTTLIASGVSIKMITGDSQETAVAIASRLGLYSKTSQSVSGEEIDAMDVQQLSQIVPKVAVFYRASPRHKMKIIKSLQKNGSVVAMTGDGVNDAVALKAADIGVAMGQTGTDVCKEAADMILVDDDFQTIMSAIEEGKGIYNNIKNFVRFQLSTSIAALTLISLATLMNFPNPLNAMQILWINIIMDGPPAQSLGVEPVDKDVIRKPPRNWKDSILTKNLILKILVSSIIIVCGTLFVFWRELRDNVITPRDTTMTFTCFVFFDMFNALSSRSQTKSVFEIGLCSNRMFCYAVLGSIMGQLLVIYFPPLQKVFQTESLSILDLLFLLGLTSSVCIVAEIIKKVERSREKIQKHVSSTSSSFLEV

SEQ ID NO: 7273 - protein, 939 aa, Homo sapiens
  Payload ID: 1548;
  Gene Symbol: ATP2C1;
  Gene Name: ATPase, Ca++ transporting, type 2C, member 1;
  Uniprot ID:  P98194;
  ENSP ID: ENSP00000402677
MKVARFQKIPNGENETMIPVLTSKKASELPVSEVASILQADLQNGLNKCEVSHRRAFHGWNEFDISEDEPLWKKYISQFKNPLIMLLLASAVISVLMHQFDDAVSITVAILIVVTVAFVQEYRSEKSLEELSKLVPPECHCVREGKLEHTLARDLVPGDTVCLSVGDRVPADLRLFEAVDLSIDESSLTGETTPCSKVTAPQPAATNGDLASRSNIAFMGTLVRCGKAKGVVIGTGENSEFGEVFKMMQAEEAPKTPLQKSMDLLGKQLSFYSFGIIGIIMLVGWLLGKDILEMFTISVSLAVAAIPEGLPIVVTVTLALGVMRMVKKRAIVKKLPIVETLGCCNVICSDKTGTLTKNEMTVTHIFTSDGLHAEVTGVGYNQFGEVIVDGDVVHGFYNPAVSRIVEAGCVCNDAVIRNNTLMGKPTEGALIALAMKMGLDGLQQDYIRKAEYPFSSEQKWMAVKCVHRTQQDRPEICFMKGAYEQVIKYCTTYQSKGQTLTLTQQQRDVYQQEKARMGSAGLRVLALASGPELGQLTFLGLVGIIDPPRTGVKEAVTTLIASGVSIKMITGDSQETAVAIASRLGLYSKTSQSVSGEEIDAMDVQQLSQIVPKVAVFYRASPRHKMKIIKSLQKNGSVVAMTGDGVNDAVALKAADIGVAMGQTGTDVCKEAADMILVDDDFQTIMSAIEEGKGIYNNIKNFVRFQLSTSIAALTLISLATLMNFPNPLNAMQILWINIIMDGPPAQSLGVEPVDKDVIRKPPRNWKDSILTKNLILKILVSSIIIVCGTLFVFWRELRDNVITPRDTTMTFTCFVFFDMFNALSSRSQTKSVFEIGLCSNRMFCYAVLGSIMGQLLVIYFPPLQKVFQTESLSILDLLFLLGLTSSVCIVAEIIKKVERSREKIQKHVWLWERSGQQLVEIHPHLETGLPLTEDVSCV

SEQ ID NO: 7274 - protein, 82 aa, Homo sapiens
  Payload ID: 1548;
  Gene Symbol: ATP2C1;
  Gene Name: ATPase, Ca++ transporting, type 2C, member 1;
  ENSP ID: ENSP00000421261
MIPVLTSKKASELPVSEVASILQADLQNGLNKCEVSHRRAFHGWNEFDISEDEPLWKKYISQFKNPLIMLLLASAVISVLMH

SEQ ID NO: 7275 - protein, 973 aa, Homo sapiens
  Payload ID: 1548;
  Gene Symbol: ATP2C1;
  Gene Name: ATPase, Ca++ transporting, type 2C, member 1;
  Uniprot ID:  P98194;
  ENSP ID: ENSP00000421326
MDSLLPPSRFSYFKKYPLHAIRRYLSTLRNQRAEEQVARFQKIPNGENETMIPVLTSKKASELPVSEVASILQADLQNGLNKCEVSHRRAFHGWNEFDISEDEPLWKKYISQFKNPLIMLLLASAVISVLMHQFDDAVSITVAILIVVTVAFVQEYRSEKSLEELSKLVPPECHCVREGKLEHTLARDLVPGDTVCLSVGDRVPADLRLFEAVDLSIDESSLTGETTPCSKVTAPQPAATNGDLASRSNIAFMGTLVRCGKAKGVVIGTGENSEFGEVFKMMQAEEAPKTPLQKSMDLLGKQLSFYSFGIIGIIMLVGWLLGKDILEMFTISVSLAVAAIPEGLPIVVTVTLALGVMRMVKKRAIVKKLPIVETLGCCNVICSDKTGTLTKNEMTVTHIFTSDGLHAEVTGVGYNQFGEVIVDGDVVHGFYNPAVSRIVEAGCVCNDAVIRNNTLMGKPTEGALIALAMKMGLDGLQQDYIRKAEYPFSSEQKWMAVKCVHRTQQDRPEICFMKGAYEQVIKYCTTYQSKGQTLTLTQQQRDVYQQEKARMGSAGLRVLALASGPELGQLTFLGLVGIIDPPRTGVKEAVTTLIASGVSIKMITGDSQETAVAIASRLGLYSKTSQSVSGEEIDAMDVQQLSQIVPKVAVFYRASPRHKMKIIKSLQKNGSVVAMTGDGVNDAVALKAADIGVAMGQTGTDVCKEAADMILVDDDFQTIMSAIEEGKGIYNNIKNFVRFQLSTSIAALTLISLATLMNFPNPLNAMQILWINIIMDGPPAQSLGVEPVDKDVIRKPPRNWKDSILTKNLILKILVSSIIIVCGTLFVFWRELRDNVITPRDTTMTFTCFVFFDMFNALSSRSQTKSVFEIGLCSNRMFCYAVLGSIMGQLLVIYFPPLQKVFQTESLSILDLLFLLGLTSSVCIVAEIIKKVERSREKIQKHVWLWERSGQQLVEIHPHLETGLPLTEDVSCV

SEQ ID NO: 7276 - protein, 215 aa, Homo sapiens
  Payload ID: 1548;
  Gene Symbol: ATP2C1;
  Gene Name: ATPase, Ca++ transporting, type 2C, member 1;
  ENSP ID: ENSP00000422489
VTVTLALGVMRMVKKRAIVKKLPIVETLGCCNVICSDKTGTLTKNEMTVTHIFTSDGLHAEVTGVGYNQFGEVIVDGDVVHGFYNPAVSRIVEAGCVCNDAVIRNNTLMGKPTEGALIALAMKMGLDGLQQDYIRKAEYPFSSEQKWMAVKCVHRTQQDRPEICFMKGAYEQVIKYCTTYQSKGQTLTLTQQQRDVYQQEKARMGSAGLRVYLVF

SEQ ID NO: 7277 - protein, 923 aa, Homo sapiens
  Payload ID: 1548;
  Gene Symbol: ATP2C1;
  Gene Name: ATPase, Ca++ transporting, type 2C, member 1;
  Uniprot ID:  P98194;
  ENSP ID: ENSP00000422872
MIPVLTSKKASELPVSEVASILQADLQNGLNKCEVSHRRAFHGWNEFDISEDEPLWKKYISQFKNPLIMLLLASAVISVLMHQFDDAVSITVAILIVVTVAFVQEYRSEKSLEELSKLVPPECHCVREGKLEHTLARDLVPGDTVCLSVGDRVPADLRLFEAVDLSIDESSLTGETTPCSKVTAPQPAATNGDLASRSNIAFMGTLVRCGKAKGVVIGTGENSEFGEVFKMMQAEEAPKTPLQKSMDLLGKQLSFYSFGIIGIIMLVGWLLGKDILEMFTISVSLAVAAIPEGLPIVVTVTLALGVMRMVKKRAIVKKLPIVETLGCCNVICSDKTGTLTKNEMTVTHIFTSDGLHAEVTGVGYNQFGEVIVDGDVVHGFYNPAVSRIVEAGCVCNDAVIRNNTLMGKPTEGALIALAMKMGLDGLQQDYIRKAEYPFSSEQKWMAVKCVHRTQQDRPEICFMKGAYEQVIKYCTTYQSKGQTLTLTQQQRDVYQQEKARMGSAGLRVLALASGPELGQLTFLGLVGIIDPPRTGVKEAVTTLIASGVSIKMITGDSQETAVAIASRLGLYSKTSQSVSGEEIDAMDVQQLSQIVPKVAVFYRASPRHKMKIIKSLQKNGSVVAMTGDGVNDAVALKAADIGVAMGQTGTDVCKEAADMILVDDDFQTIMSAIEEGKGIYNNIKNFVRFQLSTSIAALTLISLATLMNFPNPLNAMQILWINIIMDGPPAQSLGVEPVDKDVIRKPPRNWKDSILTKNLILKILVSSIIIVCGTLFVFWRELRDNVITPRDTTMTFTCFVFFDMFNALSSRSQTKSVFEIGLCSNRMFCYAVLGSIMGQLLVIYFPPLQKVFQTESLSILDLLFLLGLTSSVCIVAEIIKKVERSREKIQKHVWLWERSGQQLVEIHPHLETGLPLTEDVSCV

SEQ ID NO: 7278 - protein, 131 aa, Homo sapiens
  Payload ID: 1548;
  Gene Symbol: ATP2C1;
  Gene Name: ATPase, Ca++ transporting, type 2C, member 1;
  ENSP ID: ENSP00000422890
MDLLGKQLSFYSFGIIGIIMLVGWLLGKDILEMFTISVSLAVAAIPEGLPIVVTVTLALGVMRMVKKRAIVKKLPIVETLGCCNVICSDKTGTLTKNEMTVTHIFTSDGLHAEVTGVGYNQFGEVIVDGDV

SEQ ID NO: 7279 - protein, 903 aa, Homo sapiens
  Payload ID: 1548;
  Gene Symbol: ATP2C1;
  Gene Name: ATPase, Ca++ transporting, type 2C, member 1;
  Uniprot ID:  P98194;
  ENSP ID: ENSP00000423330
MIPVLTSKKASELPVSEVASILQADLQNGLNKCEVSHRRAFHGWNEFDISEDEPLWKKYISQFKNPLIMLLLASAVISVLMHQFDDAVSITVAILIVVTVAFVQEYRSEKSLEELSKLVPPECHCVREGKLEHTLARDLVPGDTVCLSVGDRVPADLRLFEAVDLSIDESSLTGETTPCSKVTAPQPAATNGDLASRSNIAFMGTLVRCGKAKGVVIGTGENSEFGEVFKMMQAEEAPKTPLQKSMDLLGKQLSFYSFGIIGIIMLVGWLLGKDILEMFTISVSLAVAAIPEGLPIVVTVTLALGVMRMVKKRAIVKKLPIVETLGCCNVICSDKTGTLTKNEMTVTHIFTSDGLHAEVTGVGYNQFGEVIVDGDVVHGFYNPAVSRIVEAGCVCNDAVIRNNTLMGKPTEGALIALAMKMGLDGLQQDYIRKAEYPFSSEQKWMAVKCVHRTQQDRPEICFMKGAYEQVIKYCTTYQSKGQTLTLTQQQRDVYQQEKARMGSAGLRVLALASGPELGQLTFLGLVGIIDPPRTGVKEAVTTLIASGVSIKMITGDSQETAVAIASRLGLYSKTSQSVSGEEIDAMDVQQLSQIVPKVAVFYRASPRHKMKIIKSLQKNGSVVAMTGDGVNDAVALKAADIGVAMGQTGTDVCKEAADMILVDDDFQTIMSAIEEGKGIYNNIKNFVRFQLSTSIAALTLISLATLMNFPNPLNAMQILWINIIMDGPPAQSLGVEPVDKDVIRKPPRNWKDSILTKNLILKILVSSIIIVCGTLFVFWRELRDNVITPRDTTMTFTCFVFFDMFNALSSRSQTKSVFEIGLCSNRMFCYAVLGSIMGQLLVIYFPPLQKVFQTESLSILDLLFLLGLTSSVCIVAEIIKKVERSREKIQKHVSSTSSSFLEV

SEQ ID NO: 7280 - protein, 953 aa, Homo sapiens
  Payload ID: 1548;
  Gene Symbol: ATP2C1;
  Gene Name: ATPase, Ca++ transporting, type 2C, member 1;
  ENSP ID: ENSP00000423774
MDSLLPPSRFSYFKKYPLHAIRRYLSTLRNQRAEEQVARFQKIPNGENETMIPVLTSKKASELPVSEVASILQADLQNGLNKCEVSHRRAFHGWNEFDISEDEPLWKKYISQFKNPLIMLLLASAVISVLMHQFDDAVSITVAILIVVTVAFVQEYRSEKSLEELSKLVPPECHCVREGKLEHTLARDLVPGDTVCLSVGDRVPADLRLFEAVDLSIDESSLTGETTPCSKVTAPQPAATNGDLASRSNIAFMGTLVRCGKAKGVVIGTGENSEFGEVFKMMQAEEAPKTPLQKSMDLLGKQLSFYSFGIIGIIMLVGWLLGKDILEMFTISVSLAVAAIPEGLPIVVTVTLALGVMRMVKKRAIVKKLPIVETLGCCNVICSDKTGTLTKNEMTVTHIFTSDGLHAEVTGVGYNQFGEVIVDGDVVHGFYNPAVSRIVEAGCVCNDAVIRNNTLMGKPTEGALIALAMKMGLDGLQQDYIRKAEYPFSSEQKWMAVKCVHRTQQDRPEICFMKGAYEQVIKYCTTYQSKGQTLTLTQQQRDVYQQEKARMGSAGLRVLALASGPELGQLTFLGLVGIIDPPRTGVKEAVTTLIASGVSIKMITGDSQETAVAIASRLGLYSKTSQSVSGEEIDAMDVQQLSQIVPKVAVFYRASPRHKMKIIKSLQKNGSVVAMTGDGVNDAVALKAADIGVAMGQTGTDVCKEAADMILVDDDFQTIMSAIEEGKGIYNNIKNFVRFQLSTSIAALTLISLATLMNFPNPLNAMQILWINIIMDGPPAQSLGVEPVDKDVIRKPPRNWKDSILTKNLILKILVSSIIIVCGTLFVFWRELRDNVITPRDTTMTFTCFVFFDMFNALSSRSQTKSVFEIGLCSNRMFCYAVLGSIMGQLLVIYFPPLQKVFQTESLSILDLLFLLGLTSSVCIVAEIIKKVERSREKIQKHVSSTSSSFLEV

SEQ ID NO: 7281 - protein, 919 aa, Homo sapiens; identical to SEQ ID NO: 7272
  Payload ID: 1548;
  Gene Symbol: ATP2C1;
  Gene Name: ATPase, Ca++ transporting, type 2C, member 1;
  Uniprot ID:  P98194;
  ENSP ID: ENSP00000424783

SEQ ID NO: 7282 - protein, 314 aa, Homo sapiens
  Payload ID: 1548;
  Gene Symbol: ATP2C1;
  Gene Name: ATPase, Ca++ transporting, type 2C, member 1;
  ENSP ID: ENSP00000424930
  MOD_RES (1)..(1): Any amino acid
XEGALIALAMKMGLDGLQQDYIRKAEYPFSSEQKWMAVKCVHRTQQDRPEICFMKGAYEQVIKYCTTYQSKGQTLTLTQQQRDVYQQEKARMGSAGLRASRLGLYSKTSQSVSGEEIDAMDVQQLSQIVPKVAVFYRASPRHKMKIIKSLQKNGSVVAMTGDGVNDAVALKAADIGVAMGQTGTDVCKEAADMILVDDDFQTIMSAIEEGKGIYNNIKNFVRFQLSTSIAALTLISLATLMNFPNPLNAMQILWINIIMDGPPAQSLGVEPVDKDVIRKPPRNWKDSILTKNLILKILVSSIIIVCGTLFVFWR

SEQ ID NO: 7283 - protein, 903 aa, Homo sapiens
  Payload ID: 1548;
  Gene Symbol: ATP2C1;
  Gene Name: ATPase, Ca++ transporting, type 2C, member 1;
  ENSP ID: ENSP00000425228
  MOD_RES (1)..(1): Any amino acid
XKCEVSHRRAFHGWNEFDISEDEPLWKKYISQFKNPLIMLLLASAVISVLMHQFDDAVSITVAILIVVTVAFVQEYRSEKSLEELSKLVPPECHCVREGKLEHTLARDLVPGDTVCLSVGDRVPADLRLFEAVDLSIDESSLTGETTPCSKVTAPQPAATNGDLASRSNIAFMGTLVRCGKAKGVVIGTGENSEFGEVFKMMQAEEAPKTPLQKSMDLLGKQLSFYSFGIIGIIMLVGWLLGKDILEMFTISVSLAVAAIPEGLPIVVTVTLALGVMRMVKKRAIVKKLPIVETLGCCNVICSDKTGTLTKNEMTVTHIFTSDGLHAEVTGVGYNQFGEVIVDGDVVHGFYNPAVSRIVEAGCVCNDAVIRNNTLMGKPTEGALIALAMKMGLDGLQQDYIRKAEYPFSSEQKWMAVKCVHRTQQDRPEICFMKGAYEQVIKYCTTYQSKGQTLTLTQQQRDVYQQEKARMGSAGLRVLALASGPELGQLTFLGLVGIIDPPRTGVKEAVTTLIASGVSIKMITGDSQETAVAIASRLGLYSKTSQSVSGEEIDAMDVQQLSQIVPKVAVFYRASPRHKMKIIKSLQKNGSVVAMTGDGVNDAVALKAADIGVAMGQTGTDVCKEAADMILVDDDFQTIMSAIEEGKGIYNNIKNFVRFQLSTSIAALTLISLATLMNFPNPLNAMQILWINIIMDGPPAQSLGVEPVDKDVIRKPPRNWKDSILTKNLILKILVSSIIIVCGTLFVFWRELRDNVITPRDTTMTFTCFVFFDMFNALSSRSQTKSVFEIGLCSNRMFCYAVLGSIMGQLLVIYFPPLQKVFQTESLSILDLLFLLGLTSSVCIVAEIIKKVERSREKIQKHVSSTSSSFLEVWLWERSGQQLVEIHPHLETGLPLTEDVSCV

SEQ ID NO: 7284 - protein, 944 aa, Homo sapiens
  Payload ID: 1548;
  Gene Symbol: ATP2C1;
  Gene Name: ATPase, Ca++ transporting, type 2C, member 1;
  Uniprot ID:  P98194;
  ENSP ID: ENSP00000425320
MDSLLPPSRFSYFKKYPLHAIRRYLSTLRNQRAEEQVARFQKIPNGENETMIPVLTSKKASELPVSEVASILQFKNPLIMLLLASAVISVLMHQFDDAVSITVAILIVVTVAFVQEYRSEKSLEELSKLVPPECHCVREGKLEHTLARDLVPGDTVCLSVGDRVPADLRLFEAVDLSIDESSLTGETTPCSKVTAPQPAATNGDLASRSNIAFMGTLVRCGKAKGVVIGTGENSEFGEVFKMMQAEEAPKTPLQKSMDLLGKQLSFYSFGIIGIIMLVGWLLGKDILEMFTISVSLAVAAIPEGLPIVVTVTLALGVMRMVKKRAIVKKLPIVETLGCCNVICSDKTGTLTKNEMTVTHIFTSDGLHAEVTGVGYNQFGEVIVDGDVVHGFYNPAVSRIVEAGCVCNDAVIRNNTLMGKPTEGALIALAMKMGLDGLQQDYIRKAEYPFSSEQKWMAVKCVHRTQQDRPEICFMKGAYEQVIKYCTTYQSKGQTLTLTQQQRDVYQQEKARMGSAGLRVLALASGPELGQLTFLGLVGIIDPPRTGVKEAVTTLIASGVSIKMITGDSQETAVAIASRLGLYSKTSQSVSGEEIDAMDVQQLSQIVPKVAVFYRASPRHKMKIIKSLQKNGSVVAMTGDGVNDAVALKAADIGVAMGQTGTDVCKEAADMILVDDDFQTIMSAIEEGKGIYNNIKNFVRFQLSTSIAALTLISLATLMNFPNPLNAMQILWINIIMDGPPAQSLGVEPVDKDVIRKPPRNWKDSILTKNLILKILVSSIIIVCGTLFVFWRELRDNVITPRDTTMTFTCFVFFDMFNALSSRSQTKSVFEIGLCSNRMFCYAVLGSIMGQLLVIYFPPLQKVFQTESLSILDLLFLLGLTSSVCIVAEIIKKVERSREKIQKHVSSTSSSFLEVWLWERSGQQLVEIHPHLETGLPLTEDVSCV

SEQ ID NO: 7285 - protein, 102 aa, Homo sapiens
  Payload ID: 1548;
  Gene Symbol: ATP2C1;
  Gene Name: ATPase, Ca++ transporting, type 2C, member 1;
  ENSP ID: ENSP00000426849
MKVARFQKIPNGENETMIPVLTSKKASELPVSEVASILQADLQNGLNKCEVSHRRAFHGWNEFDISEDEPLWKKYISQFKNPLIMLLLASAVISVLMHQFDD

SEQ ID NO: 7286 - protein, 50 aa, Homo sapiens
  Payload ID: 1548;
  Gene Symbol: ATP2C1;
  Gene Name: ATPase, Ca++ transporting, type 2C, member 1;
  ENSP ID: ENSP00000427087
LVDDDFQTIMSAIEEGKGIYNNIKNFVRFQLSTFCGSILLWMDPQLRALE

SEQ ID NO: 7287 - protein, 919 aa, Homo sapiens; identical to SEQ ID NO: 7272
  Payload ID: 1548;
  Gene Symbol: ATP2C1;
  Gene Name: ATPase, Ca++ transporting, type 2C, member 1;
  Uniprot ID:  P98194;
  ENSP ID: ENSP00000427461

SEQ ID NO: 7288 - protein, 120 aa, Homo sapiens
  Payload ID: 1548;
  Gene Symbol: ATP2C1;
  Gene Name: ATPase, Ca++ transporting, type 2C, member 1;
  ENSP ID: ENSP00000427625
MKVARFQKIPNGENETMIPVLTSKKASELPVSEVASILQADLQNGLNKCEVSHRRAFHGWNEFDISEDEPLWKKYISQFKNPLIMLLLASAVISVLMHQFDDAVSITVAILIVVTVAFVQ

SEQ ID NO: 7289 - protein, 888 aa, Homo sapiens; identical to SEQ ID NO: 7270
  Payload ID: 1548;
  Gene Symbol: ATP2C1;
  Gene Name: ATPase, Ca++ transporting, type 2C, member 1;
  Uniprot ID:  P98194;
  ENSP ID: ENSP00000432956

SEQ ID NO: 7290 - protein, 946 aa, Homo sapiens
  Payload ID: 1549;
  Gene Symbol: ATP2C2;
  Gene Name: ATPase, Ca++ transporting, type 2C, member 2;
  Uniprot ID:  O75185;
  ENSP ID: ENSP00000262429
MVEGRVSEFLKKLGFSGGGRQYQALEKDEEEALIDEQSELKAIEKEKKVTALPPKEACKCQKEDLARAFCVDLHTGLSEFSVTQRRLAHGWNEFVADNSEPVWKKYLDQFKNPLILLLLGSALVSVLTKEYEDAVSIATAVLVVVTVAFIQEYRSEKSLEELTKLVPPECNCLREGKLQHLLARELVPGDVVSLSIGDRIPADIRLTEVTDLLVDESSFTGEAEPCSKTDSPLTGGGDLTTLSNIVFMGTLVQYGRGQGVVIGTGESSQFGEVFKMMQAEETPKTPLQKSMDRLGKQLTLFSFGIIGLIMLIGWSQGKQLLSMFTIGVSLAVAAIPEGLPIVVMVTLVLGVLRMAKKRVIVKKLPIVETLGCCSVLCSDKTGTLTANEMTVTQLVTSDGLRAEVSGVGYDGQGTVCLLPSKEVIKEFSNVSVGKLVEAGCVANNAVIRKNAVMGQPTEGALMALAMKMDLSDIKNSYIRKKEIPFSSEQKWMAVKCSLKTEDQEDIYFMKGALEEVIRYCTMYNNGGIPLPLTPQQRSFCLQEEKRMGSLGLRVLALASGPELGRLTFLGLVGIIDPPRVGVKEAVQVLSESGVSVKMITGDALETALAIGRNIGLCNGKLQAMSGEEVDSVEKGELADRVGKVSVFFRTSPKHKLKIIKALQESGAIVAMTGDGVNDAVALKSADIGIAMGQTGTDVSKEAANMILVDDDFSAIMNAVEEGKGIFYNIKNFVRFQLSTSISALSLITLSTVFNLPSPLNAMQILWINIIMDGPPAQSLGVEPVDKDAFRQPPRSVRDTILSRALILKILMSAAIIISGTLFIFWKEMPEDRASTPRTTTMTFTCFVFFDLFNALTCRSQTKLIFEIGFLRNHMFLYSVLGSILGQLAVIYIPPLQRVFQTENLGALDLLFLTGLASSVFILSELLKLCEKYCCSPKRVQMHPEDV

SEQ ID NO: 7291 - protein, 975 aa, Homo sapiens
  Payload ID: 1549;
  Gene Symbol: ATP2C2;
  Gene Name: ATPase, Ca++ transporting, type 2C, member 2;
  ENSP ID: ENSP00000397925
MVEGRVSEFLKKLGFSGGGRQYQALEKDEEEALIDEQSELKAIEKEKKVTALPPKEACKCQKEDLARAFCVDLHTGLSEFSVTQRRLAHGWNEFVADNSEPVWKKYLDQFKNPLILLLLGSALVSVLTKEYEDAVSIATAVLVVVTVAFIQEYRSEKSLEELTKLVPPECNCLREGKLQHLLARELVPGDVVSLSIGDRIPADIRLTEVTDLLVDESSFTGEAEPCSKTDSPLTGGGDLTTLSNIVFMGTLVQYGRGQGVVIGTGESSQFGEVFKMMQAEETPKTPLQKSMDRLGKQLTLFSFGIIGLIMLIGWSQGKQLLSMFTIGVSLAVAAIPEGLPIVVMVTLVLGVLRMAKKRVIVKKLPIVETLGCCSVLCSDKTGTLTANEMTVTQLVTSDGLRAEVSGVGYDGQGTVCLLPSKEVIKEFSNVSVGKLVEAGCVANNAVIRKNAVMGQPTEGALMALAMKMDLSDIKNSYIRKKEIPFSSEQKWMAVKCSLKTEDQEDIYFMKGALEEVIRYCTMYNNGGIPLPLTPQQRSFCLQEEKRMGSLGLRVLALASGPELGRLTFLGLVGIIDPPRVGVKEAVQVLSESGVSVKMITGDALETALAIGRNIGLCNGKLQAMSGEEVDSVEKGELADRVGKVSVFFRTSPKHKLKIIKALQESGAIVAMTGDGVNDAVALKSADIGIAMGQTGTDVSKEAANMILVDDDFSAIMNAVEEGKGIFYNIKNFVRFQLSTSISALSLITLSTVFNLPSPLNAMQILWINIIMDGPPAQRSSQKTEVCCTAVRLGVEGRGESTWAGRAGLGVEPVDKDAFRQPPRSVRDTILSRALILKILMSAAIIISGTLFIFWKEMPEDRASTPRTTTMTFTCFVFFDLFNALTCRSQTKLIFEIGFLRNHMFLYSVLGSILGQLAVIYIPPLQRVFQTENLGALDLLFLTGLASSVFILSELLKLCEKYCCSPKRVQMHPEDV

SEQ ID NO: 7292 - protein, 53 aa, Homo sapiens
  Payload ID: 1549;
  Gene Symbol: ATP2C2;
  Gene Name: ATPase, Ca++ transporting, type 2C, member 2;
  ENSP ID: ENSP00000456595
  MOD_RES (1)..(1): Any amino acid
XVWKKYLDQFKNPLILLLLGSALVSVLTKEYEDAVSIATAVLVVVTVAFIQHI

SEQ ID NO: 7293 - protein, 1043 aa, Homo sapiens
  Payload ID: 1550;
  Gene Symbol: ATP2A3;
  Gene Name: ATPase, Ca++ transporting, ubiquitous;
  Uniprot ID:  Q93084;
  ENSP ID: ENSP00000301387
MEAAHLLPAADVLRHFSVTAEGGLSPAQVTGARERYGPNELPSEEGKSLWELVLEQFEDLLVRILLLAALVSFVLAWFEEGEETTTAFVEPLVIMLILVANAIVGVWQERNAESAIEALKEYEPEMGKVIRSDRKGVQRIRARDIVPGDIVEVAVGDKVPADLRLIEIKSTTLRVDQSILTGESVSVTKHTEAIPDPRAVNQDKKNMLFSGTNITSGKAVGVAVATGLHTELGKIRSQMAAVEPERTPLQRKLDEFGRQLSHAISVICVAVWVINIGHFADPAHGGSWLRGAVYYFKIAVALAVAAIPEGLPAVITTCLALGTRRMARKNAIVRSLPSVETLGCTSVICSDKTGTLTTNQMSVCRMFVVAEADAGSCLLHEFTISGTTYTPEGEVRQGDQPVRCGQFDGLVELATICALCNDSALDYNEAKGVYEKVGEATETALTCLVEKMNVFDTDLQALSRVERAGACNTVIKQLMRKEFTLEFSRDRKSMSVYCTPTRPHPTGQGSKMFVKGAPESVIERCSSVRVGSRTAPLTPTSREQILAKIRDWGSGSDTLRCLALATRDAPPRKEDMELDDCSKFVQYETDLTFVGCVGMLDPPRPEVAACITRCYQAGIRVVMITGDNKGTAVAICRRLGIFGDTEDVAGKAYTGREFDDLSPEQQRQACRTARCFARVEPAHKSRIVENLQSFNEITAMTGDGVNDAPALKKAEIGIAMGSGTAVAKSAAEMVLSDDNFASIVAAVEEGRAIYSNMKQFIRYLISSNVGEVVCIFLTAILGLPEALIPVQLLWVNLVTDGLPATALGFNPPDLDIMEKLPRSPREALISGWLFFRYLAIGVYVGLATVAAATWWFVYDAEGPHINFYQLRNFLKCSEDNPLFAGIDCEVFESRFPTTMALSVLVTIEMCNALNSVSENQSLLRMPPWMNPWLLVAVAMSMALHFLILLVPPLPLIFQVTPLSGRQWVVVLQISLPVILLDEALKYLSRNHMHACLYPGLLRTVSQAWSRQPLTTSWTPDHTGRNEPEVSAGNRVESPVCTSD

SEQ ID NO: 7294 - protein, 1029 aa, Homo sapiens
  Payload ID: 1550;
  Gene Symbol: ATP2A3;
  Gene Name: ATPase, Ca++ transporting, ubiquitous;
  Uniprot ID:  Q93084;
  ENSP ID: ENSP00000312577
MEAAHLLPAADVLRHFSVTAEGGLSPAQVTGARERYGPNELPSEEGKSLWELVLEQFEDLLVRILLLAALVSFVLAWFEEGEETTTAFVEPLVIMLILVANAIVGVWQERNAESAIEALKEYEPEMGKVIRSDRKGVQRIRARDIVPGDIVEVAVGDKVPADLRLIEIKSTTLRVDQSILTGESVSVTKHTEAIPDPRAVNQDKKNMLFSGTNITSGKAVGVAVATGLHTELGKIRSQMAAVEPERTPLQRKLDEFGRQLSHAISVICVAVWVINIGHFADPAHGGSWLRGAVYYFKIAVALAVAAIPEGLPAVITTCLALGTRRMARKNAIVRSLPSVETLGCTSVICSDKTGTLTTNQMSVCRMFVVAEADAGSCLLHEFTISGTTYTPEGEVRQGDQPVRCGQFDGLVELATICALCNDSALDYNEAKGVYEKVGEATETALTCLVEKMNVFDTDLQALSRVERAGACNTVIKQLMRKEFTLEFSRDRKSMSVYCTPTRPHPTGQGSKMFVKGAPESVIERCSSVRVGSRTAPLTPTSREQILAKIRDWGSGSDTLRCLALATRDAPPRKEDMELDDCSKFVQYETDLTFVGCVGMLDPPRPEVAACITRCYQAGIRVVMITGDNKGTAVAICRRLGIFGDTEDVAGKAYTGREFDDLSPEQQRQACRTARCFARVEPAHKSRIVENLQSFNEITAMTGDGVNDAPALKKAEIGIAMGSGTAVAKSAAEMVLSDDNFASIVAAVEEGRAIYSNMKQFIRYLISSNVGEVVCIFLTAILGLPEALIPVQLLWVNLVTDGLPATALGFNPPDLDIMEKLPRSPREALISGWLFFRYLAIGVYVGLATVAAATWWFVYDAEGPHINFYQLRNFLKCSEDNPLFAGIDCEVFESRFPTTMALSVLVTIEMCNALNSVSENQSLLRMPPWMNPWLLVAVAMSMALHFLILLVPPLPLIFQVTPLSGRQWVVVLQISLPVILLDEALKYLSRNHMHACLYPGLLRTVSQAWSRQPLTTSWTPDHTGLASLKK

SEQ ID NO: 7295 - protein, 1052 aa, Homo sapiens
  Payload ID: 1550;
  Gene Symbol: ATP2A3;
  Gene Name: ATPase, Ca++ transporting, ubiquitous;
  Uniprot ID:  Q93084;
  ENSP ID: ENSP00000353072
MEAAHLLPAADVLRHFSVTAEGGLSPAQVTGARERYGPNELPSEEGKSLWELVLEQFEDLLVRILLLAALVSFVLAWFEEGEETTTAFVEPLVIMLILVANAIVGVWQERNAESAIEALKEYEPEMGKVIRSDRKGVQRIRARDIVPGDIVEVAVGDKVPADLRLIEIKSTTLRVDQSILTGESVSVTKHTEAIPDPRAVNQDKKNMLFSGTNITSGKAVGVAVATGLHTELGKIRSQMAAVEPERTPLQRKLDEFGRQLSHAISVICVAVWVINIGHFADPAHGGSWLRGAVYYFKIAVALAVAAIPEGLPAVITTCLALGTRRMARKNAIVRSLPSVETLGCTSVICSDKTGTLTTNQMSVCRMFVVAEADAGSCLLHEFTISGTTYTPEGEVRQGDQPVRCGQFDGLVELATICALCNDSALDYNEAKGVYEKVGEATETALTCLVEKMNVFDTDLQALSRVERAGACNTVIKQLMRKEFTLEFSRDRKSMSVYCTPTRPHPTGQGSKMFVKGAPESVIERCSSVRVGSRTAPLTPTSREQILAKIRDWGSGSDTLRCLALATRDAPPRKEDMELDDCSKFVQYETDLTFVGCVGMLDPPRPEVAACITRCYQAGIRVVMITGDNKGTAVAICRRLGIFGDTEDVAGKAYTGREFDDLSPEQQRQACRTARCFARVEPAHKSRIVENLQSFNEITAMTGDGVNDAPALKKAEIGIAMGSGTAVAKSAAEMVLSDDNFASIVAAVEEGRAIYSNMKQFIRYLISSNVGEVVCIFLTAILGLPEALIPVQLLWVNLVTDGLPATALGFNPPDLDIMEKLPRSPREALISGWLFFRYLAIGVYVGLATVAAATWWFVYDAEGPHINFYQLRNFLKCSEDNPLFAGIDCEVFESRFPTTMALSVLVTIEMCNALNSVSENQSLLRMPPWMNPWLLVAVAMSMALHFLILLVPPLPLIFQVTPLSGRQWVVVLQISLPVILLDEALKYLSRNHMHACLYPGLLRTVSQAWSRQPLTTSWTPDHTGLASLGQGHSIVSLSELLREGGSREEMSQK

SEQ ID NO: 7296 - protein, 1029 aa, Homo sapiens; identical to SEQ ID NO: 7294
  Payload ID: 1550;
  Gene Symbol: ATP2A3;
  Gene Name: ATPase, Ca++ transporting, ubiquitous;
  Uniprot ID:  Q93084;
  ENSP ID: ENSP00000380229

SEQ ID NO: 7297 - protein, 999 aa, Homo sapiens
  Payload ID: 1550;
  Gene Symbol: ATP2A3;
  Gene Name: ATPase, Ca++ transporting, ubiquitous;
  Uniprot ID:  Q93084;
  ENSP ID: ENSP00000380234
MEAAHLLPAADVLRHFSVTAEGGLSPAQVTGARERYGPNELPSEEGKSLWELVLEQFEDLLVRILLLAALVSFVLAWFEEGEETTTAFVEPLVIMLILVANAIVGVWQERNAESAIEALKEYEPEMGKVIRSDRKGVQRIRARDIVPGDIVEVAVGDKVPADLRLIEIKSTTLRVDQSILTGESVSVTKHTEAIPDPRAVNQDKKNMLFSGTNITSGKAVGVAVATGLHTELGKIRSQMAAVEPERTPLQRKLDEFGRQLSHAISVICVAVWVINIGHFADPAHGGSWLRGAVYYFKIAVALAVAAIPEGLPAVITTCLALGTRRMARKNAIVRSLPSVETLGCTSVICSDKTGTLTTNQMSVCRMFVVAEADAGSCLLHEFTISGTTYTPEGEVRQGDQPVRCGQFDGLVELATICALCNDSALDYNEAKGVYEKVGEATETALTCLVEKMNVFDTDLQALSRVERAGACNTVIKQLMRKEFTLEFSRDRKSMSVYCTPTRPHPTGQGSKMFVKGAPESVIERCSSVRVGSRTAPLTPTSREQILAKIRDWGSGSDTLRCLALATRDAPPRKEDMELDDCSKFVQYETDLTFVGCVGMLDPPRPEVAACITRCYQAGIRVVMITGDNKGTAVAICRRLGIFGDTEDVAGKAYTGREFDDLSPEQQRQACRTARCFARVEPAHKSRIVENLQSFNEITAMTGDGVNDAPALKKAEIGIAMGSGTAVAKSAAEMVLSDDNFASIVAAVEEGRAIYSNMKQFIRYLISSNVGEVVCIFLTAILGLPEALIPVQLLWVNLVTDGLPATALGFNPPDLDIMEKLPRSPREALISGWLFFRYLAIGVYVGLATVAAATWWFVYDAEGPHINFYQLRNFLKCSEDNPLFAGIDCEVFESRFPTTMALSVLVTIEMCNALNSVSENQSLLRMPPWMNPWLLVAVAMSMALHFLILLVPPLPLIFQVTPLSGRQWVVVLQISLPVILLDEALKYLSRNHMHEEMSQK

SEQ ID NO: 7298 - protein, 998 aa, Homo sapiens
  Payload ID: 1550;
  Gene Symbol: ATP2A3;
  Gene Name: ATPase, Ca++ transporting, ubiquitous;
  Uniprot ID:  Q93084;
  ENSP ID: ENSP00000380236
MEAAHLLPAADVLRHFSVTAEGGLSPAQVTGARERYGPNELPSEEGKSLWELVLEQFEDLLVRILLLAALVSFVLAWFEEGEETTTAFVEPLVIMLILVANAIVGVWQERNAESAIEALKEYEPEMGKVIRSDRKGVQRIRARDIVPGDIVEVAVGDKVPADLRLIEIKSTTLRVDQSILTGESVSVTKHTEAIPDPRAVNQDKKNMLFSGTNITSGKAVGVAVATGLHTELGKIRSQMAAVEPERTPLQRKLDEFGRQLSHAISVICVAVWVINIGHFADPAHGGSWLRGAVYYFKIAVALAVAAIPEGLPAVITTCLALGTRRMARKNAIVRSLPSVETLGCTSVICSDKTGTLTTNQMSVCRMFVVAEADAGSCLLHEFTISGTTYTPEGEVRQGDQPVRCGQFDGLVELATICALCNDSALDYNEAKGVYEKVGEATETALTCLVEKMNVFDTDLQALSRVERAGACNTVIKQLMRKEFTLEFSRDRKSMSVYCTPTRPHPTGQGSKMFVKGAPESVIERCSSVRVGSRTAPLTPTSREQILAKIRDWGSGSDTLRCLALATRDAPPRKEDMELDDCSKFVQYETDLTFVGCVGMLDPPRPEVAACITRCYQAGIRVVMITGDNKGTAVAICRRLGIFGDTEDVAGKAYTGREFDDLSPEQQRQACRTARCFARVEPAHKSRIVENLQSFNEITAMTGDGVNDAPALKKAEIGIAMGSGTAVAKSAAEMVLSDDNFASIVAAVEEGRAIYSNMKQFIRYLISSNVGEVVCIFLTAILGLPEALIPVQLLWVNLVTDGLPATALGFNPPDLDIMEKLPRSPREALISGWLFFRYLAIGVYVGLATVAAATWWFVYDAEGPHINFYQLRNFLKCSEDNPLFAGIDCEVFESRFPTTMALSVLVTIEMCNALNSVSENQSLLRMPPWMNPWLLVAVAMSMALHFLILLVPPLPLIFQVTPLSGRQWVVVLQISLPVILLDEALKYLSRNHMHEMSQK

SEQ ID NO: 7299 - protein, 142 aa, Homo sapiens
  Payload ID: 1550;
  Gene Symbol: ATP2A3;
  Gene Name: ATPase, Ca++ transporting, ubiquitous;
  ENSP ID: ENSP00000458865
ESRFPTTMALSVLVTIEMCNALNSVSENQSLLRMPPWMNPWLLVAVAMSMALHFLILLVPPLPLIFQVTPLSGRQWVVVLQISLPVILLDEALKYLSRNHMHGPGTQHRLAVRAAQRGRKQGRNEPEVSAGNRVESPVCTSD

SEQ ID NO: 7300 - protein, 153 aa, Homo sapiens
  Payload ID: 1550;
  Gene Symbol: ATP2A3;
  Gene Name: ATPase, Ca++ transporting, ubiquitous;
  ENSP ID: ENSP00000461480
ESRFPTTMALSVLVTIEMCNALNSVSENQSLLRMPPWMNPWLLVAVAMSMALHFLILLVPPLPLIFQVTPLSGRQWVVVLQISLPVILLDEALKYLSRNHMHACLYPGLLRTVSQAWSRQPLTTSWTPDHTGARDTASSRCQSCSEREEAGKK

SEQ ID NO: 7301 - protein, 1192 aa, Homo sapiens
  Payload ID: 1551;
  Gene Symbol: ATP8B4;
  Gene Name: ATPase, class I, type 8B, member 4;
  Uniprot ID:  Q8TF62;
  ENSP ID: ENSP00000284509
MFCSEKKLREVERIVKANDREYNEKFQYADNRIHTSKYNILTFLPINLFEQFQRVANAYFLCLLILQLIPEISSLTWFTTIVPLVLVITMTAVKDATDDYFRHKSDNQVNNRQSEVLINSKLQNEKWMNVKVGDIIKLENNQFVAADLLLLSSSEPHGLCYVETAELDGETNLKVRHALSVTSELGADISRLAGFDGIVVCEVPNNKLDKFMGILSWKDSKHSLNNEKIILRGCILRNTSWCFGMVIFAGPDTKLMQNSGKTKFKRTSIDRLMNTLVLWIFGFLICLGIILAIGNSIWESQTGDQFRTFLFWNEGEKSSVFSGFLTFWSYIIILNTVVPISLYVSVEVIRLGHSYFINWDRKMYYSRKAIPAVARTTTLNEELGQIEYIFSDKTGTLTQNIMTFKRCSINGRIYGEVHDDLDQKTEITQEKEPVDFSVKSQADREFQFFDHHLMESIKMGDPKVHEFLRLLALCHTVMSEENSAGELIYQVQSPDEGALVTAARNFGFIFKSRTPETITIEELGTLVTYQLLAFLDFNNTRKRMSVIVRNPEGQIKLYSKGADTILFEKLHPSNEVLLSLTSDHLSEFAGEGLRTLAIAYRDLDDKYFKEWHKMLEDANAATEERDERIAGLYEEIERDLMLLGATAVEDKLQEGVIETVTSLSLANIKIWVLTGDKQETAINIGYACNMLTDDMNDVFVIAGNNAVEVREELRKAKQNLFGQNRNFSNGHVVCEKKQQLELDSIVEETITGDYALIINGHSLAHALESDVKNDLLELACMCKTVICCRVTPLQKAQVVELVKKYRNAVTLAIGDGANDVSMIKSAHIGVGISGQEGLQAVLASDYSFAQFRYLQRLLLVHGRWSYFRMCKFLCYFFYKNFAFTLVHFWFGFFCGFSAQTVYDQWFITLFNIVYTSLPVLAMGIFDQDVSDQNSVDCPQLYKPGQLNLLFNKRKFFICVLHGIYTSLVLFFIPYGAFYNVAGEDGQHIADYQSFAVTMATSLVIVVSVQIALDTSYWTFINHVFIWGSIAIYFSILFTMHSNGIFGIFPNQFPFVGNARHSLTQKCIWLVILLTTVASVMPVVAFRFLKVDLYPTLSDQIRRWQKAQKKARPPSSRRPRTRRSSSRRSGYAFAHQEGYGELITSGKNMRAKNPPPTSGLEKTHYNSTSWIENLCKKTTDTVSSFSQDKTVKL

SEQ ID NO: 7302 - protein, 122 aa, Homo sapiens
  Payload ID: 1551;
  Gene Symbol: ATP8B4;
  Gene Name: ATPase, class I, type 8B, member 4;
  ENSP ID: ENSP00000452956
MFCSEKKLREVERIVKANDREYNEKFQYADNRIHTSKYNILTFLPINLFEQFQRVANAYFLCLLILQLIPEISSLTWFTTIVPLVLVITMTAVKDATDDYFRHKSDNQVNNRQSEVLINSKC

SEQ ID NO: 7303 - protein, 95 aa, Homo sapiens
  Payload ID: 1551;
  Gene Symbol: ATP8B4;
  Gene Name: ATPase, class I, type 8B, member 4;
  ENSP ID: ENSP00000453143
  MOD_RES (1)..(1): Any amino acid
XANAYFLCLLILQLIPEISSLTWFTTIVPLVLVITMTAVKDATDDYFRHKSDNQVNNRQSEVLINSKLQNEKWMNVKVGDIIKLENNQFVALIKD

SEQ ID NO: 7304 - protein, 1192 aa, Homo sapiens; identical to SEQ ID NO: 7301
  Payload ID: 1551;
  Gene Symbol: ATP8B4;
  Gene Name: ATPase, class I, type 8B, member 4;
  Uniprot ID:  Q8TF62;
  ENSP ID: ENSP00000453169

SEQ ID NO: 7305 - protein, 122 aa, Homo sapiens; identical to SEQ ID NO: 7302
  Payload ID: 1551;
  Gene Symbol: ATP8B4;
  Gene Name: ATPase, class I, type 8B, member 4;
  ENSP ID: ENSP00000453229

SEQ ID NO: 7306 - protein, 84 aa, Homo sapiens
  Payload ID: 1551;
  Gene Symbol: ATP8B4;
  Gene Name: ATPase, class I, type 8B, member 4;
  ENSP ID: ENSP00000453482
  MOD_RES (1)..(1): Any amino acid
XFKSRTPETITIEELGTLVTYQLLAFLDFNNTRKRMSVIVRNPEGQIKLYSKGADTILFEKLHPSNEVLLSLTSDHLSEASMVF

SEQ ID NO: 7307 - protein, 53 aa, Homo sapiens
  Payload ID: 1551;
  Gene Symbol: ATP8B4;
  Gene Name: ATPase, class I, type 8B, member 4;
  ENSP ID: ENSP00000453539
MFCSEKKLREVERIVKANDREYNEKFQYADNRIHTSKYNILTFLPINLFEQFQ

SEQ ID NO: 7308 - protein, 717 aa, Homo sapiens
  Payload ID: 1551;
  Gene Symbol: ATP8B4;
  Gene Name: ATPase, class I, type 8B, member 4;
  ENSP ID: ENSP00000453690
MFCSEKKLREVERIVKANDREYNEKFQYADNRIHTSKYNILTFLPINLFEQFQRVANAYFLCLLILQLIPEISSLTWFTTIVPLVLVITMTAVKDATDDYFRHKSDNQVNNRQSEVLINSKLQNEKWMNVKVGDIIKLENNQFVAADLLLLSSSEPHGLCYVETAELDGETNLKVRHALSVTSELGADISRLAGFDGIVVCEVPNNKLDKFMGILSWKDSKHSLNNEKIILRGCILRNTSWCFGMVIFAGPDTKLMQNSGKTKFKRTSIDRLMNTLVLWIFGFLICLGIILAIGNSIWESQTGDQFRTFLFWNEGEKSSVFSGFLTFWSYIIILNTVVPISLYVSVEVIRLGHSYFINWDRKMYYSRKAIPAVARTTTLNEELGQIEYIFSDKTGTLTQNIMTFKRCSINGRIYGEVHDDLDQKTEITQEKEPVDFSVKSQADREFQFFDHHLMESIKMGDPKVHEFLRLLALCHTVMSEENSAGELIYQVQSPDEGALVTAARNFGFIFKSRTPETITIEELGTLVTYQLLAFLDFNNTRKRMSVIVRNPEGQIKLYSKGADTILFEKLHPSNEVLLSLTSDHLSEFAGEGLRTLAIAYRDLDDKYFKEWHKMLEDANAATEERDERIAGLYEEIERDLMLLGATAVEDKLQEGVIETVTSLSLANIKIWVLTGDKQETAINIGYACNMLTDDMNDVFVIAGNNAVEVREELRLMP

SEQ ID NO: 7309 - protein, 911 aa, Homo sapiens
  Payload ID: 1552;
  Gene Symbol: ATP9A;
  Gene Name: ATPase, class II, type 9A;
  ENSP ID: ENSP00000309086
MDSRPRAGCCEWLRCCGGGEARPRTVWLGHPEKRDQRYPRNVINNQKYNFFTFLPGVLFNQFKYFFNLYFLLLACSQFVPEMRLGALYTYWVPLGFVLAVTVIREAVEEIRCYVRDKEVNSQVYSRLTARGTVVGVVLYTGRELRSVMNTSNPRSKIGLFDLEVNCLTKILFGALVVVSLVMVALQHFAGRWYLQIIRFLLLFSNIIPISLRVNLDMGKIVYSWVIRRDSKIPGTVVRSSTIPEQLGRISYLLTDKTGTLTQNEMIFKRLHLGTVAYGLDSMDEVQSHIFSIYTQQSQDPPAQKGPTLTTKVRRTMSSRVHEAVKAIALCHNVTPVYESNGVTDQAEAEKQYEDSCRVYQASSPDEVALVQWTESVGLTLVGRDQSSMQLRTPGDQILNFTILQIFPFTYESKRMGIIVRDESTGEITFYMKGADVVMAGIVQYNDWLEEECGNMAREGLRVLVVAKKSLAEEQYQDFEARYVQAKLSVHDRSLKVATVIESLEMEMELLCLTGVEDQLQADVRPTLETLRNAGIKVWMLTGDKLETATCTAKNAHLVTRNQDIHVFRLVTNRGEAHLELNAFRRKHDCALVISGDSLEVCLKYYEYEFMELACQCPAVVCCRCAPTQKAQIVRLLQERTGKLTCAVGDGGNDVSMIQESDCGVGVEGKEGKQASLAADFSITQFKHLGRLLMVHGRNSYKRSAALSQFVIHRSLCISTMQAVFSSVFYFASVPLYQGFLIIGYSTIYTMFPVFSLVLDKDVKSEVAMLYPELYKDLLKGRPLSYKTFLIWVLISIYQGSTIMYGALLLFESEFVHIVAISFTSLILTELLMVALTIQTWHWLMTVAELLSLACYIASLVFLHEFIDVYFIATLSFLWKVSVITLVSCLPLYVLKYLRRRFSPPSYSKLTS

SEQ ID NO: 7310 - protein, 1047 aa, Homo sapiens
  Payload ID: 1552;
  Gene Symbol: ATP9A;
  Gene Name: ATPase, class II, type 9A;
  Uniprot ID:  O75110;
  ENSP ID: ENSP00000342481
MTDNIPLQPVRQKKRMDSRPRAGCCEWLRCCGGGEARPRTVWLGHPEKRDQRYPRNVINNQKYNFFTFLPGVLFNQFKYFFNLYFLLLACSQFVPEMRLGALYTYWVPLGFVLAVTVIREAVEEIRCYVRDKEVNSQVYSRLTARGTVKVKSSNIQVGDLIIVEKNQRVPADMIFLRTSEKNGSCFLRTDQLDGETDWKLRLPVACTQRLPTAADLLQIRSYVYAEEPNIDIHNFVGTFTREDSDPPISESLSIENTLWAGTVVASGTVVGVVLYTGRELRSVMNTSNPRSKIGLFDLEVNCLTKILFGALVVVSLVMVALQHFAGRWYLQIIRFLLLFSNIIPISLRVNLDMGKIVYSWVIRRDSKIPGTVVRSSTIPEQLGRISYLLTDKTGTLTQNEMIFKRLHLGTVAYGLDSMDEVQSHIFSIYTQQSQDPPAQKGPTLTTKVRRTMSSRVHEAVKAIALCHNVTPVYESNGVTDQAEAEKQYEDSCRVYQASSPDEVALVQWTESVGLTLVGRDQSSMQLRTPGDQILNFTILQIFPFTYESKRMGIIVRDESTGEITFYMKGADVVMAGIVQYNDWLEEECGNMAREGLRVLVVAKKSLAEEQYQDFEARYVQAKLSVHDRSLKVATVIESLEMEMELLCLTGVEDQLQADVRPTLETLRNAGIKVWMLTGDKLETATCTAKNAHLVTRNQDIHVFRLVTNRGEAHLELNAFRRKHDCALVISGDSLEVCLKYYEYEFMELACQCPAVVCCRCAPTQKAQIVRLLQERTGKLTCAVGDGGNDVSMIQESDCGVGVEGKEGKQASLAADFSITQFKHLGRLLMVHGRNSYKRSAALSQFVIHRSLCISTMQAVFSSVFYFASVPLYQGFLIIGYSTIYTMFPVFSLVLDKDVKSEVAMLYPELYKDLLKGRPLSYKTFLIWVLISIYQGSTIMYGALLLFESEFVHIVAISFTSLILTELLMVALTIQTWHWLMTVAELLSLACYIASLVFLHEFIDVYFIATLSFLWKVSVITLVSCLPLYVLKYLRRRFSPPSYSKLTS

SEQ ID NO: 7311 - protein, 1136 aa, Homo sapiens
  Payload ID: 1553;
  Gene Symbol: ATP9B;
  Gene Name: ATPase, class II, type 9B;
  Uniprot ID:  O43861;
  ENSP ID: ENSP00000304500
MADQIPLYPVRSAAAAAANRKRAAYYSAAGPRPGADRHSRYQLEDESAHLDEMPLMMSEEGFENEESDYHTLPRARIMQRKRGLEWFVCDGWKFLCTSCCGWLINICRRKKELKARTVWLGCPEKCEEKHPRNSIKNQKYNVFTFIPGVLYEQFKFFLNLYFLVISCSQFVPALKIGYLYTYWAPLGFVLAVTMTREAIDEFRRFQRDKEVNSQLYSKLTVRGKVQVKSSDIQVGDLIIVEKNQRIPSDMVFLRTSEKAGSCFIRTDQLDGETDWKLKVAVSCTQQLPALGDLFSISAYVYAQKPQMDIHSFEGTFTREDSDPPIHESLSIENTLWASTIVASGTVIGVVIYTGKETRSVMNTSNPKNKVGLLDLELNRLTKALFLALVALSIVMVTLQGFVGPWYRNLFRFLLLFSYIIPISLRVNLDMGKAVYGWMMMKDENIPGTVVRTSTIPEELGRLVYLLTDKTGTLTQNEMIFKRLHLGTVSYGADTMDEIQSHVRDSYSQMQSQAGGNNTGSTPLRKAQSSAPKVRKSVSSRIHEAVKAIVLCHNVTPVYESRAGVTEETEFAEADQDFSDENRTYQASSPDEVALVQWTESVGLTLVSRDLTSMQLKTPSGQVLSFCILQLFPFTSESKRMGVIVRDESTAEITFYMKGADVAMSPIVQYNDWLEEECGNMAREGLRTLVVAKKALTEEQYQDFESRYTQAKLSMHDRSLKVAAVVESLEREMELLCLTGVEDQLQADVRPTLEMLRNAGIKIWMLTGDKLETATCIAKSSHLVSRTQDIHIFRQVTSRGEAHLELNAFRRKHDCALVISGDSLEVCLKYYEHEFVELACQCPAVVCCRCSPTQKARIVTLLQQHTGRRTCAIGDGGNDVSMIQAADCGIGIEGKEGKQASLAADFSITQFRHIGRLLMVHGRNSYKRSAALGQFVMHRGLIISTMQAVFSSVFYFASVPLYQGFLMVGYATIYTMFPVFSLVLDQDVKPEMAMLYPELYKDLTKGRSLSFKTFLIWVLISIYQGGILMYGALVLFESEFVHVVAISFTALILTELLMVALTVRTWHWLMVVAEFLSLGCYVSSLAFLNEYFDVAFITTVTFLWKVSAITVVSCLPLYVLKYLRRKLSPPSYCKLAS

SEQ ID NO: 7312 - protein, 1147 aa, Homo sapiens
  Payload ID: 1553;
  Gene Symbol: ATP9B;
  Gene Name: ATPase, class II, type 9B;
  Uniprot ID:  O43861;
  ENSP ID: ENSP00000398076
MADQIPLYPVRSAAAAAANRKRAAYYSAAGPRPGADRHSRYQLEDESAHLDEMPLMMSEEGFENEESDYHTLPRARIMQRKRGLEWFVCDGWKFLCTSCCGWLINICRRKKELKARTVWLGCPEKCEEKHPRNSIKNQKYNVFTFIPGVLYEQFKFFLNLYFLVISCSQFVPALKIGYLYTYWAPLGFVLAVTMTREAIDEFRRFQRDKEVNSQLYSKLTVRGKVQVKSSDIQVGDLIIVEKNQRIPSDMVFLRTSEKAGSCFIRTDQLDGETDWKLKVAVSCTQQLPALGDLFSISAYVYAQKPQMDIHSFEGTFTREDSDPPIHESLSIENTLWASTIVASGTVIGVVIYTGKETRSVMNTSNPKNKVGLLDLELNRLTKALFLALVALSIVMVTLQGFVGPWYRNLFRFLLLFSYIIPISLRVNLDMGKAVYGWMMMKDENIPGTVVRTSTIPEELGRLVYLLTDKTGTLTQNEMIFKRLHLGTVSYGADTMDEIQSHVRDSYSQMQSQAGGNNTGSTPLRKAQSSAPKVRKSVSSRIHEAVKAIVLCHNVTPVYESRAGVTEETEFAEADQDFSDENRTYQASSPDEVALVQWTESVGLTLVSRDLTSMQLKTPSGQVLSFCILQLFPFTSESKRMGVIVRDESTAEITFYMKGADVAMSPIVQYNDWLEEECGNMAREGLRTLVVAKKALTEEQYQDFESRYTQAKLSMHDRSLKVAAVVESLEREMELLCLTGVEDQLQADVRPTLEMLRNAGIKIWMLTGDKLETATCIAKSSHLVSRTQDIHIFRQVTSRGEAHLELNAFRRKHDCALVISGDSLEVCLKYYEHEFVELACQCPAVVCCRCSPTQKARIVTLLQQHTGRRTCAIGDGGNDVSMIQAADCGIGIEGKEGKQASLAADFSITQFRHIGRLLMVHGRNSYKRSAALGQFVMHRGLIISTMQAVFSSVFYFASVPLYQGFLMVGYATIYTMFPVFSLVLDQDVKPEMAMLYPELYKDLTKGRSLSFKTFLIWVLISIYQGGILMYGALVLFESEFVHVVAISFTALILTELLMVALTVRTWHWLMVVAEFLSLGCYVSSLAFLNEYFGIGRVSFGAFLDVAFITTVTFLWKVSAITVVSCLPLYVLKYLRRKLSPPSYCKLAS

SEQ ID NO: 7313 - protein, 471 aa, Homo sapiens
  Payload ID: 1553;
  Gene Symbol: ATP9B;
  Gene Name: ATPase, class II, type 9B;
  ENSP ID: ENSP00000442794
MPLMMSEEGFENEESDYHTLPRARIMQRKRGLEWFVCDGWKFLCTSCCGWLINICRRKKELKARTVWLGCPEKCEEKHPRNSIKNQKYNVFTFIPGVLYEQFKFFLNLYFLVISCSQFVPALKIGYLYTYWAPLGFVLAVTMTREAIDEFRRFQRDKEVNSQLYSKLTVRGKVQVKSSDIQVGDLIIVEKNQRIPSDMVFLRTSEKAGSCFIRTDQLDGETDWKLKVAVSCTQQLPALGDLFSISAYVYAQKPQMDIHSFEGTFTREDSDPPIHESLSIENTLWASTIVASGTVIGVVIYTGKETRSVMNTSNPKNKVGLLDLELNRLTKALFLALVALSIVMVTLQGFVGPWYRNLFRFLLLFSYIIPISLRVNLDMGKAVYGWMMMKDENIPGTVVRTSTIPEELGRLVYLLTDKTGASPLLFFLFLYCQNCISILKQLEFLLKMSPNYFTITVKGSSYSGILRIRLKV

SEQ ID NO: 7314 - protein, 145 aa, Homo sapiens
  Payload ID: 1553;
  Gene Symbol: ATP9B;
  Gene Name: ATPase, class II, type 9B;
  ENSP ID: ENSP00000464761
CHNVTPVYESRAGVTEETEFAEADQDFSDENRTYQASSPDEVALVQWTESVGLTLVSRDLTSMQLKTPSGQVLSFCILQLFPFTSESKRMGVIVRDESTAEITFYMKGADVAMSPIVQYNDWLEEERSLFQFLNRRREETQLLDA

SEQ ID NO: 7315 - protein, 100 aa, Homo sapiens
  Payload ID: 1553;
  Gene Symbol: ATP9B;
  Gene Name: ATPase, class II, type 9B;
  ENSP ID: ENSP00000465158
MADQIPLYPVRSAAAAAANRKRAAYYSAAGPRPGADRHSRNEHPAPLCMYPTMTARLGWMSPLLTWSALTPPGQWGECLPTAGACGSPGFTHSLLFNVGT

SEQ ID NO: 7316 - protein, 140 aa, Homo sapiens
  Payload ID: 1553;
  Gene Symbol: ATP9B;
  Gene Name: ATPase, class II, type 9B;
  ENSP ID: ENSP00000465269
  MOD_RES (1)..(1): Any amino acid
XIISTMQAVFSSVFYFASVPLYQGFLMVGYATIYTMFPVFSLVLDQDVKPEMAMLYPELYKDLTKSQQDGRSNRRQHERLTSGTSGHVWDPGSFFRIRVSGKGARNAGKILVLQNLPHLGFNKYLPRRHPHVWGPGALRV

SEQ ID NO: 7317 - protein, 18 aa, Homo sapiens
  Payload ID: 1553;
  Gene Symbol: ATP9B;
  Gene Name: ATPase, class II, type 9B;
  ENSP ID: ENSP00000465300
  MOD_RES (1)..(1): Any amino acid
XNTLWASTIVASGWFVGP

SEQ ID NO: 7318 - protein, 80 aa, Homo sapiens
  Payload ID: 1553;
  Gene Symbol: ATP9B;
  Gene Name: ATPase, class II, type 9B;
  ENSP ID: ENSP00000465928
  MOD_RES (1)..(1): Any amino acid
XCGNMAREGLRTLVVAKKALTEEQYQDFEVPQGGRGSREPGEGDGTAVPHRRGGPAAGRRAAHAGDAAQRRDQDMDANRR

SEQ ID NO: 7319 - protein, 188 aa, Homo sapiens
  Payload ID: 1553;
  Gene Symbol: ATP9B;
  Gene Name: ATPase, class II, type 9B;
  ENSP ID: ENSP00000466992
MADQIPLYPVRSAAAAAANRKRAAYYSAAGPRPGADRHSRYQLEDESAHLDEMPLMMSEEGFENEESDYHTLPRARIMQRKRGLEWFVCDGWKFLCTSCCGWLINICRRKKELKARTVWLGCPEKCEEKHPRNSIKNQKYNVFTFIPGVLYEQFKFFLNLYFLVISCSQFVPALKIGYLYTYWAPLMT

SEQ ID NO: 7320 - protein, 289 aa, Homo sapiens
  Payload ID: 1553;
  Gene Symbol: ATP9B;
  Gene Name: ATPase, class II, type 9B;
  ENSP ID: ENSP00000467386
MADQIPLYPVRSAAAAAANRKRAAYYSAAGPRPGADRHSRYQLEDESAHLDEMPLMMSEEGFENEESDYHTLPRARIMQRKRGLEWFVCDGWKFLCTSCCGWLINICRRKKELKARTVWLGCPEKCEEKHPRNSIKNQKYNVFTFIPGVLYEQFKFFLNLYFLVISCSQFVPALKIGYLYTYWAPLGFVLAVTMTREAIDEFRRFQRDKEVNSQLYSKLTVRGKVQVKSSDIQVGDLIIVEKNQRIPSDMVFLRTSEKAGPFFYQCLCLCSETTNGHSQFRRHIYQGRQ

SEQ ID NO: 7321 - protein, 37 aa, Homo sapiens
  Payload ID: 1553;
  Gene Symbol: ATP9B;
  Gene Name: ATPase, class II, type 9B;
  ENSP ID: ENSP00000467657
  MOD_RES (1)..(1): Any amino acid
XLDQDVKPEMAMLYPELYKDLTKFAKVAQTAALCVVV

SEQ ID NO: 7322 - protein, 200 aa, Homo sapiens
  Payload ID: 1553;
  Gene Symbol: ATP9B;
  Gene Name: ATPase, class II, type 9B;
  ENSP ID: ENSP00000467935
LVISGDSLEVCLKYYEHEFVELACQCPAVVCCRCSPTQKARIVTLLQQHTGRRTCAIGDGGNDVSMIQAADCGIGIEGKEGKQASLAADFSITQFRHIGRLLMVHGRNSYKRSAALGQFVMHRGLIISTMQVCHHIHHVPSVLLSAGPGREARDGDALPGAVQGPHQGKILVLQNLPHLGFNKYLPRRHPHVWGPGALRV

SEQ ID NO: 7323 - protein, 192 aa, Homo sapiens
  Payload ID: 1553;
  Gene Symbol: ATP9B;
  Gene Name: ATPase, class II, type 9B;
  ENSP ID: ENSP00000468218
MADQIPLYPVRSAAAAAANRKRAAYYSAAGPRPGADRHSSCCGWLINICRRKKELKARTVWLGCPEKCEEKHPRNSIKNQKYNVFTFIPGVLYEQFKFFLNLYFLVISCSQFVPALKIGYLYTYWAPLGFVLAVTMTREAIDEFRRFQRDKEVNSQLYSKLTVRGKVQVKSSDIQVGDLIIVEKNQRIPSDM

SEQ ID NO: 7324 - protein, 140 aa, Homo sapiens
  Payload ID: 1553;
  Gene Symbol: ATP9B;
  Gene Name: ATPase, class II, type 9B;
  ENSP ID: ENSP00000468540
FSDENRTYQASSPDEVALVQWTESVGLTLVSRDLTSMQLKTPSGQVLSFCILQLFPFTSESKRMGVIVRDESTAEITFYMKGADVAMSPIVQYNDWLEEEETGRDTAVGCIKKGARPTPLLQPFLPSLQPPVQRQIQSTG

SEQ ID NO: 7325 - protein, 39 aa, Homo sapiens
  Payload ID: 1553;
  Gene Symbol: ATP9B;
  Gene Name: ATPase, class II, type 9B;
  ENSP ID: ENSP00000482146
MADQIPLYPVRSAAAAAANRKRAAYYSAAGPRPGADRHS

SEQ ID NO: 7326 - protein, 39 aa, Homo sapiens; identical to SEQ ID NO: 7325
  Payload ID: 1553;
  Gene Symbol: ATP9B;
  Gene Name: ATPase, class II, type 9B;
  ENSP ID: ENSP00000487938

SEQ ID NO: 7327 - protein, 39 aa, Homo sapiens; identical to SEQ ID NO: 7325
  Payload ID: 1553;
  Gene Symbol: ATP9B;
  Gene Name: ATPase, class II, type 9B;
  ENSP ID: ENSP00000488288

SEQ ID NO: 7328 - protein, 39 aa, Homo sapiens; identical to SEQ ID NO: 7325
  Payload ID: 1553;
  Gene Symbol: ATP9B;
  Gene Name: ATPase, class II, type 9B;
  ENSP ID: ENSP00000488597

SEQ ID NO: 7329 - protein, 39 aa, Homo sapiens; identical to SEQ ID NO: 7325
  Payload ID: 1553;
  Gene Symbol: ATP9B;
  Gene Name: ATPase, class II, type 9B;
  ENSP ID: ENSP00000488784

SEQ ID NO: 7330 - protein, 98 aa, Homo sapiens
  Payload ID: 1553;
  Gene Symbol: ATP9B;
  Gene Name: ATPase, class II, type 9B;
  ENSP ID: ENSP00000488793
MADQIPLYPVRSAAAAAANRKRAAYYSAAGPRPGADRHSRNEHPAPLCMYPTMTARLGWMSPLLTWSALTPPGQWGECLPTAGACGSPGFTHSLLFNV

SEQ ID NO: 7331 - protein, 39 aa, Homo sapiens; identical to SEQ ID NO: 7325
  Payload ID: 1553;
  Gene Symbol: ATP9B;
  Gene Name: ATPase, class II, type 9B;
  ENSP ID: ENSP00000488805

SEQ ID NO: 7332 - protein, 1499 aa, Homo sapiens
  Payload ID: 1554;
  Gene Symbol: ATP10A;
  Gene Name: ATPase, class V, type 10A;
  Uniprot ID:  O60312;
  ENSP ID: ENSP00000349325
MEREPAGTEEPGPPGRRRRREGRTRTVRSNLLPPPGAEDPAAGAAKGERRRRRGCAQHLADNRLKTTKYTLLSFLPKNLFEQFHRPANVYFVFIALLNFVPAVNAFQPGLALAPVLFILAITAFRDLWEDYSRHRSDHKINHLGCLVFSREEKKYVNRFWKEIHVGDFVRLRCNEIFPADILLLSSSDPDGLCHIETANLDGETNLKRRQVVRGFSELVSEFNPLTFTSVIECEKPNNDLSRFRGCIIHDNGKKAGLYKENLLLRGCTLRNTDAVVGIVIYAGHETKALLNNSGPRYKRSKLERQMNCDVLWCVLLLVCMSLFSAVGHGLWIWRYQEKKSLFYVPKSDGSSLSPVTAAVYSFLTMIIVLQVLIPISLYVSIEIVKACQVYFINQDMQLYDEETDSQLQCRALNITEDLGQIQYIFSDKTGTLTENKMVFRRCTVSGVEYSHDANAQRLARYQEADSEEEEVVPRGGSVSQRGSIGSHQSVRVVHRTQSTKSHRRTGSRAEAKRASMLSKHTAFSSPMEKDITPDPKLLEKVSECDKSLAVARHQEHLLAHLSPELSDVFDFFIALTICNTVVVTSPDQPRTKVRVRFELKSPVKTIEDFLRRFTPSCLTSGCSSIGSLAANKSSHKLGSSFPSTPSSDGMLLRLEERLGQPTSAIASNGYSSQADNWASELAQEQESERELRYEAESPDEAALVYAARAYNCVLVERLHDQVSVELPHLGRLTFELLHTLGFDSVRKRMSVVIRHPLTDEINVYTKGADSVVMDLLQPCSSVDARGRHQKKIRSKTQNYLNVYAAEGLRTLCIAKRVLSKEEYACWLQSHLEAESSLENSEELLFQSAIRLETNLHLLGATGIEDRLQDGVPETISKLRQAGLQIWVLTGDKQETAVNIAYACKLLDHDEEVITLNATSQEACAALLDQCLCYVQSRGLQRAPEKTKGKVSMRFSSLCPPSTSTASGRRPSLVIDGRSLAYALEKNLEDKFLFLAKQCRSVLCCRSTPLQKSMVVKLVRSKLKAMTLAIGDGANDVSMIQVADVGVGISGQEGMQAVMASDFAVPKFRYLERLLILHGHWCYSRLANMVLYFFYKNTMFVGLLFWFQFFCGFSASTMIDQWYLIFFNLLFSSLPPLVTGVLDRDVPANVLLTNPQLYKSGQNMEEYRPRTFWFNMADAAFQSLVCFSIPYLAYYDSNVDLFTWGTPIVTIALLTFLLHLGIETKTWTWLNWITCGFSVLLFFTVALIYNASCATCYPPSNPYWTMQALLGDPVFYLTCLMTPVAALLPRLFFRSLQGRVFPTQLQLARQLTRKSPRRCSAPKETFAQGRLPKDSGTEHSSGRTVKTSVPLSQPSWHTQQPVCSLEASGEPSTVDMSMPVREHTLLEGLSAPAPMSSAPGEAVLRSPGGCPEESKVRAASTGRVTPLSSLFSLPTFSLLNWISSWSLVSRLGSVLQFSRTEQLADGQAGRGLPVQPHSGRSGLQGPDHRLLIGASSRRSQ

SEQ ID NO: 7333 - protein, 155 aa, Homo sapiens
  Payload ID: 1554;
  Gene Symbol: ATP10A;
  Gene Name: ATPase, class V, type 10A;
  Uniprot ID:  O60312;
  ENSP ID: ENSP00000374617
MEREPAGTEEPGPPGRRRRREGRTRTVRSNLLPPPGAEDPAAGAAKGERRRRRGCAQHLADNRLKTTKYTLLSFLPKNLFEQFHRPANVYFVFIALLNFVPAVNAFQPGLALAPVLFILAITAFRDLWEDYSRHRSDHKINHLGCLVFSSRSHLK

SEQ ID NO: 7334 - protein, 594 aa, Homo sapiens
  Payload ID: 1554;
  Gene Symbol: ATP10A;
  Gene Name: ATPase, class V, type 10A;
  ENSP ID: ENSP00000450480
MEREPAGTEEPGPPGRRRRREGRTRTVRSNLLPPPGAEDPAAGAAKGERRRRRGCAQHLADNRLKTTKYTLLSFLPKNLFEQFHRPANVYFVFIALLNFVPAVNAFQPGLALAPVLFILAITAFRDLWEDYSRHRSDHKINHLGCLVFSREEKKYVNRFWKEIHVGDFVRLRCNEIFPADILLLSSSDPDGLCHIETANLDGETNLKRRQVVRGFSELVSEFNPLTFTSVIECEKPNNDLSRFRGCIIHDNGKKAGLYKENLLLRGCTLRNTDAVVGIVIYAGHETKALLNNSGPRYKRSKLERQMNCDVLWCVLLLVCMSLFSAVGHGLWIWRYQEKKSLFYVPKSDGSSLSPVTAAVYSFLTMIIVLQVLIPISLYVSIEIVKACQVYFINQDMQLYDEETDSQLQCRALNITEDLGQIQYIFSDKTGTLTENKMVFRRCTVSGVEYSHDANAQRLARYQEADSEEEEVVPRGGSVSQRGSIGSHQSVRVVHRTQSTKSHRRTGSRAEAKRASMLSKHTAFSSPMEKDITPDPKLLEKVSECDKSLAVARHQEHLLAHLSPELSDVFDFFIALTICNTVVVTSPDQPRTKAR

SEQ ID NO: 7335 - protein, 139 aa, Homo sapiens
  Payload ID: 1554;
  Gene Symbol: ATP10A;
  Gene Name: ATPase, class V, type 10A;
  ENSP ID: ENSP00000451615
AIGDGANDVSMIQVADVGVGISGQEGMQEMLRETTAMETLAGHARTVFRMGIFLPCCVPCILRREDKSDARSASPVTGIPLPLKAVMASDFAVPKFRYLERLLILHGHWCYSRLANMVLYFFYKNTMFVGLLFWFQFFC

SEQ ID NO: 7336 - protein, 155 aa, Homo sapiens; identical to SEQ ID NO: 7333
  Payload ID: 1554;
  Gene Symbol: ATP10A;
  Gene Name: ATPase, class V, type 10A;
  Uniprot ID:  O60312;
  ENSP ID: ENSP00000480665

SEQ ID NO: 7337 - protein, 1461 aa, Homo sapiens
  Payload ID: 1555;
  Gene Symbol: ATP10B;
  Gene Name: ATPase, class V, type 10B;
  Uniprot ID:  O94823;
  ENSP ID: ENSP00000313600
MALSVDSSWHRWQWRVRDGFPHCPSETTPLLSPEKGRQSYNLTQQRVVFPNNSIFHQDWEEVSRRYPGNRTCTTKYTLFTFLPRNLFEQFHRWANLYFLFLVILNWMPSMEVFHREITMLPLAIVLFVIMIKDGMEDFKRHRFDKAINCSNIRIYERKEQTYVQKCWKDVRVGDFIQMKCNEIVPADILLLFSSDPNGICHLETASLDGETNLKQRCVVKGFSQQEVQFEPELFHNTIVCEKPNNHLNKFKGYMEHPDQTRTGFGCESLLLRGCTIRNTEMAVGIVIYAGHETKAMLNNSGPRYKRSKIERRMNIDIFFCIGILILMCLIGAVGHSIWNGTFEEHPPFDVPDANGSFLPSALGGFYMFLTMIILLQVLIPISLYVSIELVKLGQVFFLSNDLDLYDEETDLSIQCRALNIAEDLGQIQYIFSDKTGTLTENKMVFRRCTIMGSEYSHQENAKRLETPKELDSDGEEWTQYQCLSFSARWAQDPATMRSQKGAQPLRRSQSARVPIQGHYRQRSMGHRESSQPPVAFSSSIEKDVTPDKNLLTKVRDAALWLETLSDSRPAKASLSTTSSIADFFLALTICNSVMVSTTTEPRQRVTIKPSSKALGTSLEKIQQLFQKLKLLSLSQSFSSTAPSDTDLGESLGANVATTDSDERDDASVCSGGDSTDDGGYRSSMWDQGDILESGSGTSLEEALEAPATDLARPEFCYEAESPDEAALVHAAHAYSFTLVSRTPEQVTVRLPQGTCLTFSLLCTLGFDSVRKRMSVVVRHPLTGEIVVYTKGADSVIMDLLEDPACVPDINMEKKLRKIRARTQKHLDLYARDGLRTLCIAKKVVSEEDFRRWASFRREAEASLDNRDELLMETAQHLENQLTLLGATGIEDRLQEGVPDTIATLREAGIQLWVLTGDKQETAVNIAHSCRLLNQTDTVYTINTENQETCESILNCALEELKQFRELQKPDRKLFGFRLPSKTPSITSEAVVPEAGLVIDGKTLNAIFQGKLEKKFLELTQYCRSVLCCRSTPLQKSMIVKLVRDKLRVMTLSIGDGANDVSMIQAADIGIGISGQEGMQAVMSSDFAITRFKHLKKLLLVHGHWCYSRLARMVVYYLYKNVCYVNLLFWYQFFCGFSSSTMIDYWQMIFFNLFFTSLPPLVFGVLDKDISAETLLALPELYKSGQNSECYNLSTFWISMVDAFYQSLICFFIPYLAYKGSDIDVFTFGTPINTISLTTILLHQAMEMKTWTIFHGVVLLGSFLMYFLVSLLYNATCVICNSPTNPYWVMEGQLSNPTFYLVCFLTPVVALLPRYFFLSLQGTCGKSLISKAQKIDKLPPDKRNLEIQSWRSRQRPAPVPEVARPTHHPVSSITGQDFSASTPKSSNPPKRKHVEESVLHEQRCGTECMRDDSCSGDSSAQLSSGEHLLGPNRIMAYSRGQTDMCRCSKRSSHRRSQSSLTI

SEQ ID NO: 7338 - protein, 556 aa, Homo sapiens
  Payload ID: 1555;
  Gene Symbol: ATP10B;
  Gene Name: ATPase, class V, type 10B;
  ENSP ID: ENSP00000431081
GQVFFLSNDLDLYDEETDLSIQCRALNIAEDLGQIQYIFSDKTGTLTENKMVFRRCTIMGSEYSHQENAKRLETPKELDSDGEEWTQYQCLSFSARWAQDPATMRSQKGAQPLRRSQSARVPIQGHYRQRSMGHRESSQPPVAFSSSIEKDVTPDKNLLTKVRDAALWLETLSDSRPAKASLSTTSSIADFFLALTICNSVMVSTTTEPRQRVTIKPSSKALGTSLEKIQQLFQKLKLLSLSQSFSSTAPSDTDLGESLGANVATTDSDERDDASVCSGGDSTDDGGYRSSMWDQGDILESGSGTSLEEALEAPATDLARPEFCYEAESPDEAALVHAAHAYSFTLVSRTPEQVTVRLPQGTCLTFSLLCTLGFDSVRKRMSVVVRHPLTGEIVVYTKGADSVIMDLLEDPACVPDINMEKKLRKIRARTQKHLDLYARDGLRTLCIAKKVVSEEDFRRWASFRREAEASLDNRDELLMETAQHLENQLTLLGATGIEDRLQEGVPDTIATLREAGIQLWVLTGDKQETAVNIAHSCRLLNQTDTVYTINTENQVR

SEQ ID NO: 7339 - protein, 1426 aa, Homo sapiens
  Payload ID: 1556;
  Gene Symbol: ATP10D;
  Gene Name: ATPase, class V, type 10D;
  Uniprot ID:  Q9P241;
  ENSP ID: ENSP00000273859
MTEALQWARYHWRRLIRGATRDDDSGPYNYSSLLACGRKSSQTPKLSGRHRIVVPHIQPFKDEYEKFSGAYVNNRIRTTKYTLLNFVPRNLFEQFHRAANLYFLFLVVLNWVPLVEAFQKEITMLPLVVVLTIIAIKDGLEDYRKYKIDKQINNLITKVYSRKEKKYIDRCWKDVTVGDFIRLSCNEVIPADMVLLFSTDPDGICHIETSGLDGESNLKQRQVVRGYAEQDSEVDPEKFSSRIECESPNNDLSRFRGFLEHSNKERVGLSKENLLLRGCTIRNTEAVVGIVVYAGHETKAMLNNSGPRYKRSKLERRANTDVLWCVMLLVIMCLTGAVGHGIWLSRYEKMHFFNVPEPDGHIISPLLAGFYMFWTMIILLQVLIPISLYVSIEIVKLGQIYFIQSDVDFYNEKMDSIVQCRALNIAEDLGQIQYLFSDKTGTLTENKMVFRRCSVAGFDYCHEENARRLESYQEAVSEDEDFIDTVSGSLSNMAKPRAPSCRTVHNGPLGNKPSNHLAGSSFTLGSGEGASEVPHSRQAAFSSPIETDVVPDTRLLDKFSQITPRLFMPLDETIQNPPMETLYIIDFFIALAICNTVVVSAPNQPRQKIRHPSLGGLPIKSLEEIKSLFQRWSVRRSSSPSLNSGKEPSSGVPNAFVSRLPLFSRMKPASPVEEEVSQVCESPQCSSSSACCTETEKQHGDAGLLNGKAESLPGQPLACNLCYEAESPDEAALVYAARAYQCTLRSRTPEQVMVDFAALGPLTFQLLHILPFDSVRKRMSVVVRHPLSNQVVVYTKGADSVIMELLSVASPDGASLEKQQMIVREKTQKHLDDYAKQGLRTLCIAKKVMSDTEYAEWLRNHFLAETSIDNREELLLESAMRLENKLTLLGATGIEDRLQEGVPESIEALHKAGIKIWMLTGDKQETAVNIAYACKLLEPDDKLFILNTQSKDACGMLMSTILKELQKKTQALPEQVSLSEDLLQPPVPRDSGLRAGLIITGKTLEFALQESLQKQFLELTSWCQAVVCCRATPLQKSEVVKLVRSHLQVMTLAIGDGANDVSMIQVADIGIGVSGQEGMQAVMASDFAVSQFKHLSKLLLVHGHWCYTRLSNMILYFFYKNVAYVNLLFWYQFFCGFSGTSMTDYWVLIFFNLLFTSAPPVIYGVLEKDVSAETLMQLPELYRSGQKSEAYLPHTFWITLLDAFYQSLVCFFVPYFTYQGSDTDIFAFGNPLNTAALFIVLLHLVIESKSLTWIHLLVIIGSILSYFLFAIVFGAMCVTCNPPSNPYWIMQEHMLDPVFYLVCILTTSIALLPRFVYRVLQGSLFPSPILRAKHFDRLTPEERTKALKKWRGAGKMNQVTSKYANQSAGKSGRRPMPGPSAVFAMKSASSCAIEQGNLSLCETALDQGYSETKAFEMAGPSKGKES

SEQ ID NO: 7340 - protein, 535 aa, Homo sapiens
  Payload ID: 1556;
  Gene Symbol: ATP10D;
  Gene Name: ATPase, class V, type 10D;
  ENSP ID: ENSP00000420909
MTEALQWARYHWRRLIRGATRDDDSGPYNYSSLLACGRKSSQTPKLSGRHRIVVPHIQPFKDEYEKFSGAYVNNRIRTTKYTLLNFVPRNLFEQFHRAANLYFLFLVVLNWVPLVEAFQKEITMLPLVVVLTIIAIKDGLEDYRKYKIDKQINNLITKVYSRKEKKYIDRCWKDVTVGDFIRLSCNEVIPADMVLLFSTDPDGICHIETSGLDGESNLKQRQVVRGYAEQDSEVDPEKFSSRIECESPNNDLSRFRGFLEHSNKERVGLSKENLLLRGCTIRNTEAVVGIVVYAGHETKAMLNNSGPRYKRSKLERRANTDVLWCVMLLVIMCLTGAVGHGIWLSRYEKMHFFNVPEPDGHIISPLLAGFYMFWTMIILLQLGQIYFIQSDVDFYNEKMDSIVQCRALNIAEDLGQIQYLFSDKTGTLTENKMVFRRCSVAGFDYCHEENARRLESYQEAVSEDEDFIDTVSGSLSNMAKPRAPSCRTVHNGPLGNKPSNHLAGSSFTLGSGEGASEVPHSRQAAFSSPIVSMNA

SEQ ID NO: 7341 - protein, 224 aa, Homo sapiens
  Payload ID: 1556;
  Gene Symbol: ATP10D;
  Gene Name: ATPase, class V, type 10D;
  ENSP ID: ENSP00000421536
  MOD_RES (1)..(1): Any amino acid
XNVPEPDGHIISPLLAGFYMFWTMIILLQVLIPISLYVSIEIVKLGQIYFIQSDVDFYNEKMDSIVQCRALNIAEDLGQIQYLFSDKTGTLTENKMVFRRCSVAGFDYCHEENARRLESYQEAVSEDEDFIDTVSGSLSNMAKPRAPSCRTVHNGPLGNKPSNHLAGSSFTLGSGEGASEVPHSRQAAFSSPIETDVVPDTRAGHGGLCCFGTINISTPTHPAL

SEQ ID NO: 7342 - protein, 1191 aa, Homo sapiens
  Payload ID: 1557;
  Gene Symbol: ATP11A;
  Gene Name: ATPase, class VI, type 11A;
  ENSP ID: ENSP00000364781
MDCSLVRTLVHRYCAGEENWVDSRTIYVGHREPPPGAEAYIPQRYPDNRIVSSKYTFWNFIPKNLFEQFRRVANFYFLIIFLVQLIIDTPTSPVTSGLPLFFVITVTAIKQGYEDWLRHKADNAMNQCPVHFIQHGKLVRKQSRKLRVGDIVMVKEDETFPCDLIFLSSNRGDGTCHVTTASLDGESSHKTHYAVQDTKGFHTEEDIGGLHATIECEQPQPDLYKFVGRINVYSDLNDPVVRPLGSENLLLRGATLKNTEKIFGVAIYTGMETKMALNYQSKSQKRSAVEKSMNAFLIVYLCILISKALINTVLKYMWQSEPFRDEPWYNQKTESERQRNLFLKAFTDFLAFMVLFNYIIPVSMYVTVEMQKFLGSYFITWDEDMFDEETGEGPLVNTSDLNEELGQVEYIFTDKTGTLTENNMEFKECCIEGHVYVPHVICNGQVLPESSGIDMIDSSPSVNGREREELFFRALCLCHTVQVKDDDSVDGPRKSPDGGKSCVYISSSPDEVALVEGVQRLGFTYLRLKDNYMEILNRENHIERFELLEILSFDSVRRRMSVIVKSATGEIYLFCKGADSSIFPRVIEGKVDQIRARVERNAVEGLRTLCVAYKRLIQEEYEGICKLLQAAKVALQDREKKLAEAYEQIEKDLTLLGATAVEDRLQEKAADTIEALQKAGIKVWVLTGDKMETAAATCYACKLFRRNTQLLELTTKRIEEQSLHDVLFELSKTVLRHSGSLTRDNLSGLSADMQDYGLIIDGAALSLIMKPREDGSSGNYRELFLEICRSCSAVLCCRMAPLQKAQIVKLIKFSKEHPITLAIGDGANDVSMILEAHVGIGVIGKEGRQAARNSDYAIPKFKHLKKMLLVHGHFYYIRISELVQYFFYKNVCFIFPQFLYQFFCGFSQQTLYDTAYLTLYNISFTSLPILLYSLMEQHVGIDVLKRDPTLYRDVAKNALLRWRVFIYWTLLGLFDALVFFFGAYFVFENTTVTSNGQIFGNWTFGTLVFTVMVFTVTLKLALDTHYWTWINHFVIWGSLLFYVVFSLLWGGVIWPFLNYQRMYYVFIQMLSSGPAWLAIVLLVTISLLPDVLKKVLCRQLWPTATERVQNGCAQPRDRDSEFTPLASLQSPGYQSTCPSAAWYSSHSQQVTLAAWKEKVSTEPPPILGGSHHHCSSIPSHSCPRSRVGMLV

SEQ ID NO: 7343 - protein, 1134 aa, Homo sapiens
  Payload ID: 1557;
  Gene Symbol: ATP11A;
  Gene Name: ATPase, class VI, type 11A;
  Uniprot ID:  P98196;
  ENSP ID: ENSP00000364796
MDCSLVRTLVHRYCAGEENWVDSRTIYVGHREPPPGAEAYIPQRYPDNRIVSSKYTFWNFIPKNLFEQFRRVANFYFLIIFLVQLIIDTPTSPVTSGLPLFFVITVTAIKQGYEDWLRHKADNAMNQCPVHFIQHGKLVRKQSRKLRVGDIVMVKEDETFPCDLIFLSSNRGDGTCHVTTASLDGESSHKTHYAVQDTKGFHTEEDIGGLHATIECEQPQPDLYKFVGRINVYSDLNDPVVRPLGSENLLLRGATLKNTEKIFGVAIYTGMETKMALNYQSKSQKRSAVEKSMNAFLIVYLCILISKALINTVLKYMWQSEPFRDEPWYNQKTESERQRNLFLKAFTDFLAFMVLFNYIIPVSMYVTVEMQKFLGSYFITWDEDMFDEETGEGPLVNTSDLNEELGQVEYIFTDKTGTLTENNMEFKECCIEGHVYVPHVICNGQVLPESSGIDMIDSSPSVNGREREELFFRALCLCHTVQVKDDDSVDGPRKSPDGGKSCVYISSSPDEVALVEGVQRLGFTYLRLKDNYMEILNRENHIERFELLEILSFDSVRRRMSVIVKSATGEIYLFCKGADSSIFPRVIEGKVDQIRARVERNAVEGLRTLCVAYKRLIQEEYEGICKLLQAAKVALQDREKKLAEAYEQIEKDLTLLGATAVEDRLQEKAADTIEALQKAGIKVWVLTGDKMETAAATCYACKLFRRNTQLLELTTKRIEEQSLHDVLFELSKTVLRHSGSLTRDNLSGLSADMQDYGLIIDGAALSLIMKPREDGSSGNYRELFLEICRSCSAVLCCRMAPLQKAQIVKLIKFSKEHPITLAIGDGANDVSMILEAHVGIGVIGKEGRQAARNSDYAIPKFKHLKKMLLVHGHFYYIRISELVQYFFYKNVCFIFPQFLYQFFCGFSQQTLYDTAYLTLYNISFTSLPILLYSLMEQHVGIDVLKRDPTLYRDVAKNALLRWRVFIYWTLLGLFDALVFFFGAYFVFENTTVTSNGQIFGNWTFGTLVFTVMVFTVTLKLALDTHYWTWINHFVIWGSLLFYVVFSLLWGGVIWPFLNYQRMYYVFIQMLSSGPAWLAIVLLVTISLLPDVLKKVLCRQLWPTATERVQTKSQCLSVEQSTIFMLSQTSSSLSF

SEQ ID NO: 7344 - protein, 935 aa, Homo sapiens
  Payload ID: 1557;
  Gene Symbol: ATP11A;
  Gene Name: ATPase, class VI, type 11A;
  ENSP ID: ENSP00000396374
  MOD_RES (1)..(1): Any amino acid
XYVGHREPPPGAEAYIPQRYPDNRIVSSKYTFWNFIPKNLFEQFRRVANFYFLIIFLVQLIIDTPTSPVTSGLPLFFVITVTAIKQGYEDWLRHKADNAMNQCPVHFIQHGKLVRKQSRKLRVGDIVMVKEDETFPCDLIFLSSNRGDGTCHVTTASLDGESSHKTHYAVQDTKGFHTEEDIGGLHATIECEQPQPDLYKFVGRINVYSDLNDPVVRPLGSENLLLRGATLKNTEKIFGVAIYTGMETKMALNYQSKSQKRSAVEKSMNAFLIVYLCILISKALINTVLKYMWQSEPFRDEPWYNQKTESERQRNLFLKAFTDFLAFMVLFNYIIPVSMYVTVEMQKFLGSYFITWDEDMFDEETGEGPLVNTSDLNEELGQVEYIFTDKTGTLTENNMEFKECCIEGHVYVPHVICNGQVLPESSGIDMIDSSPSVNGREREELFFRALCLCHTVQVKDDDSVDGPRKSPDGGKSCVYISSSPDEVALVEGVQRLGFTYLRLKDNYMEILNRENHIERFELLEILSFDSVRRRMSVIVKSATGEIYLFCKGADSSIFPRVIEGKVDQIRARVERNAVEGLRTLCVAYKRLIQEEYEGICKLLQAAKVALQDREKKLAEAYEQIEKDLTLLGATAVEDRLQEKAADTIEALQKAGIKVWVLTGDKMETAAATCYACKLFRRNTQLLELTTKRIEEQSLHDVLFELSKTVLRHSGSLTRDNLSGLSADMQDYGLIIDGAALSLIMKPREDGSSGNYRELFLEICRSCSAVLCCRMAPLQKAQIVKLIKFSKEHPITLAIGDGANDVSMILEAHVGIGVIGKEGRQAARNSDYAIPKFKHLKKMLLVHGHFYYIRISELVQYFFYKNVCFIFPQFLYQFFCGFSQQTLYDTAYLTLYNISFTSLPILLYSLMEQHVGIDVLKRDPTLYRYHPPNSLS

SEQ ID NO: 7345 - protein, 75 aa, Homo sapiens
  Payload ID: 1557;
  Gene Symbol: ATP11A;
  Gene Name: ATPase, class VI, type 11A;
  ENSP ID: ENSP00000402575
  MOD_RES (1)..(1): Any amino acid
XFIQMLSSGPAWLAIVLLVTISLLPDVLKKVLCRQLWPTATERVQRGVKHKAPVQAAQSSDGPLLKDLLRRPRRS

SEQ ID NO: 7346 - protein, 183 aa, Homo sapiens
  Payload ID: 1557;
  Gene Symbol: ATP11A;
  Gene Name: ATPase, class VI, type 11A;
  ENSP ID: ENSP00000410824
FTVMVFTVTLKLALDTHYWTWINHFVIWGSLLFYVVFSLLWGGVIWPFLNYQRMYYVFIQMLSSGPAWLAIVLLVTISLLPDVLKKVLCRQLWPTATERVQNGCAQPRDRDSEFTPLASLQSPGYQSTCPSAAWYSSHSQQVTLAAWKEKVSTEPPPILGGSHHHCSSIPSHSCPRSRVGMLV

SEQ ID NO: 7347 - protein, 1134 aa, Homo sapiens; identical to SEQ ID NO: 7343
  Payload ID: 1557;
  Gene Symbol: ATP11A;
  Gene Name: ATPase, class VI, type 11A;
  Uniprot ID:  P98196;
  ENSP ID: ENSP00000420387

SEQ ID NO: 7348 - protein, 352 aa, Homo sapiens
  Payload ID: 1557;
  Gene Symbol: ATP11A;
  Gene Name: ATPase, class VI, type 11A;
  ENSP ID: ENSP00000420696
  MOD_RES (1)..(1): Any amino acid
XSIFPRVIEGKVDQIRARVERNAVEGLRTLCVAYKRLIQEEYEGICKLLQAAKVALQDREKKLAEAYEQIEKDLTLLGATAVEDRLQEKAADTIEALQKAGIKVWVLTGDKMETAAATCYACKLFRRNTQLLELTTKRIEEQSLHDVLFELSKTVLRHSGSLTRDNLSGLSADMQDYGLIIDGAALSLIMKPREDGSSGNYRELFLEICRSCSAVLCCRMAPLQKAQIVKLIKFSKEHPITLAIGDGANDVSMILEAHVGIGVIGKEGRQAARNSDYAIPKFKHLKKMLLVHGHFYYIRISELVQYFFYKNVCFIFPQFLYQFFCGFSQQGRRQECPAALARVHLLDAPGTV

SEQ ID NO: 7349 - protein, 62 aa, Homo sapiens
  Payload ID: 1557;
  Gene Symbol: ATP11A;
  Gene Name: ATPase, class VI, type 11A;
  ENSP ID: ENSP00000479392
DMQDYGLIIDGAALSLIMKPREDGSSGNYRELFLEICRSCSAVLCCRMAPLQKAQVLPARPR

SEQ ID NO: 7350 - protein, 1177 aa, Homo sapiens
  Payload ID: 1558;
  Gene Symbol: ATP11B;
  Gene Name: ATPase, class VI, type 11B;
  Uniprot ID:  Q9Y2G3;
  ENSP ID: ENSP00000321195
MWRWIRQQLGFDPPHQSDTRTIYVANRFPQNGLYTPQKFIDNRIISSKYTVWNFVPKNLFEQFRRVANFYFLIIFLVQLMIDTPTSPVTSGLPLFFVITVTAIKQGYEDWLRHNSDNEVNGAPVYVVRSGGLVKTRSKNIRVGDIVRIAKDEIFPADLVLLSSDRLDGSCHVTTASLDGETNLKTHVAVPETALLQTVANLDTLVAVIECQQPEADLYRFMGRMIITQQMEEIVRPLGPESLLLRGARLKNTKEIFGVAVYTGMETKMALNYKSKSQKRSAVEKSMNTFLIIYLVILISEAVISTILKYTWQAEEKWDEPWYNQKTEHQRNSSKILRFISDFLAFLVLYNFIIPISLYVTVEMQKFLGSFFIGWDLDLYHEESDQKAQVNTSDLNEELGQVEYVFTDKTGTLTENEMQFRECSINGMKYQEINGRLVPEGPTPDSSEGNLSYLSSLSHLNNLSHLTTSSSFRTSPENETELIKEHDLFFKAVSLCHTVQISNVQTDCTGDGPWQSNLAPSQLEYYASSPDEKALVEAAARIGIVFIGNSEETMEVKTLGKLERYKLLHILEFDSDRRRMSVIVQAPSGEKLLFAKGAESSILPKCIGGEIEKTRIHVDEFALKGLRTLCIAYRKFTSKEYEEIDKRIFEARTALQQREEKLAAVFQFIEKDLILLGATAVEDRLQDKVRETIEALRMAGIKVWVLTGDKHETAVSVSLSCGHFHRTMNILELINQKSDSECAEQLRQLARRITEDHVIQHGLVVDGTSLSLALREHEKLFMEVCRNCSAVLCCRMAPLQKAKVIRLIKISPEKPITLAVGDGANDVSMIQEAHVGIGIMGKEGRQAARNSDYAIARFKFLSKLLFVHGHFYYIRIATLVQYFFYKNVCFITPQFLYQFYCLFSQQTLYDSVYLTLYNICFTSLPILIYSLLEQHVDPHVLQNKPTLYRDISKNRLLSIKTFLYWTILGFSHAFIFFFGSYLLIGKDTSLLGNGQMFGNWTFGTLVFTVMVITVTVKMALETHFWTWINHLVTWGSIIFYFVFSLFYGGILWPFLGSQNMYFVFIQLLSSGSAWFAIILMVVTCLFLDIIKKVFDRHLHPTSTEKAQLTETNAGIKCLDSMCCFPEGEAACASVGRMLERVIGRCSPTHISRSWSASDPFYTNDRSILTLSTMDSSTC

SEQ ID NO: 7351 - protein, 238 aa, Homo sapiens
  Payload ID: 1558;
  Gene Symbol: ATP11B;
  Gene Name: ATPase, class VI, type 11B;
  ENSP ID: ENSP00000417124
GTSLSLALREHEKLFMEVCRNCSAVLCCRMAPLQKAKVIRLIKISPEKPITLAVGDGANDVSMIQEAHVGIGIMGKEGRQAARNSDYAIARFKFLSKLLFVHGHFYYIRIATLVQYFFYKTLYDSVYLTLYNICFTSLPILIYSLLEQHVDPHVLQNKPTLYRDISKNRLLSIKTFLYWTILGFSHAFIFFFGSYLLIGKDTSLLGNGQMFGNWTFGTLVFTVMVITVTVKMALETHF

SEQ ID NO: 7352 - protein, 108 aa, Homo sapiens
  Payload ID: 1558;
  Gene Symbol: ATP11B;
  Gene Name: ATPase, class VI, type 11B;
  ENSP ID: ENSP00000417406
QKSDSECAEQLRQLARRITEDHVIQHGLVVDGTSLSLALREHEKLFMEVCRNCSAVLCCRMAPLQKAKVIRLIKISPEKPITLAVGDGANDESWVKKEDRLQETVTMQ

SEQ ID NO: 7353 - protein, 970 aa, Homo sapiens
  Payload ID: 1558;
  Gene Symbol: ATP11B;
  Gene Name: ATPase, class VI, type 11B;
  ENSP ID: ENSP00000418421
  MOD_RES (1)..(1): Any amino acid
XLDTLVAVIECQQPEADLYRFMGRMIITQQMEEIVRPLGPESLLLRGARLKNTKEIFGVAVYTGMETKMALNYKSKSQKRSAVEKSMNTFLIIYLVILISEAVISTILKYTWQAEEKWDEPWYNQKTEHQRNSSKILRFISDFLAFLVLYNFIIPISLYVTVEMQKFLGSFFIGWDLDLYHEESDQKAQVNTSDLNEELGQVEYVFTDKTGTLTENEMQFRECSINGMKYQEINGRLVPEGPTPDSSEGNLSYLSSLSHLNNLSHLTTSSSFRTSPENETELIKEHDLFFKAVSLCHTVQISNVQTDCTGDGPWQSNLAPSQLEYYASSPDEKALVEAAARIGIVFIGNSEETMEVKTLGKLERYKLLHILEFDSDRRRMSVIVQAPSGEKLLFAKGAESSILPKCIGGEIEKTRIHVDEFALKGLRTLCIAYRKFTSKEYEEIDKRIFEARTALQQREEKLAAVFQFIEKDLILLGATAVEDRLQDKVRETIEALRMAGIKVWVLTGDKHETAVSVSLSCGHFHRTMNILELINQKSDSECAEQLRQLARRITEDHVIQHGLVVDGTSLSLALREHEKLFMEVCRNCSAVLCCRMAPLQKAKVIRLIKISPEKPITLAVGDGANDVSMIQEAHVGIGIMGKEGRQAARNSDYAIARFKFLSKLLFVHGHFYYIRIATLVQYFFYKNVCFITPQFLYQFYCLFSQQTLYDSVYLTLYNICFTSLPILIYSLLEQHVDPHVLQNKPTLYRDISKNRLLSIKTFLYWTILGFSHAFIFFFGSYLLIGKDTSLLGNGQMFGNWTFGTLVFTVMVITVTVKMALETHFWTWINHLVTWGSIIFYFVFSLFYGGILWPFLGSQNMYFVFIQLLSSGSAWFAIILMVVTCLFLDIIKKVFDRHLHPTSTEKAQMYSNTVALSDEFIALQPLSRARNQLSKLSLLKQMQVSSAWTPCAVSRKEKQRVHLLEECWNEL

SEQ ID NO: 7354 - protein, 195 aa, Homo sapiens
  Payload ID: 1558;
  Gene Symbol: ATP11B;
  Gene Name: ATPase, class VI, type 11B;
  ENSP ID: ENSP00000419032
MWRWIRQQLGFDPPHQSDTRTIYVANRFPQNGLYTPQKFIDNRIISSKYTVWNFVPKNLFEQFRRVANFYFLIIFLVQLMIDTPTSPVTSGLPLFFVITVTAIKQGYEDWLRHNSDNEVNGAPVYVVRSGGLVKTRSKNIRVGDIVRIAKDEIFPADLVLLSSDRLDGSCHVTTASLDGETNLKVCLHMFEYCSW

SEQ ID NO: 7355 - protein, 119 aa, Homo sapiens
  Payload ID: 1558;
  Gene Symbol: ATP11B;
  Gene Name: ATPase, class VI, type 11B;
  ENSP ID: ENSP00000419152
  MOD_RES (1)..(1): Any amino acid
XPFLGSQNMYFVFIQLLSSGSAWFAIILMVVTCLFLDIIKKVFDRHLHPTSTEKAQMYSNTVALSDEFIALQPLSRARNQLSKLSLLKQMQVSSAWTPCAVSRKEKQRVHLLEECWNEL

SEQ ID NO: 7356 - protein, 147 aa, Homo sapiens
  Payload ID: 1558;
  Gene Symbol: ATP11B;
  Gene Name: ATPase, class VI, type 11B;
  ENSP ID: ENSP00000419768
  MOD_RES (1)..(1): Any amino acid
XMALETHFWTWINHLVTWGSIIFYFVFSLFYGGILWPFLGSQNMYFVFIQLLSSGSAWFAIILMVVTCLFLDIIKKVFDRHLHPTSTEKAQLTETNAGIKCLDSMCCFPEGEAACASVGRMLERVIGRCSPTHISRCEISLSSLCCR

SEQ ID NO: 7357 - protein, 1132 aa, Homo sapiens
  Payload ID: 1559;
  Gene Symbol: ATP11C;
  Gene Name: ATPase, class VI, type 11C;
  Uniprot ID:  Q8NB49;
  ENSP ID: ENSP00000332756
MQMVPSLPPASECAGEEKRVGTRTVFVGNHPVSETEAYIAQRFCDNRIVSSKYTLWNFLPKNLFEQFRRIANFYFLIIFLVQVTVDTPTSPVTSGLPLFFVITVTAIKQGYEDCLRHRADNEVNKSTVYIIENAKRVRKESEKIKVGDVVEVQADETFPCDLILLSSCTTDGTCYVTTASLDGESNCKTHYAVRDTIALCTAESIDTLRAAIECEQPQPDLYKFVGRINIYSNSLEAVARSLGPENLLLKGATLKNTEKIYGVAVYTGMETKMALNYQGKSQKRSAVEKSINAFLIVYLFILLTKAAVCTTLKYVWQSTPYNDEPWYNQKTQKERETLKVLKMFTDFLSFMVLFNFIIPVSMYVTVEMQKFLGSFFISWDKDFYDEEINEGALVNTSDLNEELGQVDYVFTDKTGTLTENSMEFIECCIDGHKYKGVTQEVDGLSQTDGTLTYFDKVDKNREELFLRALCLCHTVEIKTNDAVDGATESAELTYISSSPDEIALVKGAKRYGFTFLGNRNGYMRVENQRKEIEEYELLHTLNFDAVRRRMSVIVKTQEGDILLFCKGADSAVFPRVQNHEIELTKVHVERNAMDGYRTLCVAFKEIAPDDYERINRQLIEAKMALQDREEKMEKVFDDIETNMNLIGATAVEDKLQDQAAETIEALHAAGLKVWVLTGDKMETAKSTCYACRLFQTNTELLELTTKTIEESERKEDRLHELLIEYRKKLLHEFPKSTRSFKKAWTEHQEYGLIIDGSTLSLILNSSQDSSSNNYKSIFLQICMKCTAVLCCRMAPLQKAQIVRMVKNLKGSPITLSIGDGANDVSMILESHVGIGIKGKEGRQAARNSDYSVPKFKHLKKLLLAHGHLYYVRIAHLVQYFFYKNLCFILPQFLYQFFCGFSQQPLYDAAYLTMYNICFTSLPILAYSLLEQHINIDTLTSDPRLYMKISGNAMLQLGPFLYWTFLAAFEGTVFFFGTYFLFQTASLEENGKVYGNWTFGTIVFTVLVFTVTLKLALDTRFWTWINHFVIWGSLAFYVFFSFFWGGIIWPFLKQQRMYFVFAQMLSSVSTWLAIILLIFISLFPEILLIVLKNVRRRSARRNLSCRRASDSLSARPSVRPLLLRTFSDESNVL

SEQ ID NO: 7358 - protein, 1119 aa, Homo sapiens
  Payload ID: 1559;
  Gene Symbol: ATP11C;
  Gene Name: ATPase, class VI, type 11C;
  Uniprot ID:  Q8NB49;
  ENSP ID: ENSP00000355165
MQMVPSLPPASECAGEEKRVGTRTVFVGNHPVSETEAYIAQRFCDNRIVSSKYTLWNFLPKNLFEQFRRIANFYFLIIFLVQVTVDTPTSPVTSGLPLFFVITVTAIKQGYEDCLRHRADNEVNKSTVYIIENAKRVRKESEKIKVGDVVEVQADETFPCDLILLSSCTTDGTCYVTTASLDGESNCKTHYAVRDTIALCTAESIDTLRAAIECEQPQPDLYKFVGRINIYSNSLEAVARSLGPENLLLKGATLKNTEKIYGVAVYTGMETKMALNYQGKSQKRSAVEKSINAFLIVYLFILLTKAAVCTTLKYVWQSTPYNDEPWYNQKTQKERETLKVLKMFTDFLSFMVLFNFIIPVSMYVTVEMQKFLGSFFISWDKDFYDEEINEGALVNTSDLNEELGQVDYVFTDKTGTLTENSMEFIECCIDGHKYKGVTQEVDGLSQTDGTLTYFDKVDKNREELFLRALCLCHTVEIKTNDAVDGATESAELTYISSSPDEIALVKGAKRYGFTFLGNRNGYMRVENQRKEIEEYELLHTLNFDAVRRRMSVIVKTQEGDILLFCKGADSAVFPRVQNHEIELTKVHVERNAMDGYRTLCVAFKEIAPDDYERINRQLIEAKMALQDREEKMEKVFDDIETNMNLIGATAVEDKLQDQAAETIEALHAAGLKVWVLTGDKMETAKSTCYACRLFQTNTELLELTTKTIEESERKEDRLHELLIEYRKKLLHEFPKSTRSFKKAWTEHQEYGLIIDGSTLSLILNSSQDSSSNNYKSIFLQICMKCTAVLCCRMAPLQKAQIVRMVKNLKGSPITLSIGDGANDVSMILESHVGIGIKGKEGRQAARNSDYSVPKFKHLKKLLLAHGHLYYVRIAHLVQYFFYKNLCFILPQFLYQFFCGFSQQPLYDAAYLTMYNICFTSLPILAYSLLEQHINIDTLTSDPRLYMKISGNAMLQLGPFLYWTFLAAFEGTVFFFGTYFLFQTASLEENGKVYGNWTFGTIVFTVLVFTVTLKLALDTRFWTWINHFVIWGSLAFYVFFSFFWGGIIWPFLKQQRMYFVFAQMLSSVSTWLAIILLIFISLFPEILLIVLKNVRRRSARNPNLELPMLLSYKHTDSGYS

SEQ ID NO: 7359 - protein, 1113 aa, Homo sapiens
  Payload ID: 1559;
  Gene Symbol: ATP11C;
  Gene Name: ATPase, class VI, type 11C;
  ENSP ID: ENSP00000359588
MFRRSLNRFCAGEEKRVGTRTVFVGNHPVSETEAYIAQRFCDNRIVSSKYTLWNFLPKNLFEQFRRIANFYFLIIFLVQVTVDTPTSPVTSGLPLFFVITVTAIKQGYEDCLRHRADNEVNKSTVYIIENAKRVRKESEKIKVGDVVEVQADETFPCDLILLSSCTTDGTCYVTTASLDGESNCKTHYAVRDTIALCTAESIDTLRAAIECEQPQPDLYKFVGRINIYSNSLEAVARSLGPENLLLKGATLKNTEKIYGVAVYTGMETKMALNYQGKSQKRSAVEKSINAFLIVYLFILLTKAAVCTTLKYVWQSTPYNDEPWYNQKTQKERETLKVLKMFTDFLSFMVLFNFIIPVSMYVTVEMQKFLGSFFISWDKDFYDEEINEGALVNTSDLNEELGQVDYVFTDKTGTLTENSMEFIECCIDGHKYKGVTQEVDGLSQTDGTLTYFDKVDKNREELFLRALCLCHTVEIKTNDAVDGATESAELTYISSSPDEIALVKGAKRYGFTFLGNRNGYMRVENQRKEIEEYELLHTLNFDAVRRRMSVIVKTQEGDILLFCKGADSAVFPRVQNHEIELTKVHVERNAMDGYRTLCVAFKEIAPDDYERINRQLIEAKMALQDREEKMEKVFDDIETNMNLIGATAVEDKLQDQAAETIEALHAAGLKVWVLTGDKMETAKSTCYACRLFQTNTELLELTTKTIEESERKEDRLHELLIEYRKKLLHEFPKSTRSFKKAWTEHQEYGLIIDGSTLSLILNSSQDSSSNNYKSIFLQICMKCTAVLCCRMAPLQKAQIVRMVKNLKGSPITLSIGDGANDVSMILESHVGIGKEGRQAARNSDYSVPKFKHLKKLLLAHGHLYYVRIAHLVQYFFYKNLCFILPQFLYQFFCGFSQQPLYDAAYLTMYNICFTSLPILAYSLLEQHINIDTLTSDPRLYMKISGNAMLQLGPFLYWTFLAAFEGTVFFFGTYFLFQTASLEENGKVYGNWTFGTIVFTVLVFTVTLKLALDTRFWTWINHFVIWGSLAFYVFFSFFWGGIIWPFLKQQRMYFVFAQMLSSVSTWLAIILLIFISLFPEILLIVLKNVRRRSARNPNLELPMLLSYKHTDSGYS

SEQ ID NO: 7360 - protein, 172 aa, Homo sapiens
  Payload ID: 1559;
  Gene Symbol: ATP11C;
  Gene Name: ATPase, class VI, type 11C;
  ENSP ID: ENSP00000391259
TLTSDPRLYMKISGNAMLQLGPFLYWTFLAAFEGTVFFFGTYFLFQTASLEENGKVYGNWTFGTIVFTVLVFTVTLKLALDTRFWTWINHFVIWGSLAFYVFFSFFWGGIIWPFLKQQRMYFVFAQMLSSVSTWLAIILLIFISLFPEILLIVLKNVRRRSARVHHLISSSA

SEQ ID NO: 7361 - protein, 202 aa, Homo sapiens
  Payload ID: 1559;
  Gene Symbol: ATP11C;
  Gene Name: ATPase, class VI, type 11C;
  ENSP ID: ENSP00000394573
  MOD_RES (1)..(1): Any amino acid
XECCIDGHKYKGVTQEVDGLSQTDGTLTYFDKVDKNREELFLRALCLCHTVEIKTNDAVDGATESAELTYISSSPDEIALVKGAKRYELLHTLNFDAVRRRMSVIVKTQEGDILLFCKGADSAVFPRVQNHEIELTKVHVERNAMDGYRTLCVAFKEIAPDDYERINRQLIEAKMALQDREEKMEKVFDDIETNMNLIGATA

SEQ ID NO: 7362 - protein, 165 aa, Homo sapiens
  Payload ID: 1559;
  Gene Symbol: ATP11C;
  Gene Name: ATPase, class VI, type 11C;
  ENSP ID: ENSP00000397923
  MOD_RES (1)..(1): Any amino acid
XEGTVFFFGTYFLFQTASLEENGKVYGNWTFGTIVFTVLVFTVTLKLALDTRFWTWINHFVIWGSLAFYVFFSFFWGGIIWPFLKQQRMYFVFAQMLSSVSTWLAIILLIFISLFPEILLIVLKNVRRRSARRNLSCRRASDSLSARPSVRPLLLRTFSDESNVL

SEQ ID NO: 7363 - protein, 1422 aa, Homo sapiens
  Payload ID: 1560;
  Gene Symbol: ATP7A;
  Gene Name: ATPase, Cu++ transporting, alpha polypeptide;
  Uniprot ID:  Q04656;
  ENSP ID: ENSP00000343026
MDPSMGVNSVTISVEGMTCNSCVWTIEQQIGKVNGVHHIKVSLEEKNATIIYDPKLQTPKTLQEAIDDMGFDAVIHNPDPLPVLTDTLFLTVTASLTLPWDHIQSTLLKTKGVTDIKIYPQKRTVAVTIIPSIVNANQIKELVPELSLDTGTLEKKSGACEDHSMAQAGEVVLKMKVEGMTCHSCTSTIEGKIGKLQGVQRIKVSLDNQEATIVYQPHLISVEEMKKQIEAMGFPAFVKKQPKYLKLGAIDVERLKNTPVKSSEGSQQRSPSYTNDSTATFIIDGMHCKSCVSNIESTLSALQYVSSIVVSLENRSAIVKYNASSVTPESLRKAIEAVSPGLYRVSITSEVESTSNSPSSSSLQKIPLNVVSQPLTQETVINIDGMTCNSCVQSIEGVISKKPGVKSIRVSLANSNGTVEYDPLLTSPETLRGAIEDMGFDATLSDTNEPLVVIAQPSSEMPLLTSTNEFYTKGMTPVQDKEEGKNSSKCYIQVTGMTCASCVANIERNLRREEGIYSILVALMAGKAEVRYNPAVIQPPMIAEFIRELGFGATVIENADEGDGVLELVVRGMTCASCVHKIESSLTKHRGILYCSVALATNKAHIKYDPEIIGPRDIIHTIESLGFEASLVKKDRSASHLDHKREIRQWRRSFLVSLFFCIPVMGLMIYMMVMDHHFATLHHNQNMSKEEMINLHSSMFLERQILPGLSVMNLLSFLLCVPVQGKTSEALAKLISLQATEATIVTLDSDNILLSEEQVDVELVQRGDIIKVVPGGKFPVDGRVIEGHSMVDESLITGEAMPVAKKPGSTVIAGSINQNGSLLICATHVGADTTLSQIVKLVEEAQTSKAPIQQFADKLSGYFVPFIVFVSIATLLVWIVIGFLNFEIVETYFPGYNRSISRTETIIRFAFQASITVLCIACPCSLGLATPTAVMVGTGVGAQNGILIKGGEPLEMAHKVKVVVFDKTGTITHGTPVVNQVKVLTESNRISHHKILAIVGTAESNSEHPLGTAITKYCKQELDTETLGTCIDFQVVPGCGISCKVTNIEGLLHKNNWNIEDNNIKNASLVQIDASNEQSSTSSSMIIDAQISNALNAQQYKVLIGNREWMIRNGLVINNDVNDFMTEHERKGRTAVLVAVDDELCGLIAIADTVKPEAELAIHILKSMGLEVVLMTGDNSKTARSIASQVGITKVFAEVLPSHKVAKVKQLQEEGKRVAMVGDGINDSPALAMANVGIAIGTGTDVAIEAADVVLIRNDLLDVVASIDLSRKTVKRIRINFVFALIYNLVGIPIAAGVFMPIGLVLQPWMGSAAMAASSVSVVLSSLFLKLYRKPTYESYELPARSQIGQKSPSEISVHVGIDDTSRNSPKLGLLDRIVNYSRASINSLLSDKRSLNSVVTSEPDKHSLLVGDFREDDDTAL

SEQ ID NO: 7364 - protein, 274 aa, Homo sapiens [sequence omitted]

SEQ ID NO: 7365 - protein, 1500 aa, Homo sapiens
  Payload ID: 1560;
  Gene Symbol: ATP7A;
  Gene Name: ATPase, Cu++ transporting, alpha polypeptide;
  Uniprot ID:  Q04656;
  ENSP ID: ENSP00000345728
MDPSMGVNSVTISVEGMTCNSCVWTIEQQIGKVNGVHHIKVSLEEKNATIIYDPKLQTPKTLQEAIDDMGFDAVIHNPDPLPVLTDTLFLTVTASLTLPWDHIQSTLLKTKGVTDIKIYPQKRTVAVTIIPSIVNANQIKELVPELSLDTGTLEKKSGACEDHSMAQAGEVVLKMKVEGMTCHSCTSTIEGKIGKLQGVQRIKVSLDNQEATIVYQPHLISVEEMKKQIEAMGFPAFVKKQPKYLKLGAIDVERLKNTPVKSSEGSQQRSPSYTNDSTATFIIDGMHCKSCVSNIESTLSALQYVSSIVVSLENRSAIVKYNASSVTPESLRKAIEAVSPGLYRVSITSEVESTSNSPSSSSLQKIPLNVVSQPLTQETVINIDGMTCNSCVQSIEGVISKKPGVKSIRVSLANSNGTVEYDPLLTSPETLRGAIEDMGFDATLSDTNEPLVVIAQPSSEMPLLTSTNEFYTKGMTPVQDKEEGKNSSKCYIQVTGMTCASCVANIERNLRREEGIYSILVALMAGKAEVRYNPAVIQPPMIAEFIRELGFGATVIENADEGDGVLELVVRGMTCASCVHKIESSLTKHRGILYCSVALATNKAHIKYDPEIIGPRDIIHTIESLGFEASLVKKDRSASHLDHKREIRQWRRSFLVSLFFCIPVMGLMIYMMVMDHHFATLHHNQNMSKEEMINLHSSMFLERQILPGLSVMNLLSFLLCVPVQFFGGWYFYIQAYKALKHKTANMDVLIVLATTIAFAYSLIILLVAMYERAKVNPITFFDTPPMLFVFIALGRWLEHIAKGKTSEALAKLISLQATEATIVTLDSDNILLSEEQVDVELVQRGDIIKVVPGGKFPVDGRVIEGHSMVDESLITGEAMPVAKKPGSTVIAGSINQNGSLLICATHVGADTTLSQIVKLVEEAQTSKAPIQQFADKLSGYFVPFIVFVSIATLLVWIVIGFLNFEIVETYFPGYNRSISRTETIIRFAFQASITVLCIACPCSLGLATPTAVMVGTGVGAQNGILIKGGEPLEMAHKVKVVVFDKTGTITHGTPVVNQVKVLTESNRISHHKILAIVGTAESNSEHPLGTAITKYCKQELDTETLGTCIDFQVVPGCGISCKVTNIEGLLHKNNWNIEDNNIKNASLVQIDASNEQSSTSSSMIIDAQISNALNAQQYKVLIGNREWMIRNGLVINNDVNDFMTEHERKGRTAVLVAVDDELCGLIAIADTVKPEAELAIHILKSMGLEVVLMTGDNSKTARSIASQVGITKVFAEVLPSHKVAKVKQLQEEGKRVAMVGDGINDSPALAMANVGIAIGTGTDVAIEAADVVLIRNDLLDVVASIDLSRKTVKRIRINFVFALIYNLVGIPIAAGVFMPIGLVLQPWMGSAAMAASSVSVVLSSLFLKLYRKPTYESYELPARSQIGQKSPSEISVHVGIDDTSRNSPKLGLLDRIVNYSRASINSLLSDKRSLNSVVTSEPDKHSLLVGDFREDDDTAL

SEQ ID NO: 7366 - protein, 1465 aa, Homo sapiens
  Payload ID: 1561;
  Gene Symbol: ATP7B;
  Gene Name: ATPase, Cu++ transporting, beta polypeptide;
  Uniprot ID:  P35670;
  ENSP ID: ENSP00000242839
MPEQERQITAREGASRKILSKLSLPTRAWEPAMKKSFAFDNVGYEGGLDGLGPSSQVATSTVRILGMTCQSCVKSIEDRISNLKGIISMKVSLEQGSATVKYVPSVVCLQQVCHQIGDMGFEASIAEGKAASWPSRSLPAQEAVVKLRVEGMTCQSCVSSIEGKVRKLQGVVRVKVSLSNQEAVITYQPYLIQPEDLRDHVNDMGFEAAIKSKVAPLSLGPIDIERLQSTNPKRPLSSANQNFNNSETLGHQGSHVVTLQLRIDGMHCKSCVLNIEENIGQLLGVQSIQVSLENKTAQVKYDPSCTSPVALQRAIEALPPGNFKVSLPDGAEGSGTDHRSSSSHSPGSPPRNQVQGTCSTTLIAIAGMTCASCVHSIEGMISQLEGVQQISVSLAEGTATVLYNPSVISPEELRAAIEDMGFEASVVSESCSTNPLGNHSAGNSMVQTTDGTPTSVQEVAPHTGRLPANHAPDILAKSPQSTRAVAPQKCFLQIKGMTCASCVSNIERNLQKEAGVLSVLVALMAGKAEIKYDPEVIQPLEIAQFIQDLGFEAAVMEDYAGSDGNIELTITGMTCASCVHNIESKLTRTNGITYASVALATSKALVKFDPEIIGPRDIIKIIEEIGFHASLAQRNPNAHHLDHKMEIKQWKKSFLCSLVFGIPVMALMIYMLIPSNEPHQSMVLDHNIIPGLSILNLIFFILCTFVQLLGGWYFYVQAYKSLRHRSANMDVLIVLATSIAYVYSLVILVVAVAEKAERSPVTFFDTPPMLFVFIALGRWLEHLAKSKTSEALAKLMSLQATEATVVTLGEDNLIIREEQVPMELVQRGDIVKVVPGGKFPVDGKVLEGNTMADESLITGEAMPVTKKPGSTVIAGSINAHGSVLIKATHVGNDTTLAQIVKLVEEAQMSKAPIQQLADRFSGYFVPFIIIMSTLTLVVWIVIGFIDFGVVQRYFPNPNKHISQTEVIIRFAFQTSITVLCIACPCSLGLATPTAVMVGTGVAAQNGILIKGGKPLEMAHKIKTVMFDKTGTITHGVPRVMRVLLLGDVATLPLRKVLAVVGTAEASSEHPLGVAVTKYCKEELGTETLGYCTDFQAVPGCGIGCKVSNVEGILAHSERPLSAPASHLNEAGSLPAEKDAVPQTFSVLIGNREWLRRNGLTISSDVSDAMTDHEMKGQTAILVAIDGVLCGMIAIADAVKQEAALAVHTLQSMGVDVVLITGDNRKTARAIATQVGINKVFAEVLPSHKVAKVQELQNKGKKVAMVGDGVNDSPALAQADMGVAIGTGTDVAIEAADVVLIRNDLLDVVASIHLSKRTVRRIRINLVLALIYNLVGIPIAAGVFMPIGIVLQPWMGSAAMAASSVSVVLSSLQLKCYKKPDLERYEAQAHGHMKPLTASQVSVHIGMDDRWRDSPRATPWDQVSYVSQVSLSSLTSDKPSRHSAAADDDGDKWSLLLNGRDEEQYI

SEQ ID NO: 7367 - protein, 1258 aa, Homo sapiens
  Payload ID: 1561;
  Gene Symbol: ATP7B;
  Gene Name: ATPase, Cu++ transporting, beta polypeptide;
  Uniprot ID:  P35670;
  ENSP ID: ENSP00000342559
MPEQERQITAREGASRKILSKLSLPTRAWEPAMKKSFAFDNVGYEGGLDGLGPSSQVATSTVRILGMTCQSCVKSIEDRISNLKGIISMKVSLEQGSATVKYVPSVVCLQQVCHQIGDMGFEASIAEGKAASWPSRSLPAQEAVVKLRVEGMTCQSCVSSIEGKVRKLQGVVRVKVSLSNQEAVITYQPYLIQPEDLRDHVNDMGFEAAIKSKVAPLSLGPIDIERLQSTNPKRPLSSANQNFNNSETLGHQGSHVVTLQLRIDGMHCKSCVLNIEENIGQLLGVQSIQVSLENKTAQVKYDPSCTSPVALQRAIEALPPGNFKVSLPDGAEGSGTDHRSSSSHSPGSPPRNQVQGTCSTTLIAIAGMTCASCVHSIEGMISQLEGVQQISVSLAEGTATVLYNPSVISPEELRAAIEDMGFEASVVSESCSTNPLGNHSAGNSMVQTTDGTPTSVQEVAPHTGRLPANHAPDILAKSPQSTRAVAPQKCFLQIKGMTCASCVSNIERNLQKEAGVLSVLVALMAGKAEIKYDPEVIQPLEIAQFIQDLGFEAAVMEDYAGSDGNIELTITGMTCASCVHNIESKLTRTNGITYASVALATSKALVKFDPEIIGPRDIIKIIESKTSEALAKLMSLQATEATVVTLGEDNLIIREEQVPMELVQRGDIVKVVPGGKFPVDGKVLEGNTMADESLITGEAMPVTKKPGSTVIAGSINAHGSVLIKATHVGNDTTLAQIVKLVEEAQMSKNPNKHISQTEVIIRFAFQTSITVLCIACPCSLGLATPTAVMVGTGVAAQNGILIKGGKPLEMAHKIKTVMFDKTGTITHGVPRVMRVLLLGDVATLPLRKVLAVVGTAEASSEHPLGVAVTKYCKEELGTETLGYCTDFQAVPGCGIGCKVSNVEGILAHSERPLSAPASHLNEAGSLPAEKDAVPQTFSVLIGNREWLRRNGLTISSDVSDAMTDHEMKGQTAILVAIDGVLCGMIAIADAVKQEAALAVHTLQSMGVDVVLITGDNRKTARAIATQVGINKVFAEVLPSHKVAKVQELQNKGKKVAMVGDGVNDSPALAQADMGVAIGTGTDVAIEAADVVLIRNDLLDVVASIHLSKRTVRRIRINLVLALIYNLVGIPIAAGVFMPIGIVLQPWMGSAAMAASSVSVVLSSLQLKCYKKPDLERYEAQAHGHMKPLTASQVSVHIGMDDRWRDSPRATPWDQVSYVSQVSLSSLTSDKPSRHSAAADDDGDKWSLLLNGRDEEQYI

SEQ ID NO: 7368 - protein, 1354 aa, Homo sapiens
  Payload ID: 1561;
  Gene Symbol: ATP7B;
  Gene Name: ATPase, Cu++ transporting, beta polypeptide;
  Uniprot ID:  P35670;
  ENSP ID: ENSP00000383217
MPEQERQITAREGASRKILSKLSLPTRAWEPAMKKSFAFDNVGYEGGLDGLGPSSQVATSTVRILGMTCQSCVKSIEDRISNLKGIISMKVSLEQGSATVKYVPSVVCLQQVCHQIGDMGFEASIAEGKAASWPSRSLPAQEAVVKLRVEGMTCQSCVSSIEGKVRKLQGVVRVKVSLSNQEAVITYQPYLIQPEDLRDHVNDMGFEAAIKSKVAPLSLGPIDIERLQSTNPKRPLSSANQNFNNSETLGHQGSHVVTLQLRIDGMHCMISQLEGVQQISVSLAEGTATVLYNPSVISPEELRAAIEDMGFEASVVSESCSTNPLGNHSAGNSMVQTTDGTPTSVQEVAPHTGRLPANHAPDILAKSPQSTRAVAPQKCFLQIKGMTCASCVSNIERNLQKEAGVLSVLVALMAGKAEIKYDPEVIQPLEIAQFIQDLGFEAAVMEDYAGSDGNIELTITGMTCASCVHNIESKLTRTNGITYASVALATSKALVKFDPEIIGPRDIIKIIEEIGFHASLAQRNPNAHHLDHKMEIKQWKKSFLCSLVFGIPVMALMIYMLIPSNEPHQSMVLDHNIIPGLSILNLIFFILCTFVQLLGGWYFYVQAYKSLRHRSANMDVLIVLATSIAYVYSLVILVVAVAEKAERSPVTFFDTPPMLFVFIALGRWLEHLAKSKTSEALAKLMSLQATEATVVTLGEDNLIIREEQVPMELVQRGDIVKVVPGGKFPVDGKVLEGNTMADESLITGEAMPVTKKPGSTVIAGSINAHGSVLIKATHVGNDTTLAQIVKLVEEAQMSKAPIQQLADRFSGYFVPFIIIMSTLTLVVWIVIGFIDFGVVQRYFPNPNKHISQTEVIIRFAFQTSITVLCIACPCSLGLATPTAVMVGTGVAAQNGILIKGGKPLEMAHKIKTVMFDKTGTITHGVPRVMRVLLLGDVATLPLRKVLAVVGTAEASSEHPLGVAVTKYCKEELGTETLGYCTDFQAVPGCGIGCKVSNVEGILAHSERPLSAPASHLNEAGSLPAEKDAVPQTFSVLIGNREWLRRNGLTISSDVSDAMTDHEMKGQTAILVAIDGVLCGMIAIADAVKQEAALAVHTLQSMGVDVVLITGDNRKTARAIATQVGINKVFAEVLPSHKVAKVQELQNKGKKVAMVGDGVNDSPALAQADMGVAIGTGTDVAIEAADVVLIRNDLLDVVASIHLSKRTVRRIRINLVLALIYNLVGIPIAAGVFMPIGIVLQPWMGSAAMAASSVSVVLSSLQLKCYKKPDLERYEAQAHGHMKPLTASQVSVHIGMDDRWRDSPRATPWDQVSYVSQVSLSSLTSDKPSRHSAAADDDGDKWSLLLNGRDEEQYI

SEQ ID NO: 7369 - protein, 1035 aa, Homo sapiens
  Payload ID: 1561;
  Gene Symbol: ATP7B;
  Gene Name: ATPase, Cu++ transporting, beta polypeptide;
  ENSP ID: ENSP00000383221
MPEQERQITAREGASRKILSKLSLPTRAWEPAMKKSFAFDNVGYEGGLDGLGPSSQVATSTVRILGMTCQSCVKSIEDRISNLKGIISMKVSLEQGSATVKYVPSVVCLQQVCHQIGDMGFEASIAEGKAASWPSRSLPAQEAVVKLRVEGMTCQSCVSSIEGKVRKLQGVVRVKVSLSNQEAVITYQPYLIQPEDLRDHVNDMGFEAAIKSKVAPLSLGPIDIERLQSTNPKRPLSSANQNFNNSETLGHQGSHVVTLQLRIDGMHCKSCVLNIEENIGQLLGVQSIQVSLENKTAQVKYDPSCTSPVALQRAIEALPPGNFKVSLPDGAEGSGTDHRSSSSHSPGSPPRNQVQGTCSTTLIAIAGMTCASCVHSIEGMISQLEGVQQISVSLAEGTATVLYNPSVISPEELRAAIEDMGFEASVVSGEAMPVTKKPGSTVIAGSINAHGSVLIKATHVGNDTTLAQIVKLVEEAQMSKAPIQQLADRFSGYFVPFIIIMSTLTLVVWIVIGFIDFGVVQRYFPNPNKHISQTEVIIRFAFQTSITVLCIACPCSLGLATPTAVMVGTGVAAQNGILIKGGKPLEMAHKIKTVMFDKTGTITHGVPRVMRVLLLGDVATLPLRKVLAVVGTAEASSEHPLGVAVTKYCKEELGTETLGYCTDFQAVPGCGIGCKVSNVEGILAHSERPLSAPASHLNEAGSLPAEKDAVPQTFSVLIGNREWLRRNGLTISSDVSDAMTDHEMKGQTAILVAIDGVLCGMIAIADAVKQEAALAVHTLQSMGVDVVLITGDNRKTARAIATQVGINKVFAEVLPSHKVAKVQELQNKGKKVAMVGDGVNDSPALAQADMGVAIGTGTDVAIEAADVVLIRNDLLDVVASIHLSKRTVRRIRINLVLALIYNLVGIPIAAGVFMPIGIVLQPWMGSAAMAASSVSVVLSSLQLKCYKKPDLERYEAQAHGHMKPLTASQVSVHIGMDDRWRDSPRATPWDQVSYVSQVSLSSLTSDKPSRHSAAADDDGDKWSLLLNGRDEEQYI

SEQ ID NO: 7370 - protein, 1400 aa, Homo sapiens
  Payload ID: 1561;
  Gene Symbol: ATP7B;
  Gene Name: ATPase, Cu++ transporting, beta polypeptide;
  ENSP ID: ENSP00000393343
MPEQERQITAREGASRKILSKLSLPTRAWEPAMKKSFAFDNVGYEGGLDGLGPSSQVATSTVRILGMTCQSCVKSIEDRISNLKGIISMKVSLEQGSATVKYVPSVVCLQQVCHQIGDMGFEASIAEGKAASWPSRSLPAQEAVVKLRVEGMTCQSCVSSIEGKVRKLQGVVRVKVSLSNQEAVITYQPYLIQPEDLRDHVNDMGFEAAIKSKVAPLSLGPIDIERLQSTNPKRPLSSANQNFNNSETLGHQGSHVVTLQLRIDGMHCKSCVLNIEENIGQLLGVQSIQVSLENKTAQVKYDPSCTSPVALQRAIEALPPGNFKVSLPDGAEGSGTDHRSSSSHSPGSPPRNQVQGTCSTTLIAIAGMTCASCVHSIEGMISQLEGVQQISVSLAEGTATVLYNPSVISPEELRAAIEDMGFEASVVSESCSTNPLGNHSAGNSMVQTTDGTPTSVQEVAPHTGRLPANHAPDILAKSPQSTRAVAPQKCFLQIKGMTCASCVSNIERNLQKEAGVLSVLVALMAGKAEIKYDPEVIQPLEIAQFIQDLGFEAAVMEDYAGSDGNIELTITGMTCASCVHNIESKLTRTNGITYASVALATSKALVKFDPEIIGPRDIIKIIEEIGFHASLAQRNPNAHHLDHKMEIKQWKKSFLCSLVFGIPVMALMIYMLIPSNEPHQSMVLDHNIIPGLSILNLIFFILCTFVQLLGGWYFYVQAYKSLRHRSANMDVLIVLATSIAYVYSLVILVVAVAEKAERSPVTFFDTPPMLFVFIALGRWLEHLAKSKTSEALAKLMSLQATEATVVTLGEDNLIIREEQVPMELVQRGDIVKVVPGGKFPVDGKVLEGNTMADESLITGEAMPVTKKPGSTVIAGSINAHGSVLIKATHVGNDTTLAQIVKLVEEAQMSKAPIQQLADRFSGYFVPFIIIMSTLTLVVWIVIGFIDFGVVQRYFPIKTVMFDKTGTITHGVPRVMRVLLLGDVATLPLRKVLAVVGTAEASSEHPLGVAVTKYCKEELGTETLGYCTDFQAVPGCGIGCKVSNVEGILAHSERPLSAPASHLNEAGSLPAEKDAVPQTFSVLIGNREWLRRNGLTISSDVSDAMTDHEMKGQTAILVAIDGVLCGMIAIADAVKQEAALAVHTLQSMGVDVVLITGDNRKTARAIATQVGINKVFAEVLPSHKVAKVQELQNKGKKVAMVGDGVNDSPALAQADMGVAIGTGTDVAIEAADVVLIRNDLLDVVASIHLSKRTVRRIRINLVLALIYNLVGIPIAAGVFMPIGIVLQPWMGSAAMAASSVSVVLSSLQLKCYKKPDLERYEAQAHGHMKPLTASQVSVHIGMDDRWRDSPRATPWDQVSYVSQVSLSSLTSDKPSRHSAAADDDGDKWSLLLNGRDEEQYI

SEQ ID NO: 7371 - protein, 1387 aa, Homo sapiens
  Payload ID: 1561;
  Gene Symbol: ATP7B;
  Gene Name: ATPase, Cu++ transporting, beta polypeptide;
  ENSP ID: ENSP00000416738
MPEQERQITAREGASRKILSKLSLPTRAWEPAMKKSFAFDNVGYEGGLDGLGPSSQVATSTVRILGMTCQSCVKSIEDRISNLKGIISMKVSLEQGSATVKYVPSVVCLQQVCHQIGDMGFEASIAEGKAASWPSRSLPAQEAVVKLRVEGMTCQSCVSSIEGKVRKLQGVVRVKVSLSNQEAVITYQPYLIQPEDLRDHVNDMGFEAAIKSKVAPLSLGPIDIERLQSTNPKRPLSSANQNFNNSETLGHQGSHVVTLQLRIDGMHCKSCVLNIEENIGQLLGVQSIQVSLENKTAQVKYDPSCTSPVALQRAIEALPPGNFKVSLPDGAEGSGTDHRSSSSHSPGSPPRNQVQGTCSTTLIAIAGMTCASCVHSIEGMISQLEGVQQISVSLAEGTATVLYNPSVISPEELRAAIEDMGFEASVVSESCSTNPLGNHSAGNSMVQTTDGTPTSVQEVAPHTGRLPANHAPDILAKSPQSTRAVAPQKCFLQIKGMTCASCVSNIERNLQKEAGVLSVLVALMAGKAEIKYDPEVIQPLEIAQFIQDLGFEAAVMEDYAGSDGNIELTITGMTCASCVHNIESKLTRTNGITYASVALATSKALVKFDPEIIGPRDIIKIIEEIGFHASLAQRNPNAHHLDHKMEIKQWKKSFLCSLVFGIPVMALMIYMLIPSNEPHQSMVLDHNIIPGLSILNLIFFILCTFVQSKTSEALAKLMSLQATEATVVTLGEDNLIIREEQVPMELVQRGDIVKVVPGGKFPVDGKVLEGNTMADESLITGEAMPVTKKPGSTVIAGSINAHGSVLIKATHVGNDTTLAQIVKLVEEAQMSKAPIQQLADRFSGYFVPFIIIMSTLTLVVWIVIGFIDFGVVQRYFPNPNKHISQTEVIIRFAFQTSITVLCIACPCSLGLATPTAVMVGTGVAAQNGILIKGGKPLEMAHKIKTVMFDKTGTITHGVPRVMRVLLLGDVATLPLRKVLAVVGTAEASSEHPLGVAVTKYCKEELGTETLGYCTDFQAVPGCGIGCKVSNVEGILAHSERPLSAPASHLNEAGSLPAEKDAVPQTFSVLIGNREWLRRNGLTISSDVSDAMTDHEMKGQTAILVAIDGVLCGMIAIADAVKQEAALAVHTLQSMGVDVVLITGDNRKTARAIATQVGINKVFAEVLPSHKVAKVQELQNKGKKVAMVGDGVNDSPALAQADMGVAIGTGTDVAIEAADVVLIRNDLLDVVASIHLSKRTVRRIRINLVLALIYNLVGIPIAAGVFMPIGIVLQPWMGSAAMAASSVSVVLSSLQLKCYKKPDLERYEAQAHGHMKPLTASQVSVHIGMDDRWRDSPRATPWDQVSYVSQVSLSSLTSDKPSRHSAAADDDGDKWSLLLNGRDEEQYI

SEQ ID NO: 7372 - protein, 894 aa, Homo sapiens
  Payload ID: 1561;
  Gene Symbol: ATP7B;
  Gene Name: ATPase, Cu++ transporting, beta polypeptide;
  ENSP ID: ENSP00000489234
MPEQERQITAREGASRKILSKLSLPTRAWEPAMKKSFAFDNVGYEGGLDGLGPSSQVATSTVRILGMTCQSCVKSIEDRISNLKGIISMKVSLEQGSATVKYVPSVVCLQQVCHQIGDMGFEASIAEGKAASWPSRSLPAQEAVVKLRVEGMTCQSCVSSIEGKVRKLQGVVRVKVSLSNQEAVITYQPYLIQPEDLRDHVNDMGFEAAIKSKVAPLSLGPIDIERLQSTNPKRPLSSANQNFNNSETLGHQGSHVVTLQLRIDGMHCKSCVLNIEENIGQLLGVQSIQVSLENKTAQVKYDPSCTSPVALQRAIEALPPGNFKVSLPDGAEGSGTDHRSSSSHSPGSPPRNQVQGTCSTTLIAIAGMTCASCVHSIEGMISQLEGVQQISVSLAEGTATVLYNPSVISPEELRAAIEDMGFEASVVSESCSTNPLGNHSAGNSMVQTTDGTPTSVQEVAPHTGRLPANHAPDILAKSPQSTRAVAPQKCFLQIKGMTCASCVSNIERNLQKEAGVLSVLVALMAGKAEIKYDPEVIQPLEIAQFIQDLGFEAAVMEDYAGSDGNIELTITGMTCASCVHNIESKLTRTNGITYASVALATSKALVKFDPEIIGPRDIIKIIEEIGFHASLAQRNPNAHHLDHKMEIKQWKKSFLCSLVFGIPVMALMIYMLIPSNEPHQSMVLDHNIIPGLSILNLIFFILCTFVQSKTSEALAKLMSLQATEATVVTLGEDNLIIREEQVPMELVQRGDIVKVVPGGKFPVDGKVLEGNTMADESLITGEAMPVTKKPGSTVIAGSINAHGSVLIKATHVGNDTTLAQIVKLVEEAQMSKAPIQQLADRFSGYFVPFIIIMSTLTLVVWIVIGFIDFGVVQRYFPGGCWQMRTPTSTSPRQR

SEQ ID NO: 7373 - protein, 1417 aa, Homo sapiens
  Payload ID: 1561;
  Gene Symbol: ATP7B;
  Gene Name: ATPase, Cu++ transporting, beta polypeptide;
  ENSP ID: ENSP00000489398
MPEQERQITAREGASRKILSKLSLPTRAWEPAMKKSFAFDNVGYEGGLDGLGPSSQVATSTVRILGMTCQSCVKSIEDRISNLKGIISMKVSLEQGSATVKYVPSVVCLQQVCHQIGDMGFEASIAEGKAASWPSRSLPAQEAVVKLRVEGMTCQSCVSSIEGKVRKLQGVVRVKVSLSNQEAVITYQPYLIQPEDLRDHVNDMGFEAAIKSKVAPLSLGPIDIERLQSTNPKRPLSSANQNFNNSETLGHQGSHVVTLQLRIDGMHCKSCVLNIEENIGQLLGVQSIQVSLENKTAQVKYDPSCTSPVALQRAIEALPPGNFKVSLPDGAEGSGTDHRSSSSHSPGSPPRNQVQGTCSTTLIAIAGMTCASCVHSIEGMISQLEGVQQISVSLAEGTATVLYNPSVISPEELRAAIEDMGFEASVVSESCSTNPLGNHSAGNSMVQTTDGTPTSVQEVAPHTGRLPANHAPDILAKSPQSTRAVAPQKCFLQIKGMTCASCVSNIERNLQKEAGVLSVLVALMAGKAEIKYDPEVIQPLEIAQFIQDLGFEAAVMEDYAGSDGNIELTITGMTCASCVHNIESKLTRTNGITYASVALATSKALVKFDPEIIGPRDIIKIIEEIGFHASLAQRNPNAHHLDHKMEIKQWKKSFLCSLVFGIPVMALMIYMLIPSNEPHQSMVLDHNIIPGLSILNLIFFILCTFVQAERSPVTFFDTPPMLFVFIALGRWLEHLAKSKTSEALAKLMSLQATEATVVTLGEDNLIIREEQVPMELVQRGDIVKVVPGGKFPVDGKVLEGNTMADESLITGEAMPVTKKPGSTVIAGSINAHGSVLIKATHVGNDTTLAQIVKLVEEAQMSKAPIQQLADRFSGYFVPFIIIMSTLTLVVWIVIGFIDFGVVQRYFPNPNKHISQTEVIIRFAFQTSITVLCIACPCSLGLATPTAVMVGTGVAAQNGILIKGGKPLEMAHKIKTVMFDKTGTITHGVPRVMRVLLLGDVATLPLRKVLAVVGTAEASSEHPLGVAVTKYCKEELGTETLGYCTDFQAVPGCGIGCKVSNVEGILAHSERPLSAPASHLNEAGSLPAEKDAVPQTFSVLIGNREWLRRNGLTISSDVSDAMTDHEMKGQTAILVAIDGVLCGMIAIADAVKQEAALAVHTLQSMGVDVVLITGDNRKTARAIATQVGINKVFAEVLPSHKVAKVQELQNKGKKVAMVGDGVNDSPALAQADMGVAIGTGTDVAIEAADVVLIRNDLLDVVASIHLSKRTVRRIRINLVLALIYNLVGIPIAAGVFMPIGIVLQPWMGSAAMAASSVSVVLSSLQLKCYKKPDLERYEAQAHGHMKPLTASQVSVHIGMDDRWRDSPRATPWDQVSYVSQVSLSSLTSDKPSRHSAAADDDGDKWSLLLNGRDEEQYI

SEQ ID NO: 7374 - protein, 42 aa, Homo sapiens
  Payload ID: 1561;
  Gene Symbol: ATP7B;
  Gene Name: ATPase, Cu++ transporting, beta polypeptide;
  ENSP ID: ENSP00000489512
  MOD_RES (1)..(1): Any amino acid
XEEIGFHASLAQRNPNAHHLDHKMEIKHSSVGGTSTFRPTNL

SEQ ID NO: 7375 - protein, 81 aa, Homo sapiens
  Payload ID: 1562;
  Gene Symbol: ATP6V0E2;
  Gene Name: ATPase, H+ transporting V0 subunit e2;
  Uniprot ID:  Q8NHE4;
  ENSP ID: ENSP00000396148
MTAHSFALPVIIFTTFWGLVGIAGPWFVPKGPNRGVIITMLVATAVCCYLFWLIAILAQLNPLFGPQLKNETIWYVRFLWE

SEQ ID NO: 7376 - protein, 130 aa, Homo sapiens
  Payload ID: 1562;
  Gene Symbol: ATP6V0E2;
  Gene Name: ATPase, H+ transporting V0 subunit e2;
  Uniprot ID:  Q8NHE4;
  ENSP ID: ENSP00000410220
MRVRGPARLIASGARLLLRMLSALPGWGPAHLQRPLLGPASCLGILRPAMTAHSFALPVIIFTTFWGLVGIAGPWFVPKGPNRGVIITMLVATAVCCYLFWLIAILAQLNPLFGPQLKNETIWYVRFLWE

SEQ ID NO: 7377 - protein, 213 aa, Homo sapiens
  Payload ID: 1562;
  Gene Symbol: ATP6V0E2;
  Gene Name: ATPase, H+ transporting V0 subunit e2;
  ENSP ID: ENSP00000411672
MRVRGPARLIASGARLLLRMLSALPGWGPAHLQRPLLGPASCLGILRPAMTAHSFALPVIIFTTFWGLVGIAGPWFVPKGPNRGVIITMLVATAVCCYLLCPALGMTVAPLSLTTPSSGPSPTQLCLVTSSLLLAPRDPDPQGLPGSWKSSQSSQPARALGSPGHSSGRGDVLLQYPHCSGVCPLSQGDAAGELVWVGSFPLQTGQMPGLSPS

SEQ ID NO: 7378 - protein, 187 aa, Homo sapiens
  Payload ID: 1562;
  Gene Symbol: ATP6V0E2;
  Gene Name: ATPase, H+ transporting V0 subunit e2;
  Uniprot ID:  Q8NHE4;
  ENSP ID: ENSP00000417939
MTAHSFALPVIIFTTFWGLVGIAGPWFVPKGPNRGVIITMLVATAVCCYLFWLIAILAQLNPLFGPQLKNETIWCPALGMTVAPLSLTTPSSGPSPTQLCLVTSSLLLAPRDPDPQGLPGSWKSSQSSQPARALGSPGHSSGRGDVLLQYPHCSGVCPLSQGDAAGELVWVGSFPLQTGQMPGLSPS

SEQ ID NO: 7379 - protein, 79 aa, Homo sapiens
  Payload ID: 1562;
  Gene Symbol: ATP6V0E2;
  Gene Name: ATPase, H+ transporting V0 subunit e2;
  ENSP ID: ENSP00000420012
MTAHSFALPVIIFTTFWGLVGIAGPWFVPKGPNRGVIITMLVATAVCCYLFFQAAPYTHEITTLEICTWEFLLFMNAPR

SEQ ID NO: 7380 - protein, 81 aa, Homo sapiens; identical to SEQ ID NO: 7375
  Payload ID: 1562;
  Gene Symbol: ATP6V0E2;
  Gene Name: ATPase, H+ transporting V0 subunit e2;
  Uniprot ID:  Q8NHE4;
  ENSP ID: ENSP00000420679

SEQ ID NO: 7381 - protein, 81 aa, Homo sapiens; identical to SEQ ID NO: 7375
  Payload ID: 1562;
  Gene Symbol: ATP6V0E2;
  Gene Name: ATPase, H+ transporting V0 subunit e2;
  Uniprot ID:  Q8NHE4;
  ENSP ID: ENSP00000475645

SEQ ID NO: 7382 - protein, 164 aa, Homo sapiens
  Payload ID: 1562;
  Gene Symbol: ATP6V0E2;
  Gene Name: ATPase, H+ transporting V0 subunit e2;
  Uniprot ID:  Q8NHE4;
  ENSP ID: ENSP00000475904
MTAHSFALPVIIFTTFWGLVGIAGPWFVPKGPNRGVIITMLVATAVCCYLLCPALGMTVAPLSLTTPSSGPSPTQLCLVTSSLLLAPRDPDPQGLPGSWKSSQSSQPARALGSPGHSSGRGDVLLQYPHCSGVCPLSQGDAAGELVWVGSFPLQTGQMPGLSPS

SEQ ID NO: 7383 - protein, 130 aa, Homo sapiens; identical to SEQ ID NO: 7376
  Payload ID: 1562;
  Gene Symbol: ATP6V0E2;
  Gene Name: ATPase, H+ transporting V0 subunit e2;
  Uniprot ID:  Q8NHE4;
  ENSP ID: ENSP00000481176

SEQ ID NO: 7384 - protein, 213 aa, Homo sapiens; identical to SEQ ID NO: 7377
  Payload ID: 1562;
  Gene Symbol: ATP6V0E2;
  Gene Name: ATPase, H+ transporting V0 subunit e2;
  ENSP ID: ENSP00000482231

SEQ ID NO: 7385 - protein, 118 aa, Homo sapiens
  Payload ID: 1563;
  Gene Symbol: ATP6V1G1;
  Gene Name: ATPase, H+ transporting, lysosomal 13kDa, V1 subunit G1;
  Uniprot ID:  O75348;
  ENSP ID: ENSP00000363162
MASQSQGIQQLLQAEKRAAEKVSEARKRKNRRLKQAKEEAQAEIEQYRLQREKEFKAKEAAALGSRGSCSTEVEKETQEKMTILQTYFRQNRDEVLDNLLAFVCDIRPEIHENYRING

SEQ ID NO: 7386 - protein, 118 aa, Homo sapiens
  Payload ID: 1564;
  Gene Symbol: ATP6V1G2;
  Gene Name: ATPase, H+ transporting, lysosomal 13kDa, V1 subunit G2;
  Uniprot ID:  O95670;
  ENSP ID: ENSP00000302194
MASQSQGIQQLLQAEKRAAEKVADARKRKARRLKQAKEEAQMEVEQYRREREHEFQSKQQAAMGSQGNLSAEVEQATRRQVQGMQSSQQRNRERVLAQLLGMVCDVRPQVHPNYRISA

SEQ ID NO: 7387 - protein, 78 aa, Homo sapiens
  Payload ID: 1564;
  Gene Symbol: ATP6V1G2;
  Gene Name: ATPase, H+ transporting, lysosomal 13kDa, V1 subunit G2;
  Uniprot ID:  O95670;
  ENSP ID: ENSP00000365321
MASQSQGIQQLLQAEKRAAEKVADARKRKARRLKQATRRQVQGMQSSQQRNRERVLAQLLGMVCDVRPQVHPNYRISA

SEQ ID NO: 7388 - protein, 118 aa, Homo sapiens; identical to SEQ ID NO: 7386
  Payload ID: 1564;
  Gene Symbol: ATP6V1G2;
  Gene Name: ATPase, H+ transporting, lysosomal 13kDa, V1 subunit G2;
  Uniprot ID:  O95670;
  ENSP ID: ENSP00000372995

SEQ ID NO: 7389 - protein, 158 aa, Homo sapiens
  Payload ID: 1564;
  Gene Symbol: ATP6V1G2;
  Gene Name: ATPase, H+ transporting, lysosomal 13kDa, V1 subunit G2;
  ENSP ID: ENSP00000390148
GGQQHAVPCPHGGPGGQGQPRAEAAGTGQGHRGGHRPGAVVGAAQHLHRGLGVAGGGPGPGPAVLQTRKARRLKQAKEEAQMEVEQYRREREHEFQSKQQAAMGSQGNLSAEVEQATRRQVQGMQSSQQRNRERVLAQLLGMVCDVRPQVHPNYRISA

SEQ ID NO: 7390 - protein, 118 aa, Homo sapiens; identical to SEQ ID NO: 7386
  Payload ID: 1564;
  Gene Symbol: ATP6V1G2;
  Gene Name: ATPase, H+ transporting, lysosomal 13kDa, V1 subunit G2;
  Uniprot ID:  O95670;
  ENSP ID: ENSP00000395436

SEQ ID NO: 7391 - protein, 78 aa, Homo sapiens; identical to SEQ ID NO: 7387
  Payload ID: 1564;
  Gene Symbol: ATP6V1G2;
  Gene Name: ATPase, H+ transporting, lysosomal 13kDa, V1 subunit G2;
  Uniprot ID:  O95670;
  ENSP ID: ENSP00000402430

SEQ ID NO: 7392 - protein, 78 aa, Homo sapiens; identical to SEQ ID NO: 7387
  Payload ID: 1564;
  Gene Symbol: ATP6V1G2;
  Gene Name: ATPase, H+ transporting, lysosomal 13kDa, V1 subunit G2;
  Uniprot ID:  O95670;
  ENSP ID: ENSP00000403158

SEQ ID NO: 7393 - protein, 118 aa, Homo sapiens; identical to SEQ ID NO: 7386
  Payload ID: 1564;
  Gene Symbol: ATP6V1G2;
  Gene Name: ATPase, H+ transporting, lysosomal 13kDa, V1 subunit G2;
  Uniprot ID:  O95670;
  ENSP ID: ENSP00000406372

SEQ ID NO: 7394 - protein, 118 aa, Homo sapiens; identical to SEQ ID NO: 7386
  Payload ID: 1564;
  Gene Symbol: ATP6V1G2;
  Gene Name: ATPase, H+ transporting, lysosomal 13kDa, V1 subunit G2;
  Uniprot ID:  O95670;
  ENSP ID: ENSP00000406389

SEQ ID NO: 7395 - protein, 78 aa, Homo sapiens; identical to SEQ ID NO: 7387
  Payload ID: 1564;
  Gene Symbol: ATP6V1G2;
  Gene Name: ATPase, H+ transporting, lysosomal 13kDa, V1 subunit G2;
  Uniprot ID:  O95670;
  ENSP ID: ENSP00000406575

SEQ ID NO: 7396 - protein, 78 aa, Homo sapiens; identical to SEQ ID NO: 7387
  Payload ID: 1564;
  Gene Symbol: ATP6V1G2;
  Gene Name: ATPase, H+ transporting, lysosomal 13kDa, V1 subunit G2;
  Uniprot ID:  O95670;
  ENSP ID: ENSP00000406668

SEQ ID NO: 7397 - protein, 118 aa, Homo sapiens; identical to SEQ ID NO: 7386
  Payload ID: 1564;
  Gene Symbol: ATP6V1G2;
  Gene Name: ATPase, H+ transporting, lysosomal 13kDa, V1 subunit G2;
  Uniprot ID:  O95670;
  ENSP ID: ENSP00000408670

SEQ ID NO: 7398 - protein, 78 aa, Homo sapiens; identical to SEQ ID NO: 7387
  Payload ID: 1564;
  Gene Symbol: ATP6V1G2;
  Gene Name: ATPase, H+ transporting, lysosomal 13kDa, V1 subunit G2;
  Uniprot ID:  O95670;
  ENSP ID: ENSP00000409104

SEQ ID NO: 7399 - protein, 118 aa, Homo sapiens; identical to SEQ ID NO: 7386
  Payload ID: 1564;
  Gene Symbol: ATP6V1G2;
  Gene Name: ATPase, H+ transporting, lysosomal 13kDa, V1 subunit G2;
  Uniprot ID:  O95670;
  ENSP ID: ENSP00000413222

SEQ ID NO: 7400 - protein, 78 aa, Homo sapiens; identical to SEQ ID NO: 7387
  Payload ID: 1564;
  Gene Symbol: ATP6V1G2;
  Gene Name: ATPase, H+ transporting, lysosomal 13kDa, V1 subunit G2;
  Uniprot ID:  O95670;
  ENSP ID: ENSP00000416031

SEQ ID NO: 7401 - protein, 77 aa, Homo sapiens
  Payload ID: 1564;
  Gene Symbol: ATP6V1G2;
  Gene Name: ATPase, H+ transporting, lysosomal 13kDa, V1 subunit G2;
  Uniprot ID:  O95670;
  ENSP ID: ENSP00000419698
MEVEQYRREREHEFQSKQQAAMGSQGNLSAEVEQATRRQVQGMQSSQQRNRERVLAQLLGMVCDVRPQVHPNYRISA

SEQ ID NO: 7402 - protein, 118 aa, Homo sapiens
  Payload ID: 1565;
  Gene Symbol: ATP6V1G3;
  Gene Name: ATPase, H+ transporting, lysosomal 13kDa, V1 subunit G3;
  Uniprot ID:  Q96LB4;
  ENSP ID: ENSP00000281087
MTSQSQGIHQLLQAEKRAKDKLEEAKKRKGKRLKQAKEEAMVEIDQYRMQRDKEFRLKQSKIMGSQNNLSDEIEEQTLGKIQELNGHYNKYMESVMNQLLSMVCDMKPEIHVNYRATN

SEQ ID NO: 7403 - protein, 59 aa, Homo sapiens
  Payload ID: 1565;
  Gene Symbol: ATP6V1G3;
  Gene Name: ATPase, H+ transporting, lysosomal 13kDa, V1 subunit G3;
  Uniprot ID:  Q96LB4;
  ENSP ID: ENSP00000309574
MTSQSQGIHQLLQAEKRAKDKLEEAKKILHLLFLKRRDWDCFWKRKAIEASQGGSNGRN

SEQ ID NO: 7404 - protein, 118 aa, Homo sapiens; identical to SEQ ID NO: 7402
  Payload ID: 1565;
  Gene Symbol: ATP6V1G3;
  Gene Name: ATPase, H+ transporting, lysosomal 13kDa, V1 subunit G3;
  Uniprot ID:  Q96LB4;
  ENSP ID: ENSP00000356351

SEQ ID NO: 7405 - protein, 118 aa, Homo sapiens; identical to SEQ ID NO: 7402
  Payload ID: 1565;
  Gene Symbol: ATP6V1G3;
  Gene Name: ATPase, H+ transporting, lysosomal 13kDa, V1 subunit G3;
  Uniprot ID:  Q96LB4;
  ENSP ID: ENSP00000356352

SEQ ID NO: 7406 - protein, 124 aa, Homo sapiens
  Payload ID: 1565;
  Gene Symbol: ATP6V1G3;
  Gene Name: ATPase, H+ transporting, lysosomal 13kDa, V1 subunit G3;
  Uniprot ID:  Q96LB4;
  ENSP ID: ENSP00000417171
MTSQSQGIHQLLQAEKRAKDKLEEAKKKTGTASGKGKRLKQAKEEAMVEIDQYRMQRDKEFRLKQSKIMGSQNNLSDEIEEQTLGKIQELNGHYNKYMESVMNQLLSMVCDMKPEIHVNYRATN

SEQ ID NO: 7407 - protein, 124 aa, Homo sapiens; identical to SEQ ID NO: 7406
  Payload ID: 1565;
  Gene Symbol: ATP6V1G3;
  Gene Name: ATPase, H+ transporting, lysosomal 13kDa, V1 subunit G3;
  Uniprot ID:  Q96LB4;
  ENSP ID: ENSP00000461228

SEQ ID NO: 7408 - protein, 118 aa, Homo sapiens; identical to SEQ ID NO: 7402
  Payload ID: 1565;
  Gene Symbol: ATP6V1G3;
  Gene Name: ATPase, H+ transporting, lysosomal 13kDa, V1 subunit G3;
  Uniprot ID:  Q96LB4;
  ENSP ID: ENSP00000461329

SEQ ID NO: 7409 - protein, 59 aa, Homo sapiens; identical to SEQ ID NO: 7403
  Payload ID: 1565;
  Gene Symbol: ATP6V1G3;
  Gene Name: ATPase, H+ transporting, lysosomal 13kDa, V1 subunit G3;
  Uniprot ID:  Q96LB4;
  ENSP ID: ENSP00000461616

SEQ ID NO: 7410 - protein, 119 aa, Homo sapiens
  Payload ID: 1566;
  Gene Symbol: ATP6V1F;
  Gene Name: ATPase, H+ transporting, lysosomal 14kDa, V1 subunit F;
  Uniprot ID:  Q16864;
  ENSP ID: ENSP00000249289
MAGRGKLIAVIGDEDTVTGFLLGGIGELNKNRHPNFLVVEKDTTINEIEDTFRQFLNRDDIGIILINQYIAEMVRHALDAHQQSIPAVLEIPSKEHPYDAAKDSILRRARGMFTAEDLR

SEQ ID NO: 7411 - protein, 147 aa, Homo sapiens
  Payload ID: 1566;
  Gene Symbol: ATP6V1F;
  Gene Name: ATPase, H+ transporting, lysosomal 14kDa, V1 subunit F;
  Uniprot ID:  Q16864;
  ENSP ID: ENSP00000417378
MAGRGKLIAVIGDEDTVTGFLLGGIGELNKNRHPNFLVVEKDTTINEIEDTFRSLGSLPGSVVEANPNQRDPPLWDEIDSRQFLNRDDIGIILINQYIAEMVRHALDAHQQSIPAVLEIPSKEHPYDAAKDSILRRARGMFTAEDLR

SEQ ID NO: 7412 - protein, 155 aa, Homo sapiens
  Payload ID: 1567;
  Gene Symbol: ATP6V0C;
  Gene Name: ATPase, H+ transporting, lysosomal 16kDa, V0 subunit c;
  Uniprot ID:  P27449;
  ENSP ID: ENSP00000329757
MSESKSGPEYASFFAVMGASAAMVFSALGAAYGTAKSGTGIAAMSVMRPEQIMKSIIPVVMAGIIAIYGLVVAVLIANSLNDDISLYKSFLQLGAGLSVGLSGLAAGFAIGIVGDAGVRGTAQQPRLFVGMILILIFAEVLGLYGLIVALILSTK

SEQ ID NO: 7413 - protein, 63 aa, Homo sapiens
  Payload ID: 1567;
  Gene Symbol: ATP6V0C;
  Gene Name: ATPase, H+ transporting, lysosomal 16kDa, V0 subunit c;
  ENSP ID: ENSP00000454597
MSESKSGPDPGRCLWHSQERYRHCGHVCHAAGADHEVHHPSGHGWHHRHLRPGGGSPHRQLPE

SEQ ID NO: 7414 - protein, 112 aa, Homo sapiens
  Payload ID: 1567;
  Gene Symbol: ATP6V0C;
  Gene Name: ATPase, H+ transporting, lysosomal 16kDa, V0 subunit c;
  ENSP ID: ENSP00000454868
MSVMRPEQIMKSIIPVVMAGIIAIYGLVVAVLIANSLNDDISLYKSFLQLGAGLSVGLSGLAAGFAIGIVGDAGVRGTAQQPRLFVGMILILIFAEVLGLYGLIVALILSTK

SEQ ID NO: 7415 - protein, 112 aa, Homo sapiens; identical to SEQ ID NO: 7414
  Payload ID: 1567;
  Gene Symbol: ATP6V0C;
  Gene Name: ATPase, H+ transporting, lysosomal 16kDa, V0 subunit c;
  ENSP ID: ENSP00000457782

SEQ ID NO: 7416 - protein, 158 aa, Homo sapiens
  Payload ID: 1568;
  Gene Symbol: ATP6V0B;
  Gene Name: ATPase, H+ transporting, lysosomal 21kDa, V0 subunit b;
  Uniprot ID:  Q99437;
  ENSP ID: ENSP00000236067
MWSNLGIGLAISLSVVGAAWGIYITGSSIIGGGVKAPRIKTKNLVSIIFCEAVAIYGIIMAIVISNMAEPFSATDPKAIGHRNYHAGYSMFGAGLTVGLSNLFCGVCVGIVGSGAALADAQNPSLFVKILIVEIFGSAIGLFGVIVAILQTSRVKMGD

SEQ ID NO: 7417 - protein, 88 aa, Homo sapiens
  Payload ID: 1568;
  Gene Symbol: ATP6V0B;
  Gene Name: ATPase, H+ transporting, lysosomal 21kDa, V0 subunit b;
  ENSP ID: ENSP00000431375
  MOD_RES (1)..(1): Any amino acid
XAVGEAGSWRAGAASRPSWPGRNSAGKWPAGNTGPPRALHPRLWGLAPARASDSDKGDPDFQLLEEGCGRESATPFLIWASALMWHGS

SEQ ID NO: 7418 - protein, 205 aa, Homo sapiens
  Payload ID: 1568;
  Gene Symbol: ATP6V0B;
  Gene Name: ATPase, H+ transporting, lysosomal 21kDa, V0 subunit b;
  Uniprot ID:  Q99437;
  ENSP ID: ENSP00000431605
MTGLALLYSGVFVAFWACALAVGVCYTIFDLGFRFDVAWFLTETSPFMWSNLGIGLAISLSVVGAAWGIYITGSSIIGGGVKAPRIKTKNLVSIIFCEAVAIYGIIMAIVISNMAEPFSATDPKAIGHRNYHAGYSMFGAGLTVGLSNLFCGVCVGIVGSGAALADAQNPSLFVKILIVEIFGSAIGLFGVIVAILQTSRVKMGD

SEQ ID NO: 7419 - protein, 252 aa, Homo sapiens
  Payload ID: 1568;
  Gene Symbol: ATP6V0B;
  Gene Name: ATPase, H+ transporting, lysosomal 21kDa, V0 subunit b;
  ENSP ID: ENSP00000432754
MTGLALLYSGVFVAFWACALAVGEAGSWRAGAASRPSWPGRNSAGKWPAGNTGPPRALHPRLWGLAPARASDSDKGDPDFQLLEEGFLTETSPFMWSNLGIGLAISLSVVGAAWGIYITGSSIIGGGVKAPRIKTKNLVSIIFCEAVAIYGIIMAIVISNMAEPFSATDPKAIGHRNYHAGYSMFGAGLTVGLSNLFCGVCVGIVGSGAALADAQNPSLFVKILIVEIFGSAIGLFGVIVAILQTSRVKMGD

SEQ ID NO: 7420 - protein, 86 aa, Homo sapiens
  Payload ID: 1568;
  Gene Symbol: ATP6V0B;
  Gene Name: ATPase, H+ transporting, lysosomal 21kDa, V0 subunit b;
  ENSP ID: ENSP00000432994
MWSNLGIGLAISLSVVGAAWGIYITGSSIIGGGVKAPRIKTKNLVSIIFCEAVAIYGIIMAIVISNMAEPFSATDPKAIGHRNYHA

SEQ ID NO: 7421 - protein, 158 aa, Homo sapiens; identical to SEQ ID NO: 7416
  Payload ID: 1568;
  Gene Symbol: ATP6V0B;
  Gene Name: ATPase, H+ transporting, lysosomal 21kDa, V0 subunit b;
  Uniprot ID:  Q99437;
  ENSP ID: ENSP00000434094

SEQ ID NO: 7422 - protein, 261 aa, Homo sapiens
  Payload ID: 1568;
  Gene Symbol: ATP6V0B;
  Gene Name: ATPase, H+ transporting, lysosomal 21kDa, V0 subunit b;
  ENSP ID: ENSP00000434729
MTGLALLYSGVFVAFWACALAVGVCYTIFDLGFRFDVAWFLTETSPFMWSNLGIGLAISLSVVGAAWGIYITGSSIIGGGVKAPRIKTKNLVSIIFCEAVAIYGIIMAIVISNMAEPFSATDPKAIGHRNYHAGYSMFGAGLTVGLSNLFCGVCVGIVGSGAALADAQNPSLFVKILIVEIFGSAIGLFGVIVAILQVMNPLGKPLCPCPQPSLTLLLEKLKCSPSLPITIDSPKQLPPPHFHLLVFSYRGSLFLSLIWCH

SEQ ID NO: 7423 - protein, 46 aa, Homo sapiens
  Payload ID: 1568;
  Gene Symbol: ATP6V0B;
  Gene Name: ATPase, H+ transporting, lysosomal 21kDa, V0 subunit b;
  ENSP ID: ENSP00000435396
MTGLALLYSGVFVAFWACALAVAVLSPGGSLRTPLQGGGPSARQLL

SEQ ID NO: 7424 - protein, 226 aa, Homo sapiens
  Payload ID: 1569;
  Gene Symbol: ATP6V1E1;
  Gene Name: ATPase, H+ transporting, lysosomal 31kDa, V1 subunit E1;
  Uniprot ID:  P36543;
  ENSP ID: ENSP00000253413
MALSDADVQKQIKHMMAFIEQEANEKAEEIDAKAEEEFNIEKGRLVQTQRLKIMEYYEKKEKQIEQQKKIQMSNLMNQARLKVLRARDDLITDLLNEAKQRLSKVVKDTTRYQVLLDGLVLQGLYQLLEPRMIVRCRKQDFPLVKAAVQKAIPMYKIATKNDVDVQIDQESYLPEDIAGGVEIYNGDRKIKVSNTLESRLDLIAQQMMPEVRGALFGANANRKFLD

SEQ ID NO: 7425 - protein, 196 aa, Homo sapiens
  Payload ID: 1569;
  Gene Symbol: ATP6V1E1;
  Gene Name: ATPase, H+ transporting, lysosomal 31kDa, V1 subunit E1;
  Uniprot ID:  P36543;
  ENSP ID: ENSP00000382694
MALSDADVQKQIKHMMAFIEQEANEKAEEIDAKAEEEFNIEKGRLVQTQRLKIMEYYEKKEKQIEQQKKIQMSNLMNQARLKVLRARDDLITGLYQLLEPRMIVRCRKQDFPLVKAAVQKAIPMYKIATKNDVDVQIDQESYLPEDIAGGVEIYNGDRKIKVSNTLESRLDLIAQQMMPEVRGALFGANANRKFLD

SEQ ID NO: 7426 - protein, 204 aa, Homo sapiens
  Payload ID: 1569;
  Gene Symbol: ATP6V1E1;
  Gene Name: ATPase, H+ transporting, lysosomal 31kDa, V1 subunit E1;
  Uniprot ID:  P36543;
  ENSP ID: ENSP00000382696
MALSDADVQKQAEEEFNIEKGRLVQTQRLKIMEYYEKKEKQIEQQKKIQMSNLMNQARLKVLRARDDLITDLLNEAKQRLSKVVKDTTRYQVLLDGLVLQGLYQLLEPRMIVRCRKQDFPLVKAAVQKAIPMYKIATKNDVDVQIDQESYLPEDIAGGVEIYNGDRKIKVSNTLESRLDLIAQQMMPEVRGALFGANANRKFLD

SEQ ID NO: 7427 - protein, 203 aa, Homo sapiens
  Payload ID: 1569;
  Gene Symbol: ATP6V1E1;
  Gene Name: ATPase, H+ transporting, lysosomal 31kDa, V1 subunit E1;
  ENSP ID: ENSP00000398932
MQSRDGVSPCWPGWSQSLDLVIRLPRPPQVLGLQAEEEFNIEKGRLVQTQRLKIMEYYEKKEKQIEQQKKIQMSNLMNQARLKVLRARDDLITDLLNEAKQRLSKVVKDTTRYQVLLDGLVLQGLYQLLEPRMIVRCRKQDFPLVKAAVQKAIPMYKIATKNDVDVQIDQESYLPEDIAGGVEIYNGDRKIKVSNTLESRLDL

SEQ ID NO: 7428 - protein, 226 aa, Homo sapiens
  Payload ID: 1570;
  Gene Symbol: ATP6V1E2;
  Gene Name: ATPase, H+ transporting, lysosomal 31kDa, V1 subunit E2;
  Uniprot ID:  Q96A05;
  ENSP ID: ENSP00000304891
MALSDVDVKKQIKHMMAFIEQEANEKAEEIDAKAEEEFNIEKGRLVQTQRLKIMEYYEKKEKQIEQQKKILMSTMRNQARLKVLRARNDLISDLLSEAKLRLSRIVEDPEVYQGLLDKLVLQGLLRLLEPVMIVRCRPQDLLLVEAAVQKAIPEYMTISQKHVEVQIDKEAYLAVNAAGGVEVYSGNQRIKVSNTLESRLDLSAKQKMPEIRMALFGANTNRKFFI

SEQ ID NO: 7429 - protein, 226 aa, Homo sapiens; identical to SEQ ID NO: 7428
  Payload ID: 1570;
  Gene Symbol: ATP6V1E2;
  Gene Name: ATPase, H+ transporting, lysosomal 31kDa, V1 subunit E2;
  Uniprot ID:  Q96A05;
  ENSP ID: ENSP00000428141

SEQ ID NO: 7430 - protein, 247 aa, Homo sapiens
  Payload ID: 1571;
  Gene Symbol: ATP6V1D;
  Gene Name: ATPase, H+ transporting, lysosomal 34kDa, V1 subunit D;
  Uniprot ID:  Q9Y5K8;
  ENSP ID: ENSP00000216442
MSGKDRIEIFPSRMAQTIMKARLKGAQTGRNLLKKKSDALTLRFRQILKKIIETKMLMGEVMREAAFSLAEAKFTAGDFSTTVIQNVNKAQVKIRAKKDNVAGVTLPVFEHYHEGTDSYELTGLARGGEQLAKLKRNYAKAVELLVELASLQTSFVTLDEAIKITNRRVNAIEHVIIPRIERTLAYIITELDEREREEFYRLKKIQEKKKILKEKSEKDLEQRRAAGEVLEPANLLAEEKDEDLLFE

SEQ ID NO: 7431 - protein, 44 aa, Homo sapiens
  Payload ID: 1571;
  Gene Symbol: ATP6V1D;
  Gene Name: ATPase, H+ transporting, lysosomal 34kDa, V1 subunit D;
  ENSP ID: ENSP00000450834
VMREAAFSLAEAKFTAGDFSTTVIQNVNKAQVKIRAKKDNVAAC

SEQ ID NO: 7432 - protein, 192 aa, Homo sapiens
  Payload ID: 1571;
  Gene Symbol: ATP6V1D;
  Gene Name: ATPase, H+ transporting, lysosomal 34kDa, V1 subunit D;
  ENSP ID: ENSP00000450841
MLMGEVMREAAFSLAEAKFTAGDFSTTVIQNVNKAQVKIRAKKDNVAGVTLPVFEHYHEGTDSYELTGLARGGEQLAKLKRNYAKAVELLVELASLQTSFVTLDEAIKITNRRVNAIEHVIIPRIERTLAYIITELDEREREEFYRLKKIQEKKKILKEKSEKDLEQRRAAGEVLEPANLLAEEKDEDLLFE

SEQ ID NO: 7433 - protein, 148 aa, Homo sapiens
  Payload ID: 1571;
  Gene Symbol: ATP6V1D;
  Gene Name: ATPase, H+ transporting, lysosomal 34kDa, V1 subunit D;
  ENSP ID: ENSP00000450885
MSGKDRIEIFPSRMAQTIMKARLKGAQTGRNLLKKKSDALTLRFRQILKKIIETSFVTLDEAIKITNRRVNAIEHVIIPRIERTLAYIITELDEREREEFYRLKKIQEKKKILKEKSEKDLEQRRAAGEVLEPANLLAEEKDEDLLFE

SEQ ID NO: 7434 - protein, 72 aa, Homo sapiens
  Payload ID: 1571;
  Gene Symbol: ATP6V1D;
  Gene Name: ATPase, H+ transporting, lysosomal 34kDa, V1 subunit D;
  ENSP ID: ENSP00000451031
MSGKDRIEIFPSRMAQTIMKARLKGAQTGRNLLKKKSDALTLRFRQILKKIIETKMLMGEVMREAAFSLAEA

SEQ ID NO: 7435 - protein, 247 aa, Homo sapiens; identical to SEQ ID NO: 7430
  Payload ID: 1571;
  Gene Symbol: ATP6V1D;
  Gene Name: ATPase, H+ transporting, lysosomal 34kDa, V1 subunit D;
  Uniprot ID:  Q9Y5K8;
  ENSP ID: ENSP00000451167

SEQ ID NO: 7436 - protein, 86 aa, Homo sapiens
  Payload ID: 1571;
  Gene Symbol: ATP6V1D;
  Gene Name: ATPase, H+ transporting, lysosomal 34kDa, V1 subunit D;
  ENSP ID: ENSP00000451422
MSGKDRIEIFPSRMAQTIMKARLKGAQTGRNLLKKKSDALTLRFRQILKKIIETKMLMGEVMREAAFSLAEAKFTAGDFRCYFASI

SEQ ID NO: 7437 - protein, 153 aa, Homo sapiens
  Payload ID: 1571;
  Gene Symbol: ATP6V1D;
  Gene Name: ATPase, H+ transporting, lysosomal 34kDa, V1 subunit D;
  ENSP ID: ENSP00000451564
RAKKDNVAGVTLPVFEHYHEGTDSYELTGLARGGEQLAKLKRNYAKAVELLVELASLQTSFVTLDEAIKITNRRVNAIEHVIIPRIERTLAYIITELDEREREEFYRLKKIQEKKKILKEKSEKDLEQRRAAGEVLEPANLLAEEKDEDLLFE

SEQ ID NO: 7438 - protein, 119 aa, Homo sapiens
  Payload ID: 1571;
  Gene Symbol: ATP6V1D;
  Gene Name: ATPase, H+ transporting, lysosomal 34kDa, V1 subunit D;
  ENSP ID: ENSP00000452029
KKIIETKMLMGEVMREAAFSLAEAKFTAGDFSTTVIQNVNKAQVKIRAKKDNVAGVTLPVFEHYHEGTDSYELTGLARGGEQLAKLKRNYAKAVELLVELASLQVKENTREEKDSKGKI

SEQ ID NO: 7439 - protein, 179 aa, Homo sapiens
  Payload ID: 1571;
  Gene Symbol: ATP6V1D;
  Gene Name: ATPase, H+ transporting, lysosomal 34kDa, V1 subunit D;
  ENSP ID: ENSP00000452192
MSGKDRIEIFPSRMAQTIMKARLKGAQTGRNLLKKKSDALTLRFRQILKKIIETKMLMGEVMREAAFSLAEAKFTAGDFSTTVIQNVNKAQVKIRAKKDNVAGVTLPVFEHYHEGTDSYELTGLARGGEQLAKLKRNYAKAVELLVELASLQSSFPGLNVLLLISSQSWMRESEKSSIG

SEQ ID NO: 7440 - protein, 59 aa, Homo sapiens
  Payload ID: 1571;
  Gene Symbol: ATP6V1D;
  Gene Name: ATPase, H+ transporting, lysosomal 34kDa, V1 subunit D;
  ENSP ID: ENSP00000452492
MKARLKGAQTGRNLLKKKSDALTLRFRQILKKIIETKMLMGEVMREAAFSLAEAKFTAG

SEQ ID NO: 7441 - protein, 351 aa, Homo sapiens
  Payload ID: 1572;
  Gene Symbol: ATP6V0D1;
  Gene Name: ATPase, H+ transporting, lysosomal 38kDa, V0 subunit d1;
  Uniprot ID:  P61421;
  ENSP ID: ENSP00000290949
MSFFPELYFNVDNGYLEGLVRGLKAGVLSQADYLNLVQCETLEDLKLHLQSTDYGNFLANEASPLTVSVIDDRLKEKMVVEFRHMRNHAYEPLASFLDFITYSYMIDNVILLITGTLHQRSIAELVPKCHPLGSFEQMEAVNIAQTPAELYNAILVDTPLAAFFQDCISEQDLDEMNIEIIRNTLYKAYLESFYKFCTLLGGTTADAMCPILEFEADRRAFIITINSFGTELSKEDRAKLFPHCGRLYPEGLAQLARADDYEQVKNVADYYPEYKLLFEGAGSNPGDKTLEDRFFEHEVKLNKLAFLNQFHFGVFYAFVKLKEQECRNIVWIAECIAQRHRAKIDNYIPIF

SEQ ID NO: 7442 - protein, 58 aa, Homo sapiens
  Payload ID: 1572;
  Gene Symbol: ATP6V0D1;
  Gene Name: ATPase, H+ transporting, lysosomal 38kDa, V0 subunit d1;
  ENSP ID: ENSP00000393910
  MOD_RES (1)..(1): Any amino acid
XSCTSRASLSGSLWTSLEHLLEQRSQEGHSGQQVALLDQSRAEEWMVPQGMPEGLVPE

SEQ ID NO: 7443 - protein, 392 aa, Homo sapiens
  Payload ID: 1572;
  Gene Symbol: ATP6V0D1;
  Gene Name: ATPase, H+ transporting, lysosomal 38kDa, V0 subunit d1;
  ENSP ID: ENSP00000441282
MSFFPELYFNVDNGYLEGLVRGLKAGVLSQADYLNLVQCETLEDLKLHLQSTDYGNFLANEASPLTVSVIDDRLKEKMVVEFRHMRNHAYEPLASFLDFITQESEAGTPEGPGNMPKLGSRPSPGHRPPFLRVSLLPWPPSSYSYMIDNVILLITGTLHQRSIAELVPKCHPLGSFEQMEAVNIAQTPAELYNAILVDTPLAAFFQDCISEQDLDEMNIEIIRNTLYKAYLESFYKFCTLLGGTTADAMCPILEFEADRRAFIITINSFGTELSKEDRAKLFPHCGRLYPEGLAQLARADDYEQVKNVADYYPEYKLLFEGAGSNPGDKTLEDRFFEHEVKLNKLAFLNQFHFGVFYAFVKLKEQECRNIVWIAECIAQRHRAKIDNYIPIF

SEQ ID NO: 7444 - protein, 71 aa, Homo sapiens
  Payload ID: 1572;
  Gene Symbol: ATP6V0D1;
  Gene Name: ATPase, H+ transporting, lysosomal 38kDa, V0 subunit d1;
  ENSP ID: ENSP00000455446
  MOD_RES (1)..(1): Any amino acid
XLEHLLEQRSQEGHSGQQVALLDQSRAEVMLGLRARGLTGCGGEAELQLQGYMDCWVKVTANHSIWRTSFW

SEQ ID NO: 7445 - protein, 113 aa, Homo sapiens
  Payload ID: 1572;
  Gene Symbol: ATP6V0D1;
  Gene Name: ATPase, H+ transporting, lysosomal 38kDa, V0 subunit d1;
  ENSP ID: ENSP00000455695
MSFFPELYFNVDNGYLEGLVRGLKAGVLSQADYLNLVQCETLEDLKLHLQSTDYGNFLANEASPLTVSVIDDRLKEKMVVEFRHMRNHAYEPLASFLDFITGFFPGLHFRAGP

SEQ ID NO: 7446 - protein, 227 aa, Homo sapiens
  Payload ID: 1572;
  Gene Symbol: ATP6V0D1;
  Gene Name: ATPase, H+ transporting, lysosomal 38kDa, V0 subunit d1;
  ENSP ID: ENSP00000455802
  MOD_RES (1)..(1): Any amino acid
XLKLHLQSTDYGNFLANEASPLTVSVIDDRLKEKMVVEFRHMRNHAYEPLASFLDFITYSYMIDNVILLITGTLHQRSIAELVPKCHPLGSFEQMEAVNIAQTPAELYNAILVDTPLAAFFQDCISEQDLDEMNIEIIRNTLYKAYLESFYKFCTLLGGTTADAMCPILESCPKRTVPSSFHTVGGSTLRAWRSWLGLTTMNRSRTWPITTRSTSCSSRVQVATLET

SEQ ID NO: 7447 - protein, 115 aa, Homo sapiens
  Payload ID: 1572;
  Gene Symbol: ATP6V0D1;
  Gene Name: ATPase, H+ transporting, lysosomal 38kDa, V0 subunit d1;
  ENSP ID: ENSP00000456695
MSFFPELYFNVDNGYLEGLVRGLKAGVLSQADYLNLVQCETLEDLKLHLQSTDYGNFLANEASPLTVSVIDDRLKEKMVVEFRHMRNHAYEPLASFLDFITCLTLTLEEFPLGLI

SEQ ID NO: 7448 - protein, 40 aa, Homo sapiens
  Payload ID: 1572;
  Gene Symbol: ATP6V0D1;
  Gene Name: ATPase, H+ transporting, lysosomal 38kDa, V0 subunit d1;
  ENSP ID: ENSP00000457104
  MOD_RES (1)..(1): Any amino acid
XHFKGFSLRQPVDFPGALAGAEITGRSLWPASSTVRPVKG

SEQ ID NO: 7449 - protein, 57 aa, Homo sapiens
  Payload ID: 1572;
  Gene Symbol: ATP6V0D1;
  Gene Name: ATPase, H+ transporting, lysosomal 38kDa, V0 subunit d1;
  ENSP ID: ENSP00000457105
MSFFPELYFNVDNGYLEGLVRGLKAGVLSQADYLNLVQCETLEGMDGATRDARGTCP

SEQ ID NO: 7450 - protein, 47 aa, Homo sapiens
  Payload ID: 1572;
  Gene Symbol: ATP6V0D1;
  Gene Name: ATPase, H+ transporting, lysosomal 38kDa, V0 subunit d1;
  ENSP ID: ENSP00000457744
MSFFPELYFNVDNGYLEGLVRGLKAGVLSQADYLNLVQCETLEVTVT

SEQ ID NO: 7451 - protein, 232 aa, Homo sapiens
  Payload ID: 1572;
  Gene Symbol: ATP6V0D1;
  Gene Name: ATPase, H+ transporting, lysosomal 38kDa, V0 subunit d1;
  ENSP ID: ENSP00000463328
  MOD_RES (1)..(1): Any amino acid
XFPELYFNVDNGYLEGLVRGLKAGVLSQADYLNLVQCETLEAAFFQDCISEQDLDEMNIEIIRNTLYKAYLESFYKFCTLLGGTTADAMCPILEFEADRRAFIITINSFGTELSKEDRAKLFPHCGRLYPEGLAQLARADDYEQVKNVADYYPEYKLLFEGAGSNPGDKTLEDRFFEHEVKLNKLAFLNQFHFGVFYAFVKLKEQECRNIVWIAECIAQRHRAKIDNYIPIF

SEQ ID NO: 7452 - protein, 274 aa, Homo sapiens
  Payload ID: 1572;
  Gene Symbol: ATP6V0D1;
  Gene Name: ATPase, H+ transporting, lysosomal 38kDa, V0 subunit d1;
  ENSP ID: ENSP00000473515
MVVEFRHMRNHAYEPLASFLDFITYSYMIDNVILLITGTLHQRSIAELVPKCHPLGSFEQMEAVNIAQTPAELYNAILVDTPLAAFFQDCISEQDLDEMNIEIIRNTLYKAYLESFYKFCTLLGGTTADAMCPILEFEADRRAFIITINSFGTELSKEDRAKLFPHCGRLYPEGLAQLARADDYEQVKNVADYYPEYKLLFEGAGSNPGDKTLEDRFFEHEVKLNKLAFLNQFHFGVFYAFVKLKEQECRNIVWIAECIAQRHRAKIDNYIPIF

SEQ ID NO: 7453 - protein, 350 aa, Homo sapiens
  Payload ID: 1573;
  Gene Symbol: ATP6V0D2;
  Gene Name: ATPase, H+ transporting, lysosomal 38kDa, V0 subunit d2;
  Uniprot ID:  Q8N8Y2;
  ENSP ID: ENSP00000285393
MLEGAELYFNVDHGYLEGLVRGCKASLLTQQDYINLVQCETLEDLKIHLQTTDYGNFLANHTNPLTVSKIDTEMRKRLCGEFEYFRNHSLEPLSTFLTYMTCSYMIDNVILLMNGALQKKSVKEILGKCHPLGRFTEMEAVNIAETPSDLFNAILIETPLAPFFQDCMSENALDELNIELLRNKLYKSYLEAFYKFCKNHGDVTAEVMCPILEFEADRRAFIITLNSFGTELSKEDRETLYPTFGKLYPEGLRLLAQAEDFDQMKNVADHYGVYKPLFEAVGGSGGKTLEDVFYEREVQMNVLAFNRQFHYGVFYAYVKLKEQEIRNIVWIAECISQRHRTKINSYIPIL

SEQ ID NO: 7454 - protein, 43 aa, Homo sapiens
  Payload ID: 1573;
  Gene Symbol: ATP6V0D2;
  Gene Name: ATPase, H+ transporting, lysosomal 38kDa, V0 subunit d2;
  ENSP ID: ENSP00000428382
MLEGAELYFNVDHGYLEGLVRGCKASLLTQQDYINLVQCETLE

SEQ ID NO: 7455 - protein, 36 aa, Homo sapiens
  Payload ID: 1573;
  Gene Symbol: ATP6V0D2;
  Gene Name: ATPase, H+ transporting, lysosomal 38kDa, V0 subunit d2;
  ENSP ID: ENSP00000429731
MLEGAELYFNVDHGYLEGLVRGCKASLLTQQDYINL

SEQ ID NO: 7456 - protein, 382 aa, Homo sapiens
  Payload ID: 1574;
  Gene Symbol: ATP6V1C1;
  Gene Name: ATPase, H+ transporting, lysosomal 42kDa, V1 subunit C1;
  Uniprot ID:  P21283;
  ENSP ID: ENSP00000379203
MTEFWLISAPGEKTCQQTWEKLHAATSKNNNLAVTSKFNIPDLKVGTLDVLVGLSDELAKLDAFVEGVVKKVAQYMADVLEDSKDKVQENLLANGVDLVTYITRFQWDMAKYPIKQSLKNISEIIAKGVTQIDNDLKSRASAYNNLKGNLQNLERKNAGSLLTRSLAEIVKKDDFVLDSEYLVTLLVVVPKLNHNDWIKQYETLAEMVVPRSSNVLSEDQDSYLCNVTLFRKAVDDFRHKARENKFIVRDFQYNEEEMKADKEEMNRLSTDKKKQFGPLVRWLKVNFSEAFIAWIHVKALRVFVESVLRYGLPVNFQAMLLQPNKKTLKKLREVLHELYKHLDSSAAAIIDAPMDIPGLNLSQQEYYPYVYYKIDCNLLEFK

SEQ ID NO: 7457 - protein, 307 aa, Homo sapiens
  Payload ID: 1574;
  Gene Symbol: ATP6V1C1;
  Gene Name: ATPase, H+ transporting, lysosomal 42kDa, V1 subunit C1;
  ENSP ID: ENSP00000428204
MADVLEDSKDKVQENLLANGVDLVTYITRFQWDMAKYPIKQSLKNISEIIAKGVTQIDNDLKSRASAYNNLKGNLQNLERKNAGSLLTRSLAEIVKKDDFVLDSEYLVTLLVVVPKLNHNDWIKQYETLAEMVVPRSSNVLSEDQDSYLCNVTLFRKAVDDFRHKARENKFIVRDFQYNEEEMKADKEEMNRLSTDKKKQFGPLVRWLKVNFSEAFIAWIHVKALRVFVESVLRYGLPVNFQAMLLQPNKKTLKKLREVLHELYKHLDSSAAAIIDAPMDIPGLNLSQQEYYPYVYYKIDCNLLEFK

SEQ ID NO: 7458 - protein, 307 aa, Homo sapiens; identical to SEQ ID NO: 7457
  Payload ID: 1574;
  Gene Symbol: ATP6V1C1;
  Gene Name: ATPase, H+ transporting, lysosomal 42kDa, V1 subunit C1;
  ENSP ID: ENSP00000430129

SEQ ID NO: 7459 - protein, 382 aa, Homo sapiens; identical to SEQ ID NO: 7456
  Payload ID: 1574;
  Gene Symbol: ATP6V1C1;
  Gene Name: ATPase, H+ transporting, lysosomal 42kDa, V1 subunit C1;
  Uniprot ID:  P21283;
  ENSP ID: ENSP00000430282

SEQ ID NO: 7460 - protein, 427 aa, Homo sapiens
  Payload ID: 1575;
  Gene Symbol: ATP6V1C2;
  Gene Name: ATPase, H+ transporting, lysosomal 42kDa, V1 subunit C2;
  Uniprot ID:  Q8NEY4;
  ENSP ID: ENSP00000272238
MSEFWLISAPGDKENLQALERMNTVTSKSNLSYNTKFAIPDFKVGTLDSLVGLSDELGKLDTFAESLIRRMAQSVVEVMEDSKGKVQEHLLANGVDLTSFVTHFEWDMAKYPVKQPLVSVVDTIAKQLAQIEMDLKSRTAAYNTLKTNLENLEKKSMGNLFTRTLSDIVSKEDFVLDSEYLVTLLVIVPKPNYSQWQKTYESLSDMVVPRSTKLITEDKEGGLFTVTLFRKVIEDFKTKAKENKFTVREFYYDEKEIEREREEMARLLSDKKQQYQTSCVALKKGSSTFPDHKVKVTPLGNPDRPAAGQTDRERESEGEGEGPLLRWLKVNFSEAFIAWIHIKALRVFVESVLRYGLPVNFQAVLLQPHKKSSTKRLREVLNSVFRHLDEVAATSILDASVEIPGLQLNNQDYFPYVYFHIDLSLLD

SEQ ID NO: 7461 - protein, 381 aa, Homo sapiens
  Payload ID: 1575;
  Gene Symbol: ATP6V1C2;
  Gene Name: ATPase, H+ transporting, lysosomal 42kDa, V1 subunit C2;
  Uniprot ID:  Q8NEY4;
  ENSP ID: ENSP00000371077
MSEFWLISAPGDKENLQALERMNTVTSKSNLSYNTKFAIPDFKVGTLDSLVGLSDELGKLDTFAESLIRRMAQSVVEVMEDSKGKVQEHLLANGVDLTSFVTHFEWDMAKYPVKQPLVSVVDTIAKQLAQIEMDLKSRTAAYNTLKTNLENLEKKSMGNLFTRTLSDIVSKEDFVLDSEYLVTLLVIVPKPNYSQWQKTYESLSDMVVPRSTKLITEDKEGGLFTVTLFRKVIEDFKTKAKENKFTVREFYYDEKEIEREREEMARLLSDKKQQYGPLLRWLKVNFSEAFIAWIHIKALRVFVESVLRYGLPVNFQAVLLQPHKKSSTKRLREVLNSVFRHLDEVAATSILDASVEIPGLQLNNQDYFPYVYFHIDLSLLD

SEQ ID NO: 7462 - protein, 437 aa, Homo sapiens
  Payload ID: 1575;
  Gene Symbol: ATP6V1C2;
  Gene Name: ATPase, H+ transporting, lysosomal 42kDa, V1 subunit C2;
  ENSP ID: ENSP00000489280
MSEFWLISAPGDKENLQALERMNTVTSKSNLSYNTKFAIPDFKVGTLDSLVGLSDELGKLDTFAESLIRRMAQSVVEVMEDSKGKVQEHLLANGGLKGKMKCLKIDLTSFVTHFEWDMAKYPVKQPLVSVVDTIAKQLAQIEMDLKSRTAAYNTLKTNLENLEKKSMGNLFTRTLSDIVSKEDFVLDSEYLVTLLVIVPKPNYSQWQKTYESLSDMVVPRSTKLITEDKEGGLFTVTLFRKVIEDFKTKAKENKFTVREFYYDEKEIEREREEMARLLSDKKQQYQTSCVALKKGSSTFPDHKVKVTPLGNPDRPAAGQTDRERESEGEGEGPLLRWLKVNFSEAFIAWIHIKALRVFVESVLRYGLPVNFQAVLLQPHKKSSTKRLREVLNSVFRHLDEVAATSILDASVEIPGLQLNNQDYFPYVYFHIDLSLLD

SEQ ID NO: 7463 - protein, 465 aa, Homo sapiens
  Payload ID: 1576;
  Gene Symbol: ATP6V1H;
  Gene Name: ATPase, H+ transporting, lysosomal 50/57kDa, V1 subunit H;
  Uniprot ID:  Q9UI12;
  ENSP ID: ENSP00000347359
MTKMDIRGAVDAAVPTNIIAAKAAEVRANKVNWQSYLQGQMISAEDCEFIQRFEMKRSPEEKQEMLQTEGSQCAKTFINLMTHICKEQTVQYILTMVDDMLQENHQRVSIFFDYARCSKNTAWPYFLPMLNRQDPFTVHMAARIIAKLAAWGKELMEGSDLNYYFNWIKTQLSSQSSQYVQCVAGCLQLMLRVNEYRFAWVEADGVNCIMGVLSNKCGFQLQYQMIFSIWLLAFSPQMCEHLRRYNIIPVLSDILQESVKEKVTRIILAAFRNFLEKSTERETRQEYALAMIQCKVLKQLENLEQQKYDDEDISEDIKFLLEKLGESVQDLSSFDEYSSELKSGRLEWSPVHKSEKFWRENAVRLNEKNYELLKILTKLLEVSDDPQVLAVAAHDVGEYVRHYPRGKRVIEQLGGKQLVMNHMHHEDQQVRYNALLAVQKLMVHNWEYLGKQLQSEQPQTAAARS

SEQ ID NO: 7464 - protein, 483 aa, Homo sapiens
  Payload ID: 1576;
  Gene Symbol: ATP6V1H;
  Gene Name: ATPase, H+ transporting, lysosomal 50/57kDa, V1 subunit H;
  Uniprot ID:  Q9UI12;
  ENSP ID: ENSP00000352522
MTKMDIRGAVDAAVPTNIIAAKAAEVRANKVNWQSYLQGQMISAEDCEFIQRFEMKRSPEEKQEMLQTEGSQCAKTFINLMTHICKEQTVQYILTMVDDMLQENHQRVSIFFDYARCSKNTAWPYFLPMLNRQDPFTVHMAARIIAKLAAWGKELMEGSDLNYYFNWIKTQLSSQKLRGSGVAVETGTVSSSDSSQYVQCVAGCLQLMLRVNEYRFAWVEADGVNCIMGVLSNKCGFQLQYQMIFSIWLLAFSPQMCEHLRRYNIIPVLSDILQESVKEKVTRIILAAFRNFLEKSTERETRQEYALAMIQCKVLKQLENLEQQKYDDEDISEDIKFLLEKLGESVQDLSSFDEYSSELKSGRLEWSPVHKSEKFWRENAVRLNEKNYELLKILTKLLEVSDDPQVLAVAAHDVGEYVRHYPRGKRVIEQLGGKQLVMNHMHHEDQQVRYNALLAVQKLMVHNWEYLGKQLQSEQPQTAAARS

SEQ ID NO: 7465 - protein, 483 aa, Homo sapiens; identical to SEQ ID NO: 7464
  Payload ID: 1576;
  Gene Symbol: ATP6V1H;
  Gene Name: ATPase, H+ transporting, lysosomal 50/57kDa, V1 subunit H;
  Uniprot ID:  Q9UI12;
  ENSP ID: ENSP00000379995

SEQ ID NO: 7466 - protein, 101 aa, Homo sapiens
  Payload ID: 1576;
  Gene Symbol: ATP6V1H;
  Gene Name: ATPase, H+ transporting, lysosomal 50/57kDa, V1 subunit H;
  ENSP ID: ENSP00000427835
MTKMDIRGAVDAAVPTNIIAAKAAEVRANKVNWQSYLQGQMISAEDCEFIQRFEMKRSPEEKQEMLQTEGSQCAKTFINLMTHICKEQTVQYILTMVDDML

SEQ ID NO: 7467 - protein, 48 aa, Homo sapiens
  Payload ID: 1576;
  Gene Symbol: ATP6V1H;
  Gene Name: ATPase, H+ transporting, lysosomal 50/57kDa, V1 subunit H;
  ENSP ID: ENSP00000428255
MTKMDIRGAVDAAVPTNIIAAKAAEVRANKVNWQSYLQGQMISAEDLC

SEQ ID NO: 7468 - protein, 86 aa, Homo sapiens
  Payload ID: 1576;
  Gene Symbol: ATP6V1H;
  Gene Name: ATPase, H+ transporting, lysosomal 50/57kDa, V1 subunit H;
  ENSP ID: ENSP00000428625
FDYARCSKNTAWPYFLPMLNRQDPFTVHMAARIIAKLAAWGKELMEGSDLNYYFNWIKTQLSSQKLRGSGVAVETGTVSSSDHSIQ

SEQ ID NO: 7469 - protein, 36 aa, Homo sapiens
  Payload ID: 1576;
  Gene Symbol: ATP6V1H;
  Gene Name: ATPase, H+ transporting, lysosomal 50/57kDa, V1 subunit H;
  ENSP ID: ENSP00000428969
MTKMDIRGAVDAAVPTNIIAAKRCFKLKAASVLKHL

SEQ ID NO: 7470 - protein, 102 aa, Homo sapiens
  Payload ID: 1576;
  Gene Symbol: ATP6V1H;
  Gene Name: ATPase, H+ transporting, lysosomal 50/57kDa, V1 subunit H;
  ENSP ID: ENSP00000429786
MTKMDIRGAVDAAVPTNIIAAKAAEVRANKVNWQSYLQGQMISAEDCEFIQRFEMKRSPEEKQEMLQTEGSQCAKTFINLMTHICKEQTVQYILTMVDDMLQ

SEQ ID NO: 7471 - protein, 443 aa, Homo sapiens
  Payload ID: 1576;
  Gene Symbol: ATP6V1H;
  Gene Name: ATPase, H+ transporting, lysosomal 50/57kDa, V1 subunit H;
  ENSP ID: ENSP00000429947
MISAEDCEFIQRFEMKRSPEEKQEMLQTEGSQCAKTFINLMTHICKEQTVQYILTMVDDMLQENHQRVSIFFDYARCSKNTAWPYFLPMLNRQDPFTVHMAARIIAKLAAWGKELMEGSDLNYYFNWIKTQLSSQKLRGSGVAVETGTVSSSDSSQYVQCVAGCLQLMLRVNEYRFAWVEADGVNCIMGVLSNKCGFQLQYQMIFSIWLLAFSPQMCEHLRRYNIIPVLSDILQESVKEKVTRIILAAFRNFLEKSTERETRQEYALAMIQCKVLKQLENLEQQKYDDEDISEDIKFLLEKLGESVQDLSSFDEYSSELKSGRLEWSPVHKSEKFWRENAVRLNEKNYELLKILTKLLEVSDDPQVLAVAAHDVGEYVRHYPRGKRVIEQLGGKQLVMNHMHHEDQQVRYNALLAVQKLMVHNWEYLGKQLQSEQPQTAAARS

SEQ ID NO: 7472 - protein, 48 aa, Homo sapiens
  Payload ID: 1576;
  Gene Symbol: ATP6V1H;
  Gene Name: ATPase, H+ transporting, lysosomal 50/57kDa, V1 subunit H;
  ENSP ID: ENSP00000487194
MTKMDIRGAVDAAVPTNIIAAKAAEVRANKVNWQSYLQGQMISAEDFC

SEQ ID NO: 7473 - protein, 513 aa, Homo sapiens
  Payload ID: 1577;
  Gene Symbol: ATP6V1B1;
  Gene Name: ATPase, H+ transporting, lysosomal 56/58kDa, V1 subunit B1;
  Uniprot ID:  P15313;
  ENSP ID: ENSP00000234396
MAMEIDSRPGGLPGSSCNLGAAREHMQAVTRNYITHPRVTYRTVCSVNGPLVVLDRVKFAQYAEIVHFTLPDGTQRSGQVLEVAGTKAIVQVFEGTSGIDARKTTCEFTGDILRTPVSEDMLGRVFNGSGKPIDKGPVVMAEDFLDINGQPINPHSRIYPEEMIQTGISPIDVMNSIARGQKIPIFSAAGLPHNEIAAQICRQAGLVKKSKAVLDYHDDNFAIVFAAMGVNMETARFFKSDFEQNGTMGNVCLFLNLANDPTIERIITPRLALTTAEFLAYQCEKHVLVILTDMSSYAEALREVSAAREEVPGRRGFPGYMYTDLATIYERAGRVEGRGGSITQIPILTMPNDDITHPIPDLTGFITEGQIYVDRQLHNRQIYPPINVLPSLSRLMKSAIGEGMTRKDHGDVSNQLYACYAIGKDVQAMKAVVGEEALTSEDLLYLEFLQKFEKNFINQGPYENRSVFESLDLGWKLLRIFPKEMLKRIPQAVIDEFYSREGALQDLAPDTAL

SEQ ID NO: 7474 - protein, 74 aa, Homo sapiens
  Payload ID: 1577;
  Gene Symbol: ATP6V1B1;
  Gene Name: ATPase, H+ transporting, lysosomal 56/58kDa, V1 subunit B1;
  ENSP ID: ENSP00000387599
MLGRVFNGSGKPIDKGPVVMAEDFLDINGQPINPHSRIYPEEMIQTGISPIDVMNSIARGQKIPIFSAAGLPHN

SEQ ID NO: 7475 - protein, 496 aa, Homo sapiens
  Payload ID: 1577;
  Gene Symbol: ATP6V1B1;
  Gene Name: ATPase, H+ transporting, lysosomal 56/58kDa, V1 subunit B1;
  ENSP ID: ENSP00000388353
MAMEIDSRPGGLPGSSCNLGAAREHMQAVTRNYITHPRVTYRTVCSVNGPLVVLDRVKFAQYAEIVHFTLPDGTQRSGQVLEVAGTKAIVQVFEGTSGIDARKTTCEFTGDILRTPVSEDMLGRVFNGSGKPIDKGPVVMAEDFLDINGQPINPHSRIYPEEMIQTGISPIDVMNSIARGQKIPIFSAAGLPHNEIAAQICRQAGLVKKSKAVLDYHDDNFAIVFAAMGVNMETARFFKSDFEQNGTMGNVCLFLNLANDPTIERIITPRLALTTAEFLAYQCEKHVLVILTDMSSYAEALREVSAAREEVPGRRGFPGYMYTDLATIYERAGRVEDITHPIPDLTGFITEGQIYVDRQLHNRQIYPPINVLPSLSRLMKSAIGEGMTRKDHGDVSNQLYACYAIGKDVQAMKAVVGEEALTSEDLLYLEFLQKFEKNFINQGPYENRSVFESLDLGWKLLRIFPKEMLKRIPQAVIDEFYSREGALQDLAPDTAL

SEQ ID NO: 7476 - protein, 248 aa, Homo sapiens
  Payload ID: 1577;
  Gene Symbol: ATP6V1B1;
  Gene Name: ATPase, H+ transporting, lysosomal 56/58kDa, V1 subunit B1;
  ENSP ID: ENSP00000405114
MAMEIDSRPGGLPGSSCNLGAAREHMQAVTRNYITHPRVTYRTVCSVNGPLVVLDRVKFAQYAEIVHFTLPDGTQRSGQVLEVAGTKAIVQVFEGTSGIDARKTTCEFTGDILRTPVSEDMLGRVFNGSGKPIDKGPVVMAEDFLDINGQPINPHSRIYPEEMIQTGISPIDVMNSIARGQKIPIFSAAGLPHNEIAAQICRQAGLVKKSKAVLDYHDDNFAIVFAAMGVRRLSRLASEHGDSQILQV

SEQ ID NO: 7477 - protein, 118 aa, Homo sapiens
  Payload ID: 1577;
  Gene Symbol: ATP6V1B1;
  Gene Name: ATPase, H+ transporting, lysosomal 56/58kDa, V1 subunit B1;
  ENSP ID: ENSP00000407840
MKSAIGEGMTRKDHGDVSNQLYACYAIGKDVQAMKAVVGEEALTSEDLLYLEFLQKFEKNFINQGPYENRSVFESLDLGWKLLRIFPKEMLKRIPQAVIDEFYSREGALQDLAPDTAL

SEQ ID NO: 7478 - protein, 249 aa, Homo sapiens
  Payload ID: 1577;
  Gene Symbol: ATP6V1B1;
  Gene Name: ATPase, H+ transporting, lysosomal 56/58kDa, V1 subunit B1;
  ENSP ID: ENSP00000408361
MTLTAMVAGPVTANDPDGPGWEGGGVWREEGKAEDASVCVSRVFGVRPLLTPAPPPAYRTVCSVNGPLVVLDRVKFAQYAEIVHFTLPDGTQRSGQVLEVAGTKAIVQVFEGTSGIDARKTTCEFTGDILRTPVSEDMLGRVFNGSGKPIDKGPVVMAEDFLDINGQPINPHSRIYPEEMIQTGISPIDVMNSIARGQKIPIFSAAGLPHNEIAAQICRQAGLVKKSKAVLDYHDDNFAIVFAAMGVRR

SEQ ID NO: 7479 - protein, 511 aa, Homo sapiens
  Payload ID: 1578;
  Gene Symbol: ATP6V1B2;
  Gene Name: ATPase, H+ transporting, lysosomal 56/58kDa, V1 subunit B2;
  Uniprot ID:  P21281;
  ENSP ID: ENSP00000276390
MALRAMRGIVNGAAPELPVPTGGPAVGAREQALAVSRNYLSQPRLTYKTVSGVNGPLVILDHVKFPRYAEIVHLTLPDGTKRSGQVLEVSGSKAVVQVFEGTSGIDAKKTSCEFTGDILRTPVSEDMLGRVFNGSGKPIDRGPVVLAEDFLDIMGQPINPQCRIYPEEMIQTGISAIDGMNSIARGQKIPIFSAAGLPHNEIAAQICRQAGLVKKSKDVVDYSEENFAIVFAAMGVNMETARFFKSDFEENGSMDNVCLFLNLANDPTIERIITPRLALTTAEFLAYQCEKHVLVILTDMSSYAEALREVSAAREEVPGRRGFPGYMYTDLATIYERAGRVEGRNGSITQIPILTMPNDDITHPIPDLTGYITEGQIYVDRQLHNRQIYPPINVLPSLSRLMKSAIGEGMTRKDHADVSNQLYACYAIGKDVQAMKAVVGEEALTSDDLLYLEFLQKFERNFIAQGPYENRTVFETLDIGWQLLRIFPKEMLKRIPQSTLSEFYPRDSAKH

SEQ ID NO: 7480 - protein, 56 aa, Homo sapiens
  Payload ID: 1578;
  Gene Symbol: ATP6V1B2;
  Gene Name: ATPase, H+ transporting, lysosomal 56/58kDa, V1 subunit B2;
  ENSP ID: ENSP00000428069
  MOD_RES (1)..(1): Any amino acid
XRGIVNGAAPELPVPTGGPAVGAREQALAVSRNYLSQPRLSYTISPISFVTFVTSA

SEQ ID NO: 7481 - protein, 66 aa, Homo sapiens
  Payload ID: 1578;
  Gene Symbol: ATP6V1B2;
  Gene Name: ATPase, H+ transporting, lysosomal 56/58kDa, V1 subunit B2;
  ENSP ID: ENSP00000430154
MALRAMRGIVNGAAPELPVPTGGPAVGAREQALAVSRNYLSQPRLTYKTVSGVNGPLVILDHVKVC

SEQ ID NO: 7482 - protein, 199 aa, Homo sapiens
  Payload ID: 1578;
  Gene Symbol: ATP6V1B2;
  Gene Name: ATPase, H+ transporting, lysosomal 56/58kDa, V1 subunit B2;
  ENSP ID: ENSP00000430682
  MOD_RES (1)..(1): Any amino acid
XGAAPELPVPTGGPAVGAREQALAVSRNYLSQPRLTYKTVSGVNGPLVILDHVKFPRYAEIVHLTLPDGTKRSGQVLEVSGSKAVVQVFEGTSGIDAKKTSCEFTGDILRTPVSEDMLGRVFNGSGKPIDRGPVVLAEDFLDIMGQPINPQCRIYPEEMIQTGISAIDGMNSIARGQKIPIFSAAGLPHNEVRTGIGLL

SEQ ID NO: 7483 - protein, 49 aa, Homo sapiens
  Payload ID: 1578;
  Gene Symbol: ATP6V1B2;
  Gene Name: ATPase, H+ transporting, lysosomal 56/58kDa, V1 subunit B2;
  ENSP ID: ENSP00000430866
  MOD_RES (1)..(1): Any amino acid
XQAMKAVVGEEALTSDDLLYLEFLQKFERNFIAQGVSLCRPGWSTVVRS

SEQ ID NO: 7484 - protein, 617 aa, Homo sapiens
  Payload ID: 1579;
  Gene Symbol: ATP6V1A;
  Gene Name: ATPase, H+ transporting, lysosomal 70kDa, V1 subunit A;
  Uniprot ID:  P38606;
  ENSP ID: ENSP00000273398
MDFSKLPKILDEDKESTFGYVHGVSGPVVTACDMAGAAMYELVRVGHSELVGEIIRLEGDMATIQVYEETSGVSVGDPVLRTGKPLSVELGPGIMGAIFDGIQRPLSDISSQTQSIYIPRGVNVSALSRDIKWDFTPCKNLRVGSHITGGDIYGIVSENSLIKHKIMLPPRNRGTVTYIAPPGNYDTSDVVLELEFEGVKEKFTMVQVWPVRQVRPVTEKLPANHPLLTGQRVLDALFPCVQGGTTAIPGAFGCGKTVISQSLSKYSNSDVIIYVGCGERGNEMSEVLRDFPELTMEVDGKVESIMKRTALVANTSNMPVAAREASIYTGITLSEYFRDMGYHVSMMADSTSRWAEALREISGRLAEMPADSGYPAYLGARLASFYERAGRVKCLGNPEREGSVSIVGAVSPPGGDFSDPVTSATLGIVQVFWGLDKKLAQRKHFPSVNWLISYSKYMRALDEYYDKHFTEFVPLRTKAKEILQEEEDLAEIVQLVGKASLAETDKITLEVAKLIKDDFLQQNGYTPYDRFCPFYKTVGMLSNMIAFYDMARRAVETTAQSDNKITWSIIREHMGDILYKLSSMKFKDPLKDGEAKIKSDYAQLLEDMQNAFRSLED

SEQ ID NO: 7485 - protein, 184 aa, Homo sapiens
  Payload ID: 1579;
  Gene Symbol: ATP6V1A;
  Gene Name: ATPase, H+ transporting, lysosomal 70kDa, V1 subunit A;
  ENSP ID: ENSP00000417545
MAGAAMYELVRVGHSELVGEIIRLEGDMATIQVYEETSGVSVGDPVLRTGKPLSVELGPGIMGAIFDGIQRPLSDISSQTQSIYIPRGVNVSALSRDIKWDFTPCKNLRVGSHITGGDIYGIVSENSLIKHKIMLPPRNRGTVTYIAPPGNYDTSDVVLELEFEGVKEKFTMVQVWPVRQVRPV

SEQ ID NO: 7486 - protein, 221 aa, Homo sapiens
  Payload ID: 1579;
  Gene Symbol: ATP6V1A;
  Gene Name: ATPase, H+ transporting, lysosomal 70kDa, V1 subunit A;
  ENSP ID: ENSP00000419294
MDFSKLPKILDEDKESTFGYVHGVSGPVVTACDMAGAAMYELVRVGHSELVGEIIRLEGDMATIQVYEETSGVSVGDPVLRTGKPLSVELGPGIMGAIFDGIQRPLSDISSQTQSIYIPRGVNVSALSRDIKWDFTPCKNLRVGSHITGGDIYGIVSENSLIKHKIMLPPRNRGTVTYIAPPGNYDTSDVVLELEFEGVKEKFTMVQVWPVRQVRPVTEKL

SEQ ID NO: 7487 - protein, 49 aa, Homo sapiens
  Payload ID: 1579;
  Gene Symbol: ATP6V1A;
  Gene Name: ATPase, H+ transporting, lysosomal 70kDa, V1 subunit A;
  ENSP ID: ENSP00000420146
MDFSKLPKILDEDKESTFGYVHGVSGPAFTPCIIATLRTYLNPTSGYSL

SEQ ID NO: 7488 - protein, 65 aa, Homo sapiens
  Payload ID: 1580;
  Gene Symbol: ATP6V0E1;
  Gene Name: ATPase, H+ transporting, lysosomal 9kDa, V0 subunit e1;
  ENSP ID: ENSP00000265093
MAYHGLTVPLIVMSVFWGFVGFLVPWFIPKGPNRGWLIAILAQLNPLFGPQLKNETIWYLKYHWP

SEQ ID NO: 7489 - protein, 81 aa, Homo sapiens [sequence omitted]

SEQ ID NO: 7490 - protein, 81 aa, Homo sapiens [sequence omitted]

SEQ ID NO: 7491 - protein, 58 aa, Homo sapiens
  Payload ID: 1580;
  Gene Symbol: ATP6V0E1;
  Gene Name: ATPase, H+ transporting, lysosomal 9kDa, V0 subunit e1;
  ENSP ID: ENSP00000430896
MAYHGLTVPLIVMSVFWGFVGFLVPWFIPKGPNRGVIITMLVTCSVCCYLLSREENAF

SEQ ID NO: 7492 - protein, 470 aa, Homo sapiens
  Payload ID: 1581;
  Gene Symbol: ATP6AP1;
  Gene Name: ATPase, H+ transporting, lysosomal accessory prt 1;
  Uniprot ID:  Q15904;
  ENSP ID: ENSP00000358777
MMAAMATARVRMGPRCAQALWRMPWLPVFLSLAAAAAAAAAEQQVPLVLWSSDRDLWAPAADTHEGHITSDLQLSTYLDPALELGPRNVLLFLQDKLSIEDFTAYGGVFGNKQDSAFSNLENALDLAPSSLVLPAVDWYAVSTLTTYLQEKLGASPLHVDLATLRELKLNASLPALLLIRLPYTASSGLMAPREVLTGNDEVIGQVLSTLKSEDVPYTAALTAVRPSRVARDVAVVAGGLGRQLLQKQPVSPVIHPPVSYNDTAPRILFWAQNFSVAYKDQWEDLTPLTFGVQELNLTGSFWNDSFARLSLTYERLFGTTVTFKFILANRLYPVSARHWFTMERLEVHSNGSVAYFNASQVTGPSIYSFHCEYVSSLSKKGSLLVARTQPSPWQMMLQDFQIQAFNVMGEQFSYASDCASFFSPGIWMGLLTSLFMLFIFTYGLHMILSLKTMDRFDDHKGPTISLTQIV

SEQ ID NO: 7493 - protein, 230 aa, Homo sapiens
  Payload ID: 1581;
  Gene Symbol: ATP6AP1;
  Gene Name: ATPase, H+ transporting, lysosomal accessory prt 1;
  ENSP ID: ENSP00000392375
MMAAMATARVRMGPRCAQALWRMPWLPVFLSLAAAAAAAAAEQQVPLVLWSSDRDLWAPAADTHEGHITSDLQLSTYLDPALELGPRNVLLFLQDKLSIEDFTAYGGVFGNKQDSAFSNLENALDLAPSSLVLPAVDWYAVSTLTTYLQEKLGASPLHVDLATLRELKLNASLPALLLIRLPYTASSGLMAPREVLTDEVIGQVLSTLKSEDVPYTAALTAVRPSRVARD

SEQ ID NO: 7494 - protein, 133 aa, Homo sapiens
  Payload ID: 1581;
  Gene Symbol: ATP6AP1;
  Gene Name: ATPase, H+ transporting, lysosomal accessory prt 1;
  ENSP ID: ENSP00000396643
  MOD_RES (1)..(1): Any amino acid
XAAMATARVRMGPRCAQALWRMPWLPVFLSLAAAAAAAAAEQQVPLVLWSSDRDLWAPAADTHEGHITSDLQLSTYLDPALELGPRNVLLFLQDKVRPPQPTLPRSSGGSQAPSPHDTDAHSPREASVTLSQL

SEQ ID NO: 7495 - protein, 273 aa, Homo sapiens
  Payload ID: 1581;
  Gene Symbol: ATP6AP1;
  Gene Name: ATPase, H+ transporting, lysosomal accessory prt 1;
  ENSP ID: ENSP00000398511
MMAAMATARVRMGPRCAQALWRMPWLPVFLSLAAAAAAAAAEQQVPLVLWSSDRDLWAPAADTHEGHITSDLQLSTYLDPALELGPRNVLLFLQDKLSIEDFTAYGGVFGNKQDSAFSNLENALDLAPSSLVLPAVDWYAVSTLTTYLQEKLGASPLHVARDVAVVAGGLGRQLLQKQPVSPVIHPPVSYNDTAPRILFWAQNFSVAYKDQWEDLTPLTFGVQELNLTGSFWNDSFARFILANRLYPVSARHWFTMERLEVHSNGSVAYFNAS

SEQ ID NO: 7496 - protein, 134 aa, Homo sapiens
  Payload ID: 1581;
  Gene Symbol: ATP6AP1;
  Gene Name: ATPase, H+ transporting, lysosomal accessory prt 1;
  ENSP ID: ENSP00000408317
MMAAMATARVRMGPRCAQALWRMPWLPVFLSLAAAAAAAAAEQQVPLVLWSSDRDLWAPAADTHEGHITSDLQLSTYLDPALELGPRNVLLFLQDKVRPPQPTLPRSSGGSQAPSPHDTDAHSPREASVTLSQL

SEQ ID NO: 7497 - protein, 128 aa, Homo sapiens
  Payload ID: 1581;
  Gene Symbol: ATP6AP1;
  Gene Name: ATPase, H+ transporting, lysosomal accessory prt 1;
  ENSP ID: ENSP00000408470
AQALWRMPWLPVFLSLAAAAAAAAAEQQVPLVLWSSDRDLWAPAADTHEGHITSDLQLSTYLDPALELGPRNVLLFLQDKLSIEDFTAYGGVFGNKQDSAFSNLEHTQVRRCPIHSGPHSGPPFQGGP

SEQ ID NO: 7498 - protein, 134 aa, Homo sapiens; identical to SEQ ID NO: 7496
  Payload ID: 1581;
  Gene Symbol: ATP6AP1;
  Gene Name: ATPase, H+ transporting, lysosomal accessory prt 1;
  ENSP ID: ENSP00000411209

SEQ ID NO: 7499 - protein, 281 aa, Homo sapiens
  Payload ID: 1581;
  Gene Symbol: ATP6AP1;
  Gene Name: ATPase, H+ transporting, lysosomal accessory prt 1;
  ENSP ID: ENSP00000482243
MAPREVLTGNDEVIGQVLSTLKSEDVPYTAALTAVRPSRVARDVAVVAGGLGRQLLQKQPVSPVIHPPVSYNDTAPRILFWAQNFSVAYKDQWEDLTPLTFGVQELNLTGSFWNDSFARLSLTYERLFGTTVTFKFILANRLYPVSARHWFTMERLEVHSNGSVAYFNASQVTGPSIYSFHCEYVSSLSKKGSLLVARTQPSPWQMMLQDFQIQAFNVMGEQFSYASDCASFFSPGIWMGLLTSLFMLFIFTYGLHMILSLKTMDRFDDHKGPTISLTQIV

SEQ ID NO: 7500 - protein, 224 aa, Homo sapiens
  Payload ID: 1582;
  Gene Symbol: ATP6AP1L;
  Gene Name: ATPase, H+ transporting, lysosomal accessory prt 1-like;
  Uniprot ID:  Q52LC2;
  ENSP ID: ENSP00000369513
MRLWKARVLKLVLKTAKDSRLGLNSKWLSLKLGDAGNPRSLAIRFILTNYNKLSIQSWFSLRRVEIISNNSIQAVFNPTGVYAPSGYSYRCQRVGSLQQDQALLLPSDTDDGSSLWEVTFIDFQIQGFAIKGGRFTKAQDCASSFSPAFLIGLAMSLILLLVLAYALHMLIYLRYLDQQYDLIASPAHFSQLKARDTAEEKELLRSQGAECYKLRSQQISKIYV

SEQ ID NO: 7501 - protein, 224 aa, Homo sapiens; identical to SEQ ID NO: 7500
  Payload ID: 1582;
  Gene Symbol: ATP6AP1L;
  Gene Name: ATPase, H+ transporting, lysosomal accessory prt 1-like;
  Uniprot ID:  Q52LC2;
  ENSP ID: ENSP00000391381

SEQ ID NO: 7502 - protein, 350 aa, Homo sapiens
  Payload ID: 1583;
  Gene Symbol: ATP6AP2;
  Gene Name: ATPase, H+ transporting, lysosomal accessory prt 2;
  Uniprot ID:  O75787;
  ENSP ID: ENSP00000367697
MAVFVVLLALVAGVLGNEFSILKSPGSVVFRNGNWPIPGERIPDVAALSMGFSVKEDLSWPGLAVGNLFHRPRATVMVMVKGVNKLALPPGSVISYPLENAVPFSLDSVANSIHSLFSEETPVVLQLAPSEERVYMVGKANSVFEDLSVTLRQLRNRLFQENSVLSSLPLNSLSRNNEVDLLFLSELQVLHDISSLLSRHKHLAKDHSPDLYSLELAGLDEIGKRYGEDSEQFRDASKILVDALQKFADDMYSLYGGNAVVELVTVKSFDTSLIRKTRTILEAKQAKNPASPYNLAYKYNFEYSVVFNMVLWIMIALALAVIITSYNIWNMDPGYDSIIYRMTNQKIRMD

SEQ ID NO: 7503 - protein, 203 aa, Homo sapiens
  Payload ID: 1583;
  Gene Symbol: ATP6AP2;
  Gene Name: ATPase, H+ transporting, lysosomal accessory prt 2;
  ENSP ID: ENSP00000403969
ESERVTSSRCGCRPCPAGPFRVAPQCCGRRGTMAVFVVLLALVAGVLGNEFSILKSPGSVVFRNGNWPIPGERIPDVAALSMGFSVKEDLSWPGLAVGNLFHRPRATVMVMVKGVNKLALPPGSVISYPLENRVYMVGKANSVFEDLSVTLRQLRNRLFQENSVLSSLPLNSLSRNNEVDLLFLSELQVLHDISSLLSRHKHL

SEQ ID NO: 7504 - protein, 243 aa, Homo sapiens
  Payload ID: 1583;
  Gene Symbol: ATP6AP2;
  Gene Name: ATPase, H+ transporting, lysosomal accessory prt 2;
  ENSP ID: ENSP00000410105
  MOD_RES (1)..(1): Any amino acid
XCPAGPFRVAPQCCGRRGTMAVFVVLLALVAGVLGNEFSILKSPGSVVFRNGNWPIPGERIPDVAALSMGFSVKEDLSWPGLAVGNLFHRPRATVMVMVKGVNKLALPPGSVISYPLENVDLLFLSELQVLHDISSLLSRHKHLAKDHSPDLYSLELAGLDEIGKRYGEDSEQFRDASKILVDALQKFADDMYSLYGGNAVVELVTVKSFDTSLIRKTRTILEAKQAKNPASPYNLAYKYNFE

SEQ ID NO: 7505 - protein, 259 aa, Homo sapiens
  Payload ID: 1583;
  Gene Symbol: ATP6AP2;
  Gene Name: ATPase, H+ transporting, lysosomal accessory prt 2;
  ENSP ID: ENSP00000411317
  MOD_RES (1)..(1): Any amino acid
XVPPARSVSPRSAAAAAAPWLCLSCSWRWWRDLSWPGLAVGNLFHRPRATVMVMVKGVNKLALPPGSVISYPLENAVPFSLDSVANSIHSLFSEETPVVLQLAPSEERVYMVGKANSVFEDLSVTLRQLRNRLFQENSVLSSLPLNSLSRNNEVDLLFLSELQVLHDISSLLSRHKHLAKDHSPDLYSLELAGLDEIGKRYGEDSEQFRDASKILVDALQKFADDMYSLYGGNAVVELVTVKSFDTSLIRKTRTILEAK

SEQ ID NO: 7506 - protein, 838 aa, Homo sapiens
  Payload ID: 1584;
  Gene Symbol: ATP6V0A1;
  Gene Name: ATPase, H+ transporting, lysosomal V0 subunit a1;
  Uniprot ID:  Q93050;
  ENSP ID: ENSP00000264649
MGELFRSEEMTLAQLFLQSEAAYCCVSELGELGKVQFRDLNPDVNVFQRKFVNEVRRCEEMDRKLRFVEKEIRKANIPIMDTGENPEVPFPRDMIDLEANFEKIENELKEINTNQEALKRNFLELTELKFILRKTQQFFDEAELHHQQMADPDLLEESSSLLEPSEMGRGTPLRLGFVAGVINRERIPTFERMLWRVCRGNVFLRQAEIENPLEDPVTGDYVHKSVFIIFFQGDQLKNRVKKICEGFRASLYPCPETPQERKEMASGVNTRIDDLQMVLNQTEDHRQRVLQAAAKNIRVWFIKVRKMKAIYHTLNLCNIDVTQKCLIAEVWCPVTDLDSIQFALRRGTEHSGSTVPSILNRMQTNQTPPTYNKTNKFTYGFQNIVDAYGIGTYREINPAPYTIITFPFLFAVMFGDFGHGILMTLFAVWMVLRESRILSQKNENEMFSTVFSGRYIILLMGVFSMYTGLIYNDCFSKSLNIFGSSWSVRPMFTYNWTEETLRGNPVLQLNPALPGVFGGPYPFGIDPIWNIATNKLTFLNSFKMKMSVILGIIHMLFGVSLSLFNHIYFKKPLNIYFGFIPEIIFMTSLFGYLVILIFYKWTAYDAHTSENAPSLLIHFINMFLFSYPESGYSMLYSGQKGIQCFLVVVALLCVPWMLLFKPLVLRRQYLRRKHLGTLNFGGIRVGNGPTEEDAEIIQHDQLSTHSEDADEFDFGDTMVHQAIHTIEYCLGCISNTASYLRLWALSLAHAQLSEVLWTMVIHIGLSVKSLAGGLVLFFFFTAFATLTVAILLIMEGLSAFLHALRLHWVEFQNKFYSGTGFKFLPFSFEHIREGKFEE

SEQ ID NO: 7507 - protein, 837 aa, Homo sapiens
  Payload ID: 1584;
  Gene Symbol: ATP6V0A1;
  Gene Name: ATPase, H+ transporting, lysosomal V0 subunit a1;
  Uniprot ID:  Q93050;
  ENSP ID: ENSP00000342951
MGELFRSEEMTLAQLFLQSEAAYCCVSELGELGKVQFRDLNPDVNVFQRKFVNEVRRCEEMDRKLRFVEKEIRKANIPIMDTGENPEVPFPRDMIDLEANFEKIENELKEINTNQEALKRNFLELTELKFILRKTQQFFDEMADPDLLEESSSLLEPSEMGRGTPLRLGFVAGVINRERIPTFERMLWRVCRGNVFLRQAEIENPLEDPVTGDYVHKSVFIIFFQGDQLKNRVKKICEGFRASLYPCPETPQERKEMASGVNTRIDDLQMVLNQTEDHRQRVLQAAAKNIRVWFIKVRKMKAIYHTLNLCNIDVTQKCLIAEVWCPVTDLDSIQFALRRGTEHSGSTVPSILNRMQTNQTPPTYNKTNKFTYGFQNIVDAYGIGTYREINPAPYTIITFPFLFAVMFGDFGHGILMTLFAVWMVLRESRILSQKNENEMFSTVFSGRYIILLMGVFSMYTGLIYNDCFSKSLNIFGSSWSVRPMFTYNWTEETLRGNPVLQLNPALPGVFGGPYPFGIDPIWNIATNKLTFLNSFKMKMSVILGIIHMLFGVSLSLFNHIYFKKPLNIYFGFIPEIIFMTSLFGYLVILIFYKWTAYDAHTSENAPSLLIHFINMFLFSYPESGYSMLYSGQKGIQCFLVVVALLCVPWMLLFKPLVLRRQYLRRKHLGTLNFGGIRVGNGPTEEDAEIIQHDQLSTHSEDADEPSEDEVFDFGDTMVHQAIHTIEYCLGCISNTASYLRLWALSLAHAQLSEVLWTMVIHIGLSVKSLAGGLVLFFFFTAFATLTVAILLIMEGLSAFLHALRLHWVEFQNKFYSGTGFKFLPFSFEHIREGKFEE

SEQ ID NO: 7508 - protein, 831 aa, Homo sapiens
  Payload ID: 1584;
  Gene Symbol: ATP6V0A1;
  Gene Name: ATPase, H+ transporting, lysosomal V0 subunit a1;
  Uniprot ID:  Q93050;
  ENSP ID: ENSP00000377415
MGELFRSEEMTLAQLFLQSEAAYCCVSELGELGKVQFRDLNPDVNVFQRKFVNEVRRCEEMDRKLRFVEKEIRKANIPIMDTGENPEVPFPRDMIDLEANFEKIENELKEINTNQEALKRNFLELTELKFILRKTQQFFDEMADPDLLEESSSLLEPSEMGRGTPLRLGFVAGVINRERIPTFERMLWRVCRGNVFLRQAEIENPLEDPVTGDYVHKSVFIIFFQGDQLKNRVKKICEGFRASLYPCPETPQERKEMASGVNTRIDDLQMVLNQTEDHRQRVLQAAAKNIRVWFIKVRKMKAIYHTLNLCNIDVTQKCLIAEVWCPVTDLDSIQFALRRGTEHSGSTVPSILNRMQTNQTPPTYNKTNKFTYGFQNIVDAYGIGTYREINPAPYTIITFPFLFAVMFGDFGHGILMTLFAVWMVLRESRILSQKNENEMFSTVFSGRYIILLMGVFSMYTGLIYNDCFSKSLNIFGSSWSVRPMFTYNWTEETLRGNPVLQLNPALPGVFGGPYPFGIDPIWNIATNKLTFLNSFKMKMSVILGIIHMLFGVSLSLFNHIYFKKPLNIYFGFIPEIIFMTSLFGYLVILIFYKWTAYDAHTSENAPSLLIHFINMFLFSYPESGYSMLYSGQKGIQCFLVVVALLCVPWMLLFKPLVLRRQYLRRKHLGTLNFGGIRVGNGPTEEDAEIIQHDQLSTHSEDADEFDFGDTMVHQAIHTIEYCLGCISNTASYLRLWALSLAHAQLSEVLWTMVIHIGLSVKSLAGGLVLFFFFTAFATLTVAILLIMEGLSAFLHALRLHWVEFQNKFYSGTGFKFLPFSFEHIREGKFEE

SEQ ID NO: 7509 - protein, 788 aa, Homo sapiens
  Payload ID: 1584;
  Gene Symbol: ATP6V0A1;
  Gene Name: ATPase, H+ transporting, lysosomal V0 subunit a1;
  ENSP ID: ENSP00000443991
MGELFRSEEMTLAQLFLQSEAAYCCVSELGELGKVQFRDLNPDVNVFQRKFVNEVRRCEEMDRKLRFVEKEIRKANIPIMDTGENPEVPFPRDMIDLEMADPDLLEESSSLLEPSEMGRGTPLRLGFVAGVINRERIPTFERMLWRVCRGNVFLRQAEIENPLEDPVTGDYVHKSVFIIFFQGDQLKNRVKKICEGFRASLYPCPETPQERKEMASGVNTRIDDLQMVLNQTEDHRQRVLQAAAKNIRVWFIKVRKMKAIYHTLNLCNIDVTQKCLIAEVWCPVTDLDSIQFALRRGTEHSGSTVPSILNRMQTNQTPPTYNKTNKFTYGFQNIVDAYGIGTYREINPAPYTIITFPFLFAVMFGDFGHGILMTLFAVWMVLRESRILSQKNENEMFSTVFSGRYIILLMGVFSMYTGLIYNDCFSKSLNIFGSSWSVRPMFTYNWTEETLRGNPVLQLNPALPGVFGGPYPFGIDPIWNIATNKLTFLNSFKMKMSVILGIIHMLFGVSLSLFNHIYFKKPLNIYFGFIPEIIFMTSLFGYLVILIFYKWTAYDAHTSENAPSLLIHFINMFLFSYPESGYSMLYSGQKGIQCFLVVVALLCVPWMLLFKPLVLRRQYLRRKHLGTLNFGGIRVGNGPTEEDAEIIQHDQLSTHSEDADEFDFGDTMVHQAIHTIEYCLGCISNTASYLRLWALSLAHAQLSEVLWTMVIHIGLSVKSLAGGLVLFFFFTAFATLTVAILLIMEGLSAFLHALRLHWVEFQNKFYSGTGFKFLPFSFEHIREGKFEE

SEQ ID NO: 7510 - protein, 483 aa, Homo sapiens
  Payload ID: 1584;
  Gene Symbol: ATP6V0A1;
  Gene Name: ATPase, H+ transporting, lysosomal V0 subunit a1;
  ENSP ID: ENSP00000446377
MQTNQTPPTYNKTNKFTYGFQNIVDAYGIGTYREINPAPYTIITFPFLFAVMFGDFGHGILMTLFAVWMVLRESRILSQKNENEMFSTVFSGRYIILLMGVFSMYTGLIYNDCFSKSLNIFGSSWSVRPMFTYNWTEETLRGNPVLQLNPALPGVFGGPYPFGIDPIWNIATNKLTFLNSFKMKMSVILGIIHMLFGVSLSLFNHIYFKKPLNIYFGFIPEIIFMTSLFGYLVILIFYKWTAYDAHTSENAPSLLIHFINMFLFSYPESGYSMLYSGQKGIQCFLVVVALLCVPWMLLFKPLVLRRQYLRRKHLGTLNFGGIRVGNGPTEEDAEIIQHDQLSTHSEDADEPSEDEVFDFGDTMVHQAIHTIEYCLGCISNTASYLRLWALSLAHAQLSEVLWTMVIHIGLSVKSLAGGLVLFFFFTAFATLTVAILLIMEGLSAFLHALRLHWVEFQNKFYSGTGFKFLPFSFEHIREGKFEE

SEQ ID NO: 7511 - protein, 93 aa, Homo sapiens
  Payload ID: 1584;
  Gene Symbol: ATP6V0A1;
  Gene Name: ATPase, H+ transporting, lysosomal V0 subunit a1;
  ENSP ID: ENSP00000466290
MGELFRSEEMTLAQLFLQSEAAYCCVSELGELGKVQFRDLNPDVNVFQRKFVNEVRRCEEMDRKLRFVEKEIRKANIPIMDTGENPEVPFPRD

SEQ ID NO: 7512 - protein, 130 aa, Homo sapiens
  Payload ID: 1584;
  Gene Symbol: ATP6V0A1;
  Gene Name: ATPase, H+ transporting, lysosomal V0 subunit a1;
  ENSP ID: ENSP00000466328
MGELFRSEEMTLAQLFLQSEAAYCCVSELGELGKVQFRDLNPDVNVFQRKFVNEVRRCEEMDRKLRFVEKEIRKANIPIMDTGENPEVPFPRDMIDLEANFEKIENELKEINTNQEALKRNFLELTELKF

SEQ ID NO: 7513 - protein, 195 aa, Homo sapiens
  Payload ID: 1584;
  Gene Symbol: ATP6V0A1;
  Gene Name: ATPase, H+ transporting, lysosomal V0 subunit a1;
  ENSP ID: ENSP00000466767
ANIPIMDTGENPEVPFPRDMIDLEANFEKIENELKEINTNQEALKRNFLELTELKFILRKTQQFFDEMADPDLLEESSSLLEPSEMGRGTPLRLGFVAGVINRERIPTFERMLWRVCRGNVFLRQAEIENPLEDPVTVESHSVVQARVQWRDLGSPQPPLPGFKRFSCLSLPSSWGLQGDYVHKSVFIIFFQGDQ

SEQ ID NO: 7514 - protein, 191 aa, Homo sapiens
  Payload ID: 1584;
  Gene Symbol: ATP6V0A1;
  Gene Name: ATPase, H+ transporting, lysosomal V0 subunit a1;
  ENSP ID: ENSP00000466852
PWMLLFKPLVLRRQYLRRKHLEGQPVEAPVSPNPSQQGLEAAAAATGTLNFGGIRVGNGPTEEDAEIIQHDQLSTHSEDADEPSEDEVFDFGDTMVHQAIHTIEYCLGCISNTASYLRLWALSLAHAQLSEVLWTMVIHIGLSVKSLAGGLVLFFFFTAFATLTVAILLIMEGLSAFLHALRLHWVEFQNK

SEQ ID NO: 7515 - protein, 794 aa, Homo sapiens
  Payload ID: 1584;
  Gene Symbol: ATP6V0A1;
  Gene Name: ATPase, H+ transporting, lysosomal V0 subunit a1;
  ENSP ID: ENSP00000466878
MGELFRSEEMTLAQLFLQSEAAYCCVSELGELGKVQFRDLNPDVNVFQRKFVNEVRRCEEMDRKLRFVEKEIRKANIPIMDTGENPEVPFPRDMIDLEMADPDLLEESSSLLEPSEMGRGTPLRLGFVAGVINRERIPTFERMLWRVCRGNVFLRQAEIENPLEDPVTGDYVHKSVFIIFFQGDQLKNRVKKICEGFRASLYPCPETPQERKEMASGVNTRIDDLQMVLNQTEDHRQRVLQAAAKNIRVWFIKVRKMKAIYHTLNLCNIDVTQKCLIAEVWCPVTDLDSIQFALRRGTEHSGSTVPSILNRMQTNQTPPTYNKTNKFTYGFQNIVDAYGIGTYREINPAPYTIITFPFLFAVMFGDFGHGILMTLFAVWMVLRESRILSQKNENEMFSTVFSGRYIILLMGVFSMYTGLIYNDCFSKSLNIFGSSWSVRPMFTYNWTEETLRGNPVLQLNPALPGVFGGPYPFGIDPIWNIATNKLTFLNSFKMKMSVILGIIHMLFGVSLSLFNHIYFKKPLNIYFGFIPEIIFMTSLFGYLVILIFYKWTAYDAHTSENAPSLLIHFINMFLFSYPESGYSMLYSGQKGIQCFLVVVALLCVPWMLLFKPLVLRRQYLRRKHLGTLNFGGIRVGNGPTEEDAEIIQHDQLSTHSEDADEPSEDEVFDFGDTMVHQAIHTIEYCLGCISNTASYLRLWALSLAHAQLSEVLWTMVIHIGLSVKSLAGGLVLFFFFTAFATLTVAILLIMEGLSAFLHALRLHWVEFQNKFYSGTGFKFLPFSFEHIREGKFEE

SEQ ID NO: 7516 - protein, 198 aa, Homo sapiens
  Payload ID: 1584;
  Gene Symbol: ATP6V0A1;
  Gene Name: ATPase, H+ transporting, lysosomal V0 subunit a1;
  ENSP ID: ENSP00000467373
MGELFRSEEMTLAQLFLQSEAAYCCVSELGELGKVQFRDANFEKIENELKEINTNQEALKRNFLELTELKFILRKTQQFFDEMADPDLLEESSSLLEPSEMGRGTPLRLGFVAGVINRERIPTFERMLWRVCRGNVFLRQAEIENPLEDPVTGDYVHKSVFIIFFQGDQLKNRVKKICEGFRASLYPCPETPQERKEM

SEQ ID NO: 7517 - protein, 68 aa, Homo sapiens
  Payload ID: 1584;
  Gene Symbol: ATP6V0A1;
  Gene Name: ATPase, H+ transporting, lysosomal V0 subunit a1;
  ENSP ID: ENSP00000468001
MGELFRSEEMTLAQLFLQSEAAYCCVSELGELGKVQFRDLNPDVNVFQRKFVNEVRRCEEMDRKLRQF

SEQ ID NO: 7518 - protein, 129 aa, Homo sapiens
  Payload ID: 1584;
  Gene Symbol: ATP6V0A1;
  Gene Name: ATPase, H+ transporting, lysosomal V0 subunit a1;
  ENSP ID: ENSP00000468169
  MOD_RES (1)..(1): Any amino acid
XLVILIFYKWTAYDAHTSENAPSLLIHFINMFLFSYPESGYSMLYSGQKGIQCFLVVVALLCVPWMLLFKPLVLRRQYLRRKHLGTLNFGGIRVGNGPTEEDAEIIQHDQLSTHSEDADEALAPAQWKH

SEQ ID NO: 7519 - protein, 188 aa, Homo sapiens
  Payload ID: 1584;
  Gene Symbol: ATP6V0A1;
  Gene Name: ATPase, H+ transporting, lysosomal V0 subunit a1;
  ENSP ID: ENSP00000468177
AYDAHTSENAPSLLIHFINMFLFSYPESGYSMLYSGQKGIQCFLVVVALLCVPWMLLFKPLVLRRQYLRRKHLGTLNFGGIRVGNGPTEEDAEIIQHDQLSTHSEDADEPSEDEVFDFGDTMVHQAIHTIEYCLGCISNTASYLRLWALSLAHARLSSRINSTAGPVSSSYPSPSSIFGKGSLKSESL

SEQ ID NO: 7520 - protein, 856 aa, Homo sapiens
  Payload ID: 1585;
  Gene Symbol: ATP6V0A2;
  Gene Name: ATPase, H+ transporting, lysosomal V0 subunit a2;
  Uniprot ID:  Q9Y487;
  ENSP ID: ENSP00000332247
MGSLFRSETMCLAQLFLQSGTAYECLSALGEKGLVQFRDLNQNVSSFQRKFVGEVKRCEELERILVYLVQEINRADIPLPEGEASPPAPPLKQVLEMQEQLQKLEVELREVTKNKEKLRKNLLELIEYTHMLRVTKTFVKRNVEFEPTYEEFPSLESDSLLDYSCMQRLGAKLGFVSGLINQGKVEAFEKMLWRVCKGYTIVSYAELDESLEDPETGEVIKWYVFLISFWGEQIGHKVKKICDCYHCHVYPYPNTAEERREIQEGLNTRIQDLYTVLHKTEDYLRQVLCKAAESVYSRVIQVKKMKAIYHMLNMCSFDVTNKCLIAEVWCPEADLQDLRRALEEGSRESGATIPSFMNIIPTKETPPTRIRTNKFTEGFQNIVDAYGVGSYREVNPALFTIITFPFLFAVMFGDFGHGFVMFLFALLLVLNENHPRLNQSQEIMRMFFNGRYILLLMGLFSVYTGLIYNDCFSKSVNLFGSGWNVSAMYSSSHPPAEHKKMVLWNDSVVRHNSILQLDPSIPGVFRGPYPLGIDPIWNLATNRLTFLNSFKMKMSVILGIIHMTFGVILGIFNHLHFRKKFNIYLVSIPELLFMLCIFGYLIFMIFYKWLVFSAETSRVAPSILIEFINMFLFPASKTSGLYTGQEYVQRVLLVVTALSVPVLFLGKPLFLLWLHNGRSCFGVNRSGYTLIRKDSEEEVSLLGSQDIEEGNHQVEDGCREMACEEFNFGEILMTQVIHSIEYCLGCISNTASYLRLWALSLAHAQLSDVLWAMLMRVGLRVDTTYGVLLLLPVIALFAVLTIFILLIMEGLSAFLHAIRLHWVEFQNKFYVGAGTKFVPFSFSLLSSKFNNDDSVA

SEQ ID NO: 7521 - protein, 138 aa, Homo sapiens
  Payload ID: 1585;
  Gene Symbol: ATP6V0A2;
  Gene Name: ATPase, H+ transporting, lysosomal V0 subunit a2;
  ENSP ID: ENSP00000441143
MLCDLSQFNFGEILMTQVIHSIEYCLGCISNTASYLRLWALSLAHAQLSDVLWAMLMRVGLRVDTTYGVLLLLPVIALFAVLTIFILLIMEGLSAFLHAIRLHWVEFQNKFYVGAGTKFVPFSFSLLSSKFNNDDSVA

SEQ ID NO: 7522 - protein, 328 aa, Homo sapiens
  Payload ID: 1585;
  Gene Symbol: ATP6V0A2;
  Gene Name: ATPase, H+ transporting, lysosomal V0 subunit a2;
  ENSP ID: ENSP00000443441
MLRVTKTFVKRNVEFEPTYEEFPSLESDSLLDYSCMQRLGAKLGFVSGLINQGKVEAFEKMLWRVCKGYTIVSYAELDESLEDPETGEVIKWYVFLISFWGEQIGHKVKKICDCYHCHVYPYPNTAEERREIQEGLNTRIQDLYTVLHKTEDYLRQVLCKAAESVYSRVIQVKKMKAIYHMLNMCSFDVTNKCLIAEVWCPEADLQDLRRALEEGSRESGATIPSFMNIIPTKETPPTRIRTNKFTEGFQNIVDAYGVGSYREVNPALFTIITFPFLFAVMFGDFGHGFVMFLFALLLVLNENHPRLNQSQEIMRMFFNGRYILLLMG

SEQ ID NO: 7523 - protein, 131 aa, Homo sapiens
  Payload ID: 1585;
  Gene Symbol: ATP6V0A2;
  Gene Name: ATPase, H+ transporting, lysosomal V0 subunit a2;
  ENSP ID: ENSP00000443726
MACEEFNFGEILMTQVIHSIEYCLGCISNTASYLRLWALSLAHAQLSDVLWAMLMRVGLRVDTTYGVLLLLPVIALFAVLTIFILLIMEGLSAFLHAIRLHWVEFQNKFYVGAGTKFVPFSFSLLSSKFNN

SEQ ID NO: 7524 - protein, 372 aa, Homo sapiens
  Payload ID: 1585;
  Gene Symbol: ATP6V0A2;
  Gene Name: ATPase, H+ transporting, lysosomal V0 subunit a2;
  ENSP ID: ENSP00000482236
MGSLFRSETMCLAQLFLQSGTAYECLSALGEKGLVQFRDLNQNVSSFQRKFVGEVKRCEELERILVYLVQEINRADIPLPEGEASPPAPPLKQVLEMQEQLQKLEVELREVTKNKEKLRKNLLELIEYTHMLRVTKTFVKRNVEFEPTYEEFPSLESDSLLDYSCMQRLGAKLGFVSGLINQGKVEAFEKMLWRVCKGYTIVSYAELDESLEDPETGEVIKWYVFLISFWGEQIGHKVKKICDCYHCHVYPYPNTAEERREIQEGLNTRIQDLYTVLHKTEDYLRQVLCKAAESVYSRVIQVKKMKAIYHMLNMCSFDVTNKCLIAEVWCPEADLQDLRRALEEGSVRLPSSPLPGTEERLMELINSEKKRK

SEQ ID NO: 7525 - protein, 840 aa, Homo sapiens
  Payload ID: 1586;
  Gene Symbol: ATP6V0A4;
  Gene Name: ATPase, H+ transporting, lysosomal V0 subunit a4;
  Uniprot ID:  Q9HBG4;
  ENSP ID: ENSP00000253856
MVSVFRSEEMCLSQLFLQVEAAYCCVAELGELGLVQFKDLNMNVNSFQRKFVNEVRRCESLERILRFLEDEMQNEIVVQLLEKSPLTPLPREMITLETVLEKLEGELQEANQNQQALKQSFLELTELKYLLKKTQDFFETETNLADDFFTEDTSGLLELKAVPAYMTGKLGFIAGVINRERMASFERLLWRICRGNVYLKFSEMDAPLEDPVTKEEIQKNIFIIFYQGEQLRQKIKKICDGFRATVYPCPEPAVERREMLESVNVRLEDLITVITQTESHRQRLLQEAAANWHSWLIKVQKMKAVYHILNMCNIDVTQQCVIAEIWFPVADATRIKRALEQGMELSGSSMAPIMTTVQSKTAPPTFNRTNKFTAGFQNIVDAYGVGSYREINPAPYTIITFPFLFAVMFGDCGHGTVMLLAALWMILNERRLLSQKTDNEIWNTFFHGRYLILLMGIFSIYTGLIYNDCFSKSLNIFGSSWSVQPMFRNGTWNTHVMEESLYLQLDPAIPGVYFGNPYPFGIDPIWNLASNKLTFLNSYKMKMSVILGIVQMVFGVILSLFNHIYFRRTLNIILQFIPEMIFILCLFGYLVFMIIFKWCCFDVHVSQHAPSILIHFINMFLFNYSDSSNAPLYKHQQEVQSFFVVMALISVPWMLLIKPFILRASHRKSQLQASRIQEDATENIEGDSSSPSSRSGQRTSADTHGALDDHGEEFNFGDVFVHQAIHTIEYCLGCISNTASYLRLWALSLAHAQLSEVLWTMVMNSGLQTRGWGGIVGVFIIFAVFAVLTVAILLIMEGLSAFLHALRLHWVEFQNKFYVGDGYKFSPFSFKHILDGTAEE

SEQ ID NO: 7526 - protein, 840 aa, Homo sapiens; identical to SEQ ID NO: 7525
  Payload ID: 1586;
  Gene Symbol: ATP6V0A4;
  Gene Name: ATPase, H+ transporting, lysosomal V0 subunit a4;
  Uniprot ID:  Q9HBG4;
  ENSP ID: ENSP00000308122

SEQ ID NO: 7527 - protein, 840 aa, Homo sapiens; identical to SEQ ID NO: 7525
  Payload ID: 1586;
  Gene Symbol: ATP6V0A4;
  Gene Name: ATPase, H+ transporting, lysosomal V0 subunit a4;
  Uniprot ID:  Q9HBG4;
  ENSP ID: ENSP00000376774

SEQ ID NO: 7528 - protein, 1035 aa, Homo sapiens
  Payload ID: 1587;
  Gene Symbol: ATP4A;
  Gene Name: ATPase, H+/K+ exchanging, alpha polypeptide;
  Uniprot ID:  P20648;
  ENSP ID: ENSP00000262623
MGKAENYELYSVELGPGPGGDMAAKMSKKKKAGGGGGKRKEKLENMKKEMEINDHQLSVAELEQKYQTSATKGLSASLAAELLLRDGPNALRPPRGTPEYVKFARQLAGGLQCLMWVAAAICLIAFAIQASEGDLTTDDNLYLAIALIAVVVVTGCFGYYQEFKSTNIIASFKNLVPQQATVIRDGDKFQINADQLVVGDLVEMKGGDRVPADIRILAAQGCKVDNSSLTGESEPQTRSPECTHESPLETRNIAFFSTMCLEGTVQGLVVNTGDRTIIGRIASLASGVENEKTPIAIEIEHFVDIIAGLAILFGATFFIVAMCIGYTFLRAMVFFMAIVVAYVPEGLLATVTVCLSLTAKRLASKNCVVKNLEAVETLGSTSVICSDKTGTLTQNRMTVSHLWFDNHIHTADTTEDQSGQTFDQSSETWRALCRVLTLCNRAAFKSGQDAVPVPKRIVIGDASETALLKFSELTLGNAMGYRDRFPKVCEIPFNSTNKFQLSIHTLEDPRDPRHLLVMKGAPERVLERCSSILIKGQELPLDEQWREAFQTAYLSLGGLGERVLGFCQLYLNEKDYPPGYAFDVEAMNFPSSGLCFAGLVSMIDPPRATVPDAVLKCRTAGIRVIMVTGDHPITAKAIAASVGIISEGSETVEDIAARLRVPVDQVNRKDARACVINGMQLKDMDPSELVEALRTHPEMVFARTSPQQKLVIVESCQRLGAIVAVTGDGVNDSPALKKADIGVAMGIAGSDAAKNAADMILLDDNFASIVTGVEQGRLIFDNLKKSIAYTLTKNIPELTPYLIYITVSVPLPLGCITILFIELCTDIFPSVSLAYEKAESDIMHLRPRNPKRDRLVNEPLAAYSYFQIGAIQSFAGFTDYFTAMAQEGWFPLLCVGLRAQWEDHHLQDLQDSYGQEWTFGQRLYQQYTCYTVFFISIEVCQIADVLIRKTRRLSAFQQGFFRNKILVIAIVFQVCIGCFLCYCPGMPNIFNFMPIRFQWWLVPLPYGILIFVYDEIRKLGVRCCPGSWWDQELYY

SEQ ID NO: 7529 - protein, 34 aa, Homo sapiens
  Payload ID: 1587;
  Gene Symbol: ATP4A;
  Gene Name: ATPase, H+/K+ exchanging, alpha polypeptide;
  ENSP ID: ENSP00000472323
  MOD_RES (1)..(1): Any amino acid
XELPLDEQWREAFQTAYLSLGGLGERVLGDHGNG

SEQ ID NO: 7530 - protein, 291 aa, Homo sapiens
  Payload ID: 1588;
  Gene Symbol: ATP4B;
  Gene Name: ATPase, H+/K+ exchanging, beta polypeptide;
  Uniprot ID:  P51164;
  ENSP ID: ENSP00000334216
MAALQEKKTCGQRMEEFQRYCWNPDTGQMLGRTLSRWVWISLYYVAFYVVMTGLFALCLYVLMQTVDPYTPDYQDQLRSPGVTLRPDVYGEKGLEIVYNVSDNRTWADLTQTLHAFLAGYSPAAQEDSINCTSEQYFFQESFRAPNHTKFSCKFTADMLQNCSGLADPNFGFEEGKPCFIIKMNRIVKFLPSNGSAPRVDCAFLDQPRELGQPLQVKYYPPNGTFSLHYFPYYGKKAQPHYSNPLVAAKLLNIPRNAEVAIVCKVMAEHVTFNNPHDPYEGKVEFKLKIEK

SEQ ID NO: 7531 - protein, 1045 aa, Homo sapiens
  Payload ID: 1589;
  Gene Symbol: ATP12A;
  Gene Name: ATPase, H+/K+ transporting, nongastric, alpha polypeptide;
  Uniprot ID:  P54707;
  ENSP ID: ENSP00000218548
MHQKTPEIYSVELSGTKDIVKTDKGDGKEKYRGLKNNCLELKKKNHKEEFQKELHLDDHKLSNRELEEKYGTDIIMGLSSTRAAELLARDGPNSLTPPKQTPEIVKFLKQMVGGFSILLWVGAFLCWIAYGIQYSSDKSASLNNVYLGCVLGLVVILTGIFAYYQEAKSTNIMSSFNKMIPQQALVIRDSEKKTIPSEQLVVGDIVEVKGGDQIPADIRVLSSQGCRVDNSSLTGESEPQPRSSEFTHENPLETKNICFYSTTCLEASTSPVGTVTGMVINTGDRTIIGHIASLASGVGNEKTPIAIEIEHFVHIVAGVAVSIGILFFIIAVSLKYQVLDSIIFLIGIIVANVPEGLLATVTVTLSLTAKRMAKKNCLVKNLEAVETLGSTSIICSDKTGTLTQNRMTVAHLWFDNQIFVADTSEDHSNQVFDQSSRTWASLSKIITLCNRAEFKPGQENVPIMKKAVIGDASETALLKFSEVILGDVMEIRKRNRKVAEIPFNSTNKFQLSIHEMDDPHGKRFLMVMKGAPERILEKCSTIMINGEEHPLDKSTAKTFHTAYMELGGLGERVLGFCHLYLPADEFPETYSFDIDAMNFPTSNLCFVGLLSMIDPPRSTVPDAVTKCRSAGIKVIMVTGDHPITAKAIAKSVGIISANSETVEDIAHRLNIAVEQVNKRDAKAAVVTGMELKDMSSEQLDEILANYQEIVFARTSPQQKLIIVEGCQRQDAVVAVTGDGVNDSPALKKADIGIAMGIAGSDAAKNAADMVLLDDNFASIVTGVEEGRLIFDNLKKTIAYSLTKNIAELCPFLIYIIVGLPLPIGTITILFIDLGTDIIPSIALAYEKAESDIMNRKPRHKNKDRLVNQPLAVYSYLHIGLMQALGAFLVYFTVYAQEGFLPRTLINLRVEWEKDYVNDLKDSYGQEWTRYQREYLEWTGYTAFFVGILVQQIADLIIRKTRRNSIFQQGLFRNKVIWVGITSQIIIGLILSYGLGSVTALSFTMLRAQYWFVAVPHAILIWVYDEVRKLFIRLYPGSWWDKNMYY

SEQ ID NO: 7532 - protein, 1039 aa, Homo sapiens
  Payload ID: 1589;
  Gene Symbol: ATP12A;
  Gene Name: ATPase, H+/K+ transporting, nongastric, alpha polypeptide;
  Uniprot ID:  P54707;
  ENSP ID: ENSP00000371372
MHQKTPEIYSVELSGTKDIVKTDKGDGKEKYRGLKNNCLELKKKNHKEEFQKELHLDDHKLSNRELEEKYGTDIIMGLSSTRAAELLARDGPNSLTPPKQTPEIVKFLKQMVGGFSILLWVGAFLCWIAYGIQYSSDKSASLNNVYLGCVLGLVVILTGIFAYYQEAKSTNIMSSFNKMIPQQALVIRDSEKKTIPSEQLVVGDIVEVKGGDQIPADIRVLSSQGCRVDNSSLTGESEPQPRSSEFTHENPLETKNICFYSTTCLEGTVTGMVINTGDRTIIGHIASLASGVGNEKTPIAIEIEHFVHIVAGVAVSIGILFFIIAVSLKYQVLDSIIFLIGIIVANVPEGLLATVTVTLSLTAKRMAKKNCLVKNLEAVETLGSTSIICSDKTGTLTQNRMTVAHLWFDNQIFVADTSEDHSNQVFDQSSRTWASLSKIITLCNRAEFKPGQENVPIMKKAVIGDASETALLKFSEVILGDVMEIRKRNRKVAEIPFNSTNKFQLSIHEMDDPHGKRFLMVMKGAPERILEKCSTIMINGEEHPLDKSTAKTFHTAYMELGGLGERVLGFCHLYLPADEFPETYSFDIDAMNFPTSNLCFVGLLSMIDPPRSTVPDAVTKCRSAGIKVIMVTGDHPITAKAIAKSVGIISANSETVEDIAHRLNIAVEQVNKRDAKAAVVTGMELKDMSSEQLDEILANYQEIVFARTSPQQKLIIVEGCQRQDAVVAVTGDGVNDSPALKKADIGIAMGIAGSDAAKNAADMVLLDDNFASIVTGVEEGRLIFDNLKKTIAYSLTKNIAELCPFLIYIIVGLPLPIGTITILFIDLGTDIIPSIALAYEKAESDIMNRKPRHKNKDRLVNQPLAVYSYLHIGLMQALGAFLVYFTVYAQEGFLPRTLINLRVEWEKDYVNDLKDSYGQEWTRYQREYLEWTGYTAFFVGILVQQIADLIIRKTRRNSIFQQGLFRNKVIWVGITSQIIIGLILSYGLGSVTALSFTMLRAQYWFVAVPHAILIWVYDEVRKLFIRLYPGSWWDKNMYY

SEQ ID NO: 7533 - protein, 1023 aa, Homo sapiens
  Payload ID: 1590;
  Gene Symbol: ATP1A1;
  Gene Name: ATPase, Na+/K+ transporting, alpha 1 polypeptide;
  Uniprot ID:  P05023;
  ENSP ID: ENSP00000295598
MGKGVGRDKYEPAAVSEQGDKKGKKGKKDRDMDELKKEVSMDDHKLSLDELHRKYGTDLSRGLTSARAAEILARDGPNALTPPPTTPEWIKFCRQLFGGFSMLLWIGAILCFLAYSIQAATEEEPQNDNLYLGVVLSAVVIITGCFSYYQEAKSSKIMESFKNMVPQQALVIRNGEKMSINAEEVVVGDLVEVKGGDRIPADLRIISANGCKVDNSSLTGESEPQTRSPDFTNENPLETRNIAFFSTNCVEGTARGIVVYTGDRTVMGRIATLASGLEGGQTPIAAEIEHFIHIITGVAVFLGVSFFILSLILEYTWLEAVIFLIGIIVANVPEGLLATVTVCLTLTAKRMARKNCLVKNLEAVETLGSTSTICSDKTGTLTQNRMTVAHMWFDNQIHEADTTENQSGVSFDKTSATWLALSRIAGLCNRAVFQANQENLPILKRAVAGDASESALLKCIELCCGSVKEMRERYAKIVEIPFNSTNKYQLSIHKNPNTSEPQHLLVMKGAPERILDRCSSILLHGKEQPLDEELKDAFQNAYLELGGLGERVLGFCHLFLPDEQFPEGFQFDTDDVNFPIDNLCFVGLISMIDPPRAAVPDAVGKCRSAGIKVIMVTGDHPITAKAIAKGVGIISEGNETVEDIAARLNIPVSQVNPRDAKACVVHGSDLKDMTSEQLDDILKYHTEIVFARTSPQQKLIIVEGCQRQGAIVAVTGDGVNDSPALKKADIGVAMGIAGSDVSKQAADMILLDDNFASIVTGVEEGRLIFDNLKKSIAYTLTSNIPEITPFLIFIIANIPLPLGTVTILCIDLGTDMVPAISLAYEQAESDIMKRQPRNPKTDKLVNERLISMAYGQIGMIQALGGFFTYFVILAENGFLPIHLLGLRVDWDDRWINDVEDSYGQQWTYEQRKIVEFTCHTAFFVSIVVVQWADLVICKTRRNSVFQQGMKNKILIFGLFEETALAAFLSYCPGMGVALRMYPLKPTWWFCAFPYSLLIFVYDEVRKLIIRRRPGGWVEKETYY

SEQ ID NO: 7534 - protein, 144 aa, Homo sapiens
  Payload ID: 1590;
  Gene Symbol: ATP1A1;
  Gene Name: ATPase, Na+/K+ transporting, alpha 1 polypeptide;
  ENSP ID: ENSP00000358506
MDELKKEVSMDDHKLSLDELHRKYGTDLSRGLTSARAAEILARDGPNALTPPPTTPEWIKFCRQLFGGFSMLLWIGAILCFLAYSIQAATEEEPQNDNLYLGVVLSAVVIITGCFSYYQEAKSSKIMESFKNMVPQQALVIRNG

SEQ ID NO: 7535 - protein, 992 aa, Homo sapiens
  Payload ID: 1590;
  Gene Symbol: ATP1A1;
  Gene Name: ATPase, Na+/K+ transporting, alpha 1 polypeptide;
  Uniprot ID:  P05023;
  ENSP ID: ENSP00000358508
MDELKKEVSMDDHKLSLDELHRKYGTDLSRGLTSARAAEILARDGPNALTPPPTTPEWIKFCRQLFGGFSMLLWIGAILCFLAYSIQAATEEEPQNDNLYLGVVLSAVVIITGCFSYYQEAKSSKIMESFKNMVPQQALVIRNGEKMSINAEEVVVGDLVEVKGGDRIPADLRIISANGCKVDNSSLTGESEPQTRSPDFTNENPLETRNIAFFSTNCVEGTARGIVVYTGDRTVMGRIATLASGLEGGQTPIAAEIEHFIHIITGVAVFLGVSFFILSLILEYTWLEAVIFLIGIIVANVPEGLLATVTVCLTLTAKRMARKNCLVKNLEAVETLGSTSTICSDKTGTLTQNRMTVAHMWFDNQIHEADTTENQSGVSFDKTSATWLALSRIAGLCNRAVFQANQENLPILKRAVAGDASESALLKCIELCCGSVKEMRERYAKIVEIPFNSTNKYQLSIHKNPNTSEPQHLLVMKGAPERILDRCSSILLHGKEQPLDEELKDAFQNAYLELGGLGERVLGFCHLFLPDEQFPEGFQFDTDDVNFPIDNLCFVGLISMIDPPRAAVPDAVGKCRSAGIKVIMVTGDHPITAKAIAKGVGIISEGNETVEDIAARLNIPVSQVNPRDAKACVVHGSDLKDMTSEQLDDILKYHTEIVFARTSPQQKLIIVEGCQRQGAIVAVTGDGVNDSPALKKADIGVAMGIAGSDVSKQAADMILLDDNFASIVTGVEEGRLIFDNLKKSIAYTLTSNIPEITPFLIFIIANIPLPLGTVTILCIDLGTDMVPAISLAYEQAESDIMKRQPRNPKTDKLVNERLISMAYGQIGMIQALGGFFTYFVILAENGFLPIHLLGLRVDWDDRWINDVEDSYGQQWTYEQRKIVEFTCHTAFFVSIVVVQWADLVICKTRRNSVFQQGMKNKILIFGLFEETALAAFLSYCPGMGVALRMYPLKPTWWFCAFPYSLLIFVYDEVRKLIIRRRPGGWVEKETYY

SEQ ID NO: 7536 - protein, 157 aa, Homo sapiens
  Payload ID: 1590;
  Gene Symbol: ATP1A1;
  Gene Name: ATPase, Na+/K+ transporting, alpha 1 polypeptide;
  ENSP ID: ENSP00000396236
RQPRNPKTDKLVNERLISMAYGQIGMIQALGGFFTYFVILAENGFLPIHLLGLRVDWDDRWINDVEDSYGQQWTYEQRKIVEFTCHTAFFVSIVVVQWADLVICKTRRNSVFQQGMKNKILIFGLFEETALAAFLSYCPGMGVALRMYPLKTLTQYS

SEQ ID NO: 7537 - protein, 106 aa, Homo sapiens
  Payload ID: 1590;
  Gene Symbol: ATP1A1;
  Gene Name: ATPase, Na+/K+ transporting, alpha 1 polypeptide;
  ENSP ID: ENSP00000400124
MDELKKEVSMDDHKLSLDELHRKYGTDLSRGLTSARAAEILARDGPNALTPPPTTPEWIKFCRQLFGGFSMLLWIGAILCFLAYSIQAATEEEPQNDNLYLGVVLS

SEQ ID NO: 7538 - protein, 1023 aa, Homo sapiens
  Payload ID: 1590;
  Gene Symbol: ATP1A1;
  Gene Name: ATPase, Na+/K+ transporting, alpha 1 polypeptide;
  Uniprot ID:  P05023;
  ENSP ID: ENSP00000445306
MAFKVGRDKYEPAAVSEQGDKKGKKGKKDRDMDELKKEVSMDDHKLSLDELHRKYGTDLSRGLTSARAAEILARDGPNALTPPPTTPEWIKFCRQLFGGFSMLLWIGAILCFLAYSIQAATEEEPQNDNLYLGVVLSAVVIITGCFSYYQEAKSSKIMESFKNMVPQQALVIRNGEKMSINAEEVVVGDLVEVKGGDRIPADLRIISANGCKVDNSSLTGESEPQTRSPDFTNENPLETRNIAFFSTNCVEGTARGIVVYTGDRTVMGRIATLASGLEGGQTPIAAEIEHFIHIITGVAVFLGVSFFILSLILEYTWLEAVIFLIGIIVANVPEGLLATVTVCLTLTAKRMARKNCLVKNLEAVETLGSTSTICSDKTGTLTQNRMTVAHMWFDNQIHEADTTENQSGVSFDKTSATWLALSRIAGLCNRAVFQANQENLPILKRAVAGDASESALLKCIELCCGSVKEMRERYAKIVEIPFNSTNKYQLSIHKNPNTSEPQHLLVMKGAPERILDRCSSILLHGKEQPLDEELKDAFQNAYLELGGLGERVLGFCHLFLPDEQFPEGFQFDTDDVNFPIDNLCFVGLISMIDPPRAAVPDAVGKCRSAGIKVIMVTGDHPITAKAIAKGVGIISEGNETVEDIAARLNIPVSQVNPRDAKACVVHGSDLKDMTSEQLDDILKYHTEIVFARTSPQQKLIIVEGCQRQGAIVAVTGDGVNDSPALKKADIGVAMGIAGSDVSKQAADMILLDDNFASIVTGVEEGRLIFDNLKKSIAYTLTSNIPEITPFLIFIIANIPLPLGTVTILCIDLGTDMVPAISLAYEQAESDIMKRQPRNPKTDKLVNERLISMAYGQIGMIQALGGFFTYFVILAENGFLPIHLLGLRVDWDDRWINDVEDSYGQQWTYEQRKIVEFTCHTAFFVSIVVVQWADLVICKTRRNSVFQQGMKNKILIFGLFEETALAAFLSYCPGMGVALRMYPLKPTWWFCAFPYSLLIFVYDEVRKLIIRRRPGGWVEKETYY

SEQ ID NO: 7539 - protein, 1020 aa, Homo sapiens
  Payload ID: 1591;
  Gene Symbol: ATP1A2;
  Gene Name: ATPase, Na+/K+ transporting, alpha 2 polypeptide;
  Uniprot ID:  P50993;
  ENSP ID: ENSP00000354490
MGRGAGREYSPAATTAENGGGKKKQKEKELDELKKEVAMDDHKLSLDELGRKYQVDLSKGLTNQRAQDVLARDGPNALTPPPTTPEWVKFCRQLFGGFSILLWIGAILCFLAYGIQAAMEDEPSNDNLYLGVVLAAVVIVTGCFSYYQEAKSSKIMDSFKNMVPQQALVIREGEKMQINAEEVVVGDLVEVKGGDRVPADLRIISSHGCKVDNSSLTGESEPQTRSPEFTHENPLETRNICFFSTNCVEGTARGIVIATGDRTVMGRIATLASGLEVGRTPIAMEIEHFIQLITGVAVFLGVSFFVLSLILGYSWLEAVIFLIGIIVANVPEGLLATVTVCLTLTAKRMARKNCLVKNLEAVETLGSTSTICSDKTGTLTQNRMTVAHMWFDNQIHEADTTEDQSGATFDKRSPTWTALSRIAGLCNRAVFKAGQENISVSKRDTAGDASESALLKCIELSCGSVRKMRDRNPKVAEIPFNSTNKYQLSIHEREDSPQSHVLVMKGAPERILDRCSTILVQGKEIPLDKEMQDAFQNAYMELGGLGERVLGFCQLNLPSGKFPRGFKFDTDELNFPTEKLCFVGLMSMIDPPRAAVPDAVGKCRSAGIKVIMVTGDHPITAKAIAKGVGIISEGNETVEDIAARLNIPMSQVNPREAKACVVHGSDLKDMTSEQLDEILKNHTEIVFARTSPQQKLIIVEGCQRQGAIVAVTGDGVNDSPALKKADIGIAMGISGSDVSKQAADMILLDDNFASIVTGVEEGRLIFDNLKKSIAYTLTSNIPEITPFLLFIIANIPLPLGTVTILCIDLGTDMVPAISLAYEAAESDIMKRQPRNSQTDKLVNERLISMAYGQIGMIQALGGFFTYFVILAENGFLPSRLLGIRLDWDDRTMNDLEDSYGQEWTYEQRKVVEFTCHTAFFASIVVVQWADLIICKTRRNSVFQQGMKNKILIFGLLEETALAAFLSYCPGMGVALRMYPLKVTWWFCAFPYSLLIFIYDEVRKLILRRYPGGWVEKETYY

SEQ ID NO: 7540 - protein, 1009 aa, Homo sapiens
  Payload ID: 1591;
  Gene Symbol: ATP1A2;
  Gene Name: ATPase, Na+/K+ transporting, alpha 2 polypeptide;
  ENSP ID: ENSP00000376066
MGRGAGREYSPAATTAENGGGKKKQKEKELDELKKEVAMDDHKLSLDELGRKYQVDLSKGLTNQRAQDVLARDGPNALTPPPTTPEWVKFCRQLFGGFSILLWIGAILCFLAYGIQAAMEDEPSNDNLYLGVVLAAVVIVTGCFSYYQEAKSSKIMDSFKNMVPQQALVIREGEKMQINAEEVVVGDLVEVKGGDRVPADLRIISSHGCKVDNSSLTGESEPQTRSPEFTHENPLETRNICFFSTNCVEGTARGIVIATGDRTVMGRIATLASGLEVGRTPIAMEIEHFIQLITGVAVFLGVSFFVLSLILGYSWLEAVIFLIGIIVANVPEGLLATVTVCLTLTAKRMARKNCLVKNLEAVETLGSTSTICSDKTGTLTQNRMTVAHMWFDNQIHEADTTEDQSGATFDKRSPTWTALSRIAGLCNRAVFKAGQENISVSKRDTAGDASESALLKCIELSCGSVRKMRDRNPKVAEIPFNSTNKYQLSIHEREDSPQSHVLVMKGAPERILDRCSTILVQGKEIPLDKEMQDAFQNAYMELGGLGERVLGFCQLNLPSGKFPRGFKFDTDELNFPTEKLCFVGLMSMIDPPRAAVPDAVGKCRSAGIKVIMVTGDHPITAKAIAKGVGIISEGNETVEDIAARLNIPMSQVNPREAKACVVHGSDLKDMTSEQLDEILKNHTEIVFARTSPQQKLIIVEGCQRQGAIVAVTGDGVNDSPALKKADIGIAMGISGSDVSKQAADMILLDDNFASIVTGVEEGRLIFDNLKKSIAYTLTSNIPEITPFLLFIIANIPLPLGTVTILCIDLGTDMVPAISLAYEAAESDIMKRQPRNSQTDKLVNERLISMAYGQIGMIQALGGFFTYFVILAENGFLPSRLLGIRLDWDDRTMNDLEDSYGQEWTYEQRKVVEFTCHTAFFASIVVVQWADLIICKTRRNSVFQQGMKNKILIFGLLEETALAAFLSYCPGMGVALRMYPLNLLIFIYDEVRKLILRRYPGGWVEKETYY

SEQ ID NO: 7541 - protein, 714 aa, Homo sapiens
  Payload ID: 1591;
  Gene Symbol: ATP1A2;
  Gene Name: ATPase, Na+/K+ transporting, alpha 2 polypeptide;
  ENSP ID: ENSP00000411705
  MOD_RES (1)..(1): Any amino acid
XQLITGVAVFLGVSFFVLSLILGYSWLEAVIFLIGIIVANVPEGLLATVTVCLTLTAKRMARKNCLVKNLEAVETLGSTSTICSDKTGTLTQNRMTVAHMWFDNQIHEADTTEDQSGATFDKRSPTWTALSRIAGLCNRAVFKAGQENISVSKRDTAGDASESALLKCIELSCGSVRKMRDRNPKVAEIPFNSTNKYQLSIHEREDSPQSHVLVMKGAPERILDRCSTILVQGKEIPLDKEMQDAFQNAYMELGGLGERVLGFCQLNLPSGKFPRGFKFDTDELNFPTEKLCFVGLMSMIDPPRAAVPDAVGKCRSAGIKVIMVTGDHPITAKAIAKGVGIISEGNETVEDIAARLNIPMSQVNPREAKACVVHGSDLKDMTSEQLDEILKNHTEIVFARTSPQQKLIIVEGCQRQGAIVAVTGDGVNDSPALKKADIGIAMGISGSDVSKQAADMILLDDNFASIVTGVEEGRLIFDNLKKSIAYTLTSNIPEITPFLLFIIANIPLPLGTVTILCIDLGTDMVPAISLAYEAAESDIMKRQPRNSQTDKLVNERLISMAYGQIENGFLPSRLLGIRLDWDDRTMNDLEDSYGQEWTYEQRKVVEFTCHTAFFASIVVVQWADLIICKTRRNSVFQQGMKNKILIFGLLEETALAAFLSYCPGMGVALRMYPLKVTWWFCAFPYSLLIFIYDEVRKLILRRYPGGWVEKETYY

SEQ ID NO: 7542 - protein, 1013 aa, Homo sapiens
  Payload ID: 1592;
  Gene Symbol: ATP1A3;
  Gene Name: ATPase, Na+/K+ transporting, alpha 3 polypeptide;
  Uniprot ID:  P13637;
  ENSP ID: ENSP00000302397
MGDKKDDKDSPKKNKGKERRDLDDLKKEVAMTEHKMSVEEVCRKYNTDCVQGLTHSKAQEILARDGPNALTPPPTTPEWVKFCRQLFGGFSILLWIGAILCFLAYGIQAGTEDDPSGDNLYLGIVLAAVVIITGCFSYYQEAKSSKIMESFKNMVPQQALVIREGEKMQVNAEEVVVGDLVEIKGGDRVPADLRIISAHGCKVDNSSLTGESEPQTRSPDCTHDNPLETRNITFFSTNCVEGTARGVVVATGDRTVMGRIATLASGLEVGKTPIAIEIEHFIQLITGVAVFLGVSFFILSLILGYTWLEAVIFLIGIIVANVPEGLLATVTVCLTLTAKRMARKNCLVKNLEAVETLGSTSTICSDKTGTLTQNRMTVAHMWFDNQIHEADTTEDQSGTSFDKSSHTWVALSHIAGLCNRAVFKGGQDNIPVLKRDVAGDASESALLKCIELSSGSVKLMRERNKKVAEIPFNSTNKYQLSIHETEDPNDNRYLLVMKGAPERILDRCSTILLQGKEQPLDEEMKEAFQNAYLELGGLGERVLGFCHYYLPEEQFPKGFAFDCDDVNFTTDNLCFVGLMSMIDPPRAAVPDAVGKCRSAGIKVIMVTGDHPITAKAIAKGVGIISEGNETVEDIAARLNIPVSQVNPRDAKACVIHGTDLKDFTSEQIDEILQNHTEIVFARTSPQQKLIIVEGCQRQGAIVAVTGDGVNDSPALKKADIGVAMGIAGSDVSKQAADMILLDDNFASIVTGVEEGRLIFDNLKKSIAYTLTSNIPEITPFLLFIMANIPLPLGTITILCIDLGTDMVPAISLAYEAAESDIMKRQPRNPRTDKLVNERLISMAYGQIGMIQALGGFFSYFVILAENGFLPGNLVGIRLNWDDRTVNDLEDSYGQQWTYEQRKVVEFTCHTAFFVSIVVVQWADLIICKTRRNSVFQQGMKNKILIFGLFEETALAAFLSYCPGMDVALRMYPLKPSWWFCAFPYSFLIFVYDEIRKLILRRNPGGWVEKETYY

SEQ ID NO: 7543 - protein, 1226 aa, Homo sapiens
  Payload ID: 1592;
  Gene Symbol: ATP1A3;
  Gene Name: ATPase, Na+/K+ transporting, alpha 3 polypeptide;
  ENSP ID: ENSP00000411503
MGDKKDDKDSPKKNKGKERRDLDDLKKEVAMTEHKMSVEEVCRKYNTDCVQGLTHSKAQEILARDGPNALTPPPTTPEWVKFCRQLFGGFSILLWIGAILCFLAYGIQAGTEDDPSGDNLYLGIVLAAVVIITGCFSYYQEAKSSKIMESFKNMVPQQALVIREGEKMQVNAEEVVVGDLVEIKGGDRVPADLRIISAHGCKVDNSSLTGESEPQTRSPDCTHDNPLETRNITFFSTNCVEGTARGVVVATGDRTVMGRIATLASGLEVGKTPIAIEIEHFIQLITGVAVFLGVSFFILSLILGYTWLEAVIFLIGIIVANVPEGLLATVTVCLTLTAKRMARKNCLVKNLEAVETLGSTSTICSDKTGTLTQNRMTVAHMWFDNQIHEADTTEDQSGTSFDKSSHTWVALSHIAGLCNRAVFKGGQDNIPVLKRDVAGDASESALLKCIELSSGSVKLMRERNKKVAEIPFNSTNKYQLSIHETEDPNDNRYLLVMKGAPERILDRCSTILLQGKEQPLDEEMKEAFQNAYLELGGLGERVLGFCHYYLPEEQFPKGFAFDCDDVNFTTDNLCFVGLMSMIDPPRAAVPDAVGKCRSAGIKVIMVTGDHPITAKAIAKGVGIISEGNETVEDIAARLNIPVSQVNPRDAKACVIHGTDLKDFTSEQIDEILQNHTEIVFARTSPQQKLIIVEGCQRQGAIVAVTGDGVNDSPALKKADIGVAMGIAGSDVSKQAADMILLDDNFASIVTGVEEGRLIFDNLKKSIAYTLTSNIPEITPFLLFIMANIPLPLGTITILCIDLGTDMVPAISLAYEAAESDIMKRQPRNPRTDKLVNERLISMAYGQIGMIQALGGFFSYFVILAENGFLPGNLVGIRLNWDDRTVNDLEDSYGQQWTYEQRKVVEFTCHTAFFVSIVVVQWADLIICKTRRNSVFQQGMKNKILIFGLFEETALAAFLSYCPGMDVALRMYPLKPSWWFCAFPYSFLIFVYDEIRKLILRRNPGGEGARQGSRGGRGAAGSQAAGPRLPSPCWMALPPGSHSSLSSHLSGHPLCLLTGLCLCGFLVSLPLCPSLCWAARLACLSPSLTLSLSFLLCLSRLGGEGNLLLTSAPPHRPSLPRPPGPGPPLSVPPILYSGGRSPLFLWPHLGPHPLHYLLPPPLWLASLPCPKPLSSLFSVSVSLPLLTPLSIPPAPATSLGSFLLPFSPPADAISGSGQLSNISVGRE

SEQ ID NO: 7544 - protein, 1024 aa, Homo sapiens
  Payload ID: 1592;
  Gene Symbol: ATP1A3;
  Gene Name: ATPase, Na+/K+ transporting, alpha 3 polypeptide;
  Uniprot ID:  P13637;
  ENSP ID: ENSP00000437577
MGGWEEERNRRATDKKDDKDSPKKNKGKERRDLDDLKKEVAMTEHKMSVEEVCRKYNTDCVQGLTHSKAQEILARDGPNALTPPPTTPEWVKFCRQLFGGFSILLWIGAILCFLAYGIQAGTEDDPSGDNLYLGIVLAAVVIITGCFSYYQEAKSSKIMESFKNMVPQQALVIREGEKMQVNAEEVVVGDLVEIKGGDRVPADLRIISAHGCKVDNSSLTGESEPQTRSPDCTHDNPLETRNITFFSTNCVEGTARGVVVATGDRTVMGRIATLASGLEVGKTPIAIEIEHFIQLITGVAVFLGVSFFILSLILGYTWLEAVIFLIGIIVANVPEGLLATVTVCLTLTAKRMARKNCLVKNLEAVETLGSTSTICSDKTGTLTQNRMTVAHMWFDNQIHEADTTEDQSGTSFDKSSHTWVALSHIAGLCNRAVFKGGQDNIPVLKRDVAGDASESALLKCIELSSGSVKLMRERNKKVAEIPFNSTNKYQLSIHETEDPNDNRYLLVMKGAPERILDRCSTILLQGKEQPLDEEMKEAFQNAYLELGGLGERVLGFCHYYLPEEQFPKGFAFDCDDVNFTTDNLCFVGLMSMIDPPRAAVPDAVGKCRSAGIKVIMVTGDHPITAKAIAKGVGIISEGNETVEDIAARLNIPVSQVNPRDAKACVIHGTDLKDFTSEQIDEILQNHTEIVFARTSPQQKLIIVEGCQRQGAIVAVTGDGVNDSPALKKADIGVAMGIAGSDVSKQAADMILLDDNFASIVTGVEEGRLIFDNLKKSIAYTLTSNIPEITPFLLFIMANIPLPLGTITILCIDLGTDMVPAISLAYEAAESDIMKRQPRNPRTDKLVNERLISMAYGQIGMIQALGGFFSYFVILAENGFLPGNLVGIRLNWDDRTVNDLEDSYGQQWTYEQRKVVEFTCHTAFFVSIVVVQWADLIICKTRRNSVFQQGMKNKILIFGLFEETALAAFLSYCPGMDVALRMYPLKPSWWFCAFPYSFLIFVYDEIRKLILRRNPGGWVEKETYY

SEQ ID NO: 7545 - protein, 1026 aa, Homo sapiens
  Payload ID: 1592;
  Gene Symbol: ATP1A3;
  Gene Name: ATPase, Na+/K+ transporting, alpha 3 polypeptide;
  Uniprot ID:  P13637;
  ENSP ID: ENSP00000444688
MGSGGSDSYRIATSQDKKDDKDSPKKNKGKERRDLDDLKKEVAMTEHKMSVEEVCRKYNTDCVQGLTHSKAQEILARDGPNALTPPPTTPEWVKFCRQLFGGFSILLWIGAILCFLAYGIQAGTEDDPSGDNLYLGIVLAAVVIITGCFSYYQEAKSSKIMESFKNMVPQQALVIREGEKMQVNAEEVVVGDLVEIKGGDRVPADLRIISAHGCKVDNSSLTGESEPQTRSPDCTHDNPLETRNITFFSTNCVEGTARGVVVATGDRTVMGRIATLASGLEVGKTPIAIEIEHFIQLITGVAVFLGVSFFILSLILGYTWLEAVIFLIGIIVANVPEGLLATVTVCLTLTAKRMARKNCLVKNLEAVETLGSTSTICSDKTGTLTQNRMTVAHMWFDNQIHEADTTEDQSGTSFDKSSHTWVALSHIAGLCNRAVFKGGQDNIPVLKRDVAGDASESALLKCIELSSGSVKLMRERNKKVAEIPFNSTNKYQLSIHETEDPNDNRYLLVMKGAPERILDRCSTILLQGKEQPLDEEMKEAFQNAYLELGGLGERVLGFCHYYLPEEQFPKGFAFDCDDVNFTTDNLCFVGLMSMIDPPRAAVPDAVGKCRSAGIKVIMVTGDHPITAKAIAKGVGIISEGNETVEDIAARLNIPVSQVNPRDAKACVIHGTDLKDFTSEQIDEILQNHTEIVFARTSPQQKLIIVEGCQRQGAIVAVTGDGVNDSPALKKADIGVAMGIAGSDVSKQAADMILLDDNFASIVTGVEEGRLIFDNLKKSIAYTLTSNIPEITPFLLFIMANIPLPLGTITILCIDLGTDMVPAISLAYEAAESDIMKRQPRNPRTDKLVNERLISMAYGQIGMIQALGGFFSYFVILAENGFLPGNLVGIRLNWDDRTVNDLEDSYGQQWTYEQRKVVEFTCHTAFFVSIVVVQWADLIICKTRRNSVFQQGMKNKILIFGLFEETALAAFLSYCPGMDVALRMYPLKPSWWFCAFPYSFLIFVYDEIRKLILRRNPGGWVEKETYY

SEQ ID NO: 7546 - protein, 251 aa, Homo sapiens
  Payload ID: 1592;
  Gene Symbol: ATP1A3;
  Gene Name: ATPase, Na+/K+ transporting, alpha 3 polypeptide;
  ENSP ID: ENSP00000469129
MTEHKMSVEEVCRKYNTDCVQGLTHSKAQEILARDGPNALTPPPTTPEWVKFCRQLFGGFSILLWIGAILCFLAYGIQAGTEDDPSGDNLYLGIVLAAVVIITGCFSYYQEAKSSKIMESFKNMVPQQALVIREGEKMQVNAEEVVVGDLVEIKGGDRVPADLRIISAHGCKVDNSSLTGESEPQTRSPDCTHDNPLETRNITFFSTNCVEGTARGVVVATGDRTVMGRIATLASGLEVGKTPIAIEIEHF

SEQ ID NO: 7547 - protein, 983 aa, Homo sapiens
  Payload ID: 1592;
  Gene Symbol: ATP1A3;
  Gene Name: ATPase, Na+/K+ transporting, alpha 3 polypeptide;
  ENSP ID: ENSP00000471581
MTEHKMSVEEVCRKYNTDCVQGLTHSKAQEILARDGPNALTPPPTTPEWVKFCRQLFGGFSILLWIGAILCFLAYGIQAGTEDDPSGDNLYLGIVLAAVVIITGCFSYYQEAKSSKIMESFKNMVPQQALVIREGEKMQVNAEEVVVGDLVEIKGGDRVPADLRIISAHGCKVDNSSLTGESEPQTRSPDCTHDNPLETRNITFFSTNCVEGTARGVVVATGDRTVMGRIATLASGLEVGKTPIAIEIEHFIQLITGVAVFLGVSFFILSLILGYTWLEAVIFLIGIIVANVPEGLLATVTVCLTLTAKRMARKNCLVKNLEAVETLGSTSTICSDKTGTLTQNRMTVAHMWFDNQIHEADTTEDQSGTSFDKSSHTWVALSHIAGLCNRAVFKGGQDNIPVLKRDVAGDASESALLKCIELSSGSVKLMRERNKKVAEIPFNSTNKYQLSIHETEDPNDNRYLLVMKGAPERILDRCSTILLQGKEQPLDEEMKEAFQNAYLELGGLGERVLGFCHYYLPEEQFPKGFAFDCDDVNFTTDNLCFVGLMSMIDPPRAAVPDAVGKCRSAGIKVIMVTGDHPITAKAIAKGVGIISEGNETVEDIAARLNIPVSQVNPRDAKACVIHGTDLKDFTSEQIDEILQNHTEIVFARTSPQQKLIIVEGCQRQGAIVAVTGDGVNDSPALKKADIGVAMGIAGSDVSKQAADMILLDDNFASIVTGVEEGRLIFDNLKKSIAYTLTSNIPEITPFLLFIMANIPLPLGTITILCIDLGTDMVPAISLAYEAAESDIMKRQPRNPRTDKLVNERLISMAYGQIGMIQALGGFFSYFVILAENGFLPGNLVGIRLNWDDRTVNDLEDSYGQQWTYEQRKVVEFTCHTAFFVSIVVVQWADLIICKTRRNSVFQQGMKNKILIFGLFEETALAAFLSYCPGMDVALRMYPLKPSWWFCAFPYSFLIFVYDEIRKLILRRNPGGWVEKETYY

SEQ ID NO: 7548 - protein, 1029 aa, Homo sapiens
  Payload ID: 1593;
  Gene Symbol: ATP1A4;
  Gene Name: ATPase, Na+/K+ transporting, alpha 4 polypeptide;
  Uniprot ID:  Q13733;
  ENSP ID: ENSP00000357060
MGLWGKKGTVAPHDQSPRRRPKKGLIKKKMVKREKQKRNMEELKKEVVMDDHKLTLEELSTKYSVDLTKGHSHQRAKEILTRGGPNTVTPPPTTPEWVKFCKQLFGGFSLLLWTGAILCFVAYSIQIYFNEEPTKDNLYLSIVLSVVVIVTGCFSYYQEAKSSKIMESFKNMVPQQALVIRGGEKMQINVQEVVLGDLVEIKGGDRVPADLRLISAQGCKVDNSSLTGESEPQSRSPDFTHENPLETRNICFFSTNCVEGTARGIVIATGDSTVMGRIASLTSGLAVGQTPIAAEIEHFIHLITVVAVFLGVTFFALSLLLGYGWLEAIIFLIGIIVANVPEGLLATVTVCLTLTAKRMARKNCLVKNLEAVETLGSTSTICSDKTGTLTQNRMTVAHMWFDMTVYEADTTEEQTGKTFTKSSDTWFMLARIAGLCNRADFKANQEILPIAKRATTGDASESALLKFIEQSYSSVAEMREKNPKVAEIPFNSTNKYQMSIHLREDSSQTHVLMMKGAPERILEFCSTFLLNGQEYSMNDEMKEAFQNAYLELGGLGERVLGFCFLNLPSSFSKGFPFNTDEINFPMDNLCFVGLISMIDPPRAAVPDAVSKCRSAGIKVIMVTGDHPITAKAIAKGVGIISEGTETAEEVAARLKIPISKVDASAAKAIVVHGAELKDIQSKQLDQILQNHPEIVFARTSPQQKLIIVEGCQRLGAVVAVTGDGVNDSPALKKADIGIAMGISGSDVSKQAADMILLDDNFASIVTGVEEGRLIFDNLKKSIMYTLTSNIPEITPFLMFIILGIPLPLGTITILCIDLGTDMVPAISLAYESAESDIMKRLPRNPKTDNLVNHRLIGMAYGQIGMIQALAGFFTYFVILAENGFRPVDLLGIRLHWEDKYLNDLEDSYGQQWTYEQRKVVEFTCQTAFFVTIVVVQWADLIISKTRRNSLFQQGMRNKVLIFGILEETLLAAFLSYTPGMDVALRMYPLKITWWLCAIPYSILIFVYDEIRKLLIRQHPDGWVERETYY

SEQ ID NO: 7549 - protein, 165 aa, Homo sapiens
  Payload ID: 1593;
  Gene Symbol: ATP1A4;
  Gene Name: ATPase, Na+/K+ transporting, alpha 4 polypeptide;
  Uniprot ID:  Q13733;
  ENSP ID: ENSP00000433094
MIQALAGFFTYFVILAENGFRPVDLLGIRLHWEDKYLNDLEDSYGQQWTYEQRKVVEFTCQTAFFVTIVVVQWADLIISKTRRNSLFQQGMRNKVLIFGILEETLLAAFLSYTPGMDVALRMYPLKITWWLCAIPYSILIFVYDEIRKLLIRQHPDGWVERETYY

SEQ ID NO: 7550 - protein, 517 aa, Homo sapiens
  Payload ID: 1593;
  Gene Symbol: ATP1A4;
  Gene Name: ATPase, Na+/K+ transporting, alpha 4 polypeptide;
  ENSP ID: ENSP00000434272
MGLWGKKGTVAPHDQSPRRRPKKGLIKKKMVKREKQKRNMEELKKEVVMDDHKLTLEELSTKYSVDLTKGHSHQRAKEILTRGGPNTVTPPPTTPEWVKFCKQLFGGFSLLLWTGAILCFVAYSIQIYFNEEPTKDNLYLSIVLSVVVIVTGCFSYYQEAKSSKIMESFKNMVPQQALVIRGGEKMQINVQEVVLGDLVEIKGGDRVPADLRLISAQGCKVDNSSLTGESEPQSRSPDFTHENPLETRNICFFSTNCVEGTARGIVIATGDSTVMGRIASLTSGLAVGQTPIAAEIEHFIHLITVVAVFLGVTFFALSLLLGYGWLEAIIFLIGIIVANVPEGLLATVTVCLTLTAKRMARKNCLVKNLEAVETLGSTSTICSDKTGTLTQNRMTVAHMWFDMTVYEADTTEEQTGKTFTKSSDTWFMLARIAGLCNRADFKANQEILPIAKRATTGDASESALLKFIEQSYSSVAEMREKNPKVAEIPFNSTNKYQVQNPQRCPSTFGRTAPRPTY

SEQ ID NO: 7551 - protein, 303 aa, Homo sapiens
  Payload ID: 1594;
  Gene Symbol: ATP1B1;
  Gene Name: ATPase, Na+/K+ transporting, beta 1 polypeptide;
  Uniprot ID:  P05026;
  ENSP ID: ENSP00000356789
MARGKAKEEGSWKKFIWNSEKKEFLGRTGGSWFKILLFYVIFYGCLAGIFIGTIQVMLLTISEFKPTYQDRVAPPGLTQIPQIQKTEISFRPNDPKSYEAYVLNIVRFLEKYKDSAQRDDMIFEDCGDVPSEPKERGDFNHERGERKVCRFKLEWLGNCSGLNDETYGYKEGKPCIIIKLNRVLGFKPKPPKNESLETYPVMKYNPNVLPVQCTGKRDEDKDKVGNVEYFGLGNSPGFPLQYYPYYGKLLQPKYLQPLLAVQFTNLTMDTEIRIECKAYGENIGYSEKDRFQGRFDVKIEVKS

SEQ ID NO: 7552 - protein, 303 aa, Homo sapiens; identical to SEQ ID NO: 7551
  Payload ID: 1594;
  Gene Symbol: ATP1B1;
  Gene Name: ATPase, Na+/K+ transporting, beta 1 polypeptide;
  Uniprot ID:  P05026;
  ENSP ID: ENSP00000356790

SEQ ID NO: 7553 - protein, 130 aa, Homo sapiens
  Payload ID: 1594;
  Gene Symbol: ATP1B1;
  Gene Name: ATPase, Na+/K+ transporting, beta 1 polypeptide;
  ENSP ID: ENSP00000477015
MLLTISEFKPTYQDRVAPPGLTQIPQIQKTEISFRPNDPKSYEAYVLNIVRFLEKYKDSAQRDDMIFEDCGDVPSEPKERGDFNHERGERKVCRFKLEWLGNCSGLNDETYGYKEGKPCIIIKLNRVLGF

SEQ ID NO: 7554 - protein, 290 aa, Homo sapiens
  Payload ID: 1595;
  Gene Symbol: ATP1B2;
  Gene Name: ATPase, Na+/K+ transporting, beta 2 polypeptide;
  Uniprot ID:  P14415;
  ENSP ID: ENSP00000250111
MVIQKEKKSCGQVVEEWKEFVWNPRTHQFMGRTGTSWAFILLFYLVFYGFLTAMFTLTMWVMLQTVSDHTPKYQDRLATPGLMIRPKTENLDVIVNVSDTESWDQHVQKLNKFLEPYNDSIQAQKNDVCRPGRYYEQPDNGVLNYPKRACQFNRTQLGNCSGIGDSTHYGYSTGQPCVFIKMNRVINFYAGANQSMNVTCAGKRDEDAENLGNFVMFPANGNIDLMYFPYYGKKFHVNYTQPLVAVKFLNVTPNVEVNVECRINAANIATDDERDKFAGRVAFKLRINKT

SEQ ID NO: 7555 - protein, 166 aa, Homo sapiens
  Payload ID: 1595;
  Gene Symbol: ATP1B2;
  Gene Name: ATPase, Na+/K+ transporting, beta 2 polypeptide;
  ENSP ID: ENSP00000459145
MIRPKTENLDVIVNVSDTESWDQHVQKLNKFLEPYNDSIQAQKNDVCRPGRYYEQPDNGVLNYPKRACQFNRTQLGNCSGIGDSTHYGYSTGQPCVFIKMNRVINFYAGANQSMNVTCAGKRDEDAENLGNFVMFPANGNIDLMYFPYYGKKFHVNYTQPLVAVKF

SEQ ID NO: 7556 - protein, 172 aa, Homo sapiens
  Payload ID: 1595;
  Gene Symbol: ATP1B2;
  Gene Name: ATPase, Na+/K+ transporting, beta 2 polypeptide;
  ENSP ID: ENSP00000460499
  MOD_RES (1)..(1): Any amino acid
XEQPDNGVLNYPKRACQFNRTQLGNCSGIGDSTHYGYSTGQPCVFIKMNRVINFYAGANQSMNVTCAGKRPHHHRNKGKLIPEDGRDEDAENLGNFVMFPANGNIDLMYFPYYGKKFHVNYTQPLVAVKFLNVTPNVEVNVECRINAANIATDDERDKFAGRVAFKLRINKT

SEQ ID NO: 7557 - protein, 279 aa, Homo sapiens
  Payload ID: 1596;
  Gene Symbol: ATP1B3;
  Gene Name: ATPase, Na+/K+ transporting, beta 3 polypeptide;
  Uniprot ID:  P54709;
  ENSP ID: ENSP00000286371
MTKNEKKSLNQSLAEWKLFIYNPTTGEFLGRTAKSWGLILLFYLVFYGFLAALFSFTMWVMLQTLNDEVPKYRDQIPSPGLMVFPKPVTALEYTFSRSDPTSYAGYIEDLKKFLKPYTLEEQKNLTVCPDGALFEQKGPVYVACQFPISLLQACSGMNDPDFGYSQGNPCILVKMNRIIGLKPEGVPRIDCVSKNEDIPNVAVYPHNGMIDLKYFPYYGKKLHVGYLQPLVAVQVSFAPNNTGKEVTVECKIDGSANLKSQDDRDKFLGRVMFKITARA

SEQ ID NO: 7558 - protein, 133 aa, Homo sapiens
  Payload ID: 1596;
  Gene Symbol: ATP1B3;
  Gene Name: ATPase, Na+/K+ transporting, beta 3 polypeptide;
  ENSP ID: ENSP00000417522
MWVMLQTLNDEVPKYRDQIPSPGLMVFPKPVTALEYTFSRSDPTSYAGYIEDLKKFLKPYTLEEQKNLTVCPDGALFEQKGPVYVACQFPISLLQACSGMNDPDFGYSQGNPCILVKMNRIIGLKPEGVPRID

SEQ ID NO: 7559 - protein, 27 aa, Homo sapiens
  Payload ID: 1596;
  Gene Symbol: ATP1B3;
  Gene Name: ATPase, Na+/K+ transporting, beta 3 polypeptide;
  ENSP ID: ENSP00000417608
IIGLKPEGVPRIDCVSKLVGVLVISAI

SEQ ID NO: 7560 - protein, 44 aa, Homo sapiens
  Payload ID: 1596;
  Gene Symbol: ATP1B3;
  Gene Name: ATPase, Na+/K+ transporting, beta 3 polypeptide;
  ENSP ID: ENSP00000418280
MTKNEKKSLNQSLAEWKLFIYNPTTGEFLGRTAKSWGSQYVVGK

SEQ ID NO: 7561 - protein, 89 aa, Homo sapiens
  Payload ID: 1596;
  Gene Symbol: ATP1B3;
  Gene Name: ATPase, Na+/K+ transporting, beta 3 polypeptide;
  ENSP ID: ENSP00000418353
MGSWLHSSHSRCGLCFRLSTMRFQNTVTRFLAQVGYLQPLVAVQVSFAPNNTGKEVTVECKIDGSANLKSQDDRDKFLGRVMFKITARA

SEQ ID NO: 7562 - protein, 43 aa, Homo sapiens
  Payload ID: 1596;
  Gene Symbol: ATP1B3;
  Gene Name: ATPase, Na+/K+ transporting, beta 3 polypeptide;
  ENSP ID: ENSP00000418952
  MOD_RES (1)..(1): Any amino acid
XKNEKKSLNQSLAEWKLFIYNPTTGEFLGRTAKSWGSQYVVGK

SEQ ID NO: 7563 - protein, 119 aa, Homo sapiens
  Payload ID: 1596;
  Gene Symbol: ATP1B3;
  Gene Name: ATPase, Na+/K+ transporting, beta 3 polypeptide;
  ENSP ID: ENSP00000419962
MLSEGDILFSSLLSSPSLFWPPGLILLFYLVFYGFLAALFSFTMWVMLQTLNDEVPKYRDQIPSPGLMVFPKPVTALEYTFSRSDPTSYAGYIEDLKKFLKPYTLEEQKNLTVCPDGAL

SEQ ID NO: 7564 - protein, 357 aa, Homo sapiens
  Payload ID: 1597;
  Gene Symbol: ATP1B4;
  Gene Name: ATPase, Na+/K+ transporting, beta 4 polypeptide;
  Uniprot ID:  Q9UN42;
  ENSP ID: ENSP00000218008
MRRQLRSRRAPSFPYSYRYRLDDPDEANQNYLADEEEEAEEEARVTVVPKSEEEEEEEEKEEEEEEEKEEEEGQGQPTGNAWWQKLQIMSEYLWDPERRMFLARTGQSWSLILLIYFFFYASLAAVITLCMYTLFLTISPYIPTFTERVKPPGVMIRPFAHSLNFNFNVSEPDTWQHYVISLNGFLQGYNDSLQEEMNVDCPPGQYFIQDGNEDEDKKACQFKRSFLKNCSGLEDPTFGYSTGQPCILLKMNRIVGFRPELGDPVKVSCKVQRGDENDIRSISYYPESASFDLRYYPYYGKLTHVNYTSPLVAMHFTDVVKNQAVPVQCQLKGKGVINDVINDRFVGRVIFTLNIET

SEQ ID NO: 7565 - protein, 353 aa, Homo sapiens
  Payload ID: 1597;
  Gene Symbol: ATP1B4;
  Gene Name: ATPase, Na+/K+ transporting, beta 4 polypeptide;
  Uniprot ID:  Q9UN42;
  ENSP ID: ENSP00000355346
MRRQLRSRRAPSFPYSYRYRLDDPDEANQNYLADEEEEAEEEARVTVVPKSEEEEEEEEKEEEEEEEKEEEEGQGQPTGNAWWQKLQIMSEYLWDPERRMFLARTGLILLIYFFFYASLAAVITLCMYTLFLTISPYIPTFTERVKPPGVMIRPFAHSLNFNFNVSEPDTWQHYVISLNGFLQGYNDSLQEEMNVDCPPGQYFIQDGNEDEDKKACQFKRSFLKNCSGLEDPTFGYSTGQPCILLKMNRIVGFRPELGDPVKVSCKVQRGDENDIRSISYYPESASFDLRYYPYYGKLTHVNYTSPLVAMHFTDVVKNQAVPVQCQLKGKGVINDVINDRFVGRVIFTLNIET

SEQ ID NO: 7566 - protein, 314 aa, Homo sapiens
  Payload ID: 1597;
  Gene Symbol: ATP1B4;
  Gene Name: ATPase, Na+/K+ transporting, beta 4 polypeptide;
  ENSP ID: ENSP00000443334
MRRQLRSRRAPSFPYSYRYRLDDPDEANQNYLADEEEEAEEEARVTVVPKSEEEEEEEEKEEEEEEEKEEEEGQGQPTGNAWWQKLQIMSEYLWDPERRMFLARTGQSWRVMIRPFAHSLNFNFNVSEPDTWQHYVISLNGFLQGYNDSLQEEMNVDCPPGQYFIQDGNEDEDKKACQFKRSFLKNCSGLEDPTFGYSTGQPCILLKMNRIVGFRPELGDPVKVSCKVQRGDENDIRSISYYPESASFDLRYYPYYGKLTHVNYTSPLVAMHFTDVVKNQAVPVQCQLKGKGVINDVINDRFVGRVIFTLNIET

SEQ ID NO: 7567 - protein, 123 aa, Homo sapiens
  Payload ID: 1598;
  Gene Symbol: ABCA1;
  Gene Name: ATP-binding cassette, sub-family A (ABC1), member 1;
  ENSP ID: ENSP00000363865
MPSAGTLPWVQGIICNANNPCFRYPTPGEAPGVVGNFNKSIVARLFSDARRLLLYSQKDTSMKDMRKVLRTLQQIKKSSSNLKLQDFLVDNETFSGFLYHNLSLPKSTVDKMLRADVILHKVS

SEQ ID NO: 7568 - protein, 2261 aa, Homo sapiens
  Payload ID: 1598;
  Gene Symbol: ABCA1;
  Gene Name: ATP-binding cassette, sub-family A (ABC1), member 1;
  Uniprot ID:  O95477;
  ENSP ID: ENSP00000363868
MACWPQLRLLLWKNLTFRRRQTCQLLLEVAWPLFIFLILISVRLSYPPYEQHECHFPNKAMPSAGTLPWVQGIICNANNPCFRYPTPGEAPGVVGNFNKSIVARLFSDARRLLLYSQKDTSMKDMRKVLRTLQQIKKSSSNLKLQDFLVDNETFSGFLYHNLSLPKSTVDKMLRADVILHKVFLQGYQLHLTSLCNGSKSEEMIQLGDQEVSELCGLPREKLAAAERVLRSNMDILKPILRTLNSTSPFPSKELAEATKTLLHSLGTLAQELFSMRSWSDMRQEVMFLTNVNSSSSSTQIYQAVSRIVCGHPEGGGLKIKSLNWYEDNNYKALFGGNGTEEDAETFYDNSTTPYCNDLMKNLESSPLSRIIWKALKPLLVGKILYTPDTPATRQVMAEVNKTFQELAVFHDLEGMWEELSPKIWTFMENSQEMDLVRMLLDSRDNDHFWEQQLDGLDWTAQDIVAFLAKHPEDVQSSNGSVYTWREAFNETNQAIRTISRFMECVNLNKLEPIATEVWLINKSMELLDERKFWAGIVFTGITPGSIELPHHVKYKIRMDIDNVERTNKIKDGYWDPGPRADPFEDMRYVWGGFAYLQDVVEQAIIRVLTGTEKKTGVYMQQMPYPCYVDDIFLRVMSRSMPLFMTLAWIYSVAVIIKGIVYEKEARLKETMRIMGLDNSILWFSWFISSLIPLLVSAGLLVVILKLGNLLPYSDPSVVFVFLSVFAVVTILQCFLISTLFSRANLAAACGGIIYFTLYLPYVLCVAWQDYVGFTLKIFASLLSPVAFGFGCEYFALFEEQGIGVQWDNLFESPVEEDGFNLTTSVSMMLFDTFLYGVMTWYIEAVFPGQYGIPRPWYFPCTKSYWFGEESDEKSHPGSNQKRISEICMEEEPTHLKLGVSIQNLVKVYRDGMKVAVDGLALNFYEGQITSFLGHNGAGKTTTMSILTGLFPPTSGTAYILGKDIRSEMSTIRQNLGVCPQHNVLFDMLTVEEHIWFYARLKGLSEKHVKAEMEQMALDVGLPSSKLKSKTSQLSGGMQRKLSVALAFVGGSKVVILDEPTAGVDPYSRRGIWELLLKYRQGRTIILSTHHMDEADVLGDRIAIISHGKLCCVGSSLFLKNQLGTGYYLTLVKKDVESSLSSCRNSSSTVSYLKKEDSVSQSSSDAGLGSDHESDTLTIDVSAISNLIRKHVSEARLVEDIGHELTYVLPYEAAKEGAFVELFHEIDDRLSDLGISSYGISETTLEEIFLKVAEESGVDAETSDGTLPARRNRRAFGDKQSCLRPFTEDDAADPNDSDIDPESRETDLLSGMDGKGSYQVKGWKLTQQQFVALLWKRLLIARRSRKGFFAQIVLPAVFVCIALVFSLIVPPFGKYPSLELQPWMYNEQYTFVSNDAPEDTGTLELLNALTKDPGFGTRCMEGNPIPDTPCQAGEEEWTTAPVPQTIMDLFQNGNWTMQNPSPACQCSSDKIKKMLPVCPPGAGGLPPPQRKQNTADILQDLTGRNISDYLVKTYVQIIAKSLKNKIWVNEFRYGGFSLGVSNTQALPPSQEVNDAIKQMKKHLKLAKDSSADRFLNSLGRFMTGLDTKNNVKVWFNNKGWHAISSFLNVINNAILRANLQKGENPSHYGITAFNHPLNLTKQQLSEVALMTTSVDVLVSICVIFAMSFVPASFVVFLIQERVSKAKHLQFISGVKPVIYWLSNFVWDMCNYVVPATLVIIIFICFQQKSYVSSTNLPVLALLLLLYGWSITPLMYPASFVFKIPSTAYVVLTSVNLFIGINGSVATFVLELFTDNKLNNINDILKSVFLIFPHFCLGRGLIDMVKNQAMADALERFGENRFVSPLSWDLVGRNLFAMAVEGVVFFLITVLIQYRFFIRPRPVNAKLSPLNDEDEDVRRERQRILDGGGQNDILEIKELTKIYRRKRKPAVDRICVGIPPGECFGLLGVNGAGKSSTFKMLTGDTTVTRGDAFLNKNSILSNIHEVHQNMGYCPQFDAITELLTGREHVEFFALLRGVPEKEVGKVGEWAIRKLGLVKYGEKYAGNYSGGNKRKLSTAMALIGGPPVVFLDEPTTGMDPKARRFLWNCALSVVKEGRSVVLTSHSMEECEALCTRMAIMVNGRFRCLGSVQHLKNRFGDGYTIVVRIAGSNPDLKPVQDFFGLAFPGSVLKEKHRNMLQYQLPSSLSSLARIFSILSQSKKRLHIEDYSVSQTTLDQVFVNFAKDQSDDDHLKDLSLHKNQTVVDVAVLTSFLQDEKVKESYV

SEQ ID NO: 7569 - protein, 363 aa, Homo sapiens
  Payload ID: 1598;
  Gene Symbol: ABCA1;
  Gene Name: ATP-binding cassette, sub-family A (ABC1), member 1;
  ENSP ID: ENSP00000416623
MACWPQLRLLLWKNLTFRRRQTCQLLLEVAWPLFIFLILISVRLSYPPYEQHECHFPNKAMPSAGTLPWVQGIICNANNPCFRYPTPGEAPGVVGNFNKSIVARLFSDARRLLLYSQKDTSMKDMRKVLRTLQQIKKSSSNLKLQDFLVDNETFSGFLYHNLSLPKSTVDKMLRADVILHKVFLQGYQLHLTSLCNGSKSEEMIQLGDQEVSELCGLPREKLAAAERVLRSNMDILKPILMDVTCDDIAHGQLTVPRSAAVAATGDAKPNMMGRETLLSICASVPKVEFHERHILKHFSFCVCVSVSLFPAKGIVSFSWASFRIWVLWKAVFWQHGESMAVWEGQLGLGLNIAFEYFTSIDVG

SEQ ID NO: 7570 - protein, 1543 aa, Homo sapiens
  Payload ID: 1599;
  Gene Symbol: ABCA10;
  Gene Name: ATP-binding cassette, sub-family A (ABC1), member 10;
  Uniprot ID:  Q8WWZ4;
  ENSP ID: ENSP00000269081
MNKMALASFMKGRTVIGTPDEETMDIELPKKYHEMVGVIFSDTFSYRLKFNWGYRIPVIKEHSEYTEHCWAMHGEIFCYLAKYWLKGFVAFQAAINAAIIEVTTNHSVMEELTSVIGINMKIPPFISKGEIMNEWFHFTCLVSFSSFIYFASLNVARERGKFKKLMTVMGLRESAFWLSWGLTYICFIFIMSIFMALVITSIPIVFHTGFMVIFTLYSLYGLSLIALAFLMSVLIRKPMLAGLAGFLFTVFWGCLGFTVLYRQLPLSLGWVLSLLSPFAFTAGMAQITHLDNYLSGVIFPDPSGDSYKMIATFFILAFDTLFYLIFTLYFERVLPDKDGHGDSPLFFLKSSFWSKHQNTHHEIFENEINPEHSSDDSFEPVSPEFHGKEAIRIRNVIKEYNGKTGKVEALQGIFFDIYEGQITAILGHNGAGKSTLLNILSGLSVSTEGSATIYNTQLSEITDMEEIRKNIGFCPQFNFQFDFLTVRENLRVFAKIKGIQPKEVEQEVKRIIMELDMQSIQDIIAKKLSGGQKRKLTLGIAILGDPQVLLLDEPTAGLDPFSRHRVWSLLKEHKVDRLILFSTQFMDEADILADRKVFLSNGKLKCAGSSLFLKRKWGIGYHLSLHRNEMCDTEKITSLIKQHIPDAKLTTESEEKLVYSLPLEKTNKFPDLYSDLDKCSDQGIRNYAVSVTSLNEVFLNLEGKSAIDEPDFDIGKQEKIHVTRNTGDESEMEQVLCSLPETRKAVSSAALWRRQIYAVATLRFLKLRRERRALLCLLLVLGIAFIPIILEKIMYKVTRETHCWEFSPSMYFLSLEQIPKTPLTSLLIVNNTGSNIEDLVHSLKCQDIVLEIDDFRNRNGSDDPSYNGAIIVSGDQKDYRFSVACNTKKLNCFPVLMGIVSNALMGIFNFTELIQMESTSFSRDDIVLDLGFIDGSIFLLLITNCVSPFIGMSSISDYKKNVQSQLWISGLWPSAYWCGQALVDIPLYFLILFSIHLIYYFIFLGFQLSWELMFVLVVCIIGCAVSLIFLTYVLSFIFRKWRKNNGFWSFGFFIILICVSTIMVSTQYEKLNLILCMIFIPSFTLLGYVMLLIQLDFMRNLDSLDNRINEVNKTILLTTLIPYLQSVIFLFVIRCLEMKYGNEIMNKDPVFRISPRSRETHPNPEEPEEEDEDVQAERVQAANALTAPNLEEEPVITASCLHKEYYETKKSCFSTRKKKIAIRNVSFCVKKGEVLGLLGHNGAGKSTSIKMITGCTKPTAGVVVLQGSRASVRQQHDNSLKFLGYCPQENSLWPKLTMKEHLELYAAVKGLGKEDAALSISRLVEALKLQEQLKAPVKTLSEGIKRKLCFVLSILGNPSVVLLDEPFTGMDPEGQQQMWQILQATVKNKERGTLLTTHYMSEAEAVCDRMAMMVSGTLRCIGSIQHLKNKFGRDYLLEIKMKEPTQVEALHTEILKLFPQAAWQERYSSLMAYKLPVEDVHPLSRAFFKLEAMKQTFNLEEYSLSQATLEQVFLELCKEQELGNVDDKIDTTVEWKLLPQEDP

SEQ ID NO: 7571 - protein, 1326 aa, Homo sapiens
  Payload ID: 1599;
  Gene Symbol: ABCA10;
  Gene Name: ATP-binding cassette, sub-family A (ABC1), member 10;
  ENSP ID: ENSP00000428032
MNKMALASFMKGRTVIGTPDEETMDIELPKKYHEMVGVIFSDTFSYRLKFNWGYRIPVIKEHSEYTEHCWAMHGEIFCYLAKYWLKGFVAFQAAINAAIIEVTTNHSVMEELTSVIGINMKIPPFISKGEIMNEWFHFTCLVSFSSFIYFASLNVARERGKFKKLMTVMGLRESAFWLSWGLTYICFIFIMSIFMALVITSIPIVFHTGFMVIFTLYSLYGLSLIALAFLMSVLIRKPMLAGLAGFLFTVFWGCLGFTVLYRQLPLSLGWVLSLLSPFAFTAGMAQITHLDNYLSGVIFPDPSGDSYKMIATFFILAFDTLFYLIFTLYFERVLPDKDGHGDSPLFFLKSSFWSKHQNTHHEIFENEINPEHSSDDSFEPVSPEFHGKEAIRIRNVIKEYNGKTGKVEALQGIFFDIYEGQITAILGHNGAGKSTLLNILSGLSVSTEGSATIYNTQLSEITDMEEIRKNIGFCPQFNFQFDFLTVRENLRVFAKIKGIQPKEVEQEVKRIIMELDMQSIQDIIAKKLSGGQKRKLTLGIAILGDPQVLLLDEPTAGLDPFSRHRVWSLLKEHKVDRLILFSTQFMDEADILADRKVFLSNGKLKCAGSSLFLKRKWGIGYHLSLHRNEMCDTEKITSLIKQHIPDAKLTTESEEKLVYSLPLEKTNKFPDLYSDLDKCSDQGIRNYAVSVTSLNEVFLNLEGKSAIDEPDFDIGKQEKIHVTRNTGDESEMEQVLCSLPETRKAVSSAALWRRQIYAVATLRFLKLRRERRALLCLLLVLGIAFIPIILEKIMYKVTRETHCWEFSPSMYFLSLEQIPKTPLTSLLIVNNTGSNIEDLVHSLKCQDIVLEIDDFRNRNGSDDPSYNGAIIVSGDQKDYRFSVACNTKKLNCFPVLMGIVSNALMGIFNFTELIQMESTSFSRDDIVLDLGFIDGSIFLLLITNCVSPFIGMSSISDYKKNVQSQLWISGLWPSAYWCGQALVDIPLYFLILFSIHLIYYFIFLGFQLSWELMFVLVVCIIGCAVSLIFLTYVLSFIFRKWRKNNGFWSFGFFIILICVSTIMVSTQYEKLNLILCMIFIPSFTLLGYVMLLIQLDFMRNLDSLDNRINEVNKTILLTTLIPYLQSVIFLFVIRCLEMKYGNEIMNKDPVFRISPRSRETHPNPEEPEEEDEDVQAERVQAANALTAPNLEEEPVITASCLHKEYYETKKSCFSTRKKKIAIRNVSFCVKKGEVLGLLGHNGAGKSTSIKMITGCTKPTAGVVVLQGSRASVRQQHDNSLKFLGYCPQENSLWPKLTMKEHLELYAAVKGLGKEDAALSISRCALC

SEQ ID NO: 7572 - protein, 137 aa, Homo sapiens
  Payload ID: 1599;
  Gene Symbol: ABCA10;
  Gene Name: ATP-binding cassette, sub-family A (ABC1), member 10;
  ENSP ID: ENSP00000429795
  MOD_RES (1)..(1): Any amino acid
XSDTFSYRLKFNWGYRIPVIKEHSEYTEHCWAMHGEIFCYLAKYWLKGFVAFQAAINAAIIEVTTNHSVMEELTSVIGINMKIPPFISKGEIMNEWFHFTCLVSFSSFIYFASLNVARERGKFKKLMTVMGLRESAF

SEQ ID NO: 7573 - protein, 452 aa, Homo sapiens
  Payload ID: 1599;
  Gene Symbol: ABCA10;
  Gene Name: ATP-binding cassette, sub-family A (ABC1), member 10;
  Uniprot ID:  Q8WWZ4;
  ENSP ID: ENSP00000429853
MNKMALASFMKGRTVIGTPDEETMDIELPKKYHEMVGVIFSDTFSYRLKFNWGYRIPVIKEHSEYTEHCWAMHGEIFCYLAKYWLKGFVAFQAAINAAIIEVTTNHSVMEELTSVIGINMKIPPFISKGEIMNEWFHFTCLVSFSSFIYFASLNVARERGKFKKLMTVMGLRESAFWLSWGLTYICFIFIMSIFMALVITSIPIVFHTGFMVIFTLYSLYGLSLIALAFLMSVLIRKPMLAGLAGFLFTVFWGCLGFTVLYRQLPLSLGWVLSLLSPFAFTAGMAQITHLDNYLSGVIFPDPSGDSYKMIATFFILAFDTLFYLIFTLYFERVLPDKDGHGDSPLFFLKSSFWSKHQNTHHEIFENEINPEHSSDDSFEPVSPEFHGKEAIRIRNVIKEYNGKTGKVEALQGSEERLCPAAHRLRCGERLCPAAHHLGCEERPCPAATPSGN

SEQ ID NO: 7574 - protein, 92 aa, Homo sapiens
  Payload ID: 1599;
  Gene Symbol: ABCA10;
  Gene Name: ATP-binding cassette, sub-family A (ABC1), member 10;
  Uniprot ID:  Q8WWZ4;
  ENSP ID: ENSP00000429945
MNKMALASFMKGRTVIGTPDEETMDIELPKKYHEMVGVIFSDTFSYRLKFNWGYRIPVIKEHSEYTGHNKSFCNGGVDISYWNKYEDTTFHF

SEQ ID NO: 7575 - protein, 340 aa, Homo sapiens
  Payload ID: 1599;
  Gene Symbol: ABCA10;
  Gene Name: ATP-binding cassette, sub-family A (ABC1), member 10;
  ENSP ID: ENSP00000430341
MNKMALASFMKGRTVIGTPDEETMDIELPKKYHEMVGVIFSDTFSYRLKFNWGYRIPVIKEHSEYTEHCWAMHGEIFCYLAKYWLKGFVAFQAAINAAIIEVTTNHSVMEELTSVIGINMKIPPFISKGEIMNEWFHFTCLVSFSSFIYFASLNVARERGKFKKLMTVMGLRESAFWLSWGLTYICFIFIMSIFMALVITSIPIVFHTGFMVIFTLYSLYGLSLIALAFLMSVLIRKPMLAGLAGFLFTVFWGCLGFTVLYRQLPLSLGWVLSLLSPFAFTAGMAQITHLDNYLSGVIFPDPSGDSYKMIATFFILAFDTLFYLIFTLYFERVLPESEML

SEQ ID NO: 7576 - protein, 76 aa, Homo sapiens
  Payload ID: 1599;
  Gene Symbol: ABCA10;
  Gene Name: ATP-binding cassette, sub-family A (ABC1), member 10;
  ENSP ID: ENSP00000466506
  MOD_RES (1)..(1): Any amino acid
XYSSLMAYKLPVEDVHPLSRAFFKLEAMKQTFNLEEYSLSQATLEQKQCEASLDADIGTTLLVQPVVSESQLKKSA

SEQ ID NO: 7577 - protein, 45 aa, Homo sapiens
  Payload ID: 1599;
  Gene Symbol: ABCA10;
  Gene Name: ATP-binding cassette, sub-family A (ABC1), member 10;
  ENSP ID: ENSP00000468351
YSSLMAYKLPVEDVHPLSRAFFKLEAMKQTFNLEEYSLSQATLEQ

SEQ ID NO: 7578 - protein, 2595 aa, Homo sapiens
  Payload ID: 1600;
  Gene Symbol: ABCA12;
  Gene Name: ATP-binding cassette, sub-family A (ABC1), member 12;
  Uniprot ID:  Q86UK0;
  ENSP ID: ENSP00000272895
MASLFHQLQILVWKNWLGVKRQPLWTLVLILWPVIIFIILAITRTKFPPTAKPTCYLAPRNLPSTGFFPFLQTLLCDTDSKCKDTPYGPQDLLRRKGIDDALFKDSEILRKSSNLDKDSSLSFQSTQVPERRHASLATVFPSPSSDLEIPGTYTFNGSQVLARILGLEKLLKQNSTSEDIRRELCDSYSGYIVDDAFSWTFLGRNVFNKFCLSNMTLLESSLQELNKQFSQLSSDPNNQKIVFQEIVRMLSFFSQVQEQKAVWQLLSSFPNVFQNDTSLSNLFDVLRKANSVLLVVQKVYPRFATNEGFRTLQKSVKHLLYTLDSPAQGDSDNITHVWNEDDGQTLSPSSLAAQLLILENFEDALLNISANSPYIPYLACVRNVTDSLARGSPENLRLLQSTIRFKKSFLRNGSYEDYFPPVPEVLKSKLSQLRNLTELLCESETFSLIEKSCQLSDMSFGSLCEESEFDLQLLEAAELGTEIAASLLYHDNVISKKVRDLLTGDPSKINLNMDQFLEQALQMNYLENITQLIPIIEAMLHVNNSADASEKPGQLLEMFKNVEELKEDLRRTTGMSNRTIDKLLAIPIPDNRAEIISQVFWLHSCDTNITTPKLEDAMKEFCNLSLSERSRQSYLIGLTLLHYLNIYNFTYKVFFPRKDQKPVEKMMELFIRLKEILNQMASGTHPLLDKMRSLKQMHLPRSVPLTQAMYRSNRMNTPQGSFSTISQALCSQGITTEYLTAMLPSSQRPKGNHTKDFLTYKLTKEQIASKYGIPINSTPFCFSLYKDIINMPAGPVIWAFLKPMLLGRILYAPYNPVTKAIMEKSNVTLRQLAELREKSQEWMDKSPLFMNSFHLLNQAIPMLQNTLRNPFVQVFVKFSVGLDAVELLKQIDELDILRLKLENNIDIIDQLNTLSSLTVNISSCVLYDRIQAAKTIDEMEREAKRLYKSNELFGSVIFKLPSNRSWHRGYDSGNVFLPPVIKYTIRMSLKTAQTTRSLRTKIWAPGPHNSPSHNQIYGRAFIYLQDSIERAIIELQTGRNSQEIAVQVQAIPYPCFMKDNFLTSVSYSLPIVLMVAWVVFIAAFVKKLVYEKDLRLHEYMKMMGVNSCSHFFAWLIESVGFLLVTIVILIIILKFGNILPKTNGFILFLYFSDYSFSVIAMSYLISVFFNNTNIAALIGSLIYIIAFFPFIVLVTVENELSYVLKVFMSLLSPTAFSYASQYIARYEEQGIGLQWENMYTSPVQDDTTSFGWLCCLILADSFIYFLIAWYVRNVFPGTYGMAAPWYFPILPSYWKERFGCAEVKPEKSNGLMFTNIMMQNTNPSASPEYMFSSNIEPEPKDLTVGVALHGVTKIYGSKVAVDNLNLNFYEGHITSLLGPNGAGKTTTISMLTGLFGASAGTIFVYGKDIKTDLHTVRKNMGVCMQHDVLFSYLTTKEHLLLYGSIKVPHWTKKQLHEEVKRTLKDTGLYSHRHKRVGTLSGGMKRKLSISIALIGGSRVVILDEPSTGVDPCSRRSIWDVISKNKTARTIILSTHHLDEAEVLSDRIAFLEQGGLRCCGSPFYLKEAFGDGYHLTLTKKKSPNLNANAVCDTMAVTAMIQSHLPEAYLKEDIGGELVYVLPPFSTKVSGAYLSLLRALDNGMGDLNIGCYGISDTTVEEVFLNLTKESQKNSAMSLEHLTQKKIGNSNANGISTPDDLSVSSSNFTDRDDKILTRGERLDGFGLLLKKIMAILIKRFHHTRRNWKGLIAQVILPIVFVTTAMGLGTLRNSSNSYPEIQISPSLYGTSEQTAFYANYHPSTEALVSAMWDFPGIDNMCLNTSDLQCLNKDSLEKWNTSGEPITNFGVCSCSENVQECPKFNYSPPHRRTYSSQVIYNLTGQRVENYLISTANEFVQKRYGGWSFGLPLTKDLRFDITGVPANRTLAKVWYDPEGYHSLPAYLNSLNNFLLRVNMSKYDAARHGIIMYSHPYPGVQDQEQATISSLIDILVALSILMGYSVTTASFVTYVVREHQTKAKQLQHISGIGVTCYWVTNFIYDMVFYLVPVAFSIGIIAIFKLPAFYSENNLGAVSLLLLLFGYATFSWMYLLAGLFHETGMAFITYVCVNLFFGINSIVSLSVVYFLSKEKPNDPTLELISETLKRIFLIFPQFCFGYGLIELSQQQSVLDFLKAYGVEYPNETFEMNKLGAMFVALVSQGTMFFSLRLLINESLIKKLRLFFRKFNSSHVRETIDEDEDVRAERLRVESGAAEFDLVQLYCLTKTYQLIHKKIIAVNNISIGIPAGECFGLLGVNGAGKTTIFKMLTGDIIPSSGNILIRNKTGSLGHVDSHSSLVGYCPQEDALDDLVTVEEHLYFYARVHGIPEKDIKETVHKLLRRLHLMPFKDRATSMCSYGTKRKLSTALALIGKPSILLLDEPSSGMDPKSKRHLWKIISEEVQNKCSVILTSHSMEECEALCTRLAIMVNGKFQCIGSLQHIKSRFGRGFTVKVHLKNNKVTMETLTKFMQLHFPKTYLKDQHLSMLEYHVPVTAGGVANIFDLLETNKTALNITNFLVSQTTLEEVFINFAKDQKSYETADTSSQGSTISVDSQDDQMES

SEQ ID NO: 7579 - protein, 2277 aa, Homo sapiens
  Payload ID: 1600;
  Gene Symbol: ABCA12;
  Gene Name: ATP-binding cassette, sub-family A (ABC1), member 12;
  Uniprot ID:  Q86UK0;
  ENSP ID: ENSP00000374312
MFTYIKIITSGDSDNITHVWNEDDGQTLSPSSLAAQLLILENFEDALLNISANSPYIPYLACVRNVTDSLARGSPENLRLLQSTIRFKKSFLRNGSYEDYFPPVPEVLKSKLSQLRNLTELLCESETFSLIEKSCQLSDMSFGSLCEESEFDLQLLEAAELGTEIAASLLYHDNVISKKVRDLLTGDPSKINLNMDQFLEQALQMNYLENITQLIPIIEAMLHVNNSADASEKPGQLLEMFKNVEELKEDLRRTTGMSNRTIDKLLAIPIPDNRAEIISQVFWLHSCDTNITTPKLEDAMKEFCNLSLSERSRQSYLIGLTLLHYLNIYNFTYKVFFPRKDQKPVEKMMELFIRLKEILNQMASGTHPLLDKMRSLKQMHLPRSVPLTQAMYRSNRMNTPQGSFSTISQALCSQGITTEYLTAMLPSSQRPKGNHTKDFLTYKLTKEQIASKYGIPINSTPFCFSLYKDIINMPAGPVIWAFLKPMLLGRILYAPYNPVTKAIMEKSNVTLRQLAELREKSQEWMDKSPLFMNSFHLLNQAIPMLQNTLRNPFVQVFVKFSVGLDAVELLKQIDELDILRLKLENNIDIIDQLNTLSSLTVNISSCVLYDRIQAAKTIDEMEREAKRLYKSNELFGSVIFKLPSNRSWHRGYDSGNVFLPPVIKYTIRMSLKTAQTTRSLRTKIWAPGPHNSPSHNQIYGRAFIYLQDSIERAIIELQTGRNSQEIAVQVQAIPYPCFMKDNFLTSVSYSLPIVLMVAWVVFIAAFVKKLVYEKDLRLHEYMKMMGVNSCSHFFAWLIESVGFLLVTIVILIIILKFGNILPKTNGFILFLYFSDYSFSVIAMSYLISVFFNNTNIAALIGSLIYIIAFFPFIVLVTVENELSYVLKVFMSLLSPTAFSYASQYIARYEEQGIGLQWENMYTSPVQDDTTSFGWLCCLILADSFIYFLIAWYVRNVFPGTYGMAAPWYFPILPSYWKERFGCAEVKPEKSNGLMFTNIMMQNTNPSASPEYMFSSNIEPEPKDLTVGVALHGVTKIYGSKVAVDNLNLNFYEGHITSLLGPNGAGKTTTISMLTGLFGASAGTIFVYGKDIKTDLHTVRKNMGVCMQHDVLFSYLTTKEHLLLYGSIKVPHWTKKQLHEEVKRTLKDTGLYSHRHKRVGTLSGGMKRKLSISIALIGGSRVVILDEPSTGVDPCSRRSIWDVISKNKTARTIILSTHHLDEAEVLSDRIAFLEQGGLRCCGSPFYLKEAFGDGYHLTLTKKKSPNLNANAVCDTMAVTAMIQSHLPEAYLKEDIGGELVYVLPPFSTKVSGAYLSLLRALDNGMGDLNIGCYGISDTTVEEVFLNLTKESQKNSAMSLEHLTQKKIGNSNANGISTPDDLSVSSSNFTDRDDKILTRGERLDGFGLLLKKIMAILIKRFHHTRRNWKGLIAQVILPIVFVTTAMGLGTLRNSSNSYPEIQISPSLYGTSEQTAFYANYHPSTEALVSAMWDFPGIDNMCLNTSDLQCLNKDSLEKWNTSGEPITNFGVCSCSENVQECPKFNYSPPHRRTYSSQVIYNLTGQRVENYLISTANEFVQKRYGGWSFGLPLTKDLRFDITGVPANRTLAKVWYDPEGYHSLPAYLNSLNNFLLRVNMSKYDAARHGIIMYSHPYPGVQDQEQATISSLIDILVALSILMGYSVTTASFVTYVVREHQTKAKQLQHISGIGVTCYWVTNFIYDMVFYLVPVAFSIGIIAIFKLPAFYSENNLGAVSLLLLLFGYATFSWMYLLAGLFHETGMAFITYVCVNLFFGINSIVSLSVVYFLSKEKPNDPTLELISETLKRIFLIFPQFCFGYGLIELSQQQSVLDFLKAYGVEYPNETFEMNKLGAMFVALVSQGTMFFSLRLLINESLIKKLRLFFRKFNSSHVRETIDEDEDVRAERLRVESGAAEFDLVQLYCLTKTYQLIHKKIIAVNNISIGIPAGECFGLLGVNGAGKTTIFKMLTGDIIPSSGNILIRNKTGSLGHVDSHSSLVGYCPQEDALDDLVTVEEHLYFYARVHGIPEKDIKETVHKLLRRLHLMPFKDRATSMCSYGTKRKLSTALALIGKPSILLLDEPSSGMDPKSKRHLWKIISEEVQNKCSVILTSHSMEECEALCTRLAIMVNGKFQCIGSLQHIKSRFGRGFTVKVHLKNNKVTMETLTKFMQLHFPKTYLKDQHLSMLEYHVPVTAGGVANIFDLLETNKTALNITNFLVSQTTLEEVFINFAKDQKSYETADTSSQGSTISVDSQDDQMES

SEQ ID NO: 7580 - protein, 90 aa, Homo sapiens
  Payload ID: 1600;
  Gene Symbol: ABCA12;
  Gene Name: ATP-binding cassette, sub-family A (ABC1), member 12;
  ENSP ID: ENSP00000400231
MASLFHQLQILVWKNWLGVKRQPLWTLVLILWPVIIFIILAITRTKFPPTAKPTWDSSTWNTCDGWMAQIFFFSCINEETDSRYRVMIAQ

SEQ ID NO: 7581 - protein, 155 aa, Homo sapiens
  Payload ID: 1601;
  Gene Symbol: ABCA13;
  Gene Name: ATP-binding cassette, sub-family A (ABC1), member 13;
  ENSP ID: ENSP00000389861
  MOD_RES (1)..(1): Any amino acid
XLESIRQCGVALCIVLGFSILSASIGSSVLFYLVSVCLCVAVIVAFQLTAFTFRKNLAATALLLSLFGYATLPWMYLMSRIFSSSDVAFISYVSLNFIFGLCTMLITIMPRLLAIISKAKNLQNIYDVLKWVFTIFPQFCLGQGLVELCYNQIKY

SEQ ID NO: 7582 - protein, 831 aa, Homo sapiens
  Payload ID: 1601;
  Gene Symbol: ABCA13;
  Gene Name: ATP-binding cassette, sub-family A (ABC1), member 13;
  ENSP ID: ENSP00000391042
VQGVQLLRAQVAAILARRLRRTLRAGKSTLADLLLPVLFVALAMGLFMVRPLATEYPPLRLTPGHYQRAETYFFRKNSSCWRTDPFSHPEFQDSCGCLKCPNRSASAPYLTNHLGHTLLNLSGFNMEEYLLAPSEKPRLGGWSFGLKIPSEAGGANGNISKPPTLAKVWYNQKGFHSLPSYLNHLNNLILWQHLPPTVDWRQYGITLYSHPYGGALLNEDKILESIRQCGVALCIVLGFSILSASIGSSVVRDRVIGAKRLQHISGLGYRMYWFTNFLYDMLFYLVSVCLCVAVIVAFQLTAFTFRKNLAATALLLSLFGYATLPWMYLMSRIFSSSDVAFISYVSLNFIFGLCTMLITIMPRLLAIISKAKNLQNIYDVLKWVFTIFPQFCLGQGLVELCYNQIKYDLTHNFGIDSYVSPFEMNFLGWIFVQLASQGTVLLLLRVLLHWDLLRWPRGHSTLQGTVKSSKDTDVEKEEKRVFEGRTNGDILVLYNLSKHYRRFFQNIIAVQDISLGIPKGECFGLLGVNGAGKSTTFKMLNGEVSLTSGHAIIRTPMGDAVDLSSAGTAGVLIGYCPQQDALDELLTGWEHLYYYCSLRGIPRQCIPEVAGDLIRRLHLEAHADKPVATYSGGTKRKLSTALALVGKPDILLLDEPSSGMDPCSKRYLWQTIMKEVREGCAAVLTSHSMEECEALCTRLAIMVNGSFKCLGSPQHIKNRFGDGYTVKVWLCKEANQHCTVSDHLKLYFPGIQFKGQHLNLLEYHVPKRWGCLADLFKVIENNKTFLNIKHYSINQTTLEQVFINFASEQQQTLQSTLDPSTDSHHTHHLPI

SEQ ID NO: 7583 - protein, 1192 aa, Homo sapiens
  Payload ID: 1601;
  Gene Symbol: ABCA13;
  Gene Name: ATP-binding cassette, sub-family A (ABC1), member 13;
  ENSP ID: ENSP00000396789
  MOD_RES (1)..(1): Any amino acid
XIQWNNMYQALEQGGMTFGWVCWMILFDSSLYFLCGWYLSNLIPGTFGLRKPWYFPFTASYWKSVGFLVEKRQYFLSSSLFFFNENFDNKGSSLQNREGELEGSAPGVTLVSVTKEYEGHKAVVQDLSLTFYRDQITALLGTNGAGKTTIISMLTGLHPPTSGTIIINGKNLQTDLSRVRMELGVCPQQDILLDNLTVREHLLLFASIKAPQWTKKELHQQVNQTLQDVDLTQHQHKQTRALSGGLKRKLSLGIAFMGMSRTVVLDEPTSGVDPCSRHSLWDILLKYREGRTIIFTTHHLDEAEALSDRVAVLQHGRLRCCGPPFCLKEAYGQGLRLTLTRQPSVLEAHDLKDMACVTSLIKIYIPQAFLKDSSGSELTYTIPKDTDKACLKGLFQALDENLHQLHLTGYGISDTTLEEVFLMLLQDSNKKSHIALGTESELQNHRPTGHLSGYCGSLARPATVQGVQLLRAQVAAILARRLRRTLRAGKSTLADLLLPVLFVALAMGLFMVRPLATEYPPLRLTPGHYQRAETYFFSSGGDNLDLTRVLLRKFRDQDLPCADLNPRQKNSSCWRTDPFSHPEFQDSCGCLKCPNRSASAPYLTNHLGHTLLNLSGFNMEEYLLAPSEKPRLGGWSFGLKIPSEAGGANGNISKPPTLAKVWYNQKGFHSLPSYLNHLNNLILWQHLPPTVDWRQYGITLYSHPYGGALLNEDKILESIRQCGVALCIVLGFSILSASIGSSVVRDRVIGAKRLQHISGLGYRMYWFTNFLYDMLFYLVSVCLCVAVIVAFQLTAFTFRKNLAATALLLSLFGYATLPWMYLMSRIFSSSDVAFISYVSLNFIFGLCTMLITIMPRLLAIISKAKNLQNIYDVLKWVFTIFPQFCLGQGLVELCYNQIKYDLTHNFGIDSYVSPFEMNFLGWIFVQLASQGTVLLLLRVLLHWDLLRWPRGHSTLQGTVKSSKDTDVEKEEKRVFEGRTNGDILVLYNLSKHYRRFFQNIIAVQDISLGIPKGECFGLLGVNGAGKSTTFKMLNGEVSLTSGHAIIRTPMGDAVDLSSAGTAGVLIGYCPQQDALDELLTGWEHLYYYCSLRGIPRQCIPEVAGDLIRRLHLEAHADKPVATYSGGTKRKLSTALALVGKPDILLLDEPSSGMDPCSKRYLWQTIMKEVREGCAAVLTSHRFWYQDDAGLIK

SEQ ID NO: 7584 - protein, 317 aa, Homo sapiens
  Payload ID: 1601;
  Gene Symbol: ABCA13;
  Gene Name: ATP-binding cassette, sub-family A (ABC1), member 13;
  Uniprot ID:  Q86UQ4;
  ENSP ID: ENSP00000409268
MGHAGCQFKALLWKNWLCRLRNPVLFLAEFFWPCILFVILTVLRFQEPPRYRDICYLQPRDLPSCGVIPFVQSLLCNTGSRCRNFSYEGSMEHHFRLSRFQTAADPKKVNNLAFLKEIQDLAEEIHGMMDKAKNLKRLWVERSNTPDSSYGSSFFTMDLNKTEEVILKLESLHQQPHIWDFLLLLPRLHTSHDHVEDGMDVAVNLLQTILNSLISLEDLDWLPLNQTFSQVSELVLNVTISTLTFLQQHGVAVTEPVYHLSMQNIVWDPQKVQYDLKSQFGFDDLHTEQILNSSAELKEVHMLDCFSHRWAFPGDWI

SEQ ID NO: 7585 - protein, 5058 aa, Homo sapiens
  Payload ID: 1601;
  Gene Symbol: ABCA13;
  Gene Name: ATP-binding cassette, sub-family A (ABC1), member 13;
  ENSP ID: ENSP00000411096
MGHAGCQFKALLWKNWLCRLRNPVLFLAEFFWPCILFVILTVLRFQEPPRYRDICYLQPRDLPSCGVIPFVQSLLCNTGSRCRNFSYEGSMEHHFRLSRFQTAADPKKVNNLAFLKEIQDLAEEIHGMMDKAKNLKRLWVERSNTPDSSYGSSFFTMDLNKTEEVILKLESLHQQPHIWDFLLLLPRLHTSHDHVEDGMDVAVNLLQTILNSLISLEDLDWLPLNQTFSQVSELVLNVTISTLTFLQQHGVAVTEPVYHLSMQNIVWDPQKVQYDLKSQFGFDDLHTEQILNSSAELKEIPTDTSLEKMVCSVLSSTSEDEAEKWGHVGGCHPKWSEAKNYLVHAVSWLRVYQQVFVQWQQGSLLQKTLTGMGHSLEALRNQFEEESKPWKVVEALHTALLLLNDSLSADGPKDNHTFPKILQHLWKLQSLLQNLPQWPALKRFLQLDGALRNAIAQNLHFVQEVLICLETSANDFKWFELNQLKLEKDVFFWELKQMLAKNAVCPNGRFSEKEVFLPPGNSSIWGGLQGLLCYCNSSETSVLNKLLGSVEDADRILQEVITWHKNMSVLIPEEYLDWQELEMQLSEASLSCTRLFLLLGADPSPENDVFSSDCKHQLVSTVIFHTLEKTQFFLEQAYYWKAFKKFIRKTCEVAQYVNMQESFQNRLLAFPEESPCFEENMDWKMISDNYFQFLNNLLKSPTASISRALNFTKHLLMMEKKLHTLEDEQMNFLLSFVEFFEKLLLPNLFDSSIVPSFHSLPSLTEDILNISSLWTNHLKSLKRDPSATDAQKLLEFGNEVIWKMQTLGSHWIRKEPKNLLRFIELILFEINPKLLELWAYGISKGKRAKLENFFTLLNFSVPENEILSTSFNFSQLFHSDWPKSPAMNIDFVRLSEAIITSLHEFGFLEQEQISEALNTVYAIRNASDLFSALSEPQKQEVDKILTHIHLNVFQDKDSALLLQIYSSFYRYIYELLNIQSRGSSLTFLTQISKHILDIIKQFNFQNISKAFAFLFKTAEVLGGISNVSYCQQLLSIFNFLELQAQSFMSTEGQELEVIHTTLTGLKQLLIIDEDFRISLFQYMSQFFNSSVEDLLDNKCLISDNKHISSVNYSTSEESSFVFPLAQIFSNLSANVSVFNKFMSIHCTVSWLQMWTEIWETISQLFKFDMNVFTSLHHGFTQLLDELEDDVKVSKSCQGILPTHNVARLILNLFKNVTQANDFHNWEDFLDLRDFLVALGNALVSVKKLNLEQVEKSLFTMEAALHQLKTFPFNESTSREFLNSLLEVFIEFSSTSEYIVRNLDSINDFLSNNLTNYGEKFENIITELREAIVFLRNVSHDRDLFSCADIFQNVTECILEDGFLYVNTSQRMLRILDTLNSTFSSENTISSLKGCIVWLDVINHLYLLSNSSFSQGHLQNILGNFRDIENKMNSILKIVTWVLNIKKPLCSSNGSHINCVNIYLKDVTDFLNIVLTTVFEKEKKPKFEILLALLNDSTKQVRMSINNLTTDFDFASQSNWRYFTELILRPIEMSDEIPNQFQNIWLHLITLGKEFQKLVKGIYFNILENNSSSKTENLLNIFATSPKEKDVNSVGNSIYHLASYLAFSLSHDLQNSPKIIISPEIMKATGLGIQLIRDVFNSLMPVVHHTSPQNAGYMQALKKVTSVMRTLKKADIDLLVDQLEQVSVNLMDFFKNISSVGTGNLVVNLLVGLMEKFADSSHSWNVNHLLQLSRLFPKDVVDAVIDVYYVLPHAVRLLQGVPGKNITEGLKDVYSFTLLHGITISNITKEDFAIVIKILLDTIELVSDKPDIISEALACFPVVWCWNHTNSGFRQNSKIDPCNVHGLMSSSFYGKVASILDHFHLSPQGEDSPCSNESSRMEITRKVVCIIHELVDWNSILLELSEVFHVNISLVKTVQKFWHKILPFVPPSINQTRDSISELCPSGSIKQVALQIIEKLKNVNFTKVTSGENILDKLSSLNKILNINEDTETSVQNIISSNLERTVQLISEDWSLEKSTHNLLSLFMMLQNANVTGSSLEALSSFIEKSETPYNFEELWPKFQQIMKDLTQDFRIRHLLSEMNKGIKSINSMALQKITLQFAHFLEILDSPSLKTLEIIEDFLLVTKNWLQEYANEDYSRMIETLFIPVTNESSTEDIALLAKAIATFWGSLKNISRAGNFDVAFLTHLLNQEQLTNFSVVQLLFENILINLINNLAGNSQEAAWNLNDTDLQIMNFINLILNHMQSETSRKTVLSLRSIVDFTEQFLKTFFSLFLKEDSENKISLLLKYFHKDVIAEMSFVPKDKILEILKLDQFLTLMIQDRLMNIFSSLKETIYHLMKSSFILDNGEFYFDTHQGLKFMQDLFNALLRETSMKNKTENNIDFFTVVSQLFFHVNKSEDLFKLNQDLGSALHLVRECSTEMARLLDTILHSPNKDFYALYPTLQEVILANLTDLLFFINNSFPLRNRATLEITKRLVGAISRASEESHVLKPLLEMSGTLVMLLNDSADLRDLATSMDSIVKLLKLVKKVSGKMSTVFKTHFISNTKDSVKFFDTLYSIMQQSVQNLVKEIATLKKIDHFTFEKINDLLVPFLDLAFEMIGVEPYISSNSDIFSMSPSILSYMNQSKDFSDILEEIAEFLTSVKMNLEDMRSLAVAFNNETQTFSMDSVNLREEILGCLVPINNITNQMDFLYPNPISTHSGPQDIKWEIIHEVIPFLDKILSQNSTEIGSFLKMVICLTLEALWKNLKKDNWNVSNVLMTFTQHPNNLLKTIETVLEASSGIKSDYEGDLNKSLYFDTPLSQNITHHQLEKAIHNVLSRIALWRKGLLFNNSEWITSTRTLFQPLFEIFIKATTGKNVTSEKEERTKKEMIDFPYSFKPFFCLEKYLGGLFVLTKYWQQIPLTDQSVVEICEVFQQTVKPSEAMEMLQKVKMMVVRVLTIVAENPSWTKDILCATLSCKQNGIRHLILSAIQGVTLAQDHFQEIEKIWSSPNQLNCESLSKNLSSTLESFKSSLENATGQDCTSQPRLETVQQHLYMLAKSLEETWSSGNPIMTFLSNFTVTEDVKIKDLMKNITKLTEELRSSIQISNETIHSILEANISHSKVLFSALTVALSGKCDQEILHLLLTFPKGEKSWIAAEELCSLPGSKVYSLIVLLSRNLDVRAFIYKTLMPSEANGLLNSLLDIVSSLSALLAKAQHVFEYLPEFLHTFKITALLETLDFQQVSQNVQARSSAFGSFQFVMKMVCKDQASFLSDSNMFINLPRVKELLEDDKEKFNIPEDSTPFCLKLYQEILQLPNGALVWTFLKPILHGKILYTPNTPEINKVIQKANYTFYIVDKLKTLSETLLEMSSLFQRSGSGQMFNQLQEALRNKFVRNFVENQLHIDVDKLTEKLQTYGGLLDEMFNHAGAGRFRFLGSILVNLSSCVALNRFQALQSVDILETKAHELLQQNSFLASIIFSNSLFDKNFRSESVKLPPHVSYTIRTNVLYSVRTDVVKNPSWKFHPQNLPADGFKYNYVFAPLQDMIERAIILVQTGQEALEPAAQTQAAPYPCHTSDLFLNNVGFFFPLIMMLTWMVSVASMVRKLVYEQEIQIEEYMRMMGVHPVIHFLAWFLENMAVLTISSATLAIVLKTSGIFAHSNTFIVFLFLLDFGMSVVMLSYLLSAFFSQANTAALCTSLVYMISFLPYIVLLVLHNQLSFVNQTFLCLLSTTAFGQGVFFITFLEGQETGIQWNNMYQALEQGGMTFGWVCWMILFDSSLYFLCGWYLSNLIPGTFGLRKPWYFPFTASYWKSVGFLVEKRQYFLSSSLFFFNENFDNKGSSLQNREGELEGSAPGVTLVSVTKEYEGHKAVVQDLSLTFYRDQITALLGTNGAGKTTIISMLTGLHPPTSGTIIINGKNLQTDLSRVRMELGVCPQQDILLDNLTVREHLLLFASIKAPQWTKKELHQQVNQTLQDVDLTQHQHKQTRALSGGLKRKLSLGIAFMGMSRTVVLDEPTSGVDPCSRHSLWDILLKYREGRTIIFTTHHLDEAEALSDRVAVLQHGRLRCCGPPFCLKEAYGQGLRLTLTRQPSVLEAHDLKDMACVTSLIKIYIPQAFLKDSSGSELTYTIPKDTDKACLKGLFQALDENLHQLHLTGYGISDTTLEEVFLMLLQDSNKKSHIALGTESELQNHRPTGHLSGYCGSLARPATVQGVQLLRAQVAAILARRLRRTLRAGKSTLADLLLPVLFVALAMGLFMVRPLATEYPPLRLTPGHYQRAETYFFSSGGDNLDLTRVLLRKFRDQDLPCADLNPRQKNSSCWRTDPFSHPEFQDSCGCLKCPNRSASAPYLTNHLGHTLLNLSGFNMEEYLLAPSEKPRLGGWSFGLKIPSEAGGANGNISKPPTLAKVWYNQKGFHSLPSYLNHLNNLILWQHLPPTVDWRQYGITLYSHPYGGALLNEDKILESIRQCGVALCIVLGFSILSASIGSSVVRDRVIGAKRLQHISGLGYRMYWFTNFLYDMLFYLVSVCLCVAVIVAFQLTAFTFRKNLAATALLLSLFGYATLPWMYLMSRIFSSSDVAFISYVSLNFIFGLCTMLITIMPRLLAIISKAKNLQNIYDVLKWVFTIFPQFCLGQGLVELCYNQIKYDLTHNFGIDSYVSPFEMNFLGWIFVQLASQGTVLLLLRVLLHWDLLRWPRGHSTLQGTVKSSKDTDVEKEEKRVFEGRTNGDILVLYNLSKHYRRFFQNIIAVQDISLGIPKGECFGLLGVNGAGKSTTFKMLNGEVSLTSGHAIIRTPMGDAVDLSSAGTAGVLIGYCPQQDALDELLTGWEHLYYYCSLRGIPRQCIPEVAGDLIRRLHLEAHADKPVATYSGGTKRKLSTALALVGKPDILLLDEPSSGMDPCSKRYLWQTIMKEVREGCAAVLTSHSMEECEALCTRLAIMVNGSFKCLGSPQHIKNRFGDGYTVKVWLCKEANQHCTVSDHLKLYFPGIQFKGQHLNLLEYHVPKRWGCLADLFKVIENNKTFLNIKHYSINQTTLEQVFINFASEQQQTLQSTLDPSTDSHHTHHLPI

SEQ ID NO: 7586 - protein, 2366 aa, Homo sapiens
  Payload ID: 1601;
  Gene Symbol: ABCA13;
  Gene Name: ATP-binding cassette, sub-family A (ABC1), member 13;
  ENSP ID: ENSP00000442634
  MOD_RES (1)..(1): Any amino acid
XYPNPISTHSGPQDIKWEIIHEVIPFLDKILSQNSTEIGSFLKMVICLTLEALWKNLKKDNWNVSNVLMTFTQHPNNLLKTIETVLEASSGIKSDYEGDLNKSLYFDTPLSQNITHHQLEKAIHNVLSRIALWRKGLLFNNSEWITSTRTLFQPLFEIFIKATTGKNVTSEKEERTKKEMIDFPYSFKPFFCLEKYLGGLFVLTKYWQQIPLTDQSVVEICEVFQQTVKPSEAMEMLQKVKMMVVRVLTIVAENPSWTKDILCATLSCKQNGIRHLILSAIQGVTLAQDHFQEIEKIWSSPNQLNCESLSKNLSSTLESFKSSLENATGQDCTSQPRLETVQQHLYMLAKSLEETWSSGNPIMTFLSNFTVTEDVKIKDLMKNITKLTEELRSSIQISNETIHSILEANISHSKVLFSALTVALSGKCDQEILHLLLTFPKGEKSWIAAEELCSLPGSKVYSLIVLLSRNLDVRAFIYKTLMPSEANGLLNSLLDIVSSLSALLAKAQHVFEYLPEFLHTFKITALLETLDFQQVSQNVQARSSAFGSFQFVMKMVCKDQASFLSDSNMFINLPRVKELLEDDKEKFNIPEDSTPFCLKLYQEILQLPNGALVWTFLKPILHGKILYTPNTPEINKVIQKANYTFYIVDKLKTLSETLLEMSSLFQRSGSGQMFNQLQEALRNKFVRNFVENQLHIDVDKLTEKLQTYGGLLDEMFNHAGAGRFRFLGSILVNLSSCVALNRFQALQSVDILETKAHELLQQNSFLASIIFSNSLFDKNFRSESVKLPPHVSYTIRTNVLYSVRTDVVKNPSWKFHPQNLPADGFKYNYVFAPLQDMIERAIILVQTGQEALEPAAQTQAAPYPCHTSDLFLNNVGFFFPLIMMLTWMVSVASMVRKLVYEQEIQIEEYMRMMGVHPVIHFLAWFLENMAVLTISSATLAIVLKTSGIFAHSNTFIVFLFLLDFGMSVVMLSYLLSAFFSQANTAALCTSLVYMISFLPYIVLLVLHNQLSFVNQTFLCLLSTTAFGQGVFFITFLEGQETGIQWNNMYQALEQGGMTFGWVCWMILFDSSLYFLCGWYLSNLIPGTFGLRKPWYFPFTASYWKSVGFLVEKRQYFLSSSLFFFNENFDNKGSSLQNREGELEGSAPGVTLVSVTKEYEGHKAVVQDLSLTFYRDQITALLGTNGAGKTTIISMLTGLHPPTSGTIIINGKNLQTDLSRVRMELGVCPQQDILLDNLTVREHLLLFASIKAPQWTKKELHQQVNQTLQDVDLTQHQHKQTRALSGGLKRKLSLGIAFMGMSRTVVLDEPTSGVDPCSRHSLWDILLKYREGRTIIFTTHHLDEAEALSDRVAVLQHGRLRCCGPPFCLKEAYGQGLRLTLTRQPSVLEAHDLKDMACVTSLIKIYIPQAFLKDSSGSELTYTIPKDTDKACLKGLFQALDENLHQLHLTGYGISDTTLEEVFLMLLQDSNKKSHIALGTESELQNHRPTGHLSGYCGSLARPATVQGVQLLRAQVAAILARRLRRTLRAGKSTLADLLLPVLFVALAMGLFMVRPLATEYPPLRLTPGHYQRAETYFFSSSGGDNLDLTRVLLRKFRDQDLPCADLNPRQKNSSCWRTDPFSHPEFQDSCGCLKCPNRSASAPYLTNHLGHTLLNLSGFNMEEYLLAPSEKPRLGGWSFGLKIPSEAGGANGNISKPPTLAKVWYNQKGFHSLPSYLNHLNNLILWQHLPPTVDWRQYGITLYSHPYGGALLNEDKILESIRQCGVALCIVLGFSILSASIGSSVVRDRVIGAKRLQHISGLGYRMYWFTNFLYDMLFYLVSVCLCVAVIVAFQLTAFTFRKNLAATALLLSLFGYATLPWMYLMSRIFSSSDVAFISYVSLNFIFGLCTMLITIMPRLLAIISKAKNLQNIYDVLKWVFTIFPQFCLGQGLVELCYNQIKYDLTHNFGIDSYVSPFEMNFLGWIFVQLASQGTVLLLLRVLLHWDLLRWPRGHSTLQGTVKSSKDTDVEKEEKRVFEGRTNGDILVLYNLSKHYRRFFQNIIAVQDISLGIPKGECFGLLGVNGAGKSTTFKMLNGEVSLTSGHAIIRTPMGDAVDLSSAGTAGVLIGYCPQQDALDELLTGWEHLYYYCSLRGIPRQCIPEVAGDLIRRLHLEAHADKPVATYSGGTKRKLSTALALVGKPDILLLDEPSSGMDPCSKRYLWQTIMKEVREGCAAVLTSHSMEECEALCTRLAIMVNGSFKCLGSPQHIKNRFGDGYTVKVWLCKEANQHCTVSDHLKLYFPGIQFKGQHLNLLEYHVPKRWGCLADLFKVIENNKTFLNIKHYSINQTTLEQVFINFASEQQQTLQSTLDPSTDSHHTHHLPI

SEQ ID NO: 7587 - protein, 2436 aa, Homo sapiens [sequence omitted]

SEQ ID NO: 7588 - protein, 2436 aa, Homo sapiens
  Payload ID: 1602;
  Gene Symbol: ABCA2;
  Gene Name: ATP-binding cassette, sub-family A (ABC1), member 2;
  Uniprot ID:  Q9BZC7;
  ENSP ID: ENSP00000344155
MGFLHQLQLLLWKNVTLKRRSPWVLAFEIFIPLVLFFILLGLRQKKPTISVKEVSFYTAAPLTSAGILPVMQSLCPDGQRDEFGFLQYANSTVTQLLERLDRVVEEGNLFDPARPSLGSELEALRQHLEALSAGPGTSGSHLDRSTVSSFSLDSVARNPQELWRFLTQNLSLPNSTAQALLAARVDPPEVYHLLFGPSSALDSQSGLHKGQEPWSRLGGNPLFRMEELLLAPALLEQLTCTPGSGELGRILTVPESQKGALQGYRDAVCSGQAAARARRFSGLSAELRNQLDVAKVSQQLGLDAPNGSDSSPQAPPPRRLQALLGDLLDAQKVLQDVDVLSALALLLPQGACTGRTPGPPASGAGGAANGTGAGAVMGPNATAEEGAPSAAALATPDTLQGQCSAFVQLWAGLQPILCGNNRTIEPEALRRGNMSSLGFTSKEQRNLGLLVHLMTSNPKILYAPAGSEVDRVILKANETFAFVGNVTHYAQVWLNISAEIRSFLEQGRLQQHLRWLQQYVAELRLHPEALNLSLDELPPALRQDNFSLPSGMALLQQLDTIDNAACGWIQFMSKVSVDIFKGFPDEESIVNYTLNQAYQDNVTVFASVIFQTRKDGSLPPHVHYKIRQNSSFTEKTNEIRRAYWRPGPNTGGRFYFLYGFVWIQDMMERAIIDTFVGHDVVEPGSYVQMFPYPCYTRDDFLFVIEHMMPLCMVISWVYSVAMTIQHIVAEKEHRLKEVMKTMGLNNAVHWVAWFITGFVQLSISVTALTAILKYGQVLMHSHVVIIWLFLAVYAVATIMFCFLVSVLYSKAKLASACGGIIYFLSYVPYMYVAIREEVAHDKITAFEKCIASLMSTTAFGLGSKYFALYEVAGVGIQWHTFSQSPVEGDDFNLLLAVTMLMVDAVVYGILTWYIEAVHPGMYGLPRPWYFPLQKSYWLGSGRTEAWEWSWPWARTPRLSVMEEDQACAMESRRFEETRGMEEEPTHLPLVVCVDKLTKVYKDDKKLALNKLSLNLYENQVVSFLGHNGAGKTTTMSILTGLFPPTSGSATIYGHDIRTEMDEIRKNLGMCPQHNVLFDRLTVEEHLWFYSRLKSMAQEEIRREMDKMIEDLELSNKRHSLVQTLSGGMKRKLSVAIAFVGGSRAIILDEPTAGVDPYARRAIWDLILKYKPGRTILLSTHHMDEADLLGDRIAIISHGKLKCCGSPLFLKGTYGDGYRLTLVKRPAEPGGPQEPGLASSPPGRAPLSSCSELQVSQFIRKHVASCLLVSDTSTELSYILPSEAAKKGAFERLFQHLERSLDALHLSSFGLMDTTLEEVFLKVSEEDQSLENSEADVKESRKDVLPGAEGPASGEGHAGNLARCSELTQSQASLQSASSVGSARGDEGAGYTDVYGDYRPLFDNPQDPDNVSLQEVEAEALSRVGQGSRKLDGGWLKVRQFHGLLVKRFHCARRNSKALFSQILLPAFFVCVAMTVALSVPEIGDLPPLVLSPSQYHNYTQPRGNFIPYANEERREYRLRLSPDASPQQLVSTFRLPSGVGATCVLKSPANGSLGPTLNLSSGESRLLAARFFDSMCLESFTQGLPLSNFVPPPPSPAPSDSPASPDEDLQAWNVSLPPTAGPEMWTSAPSLPRLVREPVRCTCSAQGTGFSCPSSVGGHPPQMRVVTGDILTDITGHNVSEYLLFTSDRFRLHRYGAITFGNVLKSIPASFGTRAPPMVRKIAVRRAAQVFYNNKGYHSMPTYLNSLNNAILRANLPKSKGNPAAYGITVTNHPMNKTSASLSLDYLLQGTDVVIAIFIIVAMSFVPASFVVFLVAEKSTKAKHLQFVSGCNPIIYWLANYVWDMLNYLVPATCCVIILFVFDLPAYTSPTNFPAVLSLFLLYGWSITPIMYPASFWFEVPSSAYVFLIVINLFIGITATVATFLLQLFEHDKDLKVVNSYLKSCFLIFPNYNLGHGLMEMAYNEYINEYYAKIGQFDKMKSPFEWDIVTRGLVAMAVEGVVGFLLTIMCQYNFLRRPQRMPVSTKPVEDDVDVASERQRVLRGDADNDMVKIENLTKVYKSRKIGRILAVDRLCLGVRPGECFGLLGVNGAGKTSTFKMLTGDESTTGGEAFVNGHSVLKELLQVQQSLGYCPQCDALFDELTAREHLQLYTRLRGISWKDEARVVKWALEKLELTKYADKPAGTYSGGNKRKLSTAIALIGYPAFIFLDEPTTGMDPKARRFLWNLILDLIKTGRSVVLTSHSMEECEALCTRLAIMVNGRLRCLGSIQHLKNRFGDGYMITVRTKSSQSVKDVVRFFNRNFPEAMLKERHHTKVQYQLKSEHISLAQVFSKMEQVSGVLGIEDYSVSQTTLDNVFVNFAKKQSDNLEQQETEPPSALQSPLGCLLSLLRPRSAPTELRALVADEPEDLDTEDEGLISFEEERAQLSFNTDTLC

SEQ ID NO: 7589 - protein, 2435 aa, Homo sapiens
  Payload ID: 1602;
  Gene Symbol: ABCA2;
  Gene Name: ATP-binding cassette, sub-family A (ABC1), member 2;
  Uniprot ID:  Q9BZC7;
  ENSP ID: ENSP00000360666
MGFLHQLQLLLWKNVTLKRRSPWVLAFEIFIPLVLFFILLGLRQKKPTISVKEAFYTAAPLTSAGILPVMQSLCPDGQRDEFGFLQYANSTVTQLLERLDRVVEEGNLFDPARPSLGSELEALRQHLEALSAGPGTSGSHLDRSTVSSFSLDSVARNPQELWRFLTQNLSLPNSTAQALLAARVDPPEVYHLLFGPSSALDSQSGLHKGQEPWSRLGGNPLFRMEELLLAPALLEQLTCTPGSGELGRILTVPESQKGALQGYRDAVCSGQAAARARRFSGLSAELRNQLDVAKVSQQLGLDAPNGSDSSPQAPPPRRLQALLGDLLDAQKVLQDVDVLSALALLLPQGACTGRTPGPPASGAGGAANGTGAGAVMGPNATAEEGAPSAAALATPDTLQGQCSAFVQLWAGLQPILCGNNRTIEPEALRRGNMSSLGFTSKEQRNLGLLVHLMTSNPKILYAPAGSEVDRVILKANETFAFVGNVTHYAQVWLNISAEIRSFLEQGRLQQHLRWLQQYVAELRLHPEALNLSLDELPPALRQDNFSLPSGMALLQQLDTIDNAACGWIQFMSKVSVDIFKGFPDEESIVNYTLNQAYQDNVTVFASVIFQTRKDGSLPPHVHYKIRQNSSFTEKTNEIRRAYWRPGPNTGGRFYFLYGFVWIQDMMERAIIDTFVGHDVVEPGSYVQMFPYPCYTRDDFLFVIEHMMPLCMVISWVYSVAMTIQHIVAEKEHRLKEVMKTMGLNNAVHWVAWFITGFVQLSISVTALTAILKYGQVLMHSHVVIIWLFLAVYAVATIMFCFLVSVLYSKAKLASACGGIIYFLSYVPYMYVAIREEVAHDKITAFEKCIASLMSTTAFGLGSKYFALYEVAGVGIQWHTFSQSPVEGDDFNLLLAVTMLMVDAVVYGILTWYIEAVHPGMYGLPRPWYFPLQKSYWLGSGRTEAWEWSWPWARTPRLSVMEEDQACAMESRRFEETRGMEEEPTHLPLVVCVDKLTKVYKDDKKLALNKLSLNLYENQVVSFLGHNGAGKTTTMSILTGLFPPTSGSATIYGHDIRTEMDEIRKNLGMCPQHNVLFDRLTVEEHLWFYSRLKSMAQEEIRREMDKMIEDLELSNKRHSLVQTLSGGMKRKLSVAIAFVGGSRAIILDEPTAGVDPYARRAIWDLILKYKPGRTILLSTHHMDEADLLGDRIAIISHGKLKCCGSPLFLKGTYGDGYRLTLVKRPAEPGGPQEPGLASSPPGRAPLSSCSELQVSQFIRKHVASCLLVSDTSTELSYILPSEAAKKGAFERLFQHLERSLDALHLSSFGLMDTTLEEVFLKVSEEDQSLENSEADVKESRKDVLPGAEGPASGEGHAGNLARCSELTQSQASLQSASSVGSARGDEGAGYTDVYGDYRPLFDNPQDPDNVSLQEVEAEALSRVGQGSRKLDGGWLKVRQFHGLLVKRFHCARRNSKALFSQILLPAFFVCVAMTVALSVPEIGDLPPLVLSPSQYHNYTQPRGNFIPYANEERREYRLRLSPDASPQQLVSTFRLPSGVGATCVLKSPANGSLGPTLNLSSGESRLLAARFFDSMCLESFTQGLPLSNFVPPPPSPAPSDSPASPDEDLQAWNVSLPPTAGPEMWTSAPSLPRLVREPVRCTCSAQGTGFSCPSSVGGHPPQMRVVTGDILTDITGHNVSEYLLFTSDRFRLHRYGAITFGNVLKSIPASFGTRAPPMVRKIAVRRAAQVFYNNKGYHSMPTYLNSLNNAILRANLPKSKGNPAAYGITVTNHPMNKTSASLSLDYLLQGTDVVIAIFIIVAMSFVPASFVVFLVAEKSTKAKHLQFVSGCNPIIYWLANYVWDMLNYLVPATCCVIILFVFDLPAYTSPTNFPAVLSLFLLYGWSITPIMYPASFWFEVPSSAYVFLIVINLFIGITATVATFLLQLFEHDKDLKVVNSYLKSCFLIFPNYNLGHGLMEMAYNEYINEYYAKIGQFDKMKSPFEWDIVTRGLVAMAVEGVVGFLLTIMCQYNFLRRPQRMPVSTKPVEDDVDVASERQRVLRGDADNDMVKIENLTKVYKSRKIGRILAVDRLCLGVRPGECFGLLGVNGAGKTSTFKMLTGDESTTGGEAFVNGHSVLKELLQVQQSLGYCPQCDALFDELTAREHLQLYTRLRGISWKDEARVVKWALEKLELTKYADKPAGTYSGGNKRKLSTAIALIGYPAFIFLDEPTTGMDPKARRFLWNLILDLIKTGRSVVLTSHSMEECEALCTRLAIMVNGRLRCLGSIQHLKNRFGDGYMITVRTKSSQSVKDVVRFFNRNFPEAMLKERHHTKVQYQLKSEHISLAQVFSKMEQVSGVLGIEDYSVSQTTLDNVFVNFAKKQSDNLEQQETEPPSALQSPLGCLLSLLRPRSAPTELRALVADEPEDLDTEDEGLISFEEERAQLSFNTDTLC

SEQ ID NO: 7590 - protein, 989 aa, Homo sapiens
  Payload ID: 1602;
  Gene Symbol: ABCA2;
  Gene Name: ATP-binding cassette, sub-family A (ABC1), member 2;
  ENSP ID: ENSP00000418662
MGRKTSRVQQGPPRSPACSAHGERSWGLEFPPFRWLLGIAGRTHLAALPPFQWVLAFEIFIPLVLFFILLGLRQKKPTISVKEAFYTAAPLTSAGILPVMQSLCPDGQRDEFGFLQYANSTVTQLLERLDRVVEEGNLFDPARPSLGSELEALRQHLEALSAGPGTSGSHLDRSTVSSFSLDSVARNPQELWRFLTQNLSLPNSTAQALLAARVDPPEVYHLLFGPSSALDSQSGLHKGQEPWSRLGGNPLFRMEELLLAPALLEQLTCTPGSGELGRILTVPESQKGALQGYRDAVCSGQAAARARRFSGLSAELRNQLDVAKVSQQLGLDAPNGSDSSPQAPPPRRLQALLGDLLDAQKVLQDVDVLSALALLLPQGACTGRTPGPPASGAGGAANGTGAGAVMGPNATAEEGAPSAAALATPDTLQGQCSAFVQLWAGLQPILCGNNRTIEPEALRRGNMSSLGFTSKEQRNLGLLVHLMTSNPKILYAPAGSEVDRVILKANETFAFVGNVTHYAQVWLNISAEIRSFLEQGRLQQHLRWLQQYVAELRLHPEALNLSLDELPPALRQDNFSLPSGMALLQQLDTIDNAACGWIQFMSKVSVDIFKGFPDEESIVNYTLNQAYQDNVTVFASVIFQTRKDGSLPPHVHYKIRQNSSFTEKTNEIRRAYWRPGPNTGGRFYFLYGFVWIQDMMERAIIDTFVGHDVVEPGSYVQMFPYPCYTRDDFLFVIEHMMPLCMVISWVYSVAMTIQHIVAEKEHRLKEVMKTMGLNNAVHWVAWFITGFVQLSISVTALTAILKYGQVLMHSHVVIIWLFLAVYAVATIMFCFLVSVLYSKAKLASACGGIIYFLSYVPYMYVAIREEVAHDKITAFEKCIASLMSTTAFGLGSKYFALYEVAGVGIQWHTFSQSPVEGDDFNLLLAVTMLMVDAVVYGILTWYIEAVHPEVLLAGQWADRSLGVELAVGTHPPPQCHGGGPGLCHGEPAL

SEQ ID NO: 7591 - protein, 1066 aa, Homo sapiens
  Payload ID: 1602;
  Gene Symbol: ABCA2;
  Gene Name: ATP-binding cassette, sub-family A (ABC1), member 2;
  ENSP ID: ENSP00000419850
FYFLYGFVWIQDMMERAIIDTFVGHDVVEPGSYVQMFPYPCYTRDDFLFVIEHMMPLCMVISWVYSVAMTIQHIVAEKEHRLKEVMKTMGLNNAVHWVAWFITGFVQLSISVTALTAILKYGQVLMHSHVVIIWLFLAVYAVATIMFCFLVSVLYSKAKLASACGGIIYFLSYVPYMYVAIREEVAHDKITAFEKCIASLMSTTAFGLGSKYFALYEVAGVGIQWHTFSQSPVEGDDFNLLLAVTMLMVDAVVYGILTWYIEAVHPGMYGLPRPWYFPLQKSYWLGSGRTEAWEWSWPWARTPRLSVMEEDQACAMESRRFEETRGMEEEPTHLPLVVCVDKLTKVYKDDKKLALNKLSLNLYENQVVSFLGHNGAGKTTTMSILTGLFPPTSGSATIYGHDIRTEMDEIRKNLGMCPQHNVLFDRLTVEEHLWFYSRLKSMAQEEIRREMDKMIEDLELSNKRHSLVQTLSGGMKRKLSVAIAFVGGSRAIILDEPTAGVDPYARRAIWDLILKYKPGRTILLSTHHMDEADLLGDRIAIISHGKLKCCGSPLFLKGTYGDGYRLTLVKRPAEPGGPQEPGLASSPPGRAPLSSCSELQVSQFIRKHVASCLLVSDTSTELSYILPSEAAKKGAFERLFQHLERSLDALHLSSFGLMDTTLEEVFLKVSEEDQSLENSEADVKESRKDVLPGAEGPASGEGHAGNLARCSELTQSQASLQSASSVGSARGDEGAGYTDVYGDYRPLFDNPQDPDNVSLQEVEAEALSRVGQGSRKLDGGWLKVRQFHGLLVKRFHCARRNSKALFSQILLPAFFVCVAMTVALSVPEIGDLPPLVLSPSQYHNYTQPRGNFIPYANEERREYRLRLSPDASPQQLVSTFRLPSGVGATCVLKSPANGSLGPTLNLSSGESRLLAARFFDSMCLESFTQGLPLSNFVPPPPSPAPSDSPASPDEDLQAWNVSLPPTAGPEMWTSAPSLPRLVREPVRCTCSAQGTGFSCPSSVGGHPPQMRVVTGDILTDITGHNVSEYLLFTSDRFRLHRLTACLASPPLPPACPGMGPSPLETS

SEQ ID NO: 7592 - protein, 1441 aa, Homo sapiens
  Payload ID: 1602;
  Gene Symbol: ABCA2;
  Gene Name: ATP-binding cassette, sub-family A (ABC1), member 2;
  ENSP ID: ENSP00000420084
  MOD_RES (1)..(1): Any amino acid
XGRFYFLYGFVWIQDMMERAIIDTFVGHDVVEPGSYVQMFPYPCYTRDDFLFVIEHMMPLCMVISWVYSVAMTIQHIVAEKEHRLKEVMKTMGLNNAVHWVAWFITGFVQLSISVTALTAILKYGQVLMHSHVVIIWLFLAVYAVATIMFCFLVSVLYSKAKLASACGGIIYFLSYVPYMYVAIREEVAHDKITAFEKCIASLMSTTAFGLGSKYFALYEVAGVGIQWHTFSQSPVEGDDFNLLLAVTMLMVDAVVYGILTWYIEAVHPGMYGLPRPWYFPLQKSYWLGSGRTEAWEWSWPWARTPRLSVMEEDQACAMESRRFEETRGMEEEPTHLPLVVCVDKLTKVYKDDKKLALNKLSLNLYENQVVSFLGHNGAGKTTTMSILTGLFPPTSGSATIYGHDIRTEMDEIRKNLGMCPQHNVLFDRLTVEEHLWFYSRLKSMAQEEIRREMDKMIEDLELSNKRHSLVQTLSGGMKRKLSVAIAFVGGSRAIILDEPTAGVDPYARRAIWDLILKYKPGRTILLSTHHMDEADLLGDRIAIISHGKLKCCGSPLFLKGTYGDGYRLTLVKRPAEPGGPQEPGLASSPPGRAPLSSCSELQVSQFIRKHVASCLLVSDTSTELSYILPSEAAKKGAFERLFQHLERSLDALHLSSFGLMDTTLEEVFLKVSEEDQSLENSEADVKESRKDVLPGAEGPASGEGHAGNLARCSELTQSQASLQSASSVGSARGDEGAGYTDVYGDYRPLFDNPQDPDNVSLQEVEAEALSRVGQGSRKLDGGWLKVRQFHGLLVKRFHCARRNSKALFSQILLPAFFVCVAMTVALSVPEIGDLPPLVLSPSQYHNYTQPRGNFIPYANEERREYRLRLSPDASPQQLVSTFRLPSGVGATCVLKSPANGSLGPTLNLSSGESRLLAARFFDSMCLESFTQGLPLSNFVPPPPSPAPSDSPASPDEDLQAWNVSLPPTAGPEMWTSAPSLPRLVREPVRCTCSAQGTGFSCPSSVGGHPPQMRVVTGDILTDITGHNVSEYLLFTSDRFRLHRYGAITFGNVLKSIPASFGTRAPPMVRKIAVRRAAQVFYNNKGYHSMPTYLNSLNNAILRANLPKSKGNPAAYGITVTNHPMNKTSASLSLDYLLQGTDVVIAIFIIVAMSFVPASFVVFLVAEKSTKAKHLQFVSGCNPIIYWLANYVWDMLNYLVPATCCVIILFVFDLPAYTSPTNFPAVLSLFLLYGWSITPIMYPASFWFEVPSSAYVFLIVINLFIGITATVATFLLQLFEHDKDLKVVNSYLKSCFLIFPNYNLGHGLMEMAYNEYINEYYAKIGQFDKMKSPFEWDIVTRGLVAMAVEGVVGFLLTIMCQYNFLRRPQRMPVSTKPVEDDVDVASERQRVLRGDADNDMVKIENLTKVGSGHVGWGLGGVGQGQGGGAPAVEVEPGWAGP

SEQ ID NO: 7593 - protein, 44 aa, Homo sapiens
  Payload ID: 1602;
  Gene Symbol: ABCA2;
  Gene Name: ATP-binding cassette, sub-family A (ABC1), member 2;
  ENSP ID: ENSP00000420289
  MOD_RES (1)..(1): Any amino acid
XGAPSAAALATPDTLQGQCSAFVQLWAGLQPILCGNNRRCGGAT

SEQ ID NO: 7594 - protein, 195 aa, Homo sapiens
  Payload ID: 1602;
  Gene Symbol: ABCA2;
  Gene Name: ATP-binding cassette, sub-family A (ABC1), member 2;
  ENSP ID: ENSP00000420360
IKTGRSVVLTSHSMEECEALCTRLAIMVNGRLRCLGSIQHLKNRFGDGYMITVRTKSSQSVKDVVRFFNRNFPEAMLKERHHTKVQYQLKSEHISLAQVFSKMEQVSGVLGIEDYSVSQTTLDNSDNLEQQETEPPSALQSPLGCLLSLLRPRSAPTELRALVADEPEDLDTEDEGLISFEEERAQLSFNTDTLC

SEQ ID NO: 7595 - protein, 2466 aa, Homo sapiens
  Payload ID: 1602;
  Gene Symbol: ABCA2;
  Gene Name: ATP-binding cassette, sub-family A (ABC1), member 2;
  ENSP ID: ENSP00000481105
MGRKTSRVQQGPPRSPACSAHGERSWGLEFPPFRWLLGIAGRTHLAALPPFQWVLAFEIFIPLVLFFILLGLRQKKPTISVKEVAFYTAAPLTSAGILPVMQSLCPDGQRDEFGFLQYANSTVTQLLERLDRVVEEGNLFDPARPSLGSELEALRQHLEALSAGPGTSGSHLDRSTVSSFSLDSVARNPQELWRFLTQNLSLPNSTAQALLAARVDPPEVYHLLFGPSSALDSQSGLHKGQEPWSRLGGNPLFRMEELLLAPALLEQLTCTPGSGELGRILTVPESQKGALQGYRDAVCSGQAAARARRFSGLSAELRNQLDVAKVSQQLGLDAPNGSDSSPQAPPPRRLQALLGDLLDAQKVLQDVDVLSALALLLPQGACTGRTPGPPASGAGGAANGTGAGAVMGPNATAEEGAPSAAALATPDTLQGQCSAFVQLWAGLQPILCGNNRTIEPEALRRGNMSSLGFTSKEQRNLGLLVHLMTSNPKILYAPAGSEVDRVILKANETFAFVGNVTHYAQVWLNISAEIRSFLEQGRLQQHLRWLQQYVAELRLHPEALNLSLDELPPALRQDNFSLPSGMALLQQLDTIDNAACGWIQFMSKVSVDIFKGFPDEESIVNYTLNQAYQDNVTVFASVIFQTRKDGSLPPHVHYKIRQNSSFTEKTNEIRRAYWRPGPNTGGRFYFLYGFVWIQDMMERAIIDTFVGHDVVEPGSYVQMFPYPCYTRDDFLFVIEHMMPLCMVISWVYSVAMTIQHIVAEKEHRLKEVMKTMGLNNAVHWVAWFITGFVQLSISVTALTAILKYGQVLMHSHVVIIWLFLAVYAVATIMFCFLVSVLYSKAKLASACGGIIYFLSYVPYMYVAIREEVAHDKITAFEKCIASLMSTTAFGLGSKYFALYEVAGVGIQWHTFSQSPVEGDDFNLLLAVTMLMVDAVVYGILTWYIEAVHPGMYGLPRPWYFPLQKSYWLGSGRTEAWEWSWPWARTPRLSVMEEDQACAMESRRFEETRGMEEEPTHLPLVVCVDKLTKVYKDDKKLALNKLSLNLYENQVVSFLGHNGAGKTTTMSILTGLFPPTSGSATIYGHDIRTEMDEIRKNLGMCPQHNVLFDRLTVEEHLWFYSRLKSMAQEEIRREMDKMIEDLELSNKRHSLVQTLSGGMKRKLSVAIAFVGGSRAIILDEPTAGVDPYARRAIWDLILKYKPGRTILLSTHHMDEADLLGDRIAIISHGKLKCCGSPLFLKGTYGDGYRLTLVKRPAEPGGPQEPGLASSPPGRAPLSSCSELQVSQFIRKHVASCLLVSDTSTELSYILPSEAAKKGAFERLFQHLERSLDALHLSSFGLMDTTLEEVFLKVSEEDQSLENSEADVKESRKDVLPGAEGPASGEGHAGNLARCSELTQSQASLQSASSVGSARGDEGAGYTDVYGDYRPLFDNPQDPDNVSLQEVEAEALSRVGQGSRKLDGGWLKVRQFHGLLVKRFHCARRNSKALFSQILLPAFFVCVAMTVALSVPEIGDLPPLVLSPSQYHNYTQPRGNFIPYANEERREYRLRLSPDASPQQLVSTFRLPSGVGATCVLKSPANGSLGPTLNLSSGESRLLAARFFDSMCLESFTQGLPLSNFVPPPPSPAPSDSPASPDEDLQAWNVSLPPTAGPEMWTSAPSLPRLVREPVRCTCSAQGTGFSCPSSVGGHPPQMRVVTGDILTDITGHNVSEYLLFTSDRFRLHRYGAITFGNVLKSIPASFGTRAPPMVRKIAVRRAAQVFYNNKGYHSMPTYLNSLNNAILRANLPKSKGNPAAYGITVTNHPMNKTSASLSLDYLLQGTDVVIAIFIIVAMSFVPASFVVFLVAEKSTKAKHLQFVSGCNPIIYWLANYVWDMLNYLVPATCCVIILFVFDLPAYTSPTNFPAVLSLFLLYGWSITPIMYPASFWFEVPSSAYVFLIVINLFIGITATVATFLLQLFEHDKDLKVVNSYLKSCFLIFPNYNLGHGLMEMAYNEYINEYYAKIGQFDKMKSPFEWDIVTRGLVAMAVEGVVGFLLTIMCQYNFLRRPQRMPVSTKPVEDDVDVASERQRVLRGDADNDMVKIENLTKVYKSRKIGRILAVDRLCLGVRPGECFGLLGVNGAGKTSTFKMLTGDESTTGGEAFVNGHSVLKELLQVQQSLGYCPQCDALFDELTAREHLQLYTRLRGISWKDEARVVKWALEKLELTKYADKPAGTYSGGNKRKLSTAIALIGYPAFIFLDEPTTGMDPKARRFLWNLILDLIKTGRSVVLTSHSMEECEALCTRLAIMVNGRLRCLGSIQHLKNRFGDGYMITVRTKSSQSVKDVVRFFNRNFPEAMLKERHHTKVQYQLKSEHISLAQVFSKMEQVSGVLGIEDYSVSQTTLDNVFVNFAKKQSDNLEQQETEPPSALQSPLGCLLSLLRPRSAPTELRALVADEPEDLDTEDEGLISFEEERAQLSFNTDTLC

SEQ ID NO: 7596 - protein, 121 aa, Homo sapiens
  Payload ID: 1602;
  Gene Symbol: ABCA2;
  Gene Name: ATP-binding cassette, sub-family A (ABC1), member 2;
  ENSP ID: ENSP00000485459
MGRKTSRVQQGPPRSPACSAHGERSWGLEFPPFRWLLGIAGRTHLAALPPFQWVLAFEIFIPLVLFFILLGLRQKKPTISVKEVSFYTAAPLTSAGILPVMQSLCPDGQRDEFGFLQYANS

SEQ ID NO: 7597 - protein, 1704 aa, Homo sapiens
  Payload ID: 1603;
  Gene Symbol: ABCA3;
  Gene Name: ATP-binding cassette, sub-family A (ABC1), member 3;
  Uniprot ID:  Q99758;
  ENSP ID: ENSP00000301732
MAVLRQLALLLWKNYTLQKRKVLVTVLELFLPLLFSGILIWLRLKIQSENVPNATIYPGQSIQELPLFFTFPPPGDTWELAYIPSHSDAAKTVTETVRRALVINMRVRGFPSEKDFEDYIRYDNCSSSVLAAVVFEHPFNHSKEPLPLAVKYHLRFSYTRRNYMWTQTGSFFLKETEGWHTTSLFPLFPNPGPREPTSPDGGEPGYIREGFLAVQHAVDRAIMEYHADAATRQLFQRLTVTIKRFPYPPFIADPFLVAIQYQLPLLLLLSFTYTALTIARAVVQEKERRLKEYMRMMGLSSWLHWSAWFLLFFLFLLIAASFMTLLFCVKVKPNVAVLSRSDPSLVLAFLLCFAISTISFSFMVSTFFSKANMAAAFGGFLYFFTYIPYFFVAPRYNWMTLSQKLCSCLLSNVAMAMGAQLIGKFEAKGMGIQWRDLLSPVNVDDDFCFGQVLGMLLLDSVLYGLVTWYMEAVFPGQFGVPQPWYFFIMPSYWCGKPRAVAGKEEEDSDPEKALRNEYFEAEPEDLVAGIKIKHLSKVFRVGNKDRAAVRDLNLNLYEGQITVLLGHNGAGKTTTLSMLTGLFPPTSGRAYISGYEISQDMVQIRKSLGLCPQHDILFDNLTVAEHLYFYAQLKGLSRQKCPEEVKQMLHIIGLEDKWNSRSRFLSGGMRRKLSIGIALIAGSKVLILDEPTSGMDAISRRAIWDLLQRQKSDRTIVLTTHFMDEADLLGDRIAIMAKGELQCCGSSLFLKQKYGAGYHMTLVKEPHCNPEDISQLVHHHVPNATLESSAGAELSFILPRESTHRFEGLFAKLEKKQKELGIASFGASITTMEEVFLRVGKLVDSSMDIQAIQLPALQYQHERRASDWAVDSNLCGAMDPSDGIGALIEEERTAVKLNTGLALHCQQFWAMFLKKAAYSWREWKMVAAQVLVPLTCVTLALLAINYSSELFDDPMLRLTLGEYGRTVVPFSVPGTSQLGQQLSEHLKDALQAEGQEPREVLGDLEEFLIFRASVEGGGFNERCLVAASFRDVGERTVVNALFNNQAYHSPATALAVVDNLLFKLLCGPHASIVVSNFPQPRSALQAAKDQFNEGRKGFDIALNLLFAMAFLASTFSILAVSERAVQAKHVQFVSGVHVASFWLSALLWDLISFLIPSLLLLVVFKAFDVRAFTRDGHMADTLLLLLLYGWAIIPLMYLMNFFFLGAATAYTRLTIFNILSGIATFLMVTIMRIPAVKLEELSKTLDHVFLVLPNHCLGMAVSSFYENYETRRYCTSSEVAAHYCKKYNIQYQENFYAWSAPGVGRFVASMAASGCAYLILLFLIETNLLQRLRGILCALRRRRTLTELYTRMPVLPEDQDVADERTRILAPSPDSLLHTPLIIKELSKVYEQRVPLLAVDRLSLAVQKGECFGLLGFNGAGKTTTFKMLTGEESLTSGDAFVGGHRISSDVGKVRQRIGYCPQFDALLDHMTGREMLVMYARLRGIPERHIGACVENTLRGLLLEPHANKLVRTYSGGNKRKLSTGIALIGEPAVIFLDEPSTGMDPVARRLLWDTVARARESGKAIIITSHSMEECEALCTRLAIMVQGQFKCLGSPQHLKSKFGSGYSLRAKVQSEGQQEALEEFKAFVDLTFPGSVLEDEHQGMVHYHLPGRDLSWAKVFGILEKAKEKYGVDDYSVSQISLEQVFLSFAHLQPPTAEEGR

SEQ ID NO: 7598 - protein, 1646 aa, Homo sapiens
  Payload ID: 1603;
  Gene Symbol: ABCA3;
  Gene Name: ATP-binding cassette, sub-family A (ABC1), member 3;
  ENSP ID: ENSP00000371818
MAVLRQLALLLWKNYTLQKRKVLVTVLELFLPLLFSGILIWLRLKIQSENVPNATIYPGQSIQELPLFFTFPPPGDTWELAYIPSHSDAAKTVTETVRRALVINMRVRGFPSEKDFEDYIRYDNCSSSVLAAVVFEHPFNHSKEPLPLAVKYHLRFSYTRRNYMWTQTGSFFLKETEGWHTTSLFPLFPNPGPREPTSPDGGEPGYIREGFLAVQHAVDRAIMEYHADAATRQLFQRLTVTIKRFPYPPFIADPFLVAIQYQLPLLLLLSFTYTALTIARAVVQEKERRLKEYMRMMGLSSWLHWSAWFLLFFLFLLIAASFMTLLFCVKVKPNVAVLSRSDPSLVLAFLLCFAISTISFSFMVSTFFSKGMGIQWRDLLSPVNVDDDFCFGQVLGMLLLDSVLYGLVTWYMEAVFPGQFGVPQPWYFFIMPSYWCGKPRAVAGKEEEDSDPEKALRNEYFEAEPEDLVAGIKIKHLSKVFRVGNKDRAAVRDLNLNLYEGQITVLLGHNGAGKTTTLSMLTGLFPPTSGRAYISGYEISQDMVQIRKSLGLCPQHDILFDNLTVAEHLYFYAQLKGLSRQKCPEEVKQMLHIIGLEDKWNSRSRFLSGGMRRKLSIGIALIAGSKVLILDEPTSGMDAISRRAIWDLLQRQKSDRTIVLTTHFMDEADLLGDRIAIMAKGELQCCGSSLFLKQKYGAGYHMTLVKEPHCNPEDISQLVHHHVPNATLESSAGAELSFILPRESTHRFEGLFAKLEKKQKELGIASFGASITTMEEVFLRVGKLVDSSMDIQAIQLPALQYQHERRASDWAVDSNLCGAMDPSDGIGALIEEERTAVKLNTGLALHCQQFWAMFLKKAAYSWREWKMVAAQVLVPLTCVTLALLAINYSSELFDDPMLRLTLGEYGRTVVPFSVPGTSQLGQQLSEHLKDALQAEGQEPREVLGDLEEFLIFRASVEGGGFNERCLVAASFRDVGERTVVNALFNNQAYHSPATALAVVDNLLFKLLCGPHASIVVSNFPQPRSALQAAKDQFNEGRKGFDIALNLLFAMAFLASTFSILAVSERAVQAKHVQFVSGVHVASFWLSALLWDLISFLIPSLLLLVVFKAFDVRAFTRDGHMADTLLLLLLYGWAIIPLMYLMNFFFLGAATAYTRLTIFNILSGIATFLMVTIMRIPAVKLEELSKTLDHVFLVLPNHCLGMAVSSFYENYETRRYCTSSEVAAHYCKKYNIQYQENFYAWSAPGVGRFVASMAASGCAYLILLFLIETNLLQRLRGILCALRRRRTLTELYTRMPVLPEDQDVADERTRILAPSPDSLLHTPLIIKELSKVYEQRVPLLAVDRLSLAVQKGECFGLLGFNGAGKTTTFKMLTGEESLTSGDAFVGGHRISSDVGKVRQRIGYCPQFDALLDHMTGREMLVMYARLRGIPERHIGACVENTLRGLLLEPHANKLVRTYSGGNKRKLSTGIALIGEPAVIFLDEPSTGMDPVARRLLWDTVARARESGKAIIITSHSMEECEALCTRLAIMVQGQFKCLGSPQHLKSKFGSGYSLRAKVQSEGQQEALEEFKAFVDLTFPGSVLEDEHQGMVHYHLPGRDLSWAKVFGILEKAKEKYGVDDYSVSQISLEQVFLSFAHLQPPTAEEGR

SEQ ID NO: 7599 - protein, 209 aa, Homo sapiens
  Payload ID: 1603;
  Gene Symbol: ABCA3;
  Gene Name: ATP-binding cassette, sub-family A (ABC1), member 3;
  Uniprot ID:  Q99758;
  ENSP ID: ENSP00000454397
MAVLRQLALLLWKNYTLQKRKVLVTVLELFLPLLFSGILIWLRLKIQSENVPNATIYPGQSIQELPLFFTFPPPGDTWELAYIPSHSDAAKTVTETVRRALVINMRVRGFPSEKDFEDYIRYDNCSSSVLAAVVFEHPFNHSKEPLPLAVKYHLRFSYTRRNYMWTQTGSFFLKETEGWHTTSLFPLFPNPGPREPTSPDGGEPGEKLG

SEQ ID NO: 7600 - protein, 2273 aa, Homo sapiens [sequence omitted]

SEQ ID NO: 7601 - protein, 1065 aa, Homo sapiens
  Payload ID: 1604;
  Gene Symbol: ABCA4;
  Gene Name: ATP-binding cassette, sub-family A (ABC1), member 4;
  ENSP ID: ENSP00000439707
MDVVLHHVPEAKLVECIGQELIFLLPNKNFKHRAYASLFRELEETLADLGLSSFGISDTPLEEIFLKVTEDSDSGPLFAGGAQQKRENVNPRHPCLGPREKAGQTPQDSNVCSPGAPAAHPEGQPPPEPECPGPQLNTGTQLVLQHVQALLVKRFQHTIRSHKDFLAQIVLPATFVFLALMLSIVIPPFGEYPALTLHPWIYGQQYTFFSMDEPGSEQFTVLADVLLNKPGFGNRCLKEGWLPEYPCGNSTPWKTPSVSPNITQLFQKQKWTQVNPSPSCRCSTREKLTMLPECPEGAGGLPPPQRTQRSTEILQDLTDRNISDFLVKTYPALIRSSLKSKFWVNEQRYGGISIGGKLPVVPITGEALVGFLSDLGRIMNVSGGPITREASKEIPDFLKHLETEDNIKVWFNNKGWHALVSFLNVAHNAILRASLPKDRSPEEYGITVISQPLNLTKEQLSEITVLTTSVDAVVAICVIFSMSFVPASFVLYLIQERVNKSKHLQFISGVSPTTYWVTNFLWDIMNYSVSAGLVVGIFIGFQKKAYTSPENLPALVALLLLYGWAVIPMMYPASFLFDVPSTAYVALSCANLFIGINSSAITFILELFENNRTLLRFNAVLRKLLIVFPHFCLGRGLIDLALSQAVTDVYARFGEEHSANPFHWDLIGKNLFAMVVEGVVYFLLTLLVQRHFFLSQWIAEPTKEPIVDEDDDVAEERQRIITGGNKTDILRLHELTKIYPGTSSPAVDRLCVGVRPGECFGLLGVNGAGKTTTFKMLTGDTTVTSGDATVAGKSILTNISEVHQNMGYCPQFDAIDELLTGREHLYLYARLRGVPAEEIEKVANWSIKSLGLTVYADCLAGTYSGGNKRKLSTAIALIGCPPLVLLDEPTTGMDPQARRMLWNVIVSIIREGRAVVLTSHSMEECEALCTRLAIMVKGAFRCMGTIQHLKSKFGDGYIVTMKIKSPKDDLLPDLNPVEQFFQGNFPGSVQRERHYNMLQFQVSSSSLARIFQLLLSHKDSLLIEEYSVTQTTLDQVFVNFAKQQTESHDLPLHPRAAGASRQAQD

SEQ ID NO: 7602 - protein, 1642 aa, Homo sapiens
  Payload ID: 1605;
  Gene Symbol: ABCA5;
  Gene Name: ATP-binding cassette, sub-family A (ABC1), member 5;
  Uniprot ID:  Q8WWZ7;
  ENSP ID: ENSP00000376443
MSTAIREVGVWRQTRTLLLKNYLIKCRTKKSSVQEILFPLFFLFWLILISMMHPNKKYEEVPNIELNPMDKFTLSNLILGYTPVTNITSSIMQKVSTDHLPDVIITEEYTNEKEMLTSSLSKPSNFVGVVFKDSMSYELRFFPDMIPVSSIYMDSRAGCSKSCEAAQYWSSGFTVLQASIDAAIIQLKTNVSLWKELESTKAVIMGETAVVEIDTFPRGVILIYLVIAFSPFGYFLAIHIVAEKEKKIKEFLKIMGLHDTAFWLSWVLLYTSLIFLMSLLMAVIATASLLFPQSSSIVIFLLFFLYGLSSVFFALMLTPLFKKSKHVGIVEFFVTVAFGFIGLMIILIESFPKSLVWLFSPFCHCTFVIGIAQVMHLEDFNEGASFSNLTAGPYPLIITIIMLTLNSIFYVLLAVYLDQVIPGEFGLRRSSLYFLKPSYWSKSKRNYEELSEGNVNGNISFSEIIEPVSSEFVGKEAIRISGIQKTYRKKGENVEALRNLSFDIYEGQITALLGHSGTGKSTLMNILCGLCPPSDGFASIYGHRVSEIDEMFEARKMIGICPQLDIHFDVLTVEENLSILASIKGIPANNIIQEVQKVLLDLDMQTIKDNQAKKLSGGQKRKLSLGIAVLGNPKILLLDEPTAGMDPCSRHIVWNLLKYRKANRVTVFSTHFMDEADILADRKAVISQGMLKCVGSSMFLKSKWGIGYRLSMYIDKYCATESLSSLVKQHIPGATLLQQNDQQLVYSLPFKDMDKFSGLFSALDSHSNLGVISYGVSMTTLEDVFLKLEVEAEIDQADYSVFTQQPLEEEMDSKSFDEMEQSLLILSETKAALVSTMSLWKQQMYTIAKFHFFTLKRESKSVRSVLLLLLIFFTVQIFMFLVHHSFKNAVVPIKLVPDLYFLKPGDKPHKYKTSLLLQNSADSDISDLISFFTSQNIMVTMINDSDYVSVAPHSAALNVMHSEKDYVFAAVFNSTMVYSLPILVNIISNYYLYHLNVTETIQIWSTPFFQEITDIVFKIELYFQAALLGIIVTAMPPYFAMENAENHKIKAYTQLKLSGLLPSAYWIGQAVVDIPLFFIILILMLGSLLAFHYGLYFYTVKFLAVVFCLIGYVPSVILFTYIASFTFKKILNTKEFWSFIYSVAALACIAITEITFFMGYTIATILHYAFCIIIPIYPLLGCLISFIKISWKNVRKNVDTYNPWDRLSVAVISPYLQCVLWIFLLQYYEKKYGGRSIRKDPFFRNLSTKSKNRKLPEPPDNEDEDEDVKAERLKVKELMGCQCCEEKPSIMVSNLHKEYDDKKDFLLSRKVKKVATKYISFCVKKGEILGLLGPNGAGKSTIINILVGDIEPTSGQVFLGDYSSETSEDDDSLKCMGYCPQINPLWPDTTLQEHFEIYGAVKGMSASDMKEVISRITHALDLKEHLQKTVKKLPAGIKRKLCFALSMLGNPQITLLDEPSTGMDPKAKQHMWRAIRTAFKNRKRAAILTTHYMEEAEAVCDRVAIMVSGQLRCIGTVQHLKSKFGKGYFLEIKLKDWIENLEVDRLQREIQYIFPNASRQESFSSILAYKIPKEDVQSLSQSFFKLEEAKHAFAIEEYSFSQATLEQVFVELTKEQEEEDNSCGTLNSTLWWERTQEDRVVF

SEQ ID NO: 7603 - protein, 573 aa, Homo sapiens
  Payload ID: 1605;
  Gene Symbol: ABCA5;
  Gene Name: ATP-binding cassette, sub-family A (ABC1), member 5;
  ENSP ID: ENSP00000465351
MPPYFAMENAENHKIKAYTQLKLSGLLPSAYWIGQAVVDIPLFFIILILMLGSLLAFHYGLYFYTVKFLAVVFCLIGYVPSVILFTYIASFTFKKILNTKEFWSFIYSVAALACIAITEITFFMGYTIATILHYAFCIIIPIYPLLGCLISFIKISWKNVRKNVDTYNPWDRLSVAVISPYLQCVLWIFLLQYYEKKYGGRSIRKDPFFRNLSTKSKNRKLPEPPDNEDEDEDVKAERLKVKELMGCQCCEEKPSIMVSNLHKEYDDKKDFLLSRKVKKVATKYISFCVKKGEILGLLGPNGAGKSTIINILVGDIEPTSGQVFLGDYSSETSEDDDSLKCMGYCPQINPLWPDTTLQEHFEIYGAVKGMSASDMKEVISRITHALDLKEHLQKTVKKLPAGIKRKLCFALSMLGNPQITLLDEPSTGMDPKAKQHMWRAIRTAFKNRKRAAILTTHYMEEAEAVCDRVAIMVSGQLRCIGTVQHLKSKFGKGYFLEIKLKDWIENLEVDRLQREIQYIFPNASRQESFSSILAYKIPKEDVQSLSQSFFKLEEAKHAFAIEEYSFSQATLEQ

SEQ ID NO: 7604 - protein, 63 aa, Homo sapiens
  Payload ID: 1605;
  Gene Symbol: ABCA5;
  Gene Name: ATP-binding cassette, sub-family A (ABC1), member 5;
  ENSP ID: ENSP00000465766
MFLKSKWGIGYRLSMYIDKYCATESLSSLVKQHIPGATLLQQNDQQLVYSLPFKDMDKFSGIA

SEQ ID NO: 7605 - protein, 127 aa, Homo sapiens
  Payload ID: 1605;
  Gene Symbol: ABCA5;
  Gene Name: ATP-binding cassette, sub-family A (ABC1), member 5;
  ENSP ID: ENSP00000466662
MSTAIREVGVWRQTRTLLLKNYLIKCRTKKSSVQEILFPLFFLFWLILISMMHPNKKYEEVPNIELNPMDKFTLSNLILGYTPVTNITSSIMQKVSTDHLPDVIITEEYTNEKEMLTSSLSKPSNFV

SEQ ID NO: 7606 - protein, 192 aa, Homo sapiens
  Payload ID: 1605;
  Gene Symbol: ABCA5;
  Gene Name: ATP-binding cassette, sub-family A (ABC1), member 5;
  ENSP ID: ENSP00000466931
  MOD_RES (1)..(1): Any amino acid
XELRFFPDMIPVSSIYMDSRAGCSKSCEAAQYWSSGFTVLQASIDAAIIQLKTNVSLWKELESTKAVIMGETAVVEIDTFPRGVILIYLVIAFSPFGYFLAIHIVAEKEKKIKEFLKIMGLHDTAFWLSWVLLYTSLIFLMSLLMAVIATASLLFPQSSSIVIFLLFFLYGLSSVSILTCDRNKELSKCLIT

SEQ ID NO: 7607 - protein, 431 aa, Homo sapiens
  Payload ID: 1605;
  Gene Symbol: ABCA5;
  Gene Name: ATP-binding cassette, sub-family A (ABC1), member 5;
  ENSP ID: ENSP00000467251
VEFFVTVAFGFIGLMIILIESFPKSLVWLFSPFCHCTFVIGIAQVMHLEDFNEGASFSNLTAGPYPLIITIIMLTLNSIFYVLLAVYLDQVIPGEFGLRRSSLYFLKPSYWSKSKRNYEELSEGNVNGNISFSEIIEPVSSEFVGKEAIRISGIQKTYRKKGENVEALRNLSFDIYEGQITALLGHSGTGKSTLMNILCGLCPPSDGFASIYGHRVSEIDEMFEARKMIGICPQLDIHFDVLTVEENLSILASIKGIPANNIIQEVQKVLLDLDMQTIKDNQAKKLSGGQKRKLSLGIAVLGNPKILLLDEPTAGMDPCSRHIVWNLLKYRKANRVTVFSTHFMDEADILADRKAVISQGMLKCVGSSMFLKSKWGIGYRLSMYIDKYCATESLSSLVKQHIPGATLLQQNDQQLVYSLPFKDMDKFSGIA

SEQ ID NO: 7608 - protein, 917 aa, Homo sapiens
  Payload ID: 1605;
  Gene Symbol: ABCA5;
  Gene Name: ATP-binding cassette, sub-family A (ABC1), member 5;
  ENSP ID: ENSP00000467448
MSTAIREVGVWRQTRTLLLKNYLIKCRTKKSSVQEILFPLFFLFWLILISMMHPNKKYEEVPNIELNPMDKFTLSNLILGYTPVTNITSSIMQKVSTDHLPDVIITEEYTNEKEMLTSSLSKPSNFVGVVFKDSMSYELRFFPDMIPVSSIYMDSRAGCSKSCEAAQYWSSGFTVLQASIDAAIIQLKTNVSLWKELESTKAVIMGETAVVEIDTFPRGVILIYLVIAFSPFGYFLAIHIVAEKEKKIKEFLKIMGLHDTAFWLSWVLLYTSLIFLMSLLMAVIATASLLFPQSSSIVIFLLFFLYGLSSVFFALMLTPLFKKSKHVGIVEFFVTVAFGFIGLMIILIESFPKSLVWLFSPFCHCTFVIGIAQVMHLEDFNEGASFSNLTAGPYPLIITIIMLTLNSIFYVLLAVYLDQVIPGEFGLRRSSLYFLKPSYWSKSKRNYEELSEGNVNGNISFSEIIEPVSSEFVGKEAIRISGIQKTYRKKGENVEALRNLSFDIYEGQITALLGHSGTGKSTLMNILCGLCPPSDGFASIYGHRVSEIDEMFEARKMIGICPQLDIHFDVLTVEENLSILASIKGIPANNIIQEVQKVLLDLDMQTIKDNQAKKLSGGQKRKLSLGIAVLGNPKILLLDEPTAGMDPCSRHIVWNLLKYRKANRVTVFSTHFMDEADILADRKAVISQGMLKCVGSSMFLKSKWGIGYRLSMYIDKYCATESLSSLVKQHIPGATLLQQNDQQLVYSLPFKDMDKFSGLFSALDSHSNLGVISYGVSMTTLEDVFLKLEVEAEIDQADYSVFTQQPLEEEMDSKSFDEMEQSLLILSETKAALVSTMSLWKQQMYTIAKFHFFTLKRESKSVRSVLLLLLIFFTVQIFMFLVHHSFKNAVVPIKLVPDLYFLKPGDKPHKYKTSLLL

SEQ ID NO: 7609 - protein, 250 aa, Homo sapiens
  Payload ID: 1605;
  Gene Symbol: ABCA5;
  Gene Name: ATP-binding cassette, sub-family A (ABC1), member 5;
  ENSP ID: ENSP00000467524
MSTAIREVGVWRQTRTLLLKNYLIKCRTKKSSVQEILFPLFFLFWLILISMMHPNKKYEEVPNIELNPMDKFTLSNLILGYTPVTNITSSIMQKVSTDHLPDVIITEEYTNEKEMLTSSLSKPSNFVGVVFKDSMSYELRFFPDMIPVSSIYMDSRAGCSKSCEAAQYWSSGFTVLQASIDAAIIQLKTNVSLWKELESTKAVIMGETAVVEIDTFPRGVILIYLVIAFSPFGYFLAIHIVAEKEKKIKE

SEQ ID NO: 7610 - protein, 38 aa, Homo sapiens
  Payload ID: 1605;
  Gene Symbol: ABCA5;
  Gene Name: ATP-binding cassette, sub-family A (ABC1), member 5;
  ENSP ID: ENSP00000467672
MSTAIREVGVWRQTRTLLLKNYLIKCRTKKSSVQEILF

SEQ ID NO: 7611 - protein, 250 aa, Homo sapiens; identical to SEQ ID NO: 7609
  Payload ID: 1605;
  Gene Symbol: ABCA5;
  Gene Name: ATP-binding cassette, sub-family A (ABC1), member 5;
  ENSP ID: ENSP00000467815

SEQ ID NO: 7612 - protein, 1642 aa, Homo sapiens; identical to SEQ ID NO: 7602
  Payload ID: 1605;
  Gene Symbol: ABCA5;
  Gene Name: ATP-binding cassette, sub-family A (ABC1), member 5;
  Uniprot ID:  Q8WWZ7;
  ENSP ID: ENSP00000467882

SEQ ID NO: 7613 - protein, 1617 aa, Homo sapiens
  Payload ID: 1606;
  Gene Symbol: ABCA6;
  Gene Name: ATP-binding cassette, sub-family A (ABC1), member 6;
  Uniprot ID:  Q8N139;
  ENSP ID: ENSP00000284425
MNMKQKSVYQQTKALLCKNFLKKWRMKRESLLEWGLSILLGLCIALFSSSMRNVQFPGMAPQNLGRVDKFNSSSLMVVYTPISNLTQQIMNKTALAPLLKGTSVIGAPNKTHMDEILLENLPYAMGIIFNETFSYKLIFFQGYNSPLWKEDFSAHCWDGYGEFSCTLTKYWNRGFVALQTAINTAIIEITTNHPVMEELMSVTAITMKTLPFITKNLLHNEMFILFFLLHFSPLVYFISLNVTKERKKSKNLMKMMGLQDSAFWLSWGLIYAGFIFIISIFVTIIITFTQIIVMTGFMVIFILFFLYGLSLVALVFLMSVLLKKAVLTNLVVFLLTLFWGCLGFTVFYEQLPSSLEWILNICSPFAFTTGMIQIIKLDYNLNGVIFPDPSGDSYTMIATFSMLLLDGLIYLLLALYFDKILPYGDERHYSPLFFLNSSSCFQHQRTNAKVIEKEIDAEHPSDDYFEPVAPEFQGKEAIRIRNVKKEYKGKSGKVEALKGLLFDIYEGQITAILGHSGAGKSSLLNILNGLSVPTEGSVTIYNKNLSEMQDLEEIRKITGVCPQFNVQFDILTVKENLSLFAKIKGIHLKEVEQEVQRILLELDMQNIQDNLAKHLSEGQKRKLTFGITILGDPQILLLDEPTTGLDPFSRDQVWSLLRERRADHVILFSTQSMDEADILADRKVIMSNGRLKCAGSSMFLKRRWGLGYHLSLHRNEICNPEQITSFITHHIPDAKLKTENKEKLVYTLPLERTNTFPDLFSDLDKCSDQGVTGYDISMSTLNEVFMKLEGQSTIEQDFEQVEMIRDSESLNEMELAHSSFSEMQTAVSDMGLWRMQVFAMARLRFLKLKRQTKVLLTLLLVFGIAIFPLIVENIMYAMLNEKIDWEFKNELYFLSPGQLPQEPRTSLLIINNTESNIEDFIKSLKHQNILLEVDDFENRNGTDGLSYNGAIIVSGKQKDYRFSVVCNTKRLHCFPILMNIISNGLLQMFNHTQHIRIESSPFPLSHIGLWTGLPDGSFFLFLVLCSISPYITMGSISDYKKNAKSQLWISGLYTSAYWCGQALVDVSFFILILLLMYLIFYIENMQYLLITSQIVFALVIVTPGYAASLVFFIYMISFIFRKRRKNSGLWSFYFFFASTIMFSITLINHFDLSILITTMVLVPSYTLLGFKTFLEVRDQEHYREFPEANFELSATDFLVCFIPYFQTLLFVFVLRCMELKCGKKRMRKDPVFRISPQSRDAKPNPEEPIDEDEDIQTERIRTATALTTSILDEKPVIIASCLHKEYAGQKKSCFSKRKKKIAARNISFCVQEGEILGLLGPNGAGKSSSIRMISGITKPTAGEVELKGCSSVLGHLGYCPQENVLWPMLTLREHLEVYAAVKGLRKADARLAIARLVSAFKLHEQLNVPVQKLTAGITRKLCFVLSLLGNSPVLLLDEPSTGIDPTGQQQMWQAIQAVVKNTERGVLLTTHNLAEAEALCDRVAIMVSGRLRCIGSIQHLKNKLGKDYILELKVKETSQVTLVHTEILKLFPQAAGQERYSSLLTYKLPVADVYPLSQTFHKLEAVKHNFNLEEYSLSQCTLEKVFLELSKEQEVGNFDEEIDTTMRWKLLPHSDEP

SEQ ID NO: 7614 - protein, 185 aa, Homo sapiens
  Payload ID: 1606;
  Gene Symbol: ABCA6;
  Gene Name: ATP-binding cassette, sub-family A (ABC1), member 6;
  Uniprot ID:  Q8N139;
  ENSP ID: ENSP00000466862
MNMKQKSVYQQTKALLCKNFLKKWRMKRESLLEWGLSILLGLCIALFSSSMRNVQFPGMAPQNLGRVDKFNSSSLMVVYTPISNLTQQIMNKTALAPLLKGTSVIGAPNKTHMDEILLENLPYAMGIIFNETFSYKLIFFQGYNSPLWKEDFSGDFPYQISLWNFSCFQHKEQRRLGNRDAFNDT

SEQ ID NO: 7615 - protein, 2146 aa, Homo sapiens
  Payload ID: 1607;
  Gene Symbol: ABCA7;
  Gene Name: ATP-binding cassette, sub-family A (ABC1), member 7;
  Uniprot ID:  Q8IZY2;
  ENSP ID: ENSP00000263094
MAFWTQLMLLLWKNFMYRRRQPVQLLVELLWPLFLFFILVAVRHSHPPLEHHECHFPNKPLPSAGTVPWLQGLICNVNNTCFPQLTPGEEPGRLSNFNDSLVSRLLADARTVLGGASAHRTLAGLGKLIATLRAARSTAQPQPTKQSPLEPPMLDVAELLTSLLRTESLGLALGQAQEPLHSLLEAAEDLAQELLALRSLVELRALLQRPRGTSGPLELLSEALCSVRGPSSTVGPSLNWYEASDLMELVGQEPESALPDSSLSPACSELIGALDSHPLSRLLWRRLKPLILGKLLFAPDTPFTRKLMAQVNRTFEELTLLRDVREVWEMLGPRIFTFMNDSSNVAMLQRLLQMQDEGRRQPRPGGRDHMEALRSFLDPGSGGYSWQDAHADVGHLVGTLGRVTECLSLDKLEAAPSEAALVSRALQLLAEHRFWAGVVFLGPEDSSDPTEHPTPDLGPGHVRIKIRMDIDVVTRTNKIRDRFWDPGPAADPLTDLRYVWGGFVYLQDLVERAAVRVLSGANPRAGLYLQQMPYPCYVDDVFLRVLSRSLPLFLTLAWIYSVTLTVKAVVREKETRLRDTMRAMGLSRAVLWLGWFLSCLGPFLLSAALLVLVLKLGDILPYSHPGVVFLFLAAFAVATVTQSFLLSAFFSRANLAAACGGLAYFSLYLPYVLCVAWRDRLPAGGRVAASLLSPVAFGFGCESLALLEEQGEGAQWHNVGTRPTADVFSLAQVSGLLLLDAALYGLATWYLEAVCPGQYGIPEPWNFPFRRSYWCGPRPPKSPAPCPTPLDPKVLVEEAPPGLSPGVSVRSLEKRFPGSPQPALRGLSLDFYQGHITAFLGHNGAGKTTTLSILSGLFPPSGGSAFILGHDVRSSMAAIRPHLGVCPQYNVLFDMLTVDEHVWFYGRLKGLSAAVVGPEQDRLLQDVGLVSKQSVQTRHLSGGMQRKLSVAIAFVGGSQVVILDEPTAGVDPASRRGIWELLLKYREGRTLILSTHHLDEAELLGDRVAVVAGGRLCCCGSPLFLRRHLGSGYYLTLVKARLPLTTNEKADTDMEGSVDTRQEKKNGSQGSRVGTPQLLALVQHWVPGARLVEELPHELVLVLPYTGAHDGSFATLFRELDTRLAELRLTGYGISDTSLEEIFLKVVEECAADTDMEDGSCGQHLCTGIAGLDVTLRLKMPPQETALENGEPAGSAPETDQGSGPDAVGRVQGWALTRQQLQALLLKRFLLARRSRRGLFAQIVLPALFVGLALVFSLIVPPFGHYPALRLSPTMYGAQVSFFSEDAPGDPGRARLLEALLQEAGLEEPPVQHSSHRFSAPEVPAEVAKVLASGNWTPESPSPACQCSRPGARRLLPDCPAAAGGPPPPQAVTGSGEVVQNLTGRNLSDFLVKTYPRLVRQGLKTKKWVNEVRYGGFSLGGRDPGLPSGQELGRSVEELWALLSPLPGGALDRVLKNLTAWAHSLDAQDSLKIWFNNKGWHSMVAFVNRASNAILRAHLPPGPARHAHSITTLNHPLNLTKEQLSEGALMASSVDVLVSICVVFAMSFVPASFTLVLIEERVTRAKHLQLMGGLSPTLYWLGNFLWDMCNYLVPACIVVLIFLAFQQRAYVAPANLPALLLLLLLYGWSITPLMYPASFFFSVPSTAYVVLTCINLFIGINGSMATFVLELFSDQKLQEVSRILKQVFLIFPHFCLGRGLIDMVRNQAMADAFERLGDRQFQSPLRWEVVGKNLLAMVIQGPLFLLFTLLLQHRSQLLPQPRVRSLPLLGEEDEDVARERERVVQGATQGDVLVLRNLTKVYRGQRMPAVDRLCLGIPPGECFGLLGVNGAGKTSTFRMVTGDTLASRGEAVLAGHSVAREPSAAHLSMGYCPQSDAIFELLTGREHLELLARLRGVPEAQVAQTAGSGLARLGLSWYADRPAGTYSGGNKRKLATALALVGDPAVVFLDEPTTGMDPSARRFLWNSLLAVVREGRSVMLTSHSMEECEALCSRLAIMVNGRFRCLGSPQHLKGRFAAGHTLTLRVPAARSQPAAAFVAAEFPGAELREAHGGRLRFQLPPGGRCALARVFGELAVHGAEHGVEDFSVSQTMLEEVFLYFSKDQGKDEDTEEQKEAGVGVDPAPGLQHPKRVSQFLDDPSTAETVL

SEQ ID NO: 7616 - protein, 2146 aa, Homo sapiens; identical to SEQ ID NO: 7615
  Payload ID: 1607;
  Gene Symbol: ABCA7;
  Gene Name: ATP-binding cassette, sub-family A (ABC1), member 7;
  Uniprot ID:  Q8IZY2;
  ENSP ID: ENSP00000414062

SEQ ID NO: 7617 - protein, 164 aa, Homo sapiens
  Payload ID: 1607;
  Gene Symbol: ABCA7;
  Gene Name: ATP-binding cassette, sub-family A (ABC1), member 7;
  ENSP ID: ENSP00000431473
MAFWTQLMLLLWKNFMYRRRQPVQLLVELLWPLFLFFILVAVRHSHPPLEHHECHFPNKPLPSAGTVPWLQGLICNVNNTCFPQLTPGEEPGRLSNFNDSLVSRLLADARTVLGGASAHRTLAGLGKLIATLRAARSTAQPQPTKQSPLEPPMLDVAELLTSLL

SEQ ID NO: 7618 - protein, 591 aa, Homo sapiens
  Payload ID: 1607;
  Gene Symbol: ABCA7;
  Gene Name: ATP-binding cassette, sub-family A (ABC1), member 7;
  ENSP ID: ENSP00000432031
  MOD_RES (1)..(1): Any amino acid
XSICVVFAMSFVPASFTLVLIEERVTRAKHLQLMGGLSPTLYWLGNFLWDMCNYLVPACIVVLIFLAFQQRAYVAPANLPALLLLLLLYGTAYVVLTCINLFIGINGSMATFVLELFSDQKLQEVSRILKQVFLIFPHFCLGRGLIDMVRNQAMADAFERLGDRQFQSPLRWEVVGKNLLAMVIQGPLFLLFTLLLQHRSQLLPQPRVRSLPLLGEEDEDVARERERVVQGATQGDVLVLRNLTKVYRGQRMPAVDRLCLGIPPGECFGLLGVNGAGKTSTFRMVTGDTLASRGEAVLAGHSVAREPSAAHLSMGYCPQSDAIFELLTGREHLELLARLRGVPEAQVAQTAGSGLARLGLSWYADRPAGTYSGGNKRKLATALALVGDPAVVFLDEPTTGMDPSARRFLWNSLLAVVREGRSVMLTSHSMEECEALCSRLAIMVNGRFRCLGSPQHLKGRFAAGHTLTLRVPAARSQPAAAFVAAEFPGAELREAHGGRLRFQLPPGGRCALARVFGELAVHGAEHGVEDFSVSQTMLEEVFLYFSKDQGKDEDTEEQKEAGVGVDPAPGLQHPKRVSQFLDDPSTAETVL

SEQ ID NO: 7619 - protein, 136 aa, Homo sapiens
  Payload ID: 1607;
  Gene Symbol: ABCA7;
  Gene Name: ATP-binding cassette, sub-family A (ABC1), member 7;
  ENSP ID: ENSP00000433545
MAFWTQLMLLLWKNFMYRRRQPLLVELLWPLFLFFILVAVRHSHPPLEHHECHFPNKPLPSAGTVPWLQGLICNVNNTCFPQLTPGEEPGRLSNFNDSLVSRLLADARTVLGGASAHRTLAGLGKLIATLRAARST

SEQ ID NO: 7620 - protein, 62 aa, Homo sapiens
  Payload ID: 1607;
  Gene Symbol: ABCA7;
  Gene Name: ATP-binding cassette, sub-family A (ABC1), member 7;
  ENSP ID: ENSP00000437311
  MOD_RES (1)..(1): Any amino acid
XPQETALENGEPAGSAPETDQGSGPDAVGRVQGWALTRQQLQALLLKRFLLARRSRRGLFAQ

SEQ ID NO: 7621 - protein, 2008 aa, Homo sapiens
  Payload ID: 1607;
  Gene Symbol: ABCA7;
  Gene Name: ATP-binding cassette, sub-family A (ABC1), member 7;
  Uniprot ID:  Q8IZY2;
  ENSP ID: ENSP00000465322
MVCLGTGQSAGPLVSVQNHCPPCGLSPQESLGLALGQAQEPLHSLLEAAEDLAQELLALRSLVELRALLQRPRGTSGPLELLSEALCSVRGPSSTVGPSLNWYEASDLMELVGQEPESALPDSSLSPACSELIGALDSHPLSRLLWRRLKPLILGKLLFAPDTPFTRKLMAQVNRTFEELTLLRDVREVWEMLGPRIFTFMNDSSNVAMLQRLLQMQDEGRRQPRPGGRDHMEALRSFLDPGSGGYSWQDAHADVGHLVGTLGRVTECLSLDKLEAAPSEAALVSRALQLLAEHRFWAGVVFLGPEDSSDPTEHPTPDLGPGHVRIKIRMDIDVVTRTNKIRDRFWDPGPAADPLTDLRYVWGGFVYLQDLVERAAVRVLSGANPRAGLYLQQMPYPCYVDDVFLRVLSRSLPLFLTLAWIYSVTLTVKAVVREKETRLRDTMRAMGLSRAVLWLGWFLSCLGPFLLSAALLVLVLKLGDILPYSHPGVVFLFLAAFAVATVTQSFLLSAFFSRANLAAACGGLAYFSLYLPYVLCVAWRDRLPAGGRVAASLLSPVAFGFGCESLALLEEQGEGAQWHNVGTRPTADVFSLAQVSGLLLLDAALYGLATWYLEAVCPGQYGIPEPWNFPFRRSYWCGPRPPKSPAPCPTPLDPKVLVEEAPPGLSPGVSVRSLEKRFPGSPQPALRGLSLDFYQGHITAFLGHNGAGKTTTLSILSGLFPPSGGSAFILGHDVRSSMAAIRPHLGVCPQYNVLFDMLTVDEHVWFYGRLKGLSAAVVGPEQDRLLQDVGLVSKQSVQTRHLSGGMQRKLSVAIAFVGGSQVVILDEPTAGVDPASRRGIWELLLKYREGRTLILSTHHLDEAELLGDRVAVVAGGRLCCCGSPLFLRRHLGSGYYLTLVKARLPLTTNEKADTDMEGSVDTRQEKKNGSQGSRVGTPQLLALVQHWVPGARLVEELPHELVLVLPYTGAHDGSFATLFRELDTRLAELRLTGYGISDTSLEEIFLKVVEECAADTDMEDGSCGQHLCTGIAGLDVTLRLKMPPQETALENGEPAGSAPETDQGSGPDAVGRVQGWALTRQQLQALLLKRFLLARRSRRGLFAQIVLPALFVGLALVFSLIVPPFGHYPALRLSPTMYGAQVSFFSEDAPGDPGRARLLEALLQEAGLEEPPVQHSSHRFSAPEVPAEVAKVLASGNWTPESPSPACQCSRPGARRLLPDCPAAAGGPPPPQAVTGSGEVVQNLTGRNLSDFLVKTYPRLVRQGLKTKKWVNEVRYGGFSLGGRDPGLPSGQELGRSVEELWALLSPLPGGALDRVLKNLTAWAHSLDAQDSLKIWFNNKGWHSMVAFVNRASNAILRAHLPPGPARHAHSITTLNHPLNLTKEQLSEGALMASSVDVLVSICVVFAMSFVPASFTLVLIEERVTRAKHLQLMGGLSPTLYWLGNFLWDMCNYLVPACIVVLIFLAFQQRAYVAPANLPALLLLLLLYGWSITPLMYPASFFFSVPSTAYVVLTCINLFIGINGSMATFVLELFSDQKLQEVSRILKQVFLIFPHFCLGRGLIDMVRNQAMADAFERLGDRQFQSPLRWEVVGKNLLAMVIQGPLFLLFTLLLQHRSQLLPQPRVRSLPLLGEEDEDVARERERVVQGATQGDVLVLRNLTKVYRGQRMPAVDRLCLGIPPGECFGLLGVNGAGKTSTFRMVTGDTLASRGEAVLAGHSVAREPSAAHLSMGYCPQSDAIFELLTGREHLELLARLRGVPEAQVAQTAGSGLARLGLSWYADRPAGTYSGGNKRKLATALALVGDPAVVFLDEPTTGMDPSARRFLWNSLLAVVREGRSVMLTSHSMEECEALCSRLAIMVNGRFRCLGSPQHLKGRFAAGHTLTLRVPAARSQPAAAFVAAEFPGAELREAHGGRLRFQLPPGGRCALARVFGELAVHGAEHGVEDFSVSQTMLEEVFLYFSKDQGKDEDTEEQKEAGVGVDPAPGLQHPKRVSQFLDDPSTAETVL

SEQ ID NO: 7622 - protein, 36 aa, Homo sapiens
  Payload ID: 1607;
  Gene Symbol: ABCA7;
  Gene Name: ATP-binding cassette, sub-family A (ABC1), member 7;
  ENSP ID: ENSP00000478857
MAFWTQLMLLLWKNFMYRRRQPVQLLVELLWPLFLF

SEQ ID NO: 7623 - protein, 96 aa, Homo sapiens
  Payload ID: 1607;
  Gene Symbol: ABCA7;
  Gene Name: ATP-binding cassette, sub-family A (ABC1), member 7;
  ENSP ID: ENSP00000480811
  MOD_RES (1)..(1): Any amino acid
XLVSICVVFAMSFVPASFTLVLIEERVTRAKHLQLMGGLSPTLYWLGNFLWDMCNYLVPACIVVLIFLAFQQRAYVAPANLPALLLLLLLYGSCRR

SEQ ID NO: 7624 - protein, 280 aa, Homo sapiens
  Payload ID: 1607;
  Gene Symbol: ABCA7;
  Gene Name: ATP-binding cassette, sub-family A (ABC1), member 7;
  ENSP ID: ENSP00000482948
REPSAAHLSMGYCPQSDAIFELLTGREHLELLARLRGVPEAQVAQTAGSGLARLGLSWYADRPAGTYSGGNKRKLATALALVGDPAVVFLDEPTTGMDPSARRFLWNSLLAVVREGRSVMLTSHSMEECEALCSRLAIMVNGRFRCLGSPQHLKGRFAAGHTLTLRVPAARSQPAAAFVAAEFPGAELREAHGGRLRFQLPPGGRCALARVFGELAVHGAEHGVEDFSVSQTMLEEDQGKDEDTEEQKEAGVGVDPAPGLQHPKRVSQFLDDPSTAETVL

SEQ ID NO: 7625 - protein, 1581 aa, Homo sapiens
  Payload ID: 1608;
  Gene Symbol: ABCA8;
  Gene Name: ATP-binding cassette, sub-family A (ABC1), member 8;
  Uniprot ID:  O94911;
  ENSP ID: ENSP00000269080
MRKRKISVCQQTWALLCKNFLKKWRMKRESLMEWLNSLLLLLCLYIYPHSHQVNDFSSLLTMDLGRVDTFNESRFSVVYTPVTNTTQQIMNKVASTPFLAGKEVLGLPDEESIKEFTANYPEEIVRVTFTNTYSYHLKFLLGHGMPAKKEHKDHTAHCYETNEDVYCEVSVFWKEGFVALQAAINAAIIEITTNHSVMEELMSVTGKNMKMHSFIGQSGVITDLYLFSCIISFSSFIYYASVNVTRERKRMKALMTMMGLRDSAFWLSWGLLYAGFIFIMALFLALVIRSTQFIILSGFMVVFSLFLLYGLSLVALAFLMSILVKKSFLTGLVVFLLTVFWGCLGFTSLYRHLPASLEWILSLLSPFAFMLGMAQLLHLDYDLNSNAFPHPSDGSNLIVATNFMLAFDTCLYLALAIYFEKILPNEYGHRRPPLFFLKSSFWSQTQKTDHVALEDEMDADPSFHDSFEQAPPEFQGKEAIRIRNVTKEYKGKPDKIEALKDLVFDIYEGQITAILGHSGAGKSTLLNILSGLSVPTKGSVTIYNNKLSEMADLENLSKLTGVCPQSNVQFDFLTVRENLRLFAKIKGILPQEVDKEIFLLDEPTAGLDPFSRHQVWNLLKERKTDRVILFSTQFMDEADILADRKVFLSQGKLKCAGSSLFLKKKWGIGYHLSLQLNEICVEENITSLVKQHIPDAKLSAKSEGKLIYTLPLERTNKFPELYKDLDSYPDLGIENYGVSMTTLNEVFLKLEGKSTINESDIAILGEVQAEKADDTERLVEMEQVLSSLNKMRKTIGGVALWRQQICAIARVRLLKLKHERKALLALLLILMAGFCPLLVEYTMVKIYQNSYTWELSPHLYFLAPGQQPHDPLTQLLIINKTGASIDDFIQSVEHQNIALEVDAFGTRNGTDDPSYNGAITVCCNEKNYSFSLACNAKRLNCFPVLMDIVSNGLLGMVKPSVHIRTERSTFLENGQDNPIGFLAYIMFWLVLTSSCPPYIAMSSIDDYKNRARSQLRISGLSPSAYWFGQALVDVSLYFLVFVFIYLMSYISNFEDMLLTIIHIIQIPCAVGYSFSLIFMTYVISFIFRKGRKNSGIWSFCFYVVTVFSVAGFAFSIFESDIPFIFTFLIPPATMIGCLFLSSHLLFSSLFSEERMDVQPFLVFLIPFLHFIIFLFTLRCLEWKFGKKSMRKDPFFRISPRSSDVCQNPEEPEGEDEDVQMERVRTANALNSTNFDEKPVIIASCLRKEYAGKRKGCFSKRKNKIATRNVSFCVRKGEVLGLLGHNGAGKSTSIKVITGDTKPTAGQVLLKGSGGGDALEFLGYCPQENALWPNLTVRQHLEVYAAVKGLRKGDAEVAITRLVDALKLQDQLKSPVKTLSEGIKRKLCFVLSILGNPSVVLLDEPSTGMDPEGQQQMWQAIRATFRNTERGALLTTHYMAEAEAVCDRVAIMVSGRLRCIGSIQHLKSKFGKDYLLEMKVKNLAQVEPLHAEILRLFPQAARQERYSSLMVYKLPVEDVQPLAQAFFKLEKVKQSFDLEEYSLSQSTLEQVFLELSKEQELGDFEEDFDPSVKWKLLPQEEP

SEQ ID NO: 7626 - protein, 1616 aa, Homo sapiens
  Payload ID: 1608;
  Gene Symbol: ABCA8;
  Gene Name: ATP-binding cassette, sub-family A (ABC1), member 8;
  ENSP ID: ENSP00000402814
MRKRKISVCQQTWALLCKNFLKKWRMKRESLMEWLNSLLLLLCLYIYPHSHQVNDFSSLLTMDLGRVDTFNESRFSVVYTPVTNTTQQIMNKVASTPFLAGKEVLGLPDEESIKEFTANYPEEIVRVTFTNTYSYHLKFLLGHGMPAKKEHKDHTAHCYETNEDVYCEVSVFWKEGFVALQAAINAAIIEITTNHSVMEELMSVTGKNMKMHSFIGQSGVITDLYLFSCIISFSSFIYYASVNVTRERKRMKALMTMMGLRDSAFWLSWGLLYAGFIFIMALFLALVIRSTQFIILSGFMVVFSLFLLYGLSLVALAFLMSILVKKSFLTGLVVFLLTVFWGCLGFTSLYRHLPASLEWILSLLSPFAFMLGMAQLLHLDYDLNSNAFPHPSDGSNLIVATNFMLAFDTCLYLALAIYFEKILPNEYGHRRPPLFFLKSSFWSQTQKTDHVALEDEMDADPSFHDSFEQAPPEFQGKEAIRIRNVTKEYKGKPDKIEALKDLVFDIYEGQITAILGHSGAGKSTLLNILSGLSVPTKGSVTIYNNKLSEMADLENLSKLTGVCPQSNVQFDFLTVRENLRLFAKIKGILPQEVDKEIQRVLLELEMKNIQDVLAQNLSGGQKRKLTFGIAILGDPQIFLLDEPTAGLDPFSRHQVWNLLKERKTDRVILFSTQFMDEADILADRKVFLSQGKLKCAGSSLFLKKKWGIGYHLSLQLNEICVEENITSLVKQHIPDAKLSAKSEGKLIYTLPLERTNKFPELYKDLDSYPDLGIENYGVSMTTLNEVFLKLEGKSTINESDIAILGEVQAEKADDTERLVEMEQVLSSLNKMRKTIGGVALWRQQICAIARVRLLKLKHERKALLALLLILMAGFCPLLVEYTMVKIYQNSYTWELSPHLYFLAPGQQPHDPLTQLLIINKTGASIDDFIQSVEHQNIALEVDAFGTRNGTDDPSYNGAITVCCNEKNYSFSLACNAKRLNCFPVLMDIVSNGLLGMVKPSVHIRTERSTFLENGQDNPIGFLAYIMFWLVLTSSCPPYIAMSSIDDYKNRARSQLRISGLSPSAYWFGQALVDVSLYFLVFVFIYLMSYISNFEDMLLTIIHIIQIPCAVGYSFSLIFMTYVISFIFRKGRKNSGIWSFCFYVVTVFSVAGFAFSIFESDIPFIFTFLIPPATMIGCLFLSSHLLFSSLFSEERMDVQPFLVFLIPFLHFIIFLFTLRCLEWKFGKKSMRKDPFFSSDVCQNPEEPEGEDEDVQMERVRTANALNSTNFDEKPVIIASCLRKEYAGKRKGCFSKRKNKIATRNVSFCVRKGEVLGLLGHNGAGKSTSIKVITGDTKPTAGQVLLKGSGGGDALEFLGYCPQENALWPNLTVRQHLEVYAAVKGLRKGDAEVAITRLVDALKLQDQLKSPVKTLSEGIKRKLCFVLSILGNPSVVLLDEPSTGMDPEGQQQMWQAIRATFRNTERGALLTTHYMAEAEAVCDRVAIMVSGRLRCIGSIQHLKSKFGKDYLLEMKVKNLAQVEPLHAEILRLFPQAARQERYSSLMVYKLPVEDVQPLAQAFFKLEKVKQSFDLEEYSLSQSTLEQVFLELSKEQELGDFEEDFDPSVKWKLLPQEEP

SEQ ID NO: 7627 - protein, 115 aa, Homo sapiens
  Payload ID: 1608;
  Gene Symbol: ABCA8;
  Gene Name: ATP-binding cassette, sub-family A (ABC1), member 8;
  ENSP ID: ENSP00000466126
MRKRKISVCQQTWALLCKNFLKKWRMKRESLMEWLNSLLLLLCLYIYPHSHQVNDFSSLLTMDLGRVDTFNESRFSVVYTPVTNTTQQIMNKVASTPFLAGKEVLGLPDEESIKE

SEQ ID NO: 7628 - protein, 702 aa, Homo sapiens
  Payload ID: 1608;
  Gene Symbol: ABCA8;
  Gene Name: ATP-binding cassette, sub-family A (ABC1), member 8;
  ENSP ID: ENSP00000467186
  MOD_RES (1)..(1): Any amino acid
XPASLEWILSLLSPFAFMLGMAQLLHLDYDLNSNAFPHPSDGSNLIVATNFMLAFDTCLYLALAIYFEKILPNEYGHRRPPLFFLKSSFWSQTQKTDHVALEDEMDADPSFHDSFEQAPPEFQGKEAIRIRNVTKEYKGKPDKIEALKDLVFDIYEGQITAILGHSGAGKSTLLNILSGLSVPTKGSVTIYNNKLSEMADLENLSKLTGVCPQSNVQFDFLTVRENLRLFAKIKGILPQEVDKEIQRVLLELEMKNIQDVLAQNLSGGQKRKLTFGIAILGDPQIFLLDEPTAGLDPFSRHQVWNLLKERKTDRVILFSTQFMDEADILADRKVFLSQGKLKCAGSSLFLKKKWGIGYHLSLQLNEICVEENITSLVKQHIPDAKLSAKSEGKLIYTLPLERTNKFPELYKDLDSYPDLGIENYGVSMTTLNEVFLKLEGKSTINESDIAILGEVQAEKADDTERLVEMEQVLSSLNKMRKTIGGVALWRQQICAIARVRLLKLKHERKALLALLLILMAGFCPLLVEYTMVKIYQNSYTWELSPHLYFLAPGQQPHDPLTQLLIINKTGASIDDFIQSVEHQNIALEVDAFGTRNGTDDPSYNGAITVCCNEKNYSFSLACNAKRLNCFPVLMDIVSNGLLGMVKPSVHIRTERSTFLEVNIYNLTIPDSPLSGISQITLLSAGILFLLSKPLHNKLTFGL

SEQ ID NO: 7629 - protein, 1621 aa, Homo sapiens
  Payload ID: 1608;
  Gene Symbol: ABCA8;
  Gene Name: ATP-binding cassette, sub-family A (ABC1), member 8;
  Uniprot ID:  O94911;
  ENSP ID: ENSP00000467271
MRKRKISVCQQTWALLCKNFLKKWRMKRESLMEWLNSLLLLLCLYIYPHSHQVNDFSSLLTMDLGRVDTFNESRFSVVYTPVTNTTQQIMNKVASTPFLAGKEVLGLPDEESIKEFTANYPEEIVRVTFTNTYSYHLKFLLGHGMPAKKEHKDHTAHCYETNEDVYCEVSVFWKEGFVALQAAINAAIIEITTNHSVMEELMSVTGKNMKMHSFIGQSGVITDLYLFSCIISFSSFIYYASVNVTRERKRMKALMTMMGLRDSAFWLSWGLLYAGFIFIMALFLALVIRSTQFIILSGFMVVFSLFLLYGLSLVALAFLMSILVKKSFLTGLVVFLLTVFWGCLGFTSLYRHLPASLEWILSLLSPFAFMLGMAQLLHLDYDLNSNAFPHPSDGSNLIVATNFMLAFDTCLYLALAIYFEKILPNEYGHRRPPLFFLKSSFWSQTQKTDHVALEDEMDADPSFHDSFEQAPPEFQGKEAIRIRNVTKEYKGKPDKIEALKDLVFDIYEGQITAILGHSGAGKSTLLNILSGLSVPTKGSVTIYNNKLSEMADLENLSKLTGVCPQSNVQFDFLTVRENLRLFAKIKGILPQEVDKEIQRVLLELEMKNIQDVLAQNLSGGQKRKLTFGIAILGDPQIFLLDEPTAGLDPFSRHQVWNLLKERKTDRVILFSTQFMDEADILADRKVFLSQGKLKCAGSSLFLKKKWGIGYHLSLQLNEICVEENITSLVKQHIPDAKLSAKSEGKLIYTLPLERTNKFPELYKDLDSYPDLGIENYGVSMTTLNEVFLKLEGKSTINESDIAILGEVQAEKADDTERLVEMEQVLSSLNKMRKTIGGVALWRQQICAIARVRLLKLKHERKALLALLLILMAGFCPLLVEYTMVKIYQNSYTWELSPHLYFLAPGQQPHDPLTQLLIINKTGASIDDFIQSVEHQNIALEVDAFGTRNGTDDPSYNGAITVCCNEKNYSFSLACNAKRLNCFPVLMDIVSNGLLGMVKPSVHIRTERSTFLENGQDNPIGFLAYIMFWLVLTSSCPPYIAMSSIDDYKNRARSQLRISGLSPSAYWFGQALVDVSLYFLVFVFIYLMSYISNFEDMLLTIIHIIQIPCAVGYSFSLIFMTYVISFIFRKGRKNSGIWSFCFYVVTVFSVAGFAFSIFESDIPFIFTFLIPPATMIGCLFLSSHLLFSSLFSEERMDVQPFLVFLIPFLHFIIFLFTLRCLEWKFGKKSMRKDPFFRISPRSSDVCQNPEEPEGEDEDVQMERVRTANALNSTNFDEKPVIIASCLRKEYAGKRKGCFSKRKNKIATRNVSFCVRKGEVLGLLGHNGAGKSTSIKVITGDTKPTAGQVLLKGSGGGDALEFLGYCPQENALWPNLTVRQHLEVYAAVKGLRKGDAEVAITRLVDALKLQDQLKSPVKTLSEGIKRKLCFVLSILGNPSVVLLDEPSTGMDPEGQQQMWQAIRATFRNTERGALLTTHYMAEAEAVCDRVAIMVSGRLRCIGSIQHLKSKFGKDYLLEMKVKNLAQVEPLHAEILRLFPQAARQERYSSLMVYKLPVEDVQPLAQAFFKLEKVKQSFDLEEYSLSQSTLEQVFLELSKEQELGDFEEDFDPSVKWKLLPQEEP

SEQ ID NO: 7630 - protein, 156 aa, Homo sapiens
  Payload ID: 1608;
  Gene Symbol: ABCA8;
  Gene Name: ATP-binding cassette, sub-family A (ABC1), member 8;
  ENSP ID: ENSP00000481467
MLGMAQLLHLDYDLNSNAFPHPSDGSNLIVATNFMLAFDTCLYLALAIYFEKILPNEYGHRRPPLFFLKSSFWSQTQKTDHVALEDEMDADPSFHDSFEQAPPEFQGKEAIRIRNVTKEYKGKPDKIEALKDLVFDIYEGQITAILVTVELESQHC

SEQ ID NO: 7631 - protein, 1624 aa, Homo sapiens
  Payload ID: 1609;
  Gene Symbol: ABCA9;
  Gene Name: ATP-binding cassette, sub-family A (ABC1), member 9;
  Uniprot ID:  Q8IUA7;
  ENSP ID: ENSP00000342216
MSKRRMSVGQQTWALLCKNCLKKWRMKRQTLLEWLFSFLLVLFLYLFFSNLHQVHDTPQMSSMDLGRVDSFNDTNYVIAFAPESKTTQEIMNKVASAPFLKGRTIMGWPDEKSMDELDLNYSIDAVRVIFTDTFSYHLKFSWGHRIPMMKEHRDHSAHCQAVNEKMKCEGSEFWEKGFVAFQAAINAAIIEIATNHSVMEQLMSVTGVHMKILPFVAQGGVATDFFIFFCIISFSTFIYYVSVNVTQERQYITSLMTMMGLRESAFWLSWGLMYAGFILIMATLMALIVKSAQIVVLTGFVMVFTLFLLYGLSLITLAFLMSVLIKKPFLTGLVVFLLIVFWGILGFPALYTRLPAFLEWTLCLLSPFAFTVGMAQLIHLDYDVNSNAHLDSSQNPYLIIATLFMLVFDTLLYLVLTLYFDKILPAEYGHRCSPLFFLKSCFWFQHGRANHVVLENETDSDPTPNDCFEPVSPEFCGKEAIRIKNLKKEYAGKCERVEALKGVVFDIYEGQITALLGHSGAGKTTLLNILSGLSVPTSGSVTVYNHTLSRMADIENISKFTGFCPQSNVQFGFLTVKENLRLFAKIKGILPHEVEKEVQRVVQELEMENIQDILAQNLSGGQNRKLTFGIAILGDPQVLLLDEPTAGLDPLSRHRIWNLLKEGKSDRVILFSTQFIDEADILADRKVFISNGKLKCAGSSLFLKKKWGIGYHLSLHLNERCDPESITSLVKQHISDAKLTAQSEEKLVYILPLERTNKFPELYRDLDRCSNQGIEDYGVSITTLNEVFLKLEGKSTIDESDIGIWGQLQTDGAKDIGSLVELEQVLSSFHETRKTISGVALWRQQVCAIAKVRFLKLKKERKSLWTILLLFGISFIPQLLEHLFYESYQKSYPWELSPNTYFLSPGQQPQDPLTHLLVINKTGSTIDNFLHSLRRQNIAIEVDAFGTRNGTDDPSYNGAIIVSGDEKDHRFSIACNTKRLNCFPVLLDVISNGLLGIFNSSEHIQTDRSTFFEEHMDYEYGYRSNTFFWIPMAASFTPYIAMSSIGDYKKKAHSQLRISGLYPSAYWFGQALVDVSLYFLILLLMQIMDYIFSPEEIIFIIQNLLIQILCSIGYVSSLVFLTYVISFIFRNGRKNSGIWSFFFLIVVIFSIVATDLNEYGFLGLFFGTMLIPPFTLIGSLFIFSEISPDSMDYLGASESEIVYLALLIPYLHFLIFLFILRCLEMNCRKKLMRKDPVFRISPRSNAIFPNPEEPEGEEEDIQMERMRTVNAMAVRDFDETPVIIASCLRKEYAGKKKNCFSKRKKKIATRNVSFCVKKGEVIGLLGHNGAGKSTTIKMITGDTKPTAGQVILKGSGGGEPLGFLGYCPQENALWPNLTVRQHLEVYAAVKGLRKGDAMIAITRLVDALKLQDQLKAPVKTLSEGIKRKLCFVLSILGNPSVVLLDEPSTGMDPEGQQQMWQVIRATFRNTERGALLTTHYMAEAEAVCDRVAIMVSGRLRCIGSIQHLKSKFGKDYLLEMKLKNLAQMEPLHAEILRLFPQAAQQERFSSLMVYKLPVEDVRPLSQAFFKLEIVKQSFDLEEYSLSQSTLEQVFLELSKEQELGDLEEDFDPSVKWKLLLQEEP

SEQ ID NO: 7632 - protein, 1586 aa, Homo sapiens
  Payload ID: 1609;
  Gene Symbol: ABCA9;
  Gene Name: ATP-binding cassette, sub-family A (ABC1), member 9;
  ENSP ID: ENSP00000394264
MSKRRMSVGQQTWALLCKNCLKKWRMKRQTLLEWLFSFLLVLFLYLFFSNLHQVHDTPQMSSMDLGRVDSFNDTNYVIAFAPESKTTQEIMNKVASAPFLKGRTIMGWPDEKSMDELDLNYSIDAVRVIFTDTFSYHLKFSWGHRIPMMKEHRDHSAHCQAVNEKMKCEGSEFWEKGFVAFQAAINAAIIEIATNHSVMEQLMSVTGVHMKILPFVAQGGVATDFFIFFCIISFSTFIYYVSVNVTQERQYITSLMTMMGLRESAFWLSWGLMYAGFILIMATLMALIVKSAQIVVLTGFVMVFTLFLLYGLSLITLAFLMSVLIKKPFLTGLVVFLLIVFWGILGFPALYTRLPAFLEWTLCLLSPFAFTVGMAQLIHLDYDVNSNAHLDSSQNPYLIIATLFMLVFDTLLYLVLTLYFDKILPAEYGHRCSPLFFLKSCFWFQHGRANHVVLENETDSDPTPNDCFEPVSPEFCGKEAIRIKNLKKEYAGKCERVEALKGVVFDIYEGQITALLGHSGAGKTTLLNILSGLSVPTSGSVTVYNHTLSRMADIENISKFTGFCPQSNVQFGFLTVKENLRLFAKIKGILPHEVEKEVQRVVQELEMENIQDILAQNLSGGQNRKLTFGIAILGDPQVLLLDEPTAGLDPLSRHRIWNLLKEGKSDRVILFSTQFIDEADILADRKVFISNGKLKCAGSSLFLKKKWGIGYHLSLHLNERCDPESITSLVKQHISDAKLTAQSEEKLVYILPLERTNKFPELYRDLDRCSNQGIEDYGVSITTLNEVFLKLEGKSTIDESDIGIWGQLQTDGAKDIGSLVELEQVLSSFHETRKTISGVALWRQQVCAIAKVRFLKLKKERKSLWTILLLFGISFIPQLLEHLFYESYQKSYPWELSPNTYFLSPGQQPQDPLTHLLVINKTGSTIDNFLHSLRRQNIAIEVDAFGTRNGTDDPSYNGAIIVSGDEKDHRFSIACNTKRLNCFPVLLDVISNGLLGIFNSSEHIQTDRSTFFEEHMDYEYGYRSNTFFWIPMAASFTPYIAMSSIGDYKKKAHSQLRISGLYPSAYWFGQALVDVSLYFLILLLMQIMDYIFSPEEIIFIIQNLLIQVVIFSIVATDLNEYGFLGLFFGTMLIPPFTLIGSLFIFSEISPDSMDYLGASESEIVYLALLIPYLHFLIFLFILRCLEMNCRKKLMRKDPVFRISPRSNAIFPNPEEPEGEEEDIQMERMRTVNAMAVRDFDETPVIIASCLRKEYAGKKKNCFSKRKKKIATRNVSFCVKKGEVIGLLGHNGAGKSTTIKMITGDTKPTAGQVILKGSGGGEPLGFLGYCPQENALWPNLTVRQHLEVYAAVKGLRKGDAMIAITRLVDALKLQDQLKAPVKTLSEGIKRKLCFVLSILGNPSVVLLDEPSTGMDPEGQQQMWQVIRATFRNTERGALLTTHYMAEAEAVCDRVAIMVSGRLRCIGSIQHLKSKFGKDYLLEMKLKNLAQMEPLHAEILRLFPQAAQQERFSSLMVYKLPVEDVRPLSQAFFKLEIVKQSFDLEEYSLSQSTLEQVFLELSKEQELGDLEEDFDPSVKWKLLLQEEP

SEQ ID NO: 7633 - protein, 89 aa, Homo sapiens
  Payload ID: 1609;
  Gene Symbol: ABCA9;
  Gene Name: ATP-binding cassette, sub-family A (ABC1), member 9;
  ENSP ID: ENSP00000465191
MSKRRMSVGQQTWALLCKNCLKKWRMKRQTLLEWLFSFLLVLFLYLFFSNLHQVHDTPQMSSMDLGRVDSFNDTNYVIAFAPESKTTQE

SEQ ID NO: 7634 - protein, 267 aa, Homo sapiens
  Payload ID: 1609;
  Gene Symbol: ABCA9;
  Gene Name: ATP-binding cassette, sub-family A (ABC1), member 9;
  Uniprot ID:  Q8IUA7;
  ENSP ID: ENSP00000465601
MSKRRMSVGQQTWALLCKNCLKKWRMKRQTLLEWLFSFLLVLFLYLFFSNLHQVHDTPQMSSMDLGRVDSFNDTNYVIAFAPESKTTQEIMNKVASAPFLKGRTIMGWPDEKSMDELDLNYSIDAVRVIFTDTFSYHLKFSWGHRIPMMKEHRDHSAHCQAVNEKMKCEGSEFWEKGFVAFQAAINAAIIEIATNHSVMEQLMSVTGVHMKILPFVAQGGVATDFFIFFCIISFSTFIYYVSVNVTQERQYITSLMTMMGLRESAFW

SEQ ID NO: 7635 - protein, 1280 aa, Homo sapiens
  Payload ID: 1610;
  Gene Symbol: ABCB1;
  Gene Name: ATP-binding cassette, sub-family B (MDR/TAP), member 1;
  Uniprot ID:  P08183;
  ENSP ID: ENSP00000265724
MDLEGDRNGGAKKKNFFKLNNKSEKDKKEKKPTVSVFSMFRYSNWLDKLYMVVGTLAAIIHGAGLPLMMLVFGEMTDIFANAGNLEDLMSNITNRSDINDTGFFMNLEEDMTRYAYYYSGIGAGVLVAAYIQVSFWCLAAGRQIHKIRKQFFHAIMRQEIGWFDVHDVGELNTRLTDDVSKINEGIGDKIGMFFQSMATFFTGFIVGFTRGWKLTLVILAISPVLGLSAAVWAKILSSFTDKELLAYAKAGAVAEEVLAAIRTVIAFGGQKKELERYNKNLEEAKRIGIKKAITANISIGAAFLLIYASYALAFWYGTTLVLSGEYSIGQVLTVFFSVLIGAFSVGQASPSIEAFANARGAAYEIFKIIDNKPSIDSYSKSGHKPDNIKGNLEFRNVHFSYPSRKEVKILKGLNLKVQSGQTVALVGNSGCGKSTTVQLMQRLYDPTEGMVSVDGQDIRTINVRFLREIIGVVSQEPVLFATTIAENIRYGRENVTMDEIEKAVKEANAYDFIMKLPHKFDTLVGERGAQLSGGQKQRIAIARALVRNPKILLLDEATSALDTESEAVVQVALDKARKGRTTIVIAHRLSTVRNADVIAGFDDGVIVEKGNHDELMKEKGIYFKLVTMQTAGNEVELENAADESKSEIDALEMSSNDSRSSLIRKRSTRRSVRGSQAQDRKLSTKEALDESIPPVSFWRIMKLNLTEWPYFVVGVFCAIINGGLQPAFAIIFSKIIGVFTRIDDPETKRQNSNLFSLLFLALGIISFITFFLQGFTFGKAGEILTKRLRYMVFRSMLRQDVSWFDDPKNTTGALTTRLANDAAQVKGAIGSRLAVITQNIANLGTGIIISFIYGWQLTLLLLAIVPIIAIAGVVEMKMLSGQALKDKKELEGSGKIATEAIENFRTVVSLTQEQKFEHMYAQSLQVPYRNSLRKAHIFGITFSFTQAMMYFSYAGCFRFGAYLVAHKLMSFEDVLLVFSAVVFGAMAVGQVSSFAPDYAKAKISAAHIIMIIEKTPLIDSYSTEGLMPNTLEGNVTFGEVVFNYPTRPDIPVLQGLSLEVKKGQTLALVGSSGCGKSTVVQLLERFYDPLAGKVLLDGKEIKRLNVQWLRAHLGIVSQEPILFDCSIAENIAYGDNSRVVSQEEIVRAAKEANIHAFIESLPNKYSTKVGDKGTQLSGGQKQRIAIARALVRQPHILLLDEATSALDTESEKVVQEALDKAREGRTCIVIAHRLSTIQNADLIVVFQNGRVKEHGTHQQLLAQKGIYFSMVSVQAGTKRQ

SEQ ID NO: 7636 - protein, 48 aa, Homo sapiens
  Payload ID: 1610;
  Gene Symbol: ABCB1;
  Gene Name: ATP-binding cassette, sub-family B (MDR/TAP), member 1;
  ENSP ID: ENSP00000399419
MDLEGDRNGGAKKKNFFKLNNKSEKDKKEKKPTVSVFSMFRYSNWLDK

SEQ ID NO: 7637 - protein, 1216 aa, Homo sapiens
  Payload ID: 1610;
  Gene Symbol: ABCB1;
  Gene Name: ATP-binding cassette, sub-family B (MDR/TAP), member 1;
  Uniprot ID:  P08183;
  ENSP ID: ENSP00000444095
MDLEGDRNGGAKKKNFFKLNNKSEKDKKEKKPTVSVFSMFRYSNWLDKLYMVVGTLAAIIHGAGLPLMMLVFGEMTDIFANAGNLEDLMSNITNRSDINDTGFFMNLEEDMTSDVSKINEGIGDKIGMFFQSMATFFTGFIVGFTRGWKLTLVILAISPVLGLSAAVWAKILSSFTDKELLAYAKAGAVAEEVLAAIRTVIAFGGQKKELERYNKNLEEAKRIGIKKAITANISIGAAFLLIYASYALAFWYGTTLVLSGEYSIGQVLTVFFSVLIGAFSVGQASPSIEAFANARGAAYEIFKIIDNKPSIDSYSKSGHKPDNIKGNLEFRNVHFSYPSRKEVKILKGLNLKVQSGQTVALVGNSGCGKSTTVQLMQRLYDPTEGMVSVDGQDIRTINVRFLREIIGVVSQEPVLFATTIAENIRYGRENVTMDEIEKAVKEANAYDFIMKLPHKFDTLVGERGAQLSGGQKQRIAIARALVRNPKILLLDEATSALDTESEAVVQVALDKARKGRTTIVIAHRLSTVRNADVIAGFDDGVIVEKGNHDELMKEKGIYFKLVTMQTAGNEVELENAADESKSEIDALEMSSNDSRSSLIRKRSTRRSVRGSQAQDRKLSTKEALDESIPPVSFWRIMKLNLTEWPYFVVGVFCAIINGGLQPAFAIIFSKIIGVFTRIDDPETKRQNSNLFSLLFLALGIISFITFFLQGFTFGKAGEILTKRLRYMVFRSMLRQDVSWFDDPKNTTGALTTRLANDAAQVKGAIGSRLAVITQNIANLGTGIIISFIYGWQLTLLLLAIVPIIAIAGVVEMKMLSGQALKDKKELEGSGKIATEAIENFRTVVSLTQEQKFEHMYAQSLQVPYRNSLRKAHIFGITFSFTQAMMYFSYAGCFRFGAYLVAHKLMSFEDVLLVFSAVVFGAMAVGQVSSFAPDYAKAKISAAHIIMIIEKTPLIDSYSTEGLMPNTLEGNVTFGEVVFNYPTRPDIPVLQGLSLEVKKGQTLALVGSSGCGKSTVVQLLERFYDPLAGKVLLDGKEIKRLNVQWLRAHLGIVSQEPILFDCSIAENIAYGDNSRVVSQEEIVRAAKEANIHAFIESLPNKYSTKVGDKGTQLSGGQKQRIAIARALVRQPHILLLDEATSALDTESEKVVQEALDKAREGRTCIVIAHRLSTIQNADLIVVFQNGRVKEHGTHQQLLAQKGIYFSMVSVQAGTKRQ

SEQ ID NO: 7638 - protein, 1280 aa, Homo sapiens; identical to SEQ ID NO: 7635
  Payload ID: 1610;
  Gene Symbol: ABCB1;
  Gene Name: ATP-binding cassette, sub-family B (MDR/TAP), member 1;
  Uniprot ID:  P08183;
  ENSP ID: ENSP00000478255

SEQ ID NO: 7639 - protein, 738 aa, Homo sapiens
  Payload ID: 1611;
  Gene Symbol: ABCB10;
  Gene Name: ATP-binding cassette, sub-family B (MDR/TAP), member 10;
  Uniprot ID:  Q9NRK6;
  ENSP ID: ENSP00000355637
MRGPPAWPLRLLEPPSPAEPGRLLPVACVWAAASRVPGSLSPFTGLRPARLWGAGPALLWGVGAARRWRSGCRGGGPGASRGVLGLARLLGLWARGPGSCRCGAFAGPGAPRLPRARFPGGPAAAAWAGDEAWRRGPAAPPGDKGRLRPAAAGLPEARKLLGLAYPERRRLAAAVGFLTMSSVISMSAPFFLGKIIDVIYTNPTVDYSDNLTRLCLGLSAVFLCGAAANAIRVYLMQTSGQRIVNRLRTSLFSSILRQEVAFFDKTRTGELINRLSSDTALLGRSVTENLSDGLRAGAQASVGISMMFFVSPNLATFVLSVVPPVSIIAVIYGRYLRKLTKVTQDSLAQATQLAEERIGNVRTVRAFGKEMTEIEKYASKVDHVMQLARKEAFARAGFFGATGLSGNLIVLSVLYKGGLLMGSAHMTVGELSSFLMYAFWVGISIGGLSSFYSELMKGLGAGGRLWELLEREPKLPFNEGVILNEKSFQGALEFKNVHFAYPARPEVPIFQDFSLSIPSGSVTALVGPSGSGKSTVLSLLLRLYDPASGTISLDGHDIRQLNPVWLRSKIGTVSQEPILFSCSIAENIAYGADDPSSVTAEEIQRVAEVANAVAFIRNFPQGFNTVVGEKGVLLSGGQKQRIAIARALLKNPKILLLDEATSALDAENEYLVQEALDRLMDGRTVLVIAHRLSTIKNANMVAVLDQGKITEYGKHEELLSKPNGIYRKLMNKQSFISA

SEQ ID NO: 7640 - protein, 1321 aa, Homo sapiens
  Payload ID: 1612;
  Gene Symbol: ABCB11;
  Gene Name: ATP-binding cassette, sub-family B (MDR/TAP), member 11;
  Uniprot ID:  O95342;
  ENSP ID: ENSP00000263817
MSDSVILRSIKKFGEENDGFESDKSYNNDKKSRLQDEKKGDGVRVGFFQLFRFSSSTDIWLMFVGSLCAFLHGIAQPGVLLIFGTMTDVFIDYDVELQELQIPGKACVNNTIVWTNSSLNQNMTNGTRCGLLNIESEMIKFASYYAGIAVAVLITGYIQICFWVIAAARQIQKMRKFYFRRIMRMEIGWFDCNSVGELNTRFSDDINKINDAIADQMALFIQRMTSTICGFLLGFFRGWKLTLVIISVSPLIGIGAATIGLSVSKFTDYELKAYAKAGVVADEVISSMRTVAAFGGEKREVERYEKNLVFAQRWGIRKGIVMGFFTGFVWCLIFLCYALAFWYGSTLVLDEGEYTPGTLVQIFLSVIVGALNLGNASPCLEAFATGRAAATSIFETIDRKPIIDCMSEDGYKLDRIKGEIEFHNVTFHYPSRPEVKILNDLNMVIKPGEMTALVGPSGAGKSTALQLIQRFYDPCEGMVTVDGHDIRSLNIQWLRDQIGIVEQEPVLFSTTIAENIRYGREDATMEDIVQAAKEANAYNFIMDLPQQFDTLVGEGGGQMSGGQKQRVAIARALIRNPKILLLDMATSALDNESEAMVQEVLSKIQHGHTIISVAHRLSTVRAADTIIGFEHGTAVERGTHEELLERKGVYFTLVTLQSQGNQALNEEDIKDATEDDMLARTFSRGSYQDSLRASIRQRSKSQLSYLVHEPPLAVVDHKSTYEEDRKDKDIPVQEEVEPAPVRRILKFSAPEWPYMLVGSVGAAVNGTVTPLYAFLFSQILGTFSIPDKEEQRSQINGVCLLFVAMGCVSLFTQFLQGYAFAKSGELLTKRLRKFGFRAMLGQDIAWFDDLRNSPGALTTRLATDASQVQGAAGSQIGMIVNSFTNVTVAMIIAFSFSWKLSLVILCFFPFLALSGATQTRMLTGFASRDKQALEMVGQITNEALSNIRTVAGIGKERRFIEALETELEKPFKTAIQKANIYGFCFAFAQCIMFIANSASYRYGGYLISNEGLHFSYVFRVISAVVLSATALGRAFSYTPSYAKAKISAARFFQLLDRQPPISVYNTAGEKWDNFQGKIDFVDCKFTYPSRPDSQVLNGLSVSISPGQTLAFVGSSGCGKSTSIQLLERFYDPDQGKVMIDGHDSKKVNVQFLRSNIGIVSQEPVLFACSIMDNIKYGDNTKEIPMERVIAAAKQAQLHDFVMSLPEKYETNVGSQGSQLSRGEKQRIAIARAIVRDPKILLLDEATSALDTESEKTVQVALDKAREGRTCIVIAHRLSTIQNADIIAVMAQGVVIEKGTHEELMAQKGAYYKLVTTGSPIS

SEQ ID NO: 7641 - protein, 72 aa, Homo sapiens
  Payload ID: 1612;
  Gene Symbol: ABCB11;
  Gene Name: ATP-binding cassette, sub-family B (MDR/TAP), member 11;
  ENSP ID: ENSP00000416058
DIRSLNIQWLRDQIGIVEQEPVLFSTTIAENIRYGREDATMEDIVQAAKEANAYNFIMDLPQGYFFQWKSEQ

SEQ ID NO: 7642 - protein, 451 aa, Homo sapiens
  Payload ID: 1612;
  Gene Symbol: ABCB11;
  Gene Name: ATP-binding cassette, sub-family B (MDR/TAP), member 11;
  ENSP ID: ENSP00000480206
AAGSQIGMIVNSFTNVTVAMIIAFSFSWKLSLVILCFFPFLALSGATQTRMLTGFASRDKQALEMVGQITNEALSNIRTVAGIGKERRFIEALETELEKPFKTAIQKANIYGFCFAFAQCIMFIANSASYRYGGYLISNEGLHFSYVFRVISAVVLSATALGRAFSYTPSYAKAKISAARFFQLLDRQPPISVYNTAGEKWDNFQGKIDFVDCKFTYPSRPDSQVLNGLSVSISPGQTLAFVGSSGCGKSTSIQLLERFYDPDQGKVMIDGHDSKKVNVQFLRSNIGIVSQEPVLFACSIMDNIKYGDNTKEIPMERVIAAAKQAQLHDFVMSLPEKYETNVGSQGSQLSRGEKQRIAIARAIVRDPKILLLDEATSALDTESEKTVQVALDKAREGRTCIVIAHRLSTIQNADIIAVMAQGVVIEKGTHEELMAQKGAYYKLVTTGSPIS

SEQ ID NO: 7643 - protein, 1286 aa, Homo sapiens
  Payload ID: 1613;
  Gene Symbol: ABCB4;
  Gene Name: ATP-binding cassette, sub-family B (MDR/TAP), member 4;
  Uniprot ID:  P21439;
  ENSP ID: ENSP00000265723
MDLEAAKNGTAWRPTSAEGDFELGISSKQKRKKTKTVKMIGVLTLFRYSDWQDKLFMSLGTIMAIAHGSGLPLMMIVFGEMTDKFVDTAGNFSFPVNFSLSLLNPGKILEEEMTRYAYYYSGLGAGVLVAAYIQVSFWTLAAGRQIRKIRQKFFHAILRQEIGWFDINDTTELNTRLTDDISKISEGIGDKVGMFFQAVATFFAGFIVGFIRGWKLTLVIMAISPILGLSAAVWAKILSAFSDKELAAYAKAGAVAEEALGAIRTVIAFGGQNKELERYQKHLENAKEIGIKKAISANISMGIAFLLIYASYALAFWYGSTLVISKEYTIGNAMTVFFSILIGAFSVGQAAPCIDAFANARGAAYVIFDIIDNNPKIDSFSERGHKPDSIKGNLEFNDVHFSYPSRANVKILKGLNLKVQSGQTVALVGSSGCGKSTTVQLIQRLYDPDEGTINIDGQDIRNFNVNYLREIIGVVSQEPVLFSTTIAENICYGRGNVTMDEIKKAVKEANAYEFIMKLPQKFDTLVGERGAQLSGGQKQRIAIARALVRNPKILLLDEATSALDTESEAEVQAALDKAREGRTTIVIAHRLSTVRNADVIAGFEDGVIVEQGSHSELMKKEGVYFKLVNMQTSGSQIQSEEFELNDEKAATRMAPNGWKSRLFRHSTQKNLKNSQMCQKSLDVETDGLEANVPPVSFLKVLKLNKTEWPYFVVGTVCAIANGGLQPAFSVIFSEIIAIFGPGDDAVKQQKCNIFSLIFLFLGIISFFTFFLQGFTFGKAGEILTRRLRSMAFKAMLRQDMSWFDDHKNSTGALSTRLATDAAQVQGATGTRLALIAQNIANLGTGIIISFIYGWQLTLLLLAVVPIIAVSGIVEMKLLAGNAKRDKKELEAAGKIATEAIENIRTVVSLTQERKFESMYVEKLYGPYRNSVQKAHIYGITFSISQAFMYFSYAGCFRFGAYLIVNGHMRFRDVILVFSAIVFGAVALGHASSFAPDYAKAKLSAAHLFMLFERQPLIDSYSEEGLKPDKFEGNITFNEVVFNYPTRANVPVLQGLSLEVKKGQTLALVGSSGCGKSTVVQLLERFYDPLAGTVFVDFGFQLLDGQEAKKLNVQWLRAQLGIVSQEPILFDCSIAENIAYGDNSRVVSQDEIVSAAKAANIHPFIETLPHKYETRVGDKGTQLSGGQKQRIAIARALIRQPQILLLDEATSALDTESEKVVQEALDKAREGRTCIVIAHRLSTIQNADLIVVFQNGRVKEHGTHQQLLAQKGIYFSMVSVQAGTQNL

SEQ ID NO: 7644 - protein, 1232 aa, Homo sapiens
  Payload ID: 1613;
  Gene Symbol: ABCB4;
  Gene Name: ATP-binding cassette, sub-family B (MDR/TAP), member 4;
  Uniprot ID:  P21439;
  ENSP ID: ENSP00000351172
MDLEAAKNGTAWRPTSAEGDFELGISSKQKRKKTKTVKMIGVLTLFRYSDWQDKLFMSLGTIMAIAHGSGLPLMMIVFGEMTDKFVDTAGNFSFPVNFSLSLLNPGKILEEEMTRYAYYYSGLGAGVLVAAYIQVSFWTLAAGRQIRKIRQKFFHAILRQEIGWFDINDTTELNTRLTDDISKISEGIGDKVGMFFQAVATFFAGFIVGFIRGWKLTLVIMAISPILGLSAAVWAKILSAFSDKELAAYAKAGAVAEEALGAIRTVIAFGGQNKELERYQKHLENAKEIGIKKAISANISMGIAFLLIYASYALAFWYGSTLVISKEYTIGNAMTVFFSILIGAFSVGQAAPCIDAFANARGAAYVIFDIIDNNPKIDSFSERGHKPDSIKGNLEFNDVHFSYPSRANVKILKGLNLKVQSGQTVALVGSSGCGKSTTVQLIQRLYDPDEGTINIDGQDIRNFNVNYLREIIGVVSQEPVLFSTTIAENICYGRGNVTMDEIKKAVKEANAYEFIMKLPQKFDTLVGERGAQLSGGQKQRIAIARALVRNPKILLLDEATSALDTESEAEVQAALDKAREGRTTIVIAHRLSTVRNADVIAGFEDGVIVEQGSHSELMKKEGVYFKLVNMQTSGSQIQSEEFELNDEKAATRMAPNGWKSRLFRHSTQKNLKNSQMCQKSLDVETDGLEANVPPVSFLKVLKLNKTEWPYFVVGTVCAIANGGLQPAFSVIFSEIIAIFGPGDDAVKQQKCNIFSLIFLFLGIISFFTFFLQGFTFGKAGEILTRRLRSMAFKAMLRQDMSWFDDHKNSTGALSTRLATDAAQVQGATGTRLALIAQNIANLGTGIIISFIYGWQLTLLLLAVVPIIAVSGIVEMKLLAGNAKRDKKELEAAGKIATEAIENIRTVVSLTQERKFESMYVEKLYGPYRVFSAIVFGAVALGHASSFAPDYAKAKLSAAHLFMLFERQPLIDSYSEEGLKPDKFEGNITFNEVVFNYPTRANVPVLQGLSLEVKKGQTLALVGSSGCGKSTVVQLLERFYDPLAGTVLLDGQEAKKLNVQWLRAQLGIVSQEPILFDCSIAENIAYGDNSRVVSQDEIVSAAKAANIHPFIETLPHKYETRVGDKGTQLSGGQKQRIAIARALIRQPQILLLDEATSALDTESEKVVQEALDKAREGRTCIVIAHRLSTIQNADLIVVFQNGRVKEHGTHQQLLAQKGIYFSMVSVQAGTQNL

SEQ ID NO: 7645 - protein, 1279 aa, Homo sapiens
  Payload ID: 1613;
  Gene Symbol: ABCB4;
  Gene Name: ATP-binding cassette, sub-family B (MDR/TAP), member 4;
  Uniprot ID:  P21439;
  ENSP ID: ENSP00000352135
MDLEAAKNGTAWRPTSAEGDFELGISSKQKRKKTKTVKMIGVLTLFRYSDWQDKLFMSLGTIMAIAHGSGLPLMMIVFGEMTDKFVDTAGNFSFPVNFSLSLLNPGKILEEEMTRYAYYYSGLGAGVLVAAYIQVSFWTLAAGRQIRKIRQKFFHAILRQEIGWFDINDTTELNTRLTDDISKISEGIGDKVGMFFQAVATFFAGFIVGFIRGWKLTLVIMAISPILGLSAAVWAKILSAFSDKELAAYAKAGAVAEEALGAIRTVIAFGGQNKELERYQKHLENAKEIGIKKAISANISMGIAFLLIYASYALAFWYGSTLVISKEYTIGNAMTVFFSILIGAFSVGQAAPCIDAFANARGAAYVIFDIIDNNPKIDSFSERGHKPDSIKGNLEFNDVHFSYPSRANVKILKGLNLKVQSGQTVALVGSSGCGKSTTVQLIQRLYDPDEGTINIDGQDIRNFNVNYLREIIGVVSQEPVLFSTTIAENICYGRGNVTMDEIKKAVKEANAYEFIMKLPQKFDTLVGERGAQLSGGQKQRIAIARALVRNPKILLLDEATSALDTESEAEVQAALDKAREGRTTIVIAHRLSTVRNADVIAGFEDGVIVEQGSHSELMKKEGVYFKLVNMQTSGSQIQSEEFELNDEKAATRMAPNGWKSRLFRHSTQKNLKNSQMCQKSLDVETDGLEANVPPVSFLKVLKLNKTEWPYFVVGTVCAIANGGLQPAFSVIFSEIIAIFGPGDDAVKQQKCNIFSLIFLFLGIISFFTFFLQGFTFGKAGEILTRRLRSMAFKAMLRQDMSWFDDHKNSTGALSTRLATDAAQVQGATGTRLALIAQNIANLGTGIIISFIYGWQLTLLLLAVVPIIAVSGIVEMKLLAGNAKRDKKELEAAGKIATEAIENIRTVVSLTQERKFESMYVEKLYGPYRNSVQKAHIYGITFSISQAFMYFSYAGCFRFGAYLIVNGHMRFRDVILVFSAIVFGAVALGHASSFAPDYAKAKLSAAHLFMLFERQPLIDSYSEEGLKPDKFEGNITFNEVVFNYPTRANVPVLQGLSLEVKKGQTLALVGSSGCGKSTVVQLLERFYDPLAGTVLLDGQEAKKLNVQWLRAQLGIVSQEPILFDCSIAENIAYGDNSRVVSQDEIVSAAKAANIHPFIETLPHKYETRVGDKGTQLSGGQKQRIAIARALIRQPQILLLDEATSALDTESEKVVQEALDKAREGRTCIVIAHRLSTIQNADLIVVFQNGRVKEHGTHQQLLAQKGIYFSMVSVQAGTQNL

SEQ ID NO: 7646 - protein, 1232 aa, Homo sapiens; identical to SEQ ID NO: 7644
  Payload ID: 1613;
  Gene Symbol: ABCB4;
  Gene Name: ATP-binding cassette, sub-family B (MDR/TAP), member 4;
  Uniprot ID:  P21439;
  ENSP ID: ENSP00000392983

SEQ ID NO: 7647 - protein, 61 aa, Homo sapiens
  Payload ID: 1613;
  Gene Symbol: ABCB4;
  Gene Name: ATP-binding cassette, sub-family B (MDR/TAP), member 4;
  ENSP ID: ENSP00000394511
MDLEAAKNGTAWRPTSAEGDFELGISSKQKRKKTKTVKMIGVLTLFRYSDWQDKLFMSLGT

SEQ ID NO: 7648 - protein, 99 aa, Homo sapiens
  Payload ID: 1613;
  Gene Symbol: ABCB4;
  Gene Name: ATP-binding cassette, sub-family B (MDR/TAP), member 4;
  ENSP ID: ENSP00000395716
  MOD_RES (1)..(1): Any amino acid
XIRQPQILLLDEATSALDTESEKVVQEALDKAREGRTCIVIAHRLSTIQNADLIVVFQNGRVKEHGTHQQLLAQKGIYFSMINLEDPIWGLLRHLKFES

SEQ ID NO: 7649 - protein, 812 aa, Homo sapiens
  Payload ID: 1614;
  Gene Symbol: ABCB5;
  Gene Name: ATP-binding cassette, sub-family B (MDR/TAP), member 5;
  Uniprot ID:  Q2M3G0;
  ENSP ID: ENSP00000258738
MVDENDIRALNVRHYRDHIGVVSQEPVLFGTTISNNIKYGRDDVTDEEMERAAREANAYDFIMEFPNKFNTLVGEKGAQMSGGQKQRIAIARALVRNPKILILDEATSALDSESKSAVQAALEKASKGRTTIVVAHRLSTIRSADLIVTLKDGMLAEKGAHAELMAKRGLYYSLVMSQDIKKADEQMESMTYSTERKTNSLPLHSVKSIKSDFIDKAEESTQSKEISLPEVSLLKILKLNKPEWPFVVLGTLASVLNGTVHPVFSIIFAKIITMFGNNDKTTLKHDAEIYSMIFVILGVICFVSYFMQGLFYGRAGEILTMRLRHLAFKAMLYQDIAWFDEKENSTGGLTTILAIDIAQIQGATGSRIGVLTQNATNMGLSVIISFIYGWEMTFLILSIAPVLAVTGMIETAAMTGFANKDKQELKHAGKIATEALENIRTIVSLTREKAFEQMYEEMLQTQHRNTSKKAQIIGSCYAFSHAFIYFAYAAGFRFGAYLIQAGRMTPEGMFIVFTAIAYGAMAIGETLVLAPEYSKAKSGAAHLFALLEKKPNIDSRSQEGKKPDTCEGNLEFREVSFFYPCRPDVFILRGLSLSIERGKTVAFVGSSGCGKSTSVQLLQRLYDPVQGQVLFDGVDAKELNVQWLRSQIAIVPQEPVLFNCSIAENIAYGDNSRVVPLDEIKEAANAANIHSFIEGLPEKYNTQVGLKGAQLSGGQKQRLAIARALLQKPKILLLDEATSALDNDSEKVVQHALDKARTGRTCLVVTHRLSAIQNADLIVVLHNGKIKEQGTHQELLRNRDIYFKLVNAQSVQ

SEQ ID NO: 7650 - protein, 126 aa, Homo sapiens
  Payload ID: 1614;
  Gene Symbol: ABCB5;
  Gene Name: ATP-binding cassette, sub-family B (MDR/TAP), member 5;
  Uniprot ID:  Q2M3G0;
  ENSP ID: ENSP00000383899
MVDENDIRALNVRHYRDHIGVVSQEPVLFGTTISNNIKYGRDDVTDEEMERAAREANAYDFIMEFPNKFNTLVGEKGAQMSGGQKQRIAIARALVRNPKILILDEATSALDSESKSAVQAALEKKK

SEQ ID NO: 7651 - protein, 1257 aa, Homo sapiens
  Payload ID: 1614;
  Gene Symbol: ABCB5;
  Gene Name: ATP-binding cassette, sub-family B (MDR/TAP), member 5;
  Uniprot ID:  Q2M3G0;
  ENSP ID: ENSP00000384881
MENSERAEEMQENYQRNGTAEEQPKLRKEAVGSIEIFRFADGLDITLMILGILASLVNGACLPLMPLVLGEMSDNLISGCLVQTNTTNYQNCTQSQEKLNEDMTLLTLYYVGIGVAALIFGYIQISLWIITAARQTKRIRKQFFHSVLAQDIGWFDSCDIGELNTRMTDDIDKISDGIGDKIALLFQNMSTFSIGLAVGLVKGWKLTLVTLSTSPLIMASAAACSRMVISLTSKELSAYSKAGAVAEEVLSSIRTVIAFRAQEKELQRYTQNLKDAKDFGIKRTIASKVSLGAVYFFMNGTYGLAFWYGTSLILNGEPGYTIGTVLAVFFSVIHSSYCIGAAVPHFETFAIARGAAFHIFQVIDKKPSIDNFSTAGYKPESIEGTVEFKNVSFNYPSRPSIKILKGLNLRIKSGETVALVGLNGSGKSTVVQLLQRLYDPDDGFIMVDENDIRALNVRHYRDHIGVVSQEPVLFGTTISNNIKYGRDDVTDEEMERAAREANAYDFIMEFPNKFNTLVGEKGAQMSGGQKQRIAIARALVRNPKILILDEATSALDSESKSAVQAALEKASKGRTTIVVAHRLSTIRSADLIVTLKDGMLAEKGAHAELMAKRGLYYSLVMSQDIKKADEQMESMTYSTERKTNSLPLHSVKSIKSDFIDKAEESTQSKEISLPEVSLLKILKLNKPEWPFVVLGTLASVLNGTVHPVFSIIFAKIITMFGNNDKTTLKHDAEIYSMIFVILGVICFVSYFMQGLFYGRAGEILTMRLRHLAFKAMLYQDIAWFDEKENSTGGLTTILAIDIAQIQGATGSRIGVLTQNATNMGLSVIISFIYGWEMTFLILSIAPVLAVTGMIETAAMTGFANKDKQELKHAGKIATEALENIRTIVSLTREKAFEQMYEEMLQTQHRNTSKKAQIIGSCYAFSHAFIYFAYAAGFRFGAYLIQAGRMTPEGMFIVFTAIAYGAMAIGETLVLAPEYSKAKSGAAHLFALLEKKPNIDSRSQEGKKPDTCEGNLEFREVSFFYPCRPDVFILRGLSLSIERGKTVAFVGSSGCGKSTSVQLLQRLYDPVQGQVLFDGVDAKELNVQWLRSQIAIVPQEPVLFNCSIAENIAYGDNSRVVPLDEIKEAANAANIHSFIEGLPEKYNTQVGLKGAQLSGGQKQRLAIARALLQKPKILLLDEATSALDNDSEKVVQHALDKARTGRTCLVVTHRLSAIQNADLIVVLHNGKIKEQGTHQELLRNRDIYFKLVNAQSVQ

SEQ ID NO: 7652 - protein, 314 aa, Homo sapiens
  Payload ID: 1614;
  Gene Symbol: ABCB5;
  Gene Name: ATP-binding cassette, sub-family B (MDR/TAP), member 5;
  ENSP ID: ENSP00000398692
GWEMTFLILSIAPVLAVTGMIETAAMTGFANKDKQELKHAGKIATEALENIRTIVSLTREKAFEQMYEEMLQTQHRNTSKKAQIIGSCYAFSHAFIYFAYAAGFRFGAYLIQAGRMTPEGMFIVFTAIAYGAMAIGETLVLAPEYSKAKSGAAHLFALLEKKPNIDSRSQEGKKPDTCEGNLEFREVSFFYPCRPDVFILRGLSLSIERGKTVAFVGSSGCGKSTSVQLLQRLYDPVQGQVLFDGVDAKELNVQWLRSQIAIVPQEPVLFNCSIAENIAYGDNSRVVPLDEIKEAANAANIHSFIEGLPESLEC

SEQ ID NO: 7653 - protein, 131 aa, Homo sapiens
  Payload ID: 1614;
  Gene Symbol: ABCB5;
  Gene Name: ATP-binding cassette, sub-family B (MDR/TAP), member 5;
  Uniprot ID:  Q2M3G0;
  ENSP ID: ENSP00000406730
MVDENDIRALNVRHYRDHIGVVSQEPVLFGTTISNNIKYGRDDVTDEEMERAAREANAYDFIMEFPNKFNTLVGEKGAQMSGGQKQRIAIARALVRNPKILILDEATSALDSESKSAVQAALEKDTPRYSF

SEQ ID NO: 7654 - protein, 842 aa, Homo sapiens
  Payload ID: 1615;
  Gene Symbol: ABCB6;
  Gene Name: ATP-binding cassette, sub-family B (MDR/TAP), member 6 (Langereis blood group);
  Uniprot ID:  Q9NP58;
  ENSP ID: ENSP00000265316
MVTVGNYCEAEGPVGPAWMQDGLSPCFFFTLVPSTRMALGTLALVLALPCRRRERPAGADSLSWGAGPRISPYVLQLLLATLQAALPLAGLAGRVGTARGAPLPSYLLLASVLESLAGACGLWLLVVERSQARQRLAMGIWIKFRHSPGLLLLWTVAFAAENLALVSWNSPQWWWARADLGQQVQFSLWVLRYVVSGGLFVLGLWAPGLRPQSYTLQVHEEDQDVERSQVRSAAQQSTWRDFGRKLRLLSGYLWPRGSPALQLVVLICLGLMGLERALNVLVPIFYRNIVNLLTEKAPWNSLAWTVTSYVFLKFLQGGGTGSTGFVSNLRTFLWIRVQQFTSRRVELLIFSHLHELSLRWHLGRRTGEVLRIADRGTSSVTGLLSYLVFNVIPTLADIIIGIIYFSMFFNAWFGLIVFLCMSLYLTLTIVVTEWRTKFRRAMNTQENATRARAVDSLLNFETVKYYNAESYEVERYREAIIKYQGLEWKSSASLVLLNQTQNLVIGLGLLAGSLLCAYFVTEQKLQVGDYVLFGTYIIQLYMPLNWFGTYYRMIQTNFIDMENMFDLLKEETEVKDLPGAGPLRFQKGRIEFENVHFSYADGRETLQDVSFTVMPGQTLALVGPSGAGKSTILRLLFRFYDISSGCIRIDGQDISQVTQASLRSHIGVVPQDTVLFNDTIADNIRYGRVTAGNDEVEAAAQAAGIHDAIMAFPEGYRTQVGERGLKLSGGEKQRVAIARTILKAPGIILLDEATSALDTSNERAIQASLAKVCANRTTIVVAHRLSTVVNADQILVIKDGCIVERGRHEALLSRGGVYADMWQLQQGQEETSEDTKPQTMER

SEQ ID NO: 7655 - protein, 690 aa, Homo sapiens
  Payload ID: 1615;
  Gene Symbol: ABCB6;
  Gene Name: ATP-binding cassette, sub-family B (MDR/TAP), member 6 (Langereis blood group);
  ENSP ID: ENSP00000295750
  MOD_RES (1)..(1): Any amino acid
XLLASVLESLAGACGLWLLVVERSQARQRLAMGIWIKFRHSPGLLLLWTVAFAAENLALVSWNSPQWWWARADLGQQVRSAAQQSTWRDFGRKLRLLSGYLWPRGSPALQLVVLICLGLMGLERALNVLVPIFYRNIVNLLTEKAPWNSLAWTVTSYVFLKFLQGGGTGSTGFVSNLRTFLWIRVQQFTSRRVELLIFSHLHELSLRWHLGRRTGEVLRIADRGTSSVTGLLSYLVFNVIPTLADIIIGIIYFSMFFNAWFGLIVFLCMSLYLTLTIVVTEWRTKFRRAMNTQENATRARAVDSLLNFETVKYYNAESYEVERYREAIIKYQGLEWKSSASLVLLNQTQNLVIGLGLLAGSLLCAYFVTEQKLQVGDYVLFGTYIIQLYMPLNWFGTYYRMIQTNFIDMENMFDLLKEETEVKDLPGAGPLRFQKGRIEFENVHFSYADGRETLQDVSFTVMPGQTLALVGPSGAGKSTILRLLFRFYDISSGCIRIDGQDISQVTQASLRSHIGVVPQDTVLFNDTIADNIRYGRVTAGNDEVEAAAQAAGIHDAIMAFPEGYRTQVGERGLKLSGGEKQRVAIARTILKAPGIILLDEATSALDTSNERAIQASLAKVCANRTTIVVAHRLSTVVNADQILVIKDGCIVERGRHEALLSRGGVYADMWQLQQGQEETSEDTKPQTMER

SEQ ID NO: 7656 - protein, 147 aa, Homo sapiens
  Payload ID: 1615;
  Gene Symbol: ABCB6;
  Gene Name: ATP-binding cassette, sub-family B (MDR/TAP), member 6 (Langereis blood group);
  ENSP ID: ENSP00000392988
  MOD_RES (1)..(1): Any amino acid
XAALPLAGLAGRVGTARGAPLPSYLLLASVLESLAGACGLWLLVVERSQARQRLAMGIWIKFRHSPGLLLLWTVAFAAENLALVSWNSPQWWWARADLGQQVQFSLWVLRYVVSGGLFVLGLWAPGLRPQSYTLQVHEEDQDVERSQ

SEQ ID NO: 7657 - protein, 68 aa, Homo sapiens
  Payload ID: 1615;
  Gene Symbol: ABCB6;
  Gene Name: ATP-binding cassette, sub-family B (MDR/TAP), member 6 (Langereis blood group);
  ENSP ID: ENSP00000401811
NLALVSWNSPQWWWARADLGQQVQFSLWVLRYVVSGGLFVLGLWAPGLRPQSYTLQVHEEDQDVERSQ

SEQ ID NO: 7658 - protein, 119 aa, Homo sapiens
  Payload ID: 1615;
  Gene Symbol: ABCB6;
  Gene Name: ATP-binding cassette, sub-family B (MDR/TAP), member 6 (Langereis blood group);
  ENSP ID: ENSP00000404006
  MOD_RES (1)..(1): Any amino acid
XGPRISPYVLQLLLATLQAALPLAGLAGRVGTARGAPLPSYLLLASVLESLAGACGLWLLVVERSQARQRLAMGIWIKFRHSPGLLLLWTVAFAAENLALVSWNSPQWWWARADLGQQP

SEQ ID NO: 7659 - protein, 40 aa, Homo sapiens
  Payload ID: 1615;
  Gene Symbol: ABCB6;
  Gene Name: ATP-binding cassette, sub-family B (MDR/TAP), member 6 (Langereis blood group);
  ENSP ID: ENSP00000414646
  MOD_RES (1)..(1): Any amino acid
XADNIRYGRVTAGNDEVEAAAQAAGIHDAIMAFPEETCGG

SEQ ID NO: 7660 - protein, 753 aa, Homo sapiens
  Payload ID: 1616;
  Gene Symbol: ABCB7;
  Gene Name: ATP-binding cassette, sub-family B (MDR/TAP), member 7;
  Uniprot ID:  O75027;
  ENSP ID: ENSP00000253577
MALLAMHSWRWAAAAAAFEKRRHSAILIRPLVSVSGSGPQWRPHQLGALGTARAYQQIPESLKSITWQRLGKGNSGQFLDAAKALQVWPLIEKRTCWHGHAGGGLHTDPKEGLKDVDTRKIIKAMLSYVWPKDRPDLRARVAISLGFLGGAKAMNIVVPFMFKYAVDSLNQMSGNMLNLSDAPNTVATMATAVLIGYGVSRAGAAFFNEVRNAVFGKVAQNSIRRIAKNVFLHLHNLDLGFHLSRQTGALSKAIDRGTRGISFVLSALVFNLLPIMFEVMLVSGVLYYKCGAQFALVTLGTLGTYTAFTVAVTRWRTRFRIEMNKADNDAGNAAIDSLLNYETVKYFNNERYEAQRYDGFLKTYETASLKSTSTLAMLNFGQSAIFSVGLTAIMVLASQGIVAGTLTVGDLVMVNGLLFQLSLPLNFLGTVYRETRQALIDMNTLFTLLKVDTQIKDKVMASPLQITPQTATVAFDNVHFEYIEGQKVLSGISFEVPAGKKVAIVGGSGSGKSTIVRLLFRFYEPQKGSIYLAGQNIQDVSLESLRRAVGVVPQDAVLFHNTIYYNLLYGNISASPEEVYAVAKLAGLHDAILRMPHGYDTQVGERGLKLSGGEKQRVAIARAILKDPPVILYDEATSSLDSITEETILGAMKDVVKHRTSIFIAHRLSTVVDADEIIVLDQGKVAERGTHHGLLANPHSIYSEMWHTQSSRVQNHDNPKWEAKKENISKEEERKKLQEEIVNSVKGCGNCSC

SEQ ID NO: 7661 - protein, 712 aa, Homo sapiens
  Payload ID: 1616;
  Gene Symbol: ABCB7;
  Gene Name: ATP-binding cassette, sub-family B (MDR/TAP), member 7;
  Uniprot ID:  O75027;
  ENSP ID: ENSP00000343849
MALLAMHSWRWAAAAAAFEKRRHSAILIRPLVSVSGSGPQWRPHQLGALGTARAYQIPESLKSITWQRLGKGNSGQFLDAAKALQVWPLIEKRTCWHGHAGGGLHTDPKEGAMNIVVPFMFKYAVDSLNQMSGNMLNLSDAPNTVATMATAVLIGYGVSRAGAAFFNEVRNAVFGKVAQNSIRRIAKNVFLHLHNLDLGFHLSRQTGALSKAIDRGTRGISFVLSALVFNLLPIMFEVMLVSGVLYYKCGAQFALVTLGTLGTYTAFTVAVTRWRTRFRIEMNKADNDAGNAAIDSLLNYETVKYFNNERYEAQRYDGFLKTYETASLKSTSTLAMLNFGQSAIFSVGLTAIMVLASQGIVAGTLTVGDLVMVNGLLFQLSLPLNFLGTVYRETRQALIDMNTLFTLLKVDTQIKDKVMASPLQITPQTATVAFDNVHFEYIEGQKVLSGISFEVPAGKKVAIVGGSGSGKSTIVRLLFRFYEPQKGSIYLAGQNIQDVSLESLRRAVGVVPQDAVLFHNTIYYNLLYGNISASPEEVYAVAKLAGLHDAILRMPHGYDTQVGERGLKLSGGEKQRVAIARAILKDPPVILYDEATSSLDSITEETILGAMKDVVKHRTSIFIAHRLSTVVDADEIIVLDQGKVAERGTHHGLLANPHSIYSEMWHTQSSRVQNHDNPKWEAKKENISKEEERKKLQEEIVNSVKGCGNCSC

SEQ ID NO: 7662 - protein, 752 aa, Homo sapiens
  Payload ID: 1616;
  Gene Symbol: ABCB7;
  Gene Name: ATP-binding cassette, sub-family B (MDR/TAP), member 7;
  Uniprot ID:  O75027;
  ENSP ID: ENSP00000362492
MALLAMHSWRWAAAAAAFEKRRHSAILIRPLVSVSGSGPQWRPHQLGALGTARAYQIPESLKSITWQRLGKGNSGQFLDAAKALQVWPLIEKRTCWHGHAGGGLHTDPKEGLKDVDTRKIIKAMLSYVWPKDRPDLRARVAISLGFLGGAKAMNIVVPFMFKYAVDSLNQMSGNMLNLSDAPNTVATMATAVLIGYGVSRAGAAFFNEVRNAVFGKVAQNSIRRIAKNVFLHLHNLDLGFHLSRQTGALSKAIDRGTRGISFVLSALVFNLLPIMFEVMLVSGVLYYKCGAQFALVTLGTLGTYTAFTVAVTRWRTRFRIEMNKADNDAGNAAIDSLLNYETVKYFNNERYEAQRYDGFLKTYETASLKSTSTLAMLNFGQSAIFSVGLTAIMVLASQGIVAGTLTVGDLVMVNGLLFQLSLPLNFLGTVYRETRQALIDMNTLFTLLKVDTQIKDKVMASPLQITPQTATVAFDNVHFEYIEGQKVLSGISFEVPAGKKVAIVGGSGSGKSTIVRLLFRFYEPQKGSIYLAGQNIQDVSLESLRRAVGVVPQDAVLFHNTIYYNLLYGNISASPEEVYAVAKLAGLHDAILRMPHGYDTQVGERGLKLSGGEKQRVAIARAILKDPPVILYDEATSSLDSITEETILGAMKDVVKHRTSIFIAHRLSTVVDADEIIVLDQGKVAERGTHHGLLANPHSIYSEMWHTQSSRVQNHDNPKWEAKKENISKEEERKKLQEEIVNSVKGCGNCSC

SEQ ID NO: 7663 - protein, 171 aa, Homo sapiens
  Payload ID: 1616;
  Gene Symbol: ABCB7;
  Gene Name: ATP-binding cassette, sub-family B (MDR/TAP), member 7;
  ENSP ID: ENSP00000432813
MERGERDIELEEMALLAMHSWRWAAAAAAFEKRRHSAILIRPLVSVSGSGPQWRPHQLGALGTARAYQQIPESLKSITWQRLGKGNSGQFLDAAKALQVWPLIEKRTCWHGHAGGGLHTDPKEGLKDVDTRKIIKAMLSYVWPKDRPDLRARVAISLGFLGGAKAMNIVVP

SEQ ID NO: 7664 - protein, 188 aa, Homo sapiens
  Payload ID: 1616;
  Gene Symbol: ABCB7;
  Gene Name: ATP-binding cassette, sub-family B (MDR/TAP), member 7;
  ENSP ID: ENSP00000435521
MALLAMHSWRWAAAAAAFEKRRHSAILIRPLVSVSGSGPQWRPHQLGALGTARAYQLKDVDTRKIIKAMLSYVWPKDRPDLRARVAISLGFLGGAKAMNIVVPFMFKYAVDSLNQMSGNMLNLSDAPNTVATMATAVLIGYGVSRAGAAFFNEVRNAVFGKVAQNSIRRIAKNVFLHLHNLDLGFHLS

SEQ ID NO: 7665 - protein, 702 aa, Homo sapiens
  Payload ID: 1616;
  Gene Symbol: ABCB7;
  Gene Name: ATP-binding cassette, sub-family B (MDR/TAP), member 7;
  ENSP ID: ENSP00000436586
MALLAMHSWRWAAAAAAFEKRRHSAILIRPLVSVSGSGPQWRPHQLGALGTARAYQALQVWPLIEKRTCWHGHAGGGLHTDPKEGLKDVDTRKIIKAMLSYVWPKDRPDLRARVAISLGFLGGAKAMNIVVPFMFKYAVDSLNQMSGNMLNLSDAPNTVATMATAVLIGYGVSRAGAAFFNEVRNAVFGKVAQNSIRRIAKNVFLHLHNLDLGFHLSRQTGALSKAIDRGTRGISFVLSALVFNLLPIMFEVMLVSGVLYYKCGAQFALVTLGTLGTYTAFTVAVTRWRTRFRIEMNKADNDAGNAAIDSLLNYETVKYFNNERYEAQRYDGFLKTYETASLKSTSTLAMLNFGQSAIFSVGLTAIMVLASQGIVAGTLTVGDLVMVNGLLFQLSLPLNFLGTVYRETRQALIDMNTLFTLLKVDTQIKDKVMASPLQITPQTATVAFDNVHFEYIEGQKVLSGISFEVPAGKKVAIVGGSGSGKSTIVRLLFRFYEPQKGSIYLAGQNIQDVSLESLRRAVGVVPQDAVLFHNTIYYNLLYGNISASPEEVYAVAKLAGLHDAILRMPHGYDTQVGERGLKLSGGEKQRVAIARAILKDPPVILYDEATSSLDSITEETILGAMKDVVKHRTSIFIAHRLSTVVDADEIIVLDQGKVAERGTHHGLLANPHSIYSEMWHTQSSRVQNHDNPKWEAKKENIS

SEQ ID NO: 7666 - protein, 713 aa, Homo sapiens
  Payload ID: 1616;
  Gene Symbol: ABCB7;
  Gene Name: ATP-binding cassette, sub-family B (MDR/TAP), member 7;
  ENSP ID: ENSP00000479985
MALLAMHSWRWAAAAAAFEKRRHSAILIRPLVSVSGSGPQWRPHQLGALGTARAYQQIPESLKSITWQRLGKGNSGQFLDAAKALQVWPLIEKRTCWHGHAGGGLHTDPKEGAMNIVVPFMFKYAVDSLNQMSGNMLNLSDAPNTVATMATAVLIGYGVSRAGAAFFNEVRNAVFGKVAQNSIRRIAKNVFLHLHNLDLGFHLSRQTGALSKAIDRGTRGISFVLSALVFNLLPIMFEVMLVSGVLYYKCGAQFALVTLGTLGTYTAFTVAVTRWRTRFRIEMNKADNDAGNAAIDSLLNYETVKYFNNERYEAQRYDGFLKTYETASLKSTSTLAMLNFGQSAIFSVGLTAIMVLASQGIVAGTLTVGDLVMVNGLLFQLSLPLNFLGTVYRETRQALIDMNTLFTLLKVDTQIKDKVMASPLQITPQTATVAFDNVHFEYIEGQKVLSGISFEVPAGKKVAIVGGSGSGKSTIVRLLFRFYEPQKGSIYLAGQNIQDVSLESLRRAVGVVPQDAVLFHNTIYYNLLYGNISASPEEVYAVAKLAGLHDAILRMPHGYDTQVGERGLKLSGGEKQRVAIARAILKDPPVILYDEATSSLDSITEETILGAMKDVVKHRTSIFIAHRLSTVVDADEIIVLDQGKVAERGTHHGLLANPHSIYSEMWHTQSSRVQNHDNPKWEAKKENISKEEERKKLQEEIVNSVKGCGNCSC

SEQ ID NO: 7667 - protein, 735 aa, Homo sapiens
  Payload ID: 1617;
  Gene Symbol: ABCB8;
  Gene Name: ATP-binding cassette, sub-family B (MDR/TAP), member 8;
  Uniprot ID:  Q9NUT2;
  ENSP ID: ENSP00000297504
MLVHLFRVGIRGGPFPGRLLPPLRFQTFSAVRNTWRNGKTGQLHKAEGEYSDGYRSSSLLRAVAHLRSQLWAHLPRAPLAPRWSPSAWCWVGGALLGPMVLSKHPHLCLVALCEAEEAPPASSTPHVVGSRFNWKLFWQFLHPHLLVLGVAVVLALGAALVNVQIPLLLGQLVEVVAKYTRDHVGSFMTESQNLSTHLLILYGVQGLLTFGYLVLLSHVGERMAVDMRRALFSSLLRQDITFFDANKTGQLVSRLTTDVQEFKSSFKLVISQGLRSCTQVAGCLVSLSMLSTRLTLLLMVATPALMGVGTLMGSGLRKLSRQCQEQIARAMGVADEALGNVRTVRAFAMEQREEERYGAELEACRCRAEELGRGIALFQGLSNIAFNCMVLGTLFIGGSLVAGQQLTGGDLMSFLVASQTVQRSMANLSVLFGQVVRGLSAGARVFEYMALNPCIPLSGGCCVPKEQLRGSVTFQNVCFSYPCRPGFEVLKDFTLTLPPGKIVALVGQSGGGKTTVASLLERFYDPTAGVVMLDGRDLRTLDPSWLRGQVVGFISQEPVLFGTTIMENIRFGKLEASDEEVYTAAREANAHEFITSFPEGYNTVVGERGTTLSGGQKQRLAIARALIKQPTVLILDEATSALDAESERVVQEALDRASAGRTVLVIAHRLSTVRGAHCIVVMADGRVWEAGTHEELLKKGGLYAELIRRQALDAPRTAAPPPKKPEGPRSHQHKS

SEQ ID NO: 7668 - protein, 718 aa, Homo sapiens
  Payload ID: 1617;
  Gene Symbol: ABCB8;
  Gene Name: ATP-binding cassette, sub-family B (MDR/TAP), member 8;
  Uniprot ID:  Q9NUT2;
  ENSP ID: ENSP00000351717
MLVHLFRVGIRGGPFPGRLLPPLRFQTFSAVRYSDGYRSSSLLRAVAHLRSQLWAHLPRAPLAPRWSPSAWCWVGGALLGPMVLSKHPHLCLVALCEAEEAPPASSTPHVVGSRFNWKLFWQFLHPHLLVLGVAVVLALGAALVNVQIPLLLGQLVEVVAKYTRDHVGSFMTESQNLSTHLLILYGVQGLLTFGYLVLLSHVGERMAVDMRRALFSSLLRQDITFFDANKTGQLVSRLTTDVQEFKSSFKLVISQGLRSCTQVAGCLVSLSMLSTRLTLLLMVATPALMGVGTLMGSGLRKLSRQCQEQIARAMGVADEALGNVRTVRAFAMEQREEERYGAELEACRCRAEELGRGIALFQGLSNIAFNCMVLGTLFIGGSLVAGQQLTGGDLMSFLVASQTVQRSMANLSVLFGQVVRGLSAGARVFEYMALNPCIPLSGGCCVPKEQLRGSVTFQNVCFSYPCRPGFEVLKDFTLTLPPGKIVALVGQSGGGKTTVASLLERFYDPTAGVVMLDGRDLRTLDPSWLRGQVVGFISQEPVLFGTTIMENIRFGKLEASDEEVYTAAREANAHEFITSFPEGYNTVVGERGTTLSGGQKQRLAIARALIKQPTVLILDEATSALDAESERVVQEALDRASAGRTVLVIAHRLSTVRGAHCIVVMADGRVWEAGTHEELLKKGGLYAELIRRQALDAPRTAAPPPKKPEGPRSHQHKS

SEQ ID NO: 7669 - protein, 148 aa, Homo sapiens
  Payload ID: 1617;
  Gene Symbol: ABCB8;
  Gene Name: ATP-binding cassette, sub-family B (MDR/TAP), member 8;
  ENSP ID: ENSP00000417563
MLVHLFRVGIRGGPFPGRLLPPLRFQTFSAVRRLLRLQPRVSQKEGTLGVSDHAQSALPTGGPLSWPWRYSDGYRSSSLLRAVAHLRSQLWAHLPRAPLAPRWSPSAWCWVGGALLGPMVLSKHPHLCLVALCEAEEAPPASSTPHVV

SEQ ID NO: 7670 - protein, 693 aa, Homo sapiens
  Payload ID: 1617;
  Gene Symbol: ABCB8;
  Gene Name: ATP-binding cassette, sub-family B (MDR/TAP), member 8;
  Uniprot ID:  Q9NUT2;
  ENSP ID: ENSP00000418271
MLVHLFRVGIRGGPFPGRLLPPLRFQTFSAVRYSDGYRSSSLLRAVAHLRSQLWAHLPRAPLAPRWSPSAWCWVGGALLGPMVLSKHPHLCLVALCEAEEAPPASSTPHVVGSRFNWKLFWQFLHPHLLVLGVAVVLALGAALVNVQIPLLLGQLVEVVAKYTRDHVGSFMTESQNLSTHLLILYGVQGLLTFGYLVLLSHVGERMAVDMRRALFSSLLRQDITFFDANKTGQLVSRLTTDVQEFKSSFKLVISQGLRSCTQVAGCLVSLSMLSTRLTLLLMVATPALMGVGTLMGSGLRKLSRQCQEQIARAMGVADEALGNVRTVRAFAMEQREEERYGAELEACRCRAEELGRGIALFQGLSNIAFNCMVLGTLFIGGSLVAGQQLTGGDLMSFLVASQTVQRSMANLSVLFGQVVRGLSAGARVFEYMALNPCIPLSGGCCVPKEQLRGSVTFQNVCFSYPCRPGFEVLKDFTLTLPPGKIVALVGQSGGGKTTVASLLERFYDPTAGVVMLDGRDLRTLDPSWLRGQVVGFISQEPVLFGTTIMENIRFGKLEASDEEVYTAAREANAHEFITSFPEGYNTVVGERGTTLSGGQKQRLAIARALIKQPTVLILDEATSALDAESERVVQEALDRASAGRTVLAGTHEELLKKGGLYAELIRRQALDAPRTAAPPPKKPEGPRSHQHKS

SEQ ID NO: 7671 - protein, 48 aa, Homo sapiens
  Payload ID: 1617;
  Gene Symbol: ABCB8;
  Gene Name: ATP-binding cassette, sub-family B (MDR/TAP), member 8;
  ENSP ID: ENSP00000418316
MLVHLFRVGIRGGPFPGRLLPPLRFQTFSAVSCGEGVCVMAPQAREGR

SEQ ID NO: 7672 - protein, 58 aa, Homo sapiens
  Payload ID: 1617;
  Gene Symbol: ABCB8;
  Gene Name: ATP-binding cassette, sub-family B (MDR/TAP), member 8;
  ENSP ID: ENSP00000418970
MLVHLFRVGIRGGPFPGRLLPPLRFQTFSAVSDTPVASRRLLRLQPRVSQKEGTLGVL

SEQ ID NO: 7673 - protein, 39 aa, Homo sapiens
  Payload ID: 1617;
  Gene Symbol: ABCB8;
  Gene Name: ATP-binding cassette, sub-family B (MDR/TAP), member 8;
  ENSP ID: ENSP00000419014
MLVHLFRVGIRGGPFPGRLLPPLRFQTFSAVSWPWVRHS

SEQ ID NO: 7674 - protein, 431 aa, Homo sapiens
  Payload ID: 1617;
  Gene Symbol: ABCB8;
  Gene Name: ATP-binding cassette, sub-family B (MDR/TAP), member 8;
  ENSP ID: ENSP00000419558
MLVHLFRVGIRGGPFPGRLLPPLRFQTFSAVRYSDGYRSSSLLRAVAHLRSQLWAHLPRAPLAPRWSPSAWCWVGGALLGPMVLSKHPHLCLVALCEAEEAPPASSTPHVVGSRFNWKLFWQFLHPHLLVLGVAVVLALGAALVNVQIPLLLGQLVEVVAKYTRDHVGSFMTESQNLSTHLLILYGVQGLLTFGYLVLLSHVGERMAVDMRRALFSSLLRQDITFFDANKTGQLVSRLTTDVQEFKSSFKLVISQGLRSCTQVAGCLVSLSMLSTRLTLLLMVATPALMGVGTLMGSGLRKLSRQCQEQIARAMGVADEALGNVRTVRAFAMEQREEERYGAELEACRCRAEELGRGIALFQGLSNIAFNCMVLGTLFIGGSLVAGQQLTGGDLMSFLVASQTVQSFLRVAPCPNSLPLQAVTFHAWKDHP

SEQ ID NO: 7675 - protein, 409 aa, Homo sapiens
  Payload ID: 1617;
  Gene Symbol: ABCB8;
  Gene Name: ATP-binding cassette, sub-family B (MDR/TAP), member 8;
  ENSP ID: ENSP00000419891
MLVHLFRVGIRGGPFPGRLLPPLRFQTFSAVRYSDGYRSSSLLRAVAHLRSQLWAHLPRAPLAPRWSPSAWCWVGGALLGPMVLSKHPHLCLVALCEAEEAPPASSTPHVVGSRFNWKLFWQFLHPHLLVLGVAVVLALGAALVNVQIPLLLGQLVEVVAKYTRDHVGSFMTESQNLSTHLLILYGVQGLLTFGYLVLLSHVGERMAVDMRRALFSSLLRQDITFFDANKTGQLVSRLTTDVQEFKSSFKLVISQGLRSCTQVAGCLVSLSMLSTRLTLLLMVATPALMGVGTLMGSGLRKLSRQCQEQIARAMGVADEALGNVRTVRAFAMEQREEERYGAELEACRCRAEELGRGIALFQGLSNIAFNCMVLGTLFIGGSLVAGQQLTGGDLMSFLVASQTVQRDVL

SEQ ID NO: 7676 - protein, 140 aa, Homo sapiens
  Payload ID: 1617;
  Gene Symbol: ABCB8;
  Gene Name: ATP-binding cassette, sub-family B (MDR/TAP), member 8;
  ENSP ID: ENSP00000420162
  MOD_RES (1)..(1): Any amino acid
XSLSMLSTRLTLLLMVATPALMGVGTLMGSGLRKLSRQCQEQIARAMGVADEALGNVRTVRAFAMEQREEERYGAELEACRCRAEELGRGIALFQGLSNIAFNCMVLGTLFIGGSLVAGQQLTGGDLMSFLVASQTVQRL

SEQ ID NO: 7677 - protein, 48 aa, Homo sapiens; identical to SEQ ID NO: 7671
  Payload ID: 1617;
  Gene Symbol: ABCB8;
  Gene Name: ATP-binding cassette, sub-family B (MDR/TAP), member 8;
  ENSP ID: ENSP00000420216

SEQ ID NO: 7678 - protein, 39 aa, Homo sapiens; identical to SEQ ID NO: 7673
  Payload ID: 1617;
  Gene Symbol: ABCB8;
  Gene Name: ATP-binding cassette, sub-family B (MDR/TAP), member 8;
  ENSP ID: ENSP00000420631

SEQ ID NO: 7679 - protein, 630 aa, Homo sapiens
  Payload ID: 1617;
  Gene Symbol: ABCB8;
  Gene Name: ATP-binding cassette, sub-family B (MDR/TAP), member 8;
  Uniprot ID:  Q9NUT2;
  ENSP ID: ENSP00000438776
MRVKLLLPAAPVLPRQHAGAFISGRDSGWPIPRQAATAPPLPDILSCQLALGAALVNVQIPLLLGQLVEVVAKYTRDHVGSFMTESQNLSTHLLILYGVQGLLTFGYLVLLSHVGERMAVDMRRALFSSLLRQDITFFDANKTGQLVSRLTTDVQEFKSSFKLVISQGLRSCTQVAGCLVSLSMLSTRLTLLLMVATPALMGVGTLMGSGLRKLSRQCQEQIARAMGVADEALGNVRTVRAFAMEQREEERYGAELEACRCRAEELGRGIALFQGLSNIAFNCMVLGTLFIGGSLVAGQQLTGGDLMSFLVASQTVQRSMANLSVLFGQVVRGLSAGARVFEYMALNPCIPLSGGCCVPKEQLRGSVTFQNVCFSYPCRPGFEVLKDFTLTLPPGKIVALVGQSGGGKTTVASLLERFYDPTAGVVMLDGRDLRTLDPSWLRGQVVGFISQEPVLFGTTIMENIRFGKLEASDEEVYTAAREANAHEFITSFPEGYNTVVGERGTTLSGGQKQRLAIARALIKQPTVLILDEATSALDAESERVVQEALDRASAGRTVLVIAHRLSTVRGAHCIVVMADGRVWEAGTHEELLKKGGLYAELIRRQALDAPRTAAPPPKKPEGPRSHQHKS

SEQ ID NO: 7680 - protein, 723 aa, Homo sapiens
  Payload ID: 1618;
  Gene Symbol: ABCB9;
  Gene Name: ATP-binding cassette, sub-family B (MDR/TAP), member 9;
  Uniprot ID:  Q9NP78;
  ENSP ID: ENSP00000280559
MRLWKAVVVTLAFMSVDICVTTAIYVFSHLDRSLLEDIRHFNIFDSVLDLWAACLYRSCLLLGATIGVAKNSALGPRRLRASWLVITLVCLFVGIYAMVKLLLFSEVRRPIRDPWFWALFVWTYISLGASFLLWWLLSTVRPGTQALEPGAATEAEGFPGSGRPPPEQASGATLQKLLSYTKPDVAFLVAASFFLIVAALGETFLPYYTGRAIDGIVIQKSMDQFSTAVVIVCLLAIGSSFAAGIRGGIFTLIFARLNIRLRNCLFRSLVSQETSFFDENRTGDLISRLTSDTTMVSDLVSQNINVFLRNTVKVTGVVVFMFSLSWQLSLVTFMGFPIIMMVSNIYGKYYKRLSKEVQNALARASNTAEETISAMKTVRSFANEEEEAEVYLRKLQQVYKLNRKEAAAYMYYVWGSGSVGSVYSGLMQGVGAAEKVFEFIDRQPTMVHDGSLAPDHLEGRVDFENVTFTYRTRPHTQVLQNVSFSLSPGKVTALVGPSGSGKSSCVNILENFYPLEGGRVLLDGKPISAYDHKYLHRVISLVSQEPVLFARSITDNISYGLPTVPFEMVVEAAQKANAHGFIMELQDGYSTETGEKGAQLSGGQKQRVAMARALVRNPPVLILDEATSALDAESEYLIQQAIHGNLQKHTVLIIAHRLSTVEHAHLIVVLDKGRVVQQGTHQQLLAQGGLYAKLVQRQMLGLQPAADFTAGHNEPVANGSHKA

SEQ ID NO: 7681 - protein, 766 aa, Homo sapiens
  Payload ID: 1618;
  Gene Symbol: ABCB9;
  Gene Name: ATP-binding cassette, sub-family B (MDR/TAP), member 9;
  Uniprot ID:  Q9NP78;
  ENSP ID: ENSP00000280560
MRLWKAVVVTLAFMSVDICVTTAIYVFSHLDRSLLEDIRHFNIFDSVLDLWAACLYRSCLLLGATIGVAKNSALGPRRLRASWLVITLVCLFVGIYAMVKLLLFSEVRRPIRDPWFWALFVWTYISLGASFLLWWLLSTVRPGTQALEPGAATEAEGFPGSGRPPPEQASGATLQKLLSYTKPDVAFLVAASFFLIVAALGETFLPYYTGRAIDGIVIQKSMDQFSTAVVIVCLLAIGSSFAAGIRGGIFTLIFARLNIRLRNCLFRSLVSQETSFFDENRTGDLISRLTSDTTMVSDLVSQNINVFLRNTVKVTGVVVFMFSLSWQLSLVTFMGFPIIMMVSNIYGKYYKRLSKEVQNALARASNTAEETISAMKTVRSFANEEEEAEVYLRKLQQVYKLNRKEAAAYMYYVWGSGLTLLVVQVSILYYGGHLVISGQMTSGNLIAFIIYEFVLGDCMESVGSVYSGLMQGVGAAEKVFEFIDRQPTMVHDGSLAPDHLEGRVDFENVTFTYRTRPHTQVLQNVSFSLSPGKVTALVGPSGSGKSSCVNILENFYPLEGGRVLLDGKPISAYDHKYLHRVISLVSQEPVLFARSITDNISYGLPTVPFEMVVEAAQKANAHGFIMELQDGYSTETGEKGAQLSGGQKQRVAMARALVRNPPVLILDEATSALDAESEYLIQQAIHGNLQKHTVLIIAHRLSTVEHAHLIVVLDKGRVVQQGTHQQLLAQGGLYAKLVQRQMLGLQPAADFTAGHNEPVANGSHKA

SEQ ID NO: 7682 - protein, 766 aa, Homo sapiens; identical to SEQ ID NO: 7681
  Payload ID: 1618;
  Gene Symbol: ABCB9;
  Gene Name: ATP-binding cassette, sub-family B (MDR/TAP), member 9;
  Uniprot ID:  Q9NP78;
  ENSP ID: ENSP00000376234

SEQ ID NO: 7683 - protein, 769 aa, Homo sapiens
  Payload ID: 1618;
  Gene Symbol: ABCB9;
  Gene Name: ATP-binding cassette, sub-family B (MDR/TAP), member 9;
  ENSP ID: ENSP00000394898
MRLWKAVVVTLAFMSVDICVTTAIYVFSHLDRSLLEDIRHFNIFDSVLDLWAACLYRSCLLLGATIGVAKNSALGPRRLRASWLVITLVCLFVGIYAMVKLLLFSEVRRPIRDPWFWALFVWTYISLGASFLLWWLLSTVRPGTQALEPGAATEAEGFPGSGRPPPEQASGATLQKLLSYTKPDVAFLVAASFFLIVAALGETFLPYYTGRAIDGIVIQKSMDQFSTAVVIVCLLAIGSSFAAGIRGGIFTLIFARLNIRLRNCLFRSLVSQETSFFDENRTGDLISRLTSDTTMVSDLVSQNINVFLRNTVKVTGVVVFMFSLSWQLSLVTFMGFPIIMMVSNIYGKYYKRLSKEVQNALARASNTAEETISAMKTVRSFANEEEEAEVYLRKLQQVYKLNRKEAAAYMYYVWGSGLTLLVVQVSILYYGGHLVISGQMTSGNLIAFIIYEFVLGDCMESVGSVYSGLMQGVGAAEKVFEFIDRQPTMVHDGSLAPDHLEGRVDFENVTFTYRTRPHTQVLQNVSFSLSPGKVTALVGPSGSGKSSCVNILENFYPLEGGRVLLDGKPISAYDHKYLHRVISLVSQEPVLFARSITDNISYGLPTVPFEMVVEAAQKANAHGFIMELQDGYSTETGEKGAQLSGGQKQRVAMARALVRNPPVLILDEATSALDAESEYLSPQIQQAIHGNLQKHTVLIIAHRLSTVEHAHLIVVLDKGRVVQQGTHQQLLAQGGLYAKLVQRQMLGLQPAADFTAGHNEPVANGSHKA

SEQ ID NO: 7684 - protein, 145 aa, Homo sapiens
  Payload ID: 1618;
  Gene Symbol: ABCB9;
  Gene Name: ATP-binding cassette, sub-family B (MDR/TAP), member 9;
  ENSP ID: ENSP00000415967
GRPPRLRASLGAAGHRPSRRLGPRCRSCSPTPSPTWPSSWPPPSSSSWQLWERPSCPTTRAAPLMASSSRKAWISSARLSSSCACWPLAGIRGGIFTLIFARLNIRLRNCLFRSLVSQETSFFDENRTASHGSSPWSPSWASPSS

SEQ ID NO: 7685 - protein, 272 aa, Homo sapiens
  Payload ID: 1618;
  Gene Symbol: ABCB9;
  Gene Name: ATP-binding cassette, sub-family B (MDR/TAP), member 9;
  ENSP ID: ENSP00000439871
MRLWKAVVVTLAFMSVDICVTTAIYVFSHLDRSLLEDIRHFNIFDSVLDLWAACLYRSCLLLGATIGVAKNSALGPRRLRASWLVITLVCLFVGIYAMVKLLLFSEVRRPIRDPWFWALFVWTYISLGASFLLWWLLSTVRPGTQALEPGAATEAEGFPGSGRPPPEQASGATLQKLLSYTKPDVAFLVAASFFLIVAALGETFLPYYTGRAIDGIVIQKSMDQFSTAVVIVCLLAIGRYSGRHFYPHICQTEHSPSKLSLPLTGVPGDKLL

SEQ ID NO: 7686 - protein, 145 aa, Homo sapiens
  Payload ID: 1618;
  Gene Symbol: ABCB9;
  Gene Name: ATP-binding cassette, sub-family B (MDR/TAP), member 9;
  ENSP ID: ENSP00000440138
MDQFSTAVVIVCLLAIGSSFAAGIRGGIFTLIFARLNIRLRNCLFRSLVSQETSFFDENRTGDLISRLTSDTTMVSDLVSQNINVFLRNTVKVTGVVVFMFSLSWQLSLVTFMGFPIIMMVSNIYGKYYKRLSKEVQNALARASN

SEQ ID NO: 7687 - protein, 260 aa, Homo sapiens
  Payload ID: 1618;
  Gene Symbol: ABCB9;
  Gene Name: ATP-binding cassette, sub-family B (MDR/TAP), member 9;
  ENSP ID: ENSP00000440244
MKTVRSFANEEEEAEVYLRKLQQVYKLNRKEAAAYMYYVWGSGLTLLVVQVSILYYGGHLVISGQMTSGNLIAFIIYEFVLGDCMESVGSVYSGLMQGVGAAEKVFEFIDRQPTMVHDGSLAPDHLEGRVDFENVTFTYRTRPHTQVLQNVSFSLSPGKVTALVGPSGSGKSSCVNILENFYPLEGGRVLLDGKPISAYDHKYLHRVISLVSQEPVLFARSITDNISYGLPTVPFEMVVEAAQKANAHGFIMELQDGYST

SEQ ID NO: 7688 - protein, 766 aa, Homo sapiens; identical to SEQ ID NO: 7681
  Payload ID: 1618;
  Gene Symbol: ABCB9;
  Gene Name: ATP-binding cassette, sub-family B (MDR/TAP), member 9;
  Uniprot ID:  Q9NP78;
  ENSP ID: ENSP00000440288

SEQ ID NO: 7689 - protein, 182 aa, Homo sapiens
  Payload ID: 1618;
  Gene Symbol: ABCB9;
  Gene Name: ATP-binding cassette, sub-family B (MDR/TAP), member 9;
  ENSP ID: ENSP00000441086
MVSDLVSQNINVFLRNTVKVTGVVVFMFSLSWQLSLVTFMGFPIIMMVSNIYGKYYKRLSKEVQNALARASNTAEETISAMKTVRSFANEEEEAEVYLRKLQQVYKLNRKEAAAYMYYVWGSGLTLLVVQVSILYYGGHLVISGQMTSGNLIAFIIYEFVLGDCMESVGSVYSGLMQGVGAA

SEQ ID NO: 7690 - protein, 703 aa, Homo sapiens
  Payload ID: 1618;
  Gene Symbol: ABCB9;
  Gene Name: ATP-binding cassette, sub-family B (MDR/TAP), member 9;
  Uniprot ID:  Q9NP78;
  ENSP ID: ENSP00000441734
MRLWKAVVVTLAFMSVDICVTTAIYVFSHLDRSLLEDIRHFNIFDSVLDLWAACLYRSCLLLGATIGVAKNSALGPRRLRASWLVITLVCLFVGIYAMVKLLLFSEVRRPIRDPWFWALFVWTYISLGASFLLWWLLSTVRPGTQALEPGAATEAEGFPGSGRPPPEQASGATLQKLLSYTKPDVAFLVAASFFLIVAALGETFLPYYTGRAIDGIVIQKSMDQFSTAVVIVCLLAIGSSFAAGIRGGIFTLIFARLNIRLRNCLFRSLVSQETSFFDENRTGDLISRLTSDTTMVSDLVSQNINVFLRNTVKVTGVVVFMFSLSWQLSLVTFMGFPIIMMVSNIYGKYYKRLSKEVQNALARASNTAEETISAMKTVRSFANEEEEAEVYLRKLQQVYKLNRKEAAAYMYYVWGSGLTLLVVQVSILYYGGHLVISGQMTSGNLIAFIIYEFVLGDCMENVSFSLSPGKVTALVGPSGSGKSSCVNILENFYPLEGGRVLLDGKPISAYDHKYLHRVISLVSQEPVLFARSITDNISYGLPTVPFEMVVEAAQKANAHGFIMELQDGYSTETGEKGAQLSGGQKQRVAMARALVRNPPVLILDEATSALDAESEYLIQQAIHGNLQKHTVLIIAHRLSTVEHAHLIVVLDKGRVVQQGTHQQLLAQGGLYAKLVQRQMLGLQPAADFTAGHNEPVANGSHKA

SEQ ID NO: 7691 - protein, 277 aa, Homo sapiens
  Payload ID: 1618;
  Gene Symbol: ABCB9;
  Gene Name: ATP-binding cassette, sub-family B (MDR/TAP), member 9;
  ENSP ID: ENSP00000442281
MGQGMGMVGDLRSPRPTSPLPLPQLTLLVVQVSILYYGGHLVISGQMTSGNLIAFIIYEFVLGDCMENVSFSLSPGKVTALVGPSGSGKSSCVNILENFYPLEGGRVLLDGKPISAYDHKYLHRVISLVSQEPVLFARSITDNISYGLPTVPFEMVVEAAQKANAHGFIMELQDGYSTETGEKGAQLSGGQKQRVAMARALVRNPPVLILDEATSALDAESEYLIQQAIHGNLQKHTVLIIAHRLSTVEHAHLIVVLDKGRVVQQGTHQQLLAQGGL

SEQ ID NO: 7692 - protein, 115 aa, Homo sapiens
  Payload ID: 1618;
  Gene Symbol: ABCB9;
  Gene Name: ATP-binding cassette, sub-family B (MDR/TAP), member 9;
  ENSP ID: ENSP00000443224
MTASRWCRRLSKEVQNALARASNTAEETISAMKTVRSFANEEEEAEVYLRKLQQVYKLNRKEAAAYMYYVWGSGLTLLVVQVSILYYGGHLVISGQMTSGNLIAFIIYEFVLGDC

SEQ ID NO: 7693 - protein, 65 aa, Homo sapiens
  Payload ID: 1618;
  Gene Symbol: ABCB9;
  Gene Name: ATP-binding cassette, sub-family B (MDR/TAP), member 9;
  ENSP ID: ENSP00000443382
MRLWKAVVVTLAFMSVDICVTTAIYVFSHLDRSLLEDIRHFNIFDSVLDLWAACLYRSCLLLGAT

SEQ ID NO: 7694 - protein, 222 aa, Homo sapiens
  Payload ID: 1618;
  Gene Symbol: ABCB9;
  Gene Name: ATP-binding cassette, sub-family B (MDR/TAP), member 9;
  ENSP ID: ENSP00000443433
MDQFSTAVVIVCLLAIGRLNIRLRNCLFRSLVSQETSFFDENRTGDLISRLTSDTTMVSDLVSQNINVFLRNTVKVTGVVVFMFSLSWQLSLVTFMGFPIIMMVSNIYGKYYKRLSKEVQNALARASNTAEETISAMKTVRSFANEEEEAEVYLRKLQQVYKLNRKEAAAYMYYVWGSGLTLLVVQVSILYYGGHLVISGQMTSGNLIAFIIYEFVLGDCME

SEQ ID NO: 7695 - protein, 156 aa, Homo sapiens
  Payload ID: 1618;
  Gene Symbol: ABCB9;
  Gene Name: ATP-binding cassette, sub-family B (MDR/TAP), member 9;
  ENSP ID: ENSP00000444834
MGQGMGMVGDLRSPRPTSPLPLPQLTLLVVQVSILYYGGHLVISGQMTSGNLIAFIIYEFVLGDCMESVGSVYSGLMQGVGAAEKVFEFIDRQPTMVHDGSLAPDHLEGRVDFENVTFTYRTRPHTQVLQNVSFSLSPGKVTALVGPSGSGKSSCV

SEQ ID NO: 7696 - protein, 683 aa, Homo sapiens
  Payload ID: 1618;
  Gene Symbol: ABCB9;
  Gene Name: ATP-binding cassette, sub-family B (MDR/TAP), member 9;
  Uniprot ID:  Q9NP78;
  ENSP ID: ENSP00000456375
MRLWKAVVVTLAFMSVDICVTTAIYVFSHLDRSLLEDIRHFNIFDSVLDLWAACLYRSCLLLGATIGVAKNSALGPRRLRASWLVITLVCLFVGIYAMVKLLLFSEVRRPIRDPWFWALFVWTYISLGASFLLWWLLSTVRPGTQALEPGAATEAEGFPGSGRPPPEQASGATLQKLLSYTKPDVAFLVAASFFLIVAALGETFLPYYTGRAIDGIVIQKSMDQFSTAVVIVCLLAIGSSFAAGIRGGIFTLIFARLNIRLRNCLFRSLVSQETSFFDENRTGDLISRLTSDTTMVSDLVSQNINVFLRNTVKVTGVVVFMFSLSWQLSLVTFMGFPIIMMVSNIYGKYYKRLSKEVQNALARASNTAEETISAMKTVRSFANEEEEAEVYLRKLQQVYKLNRKEAAAYMYYVWGSGLTLLVVQVSILYYGGHLVISGQMTSGNLIAFIIYEFVLGDCMESVGSVYSGLMQGVGAAEKVFEFIDRQPTMVHDGSLAPDHLEGRVDFENVTFTYRTRPHTQVLQNVSFSLSPGKVTALVGPSGSGKSSCVNILENFYPLEGGRVLLDGKPISAYDHKYLHRVISLVSQEPVLFARSITDNISYGLPTVPFEMVVEAAQKANAHGFIMELQDGYSTETGEKGAQLSGGQKQRVAMARALVRNPPVLILDEATSALDAESEYLCAG

SEQ ID NO: 7697 - protein, 681 aa, Homo sapiens
  Payload ID: 1618;
  Gene Symbol: ABCB9;
  Gene Name: ATP-binding cassette, sub-family B (MDR/TAP), member 9;
  Uniprot ID:  Q9NP78;
  ENSP ID: ENSP00000456813
MRLWKAVVVTLAFMSVDICVTTAIYVFSHLDRSLLEDIRHFNIFDSVLDLWAACLYRSCLLLGATIGVAKNSALGPRRLRASWLVITLVCLFVGIYAMVKLLLFSEVRRPIRDPWFWALFVWTYISLGASFLLWWLLSTVRPGTQALEPGAATEAEGFPGSGRPPPEQASGATLQKLLSYTKPDVAFLVAASFFLIVAALGETFLPYYTGRAIDGIVIQKSMDQFSTAVVIVCLLAIGSSFAAGIRGGIFTLIFARLNIRLRNCLFRSLVSQETSFFDENRTGDLISRLTSDTTMVSDLVSQNINVFLRNTVKVTGVVVFMFSLSWQLSLVTFMGFPIIMMVSNIYGKYYKRLSKEVQNALARASNTAEETISAMKTVRSFANEEEEAEVYLRKLQQVYKLNRKEAAAYMYYVWGSGLTLLVVQVSILYYGGHLVISGQMTSGNLIAFIIYEFVLGDCMESVGSVYSGLMQGVGAAEKVFEFIDRQPTMVHDGSLAPDHLEGRVDFENVTFTYRTRPHTQVLQNVSFSLSPGKVTALVGPSGSGKSSCVNILENFYPLEGGRVLLDGKPISAYDHKYLHRVISLVSQEPVLFARSITDNISYGLPTVPFEMVVEAAQKANAHGFIMELQDGYSTETGEKGAQLSGGQKQRVAMARALVRNPPVLILDEATSALDAESEYLI

SEQ ID NO: 7698 - protein, 1215 aa, Homo sapiens
  Payload ID: 1619;
  Gene Symbol: ABCC1;
  Gene Name: ATP-binding cassette, sub-family C (CFTR/MRP), member 1;
  ENSP ID: ENSP00000382340
MSFFFKAIHDLMMFSGPQILKLLIKFVNDTKAPDWQGYFYTVLLFVTACLQTLVLHQYFHICFVSGMRIKTAVIGAVYRKALVITNSARKSSTVGEIVNLMSVDAQRFMDLATYINMIWSAPLQVILALYLLWLNLGPSVLAGVAVMVLMVPVNAVMAMKTKTYQVAHMKSKDNRIKLMNEILNGIKVLKLYAWELAFKDKVLAIRQEELKVLKKSAYLSAVGTFTWVCTPFLVALCTFAVYVTIDENNILDAQTAFVSLALFNILRFPLNILPMVISSIVQASVSLKRLRIFLSHEELEPDSIERRPVKDGGGTNSITVRNATFTWARSDPPTLNGITFSIPEGALVAVVGQVGCGKSSLLSALLAEMDKVEGHVAIKGSVAYVPQQAWIQNDSLRENILFGCQLEEPYYRSVIQACALLPDLEILPSGDRTEIGEKGVNLSGGQKQRVSLARAVYSNADIYLFDDPLSAVDAHVGKHIFENVIGPKGMLKNKTRILVTHSMSYLPQVDVIIVMSGGKISEMGSYQELLARDGAFAEFLRTYASTEQEQDAEENGSTVMDEEEAGVTGVSGPGKEAKQMENGMLVTDSAGKQLQRQLSSSSSYSGDISRHHNSTAELQKAEAKKEETWKLMEADKAQTGQVKLSVYWDYMKAIGLFISFLSIFLFMCNHVSALASNYWLSLWTDDPIVNGTQEHTKVRLSVYGALGISQGIAVFGYSMAVSIGGILASRCLHVDLLHSILRSPMSFFERTPSGNLVNRFSKELDTVDSMIPEVIKMFMGSLFNVIGACIVILLATPIAAIIIPPLGLIYFFVQRFYVASSRQLKRLESVSRSPVYSHFNETLLGVSVIRAFEEQERFIHQSDLKVDENQKAYYPSIVANRWLAVRLECVGNCIVLFAALFAVISRHSLSAGLVGLSVSYSLQVTTYLNWLVRMSSEMETNIVAVERLKEYSETEKEAPWQIQETAPPSSWPQVGRVEFRNYCLRYREDLDFVLRHINVTINGGEKVGIVGRTGAGKSSLTLGLFRINESAEGEIIIDGINIAKIGLHDLRFKITIIPQDPVLFSGSLRMNLDPFSQYSDEEVWTSLELAHLKDFVSALPDKLDHECAEGGENLSVGQRQLVCLARALLRKTKILVLDEATAAVDLETDDLIQSTIRTQFEDCTVLTIAHRLNTIMDYTRVIVLDKGEIQEYGAPSDLLQQRGLFYSMAKDAGLV

SEQ ID NO: 7699 - protein, 1531 aa, Homo sapiens
  Payload ID: 1619;
  Gene Symbol: ABCC1;
  Gene Name: ATP-binding cassette, sub-family C (CFTR/MRP), member 1;
  Uniprot ID:  P33527;
  ENSP ID: ENSP00000382342
MALRGFCSADGSDPLWDWNVTWNTSNPDFTKCFQNTVLVWVPCFYLWACFPFYFLYLSRHDRGYIQMTPLNKTKTALGFLLWIVCWADLFYSFWERSRGIFLAPVFLVSPTLLGITMLLATFLIQLERRKGVQSSGIMLTFWLVALVCALAILRSKIMTALKEDAQVDLFRDITFYVYFSLLLIQLVLSCFSDRSPLFSETIHDPNPCPESSASFLSRITFWWITGLIVRGYRQPLEGSDLWSLNKEDTSEQVVPVLVKNWKKECAKTRKQPVKVVYSSKDPAQPKESSKVDANEEVEALIVKSPQKEWNPSLFKVLYKTFGPYFLMSFFFKAIHDLMMFSGPQILKLLIKFVNDTKAPDWQGYFYTVLLFVTACLQTLVLHQYFHICFVSGMRIKTAVIGAVYRKALVITNSARKSSTVGEIVNLMSVDAQRFMDLATYINMIWSAPLQVILALYLLWLNLGPSVLAGVAVMVLMVPVNAVMAMKTKTYQVAHMKSKDNRIKLMNEILNGIKVLKLYAWELAFKDKVLAIRQEELKVLKKSAYLSAVGTFTWVCTPFLVALCTFAVYVTIDENNILDAQTAFVSLALFNILRFPLNILPMVISSIVQASVSLKRLRIFLSHEELEPDSIERRPVKDGGGTNSITVRNATFTWARSDPPTLNGITFSIPEGALVAVVGQVGCGKSSLLSALLAEMDKVEGHVAIKGSVAYVPQQAWIQNDSLRENILFGCQLEEPYYRSVIQACALLPDLEILPSGDRTEIGEKGVNLSGGQKQRVSLARAVYSNADIYLFDDPLSAVDAHVGKHIFENVIGPKGMLKNKTRILVTHSMSYLPQVDVIIVMSGGKISEMGSYQELLARDGAFAEFLRTYASTEQEQDAEENGVTGVSGPGKEAKQMENGMLVTDSAGKQLQRQLSSSSSYSGDISRHHNSTAELQKAEAKKEETWKLMEADKAQTGQVKLSVYWDYMKAIGLFISFLSIFLFMCNHVSALASNYWLSLWTDDPIVNGTQEHTKVRLSVYGALGISQGIAVFGYSMAVSIGGILASRCLHVDLLHSILRSPMSFFERTPSGNLVNRFSKELDTVDSMIPEVIKMFMGSLFNVIGACIVILLATPIAAIIIPPLGLIYFFVQRFYVASSRQLKRLESVSRSPVYSHFNETLLGVSVIRAFEEQERFIHQSDLKVDENQKAYYPSIVANRWLAVRLECVGNCIVLFAALFAVISRHSLSAGLVGLSVSYSLQVTTYLNWLVRMSSEMETNIVAVERLKEYSETEKEAPWQIQETAPPSSWPQVGRVEFRNYCLRYREDLDFVLRHINVTINGGEKVGIVGRTGAGKSSLTLGLFRINESAEGEIIIDGINIAKIGLHDLRFKITIIPQDPVLFSGSLRMNLDPFSQYSDEEVWTSLELAHLKDFVSALPDKLDHECAEGGENLSVGQRQLVCLARALLRKTKILVLDEATAAVDLETDDLIQSTIRTQFEDCTVLTIAHRLNTIMDYTRVIVLDKGEIQEYGAPSDLLQQRGLFYSMAKDAGLV

SEQ ID NO: 7700 - protein, 22 aa, Homo sapiens
  Payload ID: 1619;
  Gene Symbol: ABCC1;
  Gene Name: ATP-binding cassette, sub-family C (CFTR/MRP), member 1;
  ENSP ID: ENSP00000459693
LVTDSAGKQLQRFEGHFHLTRP

SEQ ID NO: 7701 - protein, 1440 aa, Homo sapiens
  Payload ID: 1619;
  Gene Symbol: ABCC1;
  Gene Name: ATP-binding cassette, sub-family C (CFTR/MRP), member 1;
  ENSP ID: ENSP00000461615
  MOD_RES (1)..(1): Any amino acid
XAPVFLVSPTLLGITMLLATFLIQLERRKGVQSSGIMLTFWLVALVCALAILRSKIMTALKEDAQVDLFRDITFYVYFSLLLIQLVLSCFSDRSPLFSETIHDPNPCPESSASFLSRITFWWITGLIVRGYRQPLEGSDLWSLNKEDTSEQVVPVLVKNWKKECAKTRKQPVKVVYSSKDPAQPKESSKVDANEEVEALIVKSPQKEWNPSLFKVLYKTFGPYFLMSFFFKAIHDLMMFSGPQILKLLIKFVNDTKAPDWQGYFYTVLLFVTACLQTLVLHQYFHICFVSGMRIKTAVIGAVYRKALVITNSARKSSTVGEIVNLMSVDAQRFMDLATYINMIWSAPLQVILALYLLWLNLGPSVLAGVAVMVLMVPVNAVMAMKTKTYQVAHMKSKDNRIKLMNEILNGIKVLKLYAWELAFKDKVLAIRQEELKVLKKSAYLSAVGTFTWVCTPFLVALCTFAVYVTIDENNILDAQTAFVSLALFNILRFPLNILPMVISSIVQASVSLKRLRIFLSHEELEPDSIERRPVKDGGGTNSITVRNATFTWARSDPPTLNGITFSIPEGALVAVVGQVGCGKSSLLSALLAEMDKVEGHVAIKGSVAYVPQQAWIQNDSLRENILFGCQLEEPYYRSVIQACALLPDLEILPSGDRTEIGEKGVNLSGGQKQRVSLARAVYSNADIYLFDDPLSAVDAHVGKHIFENVIGPKGMLKNKTRILVTHSMSYLPQVDVIIVMSGGKISEMGSYQELLARDGAFAEFLRTYASTEQEQDAEENGSTVMDEEEAGVTGVSGPGKEAKQMENGMLVTDSAGKQLQRQLSSSSSYSGDISRHHNSTAELQKAEAKKEETWKLMEADKAQTGQVKLSVYWDYMKAIGLFISFLSIFLFMCNHVSALASNYWLSLWTDDPIVNGTQEHTKVRLSVYGALGISQGIAVFGYSMAVSIGGILASRCLHVDLLHSILRSPMSFFERTPSGNLVNRFSKELDTVDSMIPEVIKMFMGSLFNVIGACIVILLATPIAAIIIPPLGLIYFFVQRFYVASSRQLKRLESVSRSPVYSHFNETLLGVSVIRAFEEQERFIHQSDLKVDENQKAYYPSIVANRWLAVRLECVGNCIVLFAALFAVISRHSLSAGLVGLSVSYSLQVTTYLNWLVRMSSEMETNIVAVERLKEYSETEKEAPWQIQETAPPSSWPQVGRVEFRNYCLRYREDLDFVLRHINVTINGGEKVGIVGRTGAGKSSLTLGLFRINESAEGEIIIDGINIAKIGLHDLRFKITIIPQDPVLFSGSLRMNLDPFSQYSDEEVWTSLELAHLKDFVSALPDKLDHECAEGGENLSVGQRQLVCLARALLRKTKILVLDEATAAVDLETDDLIQSTIRTQFEDCTVLTIAHRLNTIMDYTRVIVLDKGEIQEYGAPSDLLQQRGLFYSMAKDAGLV

SEQ ID NO: 7702 - protein, 1215 aa, Homo sapiens; identical to SEQ ID NO: 7698
  Payload ID: 1619;
  Gene Symbol: ABCC1;
  Gene Name: ATP-binding cassette, sub-family C (CFTR/MRP), member 1;
  ENSP ID: ENSP00000478647

SEQ ID NO: 7703 - protein, 1440 aa, Homo sapiens; identical to SEQ ID NO: 7701
  Payload ID: 1619;
  Gene Symbol: ABCC1;
  Gene Name: ATP-binding cassette, sub-family C (CFTR/MRP), member 1;
  ENSP ID: ENSP00000481080
  MOD_RES (1)..(1): Any amino acid

SEQ ID NO: 7704 - protein, 1531 aa, Homo sapiens; identical to SEQ ID NO: 7699
  Payload ID: 1619;
  Gene Symbol: ABCC1;
  Gene Name: ATP-binding cassette, sub-family C (CFTR/MRP), member 1;
  Uniprot ID:  P33527;
  ENSP ID: ENSP00000483316

SEQ ID NO: 7705 - protein, 1464 aa, Homo sapiens
  Payload ID: 1620;
  Gene Symbol: ABCC10;
  Gene Name: ATP-binding cassette, sub-family C (CFTR/MRP), member 10;
  Uniprot ID:  Q5T3U5;
  ENSP ID: ENSP00000244533
MCLLVFPLVPRSPDYILPCSPGWRLRLAASFLLSVFPLLDLLPVALPPGAGPGPIGLEVLAGCVAAVAWISHSLALWVLAHSPHGHSRGPLALALVALLPAPALVLTVLWHCQRGTLLPPLLPGPMARLCLLILQLAALLAYALGWAAPGGPREPWAQEPLLPEDQEPEVAEDGESWLSRFSYAWLAPLLARGACGELRQPQDICRLPHRLQPTYLARVFQAHWQEGARLWRALYGAFGRCYLALGLLKLVGTMLGFSGPLLLSLLVGFLEEGQEPLSHGLLYALGLAGGAVLGAVLQNQYGYEVYKVTLQARGAVLNILYCKALQLGPSRPPTGEALNLLGTDSERLLNFAGSFHEAWGLPLQLAITLYLLYQQVGVAFVGGLILALLLVPVNKVIATRIMASNQEMLQHKDARVKLVTELLSGIRVIKFCGWEQALGARVEACRARELGRLRVIKYLDAACVYLWAALPVVISIVIFITYVLMGHQLTATKVFTALALVRMLILPLNNFPWVINGLLEAKVSLDRIQLFLDLPNHNPQAYYSPDCGRLGAQIKWLLCSDPPAEPSTVLELHGALFSWDPVGTSLETFISHLEVKKGMLVGIVGKVGCGKSSLLAAIAGELHRLRGHVAVRGLSKGFGLATQEPWIQFATIRDNILFGKTFDAQLYKEVLEACALNDDLSILPAGDQTEVGEKGVTLSGGQRARIALARAVYQEKELYLLDDPLAAVDADVANHLLHRCILGMLSYTTRLLCTHRTEYLERADAVLLMEAGRLIRAGPPSEILPLVQAVPKAWAENGQESDSATAQSVQNPEKTKEGLEEEQSTSGRLLQEESKKEGAVALHVYQAYWKAVGQGLALAILFSLLLMQATRNAADWWLSHWISQLKAENSSQEAQPSTSPASMGLFSPQLLLFSPGNLYIPVFPLPKAAPNGSSDIRFYLTVYATIAGVNSLCTLLRAVLFAAGTLQAAATLHRRLLHRVLMAPVTFFNATPTGRILNRFSSDVACADDSLPFILNILLANAAGLLGLLAVLGSGLPWLLLLLPPLSIMYYHVQRHYRASSRELRRLGSLTLSPLYSHLADTLAGLSVLRATGATYRFEEENLRLLELNQRCQFATSATMQWLDIRLQLMGAAVVSAIAGIALVQHQQGLANPGLVGLSLSYALSLTGLLSGLVSSFTQTEAMLVSVERLEEYTCDLPQEPQGQPLQLGTGWLTQGGVEFQDVVLAYRPGLPNALDGVTFCVQPGEKLGIVGRTGSGKSSLLLVLFRLLEPSSGRVLLDGVDTSQLELAQLRSQLAIIPQEPFLFSGTVRENLDPQGLHKDRALWQALKQCHLSEVITSMGGLDGELGEGGRSLSLGQRQLLCLARALLTDAKILCIDEATASVDQKTDQLLQQTICKRFANKTVLTIAHRLNTILNSDRVLVLQAGRVVELDSPATLRNQPHSLFQQLLQSSQQGVPASLGGP

SEQ ID NO: 7706 - protein, 277 aa, Homo sapiens
  Payload ID: 1620;
  Gene Symbol: ABCC10;
  Gene Name: ATP-binding cassette, sub-family C (CFTR/MRP), member 10;
  ENSP ID: ENSP00000361593
MASNQEMLQHKDARVKLVTELLSGIRVIKFCGWEQALGARVEACRARELGRLRVIKYLDAACVYLWAALPVVISIVIFITYVLMGHQLTATKVFTALALVRMLILPLNNFPWVINGLLEAKVSLDRIQLFLDLPNHNPQAYYSPDPPAEPSTVLELHGALFSWDPVGTSLETFISHLEVKKGMLVGIVGKVGCGKSSLLAAIAGELHRLRGHVAVRGLSKGFGLATQEPWIQFATIRDNILFGKTFDAQLYKEVLEACALNDDLSILPAGDQTEVGE

SEQ ID NO: 7707 - protein, 1492 aa, Homo sapiens
  Payload ID: 1620;
  Gene Symbol: ABCC10;
  Gene Name: ATP-binding cassette, sub-family C (CFTR/MRP), member 10;
  Uniprot ID:  Q5T3U5;
  ENSP ID: ENSP00000361608
MERLLAQLCGSSAAWPLPLWEGDTTGHCFTQLVLSALPHALLAVLSACYLGTPRSPDYILPCSPGWRLRLAASFLLSVFPLLDLLPVALPPGAGPGPIGLEVLAGCVAAVAWISHSLALWVLAHSPHGHSRGPLALALVALLPAPALVLTVLWHCQRGTLLPPLLPGPMARLCLLILQLAALLAYALGWAAPGGPREPWAQEPLLPEDQEPEVAEDGESWLSRFSYAWLAPLLARGACGELRQPQDICRLPHRLQPTYLARVFQAHWQEGARLWRALYGAFGRCYLALGLLKLVGTMLGFSGPLLLSLLVGFLEEGQEPLSHGLLYALGLAGGAVLGAVLQNQYGYEVYKVTLQARGAVLNILYCKALQLGPSRPPTGEALNLLGTDSERLLNFAGSFHEAWGLPLQLAITLYLLYQQVGVAFVGGLILALLLVPVNKVIATRIMASNQEMLQHKDARVKLVTELLSGIRVIKFCGWEQALGARVEACRARELGRLRVIKYLDAACVYLWAALPVVISIVIFITYVLMGHQLTATKVFTALALVRMLILPLNNFPWVINGLLEAKVSLDRIQLFLDLPNHNPQAYYSPDPPAEPSTVLELHGALFSWDPVGTSLETFISHLEVKKGMLVGIVGKVGCGKSSLLAAIAGELHRLRGHVAVRGLSKGFGLATQEPWIQFATIRDNILFGKTFDAQLYKEVLEACALNDDLSILPAGDQTEVGEKGVTLSGGQRARIALARAVYQEKELYLLDDPLAAVDADVANHLLHRCILGMLSYTTRLLCTHRTEYLERADAVLLMEAGRLIRAGPPSEILPLVQAVPKAWAENGQESDSATAQSVQNPEKTKEGLEEEQSTSGRLLQEESKKEGAVALHVYQAYWKAVGQGLALAILFSLLLMQATRNAADWWLSHWISQLKAENSSQEAQPSTSPASMGLFSPQLLLFSPGNLYIPVFPLPKAAPNGSSDIRFYLTVYATIAGVNSLCTLLRAVLFAAGTLQAAATLHRRLLHRVLMAPVTFFNATPTGRILNRFSSDVACADDSLPFILNILLANAAGLLGLLAVLGSGLPWLLLLLPPLSIMYYHVQRHYRASSRELRRLGSLTLSPLYSHLADTLAGLSVLRATGATYRFEEENLRLLELNQRCQFATSATMQWLDIRLQLMGAAVVSAIAGIALVQHQQGLANPGLVGLSLSYALSLTGLLSGLVSSFTQTEAMLVSVERLEEYTCDLPQEPQGQPLQLGTGWLTQGGVEFQDVVLAYRPGLPNALDGVTFCVQPGEKLGIVGRTGSGKSSLLLVLFRLLEPSSGRVLLDGVDTSQLELAQLRSQLAIIPQEPFLFSGTVRENLDPQGLHKDRALWQALKQCHLSEVITSMGGLDGELGEGGRSLSLGQRQLLCLARALLTDAKILCIDEATASVDQKTDQLLQQTICKRFANKTVLTIAHRLNTILNSDRVLVLQAGRVVELDSPATLRNQPHSLFQQLLQSSQQGVPASLGGP

SEQ ID NO: 7708 - protein, 129 aa, Homo sapiens
  Payload ID: 1620;
  Gene Symbol: ABCC10;
  Gene Name: ATP-binding cassette, sub-family C (CFTR/MRP), member 10;
  ENSP ID: ENSP00000422699
EEGIARKALYKLTAARADQGAEMEDRMSRQGQRTPSAQILCIDEATASVDQKTDQLLQQTICKRFANKTVLTIAHRLNTILNSDRVLVLQAGRVVELDSPATLRNQPHSLFQQLLQSSQQGVPASLGGP

SEQ ID NO: 7709 - protein, 1344 aa, Homo sapiens
  Payload ID: 1621;
  Gene Symbol: ABCC11;
  Gene Name: ATP-binding cassette, sub-family C (CFTR/MRP), member 11;
  Uniprot ID:  Q96J66;
  ENSP ID: ENSP00000311326
MTRKRTYWVPNSSGGLVNRGIDIGDDMVSGLIYKTYTLQDGPWSQQERNPEAPGRAAVPPWGKYDAALRTMIPFRPKPRFPAPQPLDNAGLFSYLTVSWLTPLMIQSLRSRLDENTIPPLSVHDASDKNVQRLHRLWEEEVSRRGIEKASVLLVMLRFQRTRLIFDALLGICFCIASVLGPILIIPKILEYSEEQLGNVVHGVGLCFALFLSECVKSLSFSSSWIINQRTAIRFRAAVSSFAFEKLIQFKSVIHITSGEAISFFTGDVNYLFEGVCYGPLVLITCASLVICSISSYFIIGYTAFIAILCYLLVFPLAVFMTRMAVKAQHHTSEVSDQRIRVTSEVLTCIKLIKMYTWEKPFAKIIEDLRRKERKLLEKCGLVQSLTSITLFIIPTVATAVWVLIHTSLKLKLTASMAFSMLASLNLLRLSVFFVPIAVKGLTNSKSAVMRFKKFFLQESPVFYVQTLQDPSKALVFEEATLSWQQTCPGIVNGALELERNGHASEGMTRPRDALGPEEEGNSLGPELHKINLVVSKGMMLGVCGNTGSGKSSLLSAILEEMHLLEGSVGVQGSLAYVPQQAWIVSGNIRENILMGGAYDKARYLQVLHCCSLNRDLELLPFGDMTEIGERGLNLSGGQKQRISLARAVYSDRQIYLLDDPLSAVDAHVGKHIFEECIKKTLRGKTVVLVTHQLQYLEFCGQIILLENGKICENGTHSELMQKKGKYAQLIQKMHKEATSDMLQDTAKIAEKPKVESQALATSLEESLNGNAVPEHQLTQEEEMEEGSLSWRVYHHYIQAAGGYMVSCIIFFFVVLIVFLTIFSFWWLSYWLEQGSGTNSSRESNGTMADLGNIADNPQLSFYQLVYGLNALLLICVGVCSSGIFTKVTRKASTALHNKLFNKVFRCPMSFFDTIPIGRLLNCFAGDLEQLDQLLPIFSEQFLVLSLMVIAVLLIVSVLSPYILLMGAIIMVICFIYYMMFKKAIGVFKRLENYSRSPLFSHILNSLQGLSSIHVYGKTEDFISQFKRLTDAQNNYLLLFLSSTRWMALRLEIMTNLVTLAVALFVAFGISSTPYSFKVMAVNIVLQLASSFQATARIGLETEAQFTAVERILQYMKMCVSEAPLHMEGTSCPQGWPQHGEIIFQDYHMKYRDNTPTVLHGINLTIRGHEVVGIVGRTGSGKSSLGMALFRLVEPMAGRILIDGVDICSIGLEDLRSKLSVIPQDPVLLSGTIRFNLDPFDRHTDQQIWDALERTFLTKAIILIDEATASIDMETDTLIQRTIREAFQGCTVLVIAHRVTTVLNCDHILVMGNGKVVEFDRPEVLRKKPGSLFAALMATATSSLR

SEQ ID NO: 7710 - protein, 1382 aa, Homo sapiens
  Payload ID: 1621;
  Gene Symbol: ABCC11;
  Gene Name: ATP-binding cassette, sub-family C (CFTR/MRP), member 11;
  Uniprot ID:  Q96J66;
  ENSP ID: ENSP00000349017
MTRKRTYWVPNSSGGLVNRGIDIGDDMVSGLIYKTYTLQDGPWSQQERNPEAPGRAAVPPWGKYDAALRTMIPFRPKPRFPAPQPLDNAGLFSYLTVSWLTPLMIQSLRSRLDENTIPPLSVHDASDKNVQRLHRLWEEEVSRRGIEKASVLLVMLRFQRTRLIFDALLGICFCIASVLGPILIIPKILEYSEEQLGNVVHGVGLCFALFLSECVKSLSFSSSWIINQRTAIRFRAAVSSFAFEKLIQFKSVIHITSGEAISFFTGDVNYLFEGVCYGPLVLITCASLVICSISSYFIIGYTAFIAILCYLLVFPLAVFMTRMAVKAQHHTSEVSDQRIRVTSEVLTCIKLIKMYTWEKPFAKIIEDLRRKERKLLEKCGLVQSLTSITLFIIPTVATAVWVLIHTSLKLKLTASMAFSMLASLNLLRLSVFFVPIAVKGLTNSKSAVMRFKKFFLQESPVFYVQTLQDPSKALVFEEATLSWQQTCPGIVNGALELERNGHASEGMTRPRDALGPEEEGNSLGPELHKINLVVSKGMMLGVCGNTGSGKSSLLSAILEEMHLLEGSVGVQGSLAYVPQQAWIVSGNIRENILMGGAYDKARYLQVLHCCSLNRDLELLPFGDMTEIGERGLNLSGGQKQRISLARAVYSDRQIYLLDDPLSAVDAHVGKHIFEECIKKTLRGKTVVLVTHQLQYLEFCGQIILLENGKICENGTHSELMQKKGKYAQLIQKMHKEATSDMLQDTAKIAEKPKVESQALATSLEESLNGNAVPEHQLTQEEEMEEGSLSWRVYHHYIQAAGGYMVSCIIFFFVVLIVFLTIFSFWWLSYWLEQGSGTNSSRESNGTMADLGNIADNPQLSFYQLVYGLNALLLICVGVCSSGIFTKVTRKASTALHNKLFNKVFRCPMSFFDTIPIGRLLNCFAGDLEQLDQLLPIFSEQFLVLSLMVIAVLLIVSVLSPYILLMGAIIMVICFIYYMMFKKAIGVFKRLENYSRSPLFSHILNSLQGLSSIHVYGKTEDFISQFKRLTDAQNNYLLLFLSSTRWMALRLEIMTNLVTLAVALFVAFGISSTPYSFKVMAVNIVLQLASSFQATARIGLETEAQFTAVERILQYMKMCVSEAPLHMEGTSCPQGWPQHGEIIFQDYHMKYRDNTPTVLHGINLTIRGHEVVGIVGRTGSGKSSLGMALFRLVEPMAGRILIDGVDICSIGLEDLRSKLSVIPQDPVLLSGTIRFNLDPFDRHTDQQIWDALERTFLTKAISKFPKKLHTDVVENGGNFSVGERQLLCIARAVLRNSKIILIDEATASIDMETDTLIQRTIREAFQGCTVLVIAHRVTTVLNCDHILVMGNGKVVEFDRPEVLRKKPGSLFAALMATATSSLR

SEQ ID NO: 7711 - protein, 1382 aa, Homo sapiens; identical to SEQ ID NO: 7710
  Payload ID: 1621;
  Gene Symbol: ABCC11;
  Gene Name: ATP-binding cassette, sub-family C (CFTR/MRP), member 11;
  Uniprot ID:  Q96J66;
  ENSP ID: ENSP00000378230

SEQ ID NO: 7712 - protein, 1382 aa, Homo sapiens; identical to SEQ ID NO: 7710
  Payload ID: 1621;
  Gene Symbol: ABCC11;
  Gene Name: ATP-binding cassette, sub-family C (CFTR/MRP), member 11;
  Uniprot ID:  Q96J66;
  ENSP ID: ENSP00000378231

SEQ ID NO: 7713 - protein, 159 aa, Homo sapiens
  Payload ID: 1621;
  Gene Symbol: ABCC11;
  Gene Name: ATP-binding cassette, sub-family C (CFTR/MRP), member 11;
  ENSP ID: ENSP00000456268
MTRKRTYWVPNSSGGLVNRGIDIGDDMVSGLIYKTYTLQDGPWSQQERNPEAPGRAAVPPWGKYDAALRTMIPFRPKPRFPAPQPLDNAGLFSYLTVSWLTPLMIQSLRSRLDENTIPPLSVHDASDKNVQRLHRLWEEEVSRRGIEKASVLLVMLRFQ

SEQ ID NO: 7714 - protein, 1359 aa, Homo sapiens
  Payload ID: 1622;
  Gene Symbol: ABCC12;
  Gene Name: ATP-binding cassette, sub-family C (CFTR/MRP), member 12;
  Uniprot ID:  Q96J65;
  ENSP ID: ENSP00000311030
MVGEGPYLISDLDQRGRRRSFAERYDPSLKTMIPVRPCARLAPNPVDDAGLLSFATFSWLTPVMVKGYRQRLTVDTLPPLSTYDSSDTNAKRFRVLWDEEVARVGPEKASLSHVVWKFQRTRVLMDIVANILCIIMAAIGPVILIHQILQQTERTSGKVWVGIGLCIALFATEFTKVFFWALAWAINYRTAIRLKVALSTLVFENLVSFKTLTHISVGEVLNILSSDSYSLFEAALFCPLPATIPILMVFCAAYAFFILGPTALIGISVYVIFIPVQMFMAKLNSAFRRSAILVTDKRVQTMNEFLTCIRLIKMYAWEKSFTNTIQDIRRRERKLLEKAGFVQSGNSALAPIVSTIAIVLTLSCHILLRRKLTAPVAFSVIAMFNVMKFSIAILPFSIKAMAEANVSLRRMKKILIDKSPPSYITQPEDPDTVLLLANATLTWEHEASRKSTPKKLQNQKRHLCKKQRSEAYSERSPPAKGATGPEEQSDSLKSVLHSISFVVRKGKILGICGNVGSGKSSLLAALLGQMQLQKGVVAVNGTLAYVSQQAWIFHGNVRENILFGEKYDHQRYQHTVRVCGLQKDLSNLPYGDLTEIGERGLNLSGGQRQRISLARAVYSDRQLYLLDDPLSAVDAHVGKHVFEECIKKTLRGKTVVLVTHQLQFLESCDEVILLEDGEICEKGTHKELMEERGRYAKLIHNLRGLQFKDPEHLYNAAMVEAFKESPAEREEDAGIIVLAPGNEKDEGKESETGSEFVDTKVPEHQLIQTESPQEGTVTWKTYHTYIKASGGYLLSLFTVFLFLLMIGSAAFSNWWLGLWLDKGSRMTCGPQGNRTMCEVGAVLADIGQHVYQWVYTASMVFMLVFGVTKGFVFTKTTLMASSSLHDTVFDKILKSPMSFFDTTPTGRLMNRFSKDMDELDVRLPFHAENFLQQFFMVVFILVILAAVFPAVLLVVASLAVGFFILLRIFHRGVQELKKVENVSRSPWFTHITSSMQGLGIIHAYGKKESCITYHLLYFNCALRWFALRMDVLMNILTFTVALLVTLSFSSISTSSKGLSLSYIIQLSGLLQVCVRTGTETQAKFTSVELLREYISTCVPECTHPLKVGTCPKDWPSRGEITFRDYQMRYRDNTPLVLDSLNLNIQSGQTVGIVGRTGSGKSSLGMALFRLVEPASGTIFIDEVDICILSLEDLRTKLTVIPQDPVLFVGTVRYNLDPFESHTDEMLWQVLERTFMRDTIMKLPEKLQAEVTENGENFSVGERQLLCVARALLRNSKIILLDEATASMDSKTDTLVQNTIKDAFKGCTVLTIAHRLNTVLNCDHVLVMENGKVIEFDKPEVLAEKPDSAFAMLLAAEVRL

SEQ ID NO: 7715 - protein, 1009 aa, Homo sapiens
  Payload ID: 1622;
  Gene Symbol: ABCC12;
  Gene Name: ATP-binding cassette, sub-family C (CFTR/MRP), member 12;
  Uniprot ID:  Q96J65;
  ENSP ID: ENSP00000431232
MVGEGPYLISDLDQRGRRRSFAERYDPSLKTMIPVRPCARLAPNPVDDAGLLSFATFSWLTPVMVKGYRQRLTVDTLPPLSTYDSSDTNAKRFRVLWDEEVARVGPEKASLSHVVWKFQRTRVLMDIVANILCIIMAAIGPTVLIHQILQQTERTSGKVWVGIGLCIALFATEFTKVFFWALAWAINYRTAIRLKVALSTLVFENLVSFKTLTHISVGEVLNILSSDSYSLFEAALFCPLPATIPILMVFCAAYAFFILGPTALIGISVYVIFIPVQMFMAKLNSAFRRSAILVTDKRVQTMNEFLTCIRLIKMYAWEKSFTNTIQDIRRRERKLLEKAGFVQSGNSALAPIVSTIAIVLTLSCHILLRRKLTAPVAFSVIAMFNVMKFSIAILPFSIKAMAEANVSLRRMKKILIDKSPPSYITQPEDPDTVLLLANATLTWEHEASRKSTPKKLQNQKRHLCKKQRSEAYSERSPPAKGATGPEEQSDSLKSVLHSISFVVRKGKILGICGNVGSGKSSLLAALLGQMQLQKGVVAVNGTLAYVSQQAWIFHGNVRENILFGEKYDHQRYQHTVRVCGLQKDLSNLPYGDLTEIGERGLNLSGGQRQRISLARAVYSDRQLYLLDDPLSAVDAHVGKHVFEECIKKTLRGKTVVLVTHQLQFLESCDEVILLEDGEICEKGTHKELMEERGRYAKLIHNLRGLQFKDPEHLYNAAMVEAFKESPAEREEDAVLAPGNEKDEGKESETGSEFVDTKVPEHQLIQTESPQEGTVTWKTYHTYIKASGGYLLSLFTVFLFLLMIGSAAFSNWWLGLWLDKGSRMTCGPQGNRTMCEVGAVLADIGQHVYQWVYTASMVFMLVFGVTKGFVFTKTTLMASSSLHDTVFDKILKSPMSFFDTTPTGRLMNRFSKDMDELDVRLPFHAENFLQQFFMVVFILVILAAVFPAVLLVVASLAVGFFILLRIFHRGVQELKKVENVSRSPWFTHITSSMQGLGIIHAYGKKESCIT

SEQ ID NO: 7716 - protein, 930 aa, Homo sapiens
  Payload ID: 1622;
  Gene Symbol: ABCC12;
  Gene Name: ATP-binding cassette, sub-family C (CFTR/MRP), member 12;
  Uniprot ID:  Q96J65;
  ENSP ID: ENSP00000431354
MVGEGPYLISDLDQRGRRRSFAERYDPSLKTMIPVRPCARLAPNPVDDAGLLSFATFSWLTPVMVKGYRQRLTVDTLPPLSTYDSSDTNAKRFRVLWDEEVARVGPEKASLSHVVWKFQRTRVLMDIVANILCIIMAAIGPTVLIHQILQQTERTSGKVWVGIGLCIALFATEFTKVFFWALAWAINYRTAIRLKVALSTLVFENLVSFKTLTHISVGEMFMAKLNSAFRRSAILVTDKRVQTMNEFLTCIRLIKMYAWEKSFTNTIQDIRRRERKLLEKAGFVQSGNSALAPIVSTIAIVLTLSCHILLRRKLTAPVAFSVIAMFNVMKFSIAILPFSIKAMAEANVSLRRMKKILIDKSPPSYITQPEDPDTVLLLANATLTWEHEASRKSTPKKLQNQKRHLCKKQRSEAYSERSPPAKGATGPEEQSDSLKSVLHSISFVVRKGKILGICGNVGSGKSSLLAALLGQMQLQKGVVAVNGTLAYVSQQAWIFHGNVRENILFGEKYDHQRYQHTVRVCGLQKDLSNLPYGDLTEIGERGLNLSGGQRQRISLARAVYSDRQLYLLDDPLSAVDAHVGKHVFEECIKKTLRGKTVVLVTHQLQFLESCDEVILLEDGEICEKGTHKELMEERGRYAKLIHNLRGLQFKDPEHLYNAAMVEAFKESPAEREEDAGIIVPEHQLIQTESPQEGTVTWKTYHTYIKASGGYLLSLFTVFLFLLMIGSAAFSNWWLGLWLDKGSRMTCGPQGNRTMCEVGAVLADIGQHVYQWVYTASMVFMLVFGVTKGFVFTKTTLMASSSLHDTVFDKILKSPMSFFDTTPTGRLMNRFSKDMDELDVRLPFHAENFLQQFFMVVFILVILAAVFPAVLLVVASLAVGFFILLRIFHRGVQELKKVENVSRSPWFTHITSSMQGLGIIHAYGKKESCIT

SEQ ID NO: 7717 - protein, 935 aa, Homo sapiens
  Payload ID: 1622;
  Gene Symbol: ABCC12;
  Gene Name: ATP-binding cassette, sub-family C (CFTR/MRP), member 12;
  Uniprot ID:  Q96J65;
  ENSP ID: ENSP00000433333
MVGEGPYLISDLDQRGRRRSFAERYDPSLKTMIPVRPCARLAPNPVDDAGLLSFATFSWLTPVMVKGYRQRLTVDTLPPLSTYDSSDTNAKRFRVLWDEEVARVGPEKASLSHVVWKFQRTRVLMDIVANILCIIMAAIGPTVLIHQILQQTERTSGKVWVGIGLCIALFATEFTKVFFWALAWAINYRTAIRLKVALSTLVFENLVSFKTLTHISVGEVLNILSSDSYSLFEAALFCPLPATIPILMVFCAAYAFFILGPTALIGISVYVIFIPVQMFMAKLNSAFRRSAILVTDKRVQTMNEFLTCIRLIKMYAWEKSFTNTIQDIRRRERKLLEKAGFVQSGNSALAPIVSTIAIVLTLSCHILLRRKLTAPVAFSVIAMFNVMKFSIAILPFSIKAMAEANVSLRRMKKILIDKSPPSYITQPEDPDTVLLLANATLTWEHEASRKSTPKKLQNQKRHLCKKQRSEAYSERSPPAKGATGPEEQSDSLKSVLHSISFVVRKGKILGICGNVGSGKSSLLAALLGQMQLQKGVVAVNGTLAYVSQQAWIFHGNVRENILFGEKYDHQRYQHTVRVCGLQKDLSNLPYGDLTEIGERGLNLSGGQRQRISLARAVYSDRQLYLLDDPLSAVDAHVGKHVFEECIKKTLRGKTVVLVTHQLQFLESCDEVILLEDGEICEKGTHKELMEERGRYAKLIHNLRGLQFKDPEHLYNAAMVEAFKESPAEREEDAVLAPGNEKDEGKESETGSEFVDTKVPEHQLIQTESPQEGTVTWKTYHTYIKASGGYLLSLFTVFLFLLMIGSAAFSNWWLGLWLDKGSRMTCGPQGNRTMCEVGAVLADIGQHVYQWVYTASMVFMLVFGVTKGFVFTKTTLMASSSLHDTVFDKHFPQRSPGAQEGGECQPVTLVHPHHLLHAGPGHHSRLWQEGELHHLV

SEQ ID NO: 7718 - protein, 633 aa, Homo sapiens
  Payload ID: 1622;
  Gene Symbol: ABCC12;
  Gene Name: ATP-binding cassette, sub-family C (CFTR/MRP), member 12;
  Uniprot ID:  Q96J65;
  ENSP ID: ENSP00000434510
MVGEGPYLISDLDQRGRRRSFAERYDPSLKTMIPVRPCARLAPNPVDDAGLLSFATFSWLTPVMVKGYRQRLTVDTLPPLSTYDSSDTNAKRFRVLWDEEVARVGPEKASLSHVVWKFQRTRVLMDIVANILCIIMAAIGPTVLIHQILQQTERTSGKVWVGIGLCIALFATEFTKVFFWALAWAINYRTAIRLKVALSTLVFENLVSFKTLTHISVGEVLNILSSDSYSLFEAALFCPLPATIPILMVFCAAYAFFILGPTALIGISVYVIFIPVQMFMAKLNSAFRRSAILVTDKRVQTMNEFLTCIRLIKMYAWEKSFTNTIQDIRRRERKLLEKAGFVQSGNSALAPIVSTIAIVLTLSCHILLRRKLTAPVAFSVIAMFNVMKFSIAILPFSIKAMAEANVSLRRMKKILIDKSPPSYITQPEDPDTVLLLANATLTWEHEASRKSTPKKLQNQKRHLCKKQRSEAYSERSPPAKGATGPEEQSDSLKSVLHSISFVVRKGKILGICGNVGSGKSSLLAALLGQMQLQKGVVAVNGTLAYVSQQAWIFHGNVRENILFGEKYDHQRLGSGASTSLGGRGRGLAWPALSTPTVSSTCWTTPCRPWTPTWGSTSLRSALRRRSGERQSSW

SEQ ID NO: 7719 - protein, 285 aa, Homo sapiens
  Payload ID: 1622;
  Gene Symbol: ABCC12;
  Gene Name: ATP-binding cassette, sub-family C (CFTR/MRP), member 12;
  ENSP ID: ENSP00000435715
MVGEGPYLISDLDQRGRRRSFAERYDPSLKTMIPVRPCARLAPNPVDDAGLLSFATFSWLTPVMVKGYRQRLTVDTLPPLSTYDSSDTNAKRFRVLWDEEVARVGPEKASLSHVVWKFQRTRVLMDIVANILCIIMAAIGPTVLIHQILQQTERTSGKVWVGIGLCIALFATEFTKVFFWALAWAINYRTAIRLKVALSTLVFENLVSFKTLTHISVGEVLNILSSDSYSLFEAALFCPLPATIPILMVFCAAYAFFILGPTALIGISVCLWPSSIQLSEGQQFW

SEQ ID NO: 7720 - protein, 106 aa, Homo sapiens
  Payload ID: 1622;
  Gene Symbol: ABCC12;
  Gene Name: ATP-binding cassette, sub-family C (CFTR/MRP), member 12;
  ENSP ID: ENSP00000436647
MVGEGPYLISDLDQRGRRRSFAERYDPSLKTMIPVRPCARLAPNPVDDAGLLSFATFSWLTPVMVKGYRQRLTVDTLPPLSTYDSSDTNAKRFRVLWDEEVARVGP

SEQ ID NO: 7721 - protein, 1009 aa, Homo sapiens; identical to SEQ ID NO: 7715
  Payload ID: 1622;
  Gene Symbol: ABCC12;
  Gene Name: ATP-binding cassette, sub-family C (CFTR/MRP), member 12;
  Uniprot ID:  Q96J65;
  ENSP ID: ENSP00000437047

SEQ ID NO: 7722 - protein, 293 aa, Homo sapiens
  Payload ID: 1623;
  Gene Symbol: ABCC2;
  Gene Name: ATP-binding cassette, sub-family C (CFTR/MRP), member 2;
  ENSP ID: ENSP00000359463
MLEKFCNSTFWNSSFLDSPEADLPLCFEQTVLVWIPLGYLWLLAPWQLLHVYKSRTKRSSTTKLYLAKQVFVGFLLILAAIELALVLTEDSGQATVPAVRYTNPSLYLGTWLLVLLIQYSRQWCVQKNSWFLSLFWILSILCGTFQFQTLIRTLLQGDNSNLAYSCLFFISYGFQILILIFSAFSENNESSNNPSSIASFLSSITYSWYDSIILKGYKRPLTLEDVWEVDEEMKTKTLVSKFETHMKRELQKARRALQRRQEKSSQQNSGARLPGLNKNQSQSQDALVLVTFP

SEQ ID NO: 7723 - protein, 1545 aa, Homo sapiens
  Payload ID: 1623;
  Gene Symbol: ABCC2;
  Gene Name: ATP-binding cassette, sub-family C (CFTR/MRP), member 2;
  Uniprot ID:  Q92887;
  ENSP ID: ENSP00000359478
MLEKFCNSTFWNSSFLDSPEADLPLCFEQTVLVWIPLGYLWLLAPWQLLHVYKSRTKRSSTTKLYLAKQVFVGFLLILAAIELALVLTEDSGQATVPAVRYTNPSLYLGTWLLVLLIQYSRQWCVQKNSWFLSLFWILSILCGTFQFQTLIRTLLQGDNSNLAYSCLFFISYGFQILILIFSAFSENNESSNNPSSIASFLSSITYSWYDSIILKGYKRPLTLEDVWEVDEEMKTKTLVSKFETHMKRELQKARRALQRRQEKSSQQNSGARLPGLNKNQSQSQDALVLEDVEKKKKKSGTKKDVPKSWLMKALFKTFYMVLLKSFLLKLVNDIFTFVSPQLLKLLISFASDRDTYLWIGYLCAILLFTAALIQSFCLQCYFQLCFKLGVKVRTAIMASVYKKALTLSNLARKEYTVGETVNLMSVDAQKLMDVTNFMHMLWSSVLQIVLSIFFLWRELGPSVLAGVGVMVLVIPINAILSTKSKTIQVKNMKNKDKRLKIMNEILSGIKILKYFAWEPSFRDQVQNLRKKELKNLLAFSQLQCVVIFVFQLTPVLVSVVTFSVYVLVDSNNILDAQKAFTSITLFNILRFPLSMLPMMISSMLQASVSTERLEKYLGGDDLDTSAIRHDCNFDKAMQFSEASFTWEHDSEATVRDVNLDIMAGQLVAVIGPVGSGKSSLISAMLGEMENVHGHITIKGTTAYVPQQSWIQNGTIKDNILFGTEFNEKRYQQVLEACALLPDLEMLPGGDLAEIGEKGINLSGGQKQRISLARATYQNLDIYLLDDPLSAVDAHVGKHIFNKVLGPNGLLKGKTRLLVTHSMHFLPQVDEIVVLGNGTIVEKGSYSALLAKKGEFAKNLKTFLRHTGPEEEATVHDGSEEEDDDYGLISSVEEIPEDAASITMRRENSFRRTLSRSSRSNGRHLKSLRNSLKTRNVNSLKEDEELVKGQKLIKKEFIETGKVKFSIYLEYLQAIGLFSIFFIILAFVMNSVAFIGSNLWLSAWTSDSKIFNSTDYPASQRDMRVGVYGALGLAQGIFVFIAHFWSAFGFVHASNILHKQLLNNILRAPMRFFDTTPTGRIVNRFAGDISTVDDTLPQSLRSWITCFLGIISTLVMICMATPVFTIIVIPLGIIYVSVQMFYVSTSRQLRRLDSVTRSPIYSHFSETVSGLPVIRAFEHQQRFLKHNEVRIDTNQKCVFSWITSNRWLAIRLELVGNLTVFFSALMMVIYRDTLSGDTVGFVLSNALNITQTLNWLVRMTSEIETNIVAVERITEYTKVENEAPWVTDKRPPPDWPSKGKIQFNNYQVRYRPELDLVLRGITCDIGSMEKIGVVGRTGAGKSSLTNCLFRILEAAGGQIIIDGVDIASIGLHDLREKLTIIPQDPILFSGSLRMNLDPFNNYSDEEIWKALELAHLKSFVASLQLGLSHEVTEAGGNLSIGQRQLLCLGRALLRKSKILVLDEATAAVDLETDNLIQTTIQNEFAHCTVITIAHRLHTIMDSDKVMVLDNGKIIECGSPEELLQIPGPFYFMAKEAGIENVNSTKF

SEQ ID NO: 7724 - protein, 1527 aa, Homo sapiens
  Payload ID: 1624;
  Gene Symbol: ABCC3;
  Gene Name: ATP-binding cassette, sub-family C (CFTR/MRP), member 3;
  Uniprot ID:  O15438;
  ENSP ID: ENSP00000285238
MDALCGSGELGSKFWDSNLSVHTENPDLTPCFQNSLLAWVPCIYLWVALPCYLLYLRHHCRGYIILSHLSKLKMVLGVLLWCVSWADLFYSFHGLVHGRAPAPVFFVTPLVVGVTMLLATLLIQYERLQGVQSSGVLIIFWFLCVVCAIVPFRSKILLAKAEGEISDPFRFTTFYIHFALVLSALILACFREKPPFFSAKNVDPNPYPETSAGFLSRLFFWWFTKMAIYGYRHPLEEKDLWSLKEEDRSQMVVQQLLEAWRKQEKQTARHKASAAPGKNASGEDEVLLGARPRPRKPSFLKALLATFGSSFLISACFKLIQDLLSFINPQLLSILIRFISNPMAPSWWGFLVAGLMFLCSMMQSLILQHYYHYIFVTGVKFRTGIMGVIYRKALVITNSVKRASTVGEIVNLMSVDAQRFMDLAPFLNLLWSAPLQIILAIYFLWQNLGPSVLAGVAFMVLLIPLNGAVAVKMRAFQVKQMKLKDSRIKLMSEILNGIKVLKLYAWEPSFLKQVEGIRQGELQLLRTAAYLHTTTTFTWMCSPFLVTLITLWVYVYVDPNNVLDAEKAFVSVSLFNILRLPLNMLPQLISNLTQASVSLKRIQQFLSQEELDPQSVERKTISPGYAITIHSGTFTWAQDLPPTLHSLDIQVPKGALVAVVGPVGCGKSSLVSALLGEMEKLEGKVHMKGSVAYVPQQAWIQNCTLQENVLFGKALNPKRYQQTLEACALLADLEMLPGGDQTEIGEKGINLSGGQRQRVSLARAVYSDADIFLLDDPLSAVDSHVAKHIFDHVIGPEGVLAGKTRVLVTHGISFLPQTDFIIVLADGQVSEMGPYPALLQRNGSFANFLCNYAPDEDQGHLEDSWTALEGAEDKEALLIEDTLSNHTDLTDNDPVTYVVQKQFMRQLSALSSDGEGQGRPVPRRHLGPSEKVQVTEAKADGALTQEEKAAIGTVELSVFWDYAKAVGLCTTLAICLLYVGQSAAAIGANVWLSAWTNDAMADSRQNNTSLRLGVYAALGILQGFLVMLAAMAMAAGGIQAARVLHQALLHNKIRSPQSFFDTTPSGRILNCFSKDIYVVDEVLAPVILMLLNSFFNAISTLVVIMASTPLFTVVILPLAVLYTLVQRFYAATSRQLKRLESVSRSPIYSHFSETVTGASVIRAYNRSRDFEIISDTKVDANQRSCYPYIISNRWLSIGVEFVGNCVVLFAALFAVIGRSSLNPGLVGLSVSYSLQVTFALNWMIRMMSDLESNIVAVERVKEYSKTETEAPWVVEGSRPPEGWPPRGEVEFRNYSVRYRPGLDLVLRDLSLHVHGGEKVGIVGRTGAGKSSMTLCLFRILEAAKGEIRIDGLNVADIGLHDLRSQLTIIPQDPILFSGTLRMNLDPFGSYSEEDIWWALELSHLHTFVSSQPAGLDFQCSEGGENLSVGQRQLVCLARALLRKSRILVLDEATAAIDLETDNLIQATIRTQFDTCTVLTIAHRLNTIMDYTRVLVLDKGVVAEFDSPANLIAARGIFYGMARDAGLA

SEQ ID NO: 7725 - protein, 572 aa, Homo sapiens
  Payload ID: 1624;
  Gene Symbol: ABCC3;
  Gene Name: ATP-binding cassette, sub-family C (CFTR/MRP), member 3;
  Uniprot ID:  O15438;
  ENSP ID: ENSP00000395160
MDALCGSGELGSKFWDSNLSVHTENPDLTPCFQNSLLAWVPCIYLWVALPCYLLYLRHHCRGYIILSHLSKLKMVLGVLLWCVSWADLFYSFHGLVHGRAPAPVFFVTPLVVGVTMLLATLLIQYERLQGVQSSGVLIIFWFLCVVCAIVPFRSKILLAKAEGEISDPFRFTTFYIHFALVLSALILACFREKPPFFSAKNVDPNPYPETSAGFLSRLFFWWFTKMAIYGYRHPLEEKDLWSLKEEDRSQMVVQQLLEAWRKQEKQTARHKASAAPGKNASGEDEVLLGARPRPRKPSFLKALLATFGSSFLISACFKLIQDLLSFINPQLLSILIRFISNPMAPSWWGFLVAGLMFLCSMMQSLILQHYYHYIFVTGVKFRTGIMGVIYRKALVITNSVKRASTVGEIVNLMSVDAQRFMDLAPFLNLLWSAPLQIILAIYFLWQNLGPSVLAGVAFMVLLIPLNGAVAVKMRAFQVKQMKLKDSRIKLMSEILNGIKVLKLYAWEPSFLKQVEGIRQGELQLLRTAAYLHTTTTFTWMCSPFLVRLGTGLGPCLQGSGCPGMARAHWTLP

SEQ ID NO: 7726 - protein, 300 aa, Homo sapiens
  Payload ID: 1624;
  Gene Symbol: ABCC3;
  Gene Name: ATP-binding cassette, sub-family C (CFTR/MRP), member 3;
  ENSP ID: ENSP00000421755
  MOD_RES (1)..(1): Any amino acid
XAPDEDQGHLEDSWTALEGAEDKEALLIEDTLSNHTDLTDNDPVTYVVQKQFMRQLSALSSDGEGQGRPVPRRHLGPSEKVQVTEAKADGALTQEEKAAIGTVELSVFWDYAKAVGLCTTLAICLLYVGQSAAAIGANVWLSAWTNDAMADSRQNNTSLRLGVYAALGILQGFLVMLAAMAMAAGGIQAARVLHQALLHNKIRSPQSFFDTTPSGRILNCFSKDIYVVDERFYAATSRQLKRLESVSRSPIYSHFSETVTGASVIRAYNRSRDFEIISDTKVDANQRSCYPYIISNRWLS

SEQ ID NO: 7727 - protein, 56 aa, Homo sapiens
  Payload ID: 1624;
  Gene Symbol: ABCC3;
  Gene Name: ATP-binding cassette, sub-family C (CFTR/MRP), member 3;
  ENSP ID: ENSP00000422058
ALTCLGASGSGSVWLELFTVMPIFSCWMTHCPRWTLMWPSTSLTTSSGQKACWQAR

SEQ ID NO: 7728 - protein, 76 aa, Homo sapiens
  Payload ID: 1624;
  Gene Symbol: ABCC3;
  Gene Name: ATP-binding cassette, sub-family C (CFTR/MRP), member 3;
  ENSP ID: ENSP00000422786
MDALCGSGELGSKFWHWGARESEEECAAGAQRHSAWLGESAPSQPLRRVRKGRFAISRGFLMEGLPSASASGKTEV

SEQ ID NO: 7729 - protein, 43 aa, Homo sapiens
  Payload ID: 1624;
  Gene Symbol: ABCC3;
  Gene Name: ATP-binding cassette, sub-family C (CFTR/MRP), member 3;
  ENSP ID: ENSP00000424981
  MOD_RES (1)..(1): Any amino acid
XALILACFREKPPFFSAKNVDPNPYPETSAGFLSRLFFWWFTK

SEQ ID NO: 7730 - protein, 43 aa, Homo sapiens
  Payload ID: 1624;
  Gene Symbol: ABCC3;
  Gene Name: ATP-binding cassette, sub-family C (CFTR/MRP), member 3;
  ENSP ID: ENSP00000425697
MDALCGSGELGSKFWNPAHCLTHQGPHQTLSRPRVTLQGRGSL

SEQ ID NO: 7731 - protein, 510 aa, Homo sapiens
  Payload ID: 1624;
  Gene Symbol: ABCC3;
  Gene Name: ATP-binding cassette, sub-family C (CFTR/MRP), member 3;
  Uniprot ID:  O15438;
  ENSP ID: ENSP00000427073
MDALCGSGELGSKFWDSNLSVHTENPDLTPCFQNSLLAWVPCIYLWVALPCYLLYLRHHCRGYIILSHLSKLKMVLGVLLWCVSWADLFYSFHGLVHGRAPAPVFFVTPLVVGVTMLLATLLIQYERLQGVQSSGVLIIFWFLCVVCAIVPFRSKILLAKAEGEISDPFRFTTFYIHFALVLSALILACFREKPPFFSAKNVDPNPYPETSAGFLSRLFFWWFTKLLNPDPLRGCLPGFTSPQDGHLWLPASPGGEGPLVPKGRGQIPDGGAAAAGGMEEAGKADGTTQGFSSTWEKCLRRGRGAAGCPAQAPEALLPEGPAGHLRLQLPHQCLLQAYPGPALLHQSTAAQHPDQVYLQPHGPLLVGLPGGWADVPVLHDAVADLTTLLPLHLCDWGEVSYWDHGCHLQEGSGYHQLSQTCVHCGGNCQPHVSGCPALHGPCPLPQSAVVSTPADHPGDLLPLAEPRSLCPGWSRFHGLADSTQRSCGREDARLPGKANEIEGLAHQADE

SEQ ID NO: 7732 - protein, 1238 aa, Homo sapiens
  Payload ID: 1624;
  Gene Symbol: ABCC3;
  Gene Name: ATP-binding cassette, sub-family C (CFTR/MRP), member 3;
  Uniprot ID:  O15438;
  ENSP ID: ENSP00000427521
MDALCGSGELGSKFWDSNLSVHTENPDLTPCFQNSLLAWVPCIYLWVALPCYLLYLRHHCRGYIILSHLSKLKMVLGVLLWCVSWADLFYSFHGLVHGRAPAPVFFVTPLVVGVTMLLATLLIQYERLQGVQSSGVLIIFWFLCVVCAIVPFRSKILLAKAEGEISDPFRFTTFYIHFALVLSALILACFREKPPFFSAKNVDPNPYPETSAGFLSRLFFWWFTKMAIYGYRHPLEEKDLWSLKEEDRSQMVVQQLLEAWRKQEKQTARHKASAAPGKNASGEDEVLLGARPRPRKPSFLKALLATFGSSFLISACFKLIQDLLSFINPQLLSILIRFISNPMAPSWWGFLVAGLMFLCSMMQSLILQHYYHYIFVTGVKFRTGIMGVIYRKALVITNSVKRASTVGEIVNLMSVDAQRFMDLAPFLNLLWSAPLQIILAIYFLWQNLGPSVLAGVAFMVLLIPLNGAVAVKMRAFQVKQMKLKDSRIKLMSEILNGIKVLKLYAWEPSFLKQVEGIRQGELQLLRTAAYLHTTTTFTWMCSPFLVTLITLWVYVYVDPNNVLDAEKAFVSVSLFNILRLPLNMLPQLISNLTQASVSLKRIQQFLSQEELDPQSVERKTISPGYAITIHSGTFTWAQDLPPTLHSLDIQVPKGALVAVVGPVGCGKSSLVSALLGEMEKLEGKVHMKGSVAYVPQQAWIQNCTLQENVLFGKALNPKRYQQTLEACALLADLEMLPGGDQTEIGEKGINLSGGQRQRVSLARAVYSDADIFLLDDPLSAVDSHVAKHIFDHVIGPEGVLAGKTRVLVTHGISFLPQTDFIIVLADGQVSEMGPYPALLQRNGSFANFLCNYAPDEDQGHLEDSWTALEGAEDKEALLIEDTLSNHTDLTDNDPVTYVVQKQFMRQLSALSSDGEGQGRPVPRRHLGPSEKVQVTEAKADGALTQEEKAAIGTVELSVFWDYAKAVGLCTTLAICLLYVGQSAAAIGANVWLSAWTNDAMADSRQNNTSLRLGVYAALGILQGFLVMLAAMAMAAGGIQAARVLHQALLHNKIRSPQSFFDTTPSGRILNCFSKDIYVVDEVLAPVILMLLNSFFNAISTLVVIMASTPLFTVVILPLAVLYTLVQRFYAATSRQLKRLESVSRSPIYSHFSETVTGASVIRAYNRSRDFEIISDTKVDANQRSCYPYIISNRSEAASLAPCSSRNSQQALWCSGSLSLLSPKQKTGPALPLPHFLLI

SEQ ID NO: 7733 - protein, 1325 aa, Homo sapiens
  Payload ID: 1625;
  Gene Symbol: ABCC4;
  Gene Name: ATP-binding cassette, sub-family C (CFTR/MRP), member 4;
  Uniprot ID:  O15439;
  ENSP ID: ENSP00000366084
MLPVYQEVKPNPLQDANLCSRVFFWWLNPLFKIGHKRRLEEDDMYSVLPEDRSQHLGEELQGFWDKEVLRAENDAQKPSLTRAIIKCYWKSYLVLGIFTLIEESAKVIQPIFLGKIINYFENYDPMDSVALNTAYAYATVLTFCTLILAILHHLYFYHVQCAGMRLRVAMCHMIYRKALRLSNMAMGKTTTGQIVNLLSNDVNKFDQVTVFLHFLWAGPLQAIAVTALLWMEIGISCLAGMAVLIILLPLQSCFGKLFSSLRSKTATFTDARIRTMNEVITGIRIIKMYAWEKSFSNLITNLRKKEISKILRSSCLRGMNLASFFSASKIIVFVTFTTYVLLGSVITASRVFVAVTLYGAVRLTVTLFFPSAIERVSEAIVSIRRIQTFLLLDEISQRNRQLPSDGKKMVHVQDFTAFWDKASETPTLQGLSFTVRPGELLAVVGPVGAGKSSLLSAVLGELAPSHGLVSVHGRIAYVSQQPWVFSGTLRSNILFGKKYEKERYEKVIKACALKKDLQLLEDGDLTVIGDRGTTLSGGQKARVNLARAVYQDADIYLLDDPLSAVDAEVSRHLFELCICQILHEKITILVTHQLQYLKAASQILILKDGKMVQKGTYTEFLKSGIDFGSLLKKDNEESEQPPVPGTPTLRNRTFSESSVWSQQSSRPSLKDGALESQDTENVPVTLSEENRSEGKVGFQAYKNYFRAGAHWIVFIFLILLNTAAQVAYVLQDWWLSYWANKQSMLNVTVNGGGNVTEKLDLNWYLGIYSGLTVATVLFGIARSLLVFYVLVNSSQTLHNKMFESILKAPVLFFDRNPIGRILNRFSKDIGHLDDLLPLTFLDFIQTLLQVVGVVSVAVAVIPWIAIPLVPLGIIFIFLRRYFLETSRDVKRLESTTRSPVFSHLSSSLQGLWTIRAYKAEERCQELFDAHQDLHSEAWFLFLTTSRWFAVRLDAICAMFVIIVAFGSLILAKTLDAGQVGLALSYALTLMGMFQWCVRQSAEVENMMISVERVIEYTDLEKEAPWEYQKRPPPAWPHEGVIIFDNVNFMYSPGGPLVLKHLTALIKSQEKVGIVGRTGAGKSSLISALFRLSEPEGKIWIDKILTTEIGLHDLRKKMSIIPQEPVLFTGTMRKNLDPFNEHTDEELWNALQEVQLKETIEDLPGKMDTELAESGSNFSVGQRQLVCLARAILRKNQILIIDEATANVDPRTDELIQKKIREKFAHCTVLTIAHRLNTIIDSDKIMVLDSGRLKEYDEPYVLLQNKESLFYKMVQQLGKAEAAALTETAKQVYFKRNYPHIGHTDHMVTNTSNGQPSTLTIFETAL

SEQ ID NO: 7734 - protein, 784 aa, Homo sapiens
  Payload ID: 1625;
  Gene Symbol: ABCC4;
  Gene Name: ATP-binding cassette, sub-family C (CFTR/MRP), member 4;
  Uniprot ID:  O15439;
  ENSP ID: ENSP00000442024
MLPVYQEVKPNPLQDANLCSRVFFWWLNPLFKIGHKRRLEEDDMYSVLPEDRSQHLGEELQGFWDKEVLRAENDAQKPSLTRAIIKCYWKSYLVLGIFTLIEALRLSNMAMGKTTTGQIVNLLSNDVNKFDQVTVFLHFLWAGPLQAIAVTALLWMEIGISCLAGMAVLIILLPLQSCFGKLFSSLRSKTATFTDARIRTMNEVITGIRIIKMYAWEKSFSNLITNLRKKEISKILRSSCLRGMNLASFFSASKIIVFVTFTTYVLLGSVITASRVFVAVTLYGAVRLTVTLFFPSAIERVSEAIVSIRRIQTFLLLDEISQRNRQLPSDGKKMVHVQDFTAFWDKASETPTLQGLSFTVRPGELLAVVGPVGAGKSSLLSAVLGELAPSHGLVSVHGRIAYVSQQPWVFSGTLRSNILFGKKYEKERYEKVIKACALKKDLQLLEDGDLTVIGDRGTTLSGGQKARVNLARAVYQDADIYLLDDPLSAVDAEVSRHLFELCICQILHEKITILVTHQLQYLKAASQILILKDGKMVQKGTYTEFLKSGIDFGSLLKKDNEESEQPPVPGTPTLRNRTFSESSVWSQQSSRPSLKDGALESQDTENVPVTLSEENRSEGKVGFQAYKNYFRAGAHWIVFIFLILLNTAAQVAYVLQDWWLSYWANKQSMLNVTVNGGGNVTEKLDLNWYLGIYSGLTVATVLFGIARSLLVFYVLVNSSQTLHNKMFESILKAPVLFFDRNPIGRILNRFSKDIGHLDDLLPLTFLDFIQRWDLAVLSWLVSNS

SEQ ID NO: 7735 - protein, 859 aa, Homo sapiens
  Payload ID: 1625;
  Gene Symbol: ABCC4;
  Gene Name: ATP-binding cassette, sub-family C (CFTR/MRP), member 4;
  Uniprot ID:  O15439;
  ENSP ID: ENSP00000487081
MLPVYQEVKPNPLQDANLCSRVFFWWLNPLFKIGHKRRLEEDDMYSVLPEDRSQHLGEELQGFWDKEVLRAENDAQKPSLTRAIIKCYWKSYLVLGIFTLIEESAKVIQPIFLGKIINYFENYDPMDSVALNTAYAYATVLTFCTLILAILHHLYFYHVQCAGMRLRVAMCHMIYRKALRLSNMAMGKTTTGQIVNLLSNDVNKFDQVTVFLHFLWAGPLQAIAVTALLWMEIGISCLAGMAVLIILLPLQSCFGKLFSSLRSKTATFTDARIRTMNEVITGIRIIKMYAWEKSFSNLITNLRKKEISKILRSSCLRGMNLASFFSASKIIVFVTFTTYVLLGSVITASRVFVAVTLYGAVRLTVTLFFPSAIERVSEAIVSIRRIQTFLLLDEISQRNRQLPSDGKKMVHVQDFTAFWDKASETPTLQGLSFTVRPGELLAVVGPVGAGKSSLLSAVLGELAPSHGLVSVHGRIAYVSQQPWVFSGTLRSNILFGKKYEKERYEKVIKACALKKDLQLLEDGDLTVIGDRGTTLSGGQKARVNLARAVYQDADIYLLDDPLSAVDAEVSRHLFELCICQILHEKITILVTHQLQYLKAASQILILKDGKMVQKGTYTEFLKSGIDFGSLLKKDNEESEQPPVPGTPTLRNRTFSESSVWSQQSSRPSLKDGALESQDTENVPVTLSEENRSEGKVGFQAYKNYFRAGAHWIVFIFLILLNTAAQVAYVLQDWWLSYWANKQSMLNVTVNGGGNVTEKLDLNWYLGIYSGLTVATVLFGIARSLLVFYVLVNSSQTLHNKMFESILKAPVLFFDRNPIGRILNRFSKDIGHLDDLLPLTFLDFIQRWDLAVLSWLVSNS

SEQ ID NO: 7736 - protein, 1394 aa, Homo sapiens
  Payload ID: 1626;
  Gene Symbol: ABCC5;
  Gene Name: ATP-binding cassette, sub-family C (CFTR/MRP), member 5;
  Uniprot ID:  O15440;
  ENSP ID: ENSP00000265586
MKDIDIGKEYIIPSPGYRSVRERTSTSGTHRDREDSKFRRTRPLECQDALETAARAEGLSLDASMHSQLRILDEEHPKGKYHHGLSALKPIRTTSKHQHPVDNAGLFSCMTFSWLSSLARVAHKKGELSMEDVWSLSKHESSDVNCRRLERLWQEELNEVGPDAASLRRVVWIFCRTRLILSIVCLMITQLAGFSGPAFMVKHLLEYTQATESNLQYSLLLVLGLLLTEIVRSWSLALTWALNYRTGVRLRGAILTMAFKKILKLKNIKEKSLGELINICSNDGQRMFEAAAVGSLLAGGPVVAILGMIYNVIILGPTGFLGSAVFILFYPAMMFASRLTAYFRRKCVAATDERVQKMNEVLTYIKFIKMYAWVKAFSQSVQKIREEERRILEKAGYFQSITVGVAPIVVVIASVVTFSVHMTLGFDLTAAQAFTVVTVFNSMTFALKVTPFSVKSLSEASVAVDRFKSLFLMEEVHMIKNKPASPHIKIEMKNATLAWDSSHSSIQNSPKLTPKMKKDKRASRGKKEKVRQLQRTEHQAVLAEQKGHLLLDSDERPSPEEEEGKHIHLGHLRLQRTLHSIDLEIQEGKLVGICGSVGSGKTSLISAILGQMTLLEGSIAISGTFAYVAQQAWILNATLRDNILFGKEYDEERYNSVLNSCCLRPDLAILPSSDLTEIGERGANLSGGQRQRISLARALYSDRSIYILDDPLSALDAHVGNHIFNSAIRKHLKSKTVLFVTHQLQYLVDCDEVIFMKEGCITERGTHEELMNLNGDYATIFNNLLLGETPPVEINSKKETSGSQKKSQDKGPKTGSVKKEKAVKPEEGQLVQLEEKGQGSVPWSVYGVYIQAAGGPLAFLVIMALFMLNVGSTAFSTWWLSYWIKQGSGNTTVTRGNETSVSDSMKDNPHMQYYASIYALSMAVMLILKAIRGVVFVKGTLRASSRLHDELFRRILRSPMKFFDTTPTGRILNRFSKDMDEVDVRLPFQAEMFIQNVILVFFCVGMIAGVFPWFLVAVGPLVILFSVLHIVSRYQELLDDNQAPFFLFTCAMRWLAVRLDLISIALITTTGLMIVLMHGQIPPAYAGLAISYAVQLTGLFQFTVRLASETEARFTSVERINHYIKTLSLEAPARIKNKAPSPDWPQEGEVTFENAEMRYRENLPLVLKKVSFTIKPKEKIGIVGRTGSGKSSLGMALFRLVELSGGCIKIDGVRISDIGLADLRSKLSIIPQEPVLFSGTVRSNLDPFNQYTEDQIWDALERTHMKECIAQLPLKLESEVMENGDNFSVGERQLLCIARALLRHCKILILDEATAAMDTETDLLIQETIREAFADCTMLTIAHRLHTVLGSDRIMVLAQGQVVEFDTPSVLLSNDSSRFYAMFAAAENKVAVKG

SEQ ID NO: 7737 - protein, 1437 aa, Homo sapiens
  Payload ID: 1626;
  Gene Symbol: ABCC5;
  Gene Name: ATP-binding cassette, sub-family C (CFTR/MRP), member 5;
  Uniprot ID:  O15440;
  ENSP ID: ENSP00000333926
MKDIDIGKEYIIPSPGYRSVRERTSTSGTHRDREDSKFRRTRPLECQDALETAARAEGLSLDASMHSQLRILDEEHPKGKYHHGLSALKPIRTTSKHQHPVDNAGLFSCMTFSWLSSLARVAHKKGELSMEDVWSLSKHESSDVNCRRLERLWQEELNEVGPDAASLRRVVWIFCRTRLILSIVCLMITQLAGFSGPAFMVKHLLEYTQATESNLQYSLLLVLGLLLTEIVRSWSLALTWALNYRTGVRLRGAILTMAFKKILKLKNIKEKSLGELINICSNDGQRMFEAAAVGSLLAGGPVVAILGMIYNVIILGPTGFLGSAVFILFYPAMMFASRLTAYFRRKCVAATDERVQKMNEVLTYIKFIKMYAWVKAFSQSVQKIREEERRILEKAGYFQSITVGVAPIVVVIASVVTFSVHMTLGFDLTAAQAFTVVTVFNSMTFALKVTPFSVKSLSEASVAVDRFKSLFLMEEVHMIKNKPASPHIKIEMKNATLAWDSSHSSIQNSPKLTPKMKKDKRASRGKKEKVRQLQRTEHQAVLAEQKGHLLLDSDERPSPEEEEGKHIHLGHLRLQRTLHSIDLEIQEGKLVGICGSVGSGKTSLISAILGQMTLLEGSIAISGTFAYVAQQAWILNATLRDNILFGKEYDEERYNSVLNSCCLRPDLAILPSSDLTEIGERGANLSGGQRQRISLARALYSDRSIYILDDPLSALDAHVGNHIFNSAIRKHLKSKTVLFVTHQLQYLVDCDEVIFMKEGCITERGTHEELMNLNGDYATIFNNLLLGETPPVEINSKKETSGSQKKSQDKGPKTGSVKKEKAVKPEEGQLVQLEEKGQGSVPWSVYGVYIQAAGGPLAFLVIMALFMLNVGSTAFSTWWLSYWIKQGSGNTTVTRGNETSVSDSMKDNPHMQYYASIYALSMAVMLILKAIRGVVFVKGTLRASSRLHDELFRRILRSPMKFFDTTPTGRILNRFSKDMDEVDVRLPFQAEMFIQNVILVFFCVGMIAGVFPWFLVAVGPLVILFSVLHIVSRVLIRELKRLDNITQSPFLSHITSSIQGLATIHAYNKGQEFLHRYQELLDDNQAPFFLFTCAMRWLAVRLDLISIALITTTGLMIVLMHGQIPPAYAGLAISYAVQLTGLFQFTVRLASETEARFTSVERINHYIKTLSLEAPARIKNKAPSPDWPQEGEVTFENAEMRYRENLPLVLKKVSFTIKPKEKIGIVGRTGSGKSSLGMALFRLVELSGGCIKIDGVRISDIGLADLRSKLSIIPQEPVLFSGTVRSNLDPFNQYTEDQIWDALERTHMKECIAQLPLKLESEVMENGDNFSVGERQLLCIARALLRHCKILILDEATAAMDTETDLLIQETIREAFADCTMLTIAHRLHTVLGSDRIMVLAQGQVVEFDTPSVLLSNDSSRFYAMFAAAENKVAVKG

SEQ ID NO: 7738 - protein, 208 aa, Homo sapiens
  Payload ID: 1626;
  Gene Symbol: ABCC5;
  Gene Name: ATP-binding cassette, sub-family C (CFTR/MRP), member 5;
  Uniprot ID:  O15440;
  ENSP ID: ENSP00000371934
MKDIDIGKEYIIPSPGYRSVRERTSTSGTHRDREDSKFRRTRPLECQDALETAARAEGLSLDASMHSQLRILDEEHPKGKYHHGLSALKPIRTTSKHQHPVDNAGLFSCMTFSWLSSLARVAHKKGELSMEDVWSLSKHESSDVNCRRLERLWQEELNEVGPDAASLRRVVWIFCRTRLILSIVCLMITQLAGFSGPNFQDGCILRSE

SEQ ID NO: 7739 - protein, 225 aa, Homo sapiens
  Payload ID: 1626;
  Gene Symbol: ABCC5;
  Gene Name: ATP-binding cassette, sub-family C (CFTR/MRP), member 5;
  Uniprot ID:  O15440;
  ENSP ID: ENSP00000376358
MKDIDIGKEYIIPSPGYRSVRERTSTSGTHRDREDSKFRRTRPLECQDALETAARAEGLSLDASMHSQLRILDEEHPKGKYHHGLSALKPIRTTSKHQHPVDNAGLFSCMTFSWLSSLARVAHKKGELSMEDVWSLSKHESSDVNCRRLERLWQEELNEVGPDAASLRRVVWIFCRTRLILSIVCLMITQLAGFSGPPSFGDCSISAEVCGNRLHCTAILLSCFT

SEQ ID NO: 7740 - protein, 53 aa, Homo sapiens
  Payload ID: 1626;
  Gene Symbol: ABCC5;
  Gene Name: ATP-binding cassette, sub-family C (CFTR/MRP), member 5;
  ENSP ID: ENSP00000390911
MKDIDIGKEYIIPSPGYRSVRERTSTSGTHRDREDSKFRRTRPSQSLTLSPRL

SEQ ID NO: 7741 - protein, 147 aa, Homo sapiens
  Payload ID: 1626;
  Gene Symbol: ABCC5;
  Gene Name: ATP-binding cassette, sub-family C (CFTR/MRP), member 5;
  ENSP ID: ENSP00000399726
MKDIDIGKEYIIPSPGYRSVRERTSTSGTHRDREDSKFRRTRPLECQDALETAARAEGLSLDASMHSQLRILDEEHPKGKYHHGLSALKPIRTTSKHQHPVDNAGLFSCMTFSWLSSLARVAHKKGELSMEDVWSLSKHESSDVNCR

SEQ ID NO: 7742 - protein, 473 aa, Homo sapiens
  Payload ID: 1626;
  Gene Symbol: ABCC5;
  Gene Name: ATP-binding cassette, sub-family C (CFTR/MRP), member 5;
  ENSP ID: ENSP00000403510
MKDIDIGKEYIIPSPGYRSVRERTSTSGTHRDREDSKFRRTRPLECQDALETAARAEGLSLDASMHSQLRILDEEHPKGKYHHGLSALKPIRTTSKHQHPVDNAGLFSCMTFSWLSSLARVAHKKGELSMEDVWSLSKHESSDVNCRRLERLWQEELNEVGPDAASLRRVVWIFCRTRLILSIVCLMITQLAGFSGPAFMVKHLLEYTQATESNLQYSLLLVLGLLLTEIVRSWSLALTWALNYRTGVRLRGAILTMAFKKILKLKNIKEKSLGELINICSNDGQRMFEAAAVGSLLAGGPVVAILGMIYNVIILGPTGFLGSAVFILFYPAMMFASRLTAYFRRKCVAATDERVQKMNEVLTYIKFIKMYAWVKAFSQSVQKIREEERRILEKAGYFQSITVGVAPIVVVIASVVTFSVHMTLGFDLTAAQAFTVVTVFNSMTFALKVTPFSVKSLSEASVAVDRFKLPSTV

SEQ ID NO: 7743 - protein, 70 aa, Homo sapiens
  Payload ID: 1626;
  Gene Symbol: ABCC5;
  Gene Name: ATP-binding cassette, sub-family C (CFTR/MRP), member 5;
  ENSP ID: ENSP00000404302
  MOD_RES (1)..(1): Any amino acid
XFTIKPKEKIGIVGRTGSEHWGTQPSTKEEQHPQLCYPERSTGNILGSPRWGWPSSVWWSYLEAASRLME

SEQ ID NO: 7744 - protein, 231 aa, Homo sapiens
  Payload ID: 1626;
  Gene Symbol: ABCC5;
  Gene Name: ATP-binding cassette, sub-family C (CFTR/MRP), member 5;
  ENSP ID: ENSP00000404809
MKDIDIGKEYIIPSPGYRSVRERTSTSGTHRDREDSKFRRTRPLECQDALETAARAEGLSLDASMHSQLRILDEEHPKGKYHHGLSALKPIRTTSKHQHPVDNAGLFSCMTFSWLSSLARVAHKKGELSMEDVWSLSKHESSDVNCRRLERLWQEELNEVGPDAASLRRVVWIFCRTRLILSIVCLMITQLAGFSGPVSSNHPFRQSPGARPRPALTLLFCCRGCAQLWAR

SEQ ID NO: 7745 - protein, 53 aa, Homo sapiens
  Payload ID: 1626;
  Gene Symbol: ABCC5;
  Gene Name: ATP-binding cassette, sub-family C (CFTR/MRP), member 5;
  ENSP ID: ENSP00000409913
MKDIDIGKEYIIPSPGYRSVRERTSTSGTHRDREDSKFRRTRPRHSHCWPGCC

SEQ ID NO: 7746 - protein, 212 aa, Homo sapiens
  Payload ID: 1626;
  Gene Symbol: ABCC5;
  Gene Name: ATP-binding cassette, sub-family C (CFTR/MRP), member 5;
  Uniprot ID:  O15440;
  ENSP ID: ENSP00000416840
MKDIDIGKEYIIPSPGYRSVRERTSTSGTHRDREDSKFRRTRPLECQDALETAARAEGLSLDASMHSQLRILDEEHPKGKYHHGLSALKPIRTTSKHQHPVDNAGLFSCMTFSWLSSLARVAHKKGELSMEDVWSLSKHESSDVNCRRLERLWQEELNEVGPDAASLRRVVWIFCRTRLILSIVCLMITQLAGFSGPLAWCCQDLDLGGVSL

SEQ ID NO: 7747 - protein, 1503 aa, Homo sapiens
  Payload ID: 1627;
  Gene Symbol: ABCC6;
  Gene Name: ATP-binding cassette, sub-family C (CFTR/MRP), member 6;
  Uniprot ID:  O95255;
  ENSP ID: ENSP00000205557
MAAPAEPCAGQGVWNQTEPEPAATSLLSLCFLRTAGVWVPPMYLWVLGPIYLLFIHHHGRGYLRMSPLFKAKMVLGFALIVLCTSSVAVALWKIQQGTPEAPEFLIHPTVWLTTMSFAVFLIHTERKKGVQSSGVLFGYWLLCFVLPATNAAQQASGAGFQSDPVRHLSTYLCLSLVVAQFVLSCLADQPPFFPEDPQQSNPCPETGAAFPSKATFWWVSGLVWRGYRRPLRPKDLWSLGRENSSEELVSRLEKEWMRNRSAARRHNKAIAFKRKGGSGMKAPETEPFLRQEGSQWRPLLKAIWQVFHSTFLLGTLSLIISDVFRFTVPKLLSLFLEFIGDPKPPAWKGYLLAVLMFLSACLQTLFEQQNMYRLKVLQMRLRSAITGLVYRKVLALSSGSRKASAVGDVVNLVSVDVQRLTESVLYLNGLWLPLVWIVVCFVYLWQLLGPSALTAIAVFLSLLPLNFFISKKRNHHQEEQMRQKDSRARLTSSILRNSKTIKFHGWEGAFLDRVLGIRGQELGALRTSGLLFSVSLVSFQVSTFLVALVVFAVHTLVAENAMNAEKAFVTLTVLNILNKAQAFLPFSIHSLVQARVSFDRLVTFLCLEEVDPGVVDSSSSGSAAGKDCITIHSATFAWSQESPPCLHRINLTVPQGCLLAVVGPVGAGKSSLLSALLGELSKVEGFVSIEGAVAYVPQEAWVQNTSVVENVCFGQELDPPWLERVLEACALQPDVDSFPEGIHTSIGEQGMNLSGGQKQRLSLARAVYRKAAVYLLDDPLAALDAHVGQHVFNQVIGPGGLLQGTTRILVTHALHILPQADWIIVLANGAIAEMGSYQELLQRKGALMCLLDQARQPGDRGEGETEPGTSTKDPRGTSAGRRPELRRERSIKSVPEKDRTTSEAQTEVPLDDPDRAGWPAGKDSIQYGRVKATVHLAYLRAVGTPLCLYALFLFLCQQVASFCRGYWLSLWADDPAVGGQQTQAALRGGIFGLLGCLQAIGLFASMAAVLLGGARASRLLFQRLLWDVVRSPISFFERTPIGHLLNRFSKETDTVDVDIPDKLRSLLMYAFGLLEVSLVVAVATPLATVAILPLFLLYAGFQSLYVVSSCQLRRLESASYSSVCSHMAETFQGSTVVRAFRTQAPFVAQNNARVDESQRISFPRLVADRWLAANVELLGNGLVFAAATCAVLSKAHLSAGLVGFSVSAALQVTQTLQWVVRNWTDLENSIVSVERMQDYAWTPKEAPWRLPTCAAQPPWPQGGQIEFRDFGLRYRPELPLAVQGVSFKIHAGEKVGIVGRTGAGKSSLASGLLRLQEAAEGGIWIDGVPIAHVGLHTLRSRISIIPQDPILFPGSLRMNLDLLQEHSDEAIWAALETVQLKALVASLPGQLQYKCADRGEDLSVGQKQLLCLARALLRKTQILILDEATAAVDPGTELQMQAMLGSWFAQCTVLLIAHRLRSVMDCARVLVMDKGQVAESGSPAQLLAQKGLFYRLAQESGLV

SEQ ID NO: 7748 - protein, 871 aa, Homo sapiens
  Payload ID: 1627;
  Gene Symbol: ABCC6;
  Gene Name: ATP-binding cassette, sub-family C (CFTR/MRP), member 6;
  Uniprot ID:  O95255;
  ENSP ID: ENSP00000405002
MAAPAEPCAGQGVWNQTEPEPAATSLLSLCFLRTAGVWVPPMYLWVLGPIYLLFIHHHGRGYLRMSPLFKAKMVLGFALIVLCTSSVAVALWKIQQGTPEAPEFLIHPTVWLTTMSFAVFLIHTERKKGVQSSGVLFGYWLLCFVLPATNAAQQASGAGFQSDPVRHLSTYLCLSLVVAQFVLSCLADQPPFFPEDPQQSNPCPETGAAFPSKATFWWVSGLVWRGYRRPLRPKDLWSLGRENSSEELVSRLEKEWMRNRSAARRHNKAIAFKRKGGSGMKAPETEPFLRQEGSQWRPLLKAIWQVFHSTFLLGTLSLIISDVFRFTVPKLLSLFLEFIGDPKPPAWKGYLLAVLMFLSACLQTLFEQQNMYRLKVLQMRLRSAITGLVYRKVLALSSGSRKASAVGDVVNLVSVDVQRLTESVLYLNGLWLPLVWIVVCFVYLWQLLGPSALTAIAVFLSLLPLNFFISKKRNHHQEEQMRQKDSRARLTSSILRNSKTIKFHGWEGAFLDRVLGIRGQELGALRTSGLLFSVSLVSFQVSTFLVALVVFAVHTLVAENAMNAEKAFVTLTVLNILNKAQAFLPFSIHSLVQARVSFDRLVTFLCLEEVDPGVVDSSSSGSAAGKDCITIHSATFAWSQESPPCLHRINLTVPQGCLLAVVGPVGAGKSSLLSALLGELSKVEGFVSIEGAVAYVPQEAWVQNTSVVENVCFGQELDPPWLERVLEACALQPDVDSFPEGIHTSIGEQGMNLSGGQKQRLSLARAVYRKAAVYLLDDPLAALDAHVGQHVFNQVIGPGGLLQGTKQNLGPAPRTPEAPLQAGGPSLDARGPSSQSLRRTVPLQKPRQRFLWMTLTGQDGQQERTASNTAG

SEQ ID NO: 7749 - protein, 82 aa, Homo sapiens
  Payload ID: 1627;
  Gene Symbol: ABCC6;
  Gene Name: ATP-binding cassette, sub-family C (CFTR/MRP), member 6;
  ENSP ID: ENSP00000459243
MAAPAEPCAGQGVWNQTEPEPAATSLLSLCFLRTAGVWVPPMYLWVLGPIYLLFIHHHGRGYLRMSPLFKAKMRNQNILERP

SEQ ID NO: 7750 - protein, 99 aa, Homo sapiens
  Payload ID: 1627;
  Gene Symbol: ABCC6;
  Gene Name: ATP-binding cassette, sub-family C (CFTR/MRP), member 6;
  Uniprot ID:  O95255;
  ENSP ID: ENSP00000461686
MAAPAEPCAGQGVWNQTEPEPAATSLLSLCFLRTAGVWVPPMYLWVLGPIYLLFIHHHGRGYLRMSPLFKAKMVAAIPGSLEPGNVRGRQGTGWNLVKS

SEQ ID NO: 7751 - protein, 1503 aa, Homo sapiens
  Payload ID: 1627;
  Gene Symbol: ABCC6;
  Gene Name: ATP-binding cassette, sub-family C (CFTR/MRP), member 6;
  ENSP ID: ENSP00000479163
MAAPAEPCAGQGVWNQTEPEPAATSLLSLCFLRTAGVWVPPMYLWVLGPIYLLFIHHHGRGYLRMSPLFKAKMVLGFALIVLCTSSVAVALWKIQQGTPEAPEFLIHPTVWLTTMSFAVFLIHTERKKGVQSSGVLFGYWLLCFVLPATNAAQQASGAGFQSDPVRHLSTYLCLSLVVAQFVLSCLADQPPFFPEDPQQSNPCPETGAAFPSKATFWWVSGLVWRGYRRPLRPKDLWSLGRENSSEELVSRLEKEWMRNRSAARRHNKAIAFKRKGGSGMKAPETEPFLRQEGSQWRPLLKAIWQVFHSTFLLGTLSLIISDVFRFTVPKLLSLFLEFIGDPKPPAWKGYLLAVLMFLSACLQTLFEQQNMYRLKVLQMRLRSAITGLVYRKVLALSSGSRKASAVGDVVNLVSVDVQRLTESVLYLNGLWLPLVWIVVCFVYLWQLLGPSALTAIAVFLSLLPLNFFISKKRNHHQEEQMRQKDSRARLTSSILRNSKTIKFHGWEGAFLDRVLGIRGQELGALRTSGLLFSVSLVSFQVSTFLVALVVFAVHTLVAENAMNAEKAFVTLTVLNILNKAQAFLPFSIHSLVQARVSFDRLVTFLCLEEVDPGAVDSSSSGSAAGKDCITIQSATFAWSQESPPCLHRINLTVPQGCLLAVVGPVGAGKSSLLSALLGELSKVEGFVSIEGAVAYVPQEAWVQNTSVVENVCFGQELDPPWLERVLEACALQPDVDSFPEGIHTSIGEQGMNLSGGQKQRLSLARAVYRKAAVYLLDDPLAALDAHVGQHVFNQVIGPGGLLQGTTRILVTHALHILPQADWIIVLANGAIAEMGSYQELLQRKGALVCLLDQARQPGDRGEGETEPGTSTKDPRGTSAGRRPELRRERSIKSVPEKDRTTSEAQTEVPLDDPDRAGWPAGKDSIQYGRVKATVHLAYLRAVGTPLCLYALFLFLCQQVASFCRGYWLSLWADDPAVGGQQTQAALRGGIFGLLGCLQAIGLFASMAAVLLGGARASRLLFQRLLWDVVRSPISFFERTPIGHLLNRFSKETDTVDVDIPDKLRSLLMYAFGLLEVSLVVAVATPLATVAILPLFLLYAGFQSLYVVSSCQLRRLESASYSSVCSHMAETFQGSTVVRAFRTQAPFVAQNNARVDESQRISFPRLVADRWLAANVELLGNGLVFAAATCAVLSKAHLSAGLVGFSVSAALQVTQTLQWVVRNWTDLENSIVSVERMQDYAWTPKEAPWRLPTCAAQPPWPQGGQIEFQDFGLRYRPELPLAVQGVSFKIHAGEKVGIVGRTGAGKSSLASGLLRLQEAAEGGIWIDGVPIAHVGLHTLRSRISIIPQDPILFPGSLRMNLDLLQEHSDEAIWAALETVQLKALVASLPGQLQYKCADRGEDLSVGQKQLLCLARALLRKTQILILDEATAAVDPGTELQMQAMLGSWFAQCTVLLIAHRLRSVMDCARVLVMDKGQVAESGSPAQLLAQKGLFYRLAQESGLV

SEQ ID NO: 7752 - protein, 99 aa, Homo sapiens; identical to SEQ ID NO: 7750
  Payload ID: 1627;
  Gene Symbol: ABCC6;
  Gene Name: ATP-binding cassette, sub-family C (CFTR/MRP), member 6;
  Uniprot ID:  O95255;
  ENSP ID: ENSP00000481979

SEQ ID NO: 7753 - protein, 871 aa, Homo sapiens; identical to SEQ ID NO: 7748
  Payload ID: 1627;
  Gene Symbol: ABCC6;
  Gene Name: ATP-binding cassette, sub-family C (CFTR/MRP), member 6;
  Uniprot ID:  O95255;
  ENSP ID: ENSP00000483331

SEQ ID NO: 7754 - protein, 871 aa, Homo sapiens
  Payload ID: 1627;
  Gene Symbol: ABCC6;
  Gene Name: ATP-binding cassette, sub-family C (CFTR/MRP), member 6;
  ENSP ID: ENSP00000487705
MAAPAEPCAGQGVWNQTEPEPAATSLLSLCFLRTAGVWVPPMYLWVLGPIYLLFIHHHGRGYLRMSPLFKAKMVLGFALIVLCTSSVAVALWKIQQGTPEAPEFLIHPTVWLTTMSFAVFLIHTERKKGVQSSGVLFGYWLLCFVLPATNAAQQASGAGFQSDPVRHLSTYLCLSLVVAQFVLSCLADQPPFFPEDPQQSNPCPETGAAFPSKATFWWVSGLVWRGYRRPLRPKDLWSLGRENSSEELVSRLEKEWMRNRSAARRHNKAIAFKRKGGSGMKAPETEPFLRQEGSQWRPLLKAIWQVFHSTFLLGTLSLIISDVFRFTVPKLLSLFLEFIGDPKPPAWKGYLLAVLMFLSACLQTLFEQQNMYRLKVLQMRLRSAITGLVYRKVLALSSGSRKASAVGDVVNLVSVDVQRLTESVLYLNGLWLPLVWIVVCFVYLWQLLGPSALTAIAVFLSLLPLNFFISKKRNHHQEEQMRQKDSRARLTSSILRNSKTIKFHGWEGAFLDRVLGIRGQELGALRTSGLLFSVSLVSFQVSTFLVALVVFAVHTLVAENAMNAEKAFVTLTVLNILNKAQAFLPFSIHSLVQARVSFDRLVTFLCLEEVDPGAVDSSSSGSAAGKDCITIQSATFAWSQESPPCLHRINLTVPQGCLLAVVGPVGAGKSSLLSALLGELSKVEGFVSIEGAVAYVPQEAWVQNTSVVENVCFGQELDPPWLERVLEACALQPDVDSFPEGIHTSIGEQGMNLSGGQKQRLSLARAVYRKAAVYLLDDPLAALDAHVGQHVFNQVIGPGGLLQGTKQNLGPAPRTPEAPLQAGGPSLDARGPSSQSLRRTVPLQKPRQRFLWMTLTGQDGQQERTASNTAG

SEQ ID NO: 7755 - protein, 82 aa, Homo sapiens; identical to SEQ ID NO: 7749
  Payload ID: 1627;
  Gene Symbol: ABCC6;
  Gene Name: ATP-binding cassette, sub-family C (CFTR/MRP), member 6;
  ENSP ID: ENSP00000488537

SEQ ID NO: 7756 - protein, 1582 aa, Homo sapiens
  Payload ID: 1628;
  Gene Symbol: ABCC8;
  Gene Name: ATP-binding cassette, sub-family C (CFTR/MRP), member 8;
  Uniprot ID:  Q09428;
  ENSP ID: ENSP00000303960
MPLAFCGSENHSAAYRVDQGVLNNGCFVDALNVVPHVFLLFITFPILFIGWGSQSSKVHIHHSTWLHFPGHNLRWILTFMLLFVLVCEIAEGILSDGVTESHHLHLYMPAGMAFMAAVTSVVYYHNIETSNFPKLLIALLVYWTLAFITKTIKFVKFLDHAIGFSQLRFCLTGLLVILYGMLLLVEVNVIRVRRYIFFKTPREVKPPEDLQDLGVRFLQPFVNLLSKGTYWWMNAFIKTAHKKPIDLRAIGKLPIAMRALTNYQRLCEAFDAQVRKDIQGTQGARAIWQALSHAFGRRLVLSSTFRILADLLGFAGPLCIFGIVDHLGKENDVFQPKTQFLGVYFVSSQEFLANAYVLAVLLFLALLLQRTFLQASYYVAIETGINLRGAIQTKIYNKIMHLSTSNLSMGEMTAGQICNLVAIDTNQLMWFFFLCPNLWAMPVQIIVGVILLYYILGVSALIGAAVIILLAPVQYFVATKLSQAQRSTLEYSNERLKQTNEMLRGIKLLKLYAWENIFRTRVETTRRKEMTSLRAFAIYTSISIFMNTAIPIAAVLITFVGHVSFFKEADFSPSVAFASLSLFHILVTPLFLLSSVVRSTVKALVSVQKLSEFLSSAEIREEQCAPHEPTPQGPASKYQAVPLRVVNRKRPAREDCRGLTGPLQSLVPSADGDADNCCVQIMGGYFTWTPDGIPTLSNITIRIPRGQLTMIVGQVGCGKSSLLLAALGEMQKVSGAVFWSSSLPDSEIGEDPSPERETATDLDIRKRGPVAYASQKPWLLNATVEENIIFESPFNKQRYKMVIEACSLQPDIDILPHGDQTQIGERGINLSGGQRQRISVARALYQHANVVFLDDPFSALDIHLSDHLMQAGILELLRDDKRTVVLVTHKLQYLPHADWIIAMKDGTIQREGTLKDFQRSECQLFEHWKTLMNRQDQELEKETVTERKATEPPQGLSRAMSSRDGLLQDEEEEEEEAAESEEDDNLSSMLHQRAEIPWRACAKYLSSAGILLLSLLVFSQLLKHMVLVAIDYWLAKWTDSALTLTPAARNCSLSQECTLDQTVYAMVFTVLCSLGIVLCLVTSVTVEWTGLKVAKRLHRSLLNRIILAPMRFFETTPLGSILNRFSSDCNTIDQHIPSTLECLSRSTLLCVSALAVISYVTPVFLVALLPLAIVCYFIQKYFRVASRDLQQLDDTTQLPLLSHFAETVEGLTTIRAFRYEARFQQKLLEYTDSNNIASLFLTAANRWLEVRMEYIGACVVLIAAVTSISNSLHRELSAGLVGLGLTYALMVSNYLNWMVRNLADMELQLGAVKRIHGLLKTEAESYEGLLAPSLIPKNWPDQGKIQIQNLSVRYDSSLKPVLKHVNALIAPGQKIGICGRTGSGKSSFSLAFFRMVDTFEGHIIIDGIDIAKLPLHTLRSRLSIILQDPVLFSGTIRFNLDPERKCSDSTLWEALEIAQLKLVVKALPGGLDAIITEGGENFSQGQRQLFCLARAFVRKTSIFIMDEATASIDMATENILQKVVMTAFADRTVVTIAHRVHTILSADLVIVLKRGAILEFDKPEKLLSRKDSVFASFVRADK

SEQ ID NO: 7757 - protein, 1581 aa, Homo sapiens
  Payload ID: 1628;
  Gene Symbol: ABCC8;
  Gene Name: ATP-binding cassette, sub-family C (CFTR/MRP), member 8;
  Uniprot ID:  Q09428;
  ENSP ID: ENSP00000374467
MPLAFCGSENHSAAYRVDQGVLNNGCFVDALNVVPHVFLLFITFPILFIGWGSQSSKVHIHHSTWLHFPGHNLRWILTFMLLFVLVCEIAEGILSDGVTESHHLHLYMPAGMAFMAAVTSVVYYHNIETSNFPKLLIALLVYWTLAFITKTIKFVKFLDHAIGFSQLRFCLTGLLVILYGMLLLVEVNVIRVRRYIFFKTPREVKPPEDLQDLGVRFLQPFVNLLSKGTYWWMNAFIKTAHKKPIDLRAIGKLPIAMRALTNYQRLCEAFDAQVRKDIQGTQGARAIWQALSHAFGRRLVLSSTFRILADLLGFAGPLCIFGIVDHLGKENDVFQPKTQFLGVYFVSSQEFLANAYVLAVLLFLALLLQRTFLQASYYVAIETGINLRGAIQTKIYNKIMHLSTSNLSMGEMTAGQICNLVAIDTNQLMWFFFLCPNLWAMPVQIIVGVILLYYILGVSALIGAAVIILLAPVQYFVATKLSQAQRSTLEYSNERLKQTNEMLRGIKLLKLYAWENIFRTRVETTRRKEMTSLRAFAIYTSISIFMNTAIPIAAVLITFVGHVSFFKEADFSPSVAFASLSLFHILVTPLFLLSSVVRSTVKALVSVQKLSEFLSSAEIREEQCAPHEPTPQGPASKYQAVPLRVVNRKRPAREDCRGLTGPLQSLVPSADGDADNCCVQIMGGYFTWTPDGIPTLSNITIRIPRGQLTMIVGQVGCGKSSLLLAALGEMQKVSGAVFWSSLPDSEIGEDPSPERETATDLDIRKRGPVAYASQKPWLLNATVEENIIFESPFNKQRYKMVIEACSLQPDIDILPHGDQTQIGERGINLSGGQRQRISVARALYQHANVVFLDDPFSALDIHLSDHLMQAGILELLRDDKRTVVLVTHKLQYLPHADWIIAMKDGTIQREGTLKDFQRSECQLFEHWKTLMNRQDQELEKETVTERKATEPPQGLSRAMSSRDGLLQDEEEEEEEAAESEEDDNLSSMLHQRAEIPWRACAKYLSSAGILLLSLLVFSQLLKHMVLVAIDYWLAKWTDSALTLTPAARNCSLSQECTLDQTVYAMVFTVLCSLGIVLCLVTSVTVEWTGLKVAKRLHRSLLNRIILAPMRFFETTPLGSILNRFSSDCNTIDQHIPSTLECLSRSTLLCVSALAVISYVTPVFLVALLPLAIVCYFIQKYFRVASRDLQQLDDTTQLPLLSHFAETVEGLTTIRAFRYEARFQQKLLEYTDSNNIASLFLTAANRWLEVRMEYIGACVVLIAAVTSISNSLHRELSAGLVGLGLTYALMVSNYLNWMVRNLADMELQLGAVKRIHGLLKTEAESYEGLLAPSLIPKNWPDQGKIQIQNLSVRYDSSLKPVLKHVNALIAPGQKIGICGRTGSGKSSFSLAFFRMVDTFEGHIIIDGIDIAKLPLHTLRSRLSIILQDPVLFSGTIRFNLDPERKCSDSTLWEALEIAQLKLVVKALPGGLDAIITEGGENFSQGQRQLFCLARAFVRKTSIFIMDEATASIDMATENILQKVVMTAFADRTVVTIAHRVHTILSADLVIVLKRGAILEFDKPEKLLSRKDSVFASFVRADK

SEQ ID NO: 7758 - protein, 997 aa, Homo sapiens
  Payload ID: 1628;
  Gene Symbol: ABCC8;
  Gene Name: ATP-binding cassette, sub-family C (CFTR/MRP), member 8;
  ENSP ID: ENSP00000431653
MPLAFCGSENHSAAYRVDQGVLNNGCFVDALNVVPHVFLLFITFPILFIGWGSQSSKVHIHHSTWLHFPGHNLRWILTFMLLFVLVCEIAEGILSDGVTESHHLHLYMPAGMAFMAAVTSVVYYHNIETSNFPKLLIALLVYWTLAFITKTIKFVKFLDHAIGFSQLRFCLTGLLVILYGMLLLVEVNVIRVRRYIFFKTPREVKPPEDLQDLGVRFLQPFVNLLSKGTYWWMNAFIKTAHKKPIDLRAIGKLPIAMRALTNYQRLCEAFDAQVRKDIQGTQGARAIWQALSHAFGRRLVLSSTFRILADLLGFAGPLCIFGIVDHLGKENDVFQPKTQFLGVYFVSSQEFLANAYVLAVLLFLALLLQRTFLQASYYVAIETGINLRGAIQTKIYNKIMHLSTSNLSMGEMTAGQICNLVAIDTNQLMWFFFLCPNLWAMPVQIIVGVILLYYILGVSALIGAAVIILLAPVQYFVATKLSQAQRSTLEYSNERLKQTNEMLRGIKLLKLYAWENIFRTRVETTRRKEMTSLRAFAIYTSISIFMNTAIPIAAVLITFVGHVSFFKEADFSPSVAFASLSLFHILVTPLFLLSSVVRSTVKALVSAEIREEQCAPHEPTPQGPASKYQAVPLRVVNRKRPAREDCRGLTGPLQSLVPSADGDADNCCVQIMGGYFTWTPDGIPTLSNITIRIPRGQLTMIVGQVGCGKSSLLLAALGEMQKVSGAVFWSSLPDSEIGEDPSPERETATDLDIRKRGPVAYASQKPWLLNATVEENIIFESPFNKQRYKMVIEACSLQPDIDILPHGDQTQIGERGINLSGGQRQRISVARALYQHANVVFLDDPFSALDIHLSDHLMQAGILELLRDDKRTVVLVTHKLQYLPHADWIIAMKDGTIQREGTLKDFQRSECQLFEHWKTLMNRQDQELEKRRQLRARRMTTCRPCCTSVLRSHGEPAPSTCPPPASCSCRCWSSHSCSSTWSWWPSTTGWPSGPTAP

SEQ ID NO: 7759 - protein, 204 aa, Homo sapiens
  Payload ID: 1628;
  Gene Symbol: ABCC8;
  Gene Name: ATP-binding cassette, sub-family C (CFTR/MRP), member 8;
  ENSP ID: ENSP00000433638
  MOD_RES (1)..(1): Any amino acid
XQKYFRVASRDLQQLDDTTQLPLLSHFAETVEGLTTIRAFRYEARFQQKLLEYTDSNNIASLFLTAANRWLEVRMEYIGACVVLIAAVTSISNSLHRELSAGLVGLGLTYALMVSNYLNWMVRNLADMELQLGAVKRIHGLLKTEAESYEGLLARPPAPSLIPKNWPDQGKIQIQNLSVRYDSSLKPVLKHVNALIAPGQKIGI

SEQ ID NO: 7760 - protein, 53 aa, Homo sapiens
  Payload ID: 1628;
  Gene Symbol: ABCC8;
  Gene Name: ATP-binding cassette, sub-family C (CFTR/MRP), member 8;
  ENSP ID: ENSP00000434893
  MOD_RES (1)..(1): Any amino acid
XPSGPSGMRPGSSRSFSNTQTPTTLLPSSSQLPTDGWKSEWSTSVHVWCSSQR

SEQ ID NO: 7761 - protein, 62 aa, Homo sapiens
  Payload ID: 1628;
  Gene Symbol: ABCC8;
  Gene Name: ATP-binding cassette, sub-family C (CFTR/MRP), member 8;
  ENSP ID: ENSP00000435378
  MOD_RES (1)..(1): Any amino acid
XLPSSAWWTRSKGTSSLMALTSPNCRCTPCAHASPSSCRTPSSSAAPSGPGSLWKGIPHPWV

SEQ ID NO: 7762 - protein, 33 aa, Homo sapiens
  Payload ID: 1628;
  Gene Symbol: ABCC8;
  Gene Name: ATP-binding cassette, sub-family C (CFTR/MRP), member 8;
  ENSP ID: ENSP00000437233
  MOD_RES (1)..(1): Any amino acid
XRTGSGKSSFSLAFFRMVDTFEGPRPLQRHHPI

SEQ ID NO: 7763 - protein, 50 aa, Homo sapiens
  Payload ID: 1628;
  Gene Symbol: ABCC8;
  Gene Name: ATP-binding cassette, sub-family C (CFTR/MRP), member 8;
  Uniprot ID:  Q09428;
  ENSP ID: ENSP00000483031
MPLAFCGSENHSAAYRVDQGVLNNGCFVDALNVVPHVFLLFITFPILFIG

SEQ ID NO: 7764 - protein, 1549 aa, Homo sapiens
  Payload ID: 1629;
  Gene Symbol: ABCC9;
  Gene Name: ATP-binding cassette, sub-family C (CFTR/MRP), member 9;
  Uniprot ID:  O60706;
  ENSP ID: ENSP00000261200
MSLSFCGNNISSYNINDGVLQNSCFVDALNLVPHVFLLFITFPILFIGWGSQSSKVQIHHNTWLHFPGHNLRWILTFALLFVHVCEIAEGIVSDSRRESRHLHLFMPAVMGFVATTTSIVYYHNIETSNFPKLLLALFLYWVMAFITKTIKLVKYCQSGLDISNLRFCITGMMVILNGLLMAVEINVIRVRRYVFFMNPQKVKPPEDLQDLGVRFLQPFVNLLSKATYWWMNTLIISAHKKPIDLKAIGKLPIAMRAVTNYVCLKDAYEEQKKKVADHPNRTPSIWLAMYRAFGRPILLSSTFRYLADLLGFAGPLCISGIVQRVNETQNGTNNTTGISETLSSKEFLENAYVLAVLLFLALILQRTFLQASYYVTIETGINLRGALLAMIYNKILRLSTSNLSMGEMTLGQINNLVAIETNQLMWFLFLCPNLWAMPVQIIMGVILLYNLLGSSALVGAAVIVLLAPIQYFIATKLAEAQKSTLDYSTERLKKTNEILKGIKLLKLYAWEHIFCKSVEETRMKELSSLKTFALYTSLSIFMNAAIPIAAVLATFVTHAYASGNNLKPAEAFASLSLFHILVTPLFLLSTVVRFAVKAIISVQKLNEFLLSDEIGDDSWRTGESSLPFESCKKHTGVQPKTINRKQPGRYHLDSYEQSTRRLRPAETEDIAIKVTNGYFSWGSGLATLSNIDIRIPTGQLTMIVGQVGCGKSSLLLAILGEMQTLEGKVHWSNVNESEPSFEATRSRNRYSVAYAAQKPWLLNATVEENITFGSPFNKQRYKAVTDACSLQPDIDLLPFGDQTEIGERGINLSGGQRQRICVARALYQNTNIVFLDDPFSALDIHLSDHLMQEGILKFLQDDKRTLVLVTHKLQYLTHADWIIAMKDGSVLREGTLKDIQTKDVELYEHWKTLMNRQDQELEKDMEADQTTLERKTLRRAMYSREAKAQMEDEDEEEEEEEDEDDNMSTVMRLRTKMPWKTCWRYLTSGGFFLLILMIFSKLLKHSVIVAIDYWLATWTSEYSINNTGKADQTYYVAGFSILCGAGIFLCLVTSLTVEWMGLTAAKNLHHNLLNKIILGPIRFFDTTPLGLILNRFSADTNIIDQHIPPTLESLTRSTLLCLSAIGMISYATPVFLVALLPLGVAFYFIQKYFRVASKDLQELDDSTQLPLLCHFSETAEGLTTIRAFRHETRFKQRMLELTDTNNIAYLFLSAANRWLEVRTDYLGACIVLTASIASISGSSNSGLVGLGLLYALTITNYLNWVVRNLADLEVQMGAVKKVNSFLTMESENYEGTMDPSQVPEHWPQEGEIKIHDLCVRYENNLKPVLKHVKAYIKPGQKVGICGRTGSGKSSLSLAFFRMVDIFDGKIVIDGIDISKLPLHTLRSRLSIILQDPILFSGSIRFNLDPECKCTDDRLWEALEIAQLKNMVKSLPGGLDAVVTEGGENFSVGQRQLFCLARAFVRKSSILIMDEATASIDMATENILQKVVMTAFADRTVVTIAHRVHTILTADLVIVMKRGNILEYDTPESLLAQENGVFASFVRADM

SEQ ID NO: 7765 - protein, 1549 aa, Homo sapiens
  Payload ID: 1629;
  Gene Symbol: ABCC9;
  Gene Name: ATP-binding cassette, sub-family C (CFTR/MRP), member 9;
  Uniprot ID:  O60706;
  ENSP ID: ENSP00000261201
MSLSFCGNNISSYNINDGVLQNSCFVDALNLVPHVFLLFITFPILFIGWGSQSSKVQIHHNTWLHFPGHNLRWILTFALLFVHVCEIAEGIVSDSRRESRHLHLFMPAVMGFVATTTSIVYYHNIETSNFPKLLLALFLYWVMAFITKTIKLVKYCQSGLDISNLRFCITGMMVILNGLLMAVEINVIRVRRYVFFMNPQKVKPPEDLQDLGVRFLQPFVNLLSKATYWWMNTLIISAHKKPIDLKAIGKLPIAMRAVTNYVCLKDAYEEQKKKVADHPNRTPSIWLAMYRAFGRPILLSSTFRYLADLLGFAGPLCISGIVQRVNETQNGTNNTTGISETLSSKEFLENAYVLAVLLFLALILQRTFLQASYYVTIETGINLRGALLAMIYNKILRLSTSNLSMGEMTLGQINNLVAIETNQLMWFLFLCPNLWAMPVQIIMGVILLYNLLGSSALVGAAVIVLLAPIQYFIATKLAEAQKSTLDYSTERLKKTNEILKGIKLLKLYAWEHIFCKSVEETRMKELSSLKTFALYTSLSIFMNAAIPIAAVLATFVTHAYASGNNLKPAEAFASLSLFHILVTPLFLLSTVVRFAVKAIISVQKLNEFLLSDEIGDDSWRTGESSLPFESCKKHTGVQPKTINRKQPGRYHLDSYEQSTRRLRPAETEDIAIKVTNGYFSWGSGLATLSNIDIRIPTGQLTMIVGQVGCGKSSLLLAILGEMQTLEGKVHWSNVNESEPSFEATRSRNRYSVAYAAQKPWLLNATVEENITFGSPFNKQRYKAVTDACSLQPDIDLLPFGDQTEIGERGINLSGGQRQRICVARALYQNTNIVFLDDPFSALDIHLSDHLMQEGILKFLQDDKRTLVLVTHKLQYLTHADWIIAMKDGSVLREGTLKDIQTKDVELYEHWKTLMNRQDQELEKDMEADQTTLERKTLRRAMYSREAKAQMEDEDEEEEEEEDEDDNMSTVMRLRTKMPWKTCWRYLTSGGFFLLILMIFSKLLKHSVIVAIDYWLATWTSEYSINNTGKADQTYYVAGFSILCGAGIFLCLVTSLTVEWMGLTAAKNLHHNLLNKIILGPIRFFDTTPLGLILNRFSADTNIIDQHIPPTLESLTRSTLLCLSAIGMISYATPVFLVALLPLGVAFYFIQKYFRVASKDLQELDDSTQLPLLCHFSETAEGLTTIRAFRHETRFKQRMLELTDTNNIAYLFLSAANRWLEVRTDYLGACIVLTASIASISGSSNSGLVGLGLLYALTITNYLNWVVRNLADLEVQMGAVKKVNSFLTMESENYEGTMDPSQVPEHWPQEGEIKIHDLCVRYENNLKPVLKHVKAYIKPGQKVGICGRTGSGKSSLSLAFFRMVDIFDGKIVIDGIDISKLPLHTLRSRLSIILQDPILFSGSIRFNLDPECKCTDDRLWEALEIAQLKNMVKSLPGGLDAVVTEGGENFSVGQRQLFCLARAFVRKSSILIMDEATASIDMATENILQKVVMTAFADRTVVTIAHRVSSIMDAGLVLVFSEGILVECDTVPNLLAHKNGLFSTLVMTNK

SEQ ID NO: 7766 - protein, 149 aa, Homo sapiens
  Payload ID: 1629;
  Gene Symbol: ABCC9;
  Gene Name: ATP-binding cassette, sub-family C (CFTR/MRP), member 9;
  ENSP ID: ENSP00000317518
MSLSFCGNNISSYNINDGVLQNSCFVDALNLVPHVFLLFITFPILFIGWGSQSSKVQIHHNTWLHFPGHNLRWILTFALLFVHVCEIAEGIVSDSRRESRHLHLFMPAVMGFVATTTSIVYYHNIETSNFPKLLLGFSHHESKSCYQHS

SEQ ID NO: 7767 - protein, 1176 aa, Homo sapiens
  Payload ID: 1629;
  Gene Symbol: ABCC9;
  Gene Name: ATP-binding cassette, sub-family C (CFTR/MRP), member 9;
  ENSP ID: ENSP00000440521
ISETLSSKEFLENAYVLAVLLFLALILQRTFLQASYYVTIETGINLRGALLAMIYNKILRLSTSNLSMGEMTLGQINNLVAIETNQLMWFLFLCPNLWAMPVQIIMGVILLYNLLGSSALVGAAVIVLLAPIQYFIATKLAEAQKSTLDYSTERLKKTNEILKGIKLLKLYAWEHIFCKSVEETRMKELSSLKTFALYTSLSIFMNAAIPIAAVLATFVTHAYASGNNLKPAEAFASLSLFHILVTPLFLLSTVVRFAVKAIISVQKLNEFLLSDEIGDDSWRTGESSLPFESCKKHTGVVTNGYFSWGSGLATLSNIDIRIPTGQLTMIVGQVGCGKSSLLLAILGEMQTLEGKVHWSNVNESEPSFEATRSRNRYSVAYAAQKPWLLNATVEENITFGSPFNKQRYKAVTDACSLQPDIDLLPFGDQTEIGERGINLSGGQRQRICVARALYQNTNIVFLDDPFSALDIHLSDHLMQEGILKFLQDDKRTLVLVTHKLQYLTHADWIIAMKDGSVLREGTLKDIQTKDVELYEHWKTLMNRQDQELEKDMEADQTTLERKTLRRAMYSREAKAQMEDEDEEEEEEEDEDDNMSTVMRLRTKMPWKTCWRYLTSGGFFLLILMIFSKLLKHSVIVAIDYWLATWTSEYSINNTGKADQTYYVAGFSILCGAGIFLCLVTSLTVEWMGLTAAKNLHHNLLNKIILGPIRFFDTTPLGLILNRFSADTNIIDQHIPPTLESLTRSTLLCLSAIGMISYATPVFLVALLPLGVAFYFIQKYFRVASKDLQELDDSTQLPLLCHFSETAEGLTTIRAFRHETRFKQRMLELTDTNNIAYLFLSAANRWLEVRTDYLGACIVLTASIASISGSSNSGLVGLGLLYALTITNYLNWVVRNLADLEVQMGAVKKVNSFLTMESENYEGTMDPSQVPEHWPQEGEIKIHDLCVRYENNLKPVLKHVKAYIKPGQKVGICGRTGSGKSSLSLAFFRMVDIFDGKIVIDGIDISKLPLHTLRSRLSIILQDPILFSGSIRFNLDPECKCTDDRLWEALEIAQLKNMVKSLPGGLDAVVTEGGENFSVGQRQLFCLARAFVRKSSILIMDEATASIDMATENILQKVVMTAFADRTVVTIAHRVSSIMDAGLVLVFSEGILVECDTVPNLLAHKNGLFSTLVMTNK

SEQ ID NO: 7768 - protein, 170 aa, Homo sapiens
  Payload ID: 1629;
  Gene Symbol: ABCC9;
  Gene Name: ATP-binding cassette, sub-family C (CFTR/MRP), member 9;
  ENSP ID: ENSP00000442604
MSLSFCGNNISSYNINDGVLQNSCFVDALNLVPHVFLLFITFPILFIGWGSQSSKVQIHHNTWLHFPGHNLRWILTFALLFVHVCEIAEGIVSDSRRESRHLHLFMPAVMGFVATTTSIVYYHNIETSNFPKLLLVPGVSVSGLESKDIFPRFKPFTDAVGMPHFTRITM

SEQ ID NO: 7769 - protein, 149 aa, Homo sapiens; identical to SEQ ID NO: 7766
  Payload ID: 1629;
  Gene Symbol: ABCC9;
  Gene Name: ATP-binding cassette, sub-family C (CFTR/MRP), member 9;
  ENSP ID: ENSP00000480233

SEQ ID NO: 7770 - protein, 745 aa, Homo sapiens [sequence omitted]

SEQ ID NO: 7771 - protein, 227 aa, Homo sapiens
  Payload ID: 1630;
  Gene Symbol: ABCD1;
  Gene Name: ATP-binding cassette, sub-family D (ALD), member 1;
  ENSP ID: ENSP00000359147
MDGRLRNPDQSLTEDVVAFAASVAHLYSNLTKPLLDVAVTSYTLLRAARSRGAGTAWPSAIAGLVVFLTANVLRAFSPKFGELVAEEARRKGELRYMHSRVVANSEEIAFYGGHEVELALLQRSYQDLASQINLILLERLWYVMLEQFLMKYVWSASGLLMVAVPIITATGYSESGETQGSKRIQARGLSPIPLGAELTRAQLSQPAAHFCCRGHRGPAASLDAFRG

SEQ ID NO: 7772 - protein, 740 aa, Homo sapiens
  Payload ID: 1631;
  Gene Symbol: ABCD2;
  Gene Name: ATP-binding cassette, sub-family D (ALD), member 2;
  Uniprot ID:  Q9UBJ2;
  ENSP ID: ENSP00000310688
MTHMLNAAADRVKWTRSSAAKRAACLVAAAYALKTLYPIIGKRLKQSGHGKKKAAAYPAAENTEILHCTETICEKPSPGVNADFFKQLLELRKILFPKLVTTETGWLCLHSVALISRTFLSIYVAGLDGKIVKSIVEKKPRTFIIKLIKWLMIAIPATFVNSAIRYLECKLALAFRTRLVDHAYETYFTNQTYYKVINMDGRLANPDQSLTEDIMMFSQSVAHLYSNLTKPILDVMLTSYTLIQTATSRGASPIGPTLLAGLVVYATAKVLKACSPKFGKLVAEEAHRKGYLRYVHSRIIANVEEIAFYRGHKVEMKQLQKSYKALADQMNLILSKRLWYIMIEQFLMKYVWSSSGLIMVAIPIITATGFADGEDGQKQVMVSERTEAFTTARNLLASGADAIERIMSSYKEVTELAGYTARVYNMFWVFDEVKRGIYKRTAVIQESESHSKNGAKVELPLSDTLAIKGKVIDVDHGIICENVPIITPAGEVVASRLNFKVEEGMHLLITGPNGCGKSSLFRILSGLWPVYEGVLYKPPPQHMFYIPQRPYMSLGSLRDQVIYPDSVDDMHDKGYTDQDLERILHNVHLYHIVQREGGWDAVMDWKDVLSGGEKQRMGMARMFYHKPKYALLDECTSAVSIDVEGKIFQAAKGAGISLLSITHRPSLWKYHTHLLQFDGEGGWRFEQLDTAIRLTLSEEKQKLESQLAGIPKMQQRLNELCKILGEDSVLKTIKNEDETS

SEQ ID NO: 7773 - protein, 236 aa, Homo sapiens
  Payload ID: 1632;
  Gene Symbol: ABCD3;
  Gene Name: ATP-binding cassette, sub-family D (ALD), member 3;
  Uniprot ID:  P28288;
  ENSP ID: ENSP00000326880
MAAFSKYLTARNSSLAGAAFLLLCLLHKRRRALGLHGKKSGKPPLQNNEKEGKKERAVVDKVFFSRLIQILKIMVPRTFCKETGYLVLIAVMLVSRTYCDVWMIQNGTLIESGIIGRSRKDFKRYLLNFIAAMPLISLVNNFLKYGLNELKLCFRVRLTKYLYEEYLQAFTYYKMGNLDNRIANPDQLLTQDVEKFCNSVVDLYSNLSKPFLDIVLYIFKLTSAIGAQVLGKILWH

SEQ ID NO: 7774 - protein, 659 aa, Homo sapiens
  Payload ID: 1632;
  Gene Symbol: ABCD3;
  Gene Name: ATP-binding cassette, sub-family D (ALD), member 3;
  Uniprot ID:  P28288;
  ENSP ID: ENSP00000359233
MAAFSKYLTARNSSLAGAAFLLLCLLHKRRRALGLHGKKSGKPPLQNNEKEGKKERAVVDKVFFSRLIQILKIMVPRTFCKETGYLVLIAVMLVSRTYCDVWMIQNGTLIESGIIGRSRKDFKRYLLNFIAAMPLISLVNNFLKYGLNELKLCFRVRLTKYLYEEYLQAFTYYKMGNLDNRIANPDQLLTQDVEKFCNSVVDLYSNLSKPFLDIVLYIFKLTSAIGAQGPASMMAYLVVSGLFLTRLRRPIGKMTITEQKYEGEYRYVNSRLITNSEEIAFYNGNKREKQTVHSVFRKLVEHLHNFILFRFSMGFIDSIIAKYLATVVGYLVVSRPFLDLSHPRHLKSTHSELLEDYYQSGRMLLRMSQALGRIVLAGREMTRLAGFTARITELMQVLKDLNHGKYERTMVSQQEKGIEGVQVIPLIPGAGEIIIADNIIKFDHVPLATPNGDVLIRDLNFEVRSGANVLICGPNGCGKSSLFRVLGELWPLFGGRLTKPERGKLFYVPQRPYMTLGTLRDQVIYPDGREDQKRKGISDLVLKEYLDNVQLGHILEREGGWDSVQDWMDVLSGGEKQRMAMARLFYHKPQFAILDECTSAVSVDVEGYIYSHCRKVGITLFTVSHRKSLWKHHEYYLHMDGRGNYEFKQITEDTVEFGS

SEQ ID NO: 7775 - protein, 606 aa, Homo sapiens
  Payload ID: 1633;
  Gene Symbol: ABCD4;
  Gene Name: ATP-binding cassette, sub-family D (ALD), member 4;
  Uniprot ID:  O14678;
  ENSP ID: ENSP00000349396
MAVAGPAPGAGARPRLDLQFLQRFLQILKVLFPSWSSQNALMFLTLLCLTLLEQFVIYQVGLIPSQYYGVLGNKDLEGFKTLTFLAVMLIVLNSTLKSFDQFTCNLLYVSWRKDLTEHLHRLYFRGRAYYTLNVLRDDIDNPDQRISQDVERFCRQLSSMASKLIISPFTLVYYTYQCFQSTGWLGPVSIFGYFILGTVVNKTLMGPIVMKLVHQEKLEGDFRFKHMQIRVNAEPAAFYRAGHVEHMRTDRRLQRLLQTQRELMSKELWLYIGINTFDYLGSILSYVVIAIPIFSGVYGDLSPAELSTLVSKNAFVCIYLISCFTQLIDLSTTLSDVAGYTHRIGQLRETLLDMSLKSQDCEILGESEWGLDTPPGWPAAEPADTAFLLERVSISAPSSDKPLIKDLSLKISEGQSLLITGNTGTGKTSLLRVLGGLWTSTRGSVQMLTDFGPHGVLFLPQKPFFTDGTLREQVIYPLKEVYPDSGSADDERILRFLELAGLSNLVARTEGLDQQVDWNWYDVLSPGEMQRLSFARLFYLQPKYAVLDEATSALTEEVESELYRIGQQLGMTFISVGHRQSLEKFHSLVLKLCGGGRWELMRIKVE

SEQ ID NO: 7776 - protein, 173 aa, Homo sapiens
  Payload ID: 1633;
  Gene Symbol: ABCD4;
  Gene Name: ATP-binding cassette, sub-family D (ALD), member 4;
  ENSP ID: ENSP00000432557
  MOD_RES (1)..(1): Any amino acid
XVVIAIPIFSGVYGDLSPAELSTLVSKNAFVCIYLISCFTQLIDLSTTLSDVAGYTHRIGQLRETLLDMSLKSQDCEILGESEWGLDTPPGWPAAEPADTAFLLERVSISAPSSDKPLIKDLSLKISEGQSLLITGNTGTGKTSLLRVLGGLWTSTRGDISPEGGLPRLRFCR

SEQ ID NO: 7777 - protein, 56 aa, Homo sapiens
  Payload ID: 1633;
  Gene Symbol: ABCD4;
  Gene Name: ATP-binding cassette, sub-family D (ALD), member 4;
  ENSP ID: ENSP00000432630
MAVAGPAPGAGARPRLDLQFLQRFLQILKVLFPSWSSQNALMFLTLLCLTLLAEEL

SEQ ID NO: 7778 - protein, 39 aa, Homo sapiens
  Payload ID: 1633;
  Gene Symbol: ABCD4;
  Gene Name: ATP-binding cassette, sub-family D (ALD), member 4;
  ENSP ID: ENSP00000434626
MAVAGPAPGAGARAICDLPGWLDPQSVLWGPGKQRLGRV

SEQ ID NO: 7779 - protein, 184 aa, Homo sapiens
  Payload ID: 1633;
  Gene Symbol: ABCD4;
  Gene Name: ATP-binding cassette, sub-family D (ALD), member 4;
  ENSP ID: ENSP00000434792
  MOD_RES (1)..(1): Any amino acid
XERVSISAPSSDKPLIKDLSLKISEGQSLLITGNTGTGKTSLLRVLGGLWTSTRGSVQMLTDFGPHGVLFLPQKPFFTDGTLREQVIYPLKEVYPDSGSADDERILRFLELAGLVSGERDPQDPSPPGSTSYSPTWWQGQRAWTSRWTGTGMMFCPRGRCNGSPLPDSSTCSRSTQCLMKPPVP

SEQ ID NO: 7780 - protein, 56 aa, Homo sapiens; identical to SEQ ID NO: 7777
  Payload ID: 1633;
  Gene Symbol: ABCD4;
  Gene Name: ATP-binding cassette, sub-family D (ALD), member 4;
  ENSP ID: ENSP00000436527

SEQ ID NO: 7781 - protein, 56 aa, Homo sapiens; identical to SEQ ID NO: 7777
  Payload ID: 1633;
  Gene Symbol: ABCD4;
  Gene Name: ATP-binding cassette, sub-family D (ALD), member 4;
  ENSP ID: ENSP00000436782

SEQ ID NO: 7782 - protein, 39 aa, Homo sapiens; identical to SEQ ID NO: 7778
  Payload ID: 1633;
  Gene Symbol: ABCD4;
  Gene Name: ATP-binding cassette, sub-family D (ALD), member 4;
  ENSP ID: ENSP00000450491

SEQ ID NO: 7783 - protein, 56 aa, Homo sapiens; identical to SEQ ID NO: 7777
  Payload ID: 1633;
  Gene Symbol: ABCD4;
  Gene Name: ATP-binding cassette, sub-family D (ALD), member 4;
  ENSP ID: ENSP00000450611

SEQ ID NO: 7784 - protein, 184 aa, Homo sapiens; identical to SEQ ID NO: 7779
  Payload ID: 1633;
  Gene Symbol: ABCD4;
  Gene Name: ATP-binding cassette, sub-family D (ALD), member 4;
  ENSP ID: ENSP00000450960
  MOD_RES (1)..(1): Any amino acid

SEQ ID NO: 7785 - protein, 158 aa, Homo sapiens
  Payload ID: 1633;
  Gene Symbol: ABCD4;
  Gene Name: ATP-binding cassette, sub-family D (ALD), member 4;
  ENSP ID: ENSP00000450982
  MOD_RES (1)..(1): Any amino acid
XGSADDERILRFLELAGLSNLVARTEGLDQQVDWNWYDVLSPGEMQRLSFARLFYLQPKYAVLDEATSALTEEVESELYRIGQQLGMTFISVGHRQSLEKGSLISMWWWSLVVSFLGSETLWRRKMGADENQSGMKLWLLEGEPHCGGSAALRRDQED

SEQ ID NO: 7786 - protein, 98 aa, Homo sapiens
  Payload ID: 1633;
  Gene Symbol: ABCD4;
  Gene Name: ATP-binding cassette, sub-family D (ALD), member 4;
  ENSP ID: ENSP00000451457
MAVAGPAPGAGARPRLDLQFLQRFLQILKVLFPSWSSQNALMFLTLLCLTLLGTSASARTWSDSAGSSAAWPASSSSPRSPSSTTLTSASKAQAGSGL

SEQ ID NO: 7787 - protein, 39 aa, Homo sapiens; identical to SEQ ID NO: 7778
  Payload ID: 1633;
  Gene Symbol: ABCD4;
  Gene Name: ATP-binding cassette, sub-family D (ALD), member 4;
  ENSP ID: ENSP00000451521

SEQ ID NO: 7788 - protein, 205 aa, Homo sapiens
  Payload ID: 1633;
  Gene Symbol: ABCD4;
  Gene Name: ATP-binding cassette, sub-family D (ALD), member 4;
  ENSP ID: ENSP00000451770
  MOD_RES (1)..(1): Any amino acid
XRSRGPRPELAPEQFVIYQVGLIPSQYYGVLGNKDLEGFKTLTFLAVMLIVLNSTLKSFDQFTCNLLYVSWRKDLTEHLHRLYFRGRAYYTLNVLRDDIDNPDQRISQDVERFCRQLSSMASKLIISPFTLVYYTYQCFQSTGWLGPVSIFGYFILGTVVNKTLMGPIVMKLVHQEKLEGDFRFKHMQIRVNAEPAAFYSRHQHL

SEQ ID NO: 7789 - protein, 39 aa, Homo sapiens; identical to SEQ ID NO: 7778
  Payload ID: 1633;
  Gene Symbol: ABCD4;
  Gene Name: ATP-binding cassette, sub-family D (ALD), member 4;
  ENSP ID: ENSP00000451778

SEQ ID NO: 7790 - protein, 203 aa, Homo sapiens
  Payload ID: 1633;
  Gene Symbol: ABCD4;
  Gene Name: ATP-binding cassette, sub-family D (ALD), member 4;
  ENSP ID: ENSP00000451993
MAVAGPAPGAGARPRLDLQFLQRFLQILKVLFPSWSSQNALMFLTLLCLTLLEQFVIYQVGLIPSQYYGVLGNKDLEGFKTLTFLAVMLIVLNSTLKSFDQFTCNLLYVSWRKDLTEHLHRLYFRGRAYYTLNVLRDDIDNPDQRISQDVERFCRQLSSMASKLIISPFTLVYYTYQCFQRFKHMQIRVNAEPAAFYSRHQHL

SEQ ID NO: 7791 - protein, 94 aa, Homo sapiens
  Payload ID: 1633;
  Gene Symbol: ABCD4;
  Gene Name: ATP-binding cassette, sub-family D (ALD), member 4;
  ENSP ID: ENSP00000452430
  MOD_RES (1)..(1): Any amino acid
XILGTVVNKTLMGPIVMKLVHQEKLEGDFRFKHMQIRVNAEPAAFYSPVDIPAFPCQSWACGAHEDRPQAAETPSDPEGADVQGALAVHRHQHL

SEQ ID NO: 7792 - protein, 599 aa, Homo sapiens
  Payload ID: 1634;
  Gene Symbol: ABCE1;
  Gene Name: ATP-binding cassette, sub-family E (OABP), member 1;
  Uniprot ID:  P61221;
  ENSP ID: ENSP00000296577
MADKLTRIAIVNHDKCKPKKCRQECKKSCPVVRMGKLCIEVTPQSKIAWISETLCIGCGICIKKCPFGALSIVNLPSNLEKETTHRYCANAFKLHRLPIPRPGEVLGLVGTNGIGKSTALKILAGKQKPNLGKYDDPPDWQEILTYFRGSELQNYFTKILEDDLKAIIKPQYVDQIPKAAKGTVGSILDRKDETKTQAIVCQQLDLTHLKERNVEDLSGGELQRFACAVVCIQKADIFMFDEPSSYLDVKQRLKAAITIRSLINPDRYIIVVEHDLSVLDYLSDFICCLYGVPSAYGVVTMPFSVREGINIFLDGYVPTENLRFRDASLVFKVAETANEEEVKKMCMYKYPGMKKKMGEFELAIVAGEFTDSEIMVMLGENGTGKTTFIRMLAGRLKPDEGGEVPVLNVSYKPQKISPKSTGSVRQLLHEKIRDAYTHPQFVTDVMKPLQIENIIDQEVQTLSGGELQRVALALCLGKPADVYLIDEPSAYLDSEQRLMAARVVKRFILHAKKTAFVVEHDFIMATYLADRVIVFDGVPSKNTVANSPQTLLAGMNKFLSQLEITFRRDPNNYRPRINKLNSIKDVEQKKSGNYFFLDD

SEQ ID NO: 7793 - protein, 210 aa, Homo sapiens
  Payload ID: 1634;
  Gene Symbol: ABCE1;
  Gene Name: ATP-binding cassette, sub-family E (OABP), member 1;
  ENSP ID: ENSP00000421250
MADKLTRIAIVNHDKCKPKKCRQECKKSCPVVRMGKLCIEVTPQSKIAWISETLCIGCGICIKKCPFGALSIVNLPSNLEKETTHRYCANAFKLHRLPIPRPGEVLGLVGTNGIGKSTALKILAGKQKPNLGKYDDPPDWQEILTYFRGSELQNYFTKILEDDLKAIIKPQYVDQIPKAAKGTVGSILDRKDETKTQAIVCQQLDLTHLK

SEQ ID NO: 7794 - protein, 421 aa, Homo sapiens
  Payload ID: 1634;
  Gene Symbol: ABCE1;
  Gene Name: ATP-binding cassette, sub-family E (OABP), member 1;
  ENSP ID: ENSP00000422068
MADKLTRIAIVNHDKCKPKKCRQECKKSCPVVRMGKLCIEVTPQSKIAWISETLCIGCGICIKKCPFGALSIVNLPSNLEKETTHRYCANAFKLHRLPIPRPGEVLGLVGTNGIGKSTALKILAGKQKPNLGKYDDPPDWQEILTYFRGSELQNYFTKILEDDLKAIIKPQYVDQIPKAAKGTVGSILDRKDETKTQAIVCQQLDLTHLKERNVEDLSGGELQRFACAVVCIQKADIFMFDEPSSYLDVKQRLKAAITIRSLINPDRYIIVVEHDLSVLDYLSDFICCLYGVPSAYGVVTMPFSVREGINIFLDGYVPTENLRFRDASLVFKVAETANEEEVKKMCMYKYPGMKKKMGEFELAIVAGEFTDSEIMVMLGENGTGKTTFIRMLAGRLKPDEGGEVPVLNVSYKPQKISPKST

SEQ ID NO: 7795 - protein, 147 aa, Homo sapiens
  Payload ID: 1634;
  Gene Symbol: ABCE1;
  Gene Name: ATP-binding cassette, sub-family E (OABP), member 1;
  ENSP ID: ENSP00000423415
GALSIVNLPSNLEKETTHRYCANAFKLHRLPIPRPGEVLGLVGTNGIGKSTALKILAGKQKPNLGKYDDPPDWQEILTYFRGSELQNYFTKILEDDLKAIIKPQYVDQIPKAAKGTVGSILDRKDETKTQAIVCQQLVSCLMSLLVT

SEQ ID NO: 7796 - protein, 845 aa, Homo sapiens
  Payload ID: 1635;
  Gene Symbol: ABCF1;
  Gene Name: ATP-binding cassette, sub-family F (GCN20), member 1;
  Uniprot ID:  Q8NE71;
  ENSP ID: ENSP00000313603
MPKAPKQQPPEPEWIGDGESTSPSDKVVKKGKKDKKIKKTFFEELAVEDKQAGEEEKVLKEKEQQQQQQQQQQKKKRDTRKGRRKKDVDDDGEEKELMERLKKLSVPTSDEEDEVPAPKPRGGKKTKGGNVFAALIQDQSEEEEEEEKHPPKPAKPEKNRINKAVSEEQQPALKGKKGKEEKSKGKAKPQNKFAALDNEEEDKEEEIIKEKEPPKQGKEKAKKAEQGSEEEGEGEEEEEEGGESKADDPYAHLSKKEKKKLKKQMEYERQVASLKAANAAENDFSVSQAEMSSRQAMLENASDIKLEKFSISAHGKELFVNADLYIVAGRRYGLVGPNGKGKTTLLKHIANRALSIPPNIDVLLCEQEVVADETPAVQAVLRADTKRLKLLEEERRLQGQLEQGDDTAAERLEKVYEELRATGAAAAEAKARRILAGLGFDPEMQNRPTQKFSGGWRMRVSLARALFMEPTLLMLDEPTNHLDLNAVIWLNNYLQGWRKTLLIVSHDQGFLDDVCTDIIHLDAQRLHYYRGNYMTFKKMYQQKQKELLKQYEKQEKKLKELKAGGKSTKQAEKQTKEALTRKQQKCRRKNQDEESQEAPELLKRPKEYTVRFTFPDPPPLSPPVLGLHGVTFGYQGQKPLFKNLDFGIDMDSRICIVGPNGVGKSTLLLLLTGKLTPTHGEMRKNHRLKIGFFNQQYAEQLRMEETPTEYLQRGFNLPYQDARKCLGRFGLESHAHTIQICKLSGGQKARVVFAELACREPDVLILDEPTNNLDIESIDALGEAINEYKGAVIVVSHDARLITETNCQLWVVEEQSVSQIDGDFEDYKREVLEALGEVMVSRPRE

SEQ ID NO: 7797 - protein, 807 aa, Homo sapiens
  Payload ID: 1635;
  Gene Symbol: ABCF1;
  Gene Name: ATP-binding cassette, sub-family F (GCN20), member 1;
  Uniprot ID:  Q8NE71;
  ENSP ID: ENSP00000365728
MPKAPKQQPPEPEWIGDGESTSPSDKVVKKGKKDKKIKKTFFEELAVEDKQAGEEEKVLKEKEQQQQQQQQQQKKKRDTRKGRRKKDVDDDGEEKELMERLKKLSVPTSDEEDEVPAPKPRGGKKTKGGNVFAALIQDQSEEEEEEEKHPPKPAKPEKNRINKAVSEEQQPALKGKKGKEEKSKGKAKPQNKFAALDNEEEDKEEEIIKEKEPPKQGKEKAKKAEQMEYERQVASLKAANAAENDFSVSQAEMSSRQAMLENASDIKLEKFSISAHGKELFVNADLYIVAGRRYGLVGPNGKGKTTLLKHIANRALSIPPNIDVLLCEQEVVADETPAVQAVLRADTKRLKLLEEERRLQGQLEQGDDTAAERLEKVYEELRATGAAAAEAKARRILAGLGFDPEMQNRPTQKFSGGWRMRVSLARALFMEPTLLMLDEPTNHLDLNAVIWLNNYLQGWRKTLLIVSHDQGFLDDVCTDIIHLDAQRLHYYRGNYMTFKKMYQQKQKELLKQYEKQEKKLKELKAGGKSTKQAEKQTKEALTRKQQKCRRKNQDEESQEAPELLKRPKEYTVRFTFPDPPPLSPPVLGLHGVTFGYQGQKPLFKNLDFGIDMDSRICIVGPNGVGKSTLLLLLTGKLTPTHGEMRKNHRLKIGFFNQQYAEQLRMEETPTEYLQRGFNLPYQDARKCLGRFGLESHAHTIQICKLSGGQKARVVFAELACREPDVLILDEPTNNLDIESIDALGEAINEYKGAVIVVSHDARLITETNCQLWVVEEQSVSQIDGDFEDYKREVLEALGEVMVSRPRE

SEQ ID NO: 7798 - protein, 807 aa, Homo sapiens; identical to SEQ ID NO: 7797
  Payload ID: 1635;
  Gene Symbol: ABCF1;
  Gene Name: ATP-binding cassette, sub-family F (GCN20), member 1;
  Uniprot ID:  Q8NE71;
  ENSP ID: ENSP00000373081

SEQ ID NO: 7799 - protein, 845 aa, Homo sapiens; identical to SEQ ID NO: 7796
  Payload ID: 1635;
  Gene Symbol: ABCF1;
  Gene Name: ATP-binding cassette, sub-family F (GCN20), member 1;
  Uniprot ID:  Q8NE71;
  ENSP ID: ENSP00000373082

SEQ ID NO: 7800 - protein, 238 aa, Homo sapiens
  Payload ID: 1635;
  Gene Symbol: ABCF1;
  Gene Name: ATP-binding cassette, sub-family F (GCN20), member 1;
  ENSP ID: ENSP00000383452
MPKAPKQQPPEPEWIGDGESTSPSDKVVKKGKKDKKIKKTFFEELAVEDKQAGEEEKVLKEKEQQQQQQQQQQKKKRDTRKGRRKKDVDDDGEEKELMERLKKLSRGFNLPYQDARKCLGRFGLESHAHTIQICKLSGGQKARVVFAELACREPDVLILDEPTNNLDIESIDALGEAINEYKGAVIVVSHDARLITETNCQLWVVEEQSVSQIDGDFEDYKREVLEALGEVMVSRPRE

SEQ ID NO: 7801 - protein, 845 aa, Homo sapiens; identical to SEQ ID NO: 7796
  Payload ID: 1635;
  Gene Symbol: ABCF1;
  Gene Name: ATP-binding cassette, sub-family F (GCN20), member 1;
  Uniprot ID:  Q8NE71;
  ENSP ID: ENSP00000389065

SEQ ID NO: 7802 - protein, 807 aa, Homo sapiens; identical to SEQ ID NO: 7797
  Payload ID: 1635;
  Gene Symbol: ABCF1;
  Gene Name: ATP-binding cassette, sub-family F (GCN20), member 1;
  Uniprot ID:  Q8NE71;
  ENSP ID: ENSP00000389472

SEQ ID NO: 7803 - protein, 238 aa, Homo sapiens; identical to SEQ ID NO: 7800
  Payload ID: 1635;
  Gene Symbol: ABCF1;
  Gene Name: ATP-binding cassette, sub-family F (GCN20), member 1;
  ENSP ID: ENSP00000390550

SEQ ID NO: 7804 - protein, 807 aa, Homo sapiens; identical to SEQ ID NO: 7797
  Payload ID: 1635;
  Gene Symbol: ABCF1;
  Gene Name: ATP-binding cassette, sub-family F (GCN20), member 1;
  Uniprot ID:  Q8NE71;
  ENSP ID: ENSP00000391102

SEQ ID NO: 7805 - protein, 807 aa, Homo sapiens; identical to SEQ ID NO: 7797
  Payload ID: 1635;
  Gene Symbol: ABCF1;
  Gene Name: ATP-binding cassette, sub-family F (GCN20), member 1;
  Uniprot ID:  Q8NE71;
  ENSP ID: ENSP00000393143

SEQ ID NO: 7806 - protein, 238 aa, Homo sapiens; identical to SEQ ID NO: 7800
  Payload ID: 1635;
  Gene Symbol: ABCF1;
  Gene Name: ATP-binding cassette, sub-family F (GCN20), member 1;
  ENSP ID: ENSP00000394785

SEQ ID NO: 7807 - protein, 339 aa, Homo sapiens
  Payload ID: 1635;
  Gene Symbol: ABCF1;
  Gene Name: ATP-binding cassette, sub-family F (GCN20), member 1;
  ENSP ID: ENSP00000394994
MPKAPKQQPPEPEWIGDGESTSPSDKVVKKGKKDKKIKKTFFEELAVEDKQAGEEEKVLKEKEQQQQQQQQQQQKKKRDTRKGRRKKDVDDDGEEKELMERLKKLSVPTSDEEDEVPAPKPRGGKKTKGGNVFAALIQDQSEEEEEEEKHPPKPAKPEKNRINKAVSEEQQPALKGKKGKEEKSKGKAKPQNKFAALDNEEEDKEEEIIKEKEPPKQGKEKAKKAEQGSEEEGEGEEEEEEGGESKADDPYAHLSKKEKKKLKKQMEYERQVASLKAANAAENDFSVSQAEMSSRQAMLENASDIKLEKFSISAHGKELFVNADLYIVAGRRYGLVGPN

SEQ ID NO: 7808 - protein, 238 aa, Homo sapiens; identical to SEQ ID NO: 7800
  Payload ID: 1635;
  Gene Symbol: ABCF1;
  Gene Name: ATP-binding cassette, sub-family F (GCN20), member 1;
  ENSP ID: ENSP00000395308

SEQ ID NO: 7809 - protein, 238 aa, Homo sapiens; identical to SEQ ID NO: 7800
  Payload ID: 1635;
  Gene Symbol: ABCF1;
  Gene Name: ATP-binding cassette, sub-family F (GCN20), member 1;
  ENSP ID: ENSP00000397199

SEQ ID NO: 7810 - protein, 238 aa, Homo sapiens; identical to SEQ ID NO: 7800
  Payload ID: 1635;
  Gene Symbol: ABCF1;
  Gene Name: ATP-binding cassette, sub-family F (GCN20), member 1;
  ENSP ID: ENSP00000397875

SEQ ID NO: 7811 - protein, 339 aa, Homo sapiens; identical to SEQ ID NO: 7807
  Payload ID: 1635;
  Gene Symbol: ABCF1;
  Gene Name: ATP-binding cassette, sub-family F (GCN20), member 1;
  ENSP ID: ENSP00000401969

SEQ ID NO: 7812 - protein, 807 aa, Homo sapiens; identical to SEQ ID NO: 7797
  Payload ID: 1635;
  Gene Symbol: ABCF1;
  Gene Name: ATP-binding cassette, sub-family F (GCN20), member 1;
  Uniprot ID:  Q8NE71;
  ENSP ID: ENSP00000403526

SEQ ID NO: 7813 - protein, 807 aa, Homo sapiens; identical to SEQ ID NO: 7797
  Payload ID: 1635;
  Gene Symbol: ABCF1;
  Gene Name: ATP-binding cassette, sub-family F (GCN20), member 1;
  Uniprot ID:  Q8NE71;
  ENSP ID: ENSP00000404726

SEQ ID NO: 7814 - protein, 339 aa, Homo sapiens; identical to SEQ ID NO: 7807
  Payload ID: 1635;
  Gene Symbol: ABCF1;
  Gene Name: ATP-binding cassette, sub-family F (GCN20), member 1;
  ENSP ID: ENSP00000405512

SEQ ID NO: 7815 - protein, 339 aa, Homo sapiens; identical to SEQ ID NO: 7807
  Payload ID: 1635;
  Gene Symbol: ABCF1;
  Gene Name: ATP-binding cassette, sub-family F (GCN20), member 1;
  ENSP ID: ENSP00000406756

SEQ ID NO: 7816 - protein, 339 aa, Homo sapiens; identical to SEQ ID NO: 7807
  Payload ID: 1635;
  Gene Symbol: ABCF1;
  Gene Name: ATP-binding cassette, sub-family F (GCN20), member 1;
  ENSP ID: ENSP00000406926

SEQ ID NO: 7817 - protein, 339 aa, Homo sapiens; identical to SEQ ID NO: 7807
  Payload ID: 1635;
  Gene Symbol: ABCF1;
  Gene Name: ATP-binding cassette, sub-family F (GCN20), member 1;
  ENSP ID: ENSP00000406948

SEQ ID NO: 7818 - protein, 845 aa, Homo sapiens; identical to SEQ ID NO: 7796
  Payload ID: 1635;
  Gene Symbol: ABCF1;
  Gene Name: ATP-binding cassette, sub-family F (GCN20), member 1;
  Uniprot ID:  Q8NE71;
  ENSP ID: ENSP00000411327

SEQ ID NO: 7819 - protein, 845 aa, Homo sapiens; identical to SEQ ID NO: 7796
  Payload ID: 1635;
  Gene Symbol: ABCF1;
  Gene Name: ATP-binding cassette, sub-family F (GCN20), member 1;
  Uniprot ID:  Q8NE71;
  ENSP ID: ENSP00000412553

SEQ ID NO: 7820 - protein, 845 aa, Homo sapiens; identical to SEQ ID NO: 7796
  Payload ID: 1635;
  Gene Symbol: ABCF1;
  Gene Name: ATP-binding cassette, sub-family F (GCN20), member 1;
  Uniprot ID:  Q8NE71;
  ENSP ID: ENSP00000413319

SEQ ID NO: 7821 - protein, 845 aa, Homo sapiens; identical to SEQ ID NO: 7796
  Payload ID: 1635;
  Gene Symbol: ABCF1;
  Gene Name: ATP-binding cassette, sub-family F (GCN20), member 1;
  Uniprot ID:  Q8NE71;
  ENSP ID: ENSP00000414373

SEQ ID NO: 7822 - protein, 339 aa, Homo sapiens; identical to SEQ ID NO: 7807
  Payload ID: 1635;
  Gene Symbol: ABCF1;
  Gene Name: ATP-binding cassette, sub-family F (GCN20), member 1;
  ENSP ID: ENSP00000416890

SEQ ID NO: 7823 - protein, 105 aa, Homo sapiens
  Payload ID: 1635;
  Gene Symbol: ABCF1;
  Gene Name: ATP-binding cassette, sub-family F (GCN20), member 1;
  ENSP ID: ENSP00000440893
MERLKKLSVPTSDEEDEVPAPKPRGGKKTKGGNVFAALIQDQSEEEEEEEKHPPKPAKPEKNRINKAVSEEQQPALKGKKGKEEKSKGKAKPQNKFAALDNEEED

SEQ ID NO: 7824 - protein, 596 aa, Homo sapiens
  Payload ID: 1635;
  Gene Symbol: ABCF1;
  Gene Name: ATP-binding cassette, sub-family F (GCN20), member 1;
  ENSP ID: ENSP00000445100
  MOD_RES (1)..(1): Any amino acid
XAHLSKKEKKKLKKQMEYERQVASLKAANAAENDFSVSQAEMSSRQAMLENASDIKLEKFSISAHGKELFVNADLYIVAGRRYGLVGPNGKGKTTLLKHIANRALSIPPNIDVLLCEQEVVADETPAVQAVLRADTKRLKLLEEERRLQGQLEQGDDTAAERLEKVYEELRATGAAAAEAKARRILAGLGFDPEMQNRPTQKFSGGWRMRVSLARALFMEPTLLMLDEPTNHLDLNAVIWLNNYLQGWRKTLLIVSHDQGFLDDVCTDIIHLDAQRLHYYRGNYMTFKKMYQQKQKELLKQYEKQEKKLKELKAGGKSTKQAEKQTKEALTRKQQKCRRKNQDEESQEAPELLKRPKEYTVRFTFPDPPPLSPPVLGLHGVTFGYQGQKPLFKNLDFGIDMDSRICIVGPNGVGKSTLLLLLTGKLTPTHGEMRKNHRLKIGFFNQQYAEQLRMEETPTEYLQRGFNLPYQDARKCLGRFGLESHAHTIQICKLSGGQKARVVFAELACREPDVLILDEPTNNLDIESIDALGEAINEYKGAVIVVSHDARLITETNCQLWVVEEQSVSQIDGDFEDYKREVLEALGEVMVSRPRE

SEQ ID NO: 7825 - protein, 634 aa, Homo sapiens
  Payload ID: 1636;
  Gene Symbol: ABCF2;
  Gene Name: ATP-binding cassette, sub-family F (GCN20), member 2;
  Uniprot ID:  Q9UG63;
  ENSP ID: ENSP00000222388
MPSDLAKKKAAKKKEAAKARQRPRKGHEENGDVVTEPQVAEKNEANGRETTEVDLLTKELEDFEMKKAAARAVTGVLASHPNSTDVHIINLSLTFHGQELLSDTKLELNSGRRYGLIGLNGIGKSMLLSAIGKREVPIPEHIDIYHLTREMPPSDKTPLHCVMEVDTERAMLEKEAERLAHEDAECEKLMELYERLEELDADKAEMRASRILHGLGFTPAMQRKKLKDFSGGWRMRVALARALFIRPFMLLLDEPTNHLDLDACVWLEEELKTFKRILVLVSHSQDFLNGVCTNIIHMHNKKLKYYTGNYDQYVKTRLELEENQMKRFHWEQDQIAHMKNYIARFGHGSAKLARQAQSKEKTLQKMMASGLTERVVSDKTLSFYFPPCGKIPPPVIMVQNVSFKYTKDGPCIYNNLEFGIDLDTRVALVGPNGAGKSTLLKLLTGELLPTDGMIRKHSHVKIGRYHQHLQEQLDLDLSPLEYMMKCYPEIKEKEEMRKIIGRYGLTGKQQVSPIRNLSDGQKCRVCLAWLAWQNPHMLFLDEPTNHLDIETIDALADAINEFEGGMMLVSHDFRLIQQVAQEIWVCEKQTITKWPGDILAYKEHLKSKLVDEEPQLTKRTHNVCTLTLASLPRP

SEQ ID NO: 7826 - protein, 623 aa, Homo sapiens
  Payload ID: 1636;
  Gene Symbol: ABCF2;
  Gene Name: ATP-binding cassette, sub-family F (GCN20), member 2;
  Uniprot ID:  Q9UG63;
  ENSP ID: ENSP00000287844
MPSDLAKKKAAKKKEAAKARQRPRKGHEENGDVVTEPQVAEKNEANGRETTEVDLLTKELEDFEMKKAAARAVTGVLASHPNSTDVHIINLSLTFHGQELLSDTKLELNSGRRYGLIGLNGIGKSMLLSAIGKREVPIPEHIDIYHLTREMPPSDKTPLHCVMEVDTERAMLEKEAERLAHEDAECEKLMELYERLEELDADKAEMRASRILHGLGFTPAMQRKKLKDFSGGWRMRVALARALFIRPFMLLLDEPTNHLDLDACVWLEEELKTFKRILVLVSHSQDFLNGVCTNIIHMHNKKLKYYTGNYDQYVKTRLELEENQMKRFHWEQDQIAHMKNYIARFGHGSAKLARQAQSKEKTLQKMMASGLTERVVSDKTLSFYFPPCGKIPPPVIMVQNVSFKYTKDGPCIYNNLEFGIDLDTRVALVGPNGAGKSTLLKLLTGELLPTDGMIRKHSHVKIGRYHQHLQEQLDLDLSPLEYMMKCYPEIKEKEEMRKIIGRYGLTGKQQVSPIRNLSDGQKCRVCLAWLAWQNPHMLFLDEPTNHLDIETIDALADAINEFEGGMMLVSHDFRLIQQVAQEIWVCEKQTITKWPGDILAYKEHLKSKLVDEEPQLTKRTHNV

SEQ ID NO: 7827 - protein, 240 aa, Homo sapiens
  Payload ID: 1636;
  Gene Symbol: ABCF2;
  Gene Name: ATP-binding cassette, sub-family F (GCN20), member 2;
  ENSP ID: ENSP00000395785
MPSDLAKKKAAKKKEAAKARQRPRKGHEENGDVVTEPQVAEKNEANGRETTEVDLLTKELEDFEMKKAAARAVTGVLASHPNSTDVHIINLSLTFHGQELLSDTKLELNSGRRYGLIGLNGIGKSMLLSAIGKREVPIPEHIDIYHLTREMPPSDKTPLHCVMEVDTERAMLEKEAERLAHEDAECEKLMELYERLEELDADKAEMRASRILHGLGFTPAMQRKKLKDFSGGWRMRVALA

SEQ ID NO: 7828 - protein, 287 aa, Homo sapiens
  Payload ID: 1636;
  Gene Symbol: ABCF2;
  Gene Name: ATP-binding cassette, sub-family F (GCN20), member 2;
  ENSP ID: ENSP00000419720
MPSDLAKKKAAKKKEAAKARQRPRKGHEENGDVVTEPQVAEKNEANGRETTEVDLLTKELEDFEMKKAAARAVTGVLASHPNSTDVHIINLSLTFHGQELLSDTKLELNSGRRYGLIGLNGIGKSMLLSAIGKREVPIPEHIDIYHLTREMPPSDKTPLHCVMEVDTERAMLEKEAERLAHEDAECEKLMELYERLEELDADKAEMRASRILHGLGFTPAMQRKKLKDFSGGWRMRVALARALFIRPFMLLLDEPTNHLDLDACVWLEEELKTFKRILVLVSHSQDF

SEQ ID NO: 7829 - protein, 703 aa, Homo sapiens
  Payload ID: 1637;
  Gene Symbol: ABCF3;
  Gene Name: ATP-binding cassette, sub-family F (GCN20), member 3;
  Uniprot ID:  Q9NUQ8;
  ENSP ID: ENSP00000292808
MATCAEILRSEFPEIDGQVFDYVTGVLHSGSADFESVDDLVEAVGELLQEVSGDSKDDAGIRAVCQRMAEPQSQGNSQVLLDAPIQLSKITENYDCGTKLPGLLKREQSSTVNAKKLEKAEARLKAKQEKRSEKDTLKTSNPLVLEEASASQAGSRKESRLESSGKNKSYDVRIENFDVSFGDRVLLAGADVNLAWGRRYGLVGRNGLGKTTLLKMLATRSLRVPAHISLLHVEQEVAGDDTPALQSVLESDSVREDLLRRERELTAQIAAGRAEGSEAAELAEIYAKLEEIEADKAPARASVILAGLGFTPKMQQQPTREFSGGWRMRLALARALFARPDLLLLDEPTNMLDVRAILWLENYLQTWPSTILVVSHDRNFLNAIATDIIHLHSQRLDGYRGDFETFIKSKQERLLNQQREYEAQQQYRQHIQVFIDRFRYNANRASQVQSKLKMLEKLPELKPVDKESEVVMKFPDGFEKFSPPILQLDEVDFYYDPKHVIFSRLSVSADLESRICVVGENGAGKSTMLKLLLGDLAPVRGIRHAHRNLKIGYFSQHHVEQLDLNVSAVELLARKFPGRPEEEYRHQLGRYGISGELAMRPLASLSGGQKSRVAFAQMTMPCPNFYILDEPTNHLDMETIEALGRALNNFRGGVILVSHDERFIRLVCRELWVCEGGGVTRVEGGFDQYRALLQEQFRREGFL

SEQ ID NO: 7830 - protein, 709 aa, Homo sapiens
  Payload ID: 1637;
  Gene Symbol: ABCF3;
  Gene Name: ATP-binding cassette, sub-family F (GCN20), member 3;
  Uniprot ID:  Q9NUQ8;
  ENSP ID: ENSP00000411471
MATCAEILRSEFPEIDGQVFDYVTGVLHSGSADFESVDDLVEAVGELLQEVSGDSKDDAGIRAVCQRMYNTLRLAEPQSQGNSQVLLDAPIQLSKITENYDCGTKLPGLLKREQSSTVNAKKLEKAEARLKAKQEKRSEKDTLKTSNPLVLEEASASQAGSRKESRLESSGKNKSYDVRIENFDVSFGDRVLLAGADVNLAWGRRYGLVGRNGLGKTTLLKMLATRSLRVPAHISLLHVEQEVAGDDTPALQSVLESDSVREDLLRRERELTAQIAAGRAEGSEAAELAEIYAKLEEIEADKAPARASVILAGLGFTPKMQQQPTREFSGGWRMRLALARALFARPDLLLLDEPTNMLDVRAILWLENYLQTWPSTILVVSHDRNFLNAIATDIIHLHSQRLDGYRGDFETFIKSKQERLLNQQREYEAQQQYRQHIQVFIDRFRYNANRASQVQSKLKMLEKLPELKPVDKESEVVMKFPDGFEKFSPPILQLDEVDFYYDPKHVIFSRLSVSADLESRICVVGENGAGKSTMLKLLLGDLAPVRGIRHAHRNLKIGYFSQHHVEQLDLNVSAVELLARKFPGRPEEEYRHQLGRYGISGELAMRPLASLSGGQKSRVAFAQMTMPCPNFYILDEPTNHLDMETIEALGRALNNFRGGVILVSHDERFIRLVCRELWVCEGGGVTRVEGGFDQYRALLQEQFRREGFL

SEQ ID NO: 7831 - protein, 103 aa, Homo sapiens
  Payload ID: 1637;
  Gene Symbol: ABCF3;
  Gene Name: ATP-binding cassette, sub-family F (GCN20), member 3;
  ENSP ID: ENSP00000415704
MATCAEILRSEFPEIDGQVFDYVTGVLHSGSADFESVDDLVEAVGELLQEVSGDSKDDAGIRAVCQRMYNTLRLAEPQSQGNSQVLLDAPIQLSKITENYGRR

SEQ ID NO: 7832 - protein, 663 aa, Homo sapiens
  Payload ID: 1638;
  Gene Symbol: ABCG1;
  Gene Name: ATP-binding cassette, sub-family G (WHITE), member 1;
  Uniprot ID:  P45844;
  ENSP ID: ENSP00000291524
MIMRLPQPHGTNASSYSAEMTEPKSVCVSVDEVVSSNMEATETDLLNGHLKKVDNNLTEAQRFSSLPRRAAVNIEFRDLSYSVPEGPWWRKKGYKTLLKGISGKFNSGELVAIMGPSGAGKSTLMNILAGYRETGMKGAVLINGLPRDLRCFRKVSCYIMQDDMLLPHLTVQEAMMVSAHLKLQEKDEGRREMVKEILTALGLLSCANTRTGSLSGGQRKRLAIALELVNNPPVMFFDEPTSGLDSASCFQVVSLMKGLAQGGRSIICTIHQPSAKLFELFDQLYVLSQGQCVYRGKVCNLVPYLRDLGLNCPTYHNPADFVMEVASGEYGDQNSRLVRAVREGMCDSDHKRDLGGDAEVNPFLWHRPSEEDSSSMEGCHSFSASCLTQFCILFKRTFLSIMRDSVLTHLRITSHIGIGLLIGLLYLGIGNEAKKVLSNSGFLFFSMLFLMFAALMPTVLTFPLEMGVFLREHLNYWYSLKAYYLAKTMADVPFQIMFPVAYCSIVYWMTSQPSDAVRFVLFAALGTMTSLVAQSLGLLIGAASTSLQVATFVGPVTAIPVLLFSGFFVSFDTIPTYLQWMSYISYVRYGFEGVILSIYGLDREDLHCDIDETCHFQKSEAILRELDVENAKLYLDFIVLGIFFISLRLIAYFVLRYKIRAER

SEQ ID NO: 7833 - protein, 677 aa, Homo sapiens
  Payload ID: 1638;
  Gene Symbol: ABCG1;
  Gene Name: ATP-binding cassette, sub-family G (WHITE), member 1;
  Uniprot ID:  P45844;
  ENSP ID: ENSP00000339744
MRISLPRAPERDGGVSASSLLDTVTNASSYSAEMTEPKSVCVSVDEVVSSNMEATETDLLNGHLKKVDNNLTEAQRFSSLPRRAAVNIEFRDLSYSVPEGPWWRKKGYKTLLKGISGKFNSGELVAIMGPSGAGKSTLMNILAGYRETGMKGAVLINGLPRDLRCFRKVSCYIMQDDMLLPHLTVQEAMMVSAHLKLQEKDEGRREMVKEILTALGLLSCANTRTGSLSGGQRKRLAIALELVNNPPVMFFDEPTSGLDSASCFQVVSLMKGLAQGGRSIICTIHQPSAKLFELFDQLYVLSQGQCVYRGKVCNLVPYLRDLGLNCPTYHNPADFVMEVASGEYGDQNSRLVRAVREGMCDSDHKRDLGGDAEVNPFLWHRPSEEDSSSMEGCHSFSASCLTQFCILFKRTFLSIMRDSVLTHLRITSHIGIGLLIGLLYLGIGNEAKKVLSNSGFLFFSMLFLMFAALMPTVLTFPLEMGVFLREHLNYWYSLKAYYLAKTMADVPFQIMFPVAYCSIVYWMTSQPSDAVRFVLFAALGTMTSLVAQSLGLLIGAASTSLQVATFVGPVTAIPVLLFSGFFVSFDTIPTYLQWMSYISYVRYGFEGVILSIYGLDREDLHCDIDETCHFQKSEAILRELDVENAKLYLDFIVLGIFFISLRLIAYFVLRYKIRAER

SEQ ID NO: 7834 - protein, 678 aa, Homo sapiens
  Payload ID: 1638;
  Gene Symbol: ABCG1;
  Gene Name: ATP-binding cassette, sub-family G (WHITE), member 1;
  Uniprot ID:  P45844;
  ENSP ID: ENSP00000354995
MACLMAAFSVGTAMNASSYSAEMTEPKSVCVSVDEVVSSNMEATETDLLNGHLKKVDNNLTEAQRFSSLPRRAAVNIEFRDLSYSVPEGPWWRKKGYKTLLKGISGKFNSGELVAIMGPSGAGKSTLMNILAGYRETGMKGAVLINGLPRDLRCFRKVSCYIMQDDMLLPHLTVQEAMMVSAHLKLQEKDEGRREMVKEILTALGLLSCANTRTGSLSGGQRKRLAIALELVNNPPVMFFDEPTSGLDSASCFQVVSLMKGLAQGGRSIICTIHQPSAKLFELFDQLYVLSQGQCVYRGKVCNLVPYLRDLGLNCPTYHNPADFVMEVASGEYGDQNSRLVRAVREGMCDSDHKRDLGGDAEVNPFLWHRPSEEVKQTKRLKGLRKDSSSMEGCHSFSASCLTQFCILFKRTFLSIMRDSVLTHLRITSHIGIGLLIGLLYLGIGNEAKKVLSNSGFLFFSMLFLMFAALMPTVLTFPLEMGVFLREHLNYWYSLKAYYLAKTMADVPFQIMFPVAYCSIVYWMTSQPSDAVRFVLFAALGTMTSLVAQSLGLLIGAASTSLQVATFVGPVTAIPVLLFSGFFVSFDTIPTYLQWMSYISYVRYGFEGVILSIYGLDREDLHCDIDETCHFQKSEAILRELDVENAKLYLDFIVLGIFFISLRLIAYFVLRYKIRAER

SEQ ID NO: 7835 - protein, 824 aa, Homo sapiens
  Payload ID: 1638;
  Gene Symbol: ABCG1;
  Gene Name: ATP-binding cassette, sub-family G (WHITE), member 1;
  ENSP ID: ENSP00000381464
MLAVQQTEHLPACPPARRWSSNFCPESTEGGPSLLGLRDMVRRGWSVCTAILLARLWCLVPTHTFLSEYPEAAEYPHPGWVYWLQMAVAPGHLRAWVMRNNVTTNIPSAFSGTLTHEEKAVLTVFTGTATAVHVQVAALASAKLESSVFVTDCVSCKIENVCDSALQGKRVPMSGLQGSSIVIMPPSNRPLASAASCTWSVQVQGGPHHLGVVAISGKVLSAAHGAGRAYGWGFPGDPMEEGYKTLLKGISGKFNSGELVAIMGPSGAGKSTLMNILAGYRETGMKGAVLINGLPRDLRCFRKVSCYIMQDDMLLPHLTVQEAMMVSAHLKLQEKDEGRREMVKEILTALGLLSCANTRTGSLSGGQRKRLAIALELVNNPPVMFFDEPTSGLDSASCFQVVSLMKGLAQGGRSIICTIHQPSAKLFELFDQLYVLSQGQCVYRGKVCNLVPYLRDLGLNCPTYHNPADFVMEVASGEYGDQNSRLVRAVREGMCDSDHKRDLGGDAEVNPFLWHRPSEEVKQTKRLKGLRKDSSSMEGCHSFSASCLTQFCILFKRTFLSIMRDSVLTHLRITSHIGIGLLIGLLYLGIGNEAKKVLSNSGFLFFSMLFLMFAALMPTVLTFPLEMGVFLREHLNYWYSLKAYYLAKTMADVPFQIMFPVAYCSIVYWMTSQPSDAVRFVLFAALGTMTSLVAQSLGLLIGAASTSLQVATFVGPVTAIPVLLFSGFFVSFDTIPTYLQWMSYISYVRYGFEGVILSIYGLDREDLHCDIDETCHFQKSEAILRELDVENAKLYLDFIVLGIFFISLRLIAYFVLRYKIRAER

SEQ ID NO: 7836 - protein, 666 aa, Homo sapiens
  Payload ID: 1638;
  Gene Symbol: ABCG1;
  Gene Name: ATP-binding cassette, sub-family G (WHITE), member 1;
  Uniprot ID:  P45844;
  ENSP ID: ENSP00000381467
MACLMAAFSVGTAMNASSYSAEMTEPKSVCVSVDEVVSSNMEATETDLLNGHLKKVDNNLTEAQRFSSLPRRAAVNIEFRDLSYSVPEGPWWRKKGYKTLLKGISGKFNSGELVAIMGPSGAGKSTLMNILAGYRETGMKGAVLINGLPRDLRCFRKVSCYIMQDDMLLPHLTVQEAMMVSAHLKLQEKDEGRREMVKEILTALGLLSCANTRTGSLSGGQRKRLAIALELVNNPPVMFFDEPTSGLDSASCFQVVSLMKGLAQGGRSIICTIHQPSAKLFELFDQLYVLSQGQCVYRGKVCNLVPYLRDLGLNCPTYHNPADFVMEVASGEYGDQNSRLVRAVREGMCDSDHKRDLGGDAEVNPFLWHRPSEEDSSSMEGCHSFSASCLTQFCILFKRTFLSIMRDSVLTHLRITSHIGIGLLIGLLYLGIGNEAKKVLSNSGFLFFSMLFLMFAALMPTVLTFPLEMGVFLREHLNYWYSLKAYYLAKTMADVPFQIMFPVAYCSIVYWMTSQPSDAVRFVLFAALGTMTSLVAQSLGLLIGAASTSLQVATFVGPVTAIPVLLFSGFFVSFDTIPTYLQWMSYISYVRYGFEGVILSIYGLDREDLHCDIDETCHFQKSEAILRELDVENAKLYLDFIVLGIFFISLRLIAYFVLRYKIRAER

SEQ ID NO: 7837 - protein, 668 aa, Homo sapiens
  Payload ID: 1638;
  Gene Symbol: ABCG1;
  Gene Name: ATP-binding cassette, sub-family G (WHITE), member 1;
  Uniprot ID:  P45844;
  ENSP ID: ENSP00000381475
MLGTQGWTKQRKPCPQNASSYSAEMTEPKSVCVSVDEVVSSNMEATETDLLNGHLKKVDNNLTEAQRFSSLPRRAAVNIEFRDLSYSVPEGPWWRKKGYKTLLKGISGKFNSGELVAIMGPSGAGKSTLMNILAGYRETGMKGAVLINGLPRDLRCFRKVSCYIMQDDMLLPHLTVQEAMMVSAHLKLQEKDEGRREMVKEILTALGLLSCANTRTGSLSGGQRKRLAIALELVNNPPVMFFDEPTSGLDSASCFQVVSLMKGLAQGGRSIICTIHQPSAKLFELFDQLYVLSQGQCVYRGKVCNLVPYLRDLGLNCPTYHNPADFVMEVASGEYGDQNSRLVRAVREGMCDSDHKRDLGGDAEVNPFLWHRPSEEDSSSMEGCHSFSASCLTQFCILFKRTFLSIMRDSVLTHLRITSHIGIGLLIGLLYLGIGNEAKKVLSNSGFLFFSMLFLMFAALMPTVLTFPLEMGVFLREHLNYWYSLKAYYLAKTMADVPFQIMFPVAYCSIVYWMTSQPSDAVRFVLFAALGTMTSLVAQSLGLLIGAASTSLQVATFVGPVTAIPVLLFSGFFVSFDTIPTYLQWMSYISYVRYGFEGVILSIYGLDREDLHCDIDETCHFQKSEAILRELDVENAKLYLDFIVLGIFFISLRLIAYFVLRYKIRAER

SEQ ID NO: 7838 - protein, 257 aa, Homo sapiens
  Payload ID: 1638;
  Gene Symbol: ABCG1;
  Gene Name: ATP-binding cassette, sub-family G (WHITE), member 1;
  ENSP ID: ENSP00000414541
MACLMAAFSVGTAMNASSYSAEMTEPKSVCVSVDEVVSSNMEATETDLLNGHLKKVDNNLTEAQRFSSLPRRAAVNIEFRDLSYSVPEGPWWRKKGYKTLLKGISGKFNSGELVAIMGPSGAGKSTLMNILAGYRETGMKGAVLINGLPRDLRCFRKVSCYIMQDDMLLPHLTVQEAMMVKEILTALGLLSCANTRTGSLSGGQRKRLAIALELVNNPPVMFFDEPTSGLDSASCFQVVSLMKGLAQGGRSIICTIH

SEQ ID NO: 7839 - protein, 655 aa, Homo sapiens
  Payload ID: 1639;
  Gene Symbol: ABCG2;
  Gene Name: ATP-binding cassette, sub-family G (WHITE), member 2 (Junior blood group);
  Uniprot ID:  Q9UNQ0;
  ENSP ID: ENSP00000237612
MSSSNVEVFIPVSQGNTNGFPATASNDLKAFTEGAVLSFHNICYRVKLKSGFLPCRKPVEKEILSNINGIMKPGLNAILGPTGGGKSSLLDVLAARKDPSGLSGDVLINGAPRPANFKCNSGYVVQDDVVMGTLTVRENLQFSAALRLATTMTNHEKNERINRVIQELGLDKVADSKVGTQFIRGVSGGERKRTSIGMELITDPSILFLDEPTTGLDSSTANAVLLLLKRMSKQGRTIIFSIHQPRYSIFKLFDSLTLLASGRLMFHGPAQEALGYFESAGYHCEAYNNPADFFLDIINGDSTAVALNREEDFKATEIIEPSKQDKPLIEKLAEIYVNSSFYKETKAELHQLSGGEKKKKITVFKEISYTTSFCHQLRWVSKRSFKNLLGNPQASIAQIIVTVVLGLVIGAIYFGLKNDSTGIQNRAGVLFFLTTNQCFSSVSAVELFVVEKKLFIHEYISGYYRVSSYFLGKLLSDLLPMRMLPSIIFTCIVYFMLGLKPKADAFFVMMFTLMMVAYSASSMALAIAAGQSVVSVATLLMTICFVFMMIFSGLLVNLTTIASWLSWLQYFSIPRYGFTALQHNEFLGQNFCPGLNATGNNPCNYATCTGEEYLVKQGIDLSPWGLWKNHVALACMIVIFLTIAYLKLLFLKKYS

SEQ ID NO: 7840 - protein, 150 aa, Homo sapiens
  Payload ID: 1639;
  Gene Symbol: ABCG2;
  Gene Name: ATP-binding cassette, sub-family G (WHITE), member 2 (Junior blood group);
  ENSP ID: ENSP00000426916
KRFRARRREEAVPATPTEIERRGKEAACGGTGKIKTLQMSSSNVEVFIPVSQGNTNGFPATASNDLKAFTEGAVLSFHNICYRVKLKSGFLPCRKPVEKEILSNINGIMKPGLNAILGPTGGGKSSLLDVLAARKDPSGLSGDVLINGAP

SEQ ID NO: 7841 - protein, 611 aa, Homo sapiens
  Payload ID: 1639;
  Gene Symbol: ABCG2;
  Gene Name: ATP-binding cassette, sub-family G (WHITE), member 2 (Junior blood group);
  Uniprot ID:  Q9UNQ0;
  ENSP ID: ENSP00000426917
MSSSNVEVFIPVSQGNTNGFPATASNDLKAFTEGAVLSFHNICYRVKLKSGFLPCRKPVEKEILSNINGIMKPGLNAILGPTGGGKSSLLDVLAARKDPSGLSGDVLINGAPRPANFKCNSGYVVQDDVVMGTLTVRENLQFSAALRLATTMTNHEKNERINRVIQELGLDKVADSKVGTQFIRGVSGGERKRTSIGMELITDPSILFLDEPTTGLDSSTANAVLLLLKRMSKQGRTIIFSIHQPRYSIFKLFDSLTLLASGRLMFHGPAQEALGYFESAGYHCEAYNNPADFFLDIINGDSTAVALNREEDFKATEIIEPSKQDKPLIEKLAEIYVNSSFYKETKAELHQLSGGEKKKKITVFKEISYTTSFCHQLRWVSKRSFKNLLGNPQASIAQIIVTVVLGLVIGAIYFGLKNDSTGIQNRAGVLFFLTTNQCFSSVSAVELFVVEKKLFIHEYISGYYRVSSYFLGKLLSDLLPMRMLPSIIFTCIVYFMLGLKPKADAFFVMMFTLMMVAYSASSMALAIAAGQSVVSVATLLMTICFVFMMVCWSISQPLHLGCHGFSTSAFHDMDLRLCSIMNFWDKTSAQDSMQQETILVTMQHVLAKNIW

SEQ ID NO: 7842 - protein, 130 aa, Homo sapiens
  Payload ID: 1639;
  Gene Symbol: ABCG2;
  Gene Name: ATP-binding cassette, sub-family G (WHITE), member 2 (Junior blood group);
  ENSP ID: ENSP00000426934
SDGDQTQLGQTRKIKTLQMSSSNVEVFIPVSQGNTNGFPATASNDLKAFTEGAVLSFHNICYRVKLKSGFLPCRKPVEKEILSNINGIMKPGLNAILGPTGGGKSSLLDVLAARKDPSGLSGDVLINGAP

SEQ ID NO: 7843 - protein, 152 aa, Homo sapiens
  Payload ID: 1640;
  Gene Symbol: ABCG4;
  Gene Name: ATP-binding cassette, sub-family G (WHITE), member 4;
  ENSP ID: ENSP00000431915
MAEKALEAVGCGLGPGAVAMAVTLEDGAEPPVLTTHLKKVENHITEAQRFSHLPKRSAVDIEFVELSYSVREGPCWRKRGYKTLLKCLSGKFCRRELIGIMGPSGAGKSTFMNILAGYRESGMKGQILVNGRPRELRTFRKMSCYIMQDDML

SEQ ID NO: 7844 - protein, 646 aa, Homo sapiens
  Payload ID: 1640;
  Gene Symbol: ABCG4;
  Gene Name: ATP-binding cassette, sub-family G (WHITE), member 4;
  Uniprot ID:  Q9H172;
  ENSP ID: ENSP00000479253
MAEKALEAVGCGLGPGAVAMAVTLEDGAEPPVLTTHLKKVENHITEAQRFSHLPKRSAVDIEFVELSYSVREGPCWRKRGYKTLLKCLSGKFCRRELIGIMGPSGAGKSTFMNILAGYRESGMKGQILVNGRPRELRTFRKMSCYIMQDDMLLPHLTVLEAMMVSANLKLSEKQEVKKELVTEILTALGLMSCSHTRTALLSGGQRKRLAIALELVNNPPVMFFDEPTSGLDSASCFQVVSLMKSLAQGGRTIICTIHQPSAKLFEMFDKLYILSQGQCIFKGVVTNLIPYLKGLGLHCPTYHNPADFIIEVASGEYGDLNPMLFRAVQNGLCAMAEKKSSPEKNEVPAPCPPCPPEVDPIESHTFATSTLTQFCILFKRTFLSILRDTVLTHLRFMSHVVIGVLIGLLYLHIGDDASKVFNNTGCLFFSMLFLMFAALMPTVLTFPLEMAVFMREHLNYWYSLKAYYLAKTMADVPFQVVCPVVYCSIVYWMTGQPAETSRFLLFSALATATALVAQSLGLLIGAASNSLQVATFVGPVTAIPVLLFSGFFVSFKTIPTYLQWSSYLSYVRYGFEGVILTIYGMERGDLTCLEERCPFREPQSILRALDVEDAKLYMDFLVLGIFFLALRLLAYLVLRYRVKSER

SEQ ID NO: 7845 - protein, 646 aa, Homo sapiens; identical to SEQ ID NO: 7844
  Payload ID: 1640;
  Gene Symbol: ABCG4;
  Gene Name: ATP-binding cassette, sub-family G (WHITE), member 4;
  Uniprot ID:  Q9H172;
  ENSP ID: ENSP00000481728

SEQ ID NO: 7846 - protein, 646 aa, Homo sapiens; identical to SEQ ID NO: 7844
  Payload ID: 1640;
  Gene Symbol: ABCG4;
  Gene Name: ATP-binding cassette, sub-family G (WHITE), member 4;
  Uniprot ID:  Q9H172;
  ENSP ID: ENSP00000484289

SEQ ID NO: 7847 - protein, 651 aa, Homo sapiens
  Payload ID: 1641;
  Gene Symbol: ABCG5;
  Gene Name: ATP-binding cassette, sub-family G (WHITE), member 5;
  Uniprot ID:  Q9H222;
  ENSP ID: ENSP00000260645
MGDLSSLTPGGSMGLQVNRGSQSSLEGAPATAPEPHSLGILHASYSVSHRVRPWWDITSCRQQWTRQILKDVSLYVESGQIMCILGSSGSGKTTLLDAMSGRLGRAGTFLGEVYVNGRALRREQFQDCFSYVLQSDTLLSSLTVRETLHYTALLAIRRGNPGSFQKKVEAVMAELSLSHVADRLIGNYSLGGISTGERRRVSIAAQLLQDPKVMLFDEPTTGLDCMTANQIVVLLVELARRNRIVVLTIHQPRSELFQLFDKIAILSFGELIFCGTPAEMLDFFNDCGYPCPEHSNPFDFYMDLTSVDTQSKEREIETSKRVQMIESAYKKSAICHKTLKNIERMKHLKTLPMVPFKTKDSPGVFSKLGVLLRRVTRNLVRNKLAVITRLLQNLIMGLFLLFFVLRVRSNVLKGAIQDRVGLLYQFVGATPYTGMLNAVNLFPVLRAVSDQESQDGLYQKWQMMLAYALHVLPFSVVATMIFSSVCYWTLGLHPEVARFGYFSAALLAPHLIGEFLTLVLLGIVQNPNIVNSVVALLSIAGVLVGSGFLRNIQEMPIPFKIISYFTFQKYCSEILVVNEFYGLNFTCGSSNVSVTTNPMCAFTQGIQFIEKTCPGATSRFTMNFLILYSFIPALVILGIVVFKIRDHLISR

SEQ ID NO: 7848 - protein, 480 aa, Homo sapiens
  Payload ID: 1641;
  Gene Symbol: ABCG5;
  Gene Name: ATP-binding cassette, sub-family G (WHITE), member 5;
  ENSP ID: ENSP00000384513
MCILGSSGSGKTTLLDAMSGRLGRAGTFLGEVYVNGRALRREQFQDCFSYVLQSDTLLSSLTVRETLHYTALLAIRRGNPGSFQKKVEAVMAELSLSHVADRLIGNYSLGGISTGERRRVSIAAQLLQDPMDLTSVDTQSKEREIETSKRVQMIESAYKKSAICHKTLKNIERMKHLKTLPMVPFKTKDSPGVFSKLGVLLRRVTRNLVRNKLAVITRLLQNLIMGLFLLFFVLRVRSNVLKGAIQDRVGLLYQFVGATPYTGMLNAVNLFPVLRAVSDQESQDGLYQKWQMMLAYALHVLPFSVVATMIFSSVCYWTLGLHPEVARFGYFSAALLAPHLIGEFLTLVLLGIVQNPNIVNSVVALLSIAGVLVGSGFLRNIQEMPIPFKIISYFTFQKYCSEILVVNEFYGLNFTCGSSNVSVTTNPMCAFTQGIQFIEKTCPGATSRFTMNFLILYSFIPALVILGIVVFKIRDHLISR

SEQ ID NO: 7849 - protein, 132 aa, Homo sapiens
  Payload ID: 1641;
  Gene Symbol: ABCG5;
  Gene Name: ATP-binding cassette, sub-family G (WHITE), member 5;
  ENSP ID: ENSP00000386501
MCILGSSGSGKTTLLDAMSGRLGRAGTFLGEVYVNGRALRREQFQDCFSYVLQSDTLLSSLTVRETLHYTALLAIRRGNPGSFQKKVEAVMAELSLSHVADRLIGNYSLGGISTGERRRVSIAAQLLQDPRE

SEQ ID NO: 7850 - protein, 118 aa, Homo sapiens
  Payload ID: 1641;
  Gene Symbol: ABCG5;
  Gene Name: ATP-binding cassette, sub-family G (WHITE), member 5;
  ENSP ID: ENSP00000430935
MCILGSSGSGKTTLLDAMSGRLGRAGTFLGEVYVNGRALRREQFQDCFSYVLQSDTLLSSLTVRETLHYTALLAIRRGNPGSFQKKRQGLSLLPKLVSNSWPQAILPPQPSKVLGLQA

SEQ ID NO: 7851 - protein, 673 aa, Homo sapiens
  Payload ID: 1642;
  Gene Symbol: ABCG8;
  Gene Name: ATP-binding cassette, sub-family G (WHITE), member 8;
  Uniprot ID:  Q9H221;
  ENSP ID: ENSP00000272286
MAGKAAEERGLPKGATPQDTSGLQDRLFSSESDNSLYFTYSGQPNTLEVRDLNYQVDLASQVPWFEQLAQFKMPWTSPSCQNSCELGIQNLSFKVRSGQMLAIIGSSGCGRASLLDVITGRGHGGKIKSGQIWINGQPSSPQLVRKCVAHVRQHNQLLPNLTVRETLAFIAQMRLPRTFSQAQRDKRVEDVIAELRLRQCADTRVGNMYVRGLSGGERRRVSIGVQLLWNPGILILDEPTSGLDSFTAHNLVKTLSRLAKGNRLVLISLHQPRSDIFRLFDLVLLMTSGTPIYLGAAQHMVQYFTAIGYPCPRYSNPADFYVDLTSIDRRSREQELATREKAQSLAALFLEKVRDLDDFLWKAETKDLDEDTCVESSVTPLDTNCLPSPTKMPGAVQQFTTLIRRQISNDFRDLPTLLIHGAEACLMSMTIGFLYFGHGSIQLSFMDTAALLFMIGALIPFNVILDVISKCYSERAMLYYELEDGLYTTGPYFFAKILGELPEHCAYIIIYGMPTYWLANLRPGLQPFLLHFLLVWLVVFCCRIMALAAAALLPTFHMASFFSNALYNSFYLAGGFMINLSSLWTVPAWISKVSFLRWCFEGLMKIQFSRRTYKMPLGNLTIAVSGDKILSVMELDSYPLYAIYLIVIGLSGGFMVLYYVSLRFIKQKPSQDW

SEQ ID NO: 7852 - protein, 764 aa, Homo sapiens
  Payload ID: 1643;
  Gene Symbol: ATRIP;
  Gene Name: ATR interacting prt;
  Uniprot ID:  Q8WXE1;
  ENSP ID: ENSP00000302338
MAGTSAPGSKRRSEPPAPRPGPPPGTGHPPSKRARGFSAAAAPDPDDPFGAHGDFTADDLEELDTLASQALSQCPAAARDVSSDHKVHRLLDGMSKNPSGKNRETVPIKDNFELEVLQAQYKELKEKMKVMEEEVLIKNGEIKILRDSLHQTESVLEEQRRSHFLLEQEKTQALSDKEKEFSKKLQSLQSELQFKDAEMNELRTKLQTSERANKLAAPSVSHVSPRKNPSVVIKPEACSPQFGKTSFPTKESFSANMSLPHPCQTESGYKPLVGREDSKPHSLRGDSIKQEEAQKSFVDSWRQRSNTQGSILINLLLKQPLIPGSSLSLCHLLSSSSESPAGTPLQPPGFGSTLAGMSGLRTTGSYDGSFSLSALREAQNLAFTGLNLVARNECSRDGDPAEGGRRAFPLCQLPGAVHFLPLVQFFIGLHCQALQDLAAAKRSGAPGDSPTHSSCVSSGVETNPEDSVCILEGFSVTALSILQHLVCHSGAVVSLLLSGVGADSAAGEGNRSLVHRLSDGDMTSALRGVADDQGQHPLLKMLLHLLAFSSAATGHLQASVLTQCLKVLVKLAENTSCDFLPRFQCVFQVLPKCLSPETPLPSVLLAVELLSLLADHDQLAPQLCSHSEGCLLLLLYMYITSRPDRVALETQWLQLEQEVVRALTVMLHRQWLTVRRAGGPPRTDQQRRTVRCLRDTVLLLHGLSQKDKLFMMHCVEVLHQFDQVMPGVSMLIRGLPDVTDCEEAALDDLCAAETDVEDPEVECG

SEQ ID NO: 7853 - protein, 791 aa, Homo sapiens
  Payload ID: 1643;
  Gene Symbol: ATRIP;
  Gene Name: ATR interacting prt;
  Uniprot ID:  Q8WXE1;
  ENSP ID: ENSP00000323099
MAGTSAPGSKRRSEPPAPRPGPPPGTGHPPSKRARGFSAAAAPDPDDPFGAHGDFTADDLEELDTLASQALSQCPAAARDVSSDHKVHRLLDGMSKNPSGKNRETVPIKDNFELEVLQAQYKELKEKMKVMEEEVLIKNGEIKILRDSLHQTESVLEEQRRSHFLLEQEKTQALSDKEKEFSKKLQSLQSELQFKDAEMNELRTKLQTSERANKLAAPSVSHVSPRKNPSVVIKPEACSPQFGKTSFPTKESFSANMSLPHPCQTESGYKPLVGREDSKPHSLRGDSIKQEEAQKSFVDSWRQRSNTQGSILINLLLKQPLIPGSSLSLCHLLSSSSESPAGTPLQPPGFGSTLAGMSGLRTTGSYDGSFSLSALREAQNLAFTGLNLVARNECSRDGDPAEGGRRAFPLCQLPGAVHFLPLVQFFIGLHCQALQDLAAAKRSGAPGDSPTHSSCVSSGVETNPEDSVCILEGFSVTALSILQHLVCHSGAVVSLLLSGVGADSAAGEGNRSLVHRLSDGDMTSALRGVADDQGQHPLLKMLLHLLAFSSAATGHLQASVLTQCLKVLVKLAENTSCDFLPRFQCVFQVLPKCLSPETPLPSVLLAVELLSLLADHDQLAPQLCSHSEGCLLLLLYMYITSRPDRVALETQWLQLEQEVVWLLAKLGVQSPLPPVTGSNCQCNVEVVRALTVMLHRQWLTVRRAGGPPRTDQQRRTVRCLRDTVLLLHGLSQKDKLFMMHCVEVLHQFDQVMPGVSMLIRGLPDVTDCEEAALDDLCAAETDVEDPEVECG

SEQ ID NO: 7854 - protein, 698 aa, Homo sapiens
  Payload ID: 1643;
  Gene Symbol: ATRIP;
  Gene Name: ATR interacting prt;
  Uniprot ID:  Q8WXE1;
  ENSP ID: ENSP00000400930
MSKNPSGKNRETVPIKDNFELEVLQAQYKELKEKMKVMEEEVLIKNGEIKILRDSLHQTESVLEEQRRSHFLLEQEKTQALSDKEKEFSKKLQSLQSELQFKDAEMNELRTKLQTSERANKLAAPSVSHVSPRKNPSVVIKPEACSPQFGKTSFPTKESFSANMSLPHPCQTESGYKPLVGREDSKPHSLRGDSIKQEEAQKSFVDSWRQRSNTQGSILINLLLKQPLIPGSSLSLCHLLSSSSESPAGTPLQPPGFGSTLAGMSGLRTTGSYDGSFSLSALREAQNLAFTGLNLVARNECSRDGDPAEGGRRAFPLCQLPGAVHFLPLVQFFIGLHCQALQDLAAAKRSGAPGDSPTHSSCVSSGVETNPEDSVCILEGFSVTALSILQHLVCHSGAVVSLLLSGVGADSAAGEGNRSLVHRLSDGDMTSALRGVADDQGQHPLLKMLLHLLAFSSAATGHLQASVLTQCLKVLVKLAENTSCDFLPRFQCVFQVLPKCLSPETPLPSVLLAVELLSLLADHDQLAPQLCSHSEGCLLLLLYMYITSRPDRVALETQWLQLEQEVVWLLAKLGVQSPLPPVTGSNCQCNVEVVRALTVMLHRQWLTVRRAGGPPRTDQQRRTVRCLRDTVLLLHGLSQKDKLFMMHCVEVLHQFDQVMPGVSMLIRGLPDVTDCEEAALDDLCAAETDVEDPEVECG

SEQ ID NO: 7855 - protein, 131 aa, Homo sapiens
  Payload ID: 1643;
  Gene Symbol: ATRIP;
  Gene Name: ATR interacting prt;
  ENSP ID: ENSP00000489136
MSKNPSGKNRETVPIKDNFELEVLQAQYKELKEKMKVMEEEVLIKNGEIKILRDSLHQTESVLEEQRRSHFLLEQEKTQALSDKEKEFSKKLQSLQSELQFKDAEMNELRTKLQTSERANKLAAPSVSHVR

SEQ ID NO: 7856 - protein, 196 aa, Homo sapiens
  Payload ID: 1643;
  Gene Symbol: ATRIP;
  Gene Name: ATR interacting prt;
  ENSP ID: ENSP00000489608
MSKNPSGKNRETVPIKDNFELEVLQAQYKELKEKMKVMEEEVLIKNGEIKILRDSLHQTESVLEEQRRSHFLLEQEKTQALSDKEKEFSKKLQSLQSELQFKDAEMNELRTKLQTSERANKLAAPSVSHVSPRKNPSVVIKPEACSPQFGKTSFPTKESFSANMSLPHPCQTESGYKPLVGREDSKPHSLRGDSIK

SEQ ID NO: 7857 - protein, 314 aa, Homo sapiens
  Payload ID: 1644;
  Gene Symbol:;
  Gene Name: ATR interacting prt [Source:EntrezGene;Acc:84126];
  Uniprot ID:  Q9NSU2;
  ENSP ID: ENSP00000296443
MGSQALPPGPMQTLIFFDMEATGLPFSQPKVTELCLLAVHRCALESPPTSQGPPPTVPPPPRVVDKLSLCVAPGKACSPAASEITGLSTAVLAAHGRQCFDDNLANLLLAFLRRQPQPWCLVAHNGDRYDFPLLQAELAMLGLTSALDGAFCVDSITALKALERASSPSEHGPRKSYSLGSIYTRLYGQSPPDSHTAEGDVLALLSICQWRPQALLRWVDAHARPFGTIRPMYGVTASARTKPRPSAVTTTAHLATTRNTSPSLGESRGTKDLPPVKDPGALSREGLLAPLGLLAILTLAVATLYGLSLATPGE

SEQ ID NO: 7858 - protein, 664 aa, Homo sapiens
  Payload ID: 1644;
  Gene Symbol:;
  Gene Name: ATR interacting prt [Source:EntrezGene;Acc:84126];
  Uniprot ID:  Q8WXE1;
  ENSP ID: ENSP00000349620
MKVMEEEVLIKNGEIKILRDSLHQTESVLEEQRRSHFLLEQEKTQALSDKEKEFSKKLQSLQSELQFKDAEMNELRTKLQTSERANKLAAPSVSHVSPRKNPSVVIKPEACSPQFGKTSFPTKESFSANMSLPHPCQTESGYKPLVGREDSKPHSLRGDSIKQEEAQKSFVDSWRQRSNTQGSILINLLLKQPLIPGSSLSLCHLLSSSSESPAGTPLQPPGFGSTLAGMSGLRTTGSYDGSFSLSALREAQNLAFTGLNLVARNECSRDGDPAEGGRRAFPLCQLPGAVHFLPLVQFFIGLHCQALQDLAAAKRSGAPGDSPTHSSCVSSGVETNPEDSVCILEGFSVTALSILQHLVCHSGAVVSLLLSGVGADSAAGEGNRSLVHRLSDGDMTSALRGVADDQGQHPLLKMLLHLLAFSSAATGHLQASVLTQCLKVLVKLAENTSCDFLPRFQCVFQVLPKCLSPETPLPSVLLAVELLSLLADHDQLAPQLCSHSEGCLLLLLYMYITSRPDRVALETQWLQLEQEVVWLLAKLGVQSPLPPVTGSNCQCNVEVVRALTVMLHRQWLTVRRAGGPPRTDQQRRTVRCLRDTVLLLHGLSQKDKLFMMHCVEVLHQFDQVMPGVSMLIRGLPDVTDCEEAALDDLCAAETDVEDPEVECG

SEQ ID NO: 7859 - protein, 46 aa, Homo sapiens
  Payload ID: 1644;
  Gene Symbol:;
  Gene Name: ATR interacting prt [Source:EntrezGene;Acc:84126];
  ENSP ID: ENSP00000489041
MSKNPSGKNRETVPIKDNFELEVLQAQYKELKEKLCKKADTSYHHL

SEQ ID NO: 7860 - protein, 464 aa, Homo sapiens
  Payload ID: 1644;
  Gene Symbol:;
  Gene Name: ATR interacting prt [Source:EntrezGene;Acc:84126];
  ENSP ID: ENSP00000489199
MAGTSAPGSKRRSEPPAPRPGPPPGTGHPPSKRARGFSAAAAPDPDDPFGAHGDFTADDLEELDTLASQALSQCPAAARDVSSDHKVHRLLDGMSKNPSGKNRETVPIKDNFELEVLQAQYKELKEKMKVMEEEVLIKNGEIKILRDSLHQTESVLEEQRRSHFLLEQEKTQALSDKEKEFSKKLQSLQSELQFKDAEMNELRTKLQTSERANKLAAPSVSHVSPRKNPSVVIKPEACSPQFGKTSFPTKESFSANMSLPHPCQTESGYKPLVGREDSKPHSLRGDSIKQEEAQKSFVDSWRQRSNTQGSILINLLLKQPLIPGSSLSLCHLLSSSSESPAGTPLQPPGFGSTLAGMSGLRTTGSYDGSFSLSALREAQNLAFTGLNLVARNECSRDGDPAEGGRRAFPLCQLPGAVHFLPLVQFFIGLHCQALQDLAAAKRSGAPGDSPTHSSCQQVTFKPVS

SEQ ID NO: 7861 - protein, 2644 aa, Homo sapiens
  Payload ID: 1645;
  Gene Symbol: ATR;
  Gene Name: ATR serine/threonine kinase;
  Uniprot ID:  Q13535;
  ENSP ID: ENSP00000343741
MGEHGLELASMIPALRELGSATPEEYNTVVQKPRQILCQFIDRILTDVNVVAVELVKKTDSQPTSVMLLDFIQHIMKSSPLMFVNVSGSHEAKGSCIEFSNWIITRLLRIAATPSCHLLHKKICEVICSLLFLFKSKSPAIFGVLTKELLQLFEDLVYLHRRNVMGHAVEWPVVMSRFLSQLDEHMGYLQSAPLQLMSMQNLEFIEVTLLMVLTRIIAIVFFRRQELLLWQIGCVLLEYGSPKIKSLAISFLTELFQLGGLPAQPASTFFSSFLELLKHLVEMDTDQLKLYEEPLSKLIKTLFPFEAEAYRNIEPVYLNMLLEKLCVMFEDGVLMRLKSDLLKAALCHLLQYFLKFVPAGYESALQVRKVYVRNICKALLDVLGIEVDAEYLLGPLYAALKMESMEIIEEIQCQTQQENLSSNSDGISPKRRRLSSSLNPSKRAPKQTEEIKHVDMNQKSILWSALKQKAESLQISLEYSGLKNPVIEMLEGIAVVLQLTALCTVHCSHQNMNCRTFKDCQHKSKKKPSVVITWMSLDFYTKVLKSCRSLLESVQKLDLEATIDKVVKIYDALIYMQVNSSFEDHILEDLCGMLSLPWIYSHSDDGCLKLTTFAANLLTLSCRISDSYSPQAQSRCVFLLTLFPRRIFLEWRTAVYNWALQSSHEVIRASCVSGFFILLQQQNSCNRVPKILIDKVKDDSDIVKKEFASILGQLVCTLHGMFYLTSSLTEPFSEHGHVDLFCRNLKATSQHECSSSQLKASVCKPFLFLLKKKIPSPVKLAFIDNLHHLCKHLDFREDETDVKAVLGTLLNLMEDPDKDVRVAFSGNIKHILESLDSEDGFIKELFVLRMKEAYTHAQISRNNELKDTLILTTGDIGRAAKGDLVPFALLHLLHCLLSKSASVSGAAYTEIRALVAAKSVKLQSFFSQYKKPICQFLVESLHSSQMTALPNTPCQNADVRKQDVAHQREMALNTLSEIANVFDFPDLNRFLTRTLQVLLPDLAAKASPAASALIRTLGKQLNVNRREILINNFKYIFSHLVCSCSKDELERALHYLKNETEIELGSLLRQDFQGLHNELLLRIGEHYQQVFNGLSILASFASSDDPYQGPRDIISPELMADYLQPKLLGILAFFNMQLLSSSVGIEDKKMALNSLMSLMKLMGPKHVSSVRVKMMTTLRTGLRFKDDFPELCCRAWDCFVRCLDHACLGSLLSHVIVALLPLIHIQPKETAAIFHYLIIENRDAVQDFLHEIYFLPDHPELKKIKAVLQEYRKETSESTDLQTTLQLSMKAIQHENVDVRIHALTSLKETLYKNQEKLIKYATDSETVEPIISQLVTVLLKGCQDANSQARLLCGECLGELGAIDPGRLDFSTTETQGKDFTFVTGVEDSSFAYGLLMELTRAYLAYADNSRAQDSAAYAIQELLSIYDCREMETNGPGHQLWRRFPEHVREILEPHLNTRYKSSQKSTDWSGVKKPIYLSKLGSNFAEWSASWAGYLITKVRHDLASKIFTCCSIMMKHDFKVTIYLLPHILVYVLLGCNQEDQQEVYAEIMAVLKHDDQHTINTQDIASDLCQLSTQTVFSMLDHLTQWARHKFQALKAEKCPHSKSNRNKVDSMVSTVDYEDYQSVTRFLDLIPQDTLAVASFRSKAYTRAVMHFESFITEKKQNIQEHLGFLQKLYAAMHEPDGVAGVSAIRKAEPSLKEQILEHESLGLLRDATACYDRAIQLEPDQIIHYHGVVKSMLGLGQLSTVITQVNGVHANRSEWTDELNTYRVEAAWKLSQWDLVENYLAADGKSTTWSVRLGQLLLSAKKRDITAFYDSLKLVRAEQIVPLSAASFERGSYQRGYEYIVRLHMLCELEHSIKPLFQHSPGDSSQEDSLNWVARLEMTQNSYRAKEPILALRRALLSLNKRPDYNEMVGECWLQSARVARKAGHHQTAYNALLNAGESRLAELYVERAKWLWSKGDVHQALIVLQKGVELCFPENETPPEGKNMLIHGRAMLLVGRFMEETANFESNAIMKKYKDVTACLPEWEDGHFYLAKYYDKLMPMVTDNKMEKQGDLIRYIVLHFGRSLQYGNQFIYQSMPRMLTLWLDYGTKAYEWEKAGRSDRVQMRNDLGKINKVITEHTNYLAPYQFLTAFSQLISRICHSHDEVFVVLMEIIAKVFLAYPQQAMWMMTAVSKSSYPMRVNRCKEILNKAIHMKKSLEKFVGDATRLTDKLLELCNKPVDGSSSTLSMSTHFKMLKKLVEEATFSEILIPLQSVMIPTLPSILGTHANHASHEPFPGHWAYIAGFDDMVEILASLQKPKKISLKGSDGKFYIMMCKPKDDLRKDCRLMEFNSLINKCLRKDAESRRRELHIRTYAVIPLNDECGIIEWVNNTAGLRPILTKLYKEKGVYMTGKELRQCMLPKSAALSEKLKVFREFLLPRHPPIFHEWFLRTFPDPTSWYSSRSAYCRSTAVMSMVGYILGLGDRHGENILFDSLTGECVHVDFNCLFNKGETFEVPEIVPFRLTHNMVNGMGPMGTEGLFRRACEVTMRLMRDQREPLMSVLKTFLHDPLVEWSKPVKGHSKAPLNETGEVVNEKAKTHVLDIEQRLQGVIKTRNRVTGLPLSIEGHVHYLIQEATDENLLCQMYLGWTPYM

SEQ ID NO: 7862 - protein, 39 aa, Homo sapiens
  Payload ID: 1645;
  Gene Symbol: ATR;
  Gene Name: ATR serine/threonine kinase;
  ENSP ID: ENSP00000421870
APLNETGEVVNEKVSRRWQVLQIHLSNVKFVLQRVLPLI

SEQ ID NO: 7863 - protein, 80 aa, Homo sapiens
  Payload ID: 1645;
  Gene Symbol: ATR;
  Gene Name: ATR serine/threonine kinase;
  ENSP ID: ENSP00000422553
HNMVNGMGPMGTEGLFRRACEVTMRLMRDQREPLMSVLKTFLHDPLVEWSKPVKGHSKAPLNETGEVVNEKMASSSNSFK

SEQ ID NO: 7864 - protein, 457 aa, Homo sapiens
  Payload ID: 1645;
  Gene Symbol: ATR;
  Gene Name: ATR serine/threonine kinase;
  ENSP ID: ENSP00000424355
  MOD_RES (1)..(1): Any amino acid
XEVFVVLMEIIAKVFLAYPQQAMWMMTAVSKSSYPMRVNRCKEILNKAIHMKKSLEKFVGDATRLTDKLLELCNKPVDGSSSTLSMSTHFKMLKKLVEEATFSEILIPLQSVMIPTLPSILGTHANHASHEPFPGHWAYIAGFDDMVEILASLQKPKKISLKGSDGKFYIMMCKPKDDLRKDCRLMEFNSLINKCLRKDAESRRRELHIRTYAVIPLNDECGIIEWVNNTAGLRPILTKLYKEKGVYMTGKELRQCMLPKSAALSEKLKVFREFLLPRHPPIFHEWFLRTFPDPTSWYSSRSAYCRSTAVMSMVGYILGLGDRHGENILFDSLTGECVHVDFNCLFNKGETFEVPEIVPFRLTHNMVNGMGPMGTEGLFRRACEVTMRLMRDQREPLMSVLKTFLHDPLVEWSKPVKGHSKAPLNETGEVVNEKVSRRYSLIWAVVLISTNELDMQL

SEQ ID NO: 7865 - protein, 309 aa, Homo sapiens
  Payload ID: 1645;
  Gene Symbol: ATR;
  Gene Name: ATR serine/threonine kinase;
  ENSP ID: ENSP00000425897
MLLEKLCVMFEDGVLMRLKSDLLKAALCHLLQYFLKFVPAGYESALQVRKVYVRNICKALLDVLGIEVDAEYLLGPLYAALKMESMEIIEEIQCQTQQENLSSNSDGISPKRRRLSSSLNPSKRAPKQTEDRTFKDCQHKSKKKPSVVITWMSLDFYTKVLKSCRSLLESVQKLDLEATIDKVVKIYDALIYMQVNSSFEDHILEDLCGMLSLPWIYSHSDDGCLKLTTFAANLLTLSCRISDSYSPQAQSRCVFLLTLFPRRIFLEWRTAVYNWALQSSHEVIRASCVSGFFILLQQQNSCNRVPKIL

SEQ ID NO: 7866 - protein, 100 aa, Homo sapiens
  Payload ID: 1645;
  Gene Symbol: ATR;
  Gene Name: ATR serine/threonine kinase;
  ENSP ID: ENSP00000426595
MGEHGLELASMIPALRELGSATPEEYNTVVQKPRQILCQFIDRILTDVNVVAVELVKKTDSQPTSVMLLDFIQHIMKSSPLMFVNVSGSHEAKGSCIVFP

SEQ ID NO: 7867 - protein, 1190 aa, Homo sapiens
  Payload ID: 1646;
  Gene Symbol: ATN1;
  Gene Name: atrophin 1;
  Uniprot ID:  P54259;
  ENSP ID: ENSP00000349076
MKTRQNKDSMSMRSGRKKEAPGPREELRSRGRASPGGVSTSSSDGKAEKSRQTAKKARVEEASTPKVNKQGRSEEISESESEETNAPKKTKTEQELPRPQSPSDLDSLDGRSLNDDGSSDPRDIDQDNRSTSPSIYSPGSVENDSDSSSGLSQGPARPYHPPPLFPPSPQPPDSTPRQPEASFEPHPSVTPTGYHAPMEPPTSRMFQAPPGAPPPHPQLYPGGTGGVLSGPPMGPKGGGAASSVGGPNGGKQHPPPTTPISVSSSGASGAPPTKPPTTPVGGGNLPSAPPPANFPHVTPNLPPPPALRPLNNASASPPGLGAQPLPGHLPSPHAMGQGMGGLPPGPEKGPTLAPSPHSLPPASSSAPAPPMRFPYSSSSSSSAAASSSSSSSSSSASPFPASQALPSYPHSFPPPTSLSVSNQPPKYTQPSLPSQAVWSQGPPPPPPYGRLLANSNAHPGPFPPSTGAQSTAHPPVSTHHHHHQQQQQQQQQQQQQQQQQQQHHGNSGPPPPGAFPHPLEGGSSHHAHPYAMSPSLGSLRPYPPGPAHLPPPHSQVSYSQAGPNGPPVSSSSNSSSSTSQGSYPCSHPSPSQGPQGAPYPFPPVPTVTTSSATLSTVIATVASSPAGYKTASPPGPPPYGKRAPSPGAYKTATPPGYKPGSPPSFRTGTPPGYRGTSPPAGPGTFKPGSPTVGPGPLPPAGPSGLPSLPPPPAAPASGPPLSATQIKQEPAEEYETPESPVPPARSPSPPPKVVDVPSHASQSARFNKHLDRGFNSCARSDLYFVPLEGSKLAKKRADLVEKVRREAEQRAREEKEREREREREKEREREKERELERSVKLAQEGRAPVECPSLGPVPHRPPFEPGSAVATVPPYLGPDTPALRTLSEYARPHVMSPGNRNHPFYVPLGAVDPGLLGYNVPALYSSDPAAREREREARERDLRDRLKPGFEVKPSELEPLHGVPGPGLDPFPRHGGLALQPGPPGLHPFPFHPSLGPLERERLALAAGPALRPDMSYAERLAAERQHAERVAALGNDPLARLQMLNVTPHHHQHSHIHSHLHLHQQDAIHAASASVHPLIDPLASGSHLTRIPYPAGTLPNPLLPHPLHENEVLRHQLFAAPYRDLPASLSAPMSAAHQLQAMHAQSAELQRLALEQQQWLHAHHPLHSVPLPAQEDYYSHLKKESDKPL

SEQ ID NO: 7868 - protein, 1190 aa, Homo sapiens; identical to SEQ ID NO: 7867
  Payload ID: 1646;
  Gene Symbol: ATN1;
  Gene Name: atrophin 1;
  Uniprot ID:  P54259;
  ENSP ID: ENSP00000379915

SEQ ID NO: 7869 - protein, 1429 aa, Homo sapiens
  Payload ID: 1647;
  Gene Symbol: ATRN;
  Gene Name: attractin;
  Uniprot ID:  O75882;
  ENSP ID: ENSP00000262919
MVAAAAATEARLRRRTAATAALAGRSGGPHWDWDVTRAGRPGLGAGLRLPRLLSPPLRPRLLLLLLLLSPPLLLLLLPCEAEAAAAAAAVSGSAAAEAKECDRPCVNGGRCNPGTGQCVCPAGWVGEQCQHCGGRFRLTGSSGFVTDGPGNYKYKTKCTWLIEGQPNRIMRLRFNHFATECSWDHLYVYDGDSIYAPLVAAFSGLIVPERDGNETVPEVVATSGYALLHFFSDAAYNLTGFNITYSFDMCPNNCSGRGECKISNSSDTVECECSENWKGEACDIPHCTDNCGFPHRGICNSSDVRGCSCFSDWQGPGCSVPVPANQSFWTREEYSNLKLPRASHKAVVNGNIMWVVGGYMFNHSDYNMVLAYDLASREWLPLNRSVNNVVVRYGHSLALYKDKIYMYGGKIDSTGNVTNELRVFHIHNESWVLLTPKAKEQYAVVGHSAHIVTLKNGRVVMLVIFGHCPLYGYISNVQEYDLDKNTWSILHTQGALVQGGYGHSSVYDHRTRALYVHGGYKAFSANKYRLADDLYRYDVDTQMWTILKDSRFFRYLHTAVIVSGTMLVFGGNTHNDTSMSHGAKCFSSDFMAYDIACDRWSVLPRPDLHHDVNRFGHSAVLHNSTMYVFGGFNSLLLSDILVFTSEQCDAHRSEAACLAAGPGIRCVWNTGSSQCISWALATDEQEEKLKSECFSKRTLDHDRCDQHTDCYSCTANTNDCHWCNDHCVPRNHSCSEGQISIFRYENCPKDNPMYYCNKKTSCRSCALDQNCQWEPRNQECIALPENICGIGWHLVGNSCLKITTAKENYDNAKLFCRNHNALLASLTTQKKVEFVLKQLRIMQSSQSMSKLTLTPWVGLRKINVSYWCWEDMSPFTNSLLQWMPSEPSDAGFCGILSEPSTRGLKAATCINPLNGSVCERPANHSAKQCRTPCALRTACGDCTSGSSECMWCSNMKQCVDSNAYVASFPFGQCMEWYTMSTCPPENCSGYCTCSHCLEQPGCGWCTDPSNTGKGKCIEGSYKGPVKMPSQAPTGNFYPQPLLNSSMCLEDSRYNWSFIHCPACQCNGHSKCINQSICEKCENLTTGKHCETCISGFYGDPTNGGKCQPCKCNGHASLCNTNTGKCFCTTKGVKGDECQLCEVENRYQGNPLRGTCYYTLLIDYQFTFSLSQEDDRYYTAINFVATPDEQNRDLDMFINASKNFNLNITWAASFSAGTQAGEEMPVVSKTNIKEYKDSFSNEKFDFRNHPNITFFVYVSNFTWPIKIQIAFSQHSNFMDLVQFFVTFFSCFLSLLLVAAVVWKIKQSCWASRRREQLLREMQQMASRPFASVNVALETDEEPPDLIGGSIKTVPKPIALEPCFGNKAAVLSVFVRLPRGLGGIPPPGQSGLAVASALVDISQQMPIVYKEKSGAVRNRKQQPPAQPGTCI

SEQ ID NO: 7870 - protein, 1272 aa, Homo sapiens
  Payload ID: 1647;
  Gene Symbol: ATRN;
  Gene Name: attractin;
  Uniprot ID:  O75882;
  ENSP ID: ENSP00000416587
MVAAAAATEARLRRRTAATAALAGRSGGPHWDWDVTRAGRPGLGAGLRLPRLLSPPLRPRLLLLLLLLSPPLLLLLLPCEAEAAAAAAAVSGSAAAEAKECDRPCVNGGRCNPGTGQCVCPAGWVGEQCQHCGGRFRLTGSSGFVTDGPGNYKYKTKCTWLIEGQPNRIMRLRFNHFATECSWDHLYVYDGDSIYAPLVAAFSGLIVPERDGNETVPEVVATSGYALLHFFSDAAYNLTGFNITYSFDMCPNNCSGRGECKISNSSDTVECECSENWKGEACDIPHCTDNCGFPHRGICNSSDVRGCSCFSDWQGPGCSVPVPANQSFWTREEYSNLKLPRASHKAVVNGNIMWVVGGYMFNHSDYNMVLAYDLASREWLPLNRSVNNVVVRYGHSLALYKDKIYMYGGKIDSTGNVTNELRVFHIHNESWVLLTPKAKEQYAVVGHSAHIVTLKNGRVVMLVIFGHCPLYGYISNVQEYDLDKNTWSILHTQGALVQGGYGHSSVYDHRTRALYVHGGYKAFSANKYRLADDLYRYDVDTQMWTILKDSRFFRYLHTAVIVSGTMLVFGGNTHNDTSMSHGAKCFSSDFMAYDIACDRWSVLPRPDLHHDVNRFGHSAVLHNSTMYVFGGFNSLLLSDILVFTSEQCDAHRSEAACLAAGPGIRCVWNTGSSQCISWALATDEQEEKLKSECFSKRTLDHDRCDQHTDCYSCTANTNDCHWCNDHCVPRNHSCSEGQISIFRYENCPKDNPMYYCNKKTSCRSCALDQNCQWEPRNQECIALPENICGIGWHLVGNSCLKITTAKENYDNAKLFCRNHNALLASLTTQKKVEFVLKQLRIMQSSQSMSKLTLTPWVGLRKINVSYWCWEDMSPFTNSLLQWMPSEPSDAGFCGILSEPSTRGLKAATCINPLNGSVCERPANHSAKQCRTPCALRTACGDCTSGSSECMWCSNMKQCVDSNAYVASFPFGQCMEWYTMSTCPPENCSGYCTCSHCLEQPGCGWCTDPSNTGKGKCIEGSYKGPVKMPSQAPTGNFYPQPLLNSSMCLEDSRYNWSFIHCPACQCNGHSKCINQSICEKCENLTTGKHCETCISGFYGDPTNGGKCQPCKCNGHASLCNTNTGKCFCTTKGVKGDECQLCEVENRYQGNPLRGTCYYTLLIDYQFTFSLSQEDDRYYTAINFVATPDEQNRDLDMFINASKNFNLNITWAASFSAGTQAGEEMPVVSKTNIKEYKDSFSNEKFDFRNHPNITFFVYVSNFTWPIKIQVQTEQ

SEQ ID NO: 7871 - protein, 1379 aa, Homo sapiens
  Payload ID: 1648;
  Gene Symbol: ATRNL1;
  Gene Name: attractin-like 1;
  Uniprot ID:  Q5VV63;
  ENSP ID: ENSP00000347152
METGGRARTGTPQPAAPGVWRARPAGGGGGGASSWLLDGNSWLLCYGFLYLALYAQVSQSKPCERTGSCFSGRCVNSTCLCDPGWVGDQCQHCQGRFKLTEPSGYLTDGPINYKYKTKCTWLIEGYPNAVLRLRFNHFATECSWDHMYVYDGDSIYAPLIAVLSGLIVPEIRGNETVPEVVTTSGYALLHFFSDAAYNLTGFNIFYSINSCPNNCSGHGKCTTSVSVPSQVYCECDKYWKGEACDIPYCKANCGSPDHGYCDLTGEKLCVCNDSWQGPDCSLNVPSTESYWILPNVKPFSPSVGRASHKAVLHGKFMWVIGGYTFNYSSFQMVLNYNLESSIWNVGTPSRGPLQRYGHSLALYQENIFMYGGRIETNDGNVTDELWVFNIHSQSWSTKTPTVLGHGQQYAVEGHSAHIMELDSRDVVMIIIFGYSAIYGYTSSIQEYHISSNTWLVPETKGAIVQGGYGHTSVYDEITKSIYVHGGYKALPGNKYGLVDDLYKYEVNTKTWTILKESGFARYLHSAVLINGAMLIFGGNTHNDTSLSNGAKCFSADFLAYDIACDEWKILPKPNLHRDVNRFGHSAVVINGSMYIFGGFSSVLLNDILVYKPPNCKAFRDEELCKNAGPGIKCVWNKNHCESWESGNTNNILRAKCPPKTAASDDRCYRYADCASCTANTNGCQWCDDKKCISANSNCSMSVKNYTKCHVRNEQICNKLTSCKSCSLNLNCQWDQRQQECQALPAHLCGEGWSHIGDACLRVNSSRENYDNAKLYCYNLSGNLASLTTSKEVEFVLDEIQKYTQQKVSPWVGLRKINISYWGWEDMSPFTNTTLQWLPGEPNDSGFCAYLERAAVAGLKANPCTSMANGLVCEKPVVSPNQNARPCKKPCSLRTSCSNCTSNGMECMWCSSTKRCVDSNAYIISFPYGQCLEWQTATCSPQNCSGLRTCGQCLEQPGCGWCNDPSNTGRGHCIEGSSRGPMKLIGMHHSEMVLDTNLCPKEKNYEWSFIQCPACQCNGHSTCINNNVCEQCKNLTTGKQCQDCMPGYYGDPTNGGQCTACTCSGHANICHLHTGKCFCTTKGIKGDQCQLCDSENRYVGNPLRGTCYYSLLIDYQFTFSLLQEDDRHHTAINFIANPEQSNKNLDISINASNNFNLNITWSVGSTAGTISGEETSIVSKNNIKEYRDSFSYEKFNFRSNPNITFYVYVSNFSWPIKIQIAFSQHNTIMDLVQFFVTFFSCFLSLLLVAAVVWKIKQTCWASRRREQLLRERQQMASRPFASVDVALEVGAEQTEFLRGPLEGAPKPIAIEPCAGNRAAVLTVFLCLPRGSSGAPPPGQSGLAIASALIDISQQKASDSKDKTSGVRNRKHLSTRQGTCV

SEQ ID NO: 7872 - protein, 252 aa, Homo sapiens
  Payload ID: 1648;
  Gene Symbol: ATRNL1;
  Gene Name: attractin-like 1;
  ENSP ID: ENSP00000431423
MPECDWRQPSGGDGGWDLSLLTGERDSDGRRLTEPSGYLTDGPINYKYKTKCTWLIEGYPNAVLRLRFNHFATECSWDHMYVYDGDSIYAPLIAVLSGLIVPEIRGNETVPEVVTTSGYALLHFFSDAAYNLTGFNIFYSINSCPNNCSGHGKCTTSVSVPSQVYCECDKYWKGEACDIPYCKANCGSPDHGYCDLTGEKLCVCNDSWQGPDCSLNVPSTESYWILPNVKPFSPSVGRASHKAVLHGKFMWV

SEQ ID NO: 7873 - protein, 216 aa, Homo sapiens
  Payload ID: 1648;
  Gene Symbol: ATRNL1;
  Gene Name: attractin-like 1;
  ENSP ID: ENSP00000434118
  MOD_RES (1)..(1): Any amino acid
XCEKPVVSPNQNARPCKKPCSLRTSCSNCTSNGMECMWCSSTKRCVDSNAYIISFPYGQCLEWQTATCSPQNCSGLRTCGQCLEQPGCGWCNDPSNTGRGHCIEGSSRGPMKLIGMHHSEMVLDTNLCPKEKNYEWSFIQCPACTCSGHANICHLHTGKCFCTTKGIKGDQCQLCDSENRYVGNPLRGTCYYSLLIDYQFTFSLLQEDDRHHTAIN

SEQ ID NO: 7874 - protein, 398 aa, Homo sapiens
  Payload ID: 1648;
  Gene Symbol: ATRNL1;
  Gene Name: attractin-like 1;
  ENSP ID: ENSP00000473412
METGGRARTGTPQPAAPGVWRARPAGGGGGGASSWLLDGNSWLLCYGFLYLALYAQVSQSKPCERTGSCFSGRCVNSTCLCDPGWVGDQCQHCQGRFKLTEPSGYLTDGPINYKYKTKCTWLIEGYPNAVLRLRFNHFATECSWDHMYVYDGDSIYAPLIAVLSGLIVPEIRGNETVPEVVTTSGYALLHFFSDAAYNLTGFNIFYSINSCPNNCSGHGKCTTSVSVPSQVYCECDKYWKGEACDIPYCKANCGSPDHGYCDLTGEKLCVCNDSWQGPDCSLNVPSTESYWILPNVKPFSPSVGRASHKAVLHGKFMWVIGGYTFNYSSFQMVLKKTSLCMEAELKQMMAMSQMNYGFLTYIVSHGVQKLLLFLDMVSSMLWRDIQHILWSWIVEMLS

SEQ ID NO: 7875 - protein, 467 aa, Homo sapiens
  Payload ID: 1648;
  Gene Symbol: ATRNL1;
  Gene Name: attractin-like 1;
  Uniprot ID:  Q5VV63;
  ENSP ID: ENSP00000476902
METGGRARTGTPQPAAPGVWRARPAGGGGGGASSWLLDGNSWLLCYGFLYLALYAQVSQSKPCERTGSCFSGRCVNSTCLCDPGWVGDQCQHCQGRFKLTEPSGYLTDGPINYKYKTKCTWLIEGYPNAVLRLRFNHFATECSWDHMYVYDGDSIYAPLIAVLSGLIVPEIRGNETVPEVVTTSGYALLHFFSDAAYNLTGFNIFYSINSCPNNCSGHGKCTTSVSVPSQVYCECDKYWKGEACDIPYCKANCGSPDHGYCDLTGEKLCVCNDSWQGPDCSLNVPSTESYWILPNVKPFSPSVGRASHKAVLHGKFMWVIGGYTFNYSSFQMVLNYNLESSIWNVGTPSRGPLQRYGHSLALYQENIFMYGGRIETNDGNVTDELWVFNIHSQSWSTKTPTVLGHGQQYAVEGHSAHIMELDSRDVVMIIIFGYSAIYGYTSSIQEYHICELLKNCNFFIDWECFSL

SEQ ID NO: 7876 - protein, 36 aa, Homo sapiens
  Payload ID: 1648;
  Gene Symbol: ATRNL1;
  Gene Name: attractin-like 1;
  ENSP ID: ENSP00000483722
MPECDWRQPSGGDGGWDLSLLTGERDSDGRRDFARE

SEQ ID NO: 7877 - protein, 338 aa, Homo sapiens
  Payload ID: 1649;
  Gene Symbol: ACKR1;
  Gene Name: atypical chemokine receptor 1 (Duffy blood group);
  Uniprot ID:  Q16570;
  ENSP ID: ENSP00000357103
MASSGYVLQAELSPSTENSSQLDFEDVWNSSYGVNDSFPDGDYGANLEAAAPCHSCNLLDDSALPFFILTSVLGILASSTVLFMLFRPLFRWQLCPGWPVLAQLAVGSALFSIVVPVLAPGLGSTRSSALCSLGYCVWYGSAFAQALLLGCHASLGHRLGAGQVPGLTLGLTVGIWGVAALLTLPVTLASGASGGLCTLIYSTELKALQATHTVACLAIFVLLPLGLFGAKGLKKALGMGPGPWMNILWAWFIFWWPHGVVLGLDFLVRSKLLLLSTCLAQQALDLLLNLAEALAILHCVATPLLLALFCHQATRTLLPSLPLPEGWSSHLDTLGSKS

SEQ ID NO: 7878 - protein, 336 aa, Homo sapiens
  Payload ID: 1649;
  Gene Symbol: ACKR1;
  Gene Name: atypical chemokine receptor 1 (Duffy blood group);
  Uniprot ID:  Q16570;
  ENSP ID: ENSP00000357104
MGNCLHRAELSPSTENSSQLDFEDVWNSSYGVNDSFPDGDYGANLEAAAPCHSCNLLDDSALPFFILTSVLGILASSTVLFMLFRPLFRWQLCPGWPVLAQLAVGSALFSIVVPVLAPGLGSTRSSALCSLGYCVWYGSAFAQALLLGCHASLGHRLGAGQVPGLTLGLTVGIWGVAALLTLPVTLASGASGGLCTLIYSTELKALQATHTVACLAIFVLLPLGLFGAKGLKKALGMGPGPWMNILWAWFIFWWPHGVVLGLDFLVRSKLLLLSTCLAQQALDLLLNLAEALAILHCVATPLLLALFCHQATRTLLPSLPLPEGWSSHLDTLGSKS

SEQ ID NO: 7879 - protein, 155 aa, Homo sapiens
  Payload ID: 1649;
  Gene Symbol: ACKR1;
  Gene Name: atypical chemokine receptor 1 (Duffy blood group);
  ENSP ID: ENSP00000398406
MASSGYVLQAELSPSTENSSQLDFEDVWNSSYGVNDSFPDGDYGANLEAAAPCHSCNLLDDSALPFFILTSVLGILASSTVLFMLFRPLFRWQLCPGWPVLAQLAVGSALFSIVVPVLAPGLGSTRSSALCSLGYCVWYGSAFAQALLLGCHASL

SEQ ID NO: 7880 - protein, 336 aa, Homo sapiens; identical to SEQ ID NO: 7878
  Payload ID: 1649;
  Gene Symbol: ACKR1;
  Gene Name: atypical chemokine receptor 1 (Duffy blood group);
  Uniprot ID:  Q16570;
  ENSP ID: ENSP00000441985

SEQ ID NO: 7881 - protein, 384 aa, Homo sapiens
  Payload ID: 1650;
  Gene Symbol: ACKR2;
  Gene Name: atypical chemokine receptor 2;
  Uniprot ID:  O00590;
  ENSP ID: ENSP00000396150
MAATASPQPLATEDADSENSSFYYYDYLDEVAFMLCRKDAVVSFGKVFLPVFYSLIFVLGLSGNLLLLMVLLRYVPRRRMVEIYLLNLAISNLLFLVTLPFWGISVAWHWVFGSFLCKMVSTLYTINFYSGIFFISCMSLDKYLEIVHAQPYHRLRTRAKSLLLATIVWAVSLAVSIPDMVFVQTHENPKGVWNCHADFGGHGTIWKLFLRFQQNLLGFLLPLLAMIFFYSRIGCVLVRLRPAGQGRALKIAAALVVAFFVLWFPYNLTLFLHTLLDLQVFGNCEVSQHLDYALQVTESIAFLHCCFSPILYAFSSHRFRQYLKAFLAAVLGWHLAPGTAQASLSSCSESSILTAQEEMTGMNDLGERQSENYPNKEDVGNKSA

SEQ ID NO: 7882 - protein, 384 aa, Homo sapiens; identical to SEQ ID NO: 7881
  Payload ID: 1650;
  Gene Symbol: ACKR2;
  Gene Name: atypical chemokine receptor 2;
  Uniprot ID:  O00590;
  ENSP ID: ENSP00000416996

SEQ ID NO: 7883 - protein, 233 aa, Homo sapiens
  Payload ID: 1650;
  Gene Symbol: ACKR2;
  Gene Name: atypical chemokine receptor 2;
  ENSP ID: ENSP00000476581
MAATASPQPLATEDADSENSSFYYYDYLDEVAFMLCRKDAVVSFGKVFLPVFYSLIFVLGLSGNLLLLMVLLRYVPRRRMVEIYLLNLAISNLLFLVTLPFWGISVAWHWVFGSFLCKMVSTLYTINFYSGIFFISCMSLDKYLEIVHAQPYHRLRTRAKSLLLATIVWAVSLAVSIPDMVFVQTHENPKGVWNCHADFGGHGTIWKLFLRFQQNLLGFLLPLLAMIFFYSRI

SEQ ID NO: 7884 - protein, 124 aa, Homo sapiens
  Payload ID: 1650;
  Gene Symbol: ACKR2;
  Gene Name: atypical chemokine receptor 2;
  ENSP ID: ENSP00000476901
MAATASPQPLATEDADSENSSFYYYDYLDEVAFMLCRKDAVVSFGKVFLPVFYSLIFVLGLSGNLLLLMVLLRYVPRRRMVEIYLLNLAISNLLFLVTLPFWGISVAWHWVFGSFLCKMVSTLY

SEQ ID NO: 7885 - protein, 170 aa, Homo sapiens
  Payload ID: 1650;
  Gene Symbol: ACKR2;
  Gene Name: atypical chemokine receptor 2;
  ENSP ID: ENSP00000477157
MAATASPQPLATEDADSENSSFYYYDYLDEVAFMLCRKDAVVSFGKVFLPVFYSLIFVLGLSGNLLLLMVLLRYVPRRRMVEIYLLNLAISNLLFLVTLPFWGISVAWHWVFGSFLCKMVSTLYTINFYSGIFFISCMSLDKYLEIVHAQPYHRLRTRAKSLLLATIVWA

SEQ ID NO: 7886 - protein, 142 aa, Homo sapiens
  Payload ID: 1650;
  Gene Symbol: ACKR2;
  Gene Name: atypical chemokine receptor 2;
  ENSP ID: ENSP00000477475
MAATASPQPLATEDADSENSSFYYYDYLDEVAFMLCRKDAVVSFGKVFLPVFYSLIFVLGLSGNLLLLMVLLRYVPRRRMVEIYLLNLAISNLLFLVTLPFWGISVAWHWVFGSFLCKMVSTLYTINFYSGIFFISCMSLDK

SEQ ID NO: 7887 - protein, 362 aa, Homo sapiens
  Payload ID: 1651;
  Gene Symbol: ACKR3;
  Gene Name: atypical chemokine receptor 3;
  Uniprot ID:  P25106;
  ENSP ID: ENSP00000272928
MDLHLFDYSEPGNFSDISWPCNSSDCIVVDTVMCPNMPNKSVLLYTLSFIYIFIFVIGMIANSVVVWVNIQAKTTGYDTHCYILNLAIADLWVVLTIPVWVVSLVQHNQWPMGELTCKVTHLIFSINLFGSIFFLTCMSVDRYLSITYFTNTPSSRKKMVRRVVCILVWLLAFCVSLPDTYYLKTVTSASNNETYCRSFYPEHSIKEWLIGMELVSVVLGFAVPFSIIAVFYFLLARAISASSDQEKHSSRKIIFSYVVVFLVCWLPYHVAVLLDIFSILHYIPFTCRLEHALFTALHVTQCLSLVHCCVNPVLYSFINRNYRYELMKAFIFKYSAKTGLTKLIDASRVSETEYSALEQSTK

SEQ ID NO: 7888 - protein, 210 aa, Homo sapiens
  Payload ID: 1651;
  Gene Symbol: ACKR3;
  Gene Name: atypical chemokine receptor 3;
  ENSP ID: ENSP00000405945
MDLHLFDYSEPGNFSDISWPCNSSDCIVVDTVMCPNMPNKSVLLYTLSFIYIFIFVIGMIANSVVVWVNIQAKTTGYDTHCYILNLAIADLWVVLTIPVWVVSLVQHNQWPMGELTCKVTHLIFSINLFGSIFFLTCMSVDRYLSITYFTNTPSSRKKMVRRVVCILVWLLAFCVSLPDTYYLKTVTSASNNETYCRSFYPEHSIKEWLI

SEQ ID NO: 7889 - protein, 350 aa, Homo sapiens
  Payload ID: 1652;
  Gene Symbol: ACKR4;
  Gene Name: atypical chemokine receptor 4;
  Uniprot ID:  Q9NPB9;
  ENSP ID: ENSP00000249887
MALEQNQSTDYYYEENEMNGTYDYSQYELICIKEDVREFAKVFLPVFLTIVFVIGLAGNSMVVAIYAYYKKQRTKTDVYILNLAVADLLLLFTLPFWAVNAVHGWVLGKIMCKITSALYTLNFVSGMQFLACISIDRYVAVTKVPSQSGVGKPCWIICFCVWMAAILLSIPQLVFYTVNDNARCIPIFPRYLGTSMKALIQMLEICIGFVVPFLIMGVCYFITARTLMKMPNIKISRPLKVLLTVVIVFIVTQLPYNIVKFCRAIDIIYSLITSCNMSKRMDIAIQVTESIALFHSCLNPILYVFMGASFKNYVMKVAKKYGSWRRQRQSVEEFPFDSEGPTEPTSTFSI

SEQ ID NO: 7890 - protein, 20 aa, Homo sapiens
  Payload ID: 1652;
  Gene Symbol: ACKR4;
  Gene Name: atypical chemokine receptor 4;
  ENSP ID: ENSP00000425557
VEEFPFDSEGPTEPTSTFSI

SEQ ID NO: 7891 - protein, 310 aa, Homo sapiens
  Payload ID: 1653;
  Gene Symbol: AUH;
  Gene Name: AU RNA binding prt/enoyl-CoA hydratase;
  Uniprot ID:  Q13825;
  ENSP ID: ENSP00000307334
MAAAVAAAPGALGSLHAGGARLVAACSAWLCPGLRLPGSLAGRRAGPAIWAQGWVPAAGGPAPKRGYSSEMKTEDELRVRHLEEENRGIVVLGINRAYGKNSLSKNLIKMLSKAVDALKSDKKVRTIIIRSEVPGIFCAANLPVPTIAAIDGLALGGGLELALACDIRVAASSAKMGLVETKLAIIPGGGGTQRLPRAIGMSLAKELIFSARVLDGKEAKAVGLISHVLEQNQEGDAAYRKALDLAREFLPQGPVAMRVAKLAINQGMEVDLVTGLAIEEACYAQTIPTKDRLEGLLAFKEKRPPRYKGE

SEQ ID NO: 7892 - protein, 339 aa, Homo sapiens
  Payload ID: 1653;
  Gene Symbol: AUH;
  Gene Name: AU RNA binding prt/enoyl-CoA hydratase;
  Uniprot ID:  Q13825;
  ENSP ID: ENSP00000364883
MAAAVAAAPGALGSLHAGGARLVAACSAWLCPGLRLPGSLAGRRAGPAIWAQGWVPAAGGPAPKRGYSSEMKTEDELRVRHLEEENRGIVVLGINRAYGKNSLSKNLIKMLSKAVDALKSDKKVRTIIIRSEVPGIFCAGADLKERAKMSSSEVGPFVSKIRAVINDIANLPVPTIAAIDGLALGGGLELALACDIRVAASSAKMGLVETKLAIIPGGGGTQRLPRAIGMSLAKELIFSARVLDGKEAKAVGLISHVLEQNQEGDAAYRKALDLAREFLPQGPVAMRVAKLAINQGMEVDLVTGLAIEEACYAQTIPTKDRLEGLLAFKEKRPPRYKGE

SEQ ID NO: 7893 - protein, 403 aa, Homo sapiens
  Payload ID: 1654;
  Gene Symbol: AURKA;
  Gene Name: aurora kinase A;
  Uniprot ID:  O14965;
  ENSP ID: ENSP00000216911
MDRSKENCISGPVKATAPVGGPKRVLVTQQFPCQNPLPVNSGQAQRVLCPSNSSQRIPLQAQKLVSSHKPVQNQKQKQLQATSVPHPVSRPLNNTQKSKQPLPSAPENNPEEELASKQKNEESKKRQWALEDFEIGRPLGKGKFGNVYLAREKQSKFILALKVLFKAQLEKAGVEHQLRREVEIQSHLRHPNILRLYGYFHDATRVYLILEYAPLGTVYRELQKLSKFDEQRTATYITELANALSYCHSKRVIHRDIKPENLLLGSAGELKIADFGWSVHAPSSRRTTLCGTLDYLPPEMIEGRMHDEKVDLWSLGVLCYEFLVGKPPFEANTYQETYKRISRVEFTFPDFVTEGARDLISRLLKHNPSQRPMLREVLEHPWITANSSKPSNCQNKESASKQS

SEQ ID NO: 7894 - protein, 403 aa, Homo sapiens; identical to SEQ ID NO: 7893
  Payload ID: 1654;
  Gene Symbol: AURKA;
  Gene Name: aurora kinase A;
  Uniprot ID:  O14965;
  ENSP ID: ENSP00000321591

SEQ ID NO: 7895 - protein, 403 aa, Homo sapiens; identical to SEQ ID NO: 7893
  Payload ID: 1654;
  Gene Symbol: AURKA;
  Gene Name: aurora kinase A;
  Uniprot ID:  O14965;
  ENSP ID: ENSP00000360407

SEQ ID NO: 7896 - protein, 347 aa, Homo sapiens
  Payload ID: 1654;
  Gene Symbol: AURKA;
  Gene Name: aurora kinase A;
  ENSP ID: ENSP00000379243
MDRSKENCISGPVKATAPVGGPKRVLVTQQFPCQNPLPVNSGQAQRVLCPSNSSQRIPLQAQKLVSSHKPVQNQKQKQLQATSVPHPVSRPLNNTQKSKQPLPSAPENNPEEELASKQKNEESKKRQWALEDFEIGRPLGKGKFGNVYLAREKQSKFILALKVLFKAQLEKAGVEHQLRREVEIQSHLRHPNILRLYGYFHDATRVYLILEYAPLGTVYRELQKLSKFDEQRTATYITELANALSYCHSKRVIHRDIKPENLLLGSAGELKIADFGWSVHAPSSRRTTLCGTLDYLPPEMIEGRMHDEKVDLWSLGVLCYEFLVGKPPFEANTYQETYKRISRVRRN

SEQ ID NO: 7897 - protein, 403 aa, Homo sapiens; identical to SEQ ID NO: 7893
  Payload ID: 1654;
  Gene Symbol: AURKA;
  Gene Name: aurora kinase A;
  Uniprot ID:  O14965;
  ENSP ID: ENSP00000379247

SEQ ID NO: 7898 - protein, 403 aa, Homo sapiens; identical to SEQ ID NO: 7893
  Payload ID: 1654;
  Gene Symbol: AURKA;
  Gene Name: aurora kinase A;
  Uniprot ID:  O14965;
  ENSP ID: ENSP00000379249

SEQ ID NO: 7899 - protein, 403 aa, Homo sapiens; identical to SEQ ID NO: 7893
  Payload ID: 1654;
  Gene Symbol: AURKA;
  Gene Name: aurora kinase A;
  Uniprot ID:  O14965;
  ENSP ID: ENSP00000379250

SEQ ID NO: 7900 - protein, 403 aa, Homo sapiens; identical to SEQ ID NO: 7893
  Payload ID: 1654;
  Gene Symbol: AURKA;
  Gene Name: aurora kinase A;
  Uniprot ID:  O14965;
  ENSP ID: ENSP00000379251

SEQ ID NO: 7901 - protein, 188 aa, Homo sapiens
  Payload ID: 1654;
  Gene Symbol: AURKA;
  Gene Name: aurora kinase A;
  ENSP ID: ENSP00000388073
MDRSKENCISGPVKATAPVGGPKRVLVTQQFPCQNPLPVNSGQAQRVLCPSNSSQRIPLQAQKLVSSHKPVQNQKQKQLQATSVPHPVSRPLNNTQKSKQPLPSAPENNPEEELASKQKNEESKKRQWALEDFEIGRPLGKGKFGNVYLAREKQSKFILALKVLFKAQLEKAGVEHQLRREVEIQSHL

SEQ ID NO: 7902 - protein, 271 aa, Homo sapiens
  Payload ID: 1654;
  Gene Symbol: AURKA;
  Gene Name: aurora kinase A;
  ENSP ID: ENSP00000393452
MDRSKENCISGPVKATAPVGGPKRVLVTQQFPCQNPLPVNSGQAQRVLCPSNSSQRIPLQAQKLVSSHKPVQNQKQKQLQATSVPHPVSRPLNNTQKSKQPLPSAPENNPEEELASKQKNEESKKRQWALEDFEIGRPLGKGKFGNVYLAREKQSKFILALKVLFKAQLEKAGVEHQLRREVEIQSHLRHPNILRLYGYFHDATRVYLILEYAPLGTVYRELQKLSKFDEQRTATYITELANALSYCHSKRVIHRDIKPENLLLGSAGELK

SEQ ID NO: 7903 - protein, 79 aa, Homo sapiens
  Payload ID: 1654;
  Gene Symbol: AURKA;
  Gene Name: aurora kinase A;
  ENSP ID: ENSP00000401358
MDRSKENCISGPVKATAPVGGPKRVLVTQQFPCQNPLPVNSGQAQRVLCPSNSSQRIPLQAQKLVSSHKPVQNQKQKQL

SEQ ID NO: 7904 - protein, 146 aa, Homo sapiens
  Payload ID: 1654;
  Gene Symbol: AURKA;
  Gene Name: aurora kinase A;
  ENSP ID: ENSP00000405042
MDRSKENCISGPVKATAPVGGPKRVLVTQQFPCQNPLPVNSGQAQRVLCPSNSSQRIPLQAQKLVSSHKPVQNQKQKQLQATSVPHPVSRPLNNTQKSKQPLPSAPENNPEEELASKQKNEESKKRQWALEDFEIGRPLGKGKFGN

SEQ ID NO: 7905 - protein, 106 aa, Homo sapiens
  Payload ID: 1654;
  Gene Symbol: AURKA;
  Gene Name: aurora kinase A;
  ENSP ID: ENSP00000405170
MDRSKENCISGPVKATAPVGGPKRVLVTQQFPCQNPLPVNSGQAQRVLCPSNSSQRIPLQAQKLVSSHKPVQNQKQKQLQATSVPHPVSRPLNNTQKSKQPLPSAP

SEQ ID NO: 7906 - protein, 357 aa, Homo sapiens
  Payload ID: 1655;
  Gene Symbol: AUNIP;
  Gene Name: aurora kinase A and ninein interacting prt;
  Uniprot ID:  Q9H7T9;
  ENSP ID: ENSP00000363416
MRRTGPEEEACGVWLDAAALKRRKVQTHLIKPGTKMLTLLPGERKANIYFTQRRAPSTGIHQRSIASFFTLQPGKTNGSDQKSVSSHTESQINKESKKNATQLDHLIPGLAHDCMASPLATSTTADIQEAGLSPQSLQTSGHHRMKTPFSTELSLLQPDTPDCAGDSHTPLAFSFTEDLESSCLLDRKEEKGDSARKWEWLHESKKNYQSMEKHTKLPGDKCCQPLGKTKLERKVSAKENRQAPVLLQTYRESWNGENIESVKQSRSPVSVFSWDNEKNDKDSWSQLFTEDSQGQRVIAHNTRAPFQDVTNNWNWDLGPFPNSPWAQCQEDGPTQNLKPDLLFTQDSEGNQVIRHQF

SEQ ID NO: 7907 - protein, 371 aa, Homo sapiens
  Payload ID: 1655;
  Gene Symbol: AUNIP;
  Gene Name: aurora kinase A and ninein interacting prt;
  Uniprot ID:  Q9H7T9;
  ENSP ID: ENSP00000443647
MRRTGPEEEACGVWLDAAALKRRKVQTHLIKPGTKMLTLLPGERKANIYFTQRRAPSTGIHQRSIASFFTLQPGKTNGSDQKSVSSHTESQINKESKKNATQLDHLIPGLAHDCMASPLATSTTADIQEAGLSPQSLQTSGHHRMKTPFSTELSLLQPDTPDCAGDSHTPLAFSFTEDLESSCLLDRKEEKGDSARKWEWLHESKKNYQSMEKHTKLPGDKCCQPLGKTKLERKVSAKENRQAPVLLQTYRESWNGENIESVKQSRSPVSVFSWDNEKNDKDSWSQLFTEDSQGQRVIAHNTRAPFQDVTNNWNWDLGPFPNSPWAQCQEDGPTQNLKPDLLFTQDSEVQALACQQDCCRRSILKRQKHLR

SEQ ID NO: 7908 - protein, 199 aa, Homo sapiens
  Payload ID: 1656;
  Gene Symbol: AURKAIP1;
  Gene Name: aurora kinase A interacting prt 1;
  Uniprot ID:  Q9NWT8;
  ENSP ID: ENSP00000319778
MLLGRLTSQLLRAVPWAGGRPPWPVSGVLGSRVCGPLYSTSPAGPGRAASLPRKGAQLELEEMLVPRKMSVSPLESWLTARCFLPRLDTGTAGTVAPPQSYQCPPSQIGEGAEQGDEGVADAPQIQCKNVLKIRRRKMNHHKYRKLVKKTRFLRRKVQEGRLRRKQIKFEKDLRRIWLKAGLKEAPEGWQTPKIYLRGK

SEQ ID NO: 7909 - protein, 199 aa, Homo sapiens; identical to SEQ ID NO: 7908
  Payload ID: 1656;
  Gene Symbol: AURKAIP1;
  Gene Name: aurora kinase A interacting prt 1;
  Uniprot ID:  Q9NWT8;
  ENSP ID: ENSP00000340656

SEQ ID NO: 7910 - protein, 199 aa, Homo sapiens; identical to SEQ ID NO: 7908
  Payload ID: 1656;
  Gene Symbol: AURKAIP1;
  Gene Name: aurora kinase A interacting prt 1;
  Uniprot ID:  Q9NWT8;
  ENSP ID: ENSP00000342676

SEQ ID NO: 7911 - protein, 199 aa, Homo sapiens; identical to SEQ ID NO: 7908
  Payload ID: 1656;
  Gene Symbol: AURKAIP1;
  Gene Name: aurora kinase A interacting prt 1;
  Uniprot ID:  Q9NWT8;
  ENSP ID: ENSP00000368130

SEQ ID NO: 7912 - protein, 345 aa, Homo sapiens
  Payload ID: 1657;
  Gene Symbol: AURKB;
  Gene Name: aurora kinase B;
  Uniprot ID:  Q96GD4;
  ENSP ID: ENSP00000313950
MAQKENSYPWPYGRQTAPSGLSTLPQRVLRKEPVTPSALVLMSRSNVQPTAAPGQKVMENSSGTPDILTRRHFTIDDFEIGRPLGKGKFGNVYLAREKKSHFIVALKVLFKSQIEKEGVEHQLRREIEIQAHLHHPNILRLYNYFYDRRRIYLILEYAPRGELYKELQKSCTFDEQRTATIMEELADALMYCHGKKVIHRDIKPENLLLGLKGELKIADFGWSVHAPSLRRKTMCGTLDYLPPEMIEGRMHNEKVDLWCIGVLCYELLVGNPPFESASHNETYRRIVKVDLKFPASVPMGAQDLISKLLRHNPSERLPLAQVSAHPWVRANSRRVLPPSALQSVA

SEQ ID NO: 7913 - protein, 303 aa, Homo sapiens
  Payload ID: 1657;
  Gene Symbol: AURKB;
  Gene Name: aurora kinase B;
  Uniprot ID:  Q96GD4;
  ENSP ID: ENSP00000443869
MSRSNVQPTAAPGQKVMENSSGTPDILTRHFTIDDFEIGRPLGKGKFGNVYLAREKKSHFIVALKVLFKSQIEKEGVEHQLRREIEIQAHLHHPNILRLYNYFYDRRRIYLILEYAPRGELYKELQKSCTFDEQRTATIMEELADALMYCHGKKVIHRDIKPENLLLGLKGELKIADFGWSVHAPSLRRKTMCGTLDYLPPEMIEGRMHNEKVDLWCIGVLCYELLVGNPPFESASHNETYRRIVKVDLKFPASVPMGAQDLISKLLRHNPSERLPLAQVSAHPWVRANSRRVLPPSALQSVA

SEQ ID NO: 7914 - protein, 123 aa, Homo sapiens
  Payload ID: 1657;
  Gene Symbol: AURKB;
  Gene Name: aurora kinase B;
  ENSP ID: ENSP00000461981
MAQKENSYPWPYGRQTAPSGLSTLPQRVLRKEPVTPSALVLMSRSNVQPTAAPGQKVMENSSGTPDILTRHFTIDDFEIGRPLGKDHGGVGRCSNVLPWEEGDSQRHKARKSALRAQGRAEDC

SEQ ID NO: 7915 - protein, 69 aa, Homo sapiens
  Payload ID: 1657;
  Gene Symbol: AURKB;
  Gene Name: aurora kinase B;
  ENSP ID: ENSP00000462027
MSRSNVQPTAAPGQKVMENSSGTPDILTRHFTIDDFEIGRPLGKGKFGNVYLAREKKSHFIVALKVLFK

SEQ ID NO: 7916 - protein, 312 aa, Homo sapiens
  Payload ID: 1657;
  Gene Symbol: AURKB;
  Gene Name: aurora kinase B;
  Uniprot ID:  Q96GD4;
  ENSP ID: ENSP00000462207
MAQKENSYPWPYGRQTAPSGLSTLPQRVLRKEPVTPSALVLMSRSNVQPTAAPGQKVMENSSGTPDILTRHFTIDDFEIGRPLGKALLCLWPEASSVSSPSHPNILRLYNYFYDRRRIYLILEYAPRGELYKELQKSCTFDEQRTATIMEELADALMYCHGKKVIHRDIKPENLLLGLKGELKIADFGWSVHAPSLRRKTMCGTLDYLPPEMIEGRMHNEKVDLWCIGVLCYELLVGNPPFESASHNETYRRIVKVDLKFPASVPMGAQDLISKLLRHNPSERLPLAQVSAHPWVRANSRRVLPPSALQSVA

SEQ ID NO: 7917 - protein, 242 aa, Homo sapiens
  Payload ID: 1657;
  Gene Symbol: AURKB;
  Gene Name: aurora kinase B;
  ENSP ID: ENSP00000462858
  MOD_RES (1)..(1): Any amino acid
XRHFTIDDFEIGRPLGKGKFGNVYLAREKKSHFIVALKVLFKSQIEKEGVEHQLRREIEIQAHLHHPNILRLYNYFYDRRRIYLILEYAPRGELYKELQKSCTFDEQRTATIMEELADALMYCHGKKVIHRDIKPENLLLGLKGELKIADFGWSVHAPSLRRKTMCGTLDYLPPEMIEGRMHNEKVDLKFPASVPMGAQDLISKLLRHNPSERLPLAQVSAHPWVRANSRRVLPPSALQSVA

SEQ ID NO: 7918 - protein, 228 aa, Homo sapiens
  Payload ID: 1657;
  Gene Symbol: AURKB;
  Gene Name: aurora kinase B;
  ENSP ID: ENSP00000462930
MAQKENSYPWPYGRQTAPSGLSTLPQRVLRKEPVTPSALVLMSRSNVQPTAAPGQKVMENSSGTPDILTRHFTIDDFEIGRPLGKGKFGNVYLAREKKSHFIVALKVLFKSQIEKEGVEHQLRREIEIQAHLHHPNILRLYNYFYDRRRIYLILEYAPRGELYKELQKSCTFDEQRTATIMEELADALMYCHGKKVIHRDIKPENLLLGLKGELKIADFGWSVHAPSL

SEQ ID NO: 7919 - protein, 230 aa, Homo sapiens
  Payload ID: 1657;
  Gene Symbol: AURKB;
  Gene Name: aurora kinase B;
  ENSP ID: ENSP00000463636
MSRSNVQPTAAPGQKVMENSSGTPDILTRRHFTIDDFEIGRPLGKGKFGNVYLAREKKSHFIVALKVLFKSQIEKEGVEHQLRREIEIQAHLHHPNILRLYNYFYDRRRIYLILEYAPRGELYKELQKSCTFDEQRTATIMEELADALMYCHGKKVIHRDIKPENLLLGLKGELKIADFGWSVHAPSLRRKTMCGTLDYLPPEMIEGRMHNEKVDLWCIGVLCYELLVGN

SEQ ID NO: 7920 - protein, 344 aa, Homo sapiens
  Payload ID: 1657;
  Gene Symbol: AURKB;
  Gene Name: aurora kinase B;
  Uniprot ID:  Q96GD4;
  ENSP ID: ENSP00000463999
MAQKENSYPWPYGRQTAPSGLSTLPQRVLRKEPVTPSALVLMSRSNVQPTAAPGQKVMENSSGTPDILTRHFTIDDFEIGRPLGKGKFGNVYLAREKKSHFIVALKVLFKSQIEKEGVEHQLRREIEIQAHLHHPNILRLYNYFYDRRRIYLILEYAPRGELYKELQKSCTFDEQRTATIMEELADALMYCHGKKVIHRDIKPENLLLGLKGELKIADFGWSVHAPSLRRKTMCGTLDYLPPEMIEGRMHNEKVDLWCIGVLCYELLVGNPPFESASHNETYRRIVKVDLKFPASVPMGAQDLISKLLRHNPSERLPLAQVSAHPWVRANSRRVLPPSALQSVA

SEQ ID NO: 7921 - protein, 172 aa, Homo sapiens
  Payload ID: 1657;
  Gene Symbol: AURKB;
  Gene Name: aurora kinase B;
  ENSP ID: ENSP00000464031
MSRSNVQPTAAPGQKVMENSSGTPDILTRHFTIDDFEIGRPLGKGKFGNVYLAREKKSHFIVALKVLFKSQIEKEGVEHQLRREIEIQAHLHHPNILRLYNYFYDRRRIYLILEYAPRGELYKELQKSCTFDEQRTATIMEELADALMYCHGKKVIHRDIKPENLLLGLKGE

SEQ ID NO: 7922 - protein, 309 aa, Homo sapiens
  Payload ID: 1658;
  Gene Symbol: AURKC;
  Gene Name: aurora kinase C;
  Uniprot ID:  Q9UQB9;
  ENSP ID: ENSP00000302898
MSSPRAVVQLGKAQPAGEELATANQTAQQPSSPAMRRLTVDDFEIGRPLGKGKFGNVYLARLKESHFIVALKVLFKSQIEKEGLEHQLRREIEIQAHLQHPNILRLYNYFHDARRVYLILEYAPRGELYKELQKSEKLDEQRTATIIEELADALTYCHDKKVIHRDIKPENLLLGFRGEVKIADFGWSVHTPSLRRKTMCGTLDYLPPEMIEGRTYDEKVDLWCIGVLCYELLVGYPPFESASHSETYRRILKVDVRFPLSMPLGARDLISRLLRYQPLERLPLAQILKHPWVQAHSRRVLPPCAQMAS

SEQ ID NO: 7923 - protein, 274 aa, Homo sapiens
  Payload ID: 1658;
  Gene Symbol: AURKC;
  Gene Name: aurora kinase C;
  ENSP ID: ENSP00000406798
MRRLTVDDFEIGRPLGKGKFGNVYLARLKESHFIVALKVLFKSQIEKEGLEHQLRREIEIQAHLQHPNILRLYNYFHDARRVYLILEYAPRGELYKELQKSEKLDEQRTATIIEELADALTYCHDKKVIHRDIKPENLLLGFRGEVKIADFGWSVHPLPERKTMCGTLDYLPPEMIEGRTYDEKVDLWCIGVLCYELLVGYPPFESASHSETYRRILKVDVRFPLSMPLGARDLISRLLRYQPLERLPLAQILKHPWVQAHSRRVLPPCAQMAS

SEQ ID NO: 7924 - protein, 290 aa, Homo sapiens
  Payload ID: 1658;
  Gene Symbol: AURKC;
  Gene Name: aurora kinase C;
  Uniprot ID:  Q9UQB9;
  ENSP ID: ENSP00000407162
MATANQTAQQPSSPAMRRLTVDDFEIGRPLGKGKFGNVYLARLKESHFIVALKVLFKSQIEKEGLEHQLRREIEIQAHLQHPNILRLYNYFHDARRVYLILEYAPRGELYKELQKSEKLDEQRTATIIEELADALTYCHDKKVIHRDIKPENLLLGFRGEVKIADFGWSVHTPSLRRKTMCGTLDYLPPEMIEGRTYDEKVDLWCIGVLCYELLVGYPPFESASHSETYRRILKVDVRFPLSMPLGARDLISRLLRYQPLERLPLAQILKHPWVQAHSRRVLPPCAQMAS

SEQ ID NO: 7925 - protein, 46 aa, Homo sapiens
  Payload ID: 1658;
  Gene Symbol: AURKC;
  Gene Name: aurora kinase C;
  ENSP ID: ENSP00000468918
MSSPRAVVQLGKAQPAGEECESQRQRKDAGKAGDWARGRVHRRHMC

SEQ ID NO: 7926 - protein, 137 aa, Homo sapiens
  Payload ID: 1658;
  Gene Symbol: AURKC;
  Gene Name: aurora kinase C;
  ENSP ID: ENSP00000469894
RGELYKELQKSEKLDEQRTATVRRKTMCGTLDYLPPEMIEGRTYDEKVDLWCIGVLCYELLVGYPPFESASHSETYRRILKVDVRFPLSMPLGARDLISRLLRYQPLERLPLAQILKHPWVQAHSRRVLPPCAQMAS

SEQ ID NO: 7927 - protein, 306 aa, Homo sapiens
  Payload ID: 1658;
  Gene Symbol: AURKC;
  Gene Name: aurora kinase C;
  ENSP ID: ENSP00000469983
MSSPRAVVQLGKAQPAGEESNQTAQQPSSPAMRRLTVDDFEIGRPLGKGKFGNVYLARLKESHFIVALKVLFKSQIEKEGLEHQLRREIEIQAHLQHPNILRLYNYFHDARRVYLILEYAPRGELYKELQKSEKLDEQRTATIIEELADALTYCHDKKVIHRDIKPENLLLGFRGEVKIADFGWSVHTPSLRRKTMCGTLDYLPPEMIEGRTYDEKVDLWCIGVLCYELLVGYPPFESASHSETYRRILKVDVRFPLSMPLGARDLISRLLRYQPLERLPLAQILKHPWVQAHSRRVLPPCAQMAS

SEQ ID NO: 7928 - protein, 113 aa, Homo sapiens
  Payload ID: 1658;
  Gene Symbol: AURKC;
  Gene Name: aurora kinase C;
  ENSP ID: ENSP00000470465
MRRLTVDDFEIGRPLGKGKFGNVYLARLKESHFIVALKVLFKSQIEKEGLEHQLRREIEIQAHLQHPNILRLYNYFHDARRVYLILEYAPRGELYKELQKSEKLDEQRTATVR

SEQ ID NO: 7929 - protein, 275 aa, Homo sapiens
  Payload ID: 1658;
  Gene Symbol: AURKC;
  Gene Name: aurora kinase C;
  Uniprot ID:  Q9UQB9;
  ENSP ID: ENSP00000471830
MRRLTVDDFEIGRPLGKGKFGNVYLARLKESHFIVALKVLFKSQIEKEGLEHQLRREIEIQAHLQHPNILRLYNYFHDARRVYLILEYAPRGELYKELQKSEKLDEQRTATIIEELADALTYCHDKKVIHRDIKPENLLLGFRGEVKIADFGWSVHTPSLRRKTMCGTLDYLPPEMIEGRTYDEKVDLWCIGVLCYELLVGYPPFESASHSETYRRILKVDVRFPLSMPLGARDLISRLLRYQPLERLPLAQILKHPWVQAHSRRVLPPCAQMAS

SEQ ID NO: 7930 - protein, 1259 aa, Homo sapiens
  Payload ID: 1659;
  Gene Symbol: AUTS2;
  Gene Name: autism susceptibility candidate 2;
  Uniprot ID:  Q8WXX7;
  ENSP ID: ENSP00000344087
MDGPTRGHGLRKKRRSRSQRDRERRSRGGLGAGAAGGGGAGRTRALSLASSSGSDKEDNGKPPSSAPSRPRPPRRKRRESTSAEEDIIDGFAMTSFVTFEALEKDVALKPQERVEKRQTPLTKKKREALTNGLSFHSKKSRLSHPHHYSSDRENDRNLCQHLGKRKKMPKALRQLKPGQNSCRDSDSESASGESKGFHRSSSRERLSDSSAPSSLGTGYFCDSDSDQEEKASDASSEKLFNTVIVNKDPELGVGTLPEHDSQDAGPIVPKISGLERSQEKSQDCCKEPIFEPVVLKDPCPQVAQPIPQPQTEPQLRAPSPDPDLVQRTEAPPQPPPLSTQPPQGPPEAQLQPAPQPQVQRPPRPQSPTQLLHQNLPPVQAHPSAQSLSQPLSAYNSSSLSLNSLSSSRSSTPAKTQPAPPHISHHPSASPFPLSLPNHSPLHSFTPTLQPPAHSHHPNMFAPPTALPPPPPLTSGSLQVAGHPAGSTYSEQDILRQELNTRFLASQSADRGASLGPPPYLRTEFHQHQHQHQHTHQHTHQHTFTPFPHAIPPTAIMPTPAPPMFDKYPTKVDPFYRHSLFHSYPPAVSGIPPMIPPTGPFGSLQGAFQPKTSNPIDVAARPGTVPHTLLQKDPRLTDPFRPMLRKPGKWCAMHVHIAWQIYHHQQKVKKQMQSDPHKLDFGLKPEFLSRPPGPSLFGAIHHPHDLARPSTLFSAAGAAHPTGTPFGPPPHHSNFLNPAAHLEPFNRPSTFTGLAAVGGNAFGGLGNPSVTPNSMFGHKDGPSVQNFSNPHEPWNRLHRTPPSFPTPPPWLKPGELERSASAAAHDRDRDVDKRDSSVSKDDKERESVEKRHSSHPSPAPVLPVNALGHTRSSTEQIRAHLNTEAREKDKPKERERDHSESRKDLAADEHKAKEGHLPEKDGHGHEGRAAGEEAKQLARVPSPYVRTPVVESARPNSTSSREAEPRKGEPAYENPKKSSEVKVKEERKEDHDLPPEAPQTHRASEPPPPNSSSSVHPGPLASMPMTVGVTGIHPMNSISSLDRTRMMTPFMGISPLPGGERFPYPSFHWDPIRDPLRDPYRELDIHRRDPLGRDFLLRNDPLHRLSTPRLYEADRSFRDREPHDYSHHHHHHHHPLSVDPRREHERGGHLDERERLHMLREDYEHTRLHSVHPASLDGHLPHPSLITPGLPSMHYPRISPTAGNQNGLLNKTPPTAALSAPPPLISTLGGRPVSPRRTTPLSAEIRERPPSHTLKDIEAR

SEQ ID NO: 7931 - protein, 1235 aa, Homo sapiens
  Payload ID: 1659;
  Gene Symbol: AUTS2;
  Gene Name: autism susceptibility candidate 2;
  Uniprot ID:  Q8WXX7;
  ENSP ID: ENSP00000385263
MDGPTRGHGLRKKRRSRSQRDRERRSRGGLGAGAAGGGGAGRTRALSLASSSGSDKEDNGKPPSSAPSRPRPPRRKRRESTSAEEDIIDGFAMTSFVTFEALEKDVALKPQERVEKRQTPLTKKKREALTNGLSFHSKKSRLSHPHHYSSDRENDRNLCQHLGKRKKMPKALRQLKPGQNSCRDSDSESASGESKGFHRSSSRERLSDSSAPSSLGTGYFCDSDSDQEEKASDASSEKLFNTVIVNKDPELGVGTLPEHDSQDAGPIVPKISGLERSQEKSQDCCKEPIFEPVVLKDPCPQVAQPIPQPQTEPQLRAPSPDPDLVQRTEAPPQPPPLSTQPPQGPPEAQLQPAPQPQVQRPPRPQSPTQLLHQNLPPVQAHPSAQSLSQPLSAYNSSSLSLNSLSSSRSSTPAKTQPAPPHISHHPSASPFPLSLPNHSPLHSFTPTLQPPAHSHHPNMFAPPTALPPPPPLTSGSLQVAGHPAGSTYSEQDILRQELNTRFLASQSADRGASLGPPPYLRTEFHQHQHQHQHTHQHTHQHTFTPFPHAIPPTAIMPTPAPPMFDKYPTKVDPFYRHSLFHSYPPAVSGIPPMIPPTGPFGSLQGAFQPKLTDPFRPMLRKPGKWCAMHVHIAWQIYHHQQKVKKQMQSDPHKLDFGLKPEFLSRPPGPSLFGAIHHPHDLARPSTLFSAAGAAHPTGTPFGPPPHHSNFLNPAAHLEPFNRPSTFTGLAAVGGNAFGGLGNPSVTPNSMFGHKDGPSVQNFSNPHEPWNRLHRTPPSFPTPPPWLKPGELERSASAAAHDRDRDVDKRDSSVSKDDKERESVEKRHSSHPSPAPVLPVNALGHTRSSTEQIRAHLNTEAREKDKPKERERDHSESRKDLAADEHKAKEGHLPEKDGHGHEGRAAGEEAKQLARVPSPYVRTPVVESARPNSTSSREAEPRKGEPAYENPKKSSEVKVKEERKEDHDLPPEAPQTHRASEPPPPNSSSSVHPGPLASMPMTVGVTGIHPMNSISSLDRTRMMTPFMGISPLPGGERFPYPSFHWDPIRDPLRDPYRELDIHRRDPLGRDFLLRNDPLHRLSTPRLYEADRSFRDREPHDYSHHHHHHHHPLSVDPRREHERGGHLDERERLHMLREDYEHTRLHSVHPASLDGHLPHPSLITPGLPSMHYPRISPTAGNQNGLLNKTPPTAALSAPPPLISTLGGRPVSPRRTTPLSAEIRERPPSHTLKDIEAR

SEQ ID NO: 7932 - protein, 266 aa, Homo sapiens
  Payload ID: 1659;
  Gene Symbol: AUTS2;
  Gene Name: autism susceptibility candidate 2;
  Uniprot ID:  Q8WXX7;
  ENSP ID: ENSP00000385572
MDGPTRGHGLRKKRRSRSQRDRERRSRGGLGAGAAGGGGAGRTRALSLASSSGSDKEDNGKPPSSAPSRPRPPRRKRRESTSAEEDIIDGFAMTSFVTFEALEKDVALKPQERVEKRQTPLTKKKREALTNGLSFHSKKSRLSHPHHYSSDRENDRNLCQHLGKRKKMPKALRQLKPGQNSCRDSDSESASGESKGFHRSSSRERLSDSSAPSSLGTGYFRSGKMCLGEEACLKSGNDMKRDVSNTSSWASNRESFFSLVKLLKGF

SEQ ID NO: 7933 - protein, 183 aa, Homo sapiens
  Payload ID: 1659;
  Gene Symbol: AUTS2;
  Gene Name: autism susceptibility candidate 2;
  ENSP ID: ENSP00000392333
TLWRGVILHLTAPINESLPNKEPFNRPSTFTGLAAVGGNAFGGLGNPSVTPNSMFGHKDGPSVQNFSNPHEPWNRLHRTPPSFPTPPPWLKPGELERSASAAAHDRDRDVDKRDSSVSKDDKERESVEKRHSSHPSPAPVLPVNALGHTRSSTEQIRAHLNTEAREKDKPKERERDHSESRKD

SEQ ID NO: 7934 - protein, 181 aa, Homo sapiens
  Payload ID: 1659;
  Gene Symbol: AUTS2;
  Gene Name: autism susceptibility candidate 2;
  ENSP ID: ENSP00000393548
  MOD_RES (1)..(1): Any amino acid
XFAPPTALPPPPPLTSGSLQVAGHPAGSTYSEQDILRQELNTRFLASQSADRGASLGPPPYLRTEFHQHQHQHQHTHQHTHQHTFTPFPHAIPPTAIMPTPAPPMLFHSYPPAVSGIPPMIPPTGPFGSLQGAFQPKTSNPIDVAARPGTVPHTLLQKDPRLTDPFRPMLRKPGKWCAMHV

SEQ ID NO: 7935 - protein, 199 aa, Homo sapiens
  Payload ID: 1659;
  Gene Symbol: AUTS2;
  Gene Name: autism susceptibility candidate 2;
  ENSP ID: ENSP00000394887
  MOD_RES (1)..(1): Any amino acid
XSFSPGAFQSLWRPVPGVGLGAPVPMVKDPELGVGTLPEHDSQDAGPIVPKISGLERSQEKSQDCCKEPIFEPVVLKDPCPQVAQPIPQPQTEPQLRAPSPDPDLVQRTEAPPQPPPLSTQPPQGPPEAQLQPAPQPQVQRPPRPQSPTQLLHQNLPPVQAHPSAQSLSQPLSAYNSSSLSLNSLSSRSSTPAKTQPAP

SEQ ID NO: 7936 - protein, 100 aa, Homo sapiens
  Payload ID: 1659;
  Gene Symbol: AUTS2;
  Gene Name: autism susceptibility candidate 2;
  ENSP ID: ENSP00000400227
  MOD_RES (1)..(1): Any amino acid
XDFGLKPEFLSRPPGPSLFGAIHHPHDLARPSTLFSAAGAAHPTGTPFGPPPHHSNFLNPAAHLEPFNRPSTFTGLAAVGGNAFGGLGNPSVTPNNMYSF

SEQ ID NO: 7937 - protein, 62 aa, Homo sapiens
  Payload ID: 1659;
  Gene Symbol: AUTS2;
  Gene Name: autism susceptibility candidate 2;
  ENSP ID: ENSP00000407058
  MOD_RES (1)..(1): Any amino acid
XDRSFQTYVKETREVVCYACSHRLADLPPPTESQGQSDLRGVGKNGMHINRCSQTHISWTLD

SEQ ID NO: 7938 - protein, 1011 aa, Homo sapiens
  Payload ID: 1659;
  Gene Symbol: AUTS2;
  Gene Name: autism susceptibility candidate 2;
  ENSP ID: ENSP00000478134
PELGVGTLPEHDSQDAGPIVPKISGLERSQEKSQDCCKEPIFEPVVLKDPCPQVAQPIPQPQTEPQLRAPSPDPDLVQRTEAPPQPPPLSTQPPQGPPEAQLQPAPQPQVQRPPRPQSPTQLLHQNLPPVQAHPSAQSLSQPLSAYNSSSLSLNSLSSSRSSTPAKTQPAPPHISHHPSASPFPLSLPNHSPLHSFTPTLQPPAHSHHPNMFAPPTALPPPPPLTSGSLQVAGHPAGSTYSEQDILRQELNTRFLASQSADRGASLGPPPYLRTEFHQHQHQHQHTHQHTHQHTFTPFPHAIPPTAIMPTPAPPMFDKYPTKVDPFYRHSLFHSYPPAVSGIPPMIPPTGPFGSLQGAFQPKTSNPIDVAARPGTVPHTLLQKDPRLTDPFRPMLRKPGKWCAMHVHIAWQIYHHQQKVKKQMQSDPHKLDFGLKPEFLSRPPGPSLFGAIHHPHDLARPSTLFSAAGAAHPTGTPFGPPPHHSNFLNPAAHLEPFNRPSTFTGLAAVGGNAFGGLGNPSVTPNSMFGHKDGPSVQNFSNPHEPWNRLHRTPPSFPTPPPWLKPGELERSASAAAHDRDRDVDKRDSSVSKDDKERESVEKRHSSHPSPAPVLPVNALGHTRSSTEQIRAHLNTEAREKDKPKERERDHSESRKDLAADEHKAKEGHLPEKDGHGHEGRAAGEEAKQLARVPSPYVRTPVVESARPNSTSSREAEPRKGEPAYENPKKSSEVKVKEERKEDHDLPPEAPQTHRASEPPPPNSSSSVHPGPLASMPMTVGVTGIHPMNSISSLDRTRMMTPFMGISPLPGGERFPYPSFHWDPIRDPLRDPYRELDIHRRDPLGRDFLLRNDPLHRLSTPRLYEADRSFRDREPHDYSHHHHHHHHPLSVDPRREHERGGHLDERERLHMLREDYEHTRLHSVHPASLDGHLPHPSLITPGLPSMHYPRISPTAGNQNGLLNKTPPTAALSAPPPLISTLGGRPVSPRRTTPLSAEIRERPPSHTLKDIEAR

SEQ ID NO: 7939 - protein, 987 aa, Homo sapiens
  Payload ID: 1659;
  Gene Symbol: AUTS2;
  Gene Name: autism susceptibility candidate 2;
  ENSP ID: ENSP00000479325
PELGVGTLPEHDSQDAGPIVPKISGLERSQEKSQDCCKEPIFEPVVLKDPCPQVAQPIPQPQTEPQLRAPSPDPDLVQRTEAPPQPPPLSTQPPQGPPEAQLQPAPQPQVQRPPRPQSPTQLLHQNLPPVQAHPSAQSLSQPLSAYNSSSLSLNSLSSSRSSTPAKTQPAPPHISHHPSASPFPLSLPNHSPLHSFTPTLQPPAHSHHPNMFAPPTALPPPPPLTSGSLQVAGHPAGSTYSEQDILRQELNTRFLASQSADRGASLGPPPYLRTEFHQHQHQHQHTHQHTHQHTFTPFPHAIPPTAIMPTPAPPMFDKYPTKVDPFYRHSLFHSYPPAVSGIPPMIPPTGPFGSLQGAFQPKLTDPFRPMLRKPGKWCAMHVHIAWQIYHHQQKVKKQMQSDPHKLDFGLKPEFLSRPPGPSLFGAIHHPHDLARPSTLFSAAGAAHPTGTPFGPPPHHSNFLNPAAHLEPFNRPSTFTGLAAVGGNAFGGLGNPSVTPNSMFGHKDGPSVQNFSNPHEPWNRLHRTPPSFPTPPPWLKPGELERSASAAAHDRDRDVDKRDSSVSKDDKERESVEKRHSSHPSPAPVLPVNALGHTRSSTEQIRAHLNTEAREKDKPKERERDHSESRKDLAADEHKAKEGHLPEKDGHGHEGRAAGEEAKQLARVPSPYVRTPVVESARPNSTSSREAEPRKGEPAYENPKKSSEVKVKEERKEDHDLPPEAPQTHRASEPPPPNSSSSVHPGPLASMPMTVGVTGIHPMNSISSLDRTRMMTPFMGISPLPGGERFPYPSFHWDPIRDPLRDPYRELDIHRRDPLGRDFLLRNDPLHRLSTPRLYEADRSFRDREPHDYSHHHHHHHHPLSVDPRREHERGGHLDERERLHMLREDYEHTRLHSVHPASLDGHLPHPSLITPGLPSMHYPRISPTAGNQNGLLNKTPPTAALSAPPPLISTLGGRPVSPRRTTPLSAEIRERPPSHTLKDIEAR

SEQ ID NO: 7940 - protein, 643 aa, Homo sapiens
  Payload ID: 1660;
  Gene Symbol: AMFR;
  Gene Name: autocrine motility  factor receptor, E3 ubiquitin prt ligase;
  Uniprot ID:  Q9UKV5;
  ENSP ID: ENSP00000290649
MPLLFLERFPWPSLRTYTGLSGLALLGTIISAYRALSQPEAGPGEPDQLTASLQPEPPAPARPSAGGPRARDVAQYLLSDSLFVWVLVNTACCVLMLVAKLIQCIVFGPLRVSERQHLKDKFWNFIFYKFIFIFGVLNVQTVEEVVMWCLWFAGLVFLHLMVQLCKDRFEYLSFSPTTPMSSHGRVLSLLVAMLLSCCGLAAVCSITGYTHGMHTLAFMAAESLLVTVRTAHVILRYVIHLWDLNHEGTWEGKGTYVYYTDFVMELTLLSLDLMHHIHMLLFGNIWLSMASLVIFMQLRYLFHEVQRRIRRHKNYLRVVGNMEARFAVATPEELAVNNDDCAICWDSMQAARKLPCGHLFHNSCLRSWLEQDTSCPTCRMSLNIADNNRVREEHQGENLDENLVPVAAAEGRPRLNQHNHFFHFDGSRIASWLPSFSVEVMHTTNILGITQASNSQLNAMAHQIQEMFPQVPYHLVLQDLQLTRSVEITTDNILEGRIQVPFPTQRSDSIRPALNSPVERPSSDQEEGETSAQTERVPLDLSPRLEETLDFGEVEVEPSEVEDFEARGSRFSKSADERQRMLVQRKDELLQQARKRFLNKSSEDDAASESFLPSEGASSDPVTLRRRMLAAAAERRLQKQQTS

SEQ ID NO: 7941 - protein, 165 aa, Homo sapiens
  Payload ID: 1660;
  Gene Symbol: AMFR;
  Gene Name: autocrine motility  factor receptor, E3 ubiquitin prt ligase;
  ENSP ID: ENSP00000455842
MLVAKLIQCIVFGPLRVSERQHLKDKFWNFIFYKFIFIFGVLNVQTVEEVVMWCLWFAGLVFLHLMVQLCKDRFEYLSFSPTTPMSSHGRVLSLLVAMLLSCCGLAAVCSITGYTHGMHTLAFMAAESLLVTVRTAHVILRYVIHLWDLNHEGTWEGKGTYVYYT

SEQ ID NO: 7942 - protein, 288 aa, Homo sapiens
  Payload ID: 1660;
  Gene Symbol: AMFR;
  Gene Name: autocrine motility  factor receptor, E3 ubiquitin prt ligase;
  ENSP ID: ENSP00000456288
WLSMASLVIFMQLRYLFHEVQRRIRRHKNYLRVVGNMEARFAVATPEELAVNNDDCAICWDSMQAARKLPCGHLFHNSCLRSWLEQDTSCPTCRMSLNIADNNRVREEHQGENLDENLVPVAAAEGRPRLNQHNHFFHFDGDDSSMRVTAPEDVPVGQEVEVVDSDTDAPDLWSRIASWLPSFSVEVMHTTNILGITQASNSQLNAMAHQIQEMFPQVPYHLVLQDLQLTRSVEITTDNILEGRIQVPFPTQRSDSIRPALNSPVERPSSDQEEGETSAQTERVPLDL

SEQ ID NO: 7943 - protein, 229 aa, Homo sapiens
  Payload ID: 1660;
  Gene Symbol: AMFR;
  Gene Name: autocrine motility  factor receptor, E3 ubiquitin prt ligase;
  ENSP ID: ENSP00000456745
MLVAKLIQCIVFGPLRVSERQHLKDKFWNFIFYKFIFIFGVLNVQTVEEVVMWCLWFAGLVFLHLMVQLCKDRFEYLSFSPTTPMSSHGRVLSLLVAMLLSCCGLAAVCSITGYTHGMHTLAFMAAESLLVTVRTAHVILRYVIHLWDLNHEGTWEGKGTYVYYTDFVMELTLLSLDLMHHIHMLLFGNIWLSMASLVIFMQLRYLFHEVQRRIRRHKNYLRVVGNMEA

SEQ ID NO: 7944 - protein, 299 aa, Homo sapiens
  Payload ID: 1660;
  Gene Symbol: AMFR;
  Gene Name: autocrine motility  factor receptor, E3 ubiquitin prt ligase;
  ENSP ID: ENSP00000473636
YLATSGYPWPAWSSLCSCVTCFMRCNVEFVGTRTIYVWLETWRPGLQLQLQRSWLSTMTTVPSVGTPCRLRGNCPVDIFSTRSRIASWLPSFSVEVMHTTNILGITQASNSQLNAMAHQIQEMFPQVPYHLVLQDLQLTRSVEITTDNILEGRIQVPFPTQRSDSIRPALNSPVERPSSDQEEGETSAQTERVPLDLSPRLEETLDFGEVEVEPSEVEDFEARGSRFSKSADERQRMLVQRKDELLQQARKRFLNKSSEDDAASESFLPSEGASSDPVTLRRRMLAAAAERRLQKQQTS

SEQ ID NO: 7945 - protein, 545 aa, Homo sapiens
  Payload ID: 1661;
  Gene Symbol: AIRE;
  Gene Name: autoimmune regulator;
  Uniprot ID:  O43918;
  ENSP ID: ENSP00000291582
MATDAALRRLLRLHRTEIAVAVDSAFPLLHALADHDVVPEDKFQETLHLKEKEGCPQAFHALLSWLLTQDSTAILDFWRVLFKDYNLERYGRLQPILDSFPKDVDLSQPRKGRKPPAVPKALVPPPRLPTKRKASEEARAAAPAALTPRGTASPGSQLKAKPPKKPESSAEQQRLPLGNGIQTMSASVQRAVAMSSGDVPGARGAVEGILIQQVFESGGSKKCIQVGGEFYTPSKFEDSGSGKNKARSSSGPKPLVRAKGAQGAAPGGGEARLGQQGSVPAPLALPSDPQLHQKNEDECAVCRDGGELICCDGCPRAFHLACLSPPLREIPSGTWRCSSCLQATVQEVQPRAEEPRPQEPPVETPLPPGLRSAGEEVRGPPGEPLAGMDTTLVYKHLPAPPSAAPLPGLDSSALHPLLCVGPEGQQNLAPGARCGVCGDGTDVLRCTHCAAAFHWRCHFPAGTSRPGTGLRCRSCSGDVTPAPVEGVLAPSPARLAPGPAKDDTASHEPALHRDDLESLLSEHTFDGILQWAIQSMARPAAPFPS

SEQ ID NO: 7946 - protein, 220 aa, Homo sapiens
  Payload ID: 1662;
  Gene Symbol: ATG10;
  Gene Name: autophagy related 10;
  Uniprot ID:  Q9H0Y0;
  ENSP ID: ENSP00000282185
MEEDEFIGEKTFQRYCAEFIKHSQQIGDSWEWRPSKDCSDGYMCKIHFQIKNGSVMSHLGASTHGQTCLPMEEAFELPLDDCEVIETAAASEVIKYEYHVLYSCSYQVPVLYFRASFLDGRPLTLKDIWEGVHECYKMRLLQGPWDTITQQEHPILGQPFFVLHPCKTNEFMTPVLKNSQKINKNVNYITSWLSIVGPVVGLNLPLSYAKATSQDERNVP

SEQ ID NO: 7947 - protein, 125 aa, Homo sapiens
  Payload ID: 1662;
  Gene Symbol: ATG10;
  Gene Name: autophagy related 10;
  Uniprot ID:  Q9H0Y0;
  ENSP ID: ENSP00000347309
MEEDEFIGEKTFQRYCAEFIKHSQQIGDSWEWRPSKDCSDGYMCKIHFQIKNGSVMSHLGASTHGQTCLPMEVKSCSVTQAGVQLRDLSSLQPPPSGFKQFSCLSLPSNWDYRGSPLHLANFLYF

SEQ ID NO: 7948 - protein, 220 aa, Homo sapiens; identical to SEQ ID NO: 7946
  Payload ID: 1662;
  Gene Symbol: ATG10;
  Gene Name: autophagy related 10;
  Uniprot ID:  Q9H0Y0;
  ENSP ID: ENSP00000404938

SEQ ID NO: 7949 - protein, 36 aa, Homo sapiens
  Payload ID: 1662;
  Gene Symbol: ATG10;
  Gene Name: autophagy related 10;
  ENSP ID: ENSP00000422340
MEEDEFIGEKTFQRYCAEFIKHSQQIGDSWEWRPSK

SEQ ID NO: 7950 - protein, 171 aa, Homo sapiens
  Payload ID: 1662;
  Gene Symbol: ATG10;
  Gene Name: autophagy related 10;
  ENSP ID: ENSP00000424236
MEEDEFIGEKTFQRYCAEFIKHSQQIGDSWEWRPSKDCSDGYMCKIHFQIKNGSVMSHLGASTHGQTCLPMEEAFELPLDDCEVIETAAASEVIKYEYHVLYSCSYQVPVLYFRASFLDGRPLTLKDIWEGVHECYKMRLLQGPWDTITQQIFTKRCSEGHISVTKNIIPE

SEQ ID NO: 7951 - protein, 125 aa, Homo sapiens; identical to SEQ ID NO: 7947
  Payload ID: 1662;
  Gene Symbol: ATG10;
  Gene Name: autophagy related 10;
  Uniprot ID:  Q9H0Y0;
  ENSP ID: ENSP00000425182

SEQ ID NO: 7952 - protein, 184 aa, Homo sapiens
  Payload ID: 1662;
  Gene Symbol: ATG10;
  Gene Name: autophagy related 10;
  ENSP ID: ENSP00000425225
MEEDEFIGEKTFQRYCAEFIKHSQQIGDSWEWRPSKDCSDGYMCKIHFQIKNGSVMSHLGASTHGQTCLPMEEAFELPLDDCEVIETAAASEVIKYEYHVLYSCSYQVPVLYFRASFLDGRPLTLKDIWEGVHECYKMRLLQGPWDTITQQEHPILGQPFFVLHPCKTNEFMTPVLKNSQKINK

SEQ ID NO: 7953 - protein, 218 aa, Homo sapiens
  Payload ID: 1663;
  Gene Symbol: ATG101;
  Gene Name: autophagy related 101;
  Uniprot ID:  Q9BSB4;
  ENSP ID: ENSP00000338990
MNCRSEVLEVSVEGRQVEEAMLAVLHTVLLHRSTGKFHYKKEGTYSIGTVGTQDVDCDFIDFTYVRVSSEELDRALRKVVGEFKDALRNSGGDGLGQMSLEFYQKKKSRWPFSDECIPWEVWTVKVHVVALATEQERQICREKVGEKLCEKIINIVEVMNRHEYLPKMPTQSEVDNVFDTGLRDVQPYLYKISFQITDALGTSVTTTMRRLIKDTLAL

SEQ ID NO: 7954 - protein, 141 aa, Homo sapiens
  Payload ID: 1663;
  Gene Symbol: ATG101;
  Gene Name: autophagy related 101;
  ENSP ID: ENSP00000449935
MNCRSEVLEVSVEGRQVEEAMLAVLHTVLLHRSTGKFHYKKEGTYSIGTVGTQDVDCDFIDFTYVRVSSEELDRALRKVVGEFKDALRNSGGDGLGQMSLEFYQKKKSRWPFSDECIPWEVWTVKVHVVALATEQERQICR

SEQ ID NO: 7955 - protein, 190 aa, Homo sapiens
  Payload ID: 1663;
  Gene Symbol: ATG101;
  Gene Name: autophagy related 101;
  ENSP ID: ENSP00000450088
MNCRSEVLEVSVEGRQVEEAMLAVLHTVLLHRSTGKFHYKKEGTYSIGTVGTQDVDCDFIDFTYVRVSSEELDRALRKVVGEFKDALRNSGGDGLGQMSLEFYQKKKSRWPFSDECIPWEVWTVKVHVVALATEQERQICREKVGEKLCEKIINIVEVMNRHEYLPKMPTQSEVDNVFDTGLRDVQPYLY

SEQ ID NO: 7956 - protein, 84 aa, Homo sapiens
  Payload ID: 1663;
  Gene Symbol: ATG101;
  Gene Name: autophagy related 101;
  ENSP ID: ENSP00000454613
MNCRSEVLEVSVEGRQVEEAMLAVLHTVLLHRSTGKFHYKKEGTYSIGTVGTQDVDCDFIDFTYVRVSSEELDRALRKVVGEFK

SEQ ID NO: 7957 - protein, 75 aa, Homo sapiens
  Payload ID: 1664;
  Gene Symbol: ATG12;
  Gene Name: autophagy related 12;
  ENSP ID: ENSP00000368913
MAEEPQSVLQLPTSIAAGGEGLTDVSPETTTPEPPSSAAVSPGTEEPAGDTKKKNDSGLWPGAVAHSCNPSTLVG

SEQ ID NO: 7958 - protein, 56 aa, Homo sapiens
  Payload ID: 1664;
  Gene Symbol: ATG12;
  Gene Name: autophagy related 12;
  ENSP ID: ENSP00000424529
MAEEPQSVLQLPTSIAAGGEGLTDVSPETTTPEPPSSAAVSPGTEEPAGDTKKKSN

SEQ ID NO: 7959 - protein, 140 aa, Homo sapiens
  Payload ID: 1664;
  Gene Symbol: ATG12;
  Gene Name: autophagy related 12;
  Uniprot ID:  O94817;
  ENSP ID: ENSP00000425107
MAEEPQSVLQLPTSIAAGGEGLTDVSPETTTPEPPSSAAVSPGTEEPAGDTKKKIDILLKAVGDTPIMKTKKWAVERTRTIQGLIDFIKKFLKLVASEQLFIYVNQSFAPSPDQEVGTLYECFGSDGKLVLHYCKSQAWG

SEQ ID NO: 7960 - protein, 74 aa, Homo sapiens
  Payload ID: 1664;
  Gene Symbol: ATG12;
  Gene Name: autophagy related 12;
  Uniprot ID:  O94817;
  ENSP ID: ENSP00000425164
MAEEPQSVLQLPTSIAAGGEGLTDVSPETTTPEPPSSAAVSPGTEEPAGDTKKKIYLCESVLCSFPRPRSWNSL

SEQ ID NO: 7961 - protein, 59 aa, Homo sapiens
  Payload ID: 1664;
  Gene Symbol: ATG12;
  Gene Name: autophagy related 12;
  ENSP ID: ENSP00000425277
  MOD_RES (1)..(1): Any amino acid
XEPQSVLQLPTSIAAGGEGLTDVSPETTTPEPPSSAAVSPGTEEPAGDTKKKIGCEFTP

SEQ ID NO: 7962 - protein, 66 aa, Homo sapiens
  Payload ID: 1664;
  Gene Symbol: ATG12;
  Gene Name: autophagy related 12;
  ENSP ID: ENSP00000425948
  MOD_RES (1)..(1): Any amino acid
XSPSKMAEEPQSVLQLPTSIAAGGEGLTDVSPETTTPEPPSSAAVSPGTEEPAGDTKKKIGCEFTP

SEQ ID NO: 7963 - protein, 517 aa, Homo sapiens
  Payload ID: 1665;
  Gene Symbol: ATG13;
  Gene Name: autophagy related 13;
  Uniprot ID:  O75143;
  ENSP ID: ENSP00000352500
METDLNSQDRKDLDKFIKFFALKTVQVIVQARLGEKICTRSSSSPTGSDWFNLAIKDIPEVTHEAKKALAGQLPAVGRSMCVEISLKTSEGDSMELEIWCLEMNEKCDKEIKVSYTVYNRLSLLLKSLLAITRVTPAYRLSRKQGHEYVILYRIYFGEVQLSGLGEGFQTVRVGTVGTPVGTITLSCAYRINLAFMSTRQFERTPPIMGIIIDHFVDRPYPSSSPMHPCNYRTAGEDTGVIYPSVEDSQEVCTTSFSTSPPSQLSSSRLSYQPAALGVGSADLAYPVVFAAGLNATHPHQLMVPGKEGGVPLAPNQPVHGTQADQERLATCTPSDRTHCAATPSSSEDTETVSNSSEGRASPHDVLETIFVRKVGAFVNKPINQVTLTSLDIPFAMFAPKNLELEDTDPMVNPPDSPETESPLQGSLHSDGSSGGSSGNTHDDFVMIDFKPAFSKDDILPMDLGTFYREFQNPPQLSSLSIDIGAQSMAEDLDSLPEKLAVHEKNVREFDAFVETLQ

SEQ ID NO: 7964 - protein, 198 aa, Homo sapiens
  Payload ID: 1665;
  Gene Symbol: ATG13;
  Gene Name: autophagy related 13;
  ENSP ID: ENSP00000378919
METDLNSQDRKDLDKFIKFFALKTVQVIVQARLGEKICTRSSSSPTGSDWFNLAIKDIPEVTHEAKKALAGQLPAVGRSMCVEISLKTSEGDSMELEIWCLEMNEKCDKEIKVSYTVYNRLSLLLKSLLAITRVTPAYRLSRKQGHEYVILYRIYFGEVQLSGLGEGFQTVRVGTVGTPVGTITLSCAYRINLAFMST

SEQ ID NO: 7965 - protein, 78 aa, Homo sapiens
  Payload ID: 1665;
  Gene Symbol: ATG13;
  Gene Name: autophagy related 13;
  ENSP ID: ENSP00000431877
PSSSEDTETVSNSSEGRASPHDVLETIFVRKVGAFVNKPINQVTLTSLDIPFAMFAPKNLELEDTDPMVSPPLTTSSQ

SEQ ID NO: 7966 - protein, 517 aa, Homo sapiens; identical to SEQ ID NO: 7963
  Payload ID: 1665;
  Gene Symbol: ATG13;
  Gene Name: autophagy related 13;
  Uniprot ID:  O75143;
  ENSP ID: ENSP00000431974

SEQ ID NO: 7967 - protein, 550 aa, Homo sapiens
  Payload ID: 1665;
  Gene Symbol: ATG13;
  Gene Name: autophagy related 13;
  Uniprot ID:  O75143;
  ENSP ID: ENSP00000432412
METDLNSQDRKDLDKFIKFFALKTVQVIVQARLGEKICTRSSSSPTGSDWFNLAIKDIPEVTHEAKKALAGQLPAVGRSMCVEISLKTSEGDSMELEIWCLEMNEKCDKEIKVSYTVYNRLSLLLKSLLAITRVTPAYRLSRKQGHEYVILYRIYFGEVQLSGLGEGFQTVRVGTVGTPVGTITLSCAYRINLAFMSTRQFERTPPIMGIIIDHFVDRPYPSSSPMHPCNYRTAGEDTGVIYPSVEDSQEVCTTSFSTSPPSQCVFTVTKAHFQTPTPVVTDTLRVPMAGLAFSHQLSSSRLSYQPAALGVGSADLAYPVVFAAGLNATHPHQLMVPGKEGGVPLAPNQPVHGTQADQERLATCTPSDRTHCAATPSSSEDTETVSNSSEGRASPHDVLETIFVRKVGAFVNKPINQVTLTSLDIPFAMFAPKNLELEDTDPMVNPPDSPETESPLQGSLHSDGSSGGSSGNTHDDFVMIDFKPAFSKDDILPMDLGTFYREFQNPPQLSSLSIDIGAQSMAEDLDSLPEKLAVHEKNVREFDAFVETLQ

SEQ ID NO: 7968 - protein, 480 aa, Homo sapiens
  Payload ID: 1665;
  Gene Symbol: ATG13;
  Gene Name: autophagy related 13;
  Uniprot ID:  O75143;
  ENSP ID: ENSP00000433543
METDLNSQDRKDLDKFIKFFALKTVQVIVQARLGEKICTRSSSSPTGSDWFNLAIKDIPEVTHEAKKALAGQLPAVGRSMCVEISLKTSEGDSMELEIWCLEMNEKCDKEIKVSYTVYNRLSLLLKSLLAITRVTPAYRLSRKQGHEYVILYRIYFGEVQLSGLGEGFQTVRVGTVGTPVGTITLSCAYRINLAFMSTRQFERTPPIMGIIIDHFVDRPYPSSSPMHPCNYRTAGEDTGVIYPSVEDSQEVCTTSFSTSPPSQLMVPGKEGGVPLAPNQPVHGTQADQERLATCTPSDRTHCAATPSSSEDTETVSNSSEGRASPHDVLETIFVRKVGAFVNKPINQVTLTSLDIPFAMFAPKNLELEDTDPMVNPPDSPETESPLQGSLHSDGSSGGSSGNTHDDFVMIDFKPAFSKDDILPMDLGTFYREFQNPPQLSSLSIDIGAQSMAEDLDSLPEKLAVHEKNVREFDAFVETLQ

SEQ ID NO: 7969 - protein, 480 aa, Homo sapiens; identical to SEQ ID NO: 7968
  Payload ID: 1665;
  Gene Symbol: ATG13;
  Gene Name: autophagy related 13;
  Uniprot ID:  O75143;
  ENSP ID: ENSP00000433756

SEQ ID NO: 7970 - protein, 47 aa, Homo sapiens
  Payload ID: 1665;
  Gene Symbol: ATG13;
  Gene Name: autophagy related 13;
  ENSP ID: ENSP00000434125
  MOD_RES (1)..(1): Any amino acid
XPSVEDSQEVCTTSFSTSPPSQDSLPEKLAVHEKNVREFDAFVETLQ

SEQ ID NO: 7971 - protein, 401 aa, Homo sapiens
  Payload ID: 1665;
  Gene Symbol: ATG13;
  Gene Name: autophagy related 13;
  Uniprot ID:  O75143;
  ENSP ID: ENSP00000434390
MCVEISLKTSEGDSMELEIWCLEMNEKCDKEIKVSYTVYNRLSLLLKSLLAITRVTPAYRLSRKQGHEYVILYRIYFGEVQLSGLGEGFQTVRVGTVGTPVGTITLSCAYRINLAFMSTRQFERTPPIMGIIIDHFVDRPYPSSSPMHPCNYRTAGEDTGVIYPSVEDSQEVCTTSFSTSPPSQLMVPGKEGGVPLAPNQPVHGTQADQERLATCTPSDRTHCAATPSSSEDTETVSNSSEGRASPHDVLETIFVRKVGAFVNKPINQVTLTSLDIPFAMFAPKNLELEDTDPMVNPPDSPETESPLQGSLHSDGSSGGSSGNTHDDFVMIDFKPAFSKDDILPMDLGTFYREFQNPPQLSSLSIDIGAQSMAEDLDSLPEKLAVHEKNVREFDAFVETLQ

SEQ ID NO: 7972 - protein, 193 aa, Homo sapiens
  Payload ID: 1665;
  Gene Symbol: ATG13;
  Gene Name: autophagy related 13;
  ENSP ID: ENSP00000436174
VFTVTKAHFQTPTPVVTDTLRVPMAGLAFSHQLMVPGKEGGVPLAPNQPVHGTQADQERLATCTPSDRTHCAATPSSSEDTETVSNSSEGRASPHDVLETIFVRKVGAFVNKPINQVTLTSLDIPFAMFAPKNLELEDTDPMVNPPDSPETESPLQGSLHSDGSSGGSSGNTHDDFVMIDFKPAFSKDDILPM

SEQ ID NO: 7973 - protein, 119 aa, Homo sapiens
  Payload ID: 1665;
  Gene Symbol: ATG13;
  Gene Name: autophagy related 13;
  ENSP ID: ENSP00000436931
METDLNSQDRKDLDKFIKFFALKTVQVIVQARLGEKICTRSSSSPTGSDWFNLAIKDIPEVTHEAKKALAGQLPAVGRSMCVEISLKTSEGDSMELEIWCLEMNEKCDKEIKVSYTVYN

SEQ ID NO: 7974 - protein, 42 aa, Homo sapiens
  Payload ID: 1665;
  Gene Symbol: ATG13;
  Gene Name: autophagy related 13;
  ENSP ID: ENSP00000437191
  MOD_RES (1)..(1): Any amino acid
XKPINQVTLTSLDIPFAMFAPKNLELEDTDPMVSPPLTTSSQ

SEQ ID NO: 7975 - protein, 56 aa, Homo sapiens
  Payload ID: 1665;
  Gene Symbol: ATG13;
  Gene Name: autophagy related 13;
  ENSP ID: ENSP00000462167
METDLNSQDRKDLDKFIKFFALKTVQVIVQARLGEKICTRSSSSPTGSDWFNLAIK

SEQ ID NO: 7976 - protein, 33 aa, Homo sapiens
  Payload ID: 1665;
  Gene Symbol: ATG13;
  Gene Name: autophagy related 13;
  ENSP ID: ENSP00000462644
METDLNSQDRKDLDKFIKFFALKTVQVIVQARL

SEQ ID NO: 7977 - protein, 13 aa, Homo sapiens
  Payload ID: 1665;
  Gene Symbol: ATG13;
  Gene Name: autophagy related 13;
  ENSP ID: ENSP00000463550
METDLNSQDRKDL

SEQ ID NO: 7978 - protein, 32 aa, Homo sapiens
  Payload ID: 1665;
  Gene Symbol: ATG13;
  Gene Name: autophagy related 13;
  ENSP ID: ENSP00000463808
METDLNSQDRKDLDKFIKFFALKTVQVIVQAR

SEQ ID NO: 7979 - protein, 27 aa, Homo sapiens
  Payload ID: 1665;
  Gene Symbol: ATG13;
  Gene Name: autophagy related 13;
  ENSP ID: ENSP00000463998
METDLNSQDRKDLDKFIKFFALKTVQV

SEQ ID NO: 7980 - protein, 38 aa, Homo sapiens
  Payload ID: 1665;
  Gene Symbol: ATG13;
  Gene Name: autophagy related 13;
  ENSP ID: ENSP00000464091
METDLNSQDRKDLDKFIKFFALKTVQVIVQARLGEKIC

SEQ ID NO: 7981 - protein, 50 aa, Homo sapiens
  Payload ID: 1665;
  Gene Symbol: ATG13;
  Gene Name: autophagy related 13;
  ENSP ID: ENSP00000464274
METDLNSQDRKDLDKFIKFFALKTVQVIVQARLGEKICTRSSSSPTGSDW

SEQ ID NO: 7982 - protein, 492 aa, Homo sapiens
  Payload ID: 1666;
  Gene Symbol: ATG14;
  Gene Name: autophagy related 14;
  Uniprot ID:  Q6ZNE5;
  ENSP ID: ENSP00000247178
MASPSGKGARALEAPGCGPRPLARDLVDSVDDAEGLYVAVERCPLCNTTRRRLTCAKCVQSGDFVYFDGRDRERFIDKKERLSRLKSKQEEFQKEVLKAMEGKWITDQLRWKIMSCKMRIEQLKQTICKGNEEMEKNSEGLLKTKEKNQKLYSRAQRHQEKKEKIQRHNRKLGDLVEKKTIDLRSHYERLANLRRSHILELTSVIFPIEEVKTGVRDPADVSSESDSAMTSSTVSKLAEARRTTYLSGRWVCDDHNGDTSISITGPWISLPNNGDYSAYYSWVEEKKTTQGPDMEQSNPAYTISAALCYATQLVNILSHILDVNLPKKLCNSEFCGENLSKQKFTRAVKKLNANILYLCFSQHVNLDQLQPLHTLRNLMYLVSPSSEHLGRSGPFEVRADLEESMEFVDPGVAGESDESGDERVSDEETDLGTDWENLPSPRFCDIPSQSVEVSQSQSTQASPPIASSSAGGMISSAAASVTSWFKAYTGHR

SEQ ID NO: 7983 - protein, 444 aa, Homo sapiens
  Payload ID: 1667;
  Gene Symbol: ATG16L1;
  Gene Name: autophagy related 16-like 1;
  Uniprot ID:  Q676U5;
  ENSP ID: ENSP00000318259
MSSGLRAADFPRWKRHISEQLRRRDRLQRQAFEEIILQYNKLLEKSDLHSVLAQKLQAEKHDVPNRHEIRRRQARLQKELAEAAKEPLPVEQDDDIEVIVDETSDHTEETSPVRAISRAATRRSVSSFPVPQDNVDTHPGSGKEVRVPATALCVFDAHDGEVNAVQFSPGSRLLATGGMDRRVKLWEVFGEKCEFKGSLSGSNAGITSIEFDSAGSYLLAASNDFASRIWTVDDYRLRHTLTGHSGKVLSAKFLLDNARIVSGSHDRTLKLWDLRSKVCIKTVFAGSSCNDIVCTEQCVMSGHFDKKIRFWDIRSESIVREMELLGKITALDLNPERTELLSCSRDDLLKVIDLRTNAIKQTFSAPGFKCGSDWTRVVFSPDGSYVAAGSAEGSLYIWSVLTGKVEKVLSKQHSSSINAVAWSPSGSHVVSVDKGCKAVLWAQY

SEQ ID NO: 7984 - protein, 428 aa, Homo sapiens
  Payload ID: 1667;
  Gene Symbol: ATG16L1;
  Gene Name: autophagy related 16-like 1;
  Uniprot ID:  Q676U5;
  ENSP ID: ENSP00000362625
MSSGLRAADFPRWKRHISEQLRRRDRLQRQAFEEIILQYNKLLEKSDLHSVLAQKLQAEKHDVPNRHEIRRRQARLQKELAEAAKEPLPVEQDDDIEVIVDETSDHTEETSPVRAISRAATKRLSQPAGGLLDSITNIFGRRSVSSFPVPQDNVDTHPGSGKEVRVPATALCVFDAHDGEVNAVQFSPGITSIEFDSAGSYLLAASNDFASRIWTVDDYRLRHTLTGHSGKVLSAKFLLDNARIVSGSHDRTLKLWDLRSKVCIKTVFAGSSCNDIVCTEQCVMSGHFDKKIRFWDIRSESIVREMELLGKITALDLNPERTELLSCSRDDLLKVIDLRTNAIKQTFSAPGFKCGSDWTRVVFSPDGSYVAAGSAEGSLYIWSVLTGKVEKVLSKQHSSSINAVAWSPSGSHVVSVDKGCKAVLWAQY

SEQ ID NO: 7985 - protein, 607 aa, Homo sapiens
  Payload ID: 1667;
  Gene Symbol: ATG16L1;
  Gene Name: autophagy related 16-like 1;
  Uniprot ID:  Q676U5;
  ENSP ID: ENSP00000375872
MSSGLRAADFPRWKRHISEQLRRRDRLQRQAFEEIILQYNKLLEKSDLHSVLAQKLQAEKHDVPNRHEISPGHDGTWNDNQLQEMAQLRIKHQEELTELHKKRGELAQLVIDLNNQMQRKDREMQMNEAKIAECLQTISDLETECLDLRTKLCDLERANQTLKDEYDALQITFTALEGKLRKTTEENQELVTRWMAEKAQEANRLNAENEKDSRRRQARLQKELAEAAKEPLPVEQDDDIEVIVDETSDHTEETSPVRAISRAATKRLSQPAGGLLDSITNIFGRRSVSSFPVPQDNVDTHPGSGKEVRVPATALCVFDAHDGEVNAVQFSPGSRLLATGGMDRRVKLWEVFGEKCEFKGSLSGSNAGITSIEFDSAGSYLLAASNDFASRIWTVDDYRLRHTLTGHSGKVLSAKFLLDNARIVSGSHDRTLKLWDLRSKVCIKTVFAGSSCNDIVCTEQCVMSGHFDKKIRFWDIRSESIVREMELLGKITALDLNPERTELLSCSRDDLLKVIDLRTNAIKQTFSAPGFKCGSDWTRVVFSPDGSYVAAGSAEGSLYIWSVLTGKVEKVLSKQHSSSINAVAWSPSGSHVVSVDKGCKAVLWAQY

SEQ ID NO: 7986 - protein, 624 aa, Homo sapiens
  Payload ID: 1667;
  Gene Symbol: ATG16L1;
  Gene Name: autophagy related 16-like 1;
  ENSP ID: ENSP00000375873
MSSGLRAADFPRWKRHISEQLRRRDRLQRQAFEEIILQYNKLLEKSDLHSVLAQKLQAEKHDVPNRHEISPGHDGTWNDNQLQEMAQLRIKHQEELTELHKKRGELAQLVIDLNNQMQRKDREMQMNEAKIAECLQTISDLETECLDLRTKLCDLERANQTLKDEYDALQITFTALEGKLRKTTEENQELVTRWMAEKAQEANRLNAENEKDSRRRQARLQKELAEAAKEPLPVEQDDDIEVIVDETSDHTEETSPVRAISRAATKRLSQPAGGLLDSITNIFGLSESPLLGHHSSSDAARRRSVSSFPVPQDNVDTHPGSGKEVRVPATALCVFDAHDGEVNAVQFSPGSRLLATGGMDRRVKLWEVFGEKCEFKGSLSGSNAGITSIEFDSAGSYLLAASNDFASRIWTVDDYRLRHTLTGHSGKVLSAKFLLDNARIVSGSHDRTLKLWDLRSKVCIKTVFAGSSCNDIVCTEQCVMSGHFDKKIRFWDIRSESIVREMELLGKITALDLNPERTELLSCSRDDLLKVIDLRTNAIKQTFSAPGFKCGSDWTRVVFSPDGSYVAAGSAEGSLYIWSVLTGKVEKVLSKQHSSSINAVAWSPSGSHVVSVDKGCKAVLWAQY

SEQ ID NO: 7987 - protein, 588 aa, Homo sapiens
  Payload ID: 1667;
  Gene Symbol: ATG16L1;
  Gene Name: autophagy related 16-like 1;
  Uniprot ID:  Q676U5;
  ENSP ID: ENSP00000375875
MSSGLRAADFPRWKRHISEQLRRRDRLQRQAFEEIILQYNKLLEKSDLHSVLAQKLQAEKHDVPNRHEISPGHDGTWNDNQLQEMAQLRIKHQEELTELHKKRGELAQLVIDLNNQMQRKDREMQMNEAKIAECLQTISDLETECLDLRTKLCDLERANQTLKDEYDALQITFTALEGKLRKTTEENQELVTRWMAEKAQEANRLNAENEKDSRRRQARLQKELAEAAKEPLPVEQDDDIEVIVDETSDHTEETSPVRAISRAATRRSVSSFPVPQDNVDTHPGSGKEVRVPATALCVFDAHDGEVNAVQFSPGSRLLATGGMDRRVKLWEVFGEKCEFKGSLSGSNAGITSIEFDSAGSYLLAASNDFASRIWTVDDYRLRHTLTGHSGKVLSAKFLLDNARIVSGSHDRTLKLWDLRSKVCIKTVFAGSSCNDIVCTEQCVMSGHFDKKIRFWDIRSESIVREMELLGKITALDLNPERTELLSCSRDDLLKVIDLRTNAIKQTFSAPGFKCGSDWTRVVFSPDGSYVAAGSAEGSLYIWSVLTGKVEKVLSKQHSSSINAVAWSPSGSHVVSVDKGCKAVLWAQY

SEQ ID NO: 7988 - protein, 38 aa, Homo sapiens
  Payload ID: 1667;
  Gene Symbol: ATG16L1;
  Gene Name: autophagy related 16-like 1;
  ENSP ID: ENSP00000375876
MSSGLRAADFPRWKRHISEQLRRRDRLQRQAFEEIILQ

SEQ ID NO: 7989 - protein, 55 aa, Homo sapiens
  Payload ID: 1667;
  Gene Symbol: ATG16L1;
  Gene Name: autophagy related 16-like 1;
  ENSP ID: ENSP00000397512
MAQLRIKHQEELTELHKKRGELAQLVIDLNNQMQRKDREMQMNEAKIAECLQTIS

SEQ ID NO: 7990 - protein, 164 aa, Homo sapiens
  Payload ID: 1667;
  Gene Symbol: ATG16L1;
  Gene Name: autophagy related 16-like 1;
  ENSP ID: ENSP00000398773
MSSGLRAADFPRWKRHISEQLRRRDRLQRQAFEEIILQYNKLLEKSDLHSVLAQKLQAEKHDVPNRHEIRRRQARLQKELAEAAKEPLPVEQDDDIEVIVDETSDHTEETSPVRAISRAATRRSVSSFPVPQDNVDTHPGSGKEVRVPATALCVFDAHDGEVNA

SEQ ID NO: 7991 - protein, 177 aa, Homo sapiens
  Payload ID: 1667;
  Gene Symbol: ATG16L1;
  Gene Name: autophagy related 16-like 1;
  ENSP ID: ENSP00000409215
MSSGLRAADFPRWKRHISEQLRRRDRLQRQAFEEIILQYNKLLEKSDLHSVLAQKLQAEKHDVPNRHEIRRRQARLQKELAEAAKEPLPVEQDDDIEVIVDETSDHTEETSPVRAISRAATKRLSQPAGGLLDSITNIFGLSESPLLGHHSSSDAARRRSVSSFPVPQDNVDTHPGS

SEQ ID NO: 7992 - protein, 187 aa, Homo sapiens
  Payload ID: 1667;
  Gene Symbol: ATG16L1;
  Gene Name: autophagy related 16-like 1;
  ENSP ID: ENSP00000412046
MSSGLRAADFPRWKRHISEQLRRRDRLQRQAFEEIILQYNKLLEKSDLHSVLAQKLQAEKHDVPNRHEISPGHDGTWNDNQLQEMAQLRIKHQEELTELHKKRGELAQLVIDLNNQMQRKDREMQMNEAKRRQARLQKELAEAAKEPLPVEQDDDIEVIVDETSDHTEETSPVRAISRAATKRLSQP

SEQ ID NO: 7993 - protein, 38 aa, Homo sapiens; identical to SEQ ID NO: 7988
  Payload ID: 1667;
  Gene Symbol: ATG16L1;
  Gene Name: autophagy related 16-like 1;
  ENSP ID: ENSP00000485758

SEQ ID NO: 7994 - protein, 187 aa, Homo sapiens; identical to SEQ ID NO: 7992
  Payload ID: 1667;
  Gene Symbol: ATG16L1;
  Gene Name: autophagy related 16-like 1;
  ENSP ID: ENSP00000486453

SEQ ID NO: 7995 - protein, 624 aa, Homo sapiens; identical to SEQ ID NO: 7986
  Payload ID: 1667;
  Gene Symbol: ATG16L1;
  Gene Name: autophagy related 16-like 1;
  ENSP ID: ENSP00000486603

SEQ ID NO: 7996 - protein, 177 aa, Homo sapiens; identical to SEQ ID NO: 7991
  Payload ID: 1667;
  Gene Symbol: ATG16L1;
  Gene Name: autophagy related 16-like 1;
  ENSP ID: ENSP00000486688

SEQ ID NO: 7997 - protein, 55 aa, Homo sapiens; identical to SEQ ID NO: 7989
  Payload ID: 1667;
  Gene Symbol: ATG16L1;
  Gene Name: autophagy related 16-like 1;
  ENSP ID: ENSP00000487252

SEQ ID NO: 7998 - protein, 444 aa, Homo sapiens; identical to SEQ ID NO: 7983
  Payload ID: 1667;
  Gene Symbol: ATG16L1;
  Gene Name: autophagy related 16-like 1;
  Uniprot ID:  Q676U5;
  ENSP ID: ENSP00000487298

SEQ ID NO: 7999 - protein, 164 aa, Homo sapiens; identical to SEQ ID NO: 7990
  Payload ID: 1667;
  Gene Symbol: ATG16L1;
  Gene Name: autophagy related 16-like 1;
  ENSP ID: ENSP00000487407

SEQ ID NO: 8000 - protein, 588 aa, Homo sapiens; identical to SEQ ID NO: 7987
  Payload ID: 1667;
  Gene Symbol: ATG16L1;
  Gene Name: autophagy related 16-like 1;
  Uniprot ID:  Q676U5;
  ENSP ID: ENSP00000487446

SEQ ID NO: 8001 - protein, 428 aa, Homo sapiens; identical to SEQ ID NO: 7984
  Payload ID: 1667;
  Gene Symbol: ATG16L1;
  Gene Name: autophagy related 16-like 1;
  Uniprot ID:  Q676U5;
  ENSP ID: ENSP00000487455

SEQ ID NO: 8002 - protein, 607 aa, Homo sapiens; identical to SEQ ID NO: 7985
  Payload ID: 1667;
  Gene Symbol: ATG16L1;
  Gene Name: autophagy related 16-like 1;
  Uniprot ID:  Q676U5;
  ENSP ID: ENSP00000487542

SEQ ID NO: 8003 - protein, 619 aa, Homo sapiens
  Payload ID: 1668;
  Gene Symbol: ATG16L2;
  Gene Name: autophagy related 16-like 2;
  Uniprot ID:  Q8NAA4;
  ENSP ID: ENSP00000326340
MAGPGVPGAPAARWKRHIVRQLRLRDRTQKALFLELVPAYNHLLEKAELLDKFSKKLQPEPNSVTPTTHQGPWEESELDSDQVPSLVALRVKWQEEEEGLRLVCGEMAYQVVEKGAALGTLESELQQRQSRLAALEARVAQLREARAQQAQQVEEWRAQNAVQRAAYEALRAHVGLREAALRRLQEEARDLLERLVQRKARAAAERNLRNERRERAKQARVSQELKKAAKRTVSISEGPDTLGDGMRERRETLALAPEPEPLEKEACEKWKRPFRSASATSLTLSHCVDVVKGLLDFKKRRGHSIGGAPEQRYQIIPVCVAARLPTRAQDVLDAHLSEVNAVRFGPNSSLLATGGADRLIHLWNVVGSRLEANQTLEGAGGSITSVDFDPSGYQVLAATYNQAAQLWKVGEAQSKETLSGHKDKVTAAKFKLTRHQAVTGSRDRTVKEWDLGRAYCSRTINVLSYCNDVVCGDHIIISGHNDQKIRFWDSRGPHCTQVIPVQGRVTSLSLSHDQLHLLSCSRDNTLKVIDLRVSNIRQVFRADGFKCGSDWTKAVFSPDRSYALAGSCDGALYIWDVDTGKLESRLQGPHCAAVNAVAWCYSGSHMVSVDQGRKVVLWQ

SEQ ID NO: 8004 - protein, 121 aa, Homo sapiens
  Payload ID: 1668;
  Gene Symbol: ATG16L2;
  Gene Name: autophagy related 16-like 2;
  ENSP ID: ENSP00000400705
MAGPGVPGAPAARWKRHIVRQLRLRDRTQKALFLELVPAYNHLLEKAELLDKFSKKLQPEPNSVTPTTHQGPWEESELDSDQVPSLVALRVKWQEEEEGLRLVCGELAFQEGGGQVSSRLP

SEQ ID NO: 8005 - protein, 450 aa, Homo sapiens
  Payload ID: 1668;
  Gene Symbol: ATG16L2;
  Gene Name: autophagy related 16-like 2;
  ENSP ID: ENSP00000437412
AGRSRASPVSGREGGSSRPLEEGTGSSPACVRGAAPGSQDAFYPTRAKQARVSQELKKAAKRTVSISEGPDTLGDGMRERRETLALAPEPEPLEKEACEKWKRPFRSASATSLTLSHCVDVVKGLLDFKKRRGHSIGGAPEQRYQIIPVCVAARLPTRAQDVLDAHLSEVNAVRFGPNSSLLATGGADRLIHLWNVVGSRLEANQTLEGAGGSITSVDFDPSGYQVLAATYNQAAQLWKVGEAQSKETLSGHKDKVTAAKFKLTRHQAVTGSRDRTVKEWDLGRAYCSRTINVLSYCNDVVCGDHIIISGHNDQKIRFWDSRGPHCTQVIPVQGRVTSLSLSHDQLHLLSCSRDNTLKVIDLRVSNIRQVFRADGFKCGSDWTKAVFSPDRSYALAGSCDGALYIWDVDTGKLESRLQGPHCAAVNAVAWCYSGSHMVSVDQGRKVVLWQ

SEQ ID NO: 8006 - protein, 74 aa, Homo sapiens
  Payload ID: 1668;
  Gene Symbol: ATG16L2;
  Gene Name: autophagy related 16-like 2;
  ENSP ID: ENSP00000437932
  MOD_RES (1)..(1): Any amino acid
XAKQARVSQELKKAAKRTVSISEGPDTLGDGMRERRETLALAPEPEPLEKEACEKWKRPFSLSLQVPGVQALGQ

SEQ ID NO: 8007 - protein, 321 aa, Homo sapiens
  Payload ID: 1668;
  Gene Symbol: ATG16L2;
  Gene Name: autophagy related 16-like 2;
  ENSP ID: ENSP00000438474
  MOD_RES (1)..(1): Any amino acid
XRKGPAPAGRSRASPVSGREGGSSRPLEEGTGSSPACVRGAAPGSQDAFYPTRAKQARVSQELKKAAKRTVSISEGPDTLGDGMRERRETLALAPEPEPLEKEACEKWKRPFRSASATSLTLSHCVDVVKGLLDFKKRRGHSIGGAPEQRYQIIPVCVAARLPTRAQDVLDAHLSEVNAVRFGPNSSLLATGGADRLIHLWNVVGSRLEANQTLEGAGGSITSVDFDPSGYQVLAATYNQAAQLWKVGEAQSKETLSGHKDKVTAAKFKLTRHQAVTGSRDRTVKEWDLGRAYCSRTINVLSYCNDVVCGDHIIISGHNDQ

SEQ ID NO: 8008 - protein, 98 aa, Homo sapiens
  Payload ID: 1668;
  Gene Symbol: ATG16L2;
  Gene Name: autophagy related 16-like 2;
  ENSP ID: ENSP00000441132
  MOD_RES (1)..(1): Any amino acid
XQARVSQELKKAAKRTVSISEGPDTLGDGMRERRETLALAPEPEPLEKEACEKWKRPFRGPHCTQVIPVQGRVTSLSLSHDQLHLLSCSRDNTLKVID

SEQ ID NO: 8009 - protein, 164 aa, Homo sapiens
  Payload ID: 1668;
  Gene Symbol: ATG16L2;
  Gene Name: autophagy related 16-like 2;
  ENSP ID: ENSP00000441189
MAGPGVPGAPAARWKRHIVRQLRLRDRTQKALFLELVPAYNHLLEKAELLDKFSKKLQPEPNSVTPTTHQGPWEESELDSDQVPSLVALRVKWQEEEEGLRLVCGEGAPLHPGHPCAGPGHLPEPQPRPTAPAQLFPRQHTQGHRPACQQHPPGVQGRWLQVWF

SEQ ID NO: 8010 - protein, 397 aa, Homo sapiens
  Payload ID: 1668;
  Gene Symbol: ATG16L2;
  Gene Name: autophagy related 16-like 2;
  ENSP ID: ENSP00000441747
  MOD_RES (1)..(1): Any amino acid
XAAPGSQDAFYPTRAKQARVSQELKKAAKRTVSISEGPDTLGDGMRERRETLALAPEPEPLEKEACEKWKRPFSFKKRRGHSIGGAPEQRYQIIPVCVAARLPTRAQDVLDAHLSEVNAVRFGPNSSLLATGGADRLIHLWNVVGSRLEANQTLEGAGGSITSVDFDPSGYQVLAATYNQAAQLWKVGEAQSKETLSGHKDKVTAAKFKLTRHQAVTGSRDRTVKEWDLGRAYCSRTINVLSYCNDVVCGDHIIISGHNDQKIRFWDSRGPHCTQVIPVQGRVTSLSLSHDQLHLLSCSRDNTLKVIDLRVSNIRQVFRADGFKCGSDWTKAVFSPDRSYALAGSCDGALYIWDVDTGKLESRLQGPHCAAVNAVAWCYSGSHMVSVDQGRKVVLWQ

SEQ ID NO: 8011 - protein, 416 aa, Homo sapiens
  Payload ID: 1668;
  Gene Symbol: ATG16L2;
  Gene Name: autophagy related 16-like 2;
  ENSP ID: ENSP00000441989
AGRSRASPVSGREGGSSRPLEEGTGSSPACVRGAAPGSQDAFYPTRAKQARVSQELKKAAKRTVSISEGPDTLGDGMRERRETLALAPEPEPLEKEACEKWKRPFRSASATSLTLSHCVDVVKGLLDFKKRRGHSIGGAPEQRYQIIPVCVAARLPTRAQDVLDAHLSEVNAVRFGPNSSLLATGGADRLIHLWNVVGSRLEANQTLEGAGGSITSVDFDPSGYQVLAATYNQAAQLWKVGEAQSKETLSGHKDKVTAAKFKLTRHQAVTGSRDRTVKEWDLGRAYCSRTINVLSYCNDVVCGDHIIISGHNDQKIRFWDSRGPHCTQVIPVQGRVTSLSLSHDQLHLLSCSRDNTLKVIDLRVSNIRQVFRADGFKCGSDWTKAVFSAAVNAVAWCYSGSHMVSVDQGRKVVLWQ

SEQ ID NO: 8012 - protein, 106 aa, Homo sapiens
  Payload ID: 1668;
  Gene Symbol: ATG16L2;
  Gene Name: autophagy related 16-like 2;
  ENSP ID: ENSP00000442635
MAGPGVPGAPAARWKRHIVRQLRLRDRTQKALFLELVPAYNHLLEKAELLDKFSKKLQPEPNSVTPTTHQGPWEESELDSDQVPSLVALRVKWQEEEEGLRLVCGE

SEQ ID NO: 8013 - protein, 98 aa, Homo sapiens
  Payload ID: 1668;
  Gene Symbol: ATG16L2;
  Gene Name: autophagy related 16-like 2;
  ENSP ID: ENSP00000442931
LVQRKARAAAERNLRNERRERAKQARVSQELKKAAKRTVSISEGPDTLGDGMRERRETLALAPEPEPLEKEACEKWKRPFRPRLSFPGTFVGLPQPPP

SEQ ID NO: 8014 - protein, 117 aa, Homo sapiens
  Payload ID: 1668;
  Gene Symbol: ATG16L2;
  Gene Name: autophagy related 16-like 2;
  ENSP ID: ENSP00000443569
  MOD_RES (1)..(1): Any amino acid
XESAAMAGPGVPGAPAARWKRHIVRQLRLRDRTQKALFLELVPAYNHLLEKAELLDKFSKKLQPEPNSVTPTTHQGPWEESELDSDQVPSLVALRVKWQEEEEGLRLVCGEVSWEGV

SEQ ID NO: 8015 - protein, 1938 aa, Homo sapiens
  Payload ID: 1669;
  Gene Symbol: ATG2A;
  Gene Name: autophagy related 2A;
  Uniprot ID:  Q2TAZ0;
  ENSP ID: ENSP00000366475
MSRWLWPWSNCVKERVCRYLLHHYLGHFFQEHLSLDQLSLDLYKGSVALRDIHLEIWSVNEVLESMESPLELVEGFVGSIEVAVPWAALLTDHCTVRVSGLQLTLQPRRGPAPGAADSQSWASCMTTSLQLAQECLRDGLPEPSEPPQPLEGLEMFAQTIETVLRRIKVTFLDTVVRVEHSPGDGERGVAVEVRVQRLEYCDEAVRDPSQAPPVDVHQPPAFLHKLLQLAGVRLHYEELPAQEEPPEPPLQIGSCSGYMELMVKLKQNEAFPGPKLEVAGQLGSLHLLLTPRQLQQLQELLSAVSLTDHEGLADKLNKSRPLGAEDLWLIEQDLNQQLQAGAVAEPLSPDPLTNPLLNLDNTDLFFSMAGLTSSVASALSELSLSDVDLASSVRSDMASRRLSAQAHPAGKMAPNPLLDTMRPDSLLKMTLGGVTLTLLQTSAPSSGPPDLATHFFTEFDATKDGPFGSRDFHHLRPRFQRACPCSHVRLTGTAVQLSWELRTGSRGRRTTSMEVHFGQLEVLECLWPRGTSEPEYTEILTFPGTLGSQASARPCAHLRHTQILRRVPKSRPRRSVACHCHSELALDLANFQADVELGALDRLAALLRLATVPAEPPAGLLTEPLPAMEQQTVFRLSAPRATLRLRFPIADLRPEPDPWAGQAVRAEQLRLELSEPQFRSELSSGPGPPVPTHLELTCSDLHGIYEDGGKPPVPCLRVSKALDPKSTGRKYFLPQVVVTVNPQSSSTQWEVAPEKGEELELSVESPCELREPEPSPFSSKRTMYETEEMVIPGDPEEMRTFQSRTLALSRCSLEVILPSVHIFLPSKEVYESIYNRINNDLLMWEPADLLPTPDPAAQPSGFPGPSGFWHDSFKMCKSAFKLANCFDLTPDSDSDDEDAHFFSVGASGGPQAAAPEAPSLHLQSTFSTLVTVLKGRITALCETKDEGGKRLEAVHGELVLDMEHGTLFSVSQYCGQPGLGYFCLEAEKATLYHRAAVDDYPLPSHLDLPSFAPPAQLAPTIYPSEEGVTERGASGRKGQGRGPHMLSTAVRIHLDPHKNVKEFLVTLRLHKATLRHYMALPEQSWHSQLLEFLDVLDDPVLGYLPPTVITILHTHLFSCSVDYRPLYLPVRVLITAETFTLSSNIIMDTSTFLLRFILDDSALYLSDKCEVETLDLRRDYVCVLDVDLLELVIKTWKGSTEGKLSQPLFELRCSNNVVHVHSCADSCALLVNLLQYVMSTGDLHPPPRPPSPTEIAGQKLSESPASLPSCPPVETALINQRDLADALLDTERSLRELAQPSGGHLPQASPISVYLFPGERSGAPPPSPPVGGPAGSLGSCSEEKEDEREEEGDGDTLDSDEFCILDAPGLGIPPRDGEPVVTQLHPGPIVVRDGYFSRPIGSTDLLRAPAHFPVPSTRVVLREVSLVWHLYGGRDFGPHPGHRARTGLSGPRSSPSRCSGPNRPQNSWRTQGGSGRQHHVLMEIQLSKVSFQHEVYPAEPATGPAAPSQELEERPLSRQVFIVQELEVRDRLASSQINKFLYLHTSERMPRRAHSNMLTIKALHVAPTTNLGGPECCLRVSLMPLRLNVDQDALFFLKDFFTSLVAGINPVVPGETSAEARPETRAQPSSPLEGQAEGVETTGSQEAPGGGHSPSPPDQQPIYFREFRFTSEVPIWLDYHGKHVTMDQVGTFAGLLIGLAQLNCSELKLKRLCCRHGLLGVDKVLGYALNEWLQDIRKNQLPGLLGGVGPMHSVVQLFQGFRDLLWLPIEQYRKDGRLMRGLQRGAASFGSSTASAALELSNRLVQAIQATAETVYDILSPAAPVSRSLQDKRSARRLRRGQQPADLREGVAKAYDTVREGILDTAQTICDVASRGHEQKGLTGAVGGVIRQLPPTVVKPLILATEATSSLLGGMRNQIVPDAHKDHALKWRSDSAQD

SEQ ID NO: 8016 - protein, 331 aa, Homo sapiens
  Payload ID: 1669;
  Gene Symbol: ATG2A;
  Gene Name: autophagy related 2A;
  Uniprot ID:  Q2TAZ0;
  ENSP ID: ENSP00000410522
MAVAMVKLCERAGLPLLAAPLLRSLLPRAPQPGPAQPRSVQGQRCPARHPPGNLVCERGAGVNGVTAGAGGRLRGLHRGGRALGCSAHRPLHSARVRPPAHLAAPPGSSARGCRLTELGYALNEWLQDIRKNQLPGLLGGVGPMHSVVQLFQGFRDLLWLPIEQYRKDGRLMRGLQRGAASFGSSTASAALELSNRLVQAIQATAETVYDILSPAAPVSRSLQDKRSARRLRRGQQPADLREGVAKAYDTVREGILDTAQTICDVASRGHEQKGLTGAVGGVIRQLPPTVVKPLILATEATSSLLGGMRNQIVPDAHKDHALKWRSDSAQD

SEQ ID NO: 8017 - protein, 1742 aa, Homo sapiens
  Payload ID: 1669;
  Gene Symbol: ATG2A;
  Gene Name: autophagy related 2A;
  ENSP ID: ENSP00000413716
  MOD_RES (1)..(1): Any amino acid
XYCDEAVRDPSQAPPVDVHQPPAFLHKLLQLAGVRLHYEELPAQEEPPEPPLQIGSCSGYMELMVKLKQNEAFPGPKLEVAGQLGSLHLLLTPRQLQQLQELLSAVSLTDHEGLADKLNKSRPLGAEDLWLIEQDLNQQLQAGAVAEPLSPDPLTNPLLNLDNTDLFFSMAGLTSSVASALSELSLSDVDLASSVRSDMASRRLSAQAHPAGKMAPNPLLDTMRPDSLLKMTLGGVTLTLLQTSAPSSGPPDLATHFFTEFDATKDGPFGSRDFHHLRPRFQRACPCSHVRLTGTAVQLSWELRTGSRGRRTTSMEVHFGQLEVLECLWPRGTSEPEYTEILTFPGTLGSQASARPCAHLRHTQILRRVPKSRPRRSVACHCHSELALDLANFQADVELGALDRLAALLRLATVPAEPPAGLLTEPLPAMEQQTVFRLSAPRATLRLRFPIADLRPEPDPWAGQAVRAEQLRLELSEPQFRSELSSGPGPPVPTHLELTCSDLHGIYEDGGKPPVPCLRVSKALDPKSTGRKYFLPQVVVTVNPQSSSTQWEVAPEKGEELELSVESPCELREPEPSPFSSKRTMYETEEMVIPGDPEEMRTFQSRTLALSRCSLEVILPSVHIFLPSKEVYESIYNRINNDLLMWEPADLLPTPDPAAQPSGFPGPSGFWHDSFKMCKSAFKLANCFDLTPDSDSDDEDAHFFSVGASGGPQAAAPEAPSLHLQSTFSTLVTVLKGRITALCETKDEGGKRLEAVHGELVLDMEHGTLFSVSQYCGQPGLGYFCLEAEKATLYHRAAVDDYPLPSHLDLPSFAPPAQLAPTIYPSEEGVTERGASGRKGQGRGPHMLSTAVRIHLDPHKNVKEFLVTLRLHKATLRHYMALPEQSWHSQLLEFLDVLDDPVLGYLPPTVITILHTHLFSCSVDYRPLYLPVRVLITAETFTLSSNIIMDTSTFLLRFILDDSALYLSDKCEVETLDLRRDYVCVLDVDLLELVIKTWKGSTEGKLSQPLFELRCSNNVVHVHSCADSCALLVNLLQYVMSTGDLHPPPRPPSPTEIAGQKVQLSESPASLPSCPPVETALINQRDLADALLDTERSLRELAQPSGGHLPQASPISVYLFPGERSGAPPPSPPVGGPAGSLGSCSEEKEDEREEEGDGDTLDSDEFCILDAPGLGIPPRDGEPVVTQLHPGPIVVRDGYFSRPIGSTDLLRAPAHFPVPSTRVVLREVSLVWHLYGGRDFGPHPGHRARTGLSGPRSSPSRCSGPNRPQNSWRTQGGSGRQHHVLMEIQLSKVSFQHEVYPAEPATGPAAPSQELEERPLSRQVFIVQELEVRDRLASSQINKFLYLHTSERMPRRAHSNMLTIKALHVAPTTNLGGPECCLRVSLMPLRLNVDQDALFFLKDFFTSLVAGINPVVPGETSAEARPETRAQPSSPLEGQAEGVETTGSQEAPGGGHSPSPPDQQPIYFREFRFTSEVPIWLDYHGKHVTMDQVGTFAGLLIGLAQLNCSELKLKRLCCRHGLLGVDKVLGYALNEWLQDIRKNQLPGLLGGVGPMHSVVQLFQGFRDLLWLPIEQYRKDGRLMRGLQRGAASFGSSTASAALELSNRLVQAIQATAETVYDILSPAAPVSRSLQDKRSARRLRRGQQPADLREGVAKAYDTVREGILDTAQTICDVASRGHEQKGLTGAVGGVIRQLPPTVVKPLILATEATSSLLGGMRNQIVPDAHKDHALKWRSDSAQD

SEQ ID NO: 8018 - protein, 2078 aa, Homo sapiens
  Payload ID: 1670;
  Gene Symbol: ATG2B;
  Gene Name: autophagy related 2B;
  Uniprot ID:  Q96BY7;
  ENSP ID: ENSP00000353010
MPWPFSESIKKRACRYLLQRYLGHFLQEKLSLEQLSLDLYQGTGSLAQVPLDKWCLNEILESADAPLEVTEGFIQSISLSVPWGSLLQDNCALEVRGLEMVFRPRPRPATGSEPMYWSSFMTSSMQLAKECLSQKLTDEQGEGSQPFEGLEKFAETIETVLRRVKVTFIDTVLRIEHVPENSKTGTALEIRIERTVYCDETADESSGINVHQPTAFAHKLLQLSGVSLFWDEFSASAKSSPVCSTAPVETEPKLSPSWNPKIIYEPHPQLTRNLPEIAPSDPVQIGRLIGRLELSLTLKQNEVLPGAKLDVDGQIDSIHLLLSPRQVHLLLDMLAAIAGPENSSKIGLANKDRKNRPMQQEDEYRIQMELNRYYLRKDSLSVGVSSEQSFYETETARTPSSREEEVFFSMADMDMSHSLSSLPPLGDPPNMDLELSLTSTYTNTPAGSPLSATVLQPTWGEFLDHHKEQPVRGSTFPSNLVHPTPLQKTSLPSRSVSVDESRPELIFRLAVGTFSISVLHIDPLSPPETSQNLNPLTPMAVAFFTCIEKIDPARFSTEDFKSFRAVFAEACSHDHLRFIGTGIKVSYEQRQRSASRYFSTDMSIGQMEFLECLFPTDFHSVPPHYTELLTFHSKEETGSHSPVCLQLHYKHSENRGPQGNQARLSSVPHKAELQIKLNPVCCELDISIVDRLNSLLQPQKLATVEMMASHMYTSYNKHISLHKAFTEVFLDDSHSPANCRISVQVATPALNLSVRFPIPDLRSDQERGPWFKKSLQKEILYLAFTDLEFKTEFIGGSTPEQIKLELTFRELIGSFQEEKGDPSIKFFHVSSGVDGDTTSSDDFDWPRIVLKINPPAMHSILERIAAEEEEENDGHYQEEEEGGAHSLKDVCDLRRPAPSPFSSRRVMFENEQMVMPGDPVEMTEFQDKAISNSHYVLELTLPNIYVTLPNKSFYEKLYNRIFNDLLLWEPTAPSPVETFENISYGIGLSVASQLINTFNKDSFSAFKSAVHYDEESGSEEETLQYFSTVDPNYRSRRKKKLDSQNKNSQSFLSVLLNINHGLIAVFTDVKQDNGDLLENKHGEFWLEFNSGSLFCVTKYEGFDDKHYICLHSSSFSLYHKGIVNGVILPTETRLPSSTRPHWLEPTIYSSEEDGLSKTSSDGVGGDSLNMLSVAVKILSDKSESNTKEFLIAVGLKGATLQHRMLPSGLSWHEQILYFLNIADEPVLGYNPPTSFTTFHVHLWSCALDYRPLYLPIRSLLTVETFSVSSSVALDKSSSTLRIILDEAALHLSDKCNTVTINLSRDYVRVMDMGLLELTITAVKSDSDGEQTEPRFELHCSSDVVHIRTCSDSCAALMNLIQYIASYGDLQTPNKADMKPGAFQRRSKVDSSGRSSSRGPVLPEADQQMLRDLMSDAMEEIDMQQGTSSVKPQANGVLDEKSQIQEPCCSDLFLFPDESGNVSQESGPTYASFSHHFISDAMTGVPTENDDFCILFAPKAAMQEKEEEPVIKIMVDDAIVIRDNYFSLPVNKTDTSKAPLHFPIPVIRYVVKEVSLVWHLYGGKDFGIVPPTSPAKSYISPHSSPSHTPTRHGRNTVCGGKGRNHDFLMEIQLSKVKFQHEVYPPCKPDCDSSLSEHPVSRQVFIVQDLEIRDRLATSQMNKFLYLYCSKEMPRKAHSNMLTVKALHVCPESGRSPQECCLRVSLMPLRLNIDQDALFFLKDFFTSLSAEVELQMTPDPEVKKSPGADVTCSLPRHLSTSKEPNLVISFSGPKQPSQNDSANSVEVVNGMEEKNFSAEEASFRDQPVFFREFRFTSEVPIRLDYHGKHVSMDQGTLAGILIGLAQLNCSELKLKRLSYRHGLLGVDKLFSYAITEWLNDIKKNQLPGILGGVGPMHSLVQLVQGLKDLVWLPIEQYRKDGRIVRGFQRGAASFGTSTAMAALELTNRMVQTIQAAAETAYDMVSPGTLSIEPKKTKRFPHHRLAHQPVDLREGVAKAYSVVKEGITDTAQTIYETAAREHESRGVTGAVGEVLRQIPPAVVKPLIVATEATSNVLGGMRNQIRPDVRQDESQKWRHGDD

SEQ ID NO: 8019 - protein, 314 aa, Homo sapiens
  Payload ID: 1671;
  Gene Symbol: ATG3;
  Gene Name: autophagy related 3;
  Uniprot ID:  Q9NT62;
  ENSP ID: ENSP00000283290
MQNVINTVKGKALEVAEYLTPVLKESKFKETGVITPEEFVAAGDHLVHHCPTWQWATGEELKVKAYLPTGKQFLVTKNVPCYKRCKQMEYSDELEAIIEEDDGDGGWVDTYHNTGITGITEAVKEITLENKDNIRLQDCSALCEEEEDEDEGEAADMEEYEESGLLETDEATLDTRKIVEACKAKTDAGGEDAILQTRTYDLYITYDKYYQTPRLWLFGYDEQRQPLTVEHMYEDISQDHVKKTVTIENHPHLPPPPMCSVHPCRHAEVMKKIIETVAEGGGELGVHMYLLIFLKFVQAVIPTIEYDYTRHFTM

SEQ ID NO: 8020 - protein, 311 aa, Homo sapiens
  Payload ID: 1671;
  Gene Symbol: ATG3;
  Gene Name: autophagy related 3;
  Uniprot ID:  Q9NT62;
  ENSP ID: ENSP00000385943
MQNVINTVKGKALEVAEYLTPVLKESKFKETGVITPEEFVAAGDHLVHHCPTWQWATGEELKVKAYLPTGKQFLVTKNVPCYKRCKQMEYSDELEAIIEEDDGDGGWVDTYHNTGITGITEAVKEITLENKDNIRLQDCSALCEEEEDEDEGEAADMEEYEESGLLETDEATLDTRKIVEACKAKTDAGGEDAILQTRTYDLYITYDKYYQTPRLWLFGYDEQRQPLTVEHMYEDISQDHVKKTVTIENHPHLPPPPMCSVHPCRHAEVMKKIIETVAEGGGELGVHMYPSLYVRLVAKWLLTIFFLRNLV

SEQ ID NO: 8021 - protein, 74 aa, Homo sapiens
  Payload ID: 1671;
  Gene Symbol: ATG3;
  Gene Name: autophagy related 3;
  ENSP ID: ENSP00000420259
MQNVINTVKGKALEVAEYLTPVLKESKFKETGVITPEEFVAAGDHLVHHCPTWQWATGEELKVKAYLPTDGIFR

SEQ ID NO: 8022 - protein, 83 aa, Homo sapiens
  Payload ID: 1671;
  Gene Symbol: ATG3;
  Gene Name: autophagy related 3;
  ENSP ID: ENSP00000420378
MEYSDELEAIIEEDDGDGGWVDTYHNTGITGITEAVKEITLENKDNIRLQDCSALCEEEEDEDEGEAADMEEYEESGLLETDE

SEQ ID NO: 8023 - protein, 336 aa, Homo sapiens
  Payload ID: 1672;
  Gene Symbol: ATG4A;
  Gene Name: autophagy related 4A, cysteine peptidase;
  Uniprot ID:  Q8WYN0;
  ENSP ID: ENSP00000298131
MESVLSKYEDQITIFTDYLEEYPDTDELVWILGKQHLLKTEKSKLLSDISARLWFTYRRKFSPIGGTGPSSDAGWGCMLRCGQMMLAQALICRHLGRDWSWEKQKEQPKEYQRILQCFLDRKDCCYSIHQMAQMGVGEGKSIGEWFGPNTVAQVLKKLALFDEWNSLAVYVSMDNTVVIEDIKKMCRVLPLSADTAGDRPPDSLTASNQSDELIFLDPHTTQTFVDTEENGTVNDQTFHCLQSPQRMNILNLDPSVALGFFCKEEKDFDNWCSLVQKEILKENLRMFELVQKHPSHWPPFVPPAKPEVTTTGAEFIDSTEQLEEFDLEEDFEILSV

SEQ ID NO: 8024 - protein, 231 aa, Homo sapiens
  Payload ID: 1672;
  Gene Symbol: ATG4A;
  Gene Name: autophagy related 4A, cysteine peptidase;
  ENSP ID: ENSP00000341833
MESVLSKYEDQITIFTDYLEEYPDTDELVWILGKQHLLKTEKSKLLSDISARLWFTYRRKFSPIGGTGPSSDAGWGCMLRCGQMMLAQALICRHLGRDWSWEKQKEQPKEYQRILQCFLDRKDCCYSIHQMEKMCRVLPLSADTAGDRPPDSLTASNQSKGTSAYCSAWKPLLLIVPLRLGINQINPVYVDAFKVTSSSSWTLIQPRPLLTLKRMERLMTRLSIACSPHSE

SEQ ID NO: 8025 - protein, 398 aa, Homo sapiens
  Payload ID: 1672;
  Gene Symbol: ATG4A;
  Gene Name: autophagy related 4A, cysteine peptidase;
  Uniprot ID:  Q8WYN0;
  ENSP ID: ENSP00000361306
MESVLSKYEDQITIFTDYLEEYPDTDELVWILGKQHLLKTEKSKLLSDISARLWFTYRRKFSPIGGTGPSSDAGWGCMLRCGQMMLAQALICRHLGRDWSWEKQKEQPKEYQRILQCFLDRKDCCYSIHQMAQMGVGEGKSIGEWFGPNTVAQVLKKLALFDEWNSLAVYVSMDNTVVIEDIKKMCRVLPLSADTAGDRPPDSLTASNQSKGTSAYCSAWKPLLLIVPLRLGINQINPVYVDAFKECFKMPQSLGALGGKPNNAYYFIGFLGDELIFLDPHTTQTFVDTEENGTVNDQTFHCLQSPQRMNILNLDPSVALGFFCKEEKDFDNWCSLVQKEILKENLRMFELVQKHPSHWPPFVPPAKPEVTTTGAEFIDSTEQLEEFDLEEDFEILSV

SEQ ID NO: 8026 - protein, 47 aa, Homo sapiens
  Payload ID: 1672;
  Gene Symbol: ATG4A;
  Gene Name: autophagy related 4A, cysteine peptidase;
  ENSP ID: ENSP00000361320
MESVLSKYEDQITIFTDYLEEYPDTDELVWILGKQHLLKTDWERKTF

SEQ ID NO: 8027 - protein, 312 aa, Homo sapiens
  Payload ID: 1672;
  Gene Symbol: ATG4A;
  Gene Name: autophagy related 4A, cysteine peptidase;
  ENSP ID: ENSP00000378354
  MOD_RES (1)..(1): Any amino acid
XLSKYEDQITIFTDYLEEYPDTDELVWILGKQHLLKTGGTGPSSDAGWGCMLRCGQMMLAQALICRHLGRDWSWEKQKEQPKEYQRILQCFLDRKDCCYSIHQMAQMGVGEGKSIGEWFGPNTVAQVLKKLALFDEWNSLAVYVSMDNTVVIEDIKKMCRVLPLSADTAGDRPPDSLTASNQSKGTSAYCSAWKPLLLIVPLRLGINQINPVYVDAFKECFKMPQSLGALGGKPNNAYYFIGFLGDELIFLDPHTTQTFVDTEENGTVNDQTFHCLQSPQRMNILNLDPSVALGFFCKEEKDFDNWCSLVQK

SEQ ID NO: 8028 - protein, 202 aa, Homo sapiens
  Payload ID: 1672;
  Gene Symbol: ATG4A;
  Gene Name: autophagy related 4A, cysteine peptidase;
  ENSP ID: ENSP00000416218
MLRCGQMMLAQALICRHLGRDWSWEKQKEQPKEYQRILQCFLDRKDCCYSIHQMAQMGVGEGKSIGEWFGPNTVAQVLKKLALFDEWNSLAVYVSMDNTVVIEDIKKMCRVLPLSADTAGDRPPDSLTASNQSKGTSAYCSAWKPLLLIVPLRLGINQINPVYVDAFKECFKMPQSLGALGGKPNNAYYFIGFLGDELIFLD

SEQ ID NO: 8029 - protein, 76 aa, Homo sapiens
  Payload ID: 1673;
  Gene Symbol: ATG4B;
  Gene Name: autophagy related 4B, cysteine peptidase;
  ENSP ID: ENSP00000344960
  MOD_RES (1)..(1): Any amino acid
XATLTYDTLRFAEFEDFPETSEPVWILGRKYSIFTEKDEILSDVASRLWFTYRKNFPAIGGCRDISLSSKCGPWRY

SEQ ID NO: 8030 - protein, 219 aa, Homo sapiens
  Payload ID: 1673;
  Gene Symbol: ATG4B;
  Gene Name: autophagy related 4B, cysteine peptidase;
  ENSP ID: ENSP00000383582
MDAATLTYDTLRFAEFEDFPETSEPVWILGRKYSIFTEKDEILSDVASRLWFTYRKNFPAIGGTGPTSDTGWGCMLRCGQMIFAQALVCRHLGRDWRWTQRKRQPDSYFSVLNAFIDRKDSYYSIHQIGRLCRTSVPCAGATAFPADSDRHCNGFPAGAEVTNRPSPWRPLVLLIPLRLGLTDINEAYVETLKHCFMMPQSLGVIGGKPNSAHYFIGYV

SEQ ID NO: 8031 - protein, 88 aa, Homo sapiens
  Payload ID: 1673;
  Gene Symbol: ATG4B;
  Gene Name: autophagy related 4B, cysteine peptidase;
  ENSP ID: ENSP00000383583
MDAATLTYDTLRFAEFEDFPETSEPVWILGRKYSIFTEKDEILSDVASRLWFTYRKNFPAIAIHHCCIPWSWKEMGTGSQPCLSPAEN

SEQ ID NO: 8032 - protein, 380 aa, Homo sapiens
  Payload ID: 1673;
  Gene Symbol: ATG4B;
  Gene Name: autophagy related 4B, cysteine peptidase;
  Uniprot ID:  Q9Y4P1;
  ENSP ID: ENSP00000383964
MDAATLTYDTLRFAEFEDFPETSEPVWILGRKYSIFTEKDEILSDVASRLWFTYRKNFPAIGGTGPTSDTGWGCMLRCGQMIFAQALVCRHLGRDWRWTQRKRQPDSYFSVLNAFIDRKDSYYSIHQIAQMGVGEGKSIGQWYGPNTVAQVLKKLAVFDTWSSLAVHIAMDNTVVMEEIRRLCRTSVPCAGATAFPADSDRHCNGFPAGAEVTNRPSPWRPLVLLIPLRLGLTDINEAYVETLKHCFMMPQSLGVIGGKPNSAHYFIGYVGEELIYLDPHTTQPAVEPTDGCFIPDESFHCQHPPCRMSIAELDPSIAVGFFCKTEDDFNDWCQQVKKLSLLGGALPMFELVELQPSHLACPDVLNLSLGESCQVQILLM

SEQ ID NO: 8033 - protein, 393 aa, Homo sapiens
  Payload ID: 1673;
  Gene Symbol: ATG4B;
  Gene Name: autophagy related 4B, cysteine peptidase;
  Uniprot ID:  Q9Y4P1;
  ENSP ID: ENSP00000384259
MDAATLTYDTLRFAEFEDFPETSEPVWILGRKYSIFTEKDEILSDVASRLWFTYRKNFPAIGGTGPTSDTGWGCMLRCGQMIFAQALVCRHLGRDWRWTQRKRQPDSYFSVLNAFIDRKDSYYSIHQIAQMGVGEGKSIGQWYGPNTVAQVLKKLAVFDTWSSLAVHIAMDNTVVMEEIRRLCRTSVPCAGATAFPADSDRHCNGFPAGAEVTNRPSPWRPLVLLIPLRLGLTDINEAYVETLKHCFMMPQSLGVIGGKPNSAHYFIGYVGEELIYLDPHTTQPAVEPTDGCFIPDESFHCQHPPCRMSIAELDPSIAVGFFCKTEDDFNDWCQQVKKLSLLGGALPMFELVELQPSHLACPDVLNLSLDSSDVERLERFFDSEDEDFEILSL

SEQ ID NO: 8034 - protein, 331 aa, Homo sapiens
  Payload ID: 1673;
  Gene Symbol: ATG4B;
  Gene Name: autophagy related 4B, cysteine peptidase;
  Uniprot ID:  Q9Y4P1;
  ENSP ID: ENSP00000384661
MLRCGQMIFAQALVCRHLGRDWRWTQRKRQPDSYFSVLNAFIDRKDSYYSIHQIAQMGVGEGKSIGQWYGPNTVAQVLKKLAVFDTWSSLAVHIAMDNTVVMEEIRRLCRTSVPCAGATAFPADSDRHCNGFPAGAEVTNRPSPWRPLVLLIPLRLGLTDINEAYVETLKHCFMMPQSLGVIGGKPNSAHYFIGYVGEELIYLDPHTTQPAVEPTDGCFIPDESFHCQHPPCRMSIAELDPSIAVGFFCKTEDDFNDWCQQVKKLSLLGGALPMFELVELQPSHLACPDVLNLSLGESCQVQVGSLGDSSDVERLERFFDSEDEDFEILSL

SEQ ID NO: 8035 - protein, 88 aa, Homo sapiens; identical to SEQ ID NO: 8031
  Payload ID: 1673;
  Gene Symbol: ATG4B;
  Gene Name: autophagy related 4B, cysteine peptidase;
  ENSP ID: ENSP00000390597

SEQ ID NO: 8036 - protein, 66 aa, Homo sapiens
  Payload ID: 1673;
  Gene Symbol: ATG4B;
  Gene Name: autophagy related 4B, cysteine peptidase;
  ENSP ID: ENSP00000400050
MLRCGQMIFAQALVCRHLGRDWRWTQRKRQPDSYFSVLNAFIDRKDSYYSIHQIAQMGVGEGKSIG

SEQ ID NO: 8037 - protein, 193 aa, Homo sapiens
  Payload ID: 1673;
  Gene Symbol: ATG4B;
  Gene Name: autophagy related 4B, cysteine peptidase;
  ENSP ID: ENSP00000404783
TFAQVCLVSESMSPFLGRLCRTSVPCAGATAFPADSDRHCNGFPAGAEVTNRPSPWRPLVLLIPLRLGLTDINEAYVETLKHCFMMPQSLGVIGGKPNSAHYFIGYVGEELIYLDPHTTQPAVEPTDGCFIPDESFHCQHPPCRMSIAELDPSIAVGFFCKTEDDFNDWCQQVKKLSLLGGALPMFELVELQP

SEQ ID NO: 8038 - protein, 105 aa, Homo sapiens
  Payload ID: 1673;
  Gene Symbol: ATG4B;
  Gene Name: autophagy related 4B, cysteine peptidase;
  ENSP ID: ENSP00000407389
MLRCGQMIFAQALVCRHLGRDWRWTQRKRQPDSYFSVLNAFIDRKDSYYSIHQIAQMGVGEGKSIGQWYGPNTVAQVLKKLAVFDTWSSLAVHIAMDNTVVMEEI

SEQ ID NO: 8039 - protein, 266 aa, Homo sapiens
  Payload ID: 1673;
  Gene Symbol: ATG4B;
  Gene Name: autophagy related 4B, cysteine peptidase;
  ENSP ID: ENSP00000409895
MDAATLTYDTLRFAEFEDFPETSEPVWILGRKYSIFTEKDEILSDVASRLWFTYRKNFPAIGGTGPTSDTGWGCMLRCGQMIFAQALVCRHLGRDWRWTQRKRQPDSYFSVLNAFIDRKDSYYSIHQIAQMGVGEGKSIGQWYGPNTVAQVLKKLAVFDTWSSLAVHIAMDNTVVMEEISKWLRVSMDKKVEITGNIHTSSPESPREPRRVLSVAPCRAGAPWGLCAKPDARWPRSPIPAVIPREESPGCLEAATWYLTSCFVSWL

SEQ ID NO: 8040 - protein, 147 aa, Homo sapiens
  Payload ID: 1673;
  Gene Symbol: ATG4B;
  Gene Name: autophagy related 4B, cysteine peptidase;
  ENSP ID: ENSP00000410526
MLRCGQMIFAQALVCRHLGRDWRWTQRKRQPDSYFSVLNAFIDRKDSYYSIHQIAQMGVGEGKSIGQWYGPNTVAQVLKKLAVFDTWSSLAVHIAMDNTVVMEEIRRLCRTSVPCAGATAFPADSDRHCNGFPAGAEVTNRPSPWRP

SEQ ID NO: 8041 - protein, 88 aa, Homo sapiens; identical to SEQ ID NO: 8031
  Payload ID: 1673;
  Gene Symbol: ATG4B;
  Gene Name: autophagy related 4B, cysteine peptidase;
  ENSP ID: ENSP00000487133

SEQ ID NO: 8042 - protein, 458 aa, Homo sapiens
  Payload ID: 1674;
  Gene Symbol: ATG4C;
  Gene Name: autophagy related 4C, cysteine peptidase;
  Uniprot ID:  Q96DT6;
  ENSP ID: ENSP00000322159
MEATGTDEVDKLKTKFISAWNNMKYSWVLKTKTYFSRNSPVLLLGKCYHFKYEDEDKTLPAESGCTIEDHVIAGNVEEFRKDFISRIWLTYREEFPQIEGSALTTDCGWGCTLRTGQMLLAQGLILHFLGRAWTWPDALNIENSDSESWTSHTVKKFTASFEASLSGEREFKTPTISLKETIGKYSDDHEMRNEVYHRKIISWFGDSPLALFGLHQLIEYGKKSGKKAGDWYGPAVVAHILRKAVEEARHPDLQGITIYVAQDCTVYNSDVIDKQSASMTSDNADDKAVIILVPVRLGGERTNTDYLEFVKGILSLEYCVGIIGGKPKQSYYFAGFQDDSLIYMDPHYCQSFVDVSIKDFPLETFHCPSPKKMSFRKMDPSCTIGFYCRNVQDFKRASEEITKMLKFSSKEKYPLFTFVNGHSRDYDFTSTTTNEEDLFSEDEKKQLKRFSTEEFVLL

SEQ ID NO: 8043 - protein, 189 aa, Homo sapiens
  Payload ID: 1674;
  Gene Symbol: ATG4C;
  Gene Name: autophagy related 4C, cysteine peptidase;
  ENSP ID: ENSP00000360159
MEATGTDEVDKLKTKFISAWNNMKYSWVLKTKTYFSRNSPVLLLGKCYHFKYEDEDKTLPAESGCTIEDHVIAGNVEEFRKDFISRIWLTYREEFPQIEGSALTTDCGWGCTLRTGQMLLAQGLILHFLGRAWTWPDALNIENSDSESWTSHTVKKFTASFEASLSGEREFKTPTISLKETIGKYSDDH

SEQ ID NO: 8044 - protein, 458 aa, Homo sapiens; identical to SEQ ID NO: 8042
  Payload ID: 1674;
  Gene Symbol: ATG4C;
  Gene Name: autophagy related 4C, cysteine peptidase;
  Uniprot ID:  Q96DT6;
  ENSP ID: ENSP00000360161

SEQ ID NO: 8045 - protein, 110 aa, Homo sapiens
  Payload ID: 1674;
  Gene Symbol: ATG4C;
  Gene Name: autophagy related 4C, cysteine peptidase;
  ENSP ID: ENSP00000391820
  MOD_RES (1)..(1): Any amino acid
XIYVAQDCTVYNSDVIDKQSASMTSDNADDKAVIILVPVRLGGERTNTDYLEFVKGILSLEYCVGIIGGKPKQSYYFAGFQDDSLIYMDPHYCQSFVDVSIKDFPLEVIL

SEQ ID NO: 8046 - protein, 151 aa, Homo sapiens
  Payload ID: 1674;
  Gene Symbol: ATG4C;
  Gene Name: autophagy related 4C, cysteine peptidase;
  ENSP ID: ENSP00000396614
MEATGTDEVDKLKTKFISAWNNMKYSWVLKTKTYFSRNSPVLLLGKCYHFKYEDEDKTLPAESGCTIEDHVIAGNVEEFRKDFISRIWLTYREEFPQIEGSALTTDCGWGCTLRTGQMLLAQGLILHFLGRAWTWPDALNIENSDSESWTS

SEQ ID NO: 8047 - protein, 474 aa, Homo sapiens
  Payload ID: 1675;
  Gene Symbol: ATG4D;
  Gene Name: autophagy related 4D, cysteine peptidase;
  Uniprot ID:  Q86TL0;
  ENSP ID: ENSP00000311318
MNSVSPAAAQYRSSSPEDARRRPEARRPRGPRGPDPNGLGPSGASGPALGSPGAGPSEPDEVDKFKAKFLTAWNNVKYGWVVKSRTSFSKISSIHLCGRRYRFEGEGDIQRFQRDFVSRLWLTYRRDFPPLPGGCLTSDCGWGCMLRSGQMMLAQGLLLHFLPRDWTWAEGMGLGPPELSGSASPSRYHGPARWMPPRWAQGAPELEQERRHRQIVSWFADHPRAPFGLHRLVELGQSSGKKAGDWYGPSLVAHILRKAVESCSDVTRLVVYVSQDCTVYKADVARLVARPDPTAEWKSVVILVPVRLGGETLNPVYVPCVKELLRCELCLGIMGGKPRHSLYFIGYQDDFLLYLDPHYCQPTVDVSQADFPLESFHCTSPRKMAFAKMDPSCTVGFYAGDRKEFETLCSELTRVLSSSSATERYPMFTLAEGHAQDHSLDDLCSQLAQPTLRLPRTGRLLRAKRPSSEDFVFL

SEQ ID NO: 8048 - protein, 177 aa, Homo sapiens
  Payload ID: 1675;
  Gene Symbol: ATG4D;
  Gene Name: autophagy related 4D, cysteine peptidase;
  ENSP ID: ENSP00000465089
  MOD_RES (1)..(1): Any amino acid
XNNVKYGWVVKSRTSFSKISSIHLCGRRYRFEGEGDIQRFQRDFVSRLWLTYRRDFPPLPGGCLTSDCGWGCMLRSGQMMLAQGLLLHFLPRVYKADVARLVARPDPTAEWKSVVILVPVRLGGETLNPVYVPCVKELLRCELCLGIMGGKPRHSLYFIGYQGRPTPSSLLPPPTAP

SEQ ID NO: 8049 - protein, 120 aa, Homo sapiens
  Payload ID: 1675;
  Gene Symbol: ATG4D;
  Gene Name: autophagy related 4D, cysteine peptidase;
  ENSP ID: ENSP00000465716
MNSVSPAAAQYRSSSPEDARRRPEARRPRGPRGPDPNGLGPSGASGPALGSPGAGPSEPDEVDKFKAKFLTAWNNVKYGWVVKSRTSFSKISSIHLCGRRYRFEGEGDIQRFQRDFVSRL

SEQ ID NO: 8050 - protein, 67 aa, Homo sapiens
  Payload ID: 1675;
  Gene Symbol: ATG4D;
  Gene Name: autophagy related 4D, cysteine peptidase;
  ENSP ID: ENSP00000466439
RRDFPPLPGGCLTSDCGWGCMLRSGQMMLAQGLLLHFLPRGTPALRAVPGHHGWETATLTVLHWLPR

SEQ ID NO: 8051 - protein, 177 aa, Homo sapiens
  Payload ID: 1675;
  Gene Symbol: ATG4D;
  Gene Name: autophagy related 4D, cysteine peptidase;
  ENSP ID: ENSP00000466759
VKELLRCELCLGIMGGKPRHSLYFIGYQGRPTPSSLLPPPTAPPLTPAPPADDFLLYLDPHYCQPTVDVSQADFPLESFHCTSPRKMAFAKMDPSCTVGFYAGDRKEFETLCSELTRVLSSSSATERYPMFTLAEGHAQDHSLDDLCSQLAQPTLRLPRTGRLLRAKRPSSEDFVFL

SEQ ID NO: 8052 - protein, 209 aa, Homo sapiens
  Payload ID: 1675;
  Gene Symbol: ATG4D;
  Gene Name: autophagy related 4D, cysteine peptidase;
  ENSP ID: ENSP00000467223
FKAKFLTAWNNVKYGWVVKSRTSFSKISSIHLCGRRYRFEGEGELVVGTRAGGGLSTPAGVSLVAADRPALVGDIQRFQRDFVSRLWLTYRRDFPPLPGGCLTSDCGWGCMLRSGQMMLAQGLLLHFLPRDWTWAEGMGLGPPELSGSASPSRYHGPARWMPPRWAQGAPELEQERRHRQIVSWFADHPRAPFGLHRLVELGQSSGKKA

SEQ ID NO: 8053 - protein, 228 aa, Homo sapiens
  Payload ID: 1675;
  Gene Symbol: ATG4D;
  Gene Name: autophagy related 4D, cysteine peptidase;
  ENSP ID: ENSP00000467407
MNSVSPAAAQYRSSSPEDARRRPEARRPRGPRGPDPNGLGPSGASGPALGSPGAGPSEPDEVDKFKAKFLTAWNNVKYGWVVKSRTSFSKISSIHLCGRRYRFEGEGDIQRFQRDFVSRLWLTYRRDFPPLPGGCLTSDCGWGCMLRSGQMMLAQGLLLHFLPRGKPWRAAPTSPAWWCTFLRTAQCTRRMWHAWWPGQTPQPSGSLWSSWCPCDWVARLSTPCMCPA

SEQ ID NO: 8054 - protein, 99 aa, Homo sapiens
  Payload ID: 1675;
  Gene Symbol: ATG4D;
  Gene Name: autophagy related 4D, cysteine peptidase;
  ENSP ID: ENSP00000467694
GKPRHSLYFIGYQDDFLLYLDPHYCQPTVDVSQADFPLEVLSSSSATERYPMFTLAEGHAQDHSLDDLCSQLAQPTLRLPRTGRLLRAKRPSSEDFVFL

SEQ ID NO: 8055 - protein, 160 aa, Homo sapiens
  Payload ID: 1675;
  Gene Symbol: ATG4D;
  Gene Name: autophagy related 4D, cysteine peptidase;
  ENSP ID: ENSP00000467906
MNSVSPAAAQYRSSSPEDARRRPEARRPRGPRGPDPNGLGPSGASGPALGSPGAGPSEPDEVDKFKAKFLTAWNNVKYDGGMEALLLSCKCFISLGAAPTSPQVGWLKAGPALARSPASTSVAAATVSRARVTYSVSSGTLCPACGSHTAGTSRPFLGAA

SEQ ID NO: 8056 - protein, 334 aa, Homo sapiens
  Payload ID: 1675;
  Gene Symbol: ATG4D;
  Gene Name: autophagy related 4D, cysteine peptidase;
  ENSP ID: ENSP00000468290
MNSVSPAAAQYRSSSPEDARRRPEARRPRGPRGPDPNGLGPSGASGPALGSPGAGPSEPDEVDKFKAKFLTAWNNVKYGWVVKSRTSFSKISSIHLCGRRYRFEGEGDIQRFQRDFVSRLWLTYRRDFPPLPGGCLTSDCGWGCMLRSGQMMLAQGLLLHFLPRDWTWAEGMGLGPPELSGSASPSRYHGPARWMPPRWAQGAPELEQERRHRQIVSWFADHPRAPFGLHRLVELGQSSGKKESRGELLRRHPPGGVRFSGLHSVQGGCGTPGGQARPHSRVEVCGHPGARATGWRDSQPRVCALREGTPALRAVPGHHGWETATLTVLHWLPR

SEQ ID NO: 8057 - protein, 203 aa, Homo sapiens
  Payload ID: 1675;
  Gene Symbol: ATG4D;
  Gene Name: autophagy related 4D, cysteine peptidase;
  ENSP ID: ENSP00000468780
  MOD_RES (1)..(1): Any amino acid
XLPRDWTWAEGMGLGPPELSGSASPSRYHGPARWMPPRWAQGAPELEQERRHRQIVSWFADHPRAPFGLHRLVELGQSSGKKAGDWKAVESCSDVTRLVVYVSQDCTVYKADVARLVARPDPTAEWKSVVILVPVRLGGETLNPVYVPCVKELLRCELCLGIMGGKPRHSLYFIGYQDDFLLYLDPHYCQPTVDVSQADFPLE

SEQ ID NO: 8058 - protein, 275 aa, Homo sapiens
  Payload ID: 1676;
  Gene Symbol: ATG5;
  Gene Name: autophagy related 5;
  Uniprot ID:  Q9H1Y0;
  ENSP ID: ENSP00000343313
MTDDKDVLRDVWFGRIPTCFTLYQDEITEREAEPYYLLLPRVSYLTLVTDKVKKHFQKVMRQEDISEIWFEYEGTPLKWHYPIGLLFDLLASSSALPWNITVHFKSFPEKDLLHCPSKDAIEAHFMSCMKEADALKHKSQVINEMQKKDHKQLWMGLQNDRFDQFWAINRKLMEYPAEENGFRYIPFRIYQTTTERPFIQKLFRPVAADGQLHTLGDLLKEVCPSAIDPEDGEKKNQVMIHGIEPMLETPLQWLSEHLSYPDNFLHISIIPQPTD

SEQ ID NO: 8059 - protein, 91 aa, Homo sapiens
  Payload ID: 1676;
  Gene Symbol: ATG5;
  Gene Name: autophagy related 5;
  ENSP ID: ENSP00000353884
MTDDKDVLRDVWFGRIPTCFTLYQDEITEREAEPYYTDLTSFGPSIGNSWNILQKKMDFVISPLEYIRQRLKDLSFRSCFVLWLQMDSCTH

SEQ ID NO: 8060 - protein, 197 aa, Homo sapiens
  Payload ID: 1676;
  Gene Symbol: ATG5;
  Gene Name: autophagy related 5;
  Uniprot ID:  Q9H1Y0;
  ENSP ID: ENSP00000358066
MHYPIGLLFDLLASSSALPWNITVHFKSFPEKDLLHCPSKDAIEAHFMSCMKEADALKHKSQVINEMQKKDHKQLWMGLQNDRFDQFWAINRKLMEYPAEENGFRYIPFRIYQTTTERPFIQKLFRPVAADGQLHTLGDLLKEVCPSAIDPEDGEKKNQVMIHGIEPMLETPLQWLSEHLSYPDNFLHISIIPQPTD

SEQ ID NO: 8061 - protein, 275 aa, Homo sapiens; identical to SEQ ID NO: 8058
  Payload ID: 1676;
  Gene Symbol: ATG5;
  Gene Name: autophagy related 5;
  Uniprot ID:  Q9H1Y0;
  ENSP ID: ENSP00000358072

SEQ ID NO: 8062 - protein, 162 aa, Homo sapiens
  Payload ID: 1676;
  Gene Symbol: ATG5;
  Gene Name: autophagy related 5;
  ENSP ID: ENSP00000483135
MTDDKDVLRDVWFGRIPTCFTLYQDEITEREAEPYYLLLPRVSYLTLVTDKVKKHFQKVMRQEDISEIWFEYEGTPLKWHYPIGLLFDLLASSSALPWNITVHFKSFPEKDLLHCPSKDAIEAHFMSCMKEADALKHKSQVINEMQKKDHKQLWMGLQNDND

SEQ ID NO: 8063 - protein, 703 aa, Homo sapiens
  Payload ID: 1677;
  Gene Symbol: ATG7;
  Gene Name: autophagy related 7;
  Uniprot ID:  O95352;
  ENSP ID: ENSP00000346437
MAAATGDPGLSKLQFAPFSSALDVGFWHELTQKKLNEYRLDEAPKDIKGYYYNGDSAGLPARLTLEFSAFDMSAPTPARCCPAIGTLYNTNTLESFKTADKKLLLEQAANEIWESIKSGTALENPVLLNKFLLLTFADLKKYHFYYWFCYPALCLPESLPLIQGPVGLDQRFSLKQIEALECAYDNLCQTEGVTALPYFLIKYDENMVLVSLLKHYSDFFQGQRTKITIGVYDPCNLAQYPGWPLRNFLVLAAHRWSSSFQSVEVVCFRDRTMQGARDVAHSIIFEVKLPEMAFSPDCPKAVGWEKNQKGGMGPRMVNLSECMDPKRLAESSVDLNLKLMCWRLVPTLDLDKVVSVKCLLLGAGTLGCNVARTLMGWGVRHITFVDNAKISYSNPVRQPLYEFEDCLGGGKPKALAAADRLQKIFPGVNARGFNMSIPMPGHPVNFSSVTLEQARRDVEQLEQLIESHDVVFLLMDTRESRWLPAVIAASKRKLVINAALGFDTFVVMRHGLKKPKQQGAGDLCPNHPVASADLLGSSLFANIPGYKLGCYFCNDVVAPGDSTRDRTLDQQCTVSRPGLAVIAGALAVELMVSVLQHPEGGYAIASSSDDRMNEPPTSLGLVPHQIRGFLSRFDNVLPVSLAFDKCTACSSKVLDQYEREGFNFLAKVFNSSHSFLEDLTGLTLLHQETQAAEIWDMSDDETI

SEQ ID NO: 8064 - protein, 676 aa, Homo sapiens
  Payload ID: 1677;
  Gene Symbol: ATG7;
  Gene Name: autophagy related 7;
  Uniprot ID:  O95352;
  ENSP ID: ENSP00000347042
MAAATGDPGLSKLQFAPFSSALDVGFWHELTQKKLNEYRLDEAPKDIKGYYYNGDSAGLPARLTLEFSAFDMSAPTPARCCPAIGTLYNTNTLESFKTADKKLLLEQAANEIWESIKSGTALENPVLLNKFLLLTFADLKKYHFYYWFCYPALCLPESLPLIQGPVGLDQRFSLKQIEALECAYDNLCQTEGVTALPYFLIKYDENMVLVSLLKHYSDFFQGQRTKITIGVYDPCNLAQYPGWPLRNFLVLAAHRWSSSFQSVEVVCFRDRTMQGARDVAHSIIFEVKLPEMAFSPDCPKAVGWEKNQKGGMGPRMVNLSECMDPKRLAESSVDLNLKLMCWRLVPTLDLDKVVSVKCLLLGAGTLGCNVARTLMGWGVRHITFVDNAKISYSNPVRQPLYEFEDCLGGGKPKALAAADRLQKIFPGVNARGFNMSIPMPGHPVNFSSVTLEQARRDVEQLEQLIESHDVVFLLMDTRESRWLPAVIAASKRKLVINAALGFDTFVVMRHGLKKPKQQGAGDLCPNHPVASADLLGSSLFANIPGYKLGCYFCNDVVAPGDSTRDRTLDQQCTVSRPGLAVIAGALAVELMVSVLQHPEGGYAIASSSDDRMNEPPTSLGLVPHQVLDQYEREGFNFLAKVFNSSHSFLEDLTGLTLLHQETQAAEIWDMSDDETI

SEQ ID NO: 8065 - protein, 96 aa, Homo sapiens
  Payload ID: 1677;
  Gene Symbol: ATG7;
  Gene Name: autophagy related 7;
  ENSP ID: ENSP00000388295
  MOD_RES (1)..(1): Any amino acid
XGYAIASSSDDRMNEPPTSLGLVPHQIRGFLSRFDNVLPVSLAFDKCTACSSKVLDQYEREGFNFLAKVFNSSHSFLEDLTGLTLLHQETQAAEHL

SEQ ID NO: 8066 - protein, 76 aa, Homo sapiens
  Payload ID: 1677;
  Gene Symbol: ATG7;
  Gene Name: autophagy related 7;
  ENSP ID: ENSP00000389012
MAAATGDPGLSKLQFAPFSSALDVGFWHELTQKKLNEYRLDEAPKDIKGYYYNGDSAGLPARLTLEFSAFDIYGNP

SEQ ID NO: 8067 - protein, 93 aa, Homo sapiens
  Payload ID: 1677;
  Gene Symbol: ATG7;
  Gene Name: autophagy related 7;
  ENSP ID: ENSP00000389996
MAAATGDPGLSKLQFAPFSSALDVGFWHELTQKKLNEYRLDEAPKDIKGYYYNGDSAGLPARLTLEFSAFDMSAPTPARCCPAIGTLYNTNTL

SEQ ID NO: 8068 - protein, 66 aa, Homo sapiens
  Payload ID: 1677;
  Gene Symbol: ATG7;
  Gene Name: autophagy related 7;
  ENSP ID: ENSP00000390547
MAAATGDPGLSKLQFAPFSSALDVGFWHELTQKKLNEYRLDEAPKDIKGYYYNGDSAGLPARLTLE

SEQ ID NO: 8069 - protein, 105 aa, Homo sapiens
  Payload ID: 1677;
  Gene Symbol: ATG7;
  Gene Name: autophagy related 7;
  ENSP ID: ENSP00000393075
PALCLPESLPLIQGPVGLDQRFSLKQIEALECAYDNLCQTEGVTALPYFLIKYDENMVLVSLLKHYSDFFQGQRTKITIGVYDPCNLAQYPGWPLRNFLVLAAHR

SEQ ID NO: 8070 - protein, 139 aa, Homo sapiens
  Payload ID: 1677;
  Gene Symbol: ATG7;
  Gene Name: autophagy related 7;
  ENSP ID: ENSP00000406398
  MOD_RES (1)..(1): Any amino acid
XGYAIASSSDDRMNEPPTSLGLVPHQIRGFLSRFDNVLPVSLAFDKCTACSSKVLDQYEREGFNFLAKVFNSSHSFLEDLTGLTLLHQETQAAEDHLSFIRPKNGTFPAHQATCTQESAACPEIDLYQLSSRTIPCIHT

SEQ ID NO: 8071 - protein, 95 aa, Homo sapiens
  Payload ID: 1677;
  Gene Symbol: ATG7;
  Gene Name: autophagy related 7;
  ENSP ID: ENSP00000407340
RGYAIASSSDDRMNEPPTSLGLVPHQIRGFLSRFDNVLPVSLAFDKCTACSSKVLDQYEREGFNFLAKVFNSSHSFLEDLTGLTLLHQETQAAEH

SEQ ID NO: 8072 - protein, 89 aa, Homo sapiens
  Payload ID: 1677;
  Gene Symbol: ATG7;
  Gene Name: autophagy related 7;
  ENSP ID: ENSP00000408303
MAAATGDPGLSKLQFAPFSSALDVGFWHELTQKKLNEYRLDEAPKDIKGYYYNGDSAGLPARLTLEFSAFDMSAPTPARCCPAIGTLYN

SEQ ID NO: 8073 - protein, 77 aa, Homo sapiens
  Payload ID: 1677;
  Gene Symbol: ATG7;
  Gene Name: autophagy related 7;
  ENSP ID: ENSP00000409844
  MOD_RES (1)..(1): Any amino acid
XALENPVLLNKFLLLTFADLKKYHFYYWFCYPALCLPESLPLIQGPVGLDQRFSLKQIVLKQLDGKRTRKEAWDQGW

SEQ ID NO: 8074 - protein, 152 aa, Homo sapiens
  Payload ID: 1677;
  Gene Symbol: ATG7;
  Gene Name: autophagy related 7;
  ENSP ID: ENSP00000411880
MAAATGDPGLSKLQFAPFSSALDVGFWHELTQKKLNEYRLDEAPKDIKGYYYNGDSAGLPARLTLEFSAFDMSAPTPARCCPAIGTLYNTNTLESFKTADKKLLLEQAANEIWESIKSGTALENPVLLNKFLLLTFAIEALECAYDNLCQTE

SEQ ID NO: 8075 - protein, 623 aa, Homo sapiens
  Payload ID: 1677;
  Gene Symbol: ATG7;
  Gene Name: autophagy related 7;
  Uniprot ID:  O95352;
  ENSP ID: ENSP00000412580
MAAATGDPGLSKLQFAPFSSALDVGFWHELTQKKLNEYRLDEAPKDIKGYYYNGDSAGLPARLTLEFSAFDMSAPTPARCCPAIGTLYNTNTLESFKTADKKLLLEQAANEIWESIKSGTALENPVLLNKFLLLTFAIEALECAYDNLCQTEGVTALPYFLIKYDENMVLVSLLKHYSDFFQGQRTKITIGVYDPCNLAQYPGWPLRNFLVLAAHRWSSSFQSVEVVCFRDRTMQGARDVAHSIIFEVKLPEMAFSPDCPKAVGWEKNQKGGMGPRMVNLSECMDPKRLAESSVDLNLKLMCWRLVPTLDLDKVVSVKCLLLGAGTLGCNVARTLMGWGVRHITFVDNAKISYSNPVRQPLYEFEDCLGGGKPKALAAADRLQKIFPGVNARGFNMSIPMPGHPVNFSSVTLEQARRDVEQLEQLIESHDVVFLLMDTRESRWLPAVIAASKRKLVINAALGFDTFVVMRHGLKKPKQQGAGDLCPNHPVASADLLGSSLFANIPGYKLGCYFCNDVVAPGDSTRDRTLDQQCTVSRPGLAVIAGALAVELMVSVLQHPEGGYAIASSSDDRMNEPPTSLGLVPHQIRGFLSRFDNVLPVSLAFDKCTACSSKIWDMSDDETI

SEQ ID NO: 8076 - protein, 176 aa, Homo sapiens
  Payload ID: 1677;
  Gene Symbol: ATG7;
  Gene Name: autophagy related 7;
  ENSP ID: ENSP00000415223
MAAATGDPGLSKLQFAPFSSALDVGFWHELTQKKLNEYRLDEAPKDIKGYYYNGDSAGLPARLTLEFSAFDMSAPTPARCCPAIGTLYNTNTLESFKTADKKLLLEQAANEIWESIKSGTALENPVLLNKFLLLTFADLKKYHFYYWFCYPALCLPESLPLIQGPVGLDQRFSLKQ

SEQ ID NO: 8077 - protein, 126 aa, Homo sapiens
  Payload ID: 1677;
  Gene Symbol: ATG7;
  Gene Name: autophagy related 7;
  ENSP ID: ENSP00000416644
MAAATGDPGLSKLQFAPFSSALDVGFWHELTQKKLNEYRLDEAPKDIKGYYYNGDSAGLPARLTLEFSAFDMSAPTPARCCPAIGTLYNTNTLESFKTADKKLLLEQAANEIWESIKSGTALENPV

SEQ ID NO: 8078 - protein, 839 aa, Homo sapiens
  Payload ID: 1678;
  Gene Symbol: ATG9A;
  Gene Name: autophagy related 9A;
  Uniprot ID:  Q7Z3C6;
  ENSP ID: ENSP00000355173
MAQFDTEYQRLEASYSDSPPGEEDLLVHVAEGSKSPWHHIENLDLFFSRVYNLHQKNGFTCMLIGEIFELMQFLFVVAFTTFLVSCVDYDILFANKMVNHSLHPTEPVKVTLPDAFLPAQVCSARIQENGSLITILVIAGVFWIHRLIKFIYNICCYWEIHSFYLHALRIPMSALPYCTWQEVQARIVQTQKEHQICIHKRELTELDIYHRILRFQNYMVALVNKSLLPLRFRLPGLGEAVFFTRGLKYNFELILFWGPGSLFLNEWSLKAEYKRGGQRLELAQRLSNRILWIGIANFLLCPLILIWQILYAFFSYAEVLKREPGALGARCWSLYGRCYLRHFNELEHELQSRLNRGYKPASKYMNCFLSPLLTLLAKNGAFFAGSILAVLIALTIYDEDVLAVEHVLTTVTLLGVTVTVCRSFIPDQHMVFCPEQLLRVILAHIHYMPDHWQGNAHRSQTRDEFAQLFQYKAVFILEELLSPIVTPLILIFCLRPRALEIIDFFRNFTVEVVGVGDTCSFAQMDVRQHGHPQWLSAGQTEASVYQQAEDGKTELSLMHFAITNPGWQPPRESTAFLGFLKEQVQRDGAAASLAQGGLLPENALFTSIQSLQSESEPLSLIANVVAGSSCRGPPLPRDLQGSRHRAEVASALRSFSPLQPGQAPTGRAHSTMTGSGVDARTASSGSSVWEGQLQSLVLSEYASTEMSLHALYMHQLHKQQAQAEPERHVWHRRESDESGESAPDEGGEGARAPQSIPRSASYPCAAPRPGAPETTALHGGFQRRYGGITDPGTVPRVPSHFSRLPLGGWAEDGQSASRHPEPVPEEGSEDELPPQVHKV

SEQ ID NO: 8079 - protein, 839 aa, Homo sapiens; identical to SEQ ID NO: 8078
  Payload ID: 1678;
  Gene Symbol: ATG9A;
  Gene Name: autophagy related 9A;
  Uniprot ID:  Q7Z3C6;
  ENSP ID: ENSP00000379983

SEQ ID NO: 8080 - protein, 528 aa, Homo sapiens
  Payload ID: 1678;
  Gene Symbol: ATG9A;
  Gene Name: autophagy related 9A;
  Uniprot ID:  Q7Z3C6;
  ENSP ID: ENSP00000386482
MAQFDTEYQRLEASYSDSPPGEEDLLVHVAEGSKSPWHHIENLDLFFSRVYNLHQKNGFTCMLIGEIFELMQFLFVVAFTTFLVSCVDYDILFANKMVNHSLHPTEPVKVTLPDAFLPAQVCSARIQENGSLITILVIAGVFWIHRLIKFIYNICCYWEIHSFYLHALRIPMSALPYCTWQEVQARIVQTQKEHQICIHKRELTELDIYHRILRFQNYMVALVNKSLLPLRFRLPGLGEAVFFTRGLKYNFELILFWGPGSLFLNEWSLKAEYKRGGQRLELAQRLSNRILWIGIANFLLCPLILIWQILYAFFSYAEVLKREPGALGARCWSLYGRCYLRHFNELEHELQSRLNRGYKPASKYMNCFLSPLLTLLAKNGAFFAGSILAVLIALTIYDEDVLAVEHVLTTVTLLGVTVTVCRSFIPDQHMVFCPEQLLRVILAHIHYMPDHWQGVHFGRVAEPHCHTPHPHLLPAPTGPGDYRLLPKLHRGGRWCGRYLLLCSDGCSPAWSSPVAICWADRGLSVPAS

SEQ ID NO: 8081 - protein, 778 aa, Homo sapiens
  Payload ID: 1678;
  Gene Symbol: ATG9A;
  Gene Name: autophagy related 9A;
  Uniprot ID:  Q7Z3C6;
  ENSP ID: ENSP00000386535
MLIGEIFELMQFLFVVAFTTFLVSCVDYDILFANKMVNHSLHPTEPVKVTLPDAFLPAQVCSARIQENGSLITILVIAGVFWIHRLIKFIYNICCYWEIHSFYLHALRIPMSALPYCTWQEVQARIVQTQKEHQICIHKRELTELDIYHRILRFQNYMVALVNKSLLPLRFRLPGLGEAVFFTRGLKYNFELILFWGPGSLFLNEWSLKAEYKRGGQRLELAQRLSNRILWIGIANFLLCPLILIWQILYAFFSYAEVLKREPGALGARCWSLYGRCYLRHFNELEHELQSRLNRGYKPASKYMNCFLSPLLTLLAKNGAFFAGSILAVLIALTIYDEDVLAVEHVLTTVTLLGVTVTVCRSFIPDQHMVFCPEQLLRVILAHIHYMPDHWQGNAHRSQTRDEFAQLFQYKAVFILEELLSPIVTPLILIFCLRPRALEIIDFFRNFTVEVVGVGDTCSFAQMDVRQHGHPQWLSAGQTEASVYQQAEDGKTELSLMHFAITNPGWQPPRESTAFLGFLKEQVQRDGAAASLAQGGLLPENALFTSIQSLQSESEPLSLIANVVAGSSCRGPPLPRDLQGSRHRAEVASALRSFSPLQPGQAPTGRAHSTMTGSGVDARTASSGSSVWEGQLQSLVLSEYASTEMSLHALYMHQLHKQQAQAEPERHVWHRRESDESGESAPDEGGEGARAPQSIPRSASYPCAAPRPGAPETTALHGGFQRRYGGITDPGTVPRVPSHFSRLPLGGWAEDGQSASRHPEPVPEEGSEDELPPQVHKV

SEQ ID NO: 8082 - protein, 839 aa, Homo sapiens; identical to SEQ ID NO: 8078
  Payload ID: 1678;
  Gene Symbol: ATG9A;
  Gene Name: autophagy related 9A;
  Uniprot ID:  Q7Z3C6;
  ENSP ID: ENSP00000386710

SEQ ID NO: 8083 - protein, 98 aa, Homo sapiens
  Payload ID: 1678;
  Gene Symbol: ATG9A;
  Gene Name: autophagy related 9A;
  ENSP ID: ENSP00000390704
MAQFDTEYQRLEASYSDSPPGEEDLLVHVAEGSKSPWHHIENLDLFFSRTFIICTRRMASHVCSSGRSLSSCSSSLWLPSLPSWSAAWTMTSYLPTRW

SEQ ID NO: 8084 - protein, 98 aa, Homo sapiens; identical to SEQ ID NO: 8083
  Payload ID: 1678;
  Gene Symbol: ATG9A;
  Gene Name: autophagy related 9A;
  ENSP ID: ENSP00000393708

SEQ ID NO: 8085 - protein, 93 aa, Homo sapiens
  Payload ID: 1678;
  Gene Symbol: ATG9A;
  Gene Name: autophagy related 9A;
  ENSP ID: ENSP00000394345
MAQFDTEYQRLEASYSDSPPGEEDLLVHVAEGSKSPWHHIENLDLFFSRVYNLHQKNGFTCMLIGEIFELMQFLFVVAFTTFLVSCVDYDILF

SEQ ID NO: 8086 - protein, 133 aa, Homo sapiens
  Payload ID: 1678;
  Gene Symbol: ATG9A;
  Gene Name: autophagy related 9A;
  ENSP ID: ENSP00000396404
MVNHSLHPTEPVKVTLPDAFLPAQVCSARIQENGSLITILVIAGVFWIHRLIKFIYNICCYWEIHSFYLHALRIPMSALPYCTWQEVQARIVQTQKEHQICIHKRELTELDIYHRILRFQNYMVALVNKSLLP

SEQ ID NO: 8087 - protein, 255 aa, Homo sapiens
  Payload ID: 1678;
  Gene Symbol: ATG9A;
  Gene Name: autophagy related 9A;
  ENSP ID: ENSP00000398528
  MOD_RES (1)..(1): Any amino acid
XRDGAAASLAQGGLLPENALFTSIQSLQSESEPLSLIANVVAGSSCRGPPLPRDLQGSRHRAEVASALRSFSPLQPGQAPTGRAHSTMTGSGVDARTASSGSSVWEGQLQSLVLSEYASTEMSLHALYMHQLHKQQAQAEPERHVWHRRESDESGESAPDEGGEGARAPQSIPRSASYPCAAPRPGAPETTALHGGFQRRYGGITDPGTVPRVPSHFSRLPLGGWAEDGQSASRHPEPVPEEGSEDELPPQVHKV

SEQ ID NO: 8088 - protein, 244 aa, Homo sapiens
  Payload ID: 1678;
  Gene Symbol: ATG9A;
  Gene Name: autophagy related 9A;
  ENSP ID: ENSP00000400234
LAHIHYMPDHWQGNAHRSQTRDEFAQLFQYKAVFILEELLSPIVTPLILIFCLRPRALEIIDFFRNFTVEVVGVGDTCSFAQMDVRQHGHPQWLSAGQTEASVYQQAEDGKTELSLMHFAITNPGWQPPRESTAFLGFLKEQVQRDGAAASLAQGGLLPENALFTSIQSLQSESEPLSLIANVVAGSSCRGPPLPRDLQGSRHRAEVASALRSFSPLQPGQAPTGRAHSTMTGSGSTSSRPRLN

SEQ ID NO: 8089 - protein, 187 aa, Homo sapiens
  Payload ID: 1678;
  Gene Symbol: ATG9A;
  Gene Name: autophagy related 9A;
  ENSP ID: ENSP00000401530
MAQFDTEYQRLEASYSDSPPGEEDLLVHVAEGSKSPWHHIENLDLFFSRVYNLHQKNGFTCMLIGEIFELMQFLFVVAFTTFLVSCVDYDILFANKMVNHSLHPTEPVKVTLPDAFLPAQVCSARIQENGSLITILVIAGVFWIHRLIKFIYNICCYWEIHSFYLHALRIPMSALPYCTWQEVQARI

SEQ ID NO: 8090 - protein, 172 aa, Homo sapiens
  Payload ID: 1678;
  Gene Symbol: ATG9A;
  Gene Name: autophagy related 9A;
  ENSP ID: ENSP00000404750
MAQFDTEYQRLEASYSDSPPGEEDLLVHVAEGSKSPWHHIENLDLFFSRVYNLHQKNGFTCMLIGEIFELMQFLFVVAFTTFLVSCVDYDILFANKMVNHSLHPTEPVKVTLPDAFLPAQVCSARIQENGSLITILVIAGVFWIHRLIKFIYNICCYWEIHSFYLHALRIPM

SEQ ID NO: 8091 - protein, 144 aa, Homo sapiens
  Payload ID: 1678;
  Gene Symbol: ATG9A;
  Gene Name: autophagy related 9A;
  ENSP ID: ENSP00000406785
MAQFDTEYQRLEASYSDSPPGEEDLLVHVAEGSKSPWHHIENLDLFFSRVYNLHQKNGFTCMLIGEIFELMQFLFVVAFTTFLVSCVDYDILFANKMVNHSLHPTEPVKVTLPDAFLPAQVCSARIQENGSLITILVIAGVFWI

SEQ ID NO: 8092 - protein, 169 aa, Homo sapiens
  Payload ID: 1678;
  Gene Symbol: ATG9A;
  Gene Name: autophagy related 9A;
  ENSP ID: ENSP00000409164
MAQFDTEYQRLEASYSDSPPGEEDLLVHVAEGSKSPWHHIENLDLFFSRVYNLHQKNGFTCMLIGEIFELMQFLFVVAFTTFLVSCVDYDILFANKMVNHSLHPTEPVKVTLPDAFLPAQVCSARIQENGSLITILVIAGVFWIHRLIKFIYNICCYWEIHSFYLHALR

SEQ ID NO: 8093 - protein, 131 aa, Homo sapiens
  Payload ID: 1678;
  Gene Symbol: ATG9A;
  Gene Name: autophagy related 9A;
  ENSP ID: ENSP00000413569
MAQFDTEYQRLEASYSDSPPGEEDLLVHVAEGSKSPWHHIENLDLFFSRVYNLHQKNGFTCMLIGEIFELMQFLFVVAFTTFLVSCVDYDILFANKMVNHSLHPTEPVKVTLPDAFLPAQVCSARIQENGS

SEQ ID NO: 8094 - protein, 97 aa, Homo sapiens
  Payload ID: 1678;
  Gene Symbol: ATG9A;
  Gene Name: autophagy related 9A;
  ENSP ID: ENSP00000416435
MAQFDTEYQRLEASYSDSPPGEEDLLVHVAEGSKSPWHHIENLDLFFSRVYNLHQKNGFTCMLIGEIFELMQFLFVVAFTTFLVSCVDYDILFANKM

SEQ ID NO: 8095 - protein, 924 aa, Homo sapiens
  Payload ID: 1679;
  Gene Symbol: ATG9B;
  Gene Name: autophagy related 9B;
  Uniprot ID:  Q674R7;
  ENSP ID: ENSP00000475737
MVSRMGWGGRRRRLGRWGDLGPGSVPLLPMPLPPPPPPSCRGPGGGRISIFSLSPAPHTRSSPSSFSPPTAGPPCSVLQGTGASQSCHSALPIPATPPTQAQPAMTPASASPSWGSHSTPPLAPATPTPSQQCPQDSPGLRVGPLIPEQDYERLEDCDPEGSQDSPIHGEEQQPLLHVPEGLRGSWHHIQNLDSFFTKIYSYHQRNGFACILLEDVFQLGQFIFIVTFTTFLLRCVDYNVLFANQPSNHTRPGPFHSKVTLSDAILPSAQCAERIRSSPLLVLLLVLAAGFWLVQLLRSVCNLFSYWDIQVFYREALHIPPEELSSVPWAEVQSRLLALQRSGGLCVQPRPLTELDIHHRILRYTNYQVALANKGLLPARCPLPWGGSAAFLSRGLALNVDLLLFRGPFSLFRGGWELPHAYKRSDQRGALAARWGRTVLLLAALNLALSPLVLAWQVLHVFYSHVELLRREPGALGARGWSRLARLQLRHFNELPHELRARLARAYRPAAAFLRTAAPPAPLRTLLARQLVFFAGALFAALLVLTVYDEDVLAVEHVLTAMTALGVTATVARSFIPEEQCQGRAPQLLLQTALAHMHYLPEEPGPGGRDRAYRQMAQLLQYRAVSLLEELLSPLLTPLFLLFWFRPRALEIIDFFHHFTVDVAGVGDICSFALMDVKRHGHPQWLSAGQTEASLSQRAEDGKTELSLMRFSLAHPLWRPPGHSSKFLGHLWGRVQQDAAAWGATSARGPSTPGVLSNCTSPLPEAFLANLFVHPLLPPRDLSPTAPCPAAATASLLASISRIAQDPSSVSPGGTGGQKLAQLPELASAEMSLHVIYLHQLHQQQQQQEPWGEAAASILSRPCSSPSQPPSPDEEKPSWSSDGSSPASSPRQQWGTQKARNLFPGGFQVTTDTQKEPDRASCTD

SEQ ID NO: 8096 - protein, 924 aa, Homo sapiens; identical to SEQ ID NO: 8095
  Payload ID: 1679;
  Gene Symbol: ATG9B;
  Gene Name: autophagy related 9B;
  Uniprot ID:  Q674R7;
  ENSP ID: ENSP00000479879

SEQ ID NO: 8097 - protein, 1208 aa, Homo sapiens
  Payload ID: 1680;
  Gene Symbol: AMBRA1;
  Gene Name: autophagy/beclin-1 regulator 1;
  Uniprot ID:  Q9C0C7;
  ENSP ID: ENSP00000318313
MKVVPEKNAVRILWGRERGARAMGAQRLLQELVEDKTRWMKWEGKRVELPDSPRSTFLLAFSPDRTLLASTHVNHNIYITEVKTGKCVHSLIGHRRTPWCVTFHPTISGLIASGCLDGEVRIWDLHGGSESWFTDSNNAIASLAFHPTAQLLLIATANEIHFWDWSRREPFAVVKTASEMERVRLVRFDPLGHYLLTAIVNPSNQQGDDEPEIPIDGTELSHYRQRALLQSQPVRRTPLLHNFLHMLSSRSSGIQTEPFHPPEQASSTQQDQGLLNRPSAFSTVQSSTAGNTLRNLSLGPTRRSLGGPLSSHPSRYHREIAPGLTGSEWTRTVLSLNSRSEAESMPPPRTSASSVSLLSVLRQQEGGSQASVYTSATEGRGFPASGLATESDGGNGSSQNNSGSIRHELQCDLRRFFLEYDRLQELDQSLSGEAPQTQQAQEMLNNNIESERPGPSHQPTPHSSENNSNLSRGHLNRCRACHNLLTFNNDTLRWERTTPNYSSGEASSSWQVPSSFESVPSSGSQLPPLERTEGQTPSSSRLELSSSASPQEERTVGVAFNQETGHWERIYTQSSRSGTVSQEALHQDMPEESSEEDSLRRRLLESSLISLSRYDGAGSREHPIYPDPARLSPAAYYAQRMIQYLSRRDSIRQRSMRYQQNRLRSSTSSSSSDNQGPSVEGTDLEFEDFEDNGDRSRHRAPRNARMSAPSLGRFVPRRFLLPEYLPYAGIFHERGQPGLATHSSVNRVLAGAVIGDGQSAVASNIANTTYRLQWWDFTKFDLPEISNASVNVLVQNCKIYNDASCDISADGQLLAAFIPSSQRGFPDEGILAVYSLAPHNLGEMLYTKRFGPNAISVSLSPMGRYVMVGLASRRILLHPSTEHMVAQVFRLQQAHGGETSMRRVFNVLYPMPADQRRHVSINSARWLPEPGLGLAYGTNKGDLVICRPEALNSGVEYYWDQLNETVFTVHSNSRSSERPGTSRATWRTDRDMGLMNAIGLQPRNPATSVTSQGTQTLALQLQNAETQTEREVPEPGTAASGPGEGEGSEYGASGEDALSRIQRLMAEGGMTAVVQREQSTTMASMGGFGNNIIVSHRIHRSSQTGTEPGAAHTSSPQPSTSRGLLPEAGQLAERGLSPRTASWDQPGTPGREPTQPTLPSSSPVPIPVSLPSAEGPTLHCELTNNNHLLDGGSSRGDAAGPRGEPRNR

SEQ ID NO: 8098 - protein, 1298 aa, Homo sapiens
  Payload ID: 1680;
  Gene Symbol: AMBRA1;
  Gene Name: autophagy/beclin-1 regulator 1;
  Uniprot ID:  Q9C0C7;
  ENSP ID: ENSP00000415327
MKVVPEKNAVRILWGRERGARAMGAQRLLQELVEDKTRWMKWEGKRVELPDSPRSTFLLAFSPDRTLLASTHVNHNIYITEVKTGKCVHSLIGHRRTPWCVTFHPTISGLIASGCLDGEVRIWDLHGGSESWFTDSNNAIASLAFHPTAQLLLIATANEIHFWDWSRREPFAVVKTASEMERVRLVRFDPLGHYLLTAIVNPSNQQGDDEPEIPIDGTELSHYRQRALLQSQPVRRTPLLHNFLHMLSSRSSGIQVGEQSTVQDSATPSPPPPPPQPSTERPRTSAYIRLRQRVSYPTAECCQHLGILCLCSRCSGTRVPSLLPHQDSVPPASARATTPSFSFVQTEPFHPPEQASSTQQDQGLLNRPSAFSTVQSSTAGNTLRNLSLGPTRRSLGGPLSSHPSRYHREIAPGLTGSEWTRTVLSLNSRSEAESMPPPRTSASSVSLLSVLRQQEGGSQASVYTSATEGRGFPASGLATESDGGNGSSQNNSGSIRHELQCDLRRFFLEYDRLQELDQSLSGEAPQTQQAQEMLNNNIESERPGPSHQPTPHSSENNSNLSRGHLNRCRACHNLLTFNNDTLRWERTTPNYSSGEASSSWQVPSSFESVPSSGSQLPPLERTEGQTPSSSRLELSSSASPQEERTVGVAFNQETGHWERIYTQSSRSGTVSQEALHQDMPEESSEEDSLRRRLLESSLISLSRYDGAGSREHPIYPDPARLSPAAYYAQRMIQYLSRRDSIRQRSMRYQQNRLRSSTSSSSSDNQGPSVEGTDLEFEDFEDNGDRSRHRAPRNARMSAPSLGRFVPRRFLLPEYLPYAGIFHERGQPGLATHSSVNRVLAGAVIGDGQSAVASNIANTTYRLQWWDFTKFDLPEISNASVNVLVQNCKIYNDASCDISADGQLLAAFIPSSQRGFPDEGILAVYSLAPHNLGEMLYTKRFGPNAISVSLSPMGRYVMVGLASRRILLHPSTEHMVAQVFRLQQAHGGETSMRRVFNVLYPMPADQRRHVSINSARWLPEPGLGLAYGTNKGDLVICRPEALNSGVEYYWDQLNETVFTVHSNSRSSERPGTSRATWRTDRDMGLMNAIGLQPRNPATSVTSQGTQTLALQLQNAETQTEREVPEPGTAASGPGEGEGSEYGASGEDALSRIQRLMAEGGMTAVVQREQSTTMASMGGFGNNIIVSHRIHRSSQTGTEPGAAHTSSPQPSTSRGLLPEAGQLAERGLSPRTASWDQPGTPGREPTQPTLPSSSPVPIPVSLPSAEGPTLHCELTNNNHLLDGGSSRGDAAGPRGEPRNR

SEQ ID NO: 8099 - protein, 24 aa, Homo sapiens
  Payload ID: 1680;
  Gene Symbol: AMBRA1;
  Gene Name: autophagy/beclin-1 regulator 1;
  ENSP ID: ENSP00000431486
MKVVPEKNAVRILWGRERGARAMG

SEQ ID NO: 8100 - protein, 1238 aa, Homo sapiens
  Payload ID: 1680;
  Gene Symbol: AMBRA1;
  Gene Name: autophagy/beclin-1 regulator 1;
  Uniprot ID:  Q9C0C7;
  ENSP ID: ENSP00000431926
MKVVPEKNAVRILWGRERGARAMGAQRLLQELVEDKTRWMKWEGKRVELPDSPRSTFLLAFSPDRTLLASTHVNHNIYITEVKTGKCVHSLIGHRRTPWCVTFHPTISGLIASGCLDGEVRIWDLHGGSESWFTDSNNAIASLAFHPTAQLLLIATANEIHFWDWSRREPFAVVKTASEMERVRLVRFDPLGHYLLTAIVNPSNQQGDDEPEIPIDGTELSHYRQRALLQSQPVRRTPLLHNFLHMLSSRSSGIQVGEQSTVQDSATPSPPPPPPQPSTERPRTSAYIRLRQRVSYPTAECCQHLGILCLCSRCSGTRVPSLLPHQDSVPPASARATTPSFSFVQTEPFHPPEQASSTQQDQGLLNRPSAFSTVQSSTAGNTLRNLSLGPTRRSLGGPLSSHPSRYHREIAPGLTGSEWTRTVLSLNSRSEAESMPPPRTSASSVSLLSVLRQQEGGSQASVYTSATEGRGFPASGLATESDGGNGSSQNNSGSIRHELQCDLRRFFLEYDRLQELDQSLSGEAPQTQQAQEMLNNNIESERPGPSHQPTPHSSENNSNLSRGHLNRCRACHNLLTFNNDTLRWERTTPNYSSGEASSSWQVPSSFESVPSSGSQLPPLERTEGQTPSSSRLELSSSASPQEERTVGVAFNQETGHWERIYTQSSRSGTVSQEALHQDMPEESSEEDSLRRRLLESSLISLSRYDGAGSREHPIYPDPARDNGDRSRHRAPRNARMSAPSLGRFVPRRFLLPEYLPYAGIFHERGQPGLATHSSVNRVLAGAVIGDGQSAVASNIANTTYRLQWWDFTKFDLPEISNASVNVLVQNCKIYNDASCDISADGQLLAAFIPSSQRGFPDEGILAVYSLAPHNLGEMLYTKRFGPNAISVSLSPMGRYVMVGLASRRILLHPSTEHMVAQVFRLQQAHGGETSMRRVFNVLYPMPADQRRHVSINSARWLPEPGLGLAYGTNKGDLVICRPEALNSGVEYYWDQLNETVFTVHSNSRSSERPGTSRATWRTDRDMGLMNAIGLQPRNPATSVTSQGTQTLALQLQNAETQTEREVPEPGTAASGPGEGEGSEYGASGEDALSRIQRLMAEGGMTAVVQREQSTTMASMGGFGNNIIVSHRIHRSSQTGTEPGAAHTSSPQPSTSRGLLPEAGQLAERGLSPRTASWDQPGTPGREPTQPTLPSSSPVPIPVSLPSAEGPTLHCELTNNNHLLDGGSSRGDAAGPRGEPRNR

SEQ ID NO: 8101 - protein, 1179 aa, Homo sapiens
  Payload ID: 1680;
  Gene Symbol: AMBRA1;
  Gene Name: autophagy/beclin-1 regulator 1;
  ENSP ID: ENSP00000433372
MKVVPEKNAVRILWGRERGARAMGAQRLLQELVEDKTRWMKWEGKRVELPDSPRSTFLLAFSPDRTLLASTHVNHNIYITEVKTGKCVHSLIGHRRTPWCVTFHPTISGLIASGCLDGEVRIWDLHGGSESWFTDSNNAIASLAFHPTAQLLLIATANEIHFWDWSRREPFAVVKTASEMERVRLVRFDPLGHYLLTAIVNPSNQQGDDEPEIPIDGTELSHYRQRALLQSQPVRRTPLLHNFLHMLSSRSSGIQTEPFHPPEQASSTQQDQGLLNRPSAFSTVQSSTAGNTLRNLSLGPTRRSLGGPLSSHPSRYHREIAPGLTGSEWTRTVLSLNSRSEAESMPPPRTSASSVSLLSVLRQQEGGSQASVYTSATEGRGFPASGLATESDGGNGSSQNNSGSIRHELQCDLRRFFLEYDRLQELDQSLSGEAPQTQQAQEMLNNNIESERPGPSHQPTPHSSENNSNLSRGHLNRCRACHNLLTFNNDTLRWERTTPNYSSGEASSSWQVPSSFESVPSSGSQLPPLERTEGQTPSSSRLELSSSASPQEERTVGVAFNQETGHWERIYTQSSRSGTVSQEALHQDMPEESSEEDSLRRLSPAAYYAQRMIQYLSRRDSIRQRSMRYQQNRLRSSTSSSSSDNQGPSVEGTDLEFEDFEDNGDRSRHRAPRNARMSAPSLGRFVPRRFLLPEYLPYAGIFHERGQPGLATHSSVNRVLAGAVIGDGQSAVASNIANTTYRLQWWDFTKFDLPEISNASVNVLVQNCKIYNDASCDISADGQLLAAFIPSSQRGFPDEGILAVYSLAPHNLGEMLYTKRFGPNAISVSLSPMGRYVMVGLASRRILLHPSTEHMVAQVFRLQQAHGGETSMRRVFNVLYPMPADQRRHVSINSARWLPEPGLGLAYGTNKGDLVICRPEALNSGVEYYWDQLNETVFTVHSNSRSSERPGTSRATWRTDRDMGLMNAIGLQPRNPATSVTSQGTQTLALQLQNAETQTEREVPEPGTAASGPGEGEGSEYGASGEDALSRIQRLMAEGGMTAVVQREQSTTMASMGGFGNNIIVSHRIHRSSQTGTEPGAAHTSSPQPSTSRGLLPEAGQLAERGLSPRTASWDQPGTPGREPTQPTLPSSSPVPIPVSLPSAEGPTLHCELTNNNHLLDGGSSRGDAAGPRGEPRNR

SEQ ID NO: 8102 - protein, 1269 aa, Homo sapiens
  Payload ID: 1680;
  Gene Symbol: AMBRA1;
  Gene Name: autophagy/beclin-1 regulator 1;
  Uniprot ID:  Q9C0C7;
  ENSP ID: ENSP00000433945
MKVVPEKNAVRILWGRERGARAMGAQRLLQELVEDKTRWMKWEGKRVELPDSPRSTFLLAFSPDRTLLASTHVNHNIYITEVKTGKCVHSLIGHRRTPWCVTFHPTISGLIASGCLDGEVRIWDLHGGSESWFTDSNNAIASLAFHPTAQLLLIATANEIHFWDWSRREPFAVVKTASEMERVRLVRFDPLGHYLLTAIVNPSNQQGDDEPEIPIDGTELSHYRQRALLQSQPVRRTPLLHNFLHMLSSRSSGIQVGEQSTVQDSATPSPPPPPPQPSTERPRTSAYIRLRQRVSYPTAECCQHLGILCLCSRCSGTRVPSLLPHQDSVPPASARATTPSFSFVQTEPFHPPEQASSTQQDQGLLNRPSAFSTVQSSTAGNTLRNLSLGPTRRSLGGPLSSHPSRYHREIAPGLTGSEWTRTVLSLNSRSEAESMPPPRTSASSVSLLSVLRQQEGGSQASVYTSATEGRGFPASGLATESDGGNGSSQNNSGSIRHELQCDLRRFFLEYDRLQELDQSLSGEAPQTQQAQEMLNNNIESERPGPSHQPTPHSSENNSNLSRGHLNRCRACHNLLTFNNDTLRWERTTPNYSSGEASSSWQVPSSFESVPSSGSQLPPLERTEGQTPSSSRLELSSSASPQEERTVGVAFNQETGHWERIYTQSSRSGTVSQEALHQDMPEESSEEDSLRRLSPAAYYAQRMIQYLSRRDSIRQRSMRYQQNRLRSSTSSSSSDNQGPSVEGTDLEFEDFEDNGDRSRHRAPRNARMSAPSLGRFVPRRFLLPEYLPYAGIFHERGQPGLATHSSVNRVLAGAVIGDGQSAVASNIANTTYRLQWWDFTKFDLPEISNASVNVLVQNCKIYNDASCDISADGQLLAAFIPSSQRGFPDEGILAVYSLAPHNLGEMLYTKRFGPNAISVSLSPMGRYVMVGLASRRILLHPSTEHMVAQVFRLQQAHGGETSMRRVFNVLYPMPADQRRHVSINSARWLPEPGLGLAYGTNKGDLVICRPEALNSGVEYYWDQLNETVFTVHSNSRSSERPGTSRATWRTDRDMGLMNAIGLQPRNPATSVTSQGTQTLALQLQNAETQTEREVPEPGTAASGPGEGEGSEYGASGEDALSRIQRLMAEGGMTAVVQREQSTTMASMGGFGNNIIVSHRIHRSSQTGTEPGAAHTSSPQPSTSRGLLPEAGQLAERGLSPRTASWDQPGTPGREPTQPTLPSSSPVPIPVSLPSAEGPTLHCELTNNNHLLDGGSSRGDAAGPRGEPRNR

SEQ ID NO: 8103 - protein, 256 aa, Homo sapiens
  Payload ID: 1680;
  Gene Symbol: AMBRA1;
  Gene Name: autophagy/beclin-1 regulator 1;
  ENSP ID: ENSP00000434895
NSARWLPEPGLGLAYGTNKGDLVICRPETSRATWRTDRDMGLMNAIGLQPRNPATSVTSQGTQTLALQLQNAETQTEREVPEPGTAASGPGEGEGSEYGASGEDALSRIQRLMAEGGMTAVVQREQSTTMASMGGFGNNIIVSHRIHRSSQTGTEPGAAHTSSPQPSTSRGLLPEAGQLAERGLSPRTASWDQPGTPGREPTQPTLPSSSPVPIPVSLPSAEGPTLHCELTNNNHLLDGGSSRGDAAGPRGEPRNR

SEQ ID NO: 8104 - protein, 648 aa, Homo sapiens
  Payload ID: 1681;
  Gene Symbol: AVL9;
  Gene Name: AVL9 homolog (S. cerevisiase);
  Uniprot ID:  Q8NBF6;
  ENSP ID: ENSP00000315568
MEKARRGGDGVPRGPVLHIVVVGFHHKKGCQVEFSYPPLIPGDGHDSHTLPEEWKYLPFLALPDGAHNYQEDTVFFHLPPRNGNGATVFGISCYRQIEAKALKVRQADITRETVQKSVCVLSKLPLYGLLQAKLQLITHAYFEEKDFSQISILKELYEHMNSSLGGASLEGSQVYLGLSPRDLVLHFRHKVLILFKLILLEKKVLFYISPVNKLVGALMTVLSLFPGMIEHGLSDCSQYRPRKSMSEDGGLQESNPCADDFVSASTADVSHTNLGTIRKVMAGNHGEDAAMKTEEPLFQVEDSSKGQEPNDTNQYLKPPSRPSPDSSESDWETLDPSVLEDPNLKEREQLGSDQTNLFPKDSVPSESLPITVQPQANTGQVVLIPGLISGLEEDQYGMPLAIFTKGYLCLPYMALQQHHLLSDVTVRGFVAGATNILFRQQKHLSDAIVEVEEALIQIHDPELRKLLNPTTADLRFADYLVRHVTENRDDVFLDGTGWEGGDEWIRAQFAVYIHALLAATLQLDNEKILSDYGTTFVTAWKNTHNYRVWNSNKHPALAEINPNHPFQGQYSVSDMKLRFSHSVQNSERGKKIGNVMVTTSRNVVQTGKAVGQSVGGAFSSAKTAMSSWLSTFTTSTSQSLTEPPDEKP

SEQ ID NO: 8105 - protein, 630 aa, Homo sapiens
  Payload ID: 1681;
  Gene Symbol: AVL9;
  Gene Name: AVL9 homolog (S. cerevisiase);
  ENSP ID: ENSP00000387011
MEKARRGGDGVPRGPVLHIVVVGFHHKKGCQVEFSYPPLIPGDGHDSHTLPEEWKYLPFLALPDGAHNYQEDTVFFHLPPRNGNGATVFGISCYRQIEAKALKVRQADITRETVQKSVCVLSKLPLYGLLQAKLQLITHAYFEEKDFSQISILKELYEHMNSSLGGASLEGSQVYLGLSPRDLVLHFRHKVLILFKLILLEKKVLFYISPVNKLVGALMTVLSLFPGMIEHGLSDCSQYRPRKSMSEDGGLQESNPCADDFVSASTADVSHTNLGTIRKVMAGNHGEDAAMKTEEPLFQVEDSSKGQEPNDTNQYLKPPSRPSPDSSESDWETLDPSVLEDPNLKEREQLGSDQTNLFPKDSVPSESLPITVQPQANTGQVVLIPGLISGLEEDQYGMPLAIFTKGYLCLPYMALQQHHLLSDVTVRGFVAGATNILFRQQKHLSDAIVEVEEALIQIHDPELRKLLNPTTADLRFADYLVRHVTENRDDVFLDGTGWEGGDEWIRAQFAVYIHALLAATLQLDNEKILSDYGTTFVTAWKNTHNYRVWNSNKHPALAEINPNSVQNSERGKKIGNVMVTTSRNVVQTGKAVGQSVGGAFSSAKTAMSSWLSTFTTSTSQSLTEPPDEKP

SEQ ID NO: 8106 - protein, 568 aa, Homo sapiens
  Payload ID: 1681;
  Gene Symbol: AVL9;
  Gene Name: AVL9 homolog (S. cerevisiase);
  ENSP ID: ENSP00000395134
QEDTVFFHLPPRNGNGATVFGISCYRQIEAKALKVRQADITRETVQKSVCVLSKLPLYGLLQAKLQLITHAYFEEKDFSQISILKELYEHMNSSLGGASLEGSQVYLGLSPRDLVLHFRHKVLILFKLILLEKKVLFYISPVNKLVGALMTVLSLFPGMIEHGLSDCSQYRPRKSMSEDGGLQESNPCADDFVSASTADVSHTNLGTIRKVMAGNHGEDAAMKTEEPLFQVEDSSKGQEPNDTNQYLKPPSRPSPDSSESDWETLDPSVLEDPNLKEREQLGSDQTNLFPKDSVPSESLPITVQPQANTGQVVLIPGLISGLEEDQYGMPLAIFTKGYLCLPYMALQQHHLLSDVTVRGFVAGATNILFRQQKHLSDAIVEVEEALIQIHDPELRKLLNPTTADLRFADYLVRHVTENRDDVFLDGTGWEGGDEWIRAQFAVYIHALLAATLQLVLFRIVNVAKKLETSWSQLAGMLYKQEKLLASQLEELFPVQRQLCLHGFPLSPLPPPKVSLSHQMRSLEQGVRGCYCFLRFKCPLSVCCSQAVTSHRSTAGDHMSNCLHGCCSK

SEQ ID NO: 8107 - protein, 862 aa, Homo sapiens
  Payload ID: 1682;
  Gene Symbol: AXIN1;
  Gene Name: axin 1;
  Uniprot ID:  O15169;
  ENSP ID: ENSP00000262320
MNIQEQGFPLDLGASFTEDAPRPPVPGEEGELVSTDPRPASYSFCSGKGVGIKGETSTATPRRSDLDLGYEPEGSASPTPPYLKWAESLHSLLDDQDGISLFRTFLKQEGCADLLDFWFACTGFRKLEPCDSNEEKRLKLARAIYRKYILDNNGIVSRQTKPATKSFIKGCIMKQLIDPAMFDQAQTEIQATMEENTYPSFLKSDIYLEYTRTGSESPKVCSDQSSGSGTGKGISGYLPTLNEDEEWKCDQDMDEDDGRDAAPPGRLPQKLLLETAAPRVSSSRRYSEGREFRYGSWREPVNPYYVNAGYALAPATSANDSEQQSLSSDADTLSLTDSSVDGIPPYRIRKQHRREMQESVQVNGRVPLPHIPRTYRVPKEVRVEPQKFAEELIHRLEAVQRTREAEEKLEERLKRVRMEEEGEDGDPSSGPPGPCHKLPPAPAWHHFPPRCVDMGCAGLRDAHEENPESILDEHVQRVLRTPGRQSPGPGHRSPDSGHVAKMPVALGGAASGHGKHVPKSGAKLDAAGLHHHRHVHHHVHHSTARPKEQVEAEATRRAQSSFAWGLEPHSHGARSRGYSESVGAAPNASDGLAHSGKVGVACKRNAKKAESGKSASTEVPGASEDAEKNQKIMQWIIEGEKEISRHRRTGHGSSGTRKPQPHENSRPLSLEHPWAGPQLRTSVQPSHLFIQDPTMPPHPAPNPLTQLEEARRRLEEEEKRASRAPSKQRYVQEVMRRGRACVRPACAPVLHVVPAVSDMELSETETRSQRKVGGGSAQPCDSIVVAYYFCGEPIPYRTLVRGRAVTLGQFKELLTKKGSYRYYFKKVSDEFDCGVVFEEVREDEAVLPVFEEKIIGKVEKVD

SEQ ID NO: 8108 - protein, 826 aa, Homo sapiens
  Payload ID: 1682;
  Gene Symbol: AXIN1;
  Gene Name: axin 1;
  Uniprot ID:  O15169;
  ENSP ID: ENSP00000346935
MNIQEQGFPLDLGASFTEDAPRPPVPGEEGELVSTDPRPASYSFCSGKGVGIKGETSTATPRRSDLDLGYEPEGSASPTPPYLKWAESLHSLLDDQDGISLFRTFLKQEGCADLLDFWFACTGFRKLEPCDSNEEKRLKLARAIYRKYILDNNGIVSRQTKPATKSFIKGCIMKQLIDPAMFDQAQTEIQATMEENTYPSFLKSDIYLEYTRTGSESPKVCSDQSSGSGTGKGISGYLPTLNEDEEWKCDQDMDEDDGRDAAPPGRLPQKLLLETAAPRVSSSRRYSEGREFRYGSWREPVNPYYVNAGYALAPATSANDSEQQSLSSDADTLSLTDSSVDGIPPYRIRKQHRREMQESVQVNGRVPLPHIPRTYRVPKEVRVEPQKFAEELIHRLEAVQRTREAEEKLEERLKRVRMEEEGEDGDPSSGPPGPCHKLPPAPAWHHFPPRCVDMGCAGLRDAHEENPESILDEHVQRVLRTPGRQSPGPGHRSPDSGHVAKMPVALGGAASGHGKHVPKSGAKLDAAGLHHHRHVHHHVHHSTARPKEQVEAEATRRAQSSFAWGLEPHSHGARSRGYSESVGAAPNASDGLAHSGKVGVACKRNAKKAESGKSASTEVPGASEDAEKNQKIMQWIIEGEKEISRHRRTGHGSSGTRKPQPHENSRPLSLEHPWAGPQLRTSVQPSHLFIQDPTMPPHPAPNPLTQLEEARRRLEEEEKRASRAPSKQRTRSQRKVGGGSAQPCDSIVVAYYFCGEPIPYRTLVRGRAVTLGQFKELLTKKGSYRYYFKKVSDEFDCGVVFEEVREDEAVLPVFEEKIIGKVEKVD

SEQ ID NO: 8109 - protein, 102 aa, Homo sapiens
  Payload ID: 1682;
  Gene Symbol: AXIN1;
  Gene Name: axin 1;
  ENSP ID: ENSP00000416835
  MOD_RES (1)..(1): Any amino acid
XLEEEEKRASRAPSKQRTRSQRKVGGGSAQPCDSIVVAYYFCGEPIPYRTLVRGRAVTLGQFKELLTKKGSYRPPSHLRCCLLTALLTSVLQILLQESERRV

SEQ ID NO: 8110 - protein, 843 aa, Homo sapiens
  Payload ID: 1683;
  Gene Symbol: AXIN2;
  Gene Name: axin 2;
  Uniprot ID:  Q9Y2T1;
  ENSP ID: ENSP00000302625
MSSAMLVTCLPDPSSSFREDAPRPPVPGEEGETPPCQPGVGKGQVTKPMPVSSNTRRNEDGLGEPEGRASPDSPLTRWTKSLHSLLGDQDGAYLFRTFLEREKCVDTLDFWFACNGFRQMNLKDTKTLRVAKAIYKRYIENNSIVSKQLKPATKTYIRDGIKKQQIDSIMFDQAQTEIQSVMEENAYQMFLTSDIYLEYVRSGGENTAYMSNGGLGSLKVVCGYLPTLNEEEEWTCADFKCKLSPTVVGLSSKTLRATASVRSTETVDSGYRSFKRSDPVNPYHIGSGYVFAPATSANDSEISSDALTDDSMSMTDSSVDGIPPYRVGSKKQLQREMHRSVKANGQVSLPHFPRTHRLPKEMTPVEPATFAAELISRLEKLKLELESRHSLEERLQQIREDEEREGSELTLNSREGAPTQHPLSLLPSGSYEEDPQTILDDHLSRVLKTPGCQSPGVGRYSPRSRSPDHHHHHHSQYHSLLPPGGKLPPAAASPGACPLLGGKGFVTKQTTKHVHHHYIHHHAVPKTKEEIEAEATQRVHCFCPGGSEYYCYSKCKSHSKAPETMPSEQFGGSRGSTLPKRNGKGTEPGLALPAREGGAPGGAGALQLPREEGDRSQDVWQWMLESERQSKPKPHSAQSTKKAYPLESARSSPGERASRHHLWGGNSGHPRTTPRAHLFTQDPAMPPLTPPNTLAQLEEACRRLAEVSKPPKQRCCVASQQRDRNHSATVQTGATPFSNPSLAPEDHKEPKKLAGVHALQASELVVTYFFCGEEIPYRRMLKAQSLTLGHFKEQLSKKGNYRYYFKKASDEFACGAVFEEIWEDETVLPMYEGRILGKVERID

SEQ ID NO: 8111 - protein, 778 aa, Homo sapiens
  Payload ID: 1683;
  Gene Symbol: AXIN2;
  Gene Name: axin 2;
  ENSP ID: ENSP00000364854
MSSAMLVTCLPDPSSSFREDAPRPPVPGEEGETPPCQPGVGKGQVTKPMPVSSNTRRNEDGLGEPEGRASPDSPLTRWTKSLHSLLGDQDGAYLFRTFLEREKCVDTLDFWFACNGFRQMNLKDTKTLRVAKAIYKRYIENNSIVSKQLKPATKTYIRDGIKKQQIDSIMFDQAQTEIQSVMEENAYQMFLTSDIYLEYVRSGGENTAYMSNGGLGSLKVVCGYLPTLNEEEEWTCADFKCKLSPTVVGLSSKTLRATASVRSTETVDSGYRSFKRSDPVNPYHIGSGYVFAPATSANDSEISSDALTDDSMSMTDSSVDGIPPYRVGSKKQLQREMHRSVKANGQVSLPHFPRTHRLPKEMTPVEPATFAAELISRLEKLKLELESRHSLEERLQQIREDEEREGSELTLNSREGAPTQHPLSLLPSGSYEEDPQTILDDHLSRVLKTPGCQSPGVGRYSPRSRSPDHHHHHHSQYHSLLPPGGKLPPAAASPGACPLLGGKGFVTKQTTKHVHHHYIHHHAVPKTKEEIEAEATQRVHCFCPGGSEYYCYSKCKSHSKAPETMPSEQFGAQSTKKAYPLESARSSPGERASRHHLWGGNSGHPRTTPRAHLFTQDPAMPPLTPPNTLAQLEEACRRLAEVSKPPKQRCCVASQQRDRNHSATVQTGATPFSNPSLAPEDHKEPKKLAGVHALQASELVVTYFFCGEEIPYRRMLKAQSLTLGHFKEQLSKKGNYRYYFKKASDEFACGAVFEEIWEDETVLPMYEGRILGKVERID

SEQ ID NO: 8112 - protein, 150 aa, Homo sapiens
  Payload ID: 1683;
  Gene Symbol: AXIN2;
  Gene Name: axin 2;
  ENSP ID: ENSP00000441151
MSSAMLVTCLPDPSSSFREDAPRPPVPGEEGETPPCQPGVGKGQVTKPMPVSSNTRRNEDGLGEPEGRASPDSPLTRWTKSLHSLLGDQDGAYLFRTFLEREKCVDTLDFWFACNGFRQMNLKDTKTLRVAKAIYKRYIENNSIVSKQLK

SEQ ID NO: 8113 - protein, 191 aa, Homo sapiens
  Payload ID: 1683;
  Gene Symbol: AXIN2;
  Gene Name: axin 2;
  ENSP ID: ENSP00000463192
MSSAMLVTCLPDPSSSFREDAPRPPVPGEEGETPPCQPGVGKGQVTKPMPVSSNTRRNEDGLGEPEGRASPDSPLTRWTKSLHSLLGDQDGAYLFRTFLEREKCVDTLDFWFACNGFRQMNLKDTKTLRVAKAIYKRYIENNSIVSKQLKPATKTYIRDGIKKQQIDSIMFDQAQTEIQSVMEENAYQMFL

SEQ ID NO: 8114 - protein, 192 aa, Homo sapiens
  Payload ID: 1683;
  Gene Symbol: AXIN2;
  Gene Name: axin 2;
  ENSP ID: ENSP00000463761
MSSAMLVTCLPDPSSSFREDAPRPPVPGEEGETPPCQPGVGKGQVTKPMPVSSNTRRNEDGLGEPEGRASPDSPLTRWTKSLHSLLGDQDGAYLFRTFLEREKCVDTLDFWFACNGFRQMNLKDTKTLRVAKAIYKRYIENNSIVSKQLKPATKTYIRDGIKKQQIDSIMFDQAQTEIQSVMEENAYQMFLT

SEQ ID NO: 8115 - protein, 271 aa, Homo sapiens
  Payload ID: 1683;
  Gene Symbol: AXIN2;
  Gene Name: axin 2;
  ENSP ID: ENSP00000464264
MSSAMLVTCLPDPSSSFREDAPRPPVPGEEGETPPCQPGVGKGQVTKPMPVSSNTRRNEDGLGEPEGRASPDSPLTRWTKSLHSLLGDQDGAYLFRTFLEREKCVDTLDFWFACNGFRQMNLKDTKTLRVAKAIYKRYIENNSIVSKQLKPATKTYIRDGIKKQQIDSIMFDQAQTEIQSVMEENAYQMFLTSDIYLEYVRSGGENTAYMSNGGLGSLKVVCGYLPTLNEEEEWTCADFKCKLSPTVVGLSSKTLRATASVRSTETVDSGY

SEQ ID NO: 8116 - protein, 778 aa, Homo sapiens; identical to SEQ ID NO: 8111
  Payload ID: 1683;
  Gene Symbol: AXIN2;
  Gene Name: axin 2;
  ENSP ID: ENSP00000478916

SEQ ID NO: 8117 - protein, 160 aa, Homo sapiens
  Payload ID: 1683;
  Gene Symbol: AXIN2;
  Gene Name: axin 2;
  ENSP ID: ENSP00000481191
MSSAMLVTCLPDPSSSFREDAPRPPVPGEEGETPPCQPGVGKGQVTKPMPVSSNTRRNEDGLGEPEGRASPDSPLTRWTKSLHSLLGDQDGAYLFRTFLEREKCVDTLDFWFACNGFRQMNLKDTKTLRVAKDFCHDILFYLYCKLCIIKSSFKENYLVQ

SEQ ID NO: 8118 - protein, 306 aa, Homo sapiens
  Payload ID: 1684;
  Gene Symbol: AIDA;
  Gene Name: axin interactor, dorsalization associated;
  Uniprot ID:  Q96BJ3;
  ENSP ID: ENSP00000339161
MSEVTRSLLQRWGASFRRGADFDSWGQLVEAIDEYQILARHLQKEAQAQHNNSEFTEEQKKTIGKIATCLELRSAALQSTQSQEEFKLEDLKKLEPILKNILTYNKEFPFDVQPVPLRRILAPGEEENLEFEEDEEEGGAGAGSPDSFPARVPGTLLPRLPSEPGMTLLTIRIEKIGLKDAGQCIDPYITVSVKDLNGIDLTPVQDTPVASRKEDTYVHFNVDIELQKHVEKLTKGAAIFFEFKHYKPKKRFTSTKCFAFMEMDEIKPGPIVIELYKKPTDFKRKKLQLLTKKPLYLHLHQTLHKE

SEQ ID NO: 8119 - protein, 224 aa, Homo sapiens
  Payload ID: 1684;
  Gene Symbol: AIDA;
  Gene Name: axin interactor, dorsalization associated;
  Uniprot ID:  Q96BJ3;
  ENSP ID: ENSP00000347964
MSEVTRSLLQRWGASFRRGADFDSWGQLVEAIDEYQILARHLQKEAQAQHNNSEFTEEQKKTIGKIATCLELRSAALQSTQSQEEFKLEDLKKLEPILKNILTYNKEFPFDVQPVPLRRILAPGEEENLEFEEDEEEGGAGAGSPDSFPARVPGAAIFFEFKHYKPKKRFTSTKCFAFMEMDEIKPGPIVIELYKKPTDFKRKKLQLLTKKPLYLHLHQTLHKE

SEQ ID NO: 8120 - protein, 894 aa, Homo sapiens
  Payload ID: 1685;
  Gene Symbol: AXL;
  Gene Name: AXL receptor tyr kinase;
  Uniprot ID:  P30530;
  ENSP ID: ENSP00000301178
MAWRCPRMGRVPLAWCLALCGWACMAPRGTQAEESPFVGNPGNITGARGLTGTLRCQLQVQGEPPEVHWLRDGQILELADSTQTQVPLGEDEQDDWIVVSQLRITSLQLSDTGQYQCLVFLGHQTFVSQPGYVGLEGLPYFLEEPEDRTVAANTPFNLSCQAQGPPEPVDLLWLQDAVPLATAPGHGPQRSLHVPGLNKTSSFSCEAHNAKGVTTSRTATITVLPQQPRNLHLVSRQPTELEVAWTPGLSGIYPLTHCTLQAVLSDDGMGIQAGEPDPPEEPLTSQASVPPHQLRLGSLHPHTPYHIRVACTSSQGPSSWTHWLPVETPEGVPLGPPENISATRNGSQAFVHWQEPRAPLQGTLLGYRLAYQGQDTPEVLMDIGLRQEVTLELQGDGSVSNLTVCVAAYTAAGDGPWSLPVPLEAWRPGQAQPVHQLVKEPSTPAFSWPWWYVLLGAVVAAACVLILALFLVHRRKKETRYGEVFEPTVERGELVVRYRVRKSYSRRTTEATLNSLGISEELKEKLRDVMVDRHKVALGKTLGEGEFGAVMEGQLNQDDSILKVAVKTMKIAICTRSELEDFLSEAVCMKEFDHPNVMRLIGVCFQGSERESFPAPVVILPFMKHGDLHSFLLYSRLGDQPVYLPTQMLVKFMADIASGMEYLSTKRFIHRDLAARNCMLNENMSVCVADFGLSKKIYNGDYYRQGRIAKMPVKWIAIESLADRVYTSKSDVWSFGVTMWEIATRGQTPYPGVENSEIYDYLRQGNRLKQPADCLDGLYALMSRCWELNPQDRPSFTELREDLENTLKALPPAQEPDEILYVNMDEGGGYPEPPGAAGGADPPTQPDPKDSCSCLTAAEVHPAGRYVLCPSTTPSPAQPADRGSPAAPGQEDGA

SEQ ID NO: 8121 - protein, 885 aa, Homo sapiens
  Payload ID: 1685;
  Gene Symbol: AXL;
  Gene Name: AXL receptor tyr kinase;
  Uniprot ID:  P30530;
  ENSP ID: ENSP00000351995
MAWRCPRMGRVPLAWCLALCGWACMAPRGTQAEESPFVGNPGNITGARGLTGTLRCQLQVQGEPPEVHWLRDGQILELADSTQTQVPLGEDEQDDWIVVSQLRITSLQLSDTGQYQCLVFLGHQTFVSQPGYVGLEGLPYFLEEPEDRTVAANTPFNLSCQAQGPPEPVDLLWLQDAVPLATAPGHGPQRSLHVPGLNKTSSFSCEAHNAKGVTTSRTATITVLPQQPRNLHLVSRQPTELEVAWTPGLSGIYPLTHCTLQAVLSDDGMGIQAGEPDPPEEPLTSQASVPPHQLRLGSLHPHTPYHIRVACTSSQGPSSWTHWLPVETPEGVPLGPPENISATRNGSQAFVHWQEPRAPLQGTLLGYRLAYQGQDTPEVLMDIGLRQEVTLELQGDGSVSNLTVCVAAYTAAGDGPWSLPVPLEAWRPVKEPSTPAFSWPWWYVLLGAVVAAACVLILALFLVHRRKKETRYGEVFEPTVERGELVVRYRVRKSYSRRTTEATLNSLGISEELKEKLRDVMVDRHKVALGKTLGEGEFGAVMEGQLNQDDSILKVAVKTMKIAICTRSELEDFLSEAVCMKEFDHPNVMRLIGVCFQGSERESFPAPVVILPFMKHGDLHSFLLYSRLGDQPVYLPTQMLVKFMADIASGMEYLSTKRFIHRDLAARNCMLNENMSVCVADFGLSKKIYNGDYYRQGRIAKMPVKWIAIESLADRVYTSKSDVWSFGVTMWEIATRGQTPYPGVENSEIYDYLRQGNRLKQPADCLDGLYALMSRCWELNPQDRPSFTELREDLENTLKALPPAQEPDEILYVNMDEGGGYPEPPGAAGGADPPTQPDPKDSCSCLTAAEVHPAGRYVLCPSTTPSPAQPADRGSPAAPGQEDGA

SEQ ID NO: 8122 - protein, 626 aa, Homo sapiens
  Payload ID: 1685;
  Gene Symbol: AXL;
  Gene Name: AXL receptor tyr kinase;
  ENSP ID: ENSP00000471497
MGIQAGEPDPPEEPLTSQASVPPHQLRLGSLHPHTPYHIRVACTSSQGPSSWTHWLPVETPEGVPLGPPENISATRNGSQAFVHWQEPRAPLQGTLLGYRLAYQGQDTPEVLMDIGLRQEVTLELQGDGSVSNLTVCVAAYTAAGDGPWSLPVPLEAWRPGQAQPVHQLVKEPSTPAFSWPWWYVLLGAVVAAACVLILALFLVHRRKKETRYGEVFEPTVERGELVVRYRVRKSYSRRTTEATLNSLGISEELKEKLRDVMVDRHKVALGKTLGEGEFGAVMEGQLNQDDSILKVAVKTMKIAICTRSELEDFLSEAVCMKEFDHPNVMRLIGVCFQGSERESFPAPVVILPFMKHGDLHSFLLYSRLGDQPVYLPTQMLVKFMADIASGMEYLSTKRFIHRDLAARNCMLNENMSVCVADFGLSKKIYNGDYYRQGRIAKMPVKWIAIESLADRVYTSKSDVWSFGVTMWEIATRGQTPYPGVENSEIYDYLRQGNRLKQPADCLDGLYALMSRCWELNPQDRPSFTELREDLENTLKALPPAQEPDEILYVNMDEGGGYPEPPGAAGGADPPTQPDPKDSCSCLTAAEVHPAGRYVLCPSTTPSPAQPADRGSPAAPGQEDGA

SEQ ID NO: 8123 - protein, 1012 aa, Homo sapiens
  Payload ID: 1686;
  Gene Symbol: AXDND1;
  Gene Name: axonemal dynein light chain domain containing 1;
  Uniprot ID:  Q5T1B0;
  ENSP ID: ENSP00000356590
MSLPKTPSTPLNSTSTSESKKLKVSVAKEGTRGLPELKEKKNMVDRSKLLPTSLQNEFIPKEVLLSLTYAANAGPCPENLLPPKKIKTPKGTLPRLVDHVWHHPVRRNKFKYLIDHPVSLTGAGRDISFLYDVTYAKGQTREKAVCPPHLARSLQSHDGVIVPHKPKTLTDTLIPEEFHIVSSTGVSGLECYDDKYTTLLTDSENRLLLFPSMKPNKRVEVAQLNDVMDTMLERAGVENQEYTGPTKMHKLLHILKKEQTIYNMIFHELIRQVSVDCADRGELLSKVRERYVQMLDQIARQMIDFYKDLVTQRVMDQRILEELYNFKHVIEELTRELCLVRAHDVKLTKETEKAHKDLAQALLNAEKNAKIVEEYHDLYTLQRERMENDMKKLVAERDIWSSATYELALKVIERNRVILARRLYLNEKGWNKYTKHFIILLSNKDTEDLALLQKLTQKWRNLVNKLKQEVEQMEESTSETLKIVKDGLIKWQEFFNEKDILSPNKGNIFNSVLLDFKQWQKILNEKKEEFTGDVLLSKYDTLKIIKHLQENWADIGLGIFNRHKSLEGEMPSERQYMEEIIKNIQKLYKEYEIRINGDNGYSKILPSLISSLDFCSFKLENLEFPDTPLEEWQEIDEKINEMKSHLDILLNLTGIVPQHIDVDSVSVLQAYIFNMIQQWLLKIGNEINNGNIELQHHMDELHISMIQWMVNLLILMIPNFTDQDCLLKLEEESAEKHDIGVARLELDAIELTRKLYQYSSYLSSCCKGMVTAMALSKSTNSHKNATEDLYEVDKLKKECYEWINTCSCLLSNIKGRKITLLTYEEIERLLEEEAVKEFIEPEIDESFKEDEEESKEDRKLQEENKERAEEQPSTSTEKEKLIRFIGEDENVHSKPLFETDVLSSWRESAKQGTLAQKYLEAMAVIEHMQEKLLEVENRARQAEEKFEDAYEKLHHTLIKNKDLEELVMTSRKESKEEKENQDEREVKEEEEQQEEEEVRSAENSSKSPKKGH

SEQ ID NO: 8124 - protein, 872 aa, Homo sapiens
  Payload ID: 1686;
  Gene Symbol: AXDND1;
  Gene Name: axonemal dynein light chain domain containing 1;
  ENSP ID: ENSP00000391716
LTYAANAGPCPENLLPPKKIKTPKGTLPRLVDHVWHHPVRRNKFKYLIDHPVSLTGAGRDISFLYDVTYAKGQTREKAVCPPHLARSLQSHDGVIVPHKPKTLTDTLIPEEFHIVSSTGVSGLECYDDKYTTLLTDSENRLLLFPSMKPNKRVEVAQLNDVMDTMLERAGVENQEYTGPTKMHKLLHILKKEQTIYNMIFHELIRQVSVDCADRGELLSKVRERYVQMLDQIARQMIDFYKDLVTQRVMDQRILEELYNFKHVIEELTRELCLVRAHDVKLTKETEKAHKDLAQALLNAEKNAKIVEEYHDLYTLQRERMENDMKKLVAERDIWSSATYELALKVIERNRVILARRLYLNEKGWNKYTKHFIILLSNKDTEDLALLQKLTQKWRNLVNKLKQEVEQMEESTSETLKIVKDGLIKWQEFFNEKDILSPNKGNIFNSVLLDFKQWQKILNEKKEEFTGDVLLSKYDTLKIIKHLQENWADIGLGIFNRHKSLEGEMPSERQYMEEIIKNIQKLYKEYEIRINGDNGYSKILPSLISSLDFCSFKLENLEFPDTPLEEWQEIDEKINEMKSHLDILLNLTGIVPQHIDVDSVSVLQAYIFNMIQQWLLKIGNEINNGNIELQHHMDELHISMIQWMVNLLILMIPNFTDQDCLLKLEEESAEKHDIGVARLELDAIELTRKLYQYSSYLSSCCKGMVTAMALSKSTNSHKNATEDLYEVDKLKQPSTSTEKEKLIRFIGEDENVHSKPLFETDVLSSWRESAKQGTLAQKYLEAMAVIEHMQEKLLEVENRARQAEEKFEDAYEKLHHTLIKNKDLEELVMTSRKESKEEKENQDEREVKEEEEQQEEEEVRSAENSSKSPKKGH

SEQ ID NO: 8125 - protein, 672 aa, Homo sapiens
  Payload ID: 1686;
  Gene Symbol: AXDND1;
  Gene Name: axonemal dynein light chain domain containing 1;
  ENSP ID: ENSP00000416712
MSLPKTPSTPLNSTSTSESKKLKVSVAKEGTRGLPELKEKKNMVDRSKLLPTSLQNEFIPKEVLLSLTYAANAGPCPENLLPPKKIKTPKGTLPRLVDHVWHHPVRRNKFKYLIDHPVSLTGAGRDISFLYDVTYAKGQTREKAVCPPHLARSLQSHDGVIVPHKPKTLTDTLIPEEFHIVSSTGVSGLECYDDKYTTLLTDSENRLLLFPSMKPNKRVEVAQLNDVMDTMLERAGVENQEYTGPTKMHKLLHILKKEQTIYNMIFHELIRQVSVDCADRGELLSKVRERYVQMLDQIARQMIDFYKDLVTQRVMDQRILEELYNFKHVIEELTRELCLVRAHDVKLTKETEKAHKDLAQALLNAEKNAKIVEEYHDLYTLQRERMENDMKKLVAERDIWSSATYELALKVIERNRVILARRLYLNEKGWNKYTKHFIILLSNKDTEDLALLQKLTQKWRNLVNKLKQEVEQMEESTSETLKIVKDGLIKWQEFFNEKDILSPNKGNIFNSVLLDFKQWQKILNEKKEEFTGDVLLSKYDTLKIIKHLQENWADIGLGIFNRHKSLEGEMPSERQYMEEIIKNIQKLYKEYEIRINGDNGYSKILPSLISSLDFCSFKLENLEFPDTPLEEWQEIDEKINEMKSHLDILLNLTGCSTAHRCGFCFGTPSVYI

SEQ ID NO: 8126 - protein, 78 aa, Homo sapiens
  Payload ID: 1686;
  Gene Symbol: AXDND1;
  Gene Name: axonemal dynein light chain domain containing 1;
  ENSP ID: ENSP00000422992
MSLPKTPSTPLNSTSTSESKKLKVSVAKEGTRGLPELKEKKNMVDRSKLLPTSLQNEFIPKEVLLSLTYAANAGPCPE

SEQ ID NO: 8127 - protein, 529 aa, Homo sapiens
  Payload ID: 1686;
  Gene Symbol: AXDND1;
  Gene Name: axonemal dynein light chain domain containing 1;
  ENSP ID: ENSP00000424373
MSLPKTPSTPLNSTSTSESKKLKVSVAKEGTRGLPELKEKKNMVDRSKLLPTSLQNEFIPKEVLLSLTYAANAGPCPENLLPPKKIKTPKGTLPRLVDHVWHHPVRRNKFKYLIDHPVSLTGAGRDISFLYDVTYAKGQTREKAVCPPHLARSLQSHDGVIVPHKPKTLTDTLIPEEFHIVSSTGVSGLECYDDKYTTLLTDSENRLLLFPSMKPNKRVEVAQLNDVMDTMLERAGVENQEYTGPTKMHKLLHILKKEQTIYNMIFHELIRQVSVDCADRGELLSKVRERYVQMLDQIARQMIDFYKDLVTQRVMDQRILEELYNFKHVIEELTRELCLVRAHDVKLTKETEKAHKDLAQALLNAEKNAKIVEEYHDLYTLQRERMENDMKKLVAERDIWSSATYELALKVIERNRVILARRLYLNEKGWNKYTKHFIILLSNKDTEDLALLQKLTQKWRNLVNKLKQEVEQMEESTSETLKIVKDGLIKWQEFFNEKDILSPNKGNIFNSVLLDFKQWQKVTPKFFQV

SEQ ID NO: 8128 - protein, 151 aa, Homo sapiens
  Payload ID: 1686;
  Gene Symbol: AXDND1;
  Gene Name: axonemal dynein light chain domain containing 1;
  ENSP ID: ENSP00000425019
MVDRSKLLPTSLQNEFIPKEVLLSLTYAANAGPCPENLLPPKKIKTPKGTLPRLVDHVWHHPVRRNKFKYLIDHPVSLTGAGRDISFLYDVTYAKGQTREKAVCPPHLARSLQSHDGVIVPHKPKTLTDTLIPEEFHIVSSTGVSGLECYD

SEQ ID NO: 8129 - protein, 123 aa, Homo sapiens
  Payload ID: 1686;
  Gene Symbol: AXDND1;
  Gene Name: axonemal dynein light chain domain containing 1;
  ENSP ID: ENSP00000425198
MVDRSKLLPTSLQNEFIPKEVLLSLTYAANAGPCPENLLPPKKIKTPKGTLPRLVDHVWHHPVRRNKFKYLIDHPVSLTGAGRDISFLYDVTYAKGQTREKAVCPPHLARSLQSHDGVIVPHK

SEQ ID NO: 8130 - protein, 529 aa, Homo sapiens; identical to SEQ ID NO: 8127
  Payload ID: 1686;
  Gene Symbol: AXDND1;
  Gene Name: axonemal dynein light chain domain containing 1;
  ENSP ID: ENSP00000482167

SEQ ID NO: 8131 - protein, 251 aa, Homo sapiens
  Payload ID: 1687;
  Gene Symbol: AZU1;
  Gene Name: azurocidin 1;
  Uniprot ID:  P20160;
  ENSP ID: ENSP00000233997
MTRLTVLALLAGLLASSRAGSSPLLDIVGGRKARPRQFPFLASIQNQGRHFCGGALIHARFVMTAASCFQSQNPGVSTVVLGAYDLRRRERQSRQTFSISSMSENGYDPQQNLNDLMLLQLDREANLTSSVTILPLPLQNATVEAGTRCQVAGWGSQRSGGRLSRFPRFVNVTVTPEDQCRPNNVCTGVLTRRGGICNGDGGTPLVCEGLAHGVASFSLGPCGRGPDFFTRVALFRDWIDGVLNNPGPGPA

SEQ ID NO: 8132 - protein, 251 aa, Homo sapiens; identical to SEQ ID NO: 8131
  Payload ID: 1687;
  Gene Symbol: AZU1;
  Gene Name: azurocidin 1;
  Uniprot ID:  P20160;
  ENSP ID: ENSP00000479183

SEQ ID NO: 8133 - protein, 150 aa, Homo sapiens
  Payload ID: 1687;
  Gene Symbol: AZU1;
  Gene Name: azurocidin 1;
  ENSP ID: ENSP00000481172
MTAASCFQSQNPGVSTVVLGAYDLRRRERQSRQTFSISSMSENGYDPQQNLNDLMLLQLDREANLTSSVTILPLPLQNATVEAGTRCQVAGWGSQRSGGRLSRFPRFVNVTVTPEDQCRPNNVCTGVLTRRGGICNVSAPCGGRRGPERY

SEQ ID NO: 8134 - protein, 150 aa, Homo sapiens; identical to SEQ ID NO: 8133
  Payload ID: 1687;
  Gene Symbol: AZU1;
  Gene Name: azurocidin 1;
  ENSP ID: ENSP00000488091

SEQ ID NO: 8135 - protein, 289 aa, Homo sapiens
  Payload ID: 1688;
  Gene Symbol: BTLA;
  Gene Name: B and T lymphocyte associated;
  Uniprot ID:  Q7Z6A9;
  ENSP ID: ENSP00000333919
MKTLPAMLGTGKLFWVFFLIPYLDIWNIHGKESCDVQLYIKRQSEHSILAGDPFELECPVKYCANRPHVTWCKLNGTTCVKLEDRQTSWKEEKNISFFILHFEPVLPNDNGSYRCSANFQSNLIESHSTTLYVTDVKSASERPSKDEMASRPWLLYRLLPLGGLPLLITTCFCLFCCLRRHQGKQNELSDTAGREINLVDAHLKSEQTEASTRQNSQVLLSETGIYDNDPDLCFRMQEGSEVYSNPCLEENKPGIVYASLNHSVIGPNSRLARNVKEAPTEYASICVRS

SEQ ID NO: 8136 - protein, 241 aa, Homo sapiens
  Payload ID: 1688;
  Gene Symbol: BTLA;
  Gene Name: B and T lymphocyte associated;
  Uniprot ID:  Q7Z6A9;
  ENSP ID: ENSP00000373178
MKTLPAMLGTGKLFWVFFLIPYLDIWNIHGKESCDVQLYIKRQSEHSILAGDPFELECPVKYCANRPHVTWCKLNGTTCVKLEDRQTSWKEEKNISFFILHFEPVLPNDNGSYRCSANFQSNLIESHSTTLYVTGKQNELSDTAGREINLVDAHLKSEQTEASTRQNSQVLLSETGIYDNDPDLCFRMQEGSEVYSNPCLEENKPGIVYASLNHSVIGPNSRLARNVKEAPTEYASICVRS

SEQ ID NO: 8137 - protein, 2624 aa, Homo sapiens
  Payload ID: 1689;
  Gene Symbol: BDP1;
  Gene Name: B double prime 1, subunit of RNA polymerase III transcription initiation factor IIIB;
  Uniprot ID:  A6H8Y1;
  ENSP ID: ENSP00000351575
MFRRARLSVKPNVRPGVGARGSTASNPQRGRESPRPPDPATDSASKPAEPTDVPTVDFGGAEPQEKAPRSSTEKTGGDNDVEESSRSSSTVSQRRKRISSTSSLVKSSVSVPSESHPLSTINQEAPQPTATSTKEKQPCSDRYRIYKAQKLREMLKEELRKEKKQWKNKYAINESQRPPDRSKMTMRDFIYYLPDNNPMTSSLEQEKKTEKPSTPVQTREQEGKSTPNAEDNEMEEETDDGPLLVPRVKVAEDGSIILDEESLTVEVLRTKGPCVVEENDPIFERGSTTTYSSFRKNYYSKPWSNKETDMFFLAISMVGTDFSMIGQLFPHRARIEIKNKFKREEKTNGWRIDKAFQEKRPFDFDFFAHLLQKVLAEEEKRKQKSVKNHSLKEKKSTKPRKNVKVKKVACEGVNNDPDESMSSRISDTERSQKDAQTVEEESLTLSREDAEQVALEVDLNQKKRRRKKQDGANELGVNNLLENATVQAGPSKGEKHKNKCQAIRPELKEGECSKEQMLSCTQNIDGIVGFASTEKVEKRTDPILSLSNQQDATSVATESSESSTSDLPSFEVGIRALCEVNNAEGSCIEERNVDLKNNSLEIDQTENVKPMLRGRFQRPKPNLSRAGKKSVLSQGKTESESKNSHSKTSVEKNHVEKDKMNTLDILRMETTERENPEAETVSVLGEKNCLQEGSQLKALRPVQVRGRLQKPKPNAGKAAERKEILISQEEIGANVEKNENESCADRDTPQHMEDQSRKDFEEEDVILQPEKNDSFQNVQPDEPKVLNECLSVQENNKANKLNQVPILRTRFQKPKPNIGRGTGRREISSKEEVLEKILVSGEMAAALRETVRLDTSPKEMVPAEINTKEMQSDLKETGRRAISPREKILDVIDDTIEMETGLKAMGREICLREKTPEVIDATEEIDKDLEEAGRREISPQKNGPEEVKPLGEVETDLKATGNESSPREKTPEVTDATEEIDKNLEETGRRKISPRENGPEEVKPVDEMETDLNATGRESSPREKTPEVIDATEEIDLEETEREVSPQENGLEEVKPLGEMETDLKATGRDSFPRGKTPEVIDAIEEIEIDLEETEREISPQENGLEEVKPLGEMQTDLKATGREISPREKTPEVIDATEEIDKDLEETGRREISPEENGPEEVKPVDEMETDLKTTGREGSSREKTREVIDAAEVIETDLEETEREISPQENGPEEVKPVGKMETDLKEIREEISQREKVLAEFSAIREKEIDLKETGKRDIPIMEKVSGKMAVVEEMEADLKETGKENFRERGSEEICVTEEKVAELKQTGKTDISPRENELEETSTSRQTDTHLMQSGSNDFSAVPSLDIQNISSEVLSMMHTPVEEKRNSEKEVSSHFSHFKISSQTHESDKTEVQGIQSPDVPEQFSDINLSKSLPQEQKPLEIKPAPFVRSRFKRPKPNLARAALKRETTESEKYIYEKKSETKKMETIVMQENNEQTDTLPSQHDEASLMISREKDTLGHRNEEAVILPCTQTERNLSPSNSCEPKEESQSAPVQKNDSVVSVGTNNVNTFQQEMKESVIQTARQVRGRLQRPRPNIRKTGQRQIVDKGEAKGIIKEGRTILPKDETEKKVLTVSNSQIETEIEVPSSAVPEHRMYENQSQVVLVENLHVNKTNETIRHENKPYVPSSAQMTRRKFQKAKPNLGRAHSKKEEPVLEKVTTDQSKEGKPEDHLLQKGASNTQLLLKEKAELLTSLEVSARKDCVGSKESALAKIDAELEEVGPSRRVGEETVGDNSPSSVVEEQYLNKLTSCPQPLNETSYSKIALDGKTTISSTSEYERNRGERRSHKKFKPNVTRGRGSKRVRGKTSKKEPRASKAMLVTLRASQEEDDDADDFESDYEEESYHLAPEEVNKAPVFVPVGLRSPEPVSAQIEETMEELEITVNVPDVGCIAVVEHELPNTDVTTEEMKQEENLSVPFEMTTSEHIQDEPGTNDGSTEAAITLLTMGDLVLQSEISSEQGDVGVCIIPHVHSKDKSHIPSSLDNVNHKIVHECQELSSPVITTSPASFEENKIVLEEQSSREEISLMEKVKENATPTRNTISKVTSNLRIRSRLAKPKPNLEKTLGTNRLDDYQEVSSLCVTKGAEMETQRETEKNASKATELENKNLGPVTTAENKDQSKLACVHGIKGTSISSEVNLTERNENQEESSQEVHMLSVAPVASSETGPCTLGLDRGLGENSVEEPQIKDSKGDSVLTLPVPEYTPTSIPEVQQENIINPQDLTVNLVANVPQDGEDEQAFILTLVEIPANAVEEFTDATAQFMPNPLLPAPILVKSVNTEERGDMSICLPATSVGQDAMGLSISGRDNSKKPPDNLDLVSRKRFQCRLDKNDHIPPAKKRSLTLRDDCQEYTTEVHSKELTNVFEETGESHKGQDIFLTSGSTLTTPEPQRQQVEAAFQSRGSRSPDACMDKNVPQLPQDEMIVSDKEERTDAAPKSQQMDSRTSSSKASLSRPGRRPLGFLSLICSKNSLESDEPMQVHSKKRLKPLIPGLRKKLKRSNPFNESQEKNRESSDLLPSPSVITTQSENISSSATQVSCDQPLLKEGYKSAQKRAPQGEATTVSEYFFNDIFIEVDETE

SEQ ID NO: 8138 - protein, 846 aa, Homo sapiens
  Payload ID: 1689;
  Gene Symbol: BDP1;
  Gene Name: B double prime 1, subunit of RNA polymerase III transcription initiation factor IIIB;
  ENSP ID: ENSP00000370050
MFRRARLSVKPNVRPGVGARGSTASNPQRGRESPRPPDPATDSASKPAEPTDVPTVDFGGAEPQEKAPRSSTEKTGGDNDVEESSRSSSTVSQRRKRISSTSSLVKSSVSVPSESHPLSTINQEAPQPTATSTKEKQPCSDRYRIYKAQKLREMLKEELRKEKKQWKNKYAINESQRPPDRSKMTMRDFIYYLPDNNPMTSSLEQEKKTEKPSTPVQTREQEGKSTPNAEDNEMEEETDDGPLLVPRVKVAEDGSIILDEESLTVEVLRTKGPCVVEENDPIFERGSTTTYSSFRKNYYSKPWSNKETDMFFLAISMVGTDFSMIGQLFPHRARIEIKNKFKREEKTNGWRIDKAFQEKRPFDFDFFAHLLQKVLAEEEKRKQKSVKNHSLKEKKSTKPRKNVKVKKVACEGVNNDPDESMSSRISDTERSQKDAQTVEEESLTLSREDAEQVALEVDLNQKKRRRKKQDGANELGVNNLLENATVQAGPSKGEKHKNKCQAIRPELKEGECSKEQMLSCTQNIDGIVGFASTEKVEKRTDPILSLSNQQDATSVATESSESSTSDLPSFEVGIRALCEVNNAEGSCIEERNVDLKNNSLEIDQTENVKPMLRGRFQRPKPNLSRAGKKSVLSQGKTESESKNSHSKTSVEKNHVEKDKMNTLDILRMETTERENPEAETVSVLGEKNCLQEGSQLKALRPVQVRGRLQKPKPNAGKAAERKEILISQEEIGANVEKNENESCADRDTPQHMEDQSRKDFEEEDVILQPEKNDSFQNVQPDEPKVLNECLSVQENNKANKLNQVPILRTRFQKPKPNIGRGTGRREISSKEEVLEKILSLGKWRQH

SEQ ID NO: 8139 - protein, 583 aa, Homo sapiens
  Payload ID: 1689;
  Gene Symbol: BDP1;
  Gene Name: B double prime 1, subunit of RNA polymerase III transcription initiation factor IIIB;
  ENSP ID: ENSP00000421910
  MOD_RES (1)..(1): Any amino acid
XRKDCVGSKESALAKIDAELEEVGPSRRVGEETVGDNSPSSVVEEQYLNKLTSCPQPLNETSYSKIALDGKTTISSTSEYERNRGERRSHKKFKPNVTRGRGSKRVRGKTSKKEPRASKAMLVTLRASQEEDDDADDFESDYEEESYHLAPEEVNKAPVFVPVGLRSPEPVSAQIEETMEELEITVNVPDVGCIAVVEHELPNTDVTTEEMKQEENLSVPFEMTTSEHIQDEPGTNDGSTEAAITLLTMGDLVLQSEISSEQGDGVCIIPHVHSKDKSHIPSSLDNVNHKIVHECQELSSPVITTSPASFEENKIVLEEQSSREEISLMEKVKENATPTRNTISKVTSNLRIRSRLAKPKPNLEKTLGTNRLDDYQEVSSLCVTKGAEMETQRETEKNASKATELENKNLGPVTTAENKDQSKLACVHGIKGTSISSEVNLTERNENQEESSQEVHMLSVAPVASSETGPCTLGLDRGLGENSVEEPQIKDSKGDSVLTLPVPEYTPTSIPEVQQENIINPQDLTVFVYQQLQLVKMPWVYLFLEEIILKSRLIIWILYLGRDFNAGLIKMTTFLLPKNVHSL

SEQ ID NO: 8140 - protein, 606 aa, Homo sapiens
  Payload ID: 1689;
  Gene Symbol: BDP1;
  Gene Name: B double prime 1, subunit of RNA polymerase III transcription initiation factor IIIB;
  ENSP ID: ENSP00000432404
TDVTTEEMKQEENLSVPFEMTTSEHIQDEPGVCIIPHVHSKDKSHIPSSLDNVNHKIVHECQELSSPVITTSPASFEENKIVLEEQSSREEISLMEKVKENATPTRNTISKVTSNLRIRSRLAKPKPNLEKTLGTNRLDDYQEVSSLCVTKGAEMETQRETEKNASKATELENKNLGPVTTAENKDQSKLACVHGIKGTSISSEVNLTERNENQEESSQEVHMLSVAPVASSETGPCTLGLDRGLGENSVEEPQIKDSKGDSVLTLPVPEYTPTSIPEVQQENIINPQDLTVNLVANVPQDGEDEQAFILTLVEIPANAVEEFTDATAQFMPNPLLPAPILVKSVNTEERGDMSICLPATSVGQDAMGLSISGRDNSKKPPDNLDLVSRKRFQCRLDKNDHIPPAKKRSLTLRDDCQEYTTEVHSKELTNVFEETGESHKGQDIFLTSGSTLTTPEPQRQQVEAAFQSRGSRSPDACMDKNVPQLPQDEMIVSDKEERTDAAPKSQQMDSRTSSSKASLSRPGRRPLGFLSLICSKNSLESDEPMQVHSKKRLKPLIPGLRKKLKRSNPFNESQEKNRESSDLLPSPSVITTQSENISSSATQRPF

SEQ ID NO: 8141 - protein, 583 aa, Homo sapiens; identical to SEQ ID NO: 8139
  Payload ID: 1689;
  Gene Symbol: BDP1;
  Gene Name: B double prime 1, subunit of RNA polymerase III transcription initiation factor IIIB;
  ENSP ID: ENSP00000479056
  MOD_RES (1)..(1): Any amino acid

SEQ ID NO: 8142 - protein, 606 aa, Homo sapiens; identical to SEQ ID NO: 8140
  Payload ID: 1689;
  Gene Symbol: BDP1;
  Gene Name: B double prime 1, subunit of RNA polymerase III transcription initiation factor IIIB;
  ENSP ID: ENSP00000479247

SEQ ID NO: 8143 - protein, 846 aa, Homo sapiens; identical to SEQ ID NO: 8138
  Payload ID: 1689;
  Gene Symbol: BDP1;
  Gene Name: B double prime 1, subunit of RNA polymerase III transcription initiation factor IIIB;
  ENSP ID: ENSP00000479517

SEQ ID NO: 8144 - protein, 846 aa, Homo sapiens
  Payload ID: 1689;
  Gene Symbol: BDP1;
  Gene Name: B double prime 1, subunit of RNA polymerase III transcription initiation factor IIIB;
  ENSP ID: ENSP00000480411
MFRRARLSVKPNVRPGVGARGSTASNPQRGRESPRPPEPATDSASKPAEPTDVPTVDFGGAEPQEKAPRSSTEKTGGDNDVEESSRSSSTVSQRRKRISSTSSLVKSSVSVPSESHPLSTINQEAPQPTATSTKEKQPCSDRYRIYKAQKLREMLKEELRKEKKQWKNKYAINESQRPPDRSKMTMRDFIYYLPDNNPMTSSLEQEKKTEKPSTPVQTREQEGKSTPNAEDNEMEEETDDGPLLVPRVKVAEDGSIILDEESLTVEVLRTKGPCVVEENDPIFERGSTTTYSSFRKNYYSKPWSNKETDMFFLAISMVGTDFSMIGQLFPHRARIEIKNKFKREEKTNGWRIDKAFQEKRPFDFDFFAHLLQKVLAEEEKRKQKSVKNHSLKEKKSTKPRKNVKVKKVACEGVNNDPDESMSSRISDTERSQKDAQTVEEESLTLSREDAEQVALEVDLNQKKRRRKKQDGANELGVNNLLENATVQAGPSKGEKHKNKCQAIRPELKEGECSKEQMLSCTQNIDGIVGFASTEKVEKRTDPILSLSNQQDATSVATESSESSTSDLPSFEVGIRALCEVNNAEGSCIEERNVDLKNNSLEIDQTENVKPMLRGRFQRPKPNLSRAGKKSVLSQGKTESESKNSHSKTSVEKNHVEKDKMNTLDILRMETTERENPEAETVSVLGEKNCLQEGSQLKALRPVQVRGRLQKPKPNAGKAAERKEILISQEEIGANVEKNENESCADRDTPQHMEDQSRKDFEEEDVILQPEKNDSFQNVQPDEPKVLNECLSVQENNKANKLNQVPILRTRFQKPKPNIGRGTGRREISSKEEVLEKILSLGKWRQH

SEQ ID NO: 8145 - protein, 2624 aa, Homo sapiens
  Payload ID: 1689;
  Gene Symbol: BDP1;
  Gene Name: B double prime 1, subunit of RNA polymerase III transcription initiation factor IIIB;
  ENSP ID: ENSP00000482112
MFRRARLSVKPNVRPGVGARGSTASNPQRGRESPRPPEPATDSASKPAEPTDVPTVDFGGAEPQEKAPRSSTEKTGGDNDVEESSRSSSTVSQRRKRISSTSSLVKSSVSVPSESHPLSTINQEAPQPTATSTKEKQPCSDRYRIYKAQKLREMLKEELRKEKKQWKNKYAINESQRPPDRSKMTMRDFIYYLPDNNPMTSSLEQEKKTEKPSTPVQTREQEGKSTPNAEDNEMEEETDDGPLLVPRVKVAEDGSIILDEESLTVEVLRTKGPCVVEENDPIFERGSTTTYSSFRKNYYSKPWSNKETDMFFLAISMVGTDFSMIGQLFPHRARIEIKNKFKREEKTNGWRIDKAFQEKRPFDFDFFAHLLQKVLAEEEKRKQKSVKNHSLKEKKSTKPRKNVKVKKVACEGVNNDPDESMSSRISDTERSQKDAQTVEEESLTLSREDAEQVALEVDLNQKKRRRKKQDGANELGVNNLLENATVQAGPSKGEKHKNKCQAIRPELKEGECSKEQMLSCTQNIDGIVGFASTEKVEKRTDPILSLSNQQDATSVATESSESSTSDLPSFEVGIRALCEVNNAEGSCIEERNVDLKNNSLEIDQTENVKPMLRGRFQRPKPNLSRAGKKSVLSQGKTESESKNSHSKTSVEKNHVEKDKMNTLDILRMETTERENPEAETVSVLGEKNCLQEGSQLKALRPVQVRGRLQKPKPNAGKAAERKEILISQEEIGANVEKNENESCADRDTPQHMEDQSRKDFEEEDVILQPEKNDSFQNVQPDEPKVLNECLSVQENNKANKLNQVPILRTRFQKPKPNIGRGTGRREISSKEEVLEKILVSGEMAAALRETVRLDTSPKEMVPAEINTKEMQSDLKETGRRAISPREKILDVIDDTIEMETGLKAMGREICLREKTPEVIDATEEIDKDLEEAGRREISPQKNGPEEVKPLGEVETDLKATGNESSPREKTPEVTDATEEIDKNLEETGRRKISPRENGPEEVKPVDEMETDLNATGRESSPREKTPEVIDATEEIDLEETEREVSPQENGLEEVKPLGEMETDLKATGRDSFPRGKTPEVIDAIEEIEIDLEETEREISPQENGLEEVKPLGEMQTDLKATGREISPREKTPEVIDATEEIDKDLEETGRREISPEENGPEEVKPVDEMETDLKTTGREGSSREKTREVIDAAEVIETDLEETEREISPQENGPEEVKPVGKMETDLKEIREEISQREKVLAEFSAIREKEIDLKETGKRDIPIMEKVSGKMAVVEEMEADLKETGKENFRERGSEEICVTEEKVAELKQTGKTDISPRENELEETSTSRQTDTHLMQSGSNDFSAVPSLDIQNISSEVLSMMHTPVEEKRNSEKEVSSHFSHFKISSQTHESDKTEVQGIQSPDVPEQFSDINLSKSLPQEQKPLEIKPAPFVRSRFKRPKPNLARAALKRETTESEKYIYEKKSETKKMETIVMQENNEQTDTLPSQHDEASLMISREKDTLGHRNEEAVILPCTQTERNLSPSNSCEPKEESQSAPVQKNDSVVSVGTNNVNTFQQEMKESVIQTARQVRGRLQRPRPNIRKTGQRQIVDKGEAKGIIKEGRTILPKDETEKKVLTVSNSQIETEIEVPSSAVPEHRMYENQSQVVLVENLHVNKTNETIRHENKPYVPSSAQMTRRKFQKAKPNLGRAHSKKEEPVLEKVTTDQSKEGKPEDHLLQKGASNTQLLLKEKAELLTSLEVSARKDCVGSKESALAKIDAELEEVGPSRRVGEETVGDNSPSSVVEEQYLNKLTSCPQPLNETSYSKIALDGKTTISSTSEYERNRGERRSHKKFKPNVTRGRGSKRVRGKTSKKEPRASKAMLVTLRASQEEDDDADDFESDYEEESYHLAPEEVNKAPVFVPVGLRSPEPVSAQIEETMEELEITVNVPDVGCIAVVEHELPNTDVTTEEMKQEENLSVPFEMTTSEHIQDEPGTNDGSTEAAITLLTMGDLVLQSEISSEQGDVGVCIIPHVHSKDKSHIPSSLDNVNHKIVHECQELSSPVITTSPASFEENKIVLEEQSSREEISLMEKVKENATPTRNTISKVTSNLRIRSRLAKPKPNLEKTLGTNRLDDYQEVSSLCVTKGAEMETQRETEKNASKATELENKNLGPVTTAENKDQSKLACVHGIKGTSISSEVNLTERNENQEESSQEVHMLSVAPVASSETGPCTLGLDRGLGENSVEEPQIKDSKGDSVLTLPVPEYTPTSIPEVQQENIINPQDLTVNLVANVPQDGEDEQAFILTLVEIPANAVEEFTDATAQFMPNPLLPAPILVKSVNTEERGDMSICLPATSVGQDAMGLSISGRDNSKKPPDNLDLVSRKRFQCRLDKNDHIPPAKKRSLTLRDDCQEYTTEVHSKELTNVFEETGESHKGQDIFLTSGSTLTTPEPQRQQVEAAFQSRGSRSPDACMDKNVPQLPQDEMIVSDKEERTDAAPKSQQMDSRTSSSKASLSRPGRRPLGFLSLICSKNSLESDEPMQVHSKKRLKPLIPGLRKKLKRSNPFNESQEKNRESSDLLPSPSVITTQSENISSSATQVSCDQPLLKEGYKSAQKRAPQGEATTVSEYFFNDIFIEVDETE

SEQ ID NO: 8146 - protein, 2624 aa, Homo sapiens; identical to SEQ ID NO: 8137
  Payload ID: 1689;
  Gene Symbol: BDP1;
  Gene Name: B double prime 1, subunit of RNA polymerase III transcription initiation factor IIIB;
  Uniprot ID:  A6H8Y1;
  ENSP ID: ENSP00000482469

SEQ ID NO: 8147 - protein, 583 aa, Homo sapiens; identical to SEQ ID NO: 8139
  Payload ID: 1689;
  Gene Symbol: BDP1;
  Gene Name: B double prime 1, subunit of RNA polymerase III transcription initiation factor IIIB;
  ENSP ID: ENSP00000485731
  MOD_RES (1)..(1): Any amino acid

SEQ ID NO: 8148 - protein, 606 aa, Homo sapiens; identical to SEQ ID NO: 8140
  Payload ID: 1689;
  Gene Symbol: BDP1;
  Gene Name: B double prime 1, subunit of RNA polymerase III transcription initiation factor IIIB;
  ENSP ID: ENSP00000487333

SEQ ID NO: 8149 - protein, 39 aa, Homo sapiens
  Payload ID: 1690;
  Gene Symbol:;
  Gene Name: B melanoma antigen family, member 5 [Source:EntrezGene;Acc:85316];
  ENSP ID: ENSP00000485185
MAAGAVFLALSAQLLQARLMKEESPVVSWRLEPEDGTAL

SEQ ID NO: 8150 - protein, 204 aa, Homo sapiens
  Payload ID: 1691;
  Gene Symbol: B9D1;
  Gene Name: B9 prt domain 1;
  Uniprot ID:  Q9UPM9;
  ENSP ID: ENSP00000261499
MATASPSVFLLMVNGQVESAQFPEYDDLYCKYCFVYGQDWAPTAGLEEGISQITSKSQDVRQALVWNFPIDVTFKSTNPYGWPQIVLSVYGPDVFGNDVVRGYGAVHVPFSPGRHKRTIPMFVPESTSKLQKFTSWFMGRRPEYTDPKVVAQGEGREVTRVRSQGFVTLLFNVVTKDMRKLGYDTGPSDTQGVLGPSPPQSFPQ

SEQ ID NO: 8151 - protein, 153 aa, Homo sapiens
  Payload ID: 1691;
  Gene Symbol: B9D1;
  Gene Name: B9 prt domain 1;
  Uniprot ID:  Q9UPM9;
  ENSP ID: ENSP00000268841
MATASPSVFLLMVNGQVESAQFPEYDDLYCKYCFVYGQDWAPTAGLEEGISQITSKSQDVRQALVWNFPIDVTFKSTNPYGWPQIVLSVYGPDVFGNDVVRGYGAVHVPFSPGRHKRTIPMFVPESTSKLQKFTSLCLVASSDLQAAPPTEDK

SEQ ID NO: 8152 - protein, 161 aa, Homo sapiens
  Payload ID: 1691;
  Gene Symbol: B9D1;
  Gene Name: B9 prt domain 1;
  ENSP ID: ENSP00000378977
MATASPSVFLLMVNGQVESAQFPEYDDLYCKYCFVYGQDWAPTAGLEEGISQITSKSQDVRQALVWNFPIDVTFKSTNPYGWPQIVLSVYGPDVFGNDVVRGYGAVHVPFSPGRHKRTIPMFVPESTSKLQKFTSWFMGRRPEYTDPKVVAQGEGREAQPG

SEQ ID NO: 8153 - protein, 187 aa, Homo sapiens
  Payload ID: 1691;
  Gene Symbol: B9D1;
  Gene Name: B9 prt domain 1;
  ENSP ID: ENSP00000378978
MATASPSVFLLMVNGQVESAQFPEYDDLYCKYCFVYGQDWAPTAGLEEGISQITSKSQDVRQALVWNFPIDVTFKSTNPYGWPQIVLSVYGPDVFGNDVVRGYGAVHVPFSPGRHKRTIPMFVPESTSKLQKFTSWFMGRRPEYTDPKVVAQGEGREDENAEAEIPRSTWVSLCPSPAWLMLPFCPQ

SEQ ID NO: 8154 - protein, 133 aa, Homo sapiens
  Payload ID: 1691;
  Gene Symbol: B9D1;
  Gene Name: B9 prt domain 1;
  ENSP ID: ENSP00000410835
LLMVNGQVESAQFPEYDDLYCKYCFVYGQDWAPTAGLEEGISQITSKSQDVRQALVWNFPIDVTFKSTNPYGWPQIVLSVYGPDVFGNDVVRGYGAVHVPFSPGRHKRTIPMFVPESTSKLQKFTRSASCSTH

SEQ ID NO: 8155 - protein, 186 aa, Homo sapiens
  Payload ID: 1691;
  Gene Symbol: B9D1;
  Gene Name: B9 prt domain 1;
  ENSP ID: ENSP00000433359
MATASPSVFLLMVNGQVESAQFPEYDDLYCKYCFVYGQDWAPTAGLEEGISQITSKSQDVRQALVWNFPIDVTFKSTNPYGWPQIVLSVYGPDVFGNDVVRGYGAVHVPFSPGRHKRTIPMFVPESTSKLQKFTSWFMGRRPEYTDPKVVAQGEGREAITAPRKAVFSVHGLTSPRALALVHIKGT

SEQ ID NO: 8156 - protein, 140 aa, Homo sapiens
  Payload ID: 1691;
  Gene Symbol: B9D1;
  Gene Name: B9 prt domain 1;
  ENSP ID: ENSP00000458525
MMTSTASTALCTARTGPPQRVWRRGSHRSHPRAKMCGKHWCGTSPLMSPLKAPTPTAGHRSCSACMDQMCSGTMWFEAMGPCTCPSHLAGTKGPSPCLSQNLRLNCRSLQAGSWGGGPSTQTPRWWLRVKAGKVKLPPLS

SEQ ID NO: 8157 - protein, 147 aa, Homo sapiens
  Payload ID: 1691;
  Gene Symbol: B9D1;
  Gene Name: B9 prt domain 1;
  ENSP ID: ENSP00000459857
MMTSTASTALCTARTGPPQRVWRRGSHRSHPRAKMCGKHWCGTSPLMSPLKAPTPTAGHRSCSACMDQMCSGTMWFEAMGPCTCPSHLAGTKGPSPCLSQNLRLNCRSLQAGSWGGGPSTQTPRWWLRVKAGKPPSGLSVKDSSVSR

SEQ ID NO: 8158 - protein, 213 aa, Homo sapiens
  Payload ID: 1691;
  Gene Symbol: B9D1;
  Gene Name: B9 prt domain 1;
  ENSP ID: ENSP00000460939
MMTSTASTALCTARTGPPQRVWRRGSHRSHPRAKMCGKHWCGTSPLMSPLKAPTPTAGHRSCSACMDQMCSGTMWFEAMGPCTCPSHLAGTKGPSPCLSQNLRLNCRSLQAGSWGGGPSTQTPRWWLRVKAGKVKLPPLSYPHPPYRLQPGSGWAQGWGECRGPARHIGASPQMFPDEGLVGAQRVCHVCLSRQPLYLPVRGLGQALLSPFYR

SEQ ID NO: 8159 - protein, 106 aa, Homo sapiens
  Payload ID: 1691;
  Gene Symbol: B9D1;
  Gene Name: B9 prt domain 1;
  ENSP ID: ENSP00000462565
MMTSTASTALCTARTGPPQRVWRRGSHRSHPRAKMCGKHWCGTSPLMSPLKAPTPTAGHRSCSACMDQMCSGTMWFEAMGPCTCPSHLAGTKGPSPCLSQNLRLNC

SEQ ID NO: 8160 - protein, 112 aa, Homo sapiens
  Payload ID: 1691;
  Gene Symbol: B9D1;
  Gene Name: B9 prt domain 1;
  ENSP ID: ENSP00000463165
SNRARPRWVPPAPPDLPWRPRVLASFYSWSTGRWRAPSFQSMMTSTASTALCTARTGPPQRVWRRGSHRSHPRAKMCGKHWCGTSPLMSPLKAPTPTAAVQLAFWKFRVHQG

SEQ ID NO: 8161 - protein, 19 aa, Homo sapiens
  Payload ID: 1691;
  Gene Symbol: B9D1;
  Gene Name: B9 prt domain 1;
  ENSP ID: ENSP00000463255
MMTSTASTALCTARTGPPQ

SEQ ID NO: 8162 - protein, 175 aa, Homo sapiens
  Payload ID: 1692;
  Gene Symbol: B9D2;
  Gene Name: B9 prt domain 2;
  Uniprot ID:  Q9BPU9;
  ENSP ID: ENSP00000243578
MAEVHVIGQIIGASGFSESSLFCKWGIHTGAAWKLLSGVREGQTQVDTPQIGDMAYWSHPIDLHFATKGLQGWPRLHFQVWSQDSFGRCQLAGYGFCHVPSSPGTHQLACPTWRPLGSWREQLARAFVGGGPQLLHGDTIYSGADRYRLHTAAGGTVHLEIGLLLRNFDRYGVEC

SEQ ID NO: 8163 - protein, 82 aa, Homo sapiens
  Payload ID: 1692;
  Gene Symbol: B9D2;
  Gene Name: B9 prt domain 2;
  ENSP ID: ENSP00000469666
MAEVHVIGQIIGASGFSESSLFCKWGIHTETGSRYVAQAGLELLRSNRPPTSASQSARIKNGRHGSSCQACGRAKRKWTPRR

SEQ ID NO: 8164 - protein, 487 aa, Homo sapiens
  Payload ID: 1693;
  Gene Symbol: BPI;
  Gene Name: bactericidal/permeability-increasing prt;
  Uniprot ID:  P17213;
  ENSP ID: ENSP00000262865
MRENMARGPCNAPRWASLMVLVAIGTAVTAAVNPGVVVRISQKGLDYASQQGTAALQKELKRIKIPDYSDSFKIKHLGKGHYSFYSMDIREFQLPSSQISMVPNVGLKFSISNANIKISGKWKAQKRFLKMSGNFDLSIEGMSISADLKLGSNPTSGKPTITCSSCSSHINSVHVHISKSKVGWLIQLFHKKIESALRNKMNSQVCEKVTNSVSSELQPYFQTLPVMTKIDSVAGINYGLVAPPATTAETLDVQMKGEFYSENHHNPPPFAPPVMEFPAAHDRMVYLGLSDYFFNTAGLVYQEAGVLKMTLRDDMIPKESKFRLTTKFFGTFLPEVAKKFPNMKIQIHVSASTPPHLSVQPTGLTFYPAVDVQAFAVLPNSSLASLFLIGMHTTGSMEVSAESNRLVGELKLDRLLLELKHSNIGPFPVELLQDIMNYIVPILVLPRVNEKLQKGFPLPTPARVQLYNVVLQPHQNFLLFGADVVYK

SEQ ID NO: 8165 - protein, 95 aa, Homo sapiens
  Payload ID: 1693;
  Gene Symbol: BPI;
  Gene Name: bactericidal/permeability-increasing prt;
  ENSP ID: ENSP00000391511
MEKPGEDAARDGLLPLNPCWGGSRDGGSLCCPGWSQTPGPKPSSQSAGITSVSHHAKPDFKIFANPVDKTGDWKKGPEIQTQKPPPEATRQPGPL

SEQ ID NO: 8166 - protein, 123 aa, Homo sapiens
  Payload ID: 1693;
  Gene Symbol: BPI;
  Gene Name: bactericidal/permeability-increasing prt;
  ENSP ID: ENSP00000393126
MEKPGEDAARDGLLPLNPCWGGSRDGGSLCCPGWSQTPGPKPSSQSAGITSVSHHAKPDFKIFANPVAPWFNLKALRFWQLWRMRENMARGPCNAPRWASLMVLVAIGTAVTAAVNPGVVVRI

SEQ ID NO: 8167 - protein, 286 aa, Homo sapiens
  Payload ID: 1693;
  Gene Symbol: BPI;
  Gene Name: bactericidal/permeability-increasing prt;
  ENSP ID: ENSP00000409833
MENVCEKVTNSVSSELQPYFQTLPVMTKIDSVAGINYGLVAPPATTAETLDVQMKGEFYSENHHNPPPFAPPVMEFPAAHDRMVYLGLSDYFFNTAGLVYQEAGVLKMTLRDDMIPKESKFRLTTKFFGTFLPEVAKKFPNMKIQIHVSASTPPHLSVQPTGLTFYPAVDVQAFAVLPNSSLASLFLIGMHTTGSMEVSAESNRLVGELKLDRLLLELKHSNIGPFPVELLQDIMNYIVPILVLPRVNEKLQKGFPLPTPARVQLYNVVLQPHQNFLLFGADVVYK

SEQ ID NO: 8168 - protein, 55 aa, Homo sapiens
  Payload ID: 1693;
  Gene Symbol: BPI;
  Gene Name: bactericidal/permeability-increasing prt;
  ENSP ID: ENSP00000486976
MENVCEKVTNSVSSELQPYFQTLPVMTKIDSVAGINYGLVAPPATTAETLDVQMK

SEQ ID NO: 8169 - protein, 29 aa, Homo sapiens
  Payload ID: 1693;
  Gene Symbol: BPI;
  Gene Name: bactericidal/permeability-increasing prt;
  ENSP ID: ENSP00000487406
MEKPGEDAARDGLLPLNPCWGGSRCTMLL

SEQ ID NO: 8170 - protein, 618 aa, Homo sapiens
  Payload ID: 1694;
  Gene Symbol: BIRC2;
  Gene Name: baculoviral IAP repeat containing 2;
  Uniprot ID:  Q13490;
  ENSP ID: ENSP00000227758
MHKTASQRLFPGPSYQNIKSIMEDSTILSDWTNSNKQKMKYDFSCELYRMSTYSTFPAGVPVSERSLARAGFYYTGVNDKVKCFCCGLMLDNWKLGDSPIQKHKQLYPSCSFIQNLVSASLGSTSKNTSPMRNSFAHSLSPTLEHSSLFSGSYSSLSPNPLNSRAVEDISSSRTNPYSYAMSTEEARFLTYHMWPLTFLSPSELARAGFYYIGPGDRVACFACGGKLSNWEPKDDAMSEHRRHFPNCPFLENSLETLRFSISNLSMQTHAARMRTFMYWPSSVPVQPEQLASAGFYYVGRNDDVKCFCCDGGLRCWESGDDPWVEHAKWFPRCEFLIRMKGQEFVDEIQGRYPHLLEQLLSTSDTTGEENADPPIIHFGPGESSSEDAVMMNTPVVKSALEMGFNRDLVKQTVQSKILTTGENYKTVNDIVSALLNAEDEKREEEKEKQAEEMASDDLSLIRKNRMALFQQLTCVLPILDNLLKANVINKQEHDIIKQKTQIPLQARELIDTILVKGNAAANIFKNCLKEIDSTLYKNLFVDKNMKYIPTEDVSGLSLEEQLRRLQEERTCKVCMDKEVSVVFIPCGHLVVCQECAPSLRKCPICRGIIKGTVRTFLS

SEQ ID NO: 8171 - protein, 569 aa, Homo sapiens
  Payload ID: 1694;
  Gene Symbol: BIRC2;
  Gene Name: baculoviral IAP repeat containing 2;
  Uniprot ID:  Q13490;
  ENSP ID: ENSP00000431723
MSTYSTFPAGVPVSERSLARAGFYYTGVNDKVKCFCCGLMLDNWKLGDSPIQKHKQLYPSCSFIQNLVSASLGSTSKNTSPMRNSFAHSLSPTLEHSSLFSGSYSSLSPNPLNSRAVEDISSSRTNPYSYAMSTEEARFLTYHMWPLTFLSPSELARAGFYYIGPGDRVACFACGGKLSNWEPKDDAMSEHRRHFPNCPFLENSLETLRFSISNLSMQTHAARMRTFMYWPSSVPVQPEQLASAGFYYVGRNDDVKCFCCDGGLRCWESGDDPWVEHAKWFPRCEFLIRMKGQEFVDEIQGRYPHLLEQLLSTSDTTGEENADPPIIHFGPGESSSEDAVMMNTPVVKSALEMGFNRDLVKQTVQSKILTTGENYKTVNDIVSALLNAEDEKREEEKEKQAEEMASDDLSLIRKNRMALFQQLTCVLPILDNLLKANVINKQEHDIIKQKTQIPLQARELIDTILVKGNAAANIFKNCLKEIDSTLYKNLFVDKNMKYIPTEDVSGLSLEEQLRRLQEERTCKVCMDKEVSVVFIPCGHLVVCQECAPSLRKCPICRGIIKGTVRTFLS

SEQ ID NO: 8172 - protein, 79 aa, Homo sapiens
  Payload ID: 1694;
  Gene Symbol: BIRC2;
  Gene Name: baculoviral IAP repeat containing 2;
  ENSP ID: ENSP00000432410
MECNFVAVEDISSSRTNPYSYAMSTEEARFLTYHMWPLTFLSPSELARAGFYYIGPGDRVACFACGGKLSNWEPKDDAM

SEQ ID NO: 8173 - protein, 182 aa, Homo sapiens
  Payload ID: 1694;
  Gene Symbol: BIRC2;
  Gene Name: baculoviral IAP repeat containing 2;
  ENSP ID: ENSP00000433851
MKGQEFVDEIQGRYPHLLEQLLSTSDTTGEENADPPIIHFGPGESSSEDAVMMNTPVVKSALEMGFNRDLVKQTVQSKILTTGENYKTVNDIVSALLNAEDEKREEEKEKQAEEMASDDLSLIRKNRMALFQQLTCVLPILDNLLKANVINKQEHDIIKQKTQIPLQARELIDTILVKGNAA

SEQ ID NO: 8174 - protein, 262 aa, Homo sapiens
  Payload ID: 1694;
  Gene Symbol: BIRC2;
  Gene Name: baculoviral IAP repeat containing 2;
  ENSP ID: ENSP00000434557
YDFSCELYRMSTYSTFPAGVPVSERSLARAGFYYTGVNDKVKCFCCGLMLDNWKLGDSPIQKHKQLYPSCSFIQNLVSASLGSTSKNTSPMRNSFAHSLSPTLEHSSLFSGSYSSLSPNPLNSRAVEDISSSRTNPYSYAMSTEEARFLTYHMWPLTFLSPSELARAGFYYIGPGDRVACFACGGKLSNWEPKDDAMSEHRRHFPNCPFLENSLETLRFSISNLSMQTHAARMRTFMYWPSSVPVQPEQLASAGFYYVGVSS

SEQ ID NO: 8175 - protein, 149 aa, Homo sapiens
  Payload ID: 1694;
  Gene Symbol: BIRC2;
  Gene Name: baculoviral IAP repeat containing 2;
  ENSP ID: ENSP00000434708
MEDSTILSDWTNSNKQKMKYDFSCELYRMSTYSTFPAGVPVSERSLARAGFYYTGVNDKVKCFCCGLMLDNWKLGDSPIQKHKQLYPSCSFIQNLVSASLGSTSKNTSPMRNSFAHSLSPTLEHSSLFSGSYSSLSPNPLNSRAVEDIS

SEQ ID NO: 8176 - protein, 597 aa, Homo sapiens
  Payload ID: 1694;
  Gene Symbol: BIRC2;
  Gene Name: baculoviral IAP repeat containing 2;
  ENSP ID: ENSP00000434979
MEDSTILSDWTNSNKQKMKYDFSCELYRMSTYSTFPAGVPVSERSLARAGFYYTGVNDKVKCFCCGLMLDNWKLGDSPIQKHKQLYPSCSFIQNLVSASLGSTSKNTSPMRNSFAHSLSPTLEHSSLFSGSYSSLSPNPLNSRAVEDISSSRTNPYSYAMSTEEARFLTYHMWPLTFLSPSELARAGFYYIGPGDRVACFACGGKLSNWEPKDDAMSEHRRHFPNCPFLENSLETLRFSISNLSMQTHAARMRTFMYWPSSVPVQPEQLASAGFYYVGRNDDVKCFCCDGGLRCWESGDDPWVEHAKWFPRCEFLIRMKGQEFVDEIQGRYPHLLEQLLSTSDTTGEENADPPIIHFGPGESSSEDAVMMNTPVVKSALEMGFNRDLVKQTVQSKILTTGENYKTVNDIVSALLNAEDEKREEEKEKQAEEMASDDLSLIRKNRMALFQQLTCVLPILDNLLKANVINKQEHDIIKQKTQIPLQARELIDTILVKGNAAANIFKNCLKEIDSTLYKNLFVDKNMKYIPTEDVSGLSLEEQLRRLQEERTCKVCMDKEVSVVFIPCGHLVVCQECAPSLRKCPICRGIIKGTVRTFLS

SEQ ID NO: 8177 - protein, 139 aa, Homo sapiens
  Payload ID: 1694;
  Gene Symbol: BIRC2;
  Gene Name: baculoviral IAP repeat containing 2;
  ENSP ID: ENSP00000436741
MALFQQLTCVLPILDNLLKANVINKQEHDIIKQKTQIPLQARELIDTILVKGNAAANIFKNCLKEIDSTLYKNLFVDKNMKYIPTEDVSGLSLEEQLRRLQEERTCKVCMDKEVSVVFIPCGHLVVCQECAPSLRKCPI

SEQ ID NO: 8178 - protein, 618 aa, Homo sapiens; identical to SEQ ID NO: 8170
  Payload ID: 1694;
  Gene Symbol: BIRC2;
  Gene Name: baculoviral IAP repeat containing 2;
  Uniprot ID:  Q13490;
  ENSP ID: ENSP00000477613

SEQ ID NO: 8179 - protein, 534 aa, Homo sapiens [sequence omitted]

SEQ ID NO: 8180 - protein, 604 aa, Homo sapiens
  Payload ID: 1695;
  Gene Symbol: BIRC3;
  Gene Name: baculoviral IAP repeat containing 3;
  Uniprot ID:  Q13489;
  ENSP ID: ENSP00000263464
MNIVENSIFLSNLMKSANTFELKYDLSCELYRMSTYSTFPAGVPVSERSLARAGFYYTGVNDKVKCFCCGLMLDNWKRGDSPTEKHKKLYPSCRFVQSLNSVNNLEATSQPTFPSSVTNSTHSLLPGTENSGYFRGSYSNSPSNPVNSRANQDFSALMRSSYHCAMNNENARLLTFQTWPLTFLSPTDLAKAGFYYIGPGDRVACFACGGKLSNWEPKDNAMSEHLRHFPKCPFIENQLQDTSRYTVSNLSMQTHAARFKTFFNWPSSVLVNPEQLASAGFYYVGNSDDVKCFCCDGGLRCWESGDDPWVQHAKWFPRCEYLIRIKGQEFIRQVQASYPHLLEQLLSTSDSPGDENAESSIIHFEPGEDHSEDAIMMNTPVINAAVEMGFSRSLVKQTVQRKILATGENYRLVNDLVLDLLNAEDEIREEERERATEEKESNDLLLIRKNRMALFQHLTCVIPILDSLLTAGIINEQEHDVIKQKTQTSLQARELIDTILVKGNIAATVFRNSLQEAEAVLYEHLFVQQDIKYIPTEDVSDLPVEEQLRRLQEERTCKVCMDKEVSIVFIPCGHLVVCKDCAPSLRKCPICRSTIKGTVRTFLS

SEQ ID NO: 8181 - protein, 183 aa, Homo sapiens
  Payload ID: 1695;
  Gene Symbol: BIRC3;
  Gene Name: baculoviral IAP repeat containing 3;
  ENSP ID: ENSP00000431718
QLQDTSRYTVSNLSMQTHAARFKTFFNWPSSVLVNPEQLASAGFYYVGNSDDVKCFCCDGGLRCWESGDDPWVQHAKWFPRWSLALLPRLECDGVMSAHCNLRLLGSGNSHASSLASSWDYRCEYLIRIKGQEFIRQVQASYPHLLEQLLSTSDSPGDENAESSIIHFEPGEDHSEDAIMMNT

SEQ ID NO: 8182 - protein, 604 aa, Homo sapiens; identical to SEQ ID NO: 8180
  Payload ID: 1695;
  Gene Symbol: BIRC3;
  Gene Name: baculoviral IAP repeat containing 3;
  Uniprot ID:  Q13489;
  ENSP ID: ENSP00000432907

SEQ ID NO: 8183 - protein, 604 aa, Homo sapiens; identical to SEQ ID NO: 8180
  Payload ID: 1695;
  Gene Symbol: BIRC3;
  Gene Name: baculoviral IAP repeat containing 3;
  Uniprot ID:  Q13489;
  ENSP ID: ENSP00000481903

SEQ ID NO: 8184 - protein, 165 aa, Homo sapiens
  Payload ID: 1696;
  Gene Symbol: BIRC5;
  Gene Name: baculoviral IAP repeat containing 5;
  ENSP ID: ENSP00000301633
MGAPTLPPAWQPFLKDHRISTFKNWPFLEGCACTPERMAEAGFIHCPTENEPDLAQCFFCFKELEGWEPDDDPIGPGTVAYACNTSTLGGRGGRITREEHKKHSSGCAFLSVKKQFEELTLGEFLKLDRERAKNKIAKETNNKKKEFEETAEKVRRAIEQLAAMD

SEQ ID NO: 8185 - protein, 142 aa, Homo sapiens
  Payload ID: 1696;
  Gene Symbol: BIRC5;
  Gene Name: baculoviral IAP repeat containing 5;
  ENSP ID: ENSP00000324180
MGAPTLPPAWQPFLKDHRISTFKNWPFLEGCACTPERMAEAGFIHCPTENEPDLAQCFFCFKELEGWEPDDDPIEEHKKHSSGCAFLSVKKQFEELTLGEFLKLDRERAKNKIAKETNNKKKEFEETAEKVRRAIEQLAAMD

SEQ ID NO: 8186 - protein, 137 aa, Homo sapiens
  Payload ID: 1696;
  Gene Symbol: BIRC5;
  Gene Name: baculoviral IAP repeat containing 5;
  Uniprot ID:  O15392;
  ENSP ID: ENSP00000364086
MGAPTLPPAWQPFLKDHRISTFKNWPFLEGCACTPERMAEAGFIHCPTENEPDLAQCFFCFKELEGWEPDDDPMQRKPTIRRKNLRKLRRKCAVPSSSWLPWIEASGRSCLVPEWLHHFQGLFPGATSLPVGPLAMS

SEQ ID NO: 8187 - protein, 74 aa, Homo sapiens
  Payload ID: 1696;
  Gene Symbol: BIRC5;
  Gene Name: baculoviral IAP repeat containing 5;
  Uniprot ID:  O15392;
  ENSP ID: ENSP00000465868
MGAPTLPPAWQPFLKDHRISTFKNWPFLEGCACTPERMAEAGFIHCPTENEPDLAQCFFCFKELEGWEPDDDPM

SEQ ID NO: 8188 - protein, 83 aa, Homo sapiens
  Payload ID: 1696;
  Gene Symbol: BIRC5;
  Gene Name: baculoviral IAP repeat containing 5;
  ENSP ID: ENSP00000466063
  MOD_RES (1)..(1): Any amino acid
XNWPFLEGCACTPERMAEAGFIHCPTENEPDLAQCFFCFKELEGWEPDDDPIGPGTVAYACNTSTLGGRGGRITRSGDRDHLG

SEQ ID NO: 8189 - protein, 78 aa, Homo sapiens
  Payload ID: 1696;
  Gene Symbol: BIRC5;
  Gene Name: baculoviral IAP repeat containing 5;
  Uniprot ID:  O15392;
  ENSP ID: ENSP00000466617
MGAPTLPPAWQPFLKDHRISTFKNWPFLEGCACTPERMAEAGFIHCPTENEPDLAQCFFCFKELEGWEPDDDPMRELC

SEQ ID NO: 8190 - protein, 121 aa, Homo sapiens
  Payload ID: 1696;
  Gene Symbol: BIRC5;
  Gene Name: baculoviral IAP repeat containing 5;
  ENSP ID: ENSP00000466675
  MOD_RES (1)..(1): Any amino acid
XNWPFLEGCACTPERMAEAGFIHCPTENEPDLAQCFFCFKELEGWEPDDDPIGPGTVAYACNTSTLGGRGGRITREEHKKHSSGCAFLSVKKQFEELTLGEFLKLDRERAKNKIERALLAE

SEQ ID NO: 8191 - protein, 52 aa, Homo sapiens
  Payload ID: 1696;
  Gene Symbol: BIRC5;
  Gene Name: baculoviral IAP repeat containing 5;
  ENSP ID: ENSP00000467259
  MOD_RES (1)..(1): Any amino acid
XNWPFLEGCACTPERMAEAGFIHCPTENEPDLAQCFFCFKELEGWEPDDDPM

SEQ ID NO: 8192 - protein, 120 aa, Homo sapiens
  Payload ID: 1696;
  Gene Symbol: BIRC5;
  Gene Name: baculoviral IAP repeat containing 5;
  Uniprot ID:  O15392;
  ENSP ID: ENSP00000467336
MGAPTLPPAWQPFLKDHRISTFKNWPFLEGCACTPERMAEAGFIHCPTENEPDLAQCFFCFKELEGWEPDDDPIEEHKKHSSGCAFLSVKKQFEELTLGEFLKLDRERAKNKIERALLAE

SEQ ID NO: 8193 - protein, 110 aa, Homo sapiens
  Payload ID: 1697;
  Gene Symbol: BIRC6;
  Gene Name: baculoviral IAP repeat containing 6;
  ENSP ID: ENSP00000393590
  MOD_RES (1)..(1): Any amino acid
XEDHKEDILCGPVWLASGLDLSGHAGMLTLTSPKLVKGMAGGKYRSFLIHVKAVNERGTEEICNGGMRPVVRLPSLKHQSNKGYSLASLLAKVAAGKSATMCHVTVFRIS

SEQ ID NO: 8194 - protein, 4857 aa, Homo sapiens
  Payload ID: 1697;
  Gene Symbol: BIRC6;
  Gene Name: baculoviral IAP repeat containing 6;
  Uniprot ID:  Q9NR09;
  ENSP ID: ENSP00000393596
MVTGGGAAPPGTVTEPLPSVIVLSAGRKMAAAAAAASGPGCSSAAGAGAAGVSEWLVLRDGCMHCDADGLHSLSYHPALNAILAVTSRGTIKVIDGTSGATLQASALSAKPGGQVKCQYISAVDKVIFVDDYAVGCRKDLNGILLLDTALQTPVSKQDDVVQLELPVTEAQQLLSACLEKVDISSTEGYDLFITQLKDGLKNTSHETAANHKVAKWATVTFHLPHHVLKSIASAIVNELKKINQNVAALPVASSVMDRLSYLLPSARPELGVGPGRSVDRSLMYSEANRRETFTSWPHVGYRWAQPDPMAQAGFYHQPASSGDDRAMCFTCSVCLVCWEPTDEPWSEHERHSPNCPFVKGEHTQNVPLSVTLATSPAQFPCTDGTDRISCFGSGSCPHFLAAATKRGKICIWDVSKLMKVHLKFEINAYDPAIVQQLILSGDPSSGVDSRRPTLAWLEDSSSCSDIPKLEGDSDDLLEDSDSEEHSRSDSVTGHTSQKEAMEVSLDITALSILQQPEKLQWEIVANVLEDTVKDLEELGANPCLTNSKSEKTKEKHQEQHNIPFPCLLAGGLLTYKSPATSPISSNSHRSLDGLSRTQGESISEQGSTDNESCTNSELNSPLVRRTLPVLLLYSIKESDEKAGKIFSQMNNIMSKSLHDDGFTVPQIIEMELDSQEQLLLQDPPVTYIQQFADAAANLTSPDSEKWNSVFPKPGTLVQCLRLPKFAEEENLCIDSITPCADGIHLLVGLRTCPVESLSAINQVEALNNLNKLNSALCNRRKGELESNLAVVNGANISVIQHESPADVQTPLIIQPEQRNVSGGYLVLYKMNYATRIVTLEEEPIKIQHIKDPQDTITSLILLPPDILDNREDDCEEPIEDMQLTSKNGFEREKTSDISTLGHLVITTQGGYVKILDLSNFEILAKVEPPKKEGTEEQDTFVSVIYCSGTDRLCACTKGGELHFLQIGGTCDDIDEADILVDGSLSKGIEPSSEGSKPLSNPSSPGISGVDLLVDQPFTLEILTSLVELTRFETLTPRFSATVPPCWVEVQQEQQQRRHPQHLHQQHHGDAAQHTRTWKLQTDSNSWDEHVFELVLPKACMVGHVDFKFVLNSNITNIPQIQVTLLKNKAPGLGKVNALNIEVEQNGKPSLVDLNEEMQHMDVEESQCLRLCPFLEDHKEDILCGPVWLASGLDLSGHAGMLTLTSPKLVKGMAGGKYRSFLIHVKAVNERGTEEICNGGMRPVVRLPSLKHQSNKGYSLASLLAKVAAGKEKSSNVKNENTSGTRKSENLRGCDLLQEVSVTIRRFKKTSISKERVQRCAMLQFSEFHEKLLNTLCRKTDDGQITEHAQSLVLDTLCWLAGVHSNGPGSSKEGNENLLSKTRKFLSDIVRVCFFEAGRSIAHKCARFLALCISNGKCDPCQPAFGPVLLKALLDNMSFLPAATTGGSVYWYFVLLNYVKDEDLAGCSTACASLLTAVSRQLQDRLTPMEALLQTRYGLYSSPFDPVLFDLEMSGSSCKNVYNSSIGVQSDEIDLSDVLSGNGKVSSCTAAEGSFTSLTGLLEVEPLHFTCVSTSDGTRIERDDAMSSFGVTPAVGGLSSGTVGEASTALSSAAQVALQSLSHAMASAEQQLQVLQEKQQQLLKLQQQKAKLEAKLHQTTAAAAAAASAVGPVHNSVPSNPVAAPGFFIHPSDVIPPTPKTTPLFMTPPLTPPNEAVSVVINAELAQLFPGSVIDPPAVNLAAHNKNSNKSRMNPLGSGLALAISHASHFLQPPPHQSIIIERMHSGARRFVTLDFGRPILLTDVLIPTCGDLASLSIDIWTLGEEVDGRRLVVATDISTHSLILHDLIPPPVCRFMKITVIGRYGSTNARAKIPLGFYYGHTYILPWESELKLMHDPLKGEGESANQPEIDQHLAMMVALQEDIQCRYNLACHRLETLLQSIDLPPLNSANNAQYFLRKPDKAVEEDSRVFSAYQDCIQLQLQLNLAHNAVQRLKVALGASRKMLSETSNPEDLIQTSSTEQLRTIIRYLLDTLLSLLHASNGHSVPAVLQSTFHAQACEELFKHLCISGTPKIRLHTGLLLVQLCGGERWWGQFLSNVLQELYNSEQLLIFPQDRVFMLLSCIGQRSLSNSGVLESLLNLLDNLLSPLQPQLPMHRRTEGVLDIPMISWVVMLVSRLLDYVATVEDEAAAAKKPLNGNQWSFINNNLHTQSLNRSSKGSSSLDRLYSRKIRKQLVHHKQQLNLLKAKQKALVEQMEKEKIQSNKGSSYKLLVEQAKLKQATSKHFKDLIRLRRTAEWSRSNLDTEVTTAKESPEIEPLPFTLAHERCISVVQKLVLFLLSMDFTCHADLLLFVCKVLARIANATRPTIHLCEIVNEPQLERLLLLLVGTDFNRGDISWGGAWAQYSLTCMLQDILAGELLAPVAAEAMEEGTVGDDVGATAGDSDDSLQQSSVQLLETIDEPLTHDITGAPPLSSLEKDKEIDLELLQDLMEVDIDPLDIDLEKDPLAAKVFKPISSTWYDYWGADYGTYNYNPYIGGLGIPVAKPPANTEKNGSQTVSVSVSQALDARLEVGLEQQAELMLKMMSTLEADSILQALTNTSPTLSQSPTGTDDSLLGGLQAANQTSQLIIQLSSVPMLNVCFNKLFSMLQVHHVQLESLLQLWLTLSLNSSSTGNKENGADIFLYNANRIPVISLNQASITSFLTVLAWYPNTLLRTWCLVLHSLTLMTNMQLNSGSSSAIGTQESTAHLLVSDPNLIHVLVKFLSGTSPHGTNQHSPQVGPTATQAMQEFLTRLQVHLSSTCPQIFSEFLLKLIHILSTERGAFQTGQGPLDAQVKLLEFTLEQNFEVVSVSTISAVIESVTFLVHHYITCSDKVMSRSGSDSSVGARACFGGLFANLIRPGDAKAVCGEMTRDQLMFDLLKLVNILVQLPLSGNREYSARVSVTTNTTDSVSDEEKVSGGKDGNGSSTSVQGSPAYVADLVLANQQIMSQILSALGLCNSSAMAMIIGASGLHLTKHENFHGGLDAISVGDGLFTILTTLSKKASTVHMMLQPILTYMACGYMGRQGSLATCQLSEPLLWFILRVLDTSDALKAFHDMGGVQLICNNMVTSTRAIVNTARSMVSTIMKFLDSGPNKAVDSTLKTRILASEPDNAEGIHNFAPLGTITSSSPTAQPAEVLLQATPPHRRARSAAWSYIFLPEEAWCDLTIHLPAAVLLKEIHIQPHLASLATCPSSVSVEVSADGVNMLPLSTPVVTSGLTYIKIQLVKAEVASAVCLRLHRPRDASTLGLSQIKLLGLTAFGTTSSATVNNPFLPSEDQVSKTSIGWLRLLHHCLTHISDLEGMMASAAAPTANLLQTCAALLMSPYCGMHSPNIEVVLVKIGLQSTRIGLKLIDILLRNCAASGSDPTDLNSPLLFGRLNGLSSDSTIDILYQLGTTQDPGTKDRIQALLKWVSDSARVAAMKRSGRMNYMCPNSSTVEYGLLMPSPSHLHCVAAILWHSYELLVEYDLPALLDQELFELLFNWSMSLPCNMVLKKAVDSLLCSMCHVHPNYFSLLMGWMGITPPPVQCHHRLSMTDDSKKQDLSSSLTDDSKNAQAPLALTESHLATLASSSQSPEAIKQLLDSGLPSLLVRSLASFCFSHISSSESIAQSIDISQDKLRRHHVPQQCNKMPITADLVAPILRFLTEVGNSHIMKDWLGGSEVNPLWTALLFLLCHSGSTSGSHNLGAQQTSARSASLSSAATTGLTTQQRTAIENATVAFFLQCISCHPNNQKLMAQVLCELFQTSPQRGNLPTSGNISGFIRRLFLQLMLEDEKVTMFLQSPCPLYKGRINATSHVIQHPMYGAGHKFRTLHLPVSTTLSDVLDRVSDTPSITAKLISEQKDDKEKKNHEEKEKVKAENGFQDNYSVVVASGLKSQSKRAVSATPPRPPSRRGRTIPDKIGSTSGAEAANKIITVPVFHLFHKLLAGQPLPAEMTLAQLLTLLYDRKLPQGYRSIDLTVKLGSRVITDPSLSKTDSYKRLHPEKDHGDLLASCPEDEALTPGDECMDGILDESLLETCPIQSPLQVFAGMGGLALIAERLPMLYPEVIQQVSAPVVTSTTQEKPKDSDQFEWVTIEQSGELVYEAPETVAAEPPPIKSAVQTMSPIPAHSLAAFGLFLRLPGYAEVLLKERKHAQCLLRLVLGVTDDGEGSHILQSPSANVLPTLPFHVLRSLFSTTPLTTDDGVLLRRMALEIGALHLILVCLSALSHHSPRVPNSSVNQTEPQVSSSHNPTSTEEQQLYWAKGTGFGTGSTASGWDVEQALTKQRLEEEHVTCLLQVLASYINPVSSAVNGEAQSSHETRGQNSNALPSVLLELLSQSCLIPAMSSYLRNDSVLDMARHVPLYRALLELLRAIASCAAMVPLLLPLSTENGEEEEEQSECQTSVGTLLAKMKTCVDTYTNRLRSKRENVKTGVKPDASDQEPEGLTLLVPDIQKTAEIVYAATTSLRQANQEKKLGEYSKKAAMKPKPLSVLKSLEEKYVAVMKKLQFDTFEMVSEDEDGKLGFKVNYHYMSQVKNANDANSAARARRLAQEAVTLSTSLPLSSSSSVFVRCDEERLDIMKVLITGPADTPYANGCFEFDVYFPQDYPSSPPLVNLETTGGHSVRFNPNLYNDGKVCLSILNTWHGRPEEKWNPQTSSFLQVLVSVQSLILVAEPYFNEPGYERSRGTPSGTQSSREYDGNIRQATVKWAMLEQIRNPSPCFKEVIHKHFYLKRVEIMAQCEEWIADIQQYSSDKRVGRTMSHHAAALKRHTAQLREELLKLPCPEGLDPDTDDAPEVCRATTGAEETLMHDQVKPSSSKELPSDFQL

SEQ ID NO: 8195 - protein, 191 aa, Homo sapiens
  Payload ID: 1697;
  Gene Symbol: BIRC6;
  Gene Name: baculoviral IAP repeat containing 6;
  ENSP ID: ENSP00000413090
SWDEHVFELVLPKACMVGHVDFKFVLNSNITNIPQIQVTLLKNKAPGLGKVNGLRLCPFLEDHKEDILCGPVWLASGLDLSGHAGMLTLTSPKLVKGMAGGKYRSFLIHVKAVNERGTEEICNGGMRPVVRLPSLKHQSNKGYSLASLLAKVAAGKEKSSNVKNENTSGTRKSENLRGCDLLQEVSVTIRR

SEQ ID NO: 8196 - protein, 298 aa, Homo sapiens
  Payload ID: 1698;
  Gene Symbol: BIRC7;
  Gene Name: baculoviral IAP repeat containing 7;
  Uniprot ID:  Q96CA5;
  ENSP ID: ENSP00000217169
MGPKDSAKCLHRGPQPSHWAAGDGPTQERCGPRSLGSPVLGLDTCRAWDHVDGQILGQLRPLTEEEEEEGAGATLSRGPAFPGMGSEELRLASFYDWPLTAEVPPELLAAAGFFHTGHQDKVRCFFCYGGLQSWKRGDDPWTEHAKWFPSCQFLLRSKGRDFVHSVQETHSQLLGSWDPWEEPEDAAPVAPSVPASGYPELPTPRREVQSESAQEPGGVSPAEAQRAWWVLEPPGARDVEAQLRRLQEERTCKVCLDRAVSIVFVPCGHLVCAECAPGLQLCPICRAPVRSRVRTFLS

SEQ ID NO: 8197 - protein, 280 aa, Homo sapiens
  Payload ID: 1698;
  Gene Symbol: BIRC7;
  Gene Name: baculoviral IAP repeat containing 7;
  Uniprot ID:  Q96CA5;
  ENSP ID: ENSP00000345213
MGPKDSAKCLHRGPQPSHWAAGDGPTQERCGPRSLGSPVLGLDTCRAWDHVDGQILGQLRPLTEEEEEEGAGATLSRGPAFPGMGSEELRLASFYDWPLTAEVPPELLAAAGFFHTGHQDKVRCFFCYGGLQSWKRGDDPWTEHAKWFPSCQFLLRSKGRDFVHSVQETHSQLLGSWDPWEEPEDAAPVAPSVPASGYPELPTPRREVQSESAQEPGARDVEAQLRRLQEERTCKVCLDRAVSIVFVPCGHLVCAECAPGLQLCPICRAPVRSRVRTFLS

SEQ ID NO: 8198 - protein, 193 aa, Homo sapiens
  Payload ID: 1698;
  Gene Symbol: BIRC7;
  Gene Name: baculoviral IAP repeat containing 7;
  ENSP ID: ENSP00000378717
MPLPWDYPEAPWRRLHSSPPRPCPRALQGGGRRGPNPDPRGSKGLKQTVGALNPNLHLWGICSCQFLLRSKGRDFVHSVQETHSQLLGSWDPWEEPEDAAPVAPSVPASGYPELPTPRREVQSESAQEPGARDVEAQLRRLQEERTCKVCLDRAVSIVFVPCGHLVCAECAPGLQLCPICRAPVRSRVRTFLS

SEQ ID NO: 8199 - protein, 236 aa, Homo sapiens
  Payload ID: 1699;
  Gene Symbol: BIRC8;
  Gene Name: baculoviral IAP repeat containing 8;
  Uniprot ID:  Q96P09;
  ENSP ID: ENSP00000412957
MTGYEARLITFGTWMYSVNKEQLARAGFYAIGQEDKVQCFHCGGGLANWKPKEDPWEQHAKWYPGCKYLLEEKGHEYINNIHLTRSLEGALVQTTKKTPSLTKRISDTIFPNPMLQEAIRMGFDFKDVKKIMEERIQTSGSNYKTLEVLVADLVSAQKDTTENELNQTSLQREISPEEPLRRLQEEKLCKICMDRHIAVVFIPCGHLVTCKQCAEAVDRCPMCSAVIDFKQRVFMS

SEQ ID NO: 8200 - protein, 2608 aa, Homo sapiens
  Payload ID: 1700;
  Gene Symbol: BAHCC1;
  Gene Name: BAH domain and coiled-coil containing 1;
  ENSP ID: ENSP00000303486
MDGRDFAPPPHLLSERGSLGHRSAAAAARLAPAGPAAQPPAHFQPGKYFPSPLPMASHTASSRLMGSSPASSFMGSFLTSSLGSAASTHPSGPSSSPPEQAYRGSHPTTSQIWFSHSHEAPGYPRFSGSLASTFLPVSHLDHHGNSNVLYGQHRFYGTQKDNFYLRNLPPQPTLLPANHNFPSVARAAPAHPMGSCSRDRDRGEAGSLQKGPKDFDRFLVGKELGREKAGKAAEGKERPAAEEDGGKERHKLVLPVPADGHCREGGPAPRGACEGRPKHLTSCLLNTKVLNGEMGRAALASCAGGMLGRPGTGVVTSGRCAKEAAGPPEPGPAFSECLERRQMLHHTASYAGPPPPLSTAAGSFPCLQLHGGPDGLCPLQDKAPRDLKASGPTFVPSVGHLADKGRPFQAAEACAVAGEGKDRHLEGTMAPDHAAPYGVSYAHLKAEGKGERRPGGFEAALNPRLKGLDYLSSAGPEASFPGLPKSGLDKSGYFELPTSSQDCARPGHQDPLGGKAPQACCTLDKTVGKEAPAGPPGAQKVARIRHQQHLMAAEVEQGGIGAEAKRKSLELASLGYSGPHLPPWGVQAGQGTAMAISEERKAGAYLDPFGSGLQQAALLPQELPAPPDEVSAMKNLLKYSSQALVVGQKAPLVGLGGLKASCIQQEAKFLSSKGPGQSERPDCARSREHDTTHGDGEVRQPPVGIAVALARQKDTVSRSEAAYGTNTARQGRAAPAFKGGGGPRSTHALDLEAEEERTRLCDDRLGLASRELLLQDSKDRVEFARIHPPSSCPGDLAPHLMMQSGQLGGDPAPHTHPHPPWLPRTRSPSLWMGGHSYGLGHPALHQNLPPGFPASVAGPVPSVFPLPQDAPTQLVILPSEPTPHSAPHALADVMDQASLWPPMYGGRGPASHMQHPGQLPVYSRPQLLRQQELYALQQQRAAQFQRKPEDQHLDLEEPAQEKAPKSTHKPVALTPTAPGAPSPAAGPTKLPPCCHPPDPKPPASSPTPPPRPSAPCTLNVCPASSPGPGSRVRSAEEKNGEGQQSTADIITSEPDLPPGYLRPMAGLGFSLPSDVHSSNLEDPETMQTTAPGAQPEPTRTFLPGEPPPCSPRSLEEPGLLSGAREATQDLAATPYPTERGPQGKAADPSPLEGLQELQCAALLEAGGPEATGQAHSTQGGAREERSREEGEQGPSSGASSQVLEQRAGSPGALEDEGEQPAPEEDELEEDELGQQSMEDSEEDCGGAPDNSHPPRALPGLDALVAATINLGDLPSDSPPDPQPPAASGPPSTVPLPHSSGIHGIALLSELADLAIQRQRSERTVPEEEEDVLAFNLQHLATLATAWSLVEAAGLDSSTAPAQPPTANPCSGPRLTPRMQILQRKDTWTPKTKPVCPLKAAIDRLDTQEVGMRVRLAELQRRYKEKQRELARLQRKHDHERDESSRSPARRGPGRPRKRKHSSSLPAPRPTGPLPRSDGKKVKAVRTSLGLLCAELRGGSGGEPAKKRSKLERSVYAGLQTASVEKAQCKKSSCQGGLAPSVAHRVAQLKPKVKSKGLPTGLSSFQQKEATPGGRIREKLSRAKSAKVSGATRHPQPKGHGSRETPRCPAQPSVAASQEAGSGYDSEDCEGLLGTEAPPREAGLLLHTGASVAVLGPSPSSVVKMEANQKAKKKKERQGLLGACRLSSPESEVKIKRRSVKAKVGTTLERAPGQRPPGALGKKKAKGKAKGSLRAEPGATPSRDALFNPSRAFACREEGSQLASERLKRATRKGTVLQPVLRRKNGALSITLATRNAKAILGKGRKLSKVKHKAGKQGKGRAVSRLLESFAVEEDFEFDDNSSFSEEEEDEEEEEEDSGPLSAEQSAALARSCAIHKEDLRDGLPVLIPKEDSLLYAGSVRTLQPPDIYSIVIEGERGNRQRIYSLEQLLQEAVLDVRPQSSRYLPPGTRVCAYWSQKSRCLYPGNVVRGASGDEDEDLDSVVVEFDDGDTGHIAVSNVRLLPPDFKIQCTEPSPALLVSSSCRRTKKVSSEAPPPSEAATPSLSPKAQDGPEALKTPGKKSISKDKAGKAELLTSGAKSPTGASDHFLGRRGSPLLSWSAVAQTKRKAVAAASKGPGVLQNLFQLNGSSKKLRAREALFPVHSVATPIFGNGFRADSFSSLASSYAPFVGGTGPGLPRGAHKLLRAKKAERVEAEKGGRRRAGGEFLVKLDHEGVTSPKNKTCKALLMGDKDFSPKLGRPLPSPSYVHPALVGKDKKGRAPIPPLPMGLALRKYAGQAEFPLPYDSDCHSSFSDEDEDGPGLAAGVPSRFLARLSVSSSSSGSSTSSSSGSVSTSSLCSSDNEDSSYSSDDEDPALLLQTCLTHPVPTLLAQPEALRSKGSGPHAHAQRCFLSRATVAGTGAGSGPSSSSKSKLKRKEALSFSKAKELSRRQRPPSVENRPKISAFLPARQLWKWSGNPTQRRGMKGKARKLFYKAIVRGEETLRVGDCAVFLSAGRPNLPYIGRIESMWESWGSNMVVKVKWFYHPEETKLGKRQCDGKNALYQSCHEDENDVQTISHKCQVVAREQYEQMARSRKCQDRQDLYYLAGTYDPTTGRLVTADGVPILC

SEQ ID NO: 8201 - protein, 2639 aa, Homo sapiens
  Payload ID: 1700;
  Gene Symbol: BAHCC1;
  Gene Name: BAH domain and coiled-coil containing 1;
  ENSP ID: ENSP00000462154
MDGRDFAPPPHLLSERGSLGHRSAAAAARLAPAGPAAQPPAHFQPGKYFPSPLPMASHTASSRLMGSSPASSFMGSFLTSSLGSAASTHPSGPSSSPPEQAYRGSHPTTSQIWFSHSHEAPGYPRFSGSLASTFLPVSHLDHHGNSNVLYGQHRFYGTQKDNFYLRNLPPQPTLLPANHNFPSVARAAPAHPMGSCSRDRDRGEAGSLQKGPKDFDRFLVGKELGREKAGKAAEGKERPAAEEDGGKERHKLVLPVPADGHCREGGPAPRGACEGRPKHLTSCLLNTKVLNGEMGRAALASCAGGMLGRPGTGVVTSGRCAKEAAGPPEPGPAFSECLERRQMLHHTASYAGPPPPLSTAAGSFPCLQLHGGPDGLCPLQDKAPRDLKASGPTFVPSVGHLADKGRPFQAAEACAVAGEGKDRHLEGTMAPDHAAPYGVSYAHLKAEGKGERRPGGFEAALNPRLKGLDYLSSAGPEASFPGLPKSGLDKSGYFELPTSSQDCARPGHQDPLGGKAPQACCTLDKTVGKEAPAGPPGAQKVARIRHQQHLMAAEVEQGGIGAEAKRKSLELASLGYSGPHLPPWGVQAGQGTAMAISEERKAGAYLDPFGSGLQQAALLPQELPAPPDEVSAMKNLLKYSSQALVVGQKAPLVGLGGLKASCIQQEAKFLSSKGPGQSERPDCARSREHDTTHGDGEVRQPPVGIAVALARQKDTVSRSEAAYGTNTARQGRAAPAFKGGGGPRSTHALDLEAEEERTRLCDDRLGLASRELLLQDSKDRVEFARIHPPSSCPGDLAPHLMMQSGQLGGDPAPHTHPHPPWLPRTRSPSLWMGGHSYGLGHPALHQNLPPGFPASVAGPVPSVFPLPQDAPTQLVILPSEPTPHSAPHALADVMDQASLWPPMYGGRGPASHMQHPGQLPVYSRPQLLRQQELYALQQQRAAQFQRKPEDQHLDLEEPAQEKAPKSTHKPVALTPTAPGAPSPAAGPTKLPPCCHPPDPKPPASSPTPPPRPSAPCTLNVCPASSPGPGSRVRSAEEKNGEGQQSTADIITSEPVARAHSVAHAGLEFLASNDPSTSASQSFGITDLPPGYLRPMAGLGFSLPSDVHSSNLEDPETMQTTAPGAQPEPTRTFLPGEPPPCSPRSLEEPGLLSGAREATQDLAATPYPTERGPQGKAADPSPLEGLQELQCAALLEAGGPEATGQAHSTQGGAREERSREEGEQGPSSGASSQVLEQRAGSPGALEDEGEQPAPEEDELEEDELGQQSMEDSEEDCGGAPDNSHPPRALPGLDALVAATINLGDLPSDSPPDPQPPAASGPPSTVPLPHSSGIHGIALLSELADLAIQRQRSERTVPEEEEDVLAFNLQHLATLATAWSLVEAAGLDSSTAPAQPPTANPCSGPRLTPRMQILQRKDTWTPKTKPVCPLKAAIDRLDTQEVGMRVRLAELQRRYKEKQRELARLQRKHDHERDESSRSPARRGPGRPRKRKHSSSLPAPRPTGPLPRSDGKKVKAVRTSLGLLCAELRGGSGGEPAKKRSKLERSVYAGLQTASVEKAQCKKSSCQGGLAPSVAHRVAQLKPKVKSKGLPTGLSSFQQKEATPGGRIREKLSRAKSAKVSGATRHPQPKGHGSRETPRCPAQPSVAASQEAGSGYDSEDCEGLLGTEAPPREAGLLLHTGASVAVLGPSPSSVVKMEANQKAKKKKERQGLLGACRLSSPESEVKIKRRSVKAKVGTTLERAPGQRPPGALGKKKAKGKAKGSLRAEPGATPSRDALFNPSRAFACREEGSQLASERLKRATRKGTVLQPVLRRKNGALSITLATRNAKAILGKGRKLSKVKHKAGKQGKGRAVSRLLESFAVEEDFEFDDNSSFSEEEEDEEEEEEDSGPLSAEQSAALARSCAIHKEDLRDGLPVLIPKEDSLLYAGSVRTLQPPDIYSIVIEGERGNRQRIYSLEQLLQEAVLDVRPQSSRYLPPGTRVCAYWSQKSRCLYPGNVVRGASGDEDEDLDSVVVEFDDGDTGHIAVSNVRLLPPDFKIQCTEPSPALLVSSSCRRTKKVSSEAPPPSEAATPSLSPKAQDGPEALKTPGKKSISKDKAGKAELLTSGAKSPTGASDHFLGRRGSPLLSWSAVAQTKRKAVAAASKGPGVLQNLFQLNGSSKKLRAREALFPVHSVATPIFGNGFRADSFSSLASSYAPFVGGTGPGLPRGAHKLLRAKKAERVEAEKGGRRRAGGEFLVKLDHEGVTSPKNKTCKALLMGDKDFSPKLGRPLPSPSYVHPALVGKDKKGRAPIPPLPMGLALRKYAGQAEFPLPYDSDCHSSFSDEDEDGPGLAAGVPSRFLARLSVSSSSSGSSTSSSSGSVSTSSLCSSDNEDSSYSSDDEDPALLLQTCLTHPVPTLLAQPEALRSKGSGPHAHAQRCFLSRATVAGTGAGSGPSSSSKSKLKRKEALSFSKAKELSRRQRPPSVENRPKISAFLPARQLWKWSGNPTQRRGMKGKARKLFYKAIVRGEETLRVGDCAVFLSAGRPNLPYIGRIESMWESWGSNMVVKVKWFYHPEETKLGKRQCDGKNALYQSCHEDENDVQTISHKCQVVAREQYEQMARSRKCQDRQDLYYLAGTYDPTTGRLVTADGVPILC

SEQ ID NO: 8202 - protein, 521 aa, Homo sapiens
  Payload ID: 1701;
  Gene Symbol: BAIAP2;
  Gene Name: BAI1-associated prt 2;
  Uniprot ID:  Q9UQB8;
  ENSP ID: ENSP00000315685
MSLSRSEEMHRLTENVYKTIMEQFNPSLRNFIAMGKNYEKALAGVTYAAKGYFDALVKMGELASESQGSKELGDVLFQMAEVHRQIQNQLEEMLKSFHNELLTQLEQKVELDSRYLSAALKKYQTEQRSKGDALDKCQAELKKLRKKSQGSKNPQKYSDKELQYIDAISNKQGELENYVSDGYKTALTEERRRFCFLVEKQCAVAKNSAAYHSKGKELLAQKLPLWQQACADPSKIPERAVQLMQQVASNGATLPSALSASKSNLVISDPIPGAKPLPVPPELAPFVGRMSAQESTPIMNGVTGPDGEDYSPWADRKAAQPKSLSPPQSQSKLSDSYSNTLPVRKSVTPKNSYATTENKTLPRSSSMAAGLERNGRMRVKAIFSHAAGDNSTLLSFKEGDLITLLVPEARDGWHYGESEKTKMRGWFPFSYTRVLDSDGSDRLHMSLQQGKSSSTGNLLDKDDLAIPPPDYGAASRAFPAQTASGFKQRPYSVAVPAFSQGLDDYGARSMSSGSGTLVSTV

SEQ ID NO: 8203 - protein, 552 aa, Homo sapiens
  Payload ID: 1701;
  Gene Symbol: BAIAP2;
  Gene Name: BAI1-associated prt 2;
  Uniprot ID:  Q9UQB8;
  ENSP ID: ENSP00000316338
MSLSRSEEMHRLTENVYKTIMEQFNPSLRNFIAMGKNYEKALAGVTYAAKGYFDALVKMGELASESQGSKELGDVLFQMAEVHRQIQNQLEEMLKSFHNELLTQLEQKVELDSRYLSAALKKYQTEQRSKGDALDKCQAELKKLRKKSQGSKNPQKYSDKELQYIDAISNKQGELENYVSDGYKTALTEERRRFCFLVEKQCAVAKNSAAYHSKGKELLAQKLPLWQQACADPSKIPERAVQLMQQVASNGATLPSALSASKSNLVISDPIPGAKPLPVPPELAPFVGRMSAQESTPIMNGVTGPDGEDYSPWADRKAAQPKSLSPPQSQSKLSDSYSNTLPVRKSVTPKNSYATTENKTLPRSSSMAAGLERNGRMRVKAIFSHAAGDNSTLLSFKEGDLITLLVPEARDGWHYGESEKTKMRGWFPFSYTRVLDSDGSDRLHMSLQQGKSSSTGNLLDKDDLAIPPPDYGAASRAFPAQTASGFKQRPYSVAVPAFSQGLDDYGARSMSRNPFAHVQLKPTVTNDRCDLSAQGPEGREHGDGSARTLAGR

SEQ ID NO: 8204 - protein, 375 aa, Homo sapiens
  Payload ID: 1701;
  Gene Symbol: BAIAP2;
  Gene Name: BAI1-associated prt 2;
  ENSP ID: ENSP00000391837
MLLPEGQRQRALGFGTVTSTYSPVGQYIDAISNKQGELENYVSDGYKTALTEERRRFCFLVEKQCAVAKNSAAYHSKGKELLAQKLPLWQQACADPSKIPERAVQLMQQVASNGATLPSALSASKSNLVISDPIPGAKPLPVPPELAPFVGRMSAQESTPIMNGVTGPDGEDYSPWADRKAAQPKSLSPPQSQSKLSDSYSNTLPVRKSVTPKNSYATTENKTLPRSSSMAAGLERNGRMRVKAIFSHAAGDNSTLLSFKEGDLITLLVPEARDGWHYGESEKTKMRGWFPFSYTRVLDSDGSDRLHMSLQQGKSSSTGNLLDKDDLAIPPPDYGAASRAFPAQTASGFKQRPYSVAVPAFSQGLDDYGARSMSR

SEQ ID NO: 8205 - protein, 534 aa, Homo sapiens
  Payload ID: 1701;
  Gene Symbol: BAIAP2;
  Gene Name: BAI1-associated prt 2;
  Uniprot ID:  Q9UQB8;
  ENSP ID: ENSP00000401022
MSLSRSEEMHRLTENVYKTIMEQFNPSLRNFIAMGKNYEKALAGVTYAAKGYFDALVKMGELASESQGSKELGDVLFQMAEVHRQIQNQLEEMLKSFHNELLTQLEQKVELDSRYLSAALKKYQTEQRSKGDALDKCQAELKKLRKKSQGSKNPQKYSDKELQYIDAISNKQGELENYVSDGYKTALTEERRRFCFLVEKQCAVAKNSAAYHSKGKELLAQKLPLWQQACADPSKIPERAVQLMQQVASNGATLPSALSASKSNLVISDPIPGAKPLPVPPELAPFVGRMSAQESTPIMNGVTGPDGEDYSPWADRKAAQPKSLSPPQSQSKLSDSYSNTLPVRKSVTPKNSYATTENKTLPRSSSMAAGLERNGRMRVKAIFSHAAGDNSTLLSFKEGDLITLLVPEARDGWHYGESEKTKMRGWFPFSYTRVLDSDGSDRLHMSLQQGKSSSTGNLLDKDDLAIPPPDYGAASRAFPAQTASGFKQRPYSVAVPAFSQGLDDYGARSMSRNPFAHVQLKPTVTNDRSAPLLS

SEQ ID NO: 8206 - protein, 520 aa, Homo sapiens
  Payload ID: 1701;
  Gene Symbol: BAIAP2;
  Gene Name: BAI1-associated prt 2;
  Uniprot ID:  Q9UQB8;
  ENSP ID: ENSP00000413069
MSLSRSEEMHRLTENVYKTIMEQFNPSLRNFIAMGKNYEKALAGVTYAAKGYFDALVKMGELASESQGSKELGDVLFQMAEVHRQIQNQLEEMLKSFHNELLTQLEQKVELDSRYLSAALKKYQTEQRSKGDALDKCQAELKKLRKKSQGSKNPQKYSDKELQYIDAISNKQGELENYVSDGYKTALTEERRRFCFLVEKQCAVAKNSAAYHSKGKELLAQKLPLWQQACADPSKIPERAVQLMQQVASNGATLPSALSASKSNLVISDPIPGAKPLPVPPELAPFVGRMSAQESTPIMNGVTGPDGEDYSPWADRKAAQPKSLSPPQSQSKLSDSYSNTLPVRKSVTPKNSYATTENKTLPRSSSMAAGLERNGRMRVKAIFSHAAGDNSTLLSFKEGDLITLLVPEARDGWHYGESEKTKMRGWFPFSYTRVLDSDGSDRLHMSLQQGKSSSTGNLLDKDDLAIPPPDYGAASRAFPAQTASGFKQRPYSVAVPAFSQGLDDYGARSMSSADVEVARF

SEQ ID NO: 8207 - protein, 140 aa, Homo sapiens
  Payload ID: 1701;
  Gene Symbol: BAIAP2;
  Gene Name: BAI1-associated prt 2;
  ENSP ID: ENSP00000458202
MEQFNPSLRNFIAMGKNYEKALAGVTYAAKGYFDALVKMGELASESQGSKELGDVLFQMAEVHRQIQNQLEEMLKSFHNELLTQLEQKVELDSRYLSAALKKYQTEQRSKGDALDKCQAELKKLRKKSQGSKNPQKYSDK

SEQ ID NO: 8208 - protein, 130 aa, Homo sapiens
  Payload ID: 1701;
  Gene Symbol: BAIAP2;
  Gene Name: BAI1-associated prt 2;
  ENSP ID: ENSP00000458440
MQQVASNGATLPSALSASKSNLVISDPIPGAKPLPVPPELAPFVGRMSAQESTPIMNGVTGPDGEDYSPWADRKAAQPKSLSPPQSQSKLSDSYSNTLPVRKSVTPKNSYATTENKTLPRSSSMAAGLER

SEQ ID NO: 8209 - protein, 79 aa, Homo sapiens
  Payload ID: 1701;
  Gene Symbol: BAIAP2;
  Gene Name: BAI1-associated prt 2;
  ENSP ID: ENSP00000458494
MGELASESQGSKELGDVLFQMAEVHRQIQNQLEEMLKSFHNELLTQLEQKVELDSRYLSAALKKYQTEQRSKGDALDKC

SEQ ID NO: 8210 - protein, 135 aa, Homo sapiens
  Payload ID: 1701;
  Gene Symbol: BAIAP2;
  Gene Name: BAI1-associated prt 2;
  ENSP ID: ENSP00000458522
MGELASESQGSKELGDVLFQMAEVHRQIQNQLEEMLKSFHNELLTQLEQKVELDSRYLSAALKKYQTEQRSKGDALDKCQAELKKLRKKSQGSKNPQKYSDKELQYIDAISNKQGELENYVSDGYKTALTEERRR

SEQ ID NO: 8211 - protein, 180 aa, Homo sapiens
  Payload ID: 1701;
  Gene Symbol: BAIAP2;
  Gene Name: BAI1-associated prt 2;
  ENSP ID: ENSP00000458735
MGELASESQGSKELGDVLFQMAEVHRQIQNQLEEMLKSFHNELLTQLEQKVELDSRYLSAALKKYQTEQRSKGDALDKCQAELKKLRKKSQGSKNPQKYSDKELQYIDAISNKQGELENYVSDGYKTALTEERRRFCFLVEKQCAVAKNSAAYHSKGKELLAQKLPLWQQACADPSKIPE

SEQ ID NO: 8212 - protein, 512 aa, Homo sapiens
  Payload ID: 1701;
  Gene Symbol: BAIAP2;
  Gene Name: BAI1-associated prt 2;
  Uniprot ID:  Q9UQB8;
  ENSP ID: ENSP00000458964
MSLSRSEEMHRLTENVYKTIMEQFNPSLRNFIAMGKNYEKALAGVTYAAKGYFDALVKMGELASESQGSKELGDVLFQMAEVHRQIQNQLEEMLKSFHNELLTQLEQKVELDSRYLSAALKKYQTEQRSKGDALDKCQAELKKLRKKSQGSKNPQKYSDKELQYIDAISNKQGELENYVSDGYKTALTEERRRFCFLVEKQCAVAKNSAAYHSKGKELLAQKLPLWQQACADPSKIPERAVQLMQQVASNGATLPSALSASKSNLVISDPIPGAKPLPVPPELAPFVGRMSAQESTPIMNGVTGPDGEDYSPWADRKAAQPKSLSPPQSQSKLSDSYSNTLPVRKSVTPKNSYATTENKTLPRSSSMAAGLERNGRMRVKAIFSHAAGDNSTLLSFKEGDLITLLVPEARDGWHYGESEKTKMRGWFPFSYTRVLDSDGSDRLHMSLQQGKSSSTGNLLDKDDLAIPPPDYGAASRAFPAQTASGFKQRPYSVAVPAFSQGLDDYGARSMSR

SEQ ID NO: 8213 - protein, 58 aa, Homo sapiens
  Payload ID: 1701;
  Gene Symbol: BAIAP2;
  Gene Name: BAI1-associated prt 2;
  ENSP ID: ENSP00000459730
MGELASESQGSKELGDVLFQMAEVHRQIQNQLEEMLKSFHNELLTQLEQKVELDSRLR

SEQ ID NO: 8214 - protein, 234 aa, Homo sapiens
  Payload ID: 1701;
  Gene Symbol: BAIAP2;
  Gene Name: BAI1-associated prt 2;
  ENSP ID: ENSP00000459787
MGELASESQGSKELGDVLFQMAEVHRQIQNQLEEMLKSFHNELLTQLEQKVELDSRYLSAALKKYQTEQRSKGDALDKCQAELKKLRKKSQGSKNPQKYSDKELQYIDAISNKQGELENYVSDGYKTALTEERRRFCFLVEKQCAVAKNSAAYHSKGKELLAQKLPLWQQACADPSKIPERAVQLMQQVASNGATLPSALSASKSNLVISDPIPGAKPLPVPPELAPFVGRMSA

SEQ ID NO: 8215 - protein, 175 aa, Homo sapiens
  Payload ID: 1701;
  Gene Symbol: BAIAP2;
  Gene Name: BAI1-associated prt 2;
  ENSP ID: ENSP00000460131
MEQFNPSLRNFIAMGKNYEKALAGVTYAAKGYFDALVKMGELASESQGSKELGDVLFQMAEVHRQIQNQLEEMLKSFHNELLTQLEQKVELDSRYLSAALKKYQTEQRSKGDALDKCQAELKKLRKKSQGSKNPQKYSDKELQYIDAISNKQGELENYVSDGYKTALTEERRRFC

SEQ ID NO: 8216 - protein, 106 aa, Homo sapiens
  Payload ID: 1701;
  Gene Symbol: BAIAP2;
  Gene Name: BAI1-associated prt 2;
  ENSP ID: ENSP00000460344
MSLSRSEEMHRLTENVYKTIMEQFNPSLRNFIAMGKNYEKALAGVTYAAKGYFDALVKMGELASESQGSKELGDVLFQMAEVHRQIQNQLEEMPCPASCSGSMCWS

SEQ ID NO: 8217 - protein, 216 aa, Homo sapiens
  Payload ID: 1701;
  Gene Symbol: BAIAP2;
  Gene Name: BAI1-associated prt 2;
  ENSP ID: ENSP00000460350
  MOD_RES (1)..(1): Any amino acid
XPKSLSPPQSQSKLSDSYSNTLPVRKSVTPKNSYATTAENKTLPRSSSMAAGLERNGRMRVKAIFSHAAGDNSTLLSFKEGDLITLLVPEARDGWHYGESEKTKMRGWFPFSYTRVLDSDGSDRLHMSLQQGKSSSTGNLLDKDDLAIPPPDYGAASRAFPAQTASGFKQRPYSVAVPAFSQGLDDYGARSMSRNPFAHVQLKPTVTNDRSAPLLS

SEQ ID NO: 8218 - protein, 149 aa, Homo sapiens
  Payload ID: 1701;
  Gene Symbol: BAIAP2;
  Gene Name: BAI1-associated prt 2;
  ENSP ID: ENSP00000460492
MSLSRSEEMHRLTENVYKRVEEKYQRNLFPIFSPSALKPESRNFRGESWQGTIMEQFNPSLRNFIAMGKNYEKALAGVTYAAKGYFDALVKMGELASESQGSKELGDVLFQMAEVHRQIQNQLEEMLKSFHNELLTQLEQKVELDSRLR

SEQ ID NO: 8219 - protein, 97 aa, Homo sapiens
  Payload ID: 1701;
  Gene Symbol: BAIAP2;
  Gene Name: BAI1-associated prt 2;
  ENSP ID: ENSP00000461101
QTEQRSKGDALDKCQAELKKLRKKSQGSKNPQKYSDKELQYIDAISNKQGELENYVSDGYKTALTEERRRFCFLVEKQCAVAKNSAAYHSKGGPGPV

SEQ ID NO: 8220 - protein, 553 aa, Homo sapiens
  Payload ID: 1701;
  Gene Symbol: BAIAP2;
  Gene Name: BAI1-associated prt 2;
  ENSP ID: ENSP00000461144
MSLSRSEEMHRLTENVYKRVEEKYQRNLFPIFSPSALKPESRNFRGESWQGTIMEQFNPSLRNFIAMGKNYEKALAGVTYAAKGYFDALVKMGELASESQGSKELGDVLFQMAEVHRQIQNQLEEMLKSFHNELLTQLEQKVELDSRYLSAALKKYQTEQRSKGDALDKCQAELKKLRKKSQGSKNPQKYSDKELQYIDAISNKQGELENYVSDGYKTALTEERRRFCFLVEKQCAVAKNSAAYHSKGKELLAQKLPLWQQACADPSKIPERAVQLMQQVASNGATLPSALSASKSNLVISDPIPGAKPLPVPPELAPFVGRMSAQESTPIMNGVTGPDGEDYSPWADRKAAQPKSLSPPQSQSKLSDSYSNTLPVRKSVTPKNSYATTENKTLPRSSSMAAGLERNGRMRVKAIFSHAAGDNSTLLSFKEGDLITLLVPEARDGWHYGESEKTKMRGWFPFSYTRVLDSDGSDRLHMSLQQGKSSSTGNLLDKDDLAIPPPDYGAASRAFPAQTASGFKQRPYSVAVPAFSQGLDDYGARSMSSADVEVARF

SEQ ID NO: 8221 - protein, 114 aa, Homo sapiens
  Payload ID: 1701;
  Gene Symbol: BAIAP2;
  Gene Name: BAI1-associated prt 2;
  ENSP ID: ENSP00000461736
MGELASESQGSKELGDVLFQMAEVHRQIQNQLEEMLKSFHNELLTQLEQKVELDSRYLSAALKKYQTEQRSKGDALDKCQAELKKLRKKSQGSKNPQKYSDKELQYIDAISNKQ

SEQ ID NO: 8222 - protein, 511 aa, Homo sapiens
  Payload ID: 1702;
  Gene Symbol: BAIAP2L1;
  Gene Name: BAI1-associated prt 2-like 1;
  Uniprot ID:  Q9UHR4;
  ENSP ID: ENSP00000005260
MSRGPEEVNRLTESTYRNVMEQFNPGLRNLINLGKNYEKAVNAMILAGKAYYDGVAKIGEIATGSPVSTELGHVLIEISSTHKKLNESLDENFKKFHKEIIHELEKKIELDVKYMNATLKRYQTEHKNKLESLEKSQAELKKIRRKSQGSRNALKYEHKEIEYVETVTSRQSEIQKFIADGCKEALLEEKRRFCFLVDKHCGFANHIHYYHLQSAELLNSKLPRWQETCVDAIKVPEKIMNMIEEIKTPASTPVSGTPQASPMIERSNVVRKDYDTLSKCSPKMPPAPSGRAYTSPLIDMFNNPATAAPNSQRVNNSTGTSEDPSLQRSVSVATGLNMMKKQKVKTIFPHTAGSNKTLLSFAQGDVITLLIPEEKDGWLYGEHDVSKARGWFPSSYTKLLEENETEAVTVPTPSPTPVRSISTVNLSENSSVVIPPPDYLECLSMGAAADRRADSARTTSTFKAPASKPETAAPNDANGTAKPPFLSGENPFATVKLRPTVTNDRSAPIIR

SEQ ID NO: 8223 - protein, 515 aa, Homo sapiens
  Payload ID: 1703;
  Gene Symbol: BAIAP2L2;
  Gene Name: BAI1-associated prt 2-like 2;
  Uniprot ID:  Q6UXY1;
  ENSP ID: ENSP00000328876
MAPEMDQFYRSTMAIYKSIMEQFNPALENLVYLGNNYLRAFHALSEAAEVYFSAIQKIGERALQSPTSQILGEILVQMSDTQRHLNSDLEVVVQTFHGGLLQHMEKNTKLDMQFIKDSRQHYELEYRHRAANLEKCMSELWRMERKRDKNVREMKESVNRLHAQMQAFVSESQRAAELEEKRRYRFLAEKHLLLSNTFLQFFGRARGMLQNRVLLWKEQSEASRSPSRAHSPGLLGPALGPPYPSGRLTPTCLDMPPRPLGEFSSPRSRHGSGSYGTEPDARPASQLEPDRRSLPRTPSASSLYSGSAQSSRSNSFGERPGGGGGARRVRALVSHSEGANHTLLRFSAGDVVEVLVPEAQNGWLYGKLEGSSASGWFPEAYVKALEEGPVNPMTPVTPMTSMTSMSPMTPMNPGNELPSRSYPLRGSHSLDDLLDRPGNSTPSRVPSRAPSPAPPPLPSSRRSSMGSTAVATDVKKLMSSEQYPPQELFPRGTNPFATVKLRPTITNDRSAPLIR

SEQ ID NO: 8224 - protein, 529 aa, Homo sapiens
  Payload ID: 1703;
  Gene Symbol: BAIAP2L2;
  Gene Name: BAI1-associated prt 2-like 2;
  Uniprot ID:  Q6UXY1;
  ENSP ID: ENSP00000371085
MAPEMDQFYRSTMAIYKSIMEQFNPALENLVYLGNNYLRAFHALSEAAEVYFSAIQKIGERALQSPTSQILGEILVQMSDTQRHLNSDLEVVVQTFHGGLLQHMEKNTKLDMQFIKDSRQHYELEYRHRAANLEKCMSELWRMERKRDKNVREMKESVNRLHAQMQAFVSESQRAAELEEKRRYRFLAEKHLLLSNTFLQFFGRARGMLQNRVLLWKEQSEASRSPSRAHSPGLLGPALGPPYPSGRLTPTCLDMPPRPLGEFSSPRSRHGSGSYGTEPDARPASQLEPDRRSLPRTPSASSLYSGSAQSSRSNSFGERPGGGGGARRVRALVSHSEGANHTLLRFSAGDVVEVLVPEAQNGWLYGKLEGSSASGWFPEAYVKALEEGPVNPMTPVTPMTSMTSMSPMTPMNPGNELPSRSYPLRGSHSLDDLLDRPGNSIAPSEYWDGQSRSRTPSRVPSRAPSPAPPPLPSSRRSSMGSTAVATDVKKLMSSEQYPPQELFPRGTNPFATVKLRPTITNDRSAPLIR

SEQ ID NO: 8225 - protein, 196 aa, Homo sapiens
  Payload ID: 1703;
  Gene Symbol: BAIAP2L2;
  Gene Name: BAI1-associated prt 2-like 2;
  ENSP ID: ENSP00000410074
SSRSNSFGERPGGGGGARRVRALVSHSEGANHTLLRFSAGDVVEVLVPEAQNGWLYGKLEGSSASGWFPEAYVKALEEGPVNPMTPVTPMTSMTSMSPMTPMNPGNELPSRSYPLRGSHSLDDLLDRPGNSIAPSEYWDGQSRSRTPSRVPSRAPSPAPPPLPSSRRSSMGSTAVATDVKGHKSFCHCQASSHHHQ

SEQ ID NO: 8226 - protein, 1187 aa, Homo sapiens
  Payload ID: 1704;
  Gene Symbol: BAIAP3;
  Gene Name: BAI1-associated prt 3;
  Uniprot ID:  O94812;
  ENSP ID: ENSP00000324510
MRPRGAAFAAGPPGDLHLGTAIGFAGAIWRSRSPAMSTLLDIKSSVLRQVQVCPSFRRRTEQDPGSASADPQEPATGAWKPGDGVEFFAHMRLMLKKGEGRQGLPCLEVPLRSGSPAPPEPVDPSLGLRALAPEEVEMLYEEALYTVLYRAGTMGPDQVDDEEALLSYLQQVFGTSLEEHTEAIERVRKAKAPTYALKVSVMRAKNLLAKDPNGFSDPYCMLGILPASDATREPRAQKEQRFGFRKGSKRGGPLPAKCIQVTEVKSSTLNPVWKEHFLFEIEDVSTDQLHLDIWDHDDDVSLVEACRKLNEVIGLKGMGRYFKQIVKSARANGTAGPTEDHTDDFLGCLNIPVREVPVAGVDRWFKLEPRSSASRVQGHCHLVLKLITTQRDTAMSQRGRSGFLSHLLLLSHLLRLEHSAEEPNSSSWRGELSTPAATILCLHGAQSNLSPLQLAVLHWQVSSRHHQTCTLDYSYLLGLLEDMQAHWEEAPSLPQEQEESLADSLSAFSEFGLQLLRQLRDYFPATNSTAVHRLELLLKCLGKLQLFQPSFEICPFESELNMDIAAALKRGNREWYDRILNDKSPREQPGPQRLPGLVVLADAVYDDLQFCYSVYASLFHSILNVDVFTLTFRQLERLVAEEAWVLTEELSPKMTLEVASGLFELYLTLADLQRFWDSIPGRDSRSLALAGIHAPFLPAVKLWFQVLRDQAKWRLQGAVDMDTLEPVDASSRHSSSAATAGLCLSHIQELWVRLAWPDPAQAQGLGTQLGQDVCEATLFYTELLRKKVDTQPGAAGEAVSEALCVVLNNVELVRKAAGQALKGLAWPEGATGPEGVLPRPLLSCTQALDDDLQREAHTVTAHLTSKMVGDIRKYVQHISLSPDSIQNDEAVAPLMKYLDEKLALLNASLVKGNLSRVLEALWELLLQAILQALGANRDVSADFYSRFHFTLEALVSFFHAEGQGLPLESLRDGSYKRLKEELRLHKCSTRECIEQFYLDKLKQRTLEQNRFGRLSVRCHYEAAEQRLAVEVLHAADLLPLDANGLSDPFVIVELGPPHLFPLVRSQRTQVKTRTLHPVYDELFYFSVPAEACRRRAACVLFTVMDHDWLSTNDFAGEAALGLGGVTGVARPQVGGGARAGQPVTLHLCRPRAQVRSALRRLEGRTSKEAQEFVKKLKELEKCMEADP

SEQ ID NO: 8227 - protein, 1169 aa, Homo sapiens
  Payload ID: 1704;
  Gene Symbol: BAIAP3;
  Gene Name: BAI1-associated prt 3;
  Uniprot ID:  O94812;
  ENSP ID: ENSP00000380625
MSTLLDIKSSVLRQVQVCPSFRRRTEQDPGSASADPQEPATGAWKPGDGVEFFAHMRLMLKKGEGRQGLPCLEAWGSPCRQSPHPGPHTQVPLRSGSPAPPEPVDPSLGLRALAPEEVEMLYEEALYTVLYRAGTMGPDQVDDEEALLSYLQQVFGTSLEEHTEAIERVRKAKAPTYALKVSVMRAKNLLAKDPNGFSDPYCMLGILPASDATREPRAQKEQRFGFRKGSKRGGPLPAKCIQVTEVKSSTLNPVWKEHFLFEIEDVSTDQLHLDIWDHDDDVSLVEACRKLNEVIGLKGMGRYFKQIVKSARANGTAGPTEDHTDDFLGCLNIPVREVPVAGVDRWFKLEPRSSASRVQGHCHLVLKLITTQRDTAMSQRGRSGFLSHLLLLSHLLRLEHSAEEPNSSSWRGELSTPAATILCLHGAQSNLSPLQLAVLHWQVSSRHHQTCTLDYSYLLGLLEDMQAHWEEAPSLPQEQEESLADSLSAFSEFGLQLLRQLRDYFPATNSTAVHRLELLLKCLGKLQLFQPSFEICPFESELNMDIAAALKRGNREWYDRILNDKSPREQPGPQRLPGLVVLADAVYDDLQFCYSVYASLFHSILNVDVFTLTFRQLERLVAEEAWVLTEELSPKMTLEVASGLFELYLTLADLQRFWDSIPGRDSRSLALAGIHAPFLPAVKLWFQVLRDQAKWRLQGAVDMDTLEPVDASSRHSSSAATAGLCLSHIQELWVRLAWPDPAQAQGLGTQLGQDVCEATLFYTELLRKKVDTQPGAAGEAVSEALCVVLNNVELVRKAAGQALKGLAWPEGATGPEGVLPRPLLSCTQALDDDLQREAHTVTAHLTSKMVGDIRKYVQHISLSPDSIQNDEAVAPLMKYLDEKLALLNASLVKGNLSRVLEALWELLLQAILQALGANRDVSADFYSRFHFTLEALVSFFHAEGQGLPLESLRDGSYKRLKEELRLHKCSTRECIEQFYLDKLKQRTLEQNRFGRLSVRCHYEAAEQRLAVEVLHAADLLPLDANGLSDPFVIVELGPPHLFPLVRSQRTQVKTRTLHPVYDELFYFSVPAEACRRRAACVLFTVMDHDWLSTNDFAGEAALGLGGVTGVARPQVGGGARAGQPVTLHLCRPRAQVRSALRRLEGRTSKEAQEFVKKLKELEKCMEADP

SEQ ID NO: 8228 - protein, 1152 aa, Homo sapiens
  Payload ID: 1704;
  Gene Symbol: BAIAP3;
  Gene Name: BAI1-associated prt 3;
  Uniprot ID:  O94812;
  ENSP ID: ENSP00000407242
MSTLLDIKSSVLRQVQVCPSFRRRTEQDPGSASADPQEPATGAWKPGDGVEFFAHMRLMLKKGEGRQGLPCLEVPLRSGSPAPPEPVDPSLGLRALAPEEVEMLYEEALYTVLYRAGTMGPDQVDDEEALLSYLQQVFGTSLEEHTEAIERVRKAKAPTYALKVSVMRAKNLLAKDPNGFSDPYCMLGILPASDATREPRAQKEQRFGFRKGSKRGGPLPAKCIQVTEVKSSTLNPVWKEHFLFEIEDVSTDQLHLDIWDHDDDVSLVEACRKLNEVIGLKGMGRYFKQIVKSARANGTAGPTEDHTDDFLGCLNIPVREVPVAGVDRWFKLEPRSSASRVQGHCHLVLKLITTQRDTAMSQRGRSGFLSHLLLLSHLLRLEHSAEEPNSSSWRGELSTPAATILCLHGAQSNLSPLQLAVLHWQVSSRHHQTCTLDYSYLLGLLEDMQAHWEEAPSLPQEQEESLADSLSAFSEFGLQLLRQLRDYFPATNSTAVHRLELLLKCLGKLQLFQPSFEICPFESELNMDIAAALKRGNREWYDRILNDKSPREQPGPQRLPGLVVLADAVYDDLQFCYSVYASLFHSILNVDVFTLTFRQLERLVAEEAWVLTEELSPKMTLEVASGLFELYLTLADLQRFWDSIPGRDSRSLALAGIHAPFLPAVKLWFQVLRDQAKWRLQGAVDMDTLEPVDASSRHSSSAATAGLCLSHIQELWVRLAWPDPAQAQGLGTQLGQDVCEATLFYTELLRKKVDTQPGAAGEAVSEALCVVLNNVELVRKAAGQALKGLAWPEGATGPEGVLPRPLLSCTQALDDDLQREAHTVTAHLTSKMVGDIRKYVQHISLSPDSIQNDEAVAPLMKYLDEKLALLNASLVKGNLSRVLEALWELLLQAILQALGANRDVSADFYSRFHFTLEALVSFFHAEGQGLPLESLRDGSYKRLKEELRLHKCSTRECIEQFYLDKLKQRTLEQNRFGRLSVRCHYEAAEQRLAVEVLHAADLLPLDANGLSDPFVIVELGPPHLFPLVRSQRTQVKTRTLHPVYDELFYFSVPAEACRRRAACVLFTVMDHDWLSTNDFAGEAALGLGGVTGVARPQVGGGARAGQPVTLHLCRPRAQVRSALRRLEGRTSKEAQEFVKKLKELEKCMEADP

SEQ ID NO: 8229 - protein, 1116 aa, Homo sapiens
  Payload ID: 1704;
  Gene Symbol: BAIAP3;
  Gene Name: BAI1-associated prt 3;
  Uniprot ID:  O94812;
  ENSP ID: ENSP00000409533
MSTLLDIKSSVLRQVQVCPSFRRRTEQDPGSASADPQEPATGAWKPGDGVEFFAHMRLMLKKGEGRQGLPCLEVPLRSGSPAPPEPVDPSLGLRALAPEEVEMLYEEALYTVLYRAGTMGPDQVDDEEALLSYLQQVFGTSLEEHTEAIERVRKAKAPTYALKVSVMRAKNLLAKDPNGFSDPYCMLGILPASDATREPRAQKEQRFGFRKGSKRGGPLPAKCIQVTEVKSSTLNPVWKEHFLFEIEDVSTDQLHLDIWDHDDDVSLVEACRKLNEVIGLKGMGRYFKQIVKSARANGTAGPTEDHTDDFLGCLNIPVRRDTAMSQRGRSGFLSHLLLLSHLLRLEHSAEEPNSSSWRGELSTPAATILCLHGAQSNLSPLQLAVLHWQVSSRHHQTCTLDYSYLLGLLEDMQAHWEEAPSLPQEQEESLADSLSAFSEFGLQLLRQLRDYFPATNSTAVHRLELLLKCLGKLQLFQPSFEICPFESELNMDIAAALKRGNREWYDRILNDKSPREQPGPQRLPGLVVLADAVYDDLQFCYSVYASLFHSILNVDVFTLTFRQLERLVAEEAWVLTEELSPKMTLEVASGLFELYLTLADLQRFWDSIPGRDSRSLALAGIHAPFLPAVKLWFQVLRDQAKWRLQGAVDMDTLEPVDASSRHSSSAATAGLCLSHIQELWVRLAWPDPAQAQGLGTQLGQDVCEATLFYTELLRKKVDTQPGAAGEAVSEALCVVLNNVELVRKAAGQALKGLAWPEGATGPEGVLPRPLLSCTQALDDDLQREAHTVTAHLTSKMVGDIRKYVQHISLSPDSIQNDEAVAPLMKYLDEKLALLNASLVKGNLSRVLEALWELLLQAILQALGANRDVSADFYSRFHFTLEALVSFFHAEGQGLPLESLRDGSYKRLKEELRLHKCSTRECIEQFYLDKLKQRTLEQNRFGRLSVRCHYEAAEQRLAVEVLHAADLLPLDANGLSDPFVIVELGPPHLFPLVRSQRTQVKTRTLHPVYDELFYFSVPAEACRRRAACVLFTVMDHDWLSTNDFAGEAALGLGGVTGVARPQVGGGARAGQPVTLHLCRPRAQVRSALRRLEGRTSKEAQEFVKKLKELEKCMEADP

SEQ ID NO: 8230 - protein, 191 aa, Homo sapiens
  Payload ID: 1704;
  Gene Symbol: BAIAP3;
  Gene Name: BAI1-associated prt 3;
  ENSP ID: ENSP00000455414
  MOD_RES (1)..(1): Any amino acid
XYTELLRKKVDTQPGAAGEAVSEALCVVLNNVELVRKAAGQALKGLAWPEGATGPEGVLPRPLLSCTQALDDDLQREAHTVTAHLTSKMVGDIRKYVQHISLSPDSIQNDEAVAPLMKYLDEKLALLNASLVKGNLSSRFHFTLEALVSFFHAEGQGLPLESLRDGSYKRLKEELRLHKCSTRECIEQFYL

SEQ ID NO: 8231 - protein, 1124 aa, Homo sapiens
  Payload ID: 1704;
  Gene Symbol: BAIAP3;
  Gene Name: BAI1-associated prt 3;
  Uniprot ID:  O94812;
  ENSP ID: ENSP00000457644
MSTLLDIKSSVLRQVQVCPSFRRRTEQDPGSASADPQEPATGAWKPGDGVEFFAHMRLMLKKGEGRQGLPCLEVPLRSGSPAPPEPVDPSLGLRALAPEEALLSYLQQVFGTSLEEHTEAIERVRKAKAPTYALKVSVMRAKNLLAKDPNGFSDPYCMLGILPASDATREPRAQKEQRFGFRKGSKRGGPLPAKCIQVTEVKSSTLNPVWKEHFLFEIEDVSTDQLHLDIWDHDDDVSLVEACRKLNEVIGLKGMGRYFKQIVKSARANGTAGPTEDHTDDFLGCLNIPVREVPVAGVDRWFKLEPRSSASRVQGHCHLVLKLITTQRDTAMSQRGRSGFLSHLLLLSHLLRLEHSAEEPNSSSWRGELSTPAATILCLHGAQSNLSPLQLAVLHWQVSSRHHQTCTLDYSYLLGLLEDMQAHWEEAPSLPQEQEESLADSLSAFSEFGLQLLRQLRDYFPATNSTAVHRLELLLKCLGKLQLFQPSFEICPFESELNMDIAAALKRGNREWYDRILNDKSPREQPGPQRLPGLVVLADAVYDDLQFCYSVYASLFHSILNVDVFTLTFRQLERLVAEEAWVLTEELSPKMTLEVASGLFELYLTLADLQRFWDSIPGRDSRSLALAGIHAPFLPAVKLWFQVLRDQAKWRLQGAVDMDTLEPVDASSRHSSSAATAGLCLSHIQELWVRLAWPDPAQAQGLGTQLGQDVCEATLFYTELLRKKVDTQPGAAGEAVSEALCVVLNNVELVRKAAGQALKGLAWPEGATGPEGVLPRPLLSCTQALDDDLQREAHTVTAHLTSKMVGDIRKYVQHISLSPDSIQNDEAVAPLMKYLDEKLALLNASLVKGNLSRVLEALWELLLQAILQALGANRDVSADFYSRFHFTLEALVSFFHAEGQGLPLESLRDGSYKRLKEELRLHKCSTRECIEQFYLDKLKQRTLEQNRFGRLSVRCHYEAAEQRLAVEVLHAADLLPLDANGLSDPFVIVELGPPHLFPLVRSQRTQVKTRTLHPVYDELFYFSVPAEACRRRAACVLFTVMDHDWLSTNDFAGEAALGLGGVTGVARPQVGGGARAGQPVTLHLCRPRAQVRSALRRLEGRTSKEAQEFVKKLKELEKCMEADP

SEQ ID NO: 8232 - protein, 217 aa, Homo sapiens
  Payload ID: 1704;
  Gene Symbol: BAIAP3;
  Gene Name: BAI1-associated prt 3;
  ENSP ID: ENSP00000457947
  MOD_RES (1)..(1): Any amino acid
XYSVYASLFHSILNVDVFTLTFRQLERLVAEEAWVLTEELSPKMTLEVASGLFELYLTLADLQRFWDSIPGRDSRSLALAGIHAPFLPAVKLWFQVLRDQAKWRLQGAVDMDTLEPVDASSRHSSSAATAGLCLSHIQELWVRLAWPDPAQAQGLGTQLGQDVCEATLFYTELLRKKVDTQPGAAGEAVSEALCVVLNNVELVRKAAGQAHLCPSCL

SEQ ID NO: 8233 - protein, 1129 aa, Homo sapiens
  Payload ID: 1704;
  Gene Symbol: BAIAP3;
  Gene Name: BAI1-associated prt 3;
  Uniprot ID:  O94812;
  ENSP ID: ENSP00000458134
MSTLLDIKSSVLRQVQVCPSFRRRTEQDPGSASADPQEPATGAWKPGDGVEFFAHMRLMLKKGEGRQGLPCLEVPLRSGSPAPPEPVDPSLGLRALAPEEVDDEEALLSYLQQVFGTSLEEHTEAIERVRKAKAPTYALKVSVMRAKNLLAKDPNGFSDPYCMLGILPASDATREPRAQKEQRFGFRKGSKRGGPLPAKCIQVTEVKSSTLNPVWKEHFLFEIEDVSTDQLHLDIWDHDDDVSLVEACRKLNEVIGLKGMGRYFKQIVKSARANGTAGPTEDHTDDFLGCLNIPVREVPVAGVDRWFKLEPRSSASRVQGHCHLVLKLITTQRDTAMSQRGRSGFLSHLLLLSHLLRLEHSAEEPNSSSWRGELSTPAATILCLHGAQSNLSPLQLAVLHWQVSSRHHQTCTLDYSYLLGLLEDMQAHWEEAPSLPQEQEESLADSLSAFSEFGLQLLRQLRDYFPATNSTAVHRLELLLKCLGKLQLFQPSFEICPFESELNMDIAAALKRGNREWYDRILNDKSPREQPGPQRLPGLVVLADAVYDDLQFCYSVYASLFHSILNVDVFTLTFRQLERLVAEEAWVLTEELSPKMTLEVASGLFELYLTLADLQRFWDSIPGRDSRSLALAGIHAPFLPAVKLWFQVLRDQAKWRLQGAVDMDTLEPVDASSRHSSSAATAGLCLSHIQELWVRLAWPDPAQAQGLGTQLGQDVCEATLFYTELLRKKVDTQPGAAGEAVSEALCVVLNNVELVRKAAGQALKGLAWPEGATGPEGVLPRPLLSCTQALDDDLQREAHTVTAHLTSKMVGDIRKYVQHISLSPDSIQNDEAVAPLMKYLDEKLALLNASLVKGNLSRVLEALWELLLQAILQALGANRDVSADFYSRFHFTLEALVSFFHAEGQGLPLESLRDGSYKRLKEELRLHKCSTRECIEQFYLDKLKQRTLEQNRFGRLSVRCHYEAAEQRLAVEVLHAADLLPLDANGLSDPFVIVELGPPHLFPLVRSQRTQVKTRTLHPVYDELFYFSVPAEACRRRAACVLFTVMDHDWLSTNDFAGEAALGLGGVTGVARPQVGGGARAGQPVTLHLCRPRAQVRSALRRLEGRTSKEAQEFVKKLKELEKCMEADP

SEQ ID NO: 8234 - protein, 1169 aa, Homo sapiens; identical to SEQ ID NO: 8227
  Payload ID: 1704;
  Gene Symbol: BAIAP3;
  Gene Name: BAI1-associated prt 3;
  Uniprot ID:  O94812;
  ENSP ID: ENSP00000487275

SEQ ID NO: 8235 - protein, 593 aa, Homo sapiens
  Payload ID: 1705;
  Gene Symbol: BBS1;
  Gene Name: Bardet-Biedl syndrome 1;
  Uniprot ID:  Q8NFJ9;
  ENSP ID: ENSP00000317469
MAAASSSDSDACGAESNEANSKWLDAHYDPMANIHTFSACLALADLHGDGEYKLVVGDLGPGGQQPRLKVLKGPLVMTESPLPALPAAAATFLMEQHEPRTPALALASGPCVYVYKNLRPYFKFSLPQLPPNPLEQDLWNQAKEDRIDPLTLKEMLESIRETAEEPLSIQSLRFLQLELSEMEAFVNQHKSNSIKRQTVITTMTTLKKNLADEDAVSCLVLGTENKELLVLDPEAFTILAKMSLPSVPVFLEVSGQFDVEFRLAAACRNGNIYILRRDSKHPKYCIELSAQPVGLIRVHKVLVVGSTQDSLHGFTHKGKKLWTVQMPAAILTMNLLEQHSRGLQAVMAGLANGEVRIYRDKALLNVIHTPDAVTSLCFGRYGREDNTLIMTTRGGGLIIKILKRTAVFVEGGSEVGPPPAQAMKLNVPRKTRLYVDQTLREREAGTAMHRAFQTDLYLLRLRAARAYLQALESSLSPLSTTAREPLKLHAVVQGLGPTFKLTLHLQNTSTTRPVLGLLVCFLYNEALYSLPRAFFKVPLLVPGLNYPLETFVESLSNKGISDIIKVLVLREGQSAPLLSAHVNMPGSEGLAAA

SEQ ID NO: 8236 - protein, 446 aa, Homo sapiens
  Payload ID: 1705;
  Gene Symbol: BBS1;
  Gene Name: Bardet-Biedl syndrome 1;
  Uniprot ID:  Q8NFJ9;
  ENSP ID: ENSP00000377563
MAAASSSDSDACGAESNEANSKWLDAHYDPMANIHTFSACLALADLHGDGEYKLVVGDLGPGGQQPRLKVLKGPLVMTESPLPALPAAAATFLMEQHEPRTPALALASGPCVYVYKNLRPYFKFSLPQLPPNPLEQDLWNQAKEDRIDPLTLKEMLESIRETAEEPLSIQSLRFLQLELSEMEAFVNQHKSNSIKRQTVITTMTTLKKNLADEDAVSCLVLGTENKELLVLDPEAFTILAKDAVTSLCFGRYGREDNTLIMTTRGGGLIIKILKRTAVFVEGGSEVGPPPAQAMKLNVPRKTRLYVDQTLREREAGTAMHRAFQTDLYLLRLRAARAYLQALESSLSPLSTTAREPLKLHAVVQGLGPTFKLTLHLQNTSTTRPVLGLLVCFLYNEALYSLPRAFFKVPLLVPGLNYPLETFVESLSNKGISDIIKVGPALVPRGR

SEQ ID NO: 8237 - protein, 496 aa, Homo sapiens
  Payload ID: 1705;
  Gene Symbol: BBS1;
  Gene Name: Bardet-Biedl syndrome 1;
  ENSP ID: ENSP00000405764
MAAASSSDSDACGAESNEANSKWLDAHYDPMANIHTFSACLALADLHGDGEYKLVVGDLGPGGQQPRLKVLKGPLVMTESPLPALPAAAATFLMEQHEPRTPALALASGPCVYVYKNLRPYFKFSLPQLPPNPLEQDLWNQAKEMSLPSVPVFLEVSGQFDVEFRLAAACRNGNIYILRRDSKHPKYCIELSAQPVGLIRVHKVLVVGSTQDSLHGFTHKGKKLWTVQMPAAILTMNLLEQHSRGLQAVMAGLANGEVRIYRDKALLNVIHTPDAVTSLCFGRYGREDNTLIMTTRGGGLIIKILKRTAVFVEGGSEVGPPPAQAMKLNVPRKTRLYVDQTLREREAGTAMHRAFQTDLYLLRLRAARAYLQALESSLSPLSTTAREPLKLHAVVQGLGPTFKLTLHLQNTSTTRPVLGLLVCFLYNEALYSLPRAFFKVPLLVPGLNYPLETFVESLSNKGISDIIKVLVLREGQSAPLLSAHVNMPGSEGLAAA

SEQ ID NO: 8238 - protein, 192 aa, Homo sapiens
  Payload ID: 1705;
  Gene Symbol: BBS1;
  Gene Name: Bardet-Biedl syndrome 1;
  ENSP ID: ENSP00000431187
MAAASSSDSDACGAESNEANSKWLDAHYDPMANIHTFSACLALADLHGDGEYKDRIDPLTLKEMLESIRETAEEPLSIQSLRFLQLELSEMEAFVNQHKSNSIKRQTVITTMTTLKKNLADEDAVSCLVLGTENKELLVLDPEAFTILAKMSLPSVPVFLEVSGQFDVEFRLAAACRNGNIYILRRDSKHPK

SEQ ID NO: 8239 - protein, 85 aa, Homo sapiens
  Payload ID: 1705;
  Gene Symbol: BBS1;
  Gene Name: Bardet-Biedl syndrome 1;
  ENSP ID: ENSP00000431866
MAAASSSDSDACGAESNEANSKWLDAHYDPMANIHTFSACLAGGRGPWPWWAAAPPEGAQRTTGDDRKPATCSASCCCHLPHGAT

SEQ ID NO: 8240 - protein, 85 aa, Homo sapiens; identical to SEQ ID NO: 8239
  Payload ID: 1705;
  Gene Symbol: BBS1;
  Gene Name: Bardet-Biedl syndrome 1;
  ENSP ID: ENSP00000432140

SEQ ID NO: 8241 - protein, 85 aa, Homo sapiens; identical to SEQ ID NO: 8239
  Payload ID: 1705;
  Gene Symbol: BBS1;
  Gene Name: Bardet-Biedl syndrome 1;
  ENSP ID: ENSP00000434197

SEQ ID NO: 8242 - protein, 55 aa, Homo sapiens
  Payload ID: 1705;
  Gene Symbol: BBS1;
  Gene Name: Bardet-Biedl syndrome 1;
  ENSP ID: ENSP00000434360
MANIHTFSACLAGGRGPWPWWAAAPPEGAQRTTGDDRKPATCSASCCCHLPHGAT

SEQ ID NO: 8243 - protein, 85 aa, Homo sapiens; identical to SEQ ID NO: 8239
  Payload ID: 1705;
  Gene Symbol: BBS1;
  Gene Name: Bardet-Biedl syndrome 1;
  ENSP ID: ENSP00000434619

SEQ ID NO: 8244 - protein, 164 aa, Homo sapiens
  Payload ID: 1705;
  Gene Symbol: BBS1;
  Gene Name: Bardet-Biedl syndrome 1;
  ENSP ID: ENSP00000436073
MAAASSSDSDACGAESNEANSKWLDAHYDPMANIHTFSACLALADLHGDGEYKLVVGDLGPGGQQPRLKVLKGPLVMTESPLPALPAAAATFLMEQHEPRTPALALASGPCVYVYKNLRPYFKFSLPQLPPNPLEQDLWNQAKEGDGRGAFVHPVTQVSAAGAK

SEQ ID NO: 8245 - protein, 55 aa, Homo sapiens; identical to SEQ ID NO: 8242
  Payload ID: 1705;
  Gene Symbol: BBS1;
  Gene Name: Bardet-Biedl syndrome 1;
  ENSP ID: ENSP00000436195

SEQ ID NO: 8246 - protein, 54 aa, Homo sapiens
  Payload ID: 1705;
  Gene Symbol: BBS1;
  Gene Name: Bardet-Biedl syndrome 1;
  ENSP ID: ENSP00000436860
MANIHTFSACLALADLHGDGEYKLVVGDLGPGGQQPRLKVLKGPLVMTESPLPA

SEQ ID NO: 8247 - protein, 66 aa, Homo sapiens
  Payload ID: 1705;
  Gene Symbol: BBS1;
  Gene Name: Bardet-Biedl syndrome 1;
  ENSP ID: ENSP00000436927
MEQHEPRTPALALASGPCVYVYKNLRPYFKFSLPQLPPNPLEQDLWNQAKEDRIDPLTLKEMLESI

SEQ ID NO: 8248 - protein, 85 aa, Homo sapiens; identical to SEQ ID NO: 8239
  Payload ID: 1705;
  Gene Symbol: BBS1;
  Gene Name: Bardet-Biedl syndrome 1;
  ENSP ID: ENSP00000486455

SEQ ID NO: 8249 - protein, 723 aa, Homo sapiens
  Payload ID: 1706;
  Gene Symbol: BBS10;
  Gene Name: Bardet-Biedl syndrome 10;
  Uniprot ID:  Q8TAM1;
  ENSP ID: ENSP00000376946
MLSSMAAAGSVKAALQVAEVLEAIVSCCVGPEGRQVLCTKPTGEVLLSRNGGRLLEALHLEHPIARMIVDCVSSHLKKTGDGAKTFIIFLCHLLRGLHAITDREKDPLMCENIQTHGRHWKNCSRWKFISQALLTFQTQILDGIMDQYLSRHFLSIFSSAKERTLCRSSLELLLEAYFCGRVGRNNHKFISQLMCDYFFKCMTCKSGIGVFELVDDHFVELNVGVTGLPVSDSRIIAGLVLQKDFSVYRPADGDMRMVIVTETIQPLFSTSGSEFILNSEAQFQTSQFWIMEKTKAIMKHLHSQNVKLLISSVKQPDLVSYYAGVNGISVVECLSSEEVSLIRRIIGLSPFVPPQAFSQCEIPNTALVKFCKPLILRSKRYVHLGLISTCAFIPHSIVLCGPVHGLIEQHEDALHGALKMLRQLFKDLDLNYMTQTNDQNGTSSLFIYKNSGESYQAPDPGNGSIQRPYQDTVAENKDALEKTQTYLKVHSNLVIPDVELETYIPYSTPTLTPTDTFQTVETLTCLSLERNRLTDYYEPLLKNNSTAYSTRGNRIEISYENLQVTNITRKGSMLPVSCKLPNMGTSQSYLSSSMPAGCVLPVGGNFEILLHYYLLNYAKKCHQSEETMVSMIIANALLGIPKVLYKSKTGKYSFPHTYIRAVHALQTNQPLVSSQTGLESVMGKYQLLTSVLQCLTKILTIDMVITVKRHPQKVHNQDSEDEL

SEQ ID NO: 8250 - protein, 710 aa, Homo sapiens
  Payload ID: 1707;
  Gene Symbol: BBS12;
  Gene Name: Bardet-Biedl syndrome 12;
  Uniprot ID:  Q6ZW61;
  ENSP ID: ENSP00000319062
MVMACRVVNKRRHMGLQQLSSFAETGRTFLGPLKSSKFIIDEECHESVLISSTVRLLESLDLTSAVGQLLNEAVQAQNNTYRTGISTLLFLVGAWSSAVEECLHLGVPISIIVSVMSEGLNFCSEEVVSLHVPVHNIFDCMDSTKTFSQLETFSVSLCPFLQVPSDTDLIEELHGLKDVASQTLTISNLSGRPLKSYELFKPQTKVEADNNTSRTLKNSLLADTCCRQSILIHSRHFNRTDNTEGVSKPDGFQEHVTATHKTYRCNDLVELAVGLSHGDHSSMKLVEEAVQLQYQNACVQQGNCTKPFMFDISRIFTCCLPGLPETSSCVCPGYITVVSVSNNPVIKELQNQPVRIVLIEGDLTENYRHLGFNKSANIKTVLDSMRLQEDSSEELWANHVLQVLIQFKVNLVLVQGNVSERLIEKCINSKRLVIGSVNGSVMQAFAEAAGAVQVAYITQVNEDCVGDGVCVTFWRSSPLDVVDRNNRIAILLKTEGINLVTAVLTNPVTAQMQIKEDRFWTCAYRLYYALKEEKVFLGGGAVEFLCLSCLHILAEQSLKKENHACSGWLHNTSSWLASSLAIYRPTVLKFLANGWQKYLSTLLYNTANYSSEFEASTYIQHHLQNATDSGSPSSYILNEYSKLNSRIFNSDISNKLEQIPRVYDVVTPKIEAWRRALDLVLLVLQTDSEIITGHGHTQINSQELTGFLFL

SEQ ID NO: 8251 - protein, 191 aa, Homo sapiens
  Payload ID: 1707;
  Gene Symbol: BBS12;
  Gene Name: Bardet-Biedl syndrome 12;
  ENSP ID: ENSP00000398912
MVMACRVVNKRRHMGLQQLSSFAETGRTFLGPLKSSKFIIDEECHESVLISSTVRLLESLDLTSAVGQLLNEAVQAQNNTYRTGISTLLFLVGAWSSAVEECLHLGVPISIIVSVMSEGLNFCSEEVVSLHVPVHNIFDCMDSTKTFSQLETFSVSLCPFLQVPSDTDLIEELHGLKDVASQTLTISNLSG

SEQ ID NO: 8252 - protein, 710 aa, Homo sapiens; identical to SEQ ID NO: 8250
  Payload ID: 1707;
  Gene Symbol: BBS12;
  Gene Name: Bardet-Biedl syndrome 12;
  Uniprot ID:  Q6ZW61;
  ENSP ID: ENSP00000438273

SEQ ID NO: 8253 - protein, 721 aa, Homo sapiens
  Payload ID: 1708;
  Gene Symbol: BBS2;
  Gene Name: Bardet-Biedl syndrome 2;
  Uniprot ID:  Q9BXC9;
  ENSP ID: ENSP00000245157
MLLPVFTLKLRHKISPRMVAIGRYDGTHPCLAAATQTGKVFIHNPHTRNQHVSASRVFQSPLESDVSLLSINQAVSCLTAGVLNPELGYDALLVGTQTNLLAYDVYNNSDLFYREVADGANAIVLGTLGDISSPLAIIGGNCALQGFNHEGSDLFWTVTGDNVNSLALCDFDGDGKKELLVGSEDFDIRVFKEDEIVAEMTETEIVTSLCPMYGSRFGYALSNGTVGVYDKTSRYWRIKSKNHAMSIHAFDLNSDGVNELITGWSNGKVDARSDRTGEVIFKDNFSSAIAGVVEGDYRMDGHIQLICCSVDGEIRGYLPGTAEMRGNLMDTSAEQDLIRELSQKKQNLLLELRNYEENAKAELASPLNEADGHRGIIPANTRLHTTLSVSLGNETQTAHTELRISTSNDTIIRAVLIFAEGIFTGESHVVHPSIHNLSSSICIPIVPPKDVPVDLHLKAFVGYRSSTQFHVFESTRQLPRFSMYALTSLDPASEPISYVNFTIAERAQRVVVWLGQNFLLPEDTHIQNAPFQVCFTSLRNGGHLHIKIKLSGEITINTDDIDLAGDIIQSMASFFAIEDLQVEADFPVYFEELRKVLVKVDEYHSVHQKLSADMADHSNLIRSLLVGAEDARLMRDMKTMKSRYMELYDLNRDLLNGYKIRCNNHTELLGNLKAVNQAIQRAGRLRVGKPKNQVITACRDAIRSNNINTLFKIMRVGTASS

SEQ ID NO: 8254 - protein, 76 aa, Homo sapiens
  Payload ID: 1708;
  Gene Symbol: BBS2;
  Gene Name: Bardet-Biedl syndrome 2;
  ENSP ID: ENSP00000454986
  MOD_RES (1)..(1): Any amino acid
XNLSSSICIPIVPPKDVPVDLHLKAFVGYRSSTQFHVFESTRQLPRFSMYALTSLDPASEPISYVNFTIAERAQRQ

SEQ ID NO: 8255 - protein, 119 aa, Homo sapiens
  Payload ID: 1708;
  Gene Symbol: BBS2;
  Gene Name: Bardet-Biedl syndrome 2;
  ENSP ID: ENSP00000455651
DEIVAEMTETEIVTSLCPMYGSRFGYALSNGTVGVYDKTSRYWRIKSKNHAMSIHAFDLNSDGVNELITGWSNGKVDARSDRTGEVIFKDNFSSAIAGVVEGDYRMDGHIHPGLPAWHG

SEQ ID NO: 8256 - protein, 675 aa, Homo sapiens
  Payload ID: 1708;
  Gene Symbol: BBS2;
  Gene Name: Bardet-Biedl syndrome 2;
  ENSP ID: ENSP00000456289
MLLPVFTLKLRHKISPRMVAIGRYDGTHPCLAAATQTGKVFIHNPHTRNQHVSASRVFQSPLESDVSLLSINQAVSCLTAGVLNPELGYDALLVGTQTNLLAYDVYNNSDLFYREVADGANAIVLGTLGDISSPLAIIGGNCALQGFNHEGSDLFWTVTGDNVNSLALCDFDGDGKKELLVGSEDFDIRVFKEDEIVAEMTETEIVTSLCPMYGSRFGYALSNGTVGVYDKTSRYWRIKSKNHAMSIHAFDLNSDGVNELITGWSNGKVDARSDRTGEVIFKDNFSSAIAGVVEGDYRMDGHIQLICCSVDGEIRGYLPGTAEMRGNLMDTSAEQDLIRELSQKKQNLLLELRNYEENAKAELASPLNEADGHRGIIPANTRLHTTLSVSLGNETQTAHTELRISTSNDTIIRAVLIFAEGIFTGESHVVHPSIHNLSSSICIPIVPPKDVPVDLHLKAFVGYRSSTQFHVFESTRQLPRFSMYALTSLDPASEPISYVNFTIAERAQRVVVWLGQNFLLPEDTHIQNAPFQVCFTSLRNGGHLHIKIKLSGEVDEYHSVHQKLSADMADHSNLIRSLLVGAEDARLMRDMKTMKSRYMELYDLNRDLLNGYKIRCNNHTELLGNLKAVNQAIQRAGRLRVGKPKNQVITACRDAIRSNNINTLFKIMRVGTASS

SEQ ID NO: 8257 - protein, 5 aa, Homo sapiens
  Payload ID: 1708;
  Gene Symbol: BBS2;
  Gene Name: Bardet-Biedl syndrome 2;
  ENSP ID: ENSP00000456741
MTETE

SEQ ID NO: 8258 - protein, 85 aa, Homo sapiens
  Payload ID: 1708;
  Gene Symbol: BBS2;
  Gene Name: Bardet-Biedl syndrome 2;
  ENSP ID: ENSP00000463176
  MOD_RES (1)..(1): Any amino acid
XKTMKSRYMELYDLNRDLLNGYKIRCNNHTELLGNLKAVNQAIQRAGRLRVGKPKNQVITACRDAIRSNNINTLFKIMRVGTASS

SEQ ID NO: 8259 - protein, 142 aa, Homo sapiens
  Payload ID: 1708;
  Gene Symbol: BBS2;
  Gene Name: Bardet-Biedl syndrome 2;
  ENSP ID: ENSP00000463731
LQVEADFPVYFEELRKVLVKVDEYHSVHQKLSADMADHSNLIRSLLVGAEDARLMRDMKTMKSRYMELYDLNRDLLNGYKIRCNNHTELLGNLKAVNQAIQRAGRLRVGKPKNQVITACRDAIRSNNINTLFKIMRVGTASS

SEQ ID NO: 8260 - protein, 519 aa, Homo sapiens
  Payload ID: 1709;
  Gene Symbol: BBS4;
  Gene Name: Bardet-Biedl syndrome 4;
  Uniprot ID:  Q96RK4;
  ENSP ID: ENSP00000268057
MAEERVATRTQFPVSTESQKPRQKKAPEFPILEKQNWLIHLHYIRKDYEACKAVIKEQLQETQGLCEYAIYVQALIFRLEGNIQESLELFQTCAVLSPQSADNLKQVARSLFLLGKHKAAIEVYNEAAKLNQKDWEISHNLGVCYIYLKQFNKAQDQLHNALNLNRHDLTYIMLGKIHLLEGDLDKAIEVYKKAVEFSPENTELLTTLGLLYLQLGIYQKAFEHLGNALTYDPTNYKAILAAGSMMQTHGDFDVALTKYRVVACAVPESPPLWNNIGMCFFGKKKYVAAISCLKRANYLAPFDWKILYNLGLVHLTMQQYASAFHFLSAAINFQPKMGELYMLLAVALTNLEDIENAKRAYAEAVHLDKCNPLVNLNYAVLLYNQGEKKNALAQYQEMEKKVSLLKDNSSLEFDSEMVEMAQKLGAALQVGEALVWTKPVKDPKSKHQTTSTSKPASFQQPLGSNQALGQAMSSAAAYRTLPSGAGGTSQFTKPPSLPLEPEPAVESSPTETSEQIREK

SEQ ID NO: 8261 - protein, 347 aa, Homo sapiens
  Payload ID: 1709;
  Gene Symbol: BBS4;
  Gene Name: Bardet-Biedl syndrome 4;
  Uniprot ID:  Q96RK4;
  ENSP ID: ENSP00000378631
MLGKIHLLEGDLDKAIEVYKKAVEFSPENTELLTTLGLLYLQLGIYQKAFEHLGNALTYDPTNYKAILAAGSMMQTHGDFDVALTKYRVVACAVPESPPLWNNIGMCFFGKKKYVAAISCLKRANYLAPFDWKILYNLGLVHLTMQQYASAFHFLSAAINFQPKMGELYMLLAVALTNLEDIENAKRAYAEAVHLDKCNPLVNLNYAVLLYNQGEKKNALAQYQEMEKKVSLLKDNSSLEFDSEMVEMAQKLGAALQVGEALVWTKPVKDPKSKHQTTSTSKPASFQQPLGSNQALGQAMSSAAAYRTLPSGAGGTSQFTKPPSLPLEPEPAVESSPTETSEQIREK

SEQ ID NO: 8262 - protein, 77 aa, Homo sapiens
  Payload ID: 1709;
  Gene Symbol: BBS4;
  Gene Name: Bardet-Biedl syndrome 4;
  ENSP ID: ENSP00000454718
MAEERVATVSAEILFSCPAAGQGKLAGGFCPMQRFLERGGAGCRASQGGRGDTVPFLLSRELVAWGKSGYLAAQVLF

SEQ ID NO: 8263 - protein, 142 aa, Homo sapiens
  Payload ID: 1709;
  Gene Symbol: BBS4;
  Gene Name: Bardet-Biedl syndrome 4;
  ENSP ID: ENSP00000455412
MAEERVATRTQFPVSTESQKPRQKKAPEFPILEKQNWLIHLHYIRKDYEACKAVIKEQLQETQGLCEYAIYVQALIFRLEGNIQESLELFQTCAVLSPQSADNLKQVARSLFLLGKHKAAIEVYNEAAKLNQKDWPRRSAIT

SEQ ID NO: 8264 - protein, 141 aa, Homo sapiens
  Payload ID: 1709;
  Gene Symbol: BBS4;
  Gene Name: Bardet-Biedl syndrome 4;
  ENSP ID: ENSP00000455958
MALTVVPSFSVSGVWKRTQFPVSTESQKPRQKKEFPILEKQNWLIHLHYIRKDYEACKAVIKEQLQETQGLCEYAIYVQALIFRLEGNIQESLELFQTCAVLSPQSADNLKQVARSLFLLGKHKAAIEVYNEAAKLNQKDW

SEQ ID NO: 8265 - protein, 20 aa, Homo sapiens
  Payload ID: 1709;
  Gene Symbol: BBS4;
  Gene Name: Bardet-Biedl syndrome 4;
  ENSP ID: ENSP00000456463
MAEERVATLQSFLFWRSRTG

SEQ ID NO: 8266 - protein, 67 aa, Homo sapiens
  Payload ID: 1709;
  Gene Symbol: BBS4;
  Gene Name: Bardet-Biedl syndrome 4;
  ENSP ID: ENSP00000456664
MAEERVATRTQFPVSTESQKPRQKKGGVGVSNDLEYQKFNLYIYSSRVSYFGEAELVDSSSLYPERL

SEQ ID NO: 8267 - protein, 281 aa, Homo sapiens
  Payload ID: 1709;
  Gene Symbol: BBS4;
  Gene Name: Bardet-Biedl syndrome 4;
  ENSP ID: ENSP00000456758
ERVATRTQFPVSTESQKPRQKKAPEFPILEKQNWLIHLHYIRKDYEACKAVIKEQLQETQGLCEYAIYVQALIFRLEGNIQESLELFQTCAVLSPQSADNLKQVARSLFLLGKHKAAIEVYNEAAKLNQKDWEISHNLGVCYIYLKQFNKAQDQLHNALNLNRHDLTYIMLGKIHLLEGDLDKAIEVYKKAVEFSPENTELLTTLGLLYLQAILAAGSMMQTHGDFDVALTKYRVVACAVPESPPLWNNIGMCFFGKKKYVAAISCLKRANYLAPFDWKIL

SEQ ID NO: 8268 - protein, 20 aa, Homo sapiens
  Payload ID: 1709;
  Gene Symbol: BBS4;
  Gene Name: Bardet-Biedl syndrome 4;
  ENSP ID: ENSP00000456759
MAEERVATLQSFLFWRSRTG

SEQ ID NO: 8269 - protein, 180 aa, Homo sapiens
  Payload ID: 1709;
  Gene Symbol: BBS4;
  Gene Name: Bardet-Biedl syndrome 4;
  ENSP ID: ENSP00000457479
  MOD_RES (1)..(1): Any amino acid
XNFQPKMGELYMLLAAELSSCSAFFVAVALTNLEDIENAKRAYAEAVHLDKCNPLVNLNYAVLLYNQGEKKNALAQYQEMEKKVSLLKDNSSLEFDSEMVEMAQKLGAALQVGEALVWTKPVKDPKSKHQTTSTSKPASFQQPLGSNQALGQAMSSAAAYRTLPSGAGGTSQFTKPPSLP

SEQ ID NO: 8270 - protein, 50 aa, Homo sapiens
  Payload ID: 1709;
  Gene Symbol: BBS4;
  Gene Name: Bardet-Biedl syndrome 4;
  ENSP ID: ENSP00000457753
MAEERVATDCSPSWGALDGEGRLFTSNGSYRSAIFFCLGGLEENSISCIY

SEQ ID NO: 8271 - protein, 103 aa, Homo sapiens
  Payload ID: 1709;
  Gene Symbol: BBS4;
  Gene Name: Bardet-Biedl syndrome 4;
  ENSP ID: ENSP00000457795
MAEERVATRTQFPVSTESQKPRQKKAPEFPILEKQNWLIHLHYIRKDYEACKAVIKEQLQETQGLCEYAIYVQDFFWENIKLPLKYIMKQLNSTRKIGRSAIT

SEQ ID NO: 8272 - protein, 33 aa, Homo sapiens
  Payload ID: 1709;
  Gene Symbol: BBS4;
  Gene Name: Bardet-Biedl syndrome 4;
  ENSP ID: ENSP00000457958
MAEERVATRTQFPVSTESQKPRQKKGDFLLAFS

SEQ ID NO: 8273 - protein, 341 aa, Homo sapiens
  Payload ID: 1710;
  Gene Symbol: BBS5;
  Gene Name: Bardet-Biedl syndrome 5;
  Uniprot ID:  Q8N3I7;
  ENSP ID: ENSP00000295240
MSVLDALWEDRDVRFDLSAQQMKTRPGEVLIDCLDSIEDTKGNNGDRGRLLVTNLRILWHSLALSRVNVSVGYNCILNITTRTANSKLRGQTEALYILTKCNSTRFEFIFTNLVPGSPRLFTSVMAVHRAYETSKMYRDFKLRSALIQNKQLRLLPQEHVYDKINGVWNLSSDQGNLGTFFITNVRIVWHANMNDSFNVSIPYLQIRSIKIRDSKFGLALVIESSQQSGGYVLGFKIDPVEKLQESVKEINSLHKVYSASPIFGVDYEMEEKPQPLEALTVEQIQDDVEIDSDGHTDAFVAYFADGNKQQDREPVFSEELGLAIEKLKDGFTLQGLWEVMS

SEQ ID NO: 8274 - protein, 320 aa, Homo sapiens
  Payload ID: 1710;
  Gene Symbol: BBS5;
  Gene Name: Bardet-Biedl syndrome 5;
  Uniprot ID:  Q8N3I7;
  ENSP ID: ENSP00000376431
MSVLDALWEDRDVRFDLSAQQMKTRPGEVLIDCLDSIEDTKGNNGDRGRLLVTNLRILWHSLALSRVNVSVGYNCILNITTRTANSKLRGQTEALYILTKCNSTRFEFIFTNLVPGSPRLFTSVMAVHRAYETSKMYRDFKLRSALIQNKQLRLLPQEHVYDKINGVWNLSSDQGNLGTFFITNVRIVWHANMNDSFNVSIPYLQISGGYVLGFKIDPVEKLQESVKEINSLHKVYSASPIFGVDYEMEEKPQPLEALTVEQIQDDVEIDSDGHTDAFVAYFADGNKQQDREPVFSEELGLAIEKLKDGFTLQGLWEVMS

SEQ ID NO: 8275 - protein, 53 aa, Homo sapiens
  Payload ID: 1710;
  Gene Symbol: BBS5;
  Gene Name: Bardet-Biedl syndrome 5;
  ENSP ID: ENSP00000406182
MSVLDALWEDRDVRFDLSAQQMKTRPGEVLIDCLDSIEDTKGNNGDREITRPN

SEQ ID NO: 8276 - protein, 715 aa, Homo sapiens
  Payload ID: 1711;
  Gene Symbol: BBS7;
  Gene Name: Bardet-Biedl syndrome 7;
  Uniprot ID:  Q8IWZ6;
  ENSP ID: ENSP00000264499
MDLILNRMDYLQVGVTSQKTMKLIPASRHRATQKVVIGDHDGVVMCFGMKKGEAAAVFKTLPGPKIARLELGGVINTPQEKIFIAAASEIRGFTKRGKQFLSFETNLTESIKAMHISGSDLFLSASYIYNHYCDCKDQHYYLSGDKINDVICLPVERLSRITPVLACQDRVLRVLQGSDVMYAVEVPGPPTVLALHNGNGGDSGEDLLFGTSDGKLALIQITTSKPVRKWEIQNEKKRGGILCIDSFDIVGDGVKDLLVGRDDGMVEVYSFDNANEPVLRFDQMLSESVTSIQGGCVGKDSYDEIVVSTYSGWVTGLTTEPIHKESGPGEELKINQEMQNKISSLRNELEHLQYKVLQERENYQQSSQSSKAKSAVPSFGINDKFTLNKDDASYSLILEVQTAIDNVLIQSDVPIDLLDVDKNSAVVSFSSCDSESNDNFLLATYRCQADTTRLELKIRSIEGQYGTLQAYVTPRIQPKTCQVRQYHIKPLSLHQRTHFIDHDRPMNTLTLTGQFSFAEVHSWVVFCLPEVPEKPPAGECVTFYFQNTFLDTQLESTYRKGEGVFKSDNISTISILKDVLSKEATKRKINLNISYEINEVSVKHTLKLIHPKLEYQLLLAKKVQLIDALKELQIHEGNTNFLIPEYHCILEEADHLQEEYKKQPAHLERLYGMITDLFIDKFKFKGTNVKTKVPLLLEILDSYDQNALISFFDAA

SEQ ID NO: 8277 - protein, 138 aa, Homo sapiens
  Payload ID: 1711;
  Gene Symbol: BBS7;
  Gene Name: Bardet-Biedl syndrome 7;
  ENSP ID: ENSP00000423250
DVLSKEATKRKINLNISYEINEVSVKHTLKLIHPKLEYQLLLAKKVQLIDALKELQIHEGNTNFLIPEYHCILEEADHLQEEYKKQPAHLERLYGMITDLFIDKFKFKGTNVKTKVPLLLEILDSYDQNALISFFDAA

SEQ ID NO: 8278 - protein, 672 aa, Homo sapiens
  Payload ID: 1711;
  Gene Symbol: BBS7;
  Gene Name: Bardet-Biedl syndrome 7;
  Uniprot ID:  Q8IWZ6;
  ENSP ID: ENSP00000423626
MDLILNRMDYLQVGVTSQKTMKLIPASRHRATQKVVIGDHDGVVMCFGMKKGEAAAVFKTLPGPKIARLELGGVINTPQEKIFIAAASEIRGFTKRGKQFLSFETNLTESIKAMHISGSDLFLSASYIYNHYCDCKDQHYYLSGDKINDVICLPVERLSRITPVLACQDRVLRVLQGSDVMYAVEVPGPPTVLALHNGNGGDSGEDLLFGTSDGKLALIQITTSKPVRKWEIQNEKKRGGILCIDSFDIVGDGVKDLLVGRDDGMVEVYSFDNANEPVLRFDQMLSESVTSIQGGCVGKDSYDEIVVSTYSGWVTGLTTEPIHKESGPGEELKINQEMQNKISSLRNELEHLQYKVLQERENYQQSSQSSKAKSAVPSFGINDKFTLNKDDASYSLILEVQTAIDNVLIQSDVPIDLLDVDKNSAVVSFSSCDSESNDNFLLATYRCQADTTRLELKIRSIEGQYGTLQAYVTPRIQPKTCQVRQYHIKPLSLHQRTHFIDHDRPMNTLTLTGQFSFAEVHSWVVFCLPEVPEKPPAGECVTFYFQNTFLDTQLESTYRKGEGVFKSDNISTISILKDVLSKEATKRKINLNISYEINEVSVKHTLKLIHPKLEYQLLLAKKVQLIDALKELQIHEGNTNFLIPEYHCILEEADHLQEEYKKQPAHLERLYG

SEQ ID NO: 8279 - protein, 887 aa, Homo sapiens
  Payload ID: 1712;
  Gene Symbol: BBS9;
  Gene Name: Bardet-Biedl syndrome 9;
  Uniprot ID:  Q3SYG4;
  ENSP ID: ENSP00000242067
MSLFKARDWWSTILGDKEEFDQGCLCLANVDNSGNGQDKIIVGSFMGYLRIFSPHPAKTGDGAQAEDLLLEVDLRDPVLQVEVGKFVSGTEMLHLAVLHSRKLCVYSVSGTLGNVEHGNQCQMKLMYEHNLQRTACNMTYGSFGGVKGRDLICIQSMDGMLMVFEQESYAFGRFLPGFLLPGPLAYSSRTDSFLTVSSCQQVESYKYQVLAFATDADKRQETEQQKLGSGKRLVVDWTLNIGEQALDICIVSFNQSASSVFVLGERNFFCLKDNGQIRFMKKLDWSPSCFLPYCSVSEGTINTLIGNHNNMLHIYQDVTLKWATQLPHIPVAVRVGCLHDLKGVIVTLSDDGHLQCSYLGTDPSLFQAPNVQSRELNYDELDVEMKELQKIIKDVNKSQGVWPMTEREDDLNVSVVVSPNFDSVSQATDVEVGTDLVPSVTVKVTLQNRVILQKAKLSVYVQPPLELTCDQFTFEFMTPDLTRTVSFSVYLKRSYTPSELEGNAVVSYSRPTDRNPDGIPRVIQCKFRLPLKLICLPGQPSKTASHKITIDTNKSPVSLLSLFPGFASQSDDDQVNVMGFHFLGGARITVLASKTSQRYRIQSEQFEDLWLITNELILRLQEYFEKQGVKDFACSFSGSIPLQEYFELIDHHFELRINGEKLEELLSERAVQFRAIQRRLLARFKDKTPAPLQHLDTLLDGTYKQVIALADAVEENQGNLFQSFTRLKSATHLVILLIALWQKLSADQVAILEAAFLPLQEDTQELGWEETVDAAISHLLKTCLSKSSKEQALNLNSQLNIPKDTSQLKKHITLLCDRLSKGGRLCLSTDAAAPQTMVMPGGCTTIPESDLEERSVEQDSTELFTNHRHLTAETPRPEVSPLQGVSE

SEQ ID NO: 8280 - protein, 847 aa, Homo sapiens
  Payload ID: 1712;
  Gene Symbol: BBS9;
  Gene Name: Bardet-Biedl syndrome 9;
  Uniprot ID:  Q3SYG4;
  ENSP ID: ENSP00000313122
MSLFKARDWWSTILGDKEEFDQGCLCLANVDNSGNGQDKIIVGSFMGYLRIFSPHPAKTGDGAQAEDLLLEVDLRDPVLQVEVGKFVSGTEMLHLAVLHSRKLCVYSVSGTLGNVEHGNQCQMKLMYEHNLQRTACNMTYGSFGGVKGRDLICIQSMDGMLMVFEQESYAFGRFLPGFLLPGPLAYSSRTDSFLTVSSCQQVESYKYQVLAFATDADKRQETEQQKLGSGKRLVVDWTLNIGEQALDICIVSFNQSASSVFVLGERNFFCLKDNGQIRFMKKLDWSPSCFLPYCSVSEGTINTLIGNHNNMLHIYQDVTLKWATQLPHIPVAVRVGCLHDLKGVIVTLSDDGHLQCSYLGTDPSLFQAPNVQSRELNYDELDVEMKELQKIIKDVNKSQGVWPMTEREDDLNVSVVVSPNFDSVSQATDVEVGTDLVPSVTVKVTLQNRVILQKAKLSVYVQPPLELTCDQFTFEFMSIPRVIQCKFRLPLKLICLPGQPSKTASHKITIDTNKSPVSLLSLFPGFASQSDDDQVNVMGFHFLGGARITVLASKTSQRYRIQSEQFEDLWLITNELILRLQEYFEKQGVKDFACSFSGSIPLQEYFELIDHHFELRINGEKLEELLSERAVQFRAIQRRLLARFKDKTPAPLQHLDTLLDGTYKQVIALADAVEENQGNLFQSFTRLKSATHLVILLIALWQKLSADQVAILEAAFLPLQEDTQELGWEETVDAAISHLLKTCLSKSSKEQALNLNSQLNIPKDTSQLKKHITLLCDRLSKGGRLCLSTDAAAPQTMVMPGGCTTIPESDLEERSVEQDSTELFTNHRHLTAETPRPEVSPLQGVSE

SEQ ID NO: 8281 - protein, 882 aa, Homo sapiens
  Payload ID: 1712;
  Gene Symbol: BBS9;
  Gene Name: Bardet-Biedl syndrome 9;
  Uniprot ID:  Q3SYG4;
  ENSP ID: ENSP00000347182
MSLFKARDWWSTILGDKEEFDQGCLCLANVDNSGNGQDKIIVGSFMGYLRIFSPHPAKTGDGAQAEDLLLEVDLRDPVLQVEVGKFVSGTEMLHLAVLHSRKLCVYSVSGTLGNVEHGNQCQMKLMYEHNLQRTACNMTYGSFGGVKGRDLICIQSMDGMLMVFEQESYAFGRFLPGFLLPGPLAYSSRTDSFLTVSSCQQVESYKYQVLAFATDADKRQETEQQKLGSGKRLVVDWTLNIGEQALDICIVSFNQSASSVFVLGERNFFCLKDNGQIRFMKKLDWSPSCFLPYCSVSEGTINTLIGNHNNMLHIYQDVTLKWATQLPHIPVAVRVGCLHDLKGVIVTLSDDGHLQCSYLGTDPSLFQAPNVQSRELNYDELDVEMKELQKIIKDVNKSQGVWPMTEREDDLNVSVVVSPNFDSVSQATDVEVGTDLVPSVTVKVTLQNRVILQKAKLSVYVQPPLELTCDQFTFEFMTPDLTRTVSFSVYLKRSYTPSELEGNAVVSYSRPTGIPRVIQCKFRLPLKLICLPGQPSKTASHKITIDTNKSPVSLLSLFPGFASQSDDDQVNVMGFHFLGGARITVLASKTSQRYRIQSEQFEDLWLITNELILRLQEYFEKQGVKDFACSFSGSIPLQEYFELIDHHFELRINGEKLEELLSERAVQFRAIQRRLLARFKDKTPAPLQHLDTLLDGTYKQVIALADAVEENQGNLFQSFTRLKSATHLVILLIALWQKLSADQVAILEAAFLPLQEDTQELGWEETVDAAISHLLKTCLSKSSKEQALNLNSQLNIPKDTSQLKKHITLLCDRLSKGGRLCLSTDAAAPQTMVMPGGCTTIPESDLEERSVEQDSTELFTNHRHLTAETPRPEVSPLQGVSE

SEQ ID NO: 8282 - protein, 852 aa, Homo sapiens
  Payload ID: 1712;
  Gene Symbol: BBS9;
  Gene Name: Bardet-Biedl syndrome 9;
  Uniprot ID:  Q3SYG4;
  ENSP ID: ENSP00000379433
MSLFKARDWWSTILGDKEEFDQGCLCLANVDNSGNGQDKIIVGSFMGYLRIFSPHPAKTGDGAQAEDLLLEVDLRDPVLQVEVGKFVSGTEMLHLAVLHSRKLCVYSVSGTLGNVEHGNQCQMKLMYEHNLQRTACNMTYGSFGGVKGRDLICIQSMDGMLMVFEQESYAFGRFLPGFLLPGPLAYSSRTDSFLTVSSCQQVESYKYQVLAFATDADKRQETEQQKLGSGKRLVVDWTLNIGEQALDICIVSFNQSASSVFVLGERNFFCLKDNGQIRFMKKLDWSPSCFLPYCSVSEGTINTLIGNHNNMLHIYQDVTLKWATQLPHIPVAVRVGCLHDLKGVIVTLSDDGHLQCSYLGTDPSLFQAPNVQSRELNYDELDVEMKELQKIIKDVNKSQGVWPMTEREDDLNVSVVVSPNFDSVSQATDVEVGTDLVPSVTVKVTLQNRVILQKAKLSVYVQPPLELTCDQFTFEFMNRNPDGIPRVIQCKFRLPLKLICLPGQPSKTASHKITIDTNKSPVSLLSLFPGFASQSDDDQVNVMGFHFLGGARITVLASKTSQRYRIQSEQFEDLWLITNELILRLQEYFEKQGVKDFACSFSGSIPLQEYFELIDHHFELRINGEKLEELLSERAVQFRAIQRRLLARFKDKTPAPLQHLDTLLDGTYKQVIALADAVEENQGNLFQSFTRLKSATHLVILLIALWQKLSADQVAILEAAFLPLQEDTQELGWEETVDAAISHLLKTCLSKSSKEQALNLNSQLNIPKDTSQLKKHITLLCDRLSKGGRLCLSTDAAAPQTMVMPGGCTTIPESDLEERSVEQDSTELFTNHRHLTAETPRPEVSPLQGVSE

SEQ ID NO: 8283 - protein, 454 aa, Homo sapiens
  Payload ID: 1712;
  Gene Symbol: BBS9;
  Gene Name: Bardet-Biedl syndrome 9;
  ENSP ID: ENSP00000388114
  MOD_RES (1)..(1): Any amino acid
XDLVPSVTVKVTLQNRVILQKAKLSVYVQPPLELTCDQFTFEFMTPDLTRTVSFSVYLKRSYTPSELEGNAVVSYSRPTDRNPDGIPRVIQCKFRLPLKLICLPGQPSKTASHKITIDTNKSPVSLLSLFPGFASQSDDDQVNVMGFHFLGGARITVLASKTSQRYRIQSEQFEDLWLITNELILRLQEYFEKQGVKDFACSFSGSIPLQEYFELIDHHFELRINGEKLEELLSERAVQFRAIQRRLLARFKDKTPAPLQHLDTLLDGTYKQVIALADAVEENQGNLFQSFTRLKSATHLVILLIALWQKLSADQVAILEAAFLPLQEDTQELGWEETVDAAISHLLKTCLSKSSKEQALNLNSQLNIPKDTSQLKKHITLLCDRLSKGGRLCLSTDAAAPQTMVMPGGCTTIPESDLEERSVEQDSTELFTNHRHLTAETPRPGKRLDGLHKR

SEQ ID NO: 8284 - protein, 146 aa, Homo sapiens
  Payload ID: 1712;
  Gene Symbol: BBS9;
  Gene Name: Bardet-Biedl syndrome 9;
  ENSP ID: ENSP00000388646
MKLMYEHNLQRTACNMTYGSFGGVKGRDLICIQSMDGMLMVFEQESYAFGRFLPGFLLPGPLAYSSRTDSFLTVSSCQQVESYKYQVLAFATDADKRQETEQQKLGSGKRLVVDWTLNIGEQALDICIVSFNQSASSVFVLGERNF

SEQ ID NO: 8285 - protein, 310 aa, Homo sapiens
  Payload ID: 1712;
  Gene Symbol: BBS9;
  Gene Name: Bardet-Biedl syndrome 9;
  Uniprot ID:  Q3SYG4;
  ENSP ID: ENSP00000405151
MGYLRIFSPHPAKTGDGAQAEDLLLEVDLRDPVLQVEVGKFVSGTEMLHLAVLHSRKLCVYSVSGTLGNVEHGNQCQMKLMYEHNLQRTACNMTYGSFGGVKGRDLICIQSMDGMLMVFEQESYAFGRFLPGFLLPGPLAYSSRTDSFLTVSSCQQVESYKYQVLAFATDADKRQETEQQKLGSGKRLVVDWTLNIGEQALDICIVSFNQSASSVFVLGERNFFCLKDNGQIRFMKKLDWSPSCFLPYCSVSEGTINTLIGNHNNMLHIYQDVTLKWATQLPHIPVAVRVGCLQFSLWKHLLPRSSTLEK

SEQ ID NO: 8286 - protein, 460 aa, Homo sapiens
  Payload ID: 1712;
  Gene Symbol: BBS9;
  Gene Name: Bardet-Biedl syndrome 9;
  ENSP ID: ENSP00000412159
MSLFKARDWWSTILGDKEEFDQGCLCLANVDNSGNGQDKIIVGSFMGYLRIFSPHPAKTGDGAQAEDLLLEVDLRDPVLQVEVGKFVSGTEMLHLAVLHSRKLCVYSVSGTLGNVEHGNQCQMKLMYEHNLQRTACNMTYGSFGGVKGRDLICIQSMDGMLMVFEQESYAFGRFLPGFLLPGPLAYSSRTDSFLTVSSCQQVESYKYQVLAFATDADKRQETEQQKLGSGKRLVVDWTLNIGEQALDICIVSFNQSASSVFVLGERNFFCLKDNGQIRFMKKLDWSPSCFLPYCSVSEGTINTLIGNHNNMLHIYQDVTLKWATQLPHIPVAVRVGCLHDLKGVIVTLSDDGHLQCSYLGTDPSLFQAPNVQSRELNYDELDVEMKELQKIIKDVNKSQGVWPMTEREDDLNVSVVVSPNFDSVSQATDVEVGTDLVPSVTVKQPRYTTMQVSIIINPVN

SEQ ID NO: 8287 - protein, 97 aa, Homo sapiens
  Payload ID: 1712;
  Gene Symbol: BBS9;
  Gene Name: Bardet-Biedl syndrome 9;
  ENSP ID: ENSP00000415794
MSLFKARDWWSTILGDKEEFDQGCLCLANVDNSGNGQDKIIVGSFMGYLRIFSPHPAKTGDGAQAEDLLLEVDLRDPVLQVEVGKFVSGTEMLHLAV

SEQ ID NO: 8288 - protein, 183 aa, Homo sapiens
  Payload ID: 1712;
  Gene Symbol: BBS9;
  Gene Name: Bardet-Biedl syndrome 9;
  ENSP ID: ENSP00000485871
  MOD_RES (1)..(1): Any amino acid
XIQKESIGKGQAHRDRSSSGFWVSSRTSSTVFQPSGCFKPEGIPRVIQCKFRLPLKLICLPGQPSKTASHKITIDTNKSPVSLLSLFPGFASQSDDDQVNVMGFHFLGGARITVLASKTSQRYRIQSEQFEDLWLITNELILRLQEYFEKQGVKDFACSFSGSIPLQEYFELIDHHFELRING

SEQ ID NO: 8289 - protein, 327 aa, Homo sapiens
  Payload ID: 1713;
  Gene Symbol: BARHL1;
  Gene Name: BarH-like homeobox 1;
  Uniprot ID:  Q9BZE3;
  ENSP ID: ENSP00000263610
MEGSNGFGIDSILSHRAGSPALPKGDPLLGDCRSPLELSPRSESSSDCSSPASPGRDCLETGTPRPGGASGPGLDSHLQPGQLSAPAQSRTVTSSFLIRDILADCKPLAACAPYSSSGQPAAPEPGGRLAAKAAEDFRDKLDKSGSNASSDSEYKVKEEGDREISSSRDSPPVRLKKPRKARTAFTDHQLAQLERSFERQKYLSVQDRMELAASLNLTDTQVKTWYQNRRTKWKRQTAVGLELLAEAGNYSALQRMFPSPYFYPQSLVSNLDPGAALYLYRGPSAPPPALQRPLVPRILIHGLQGASEPPPPLPPLAGVLPRAAQPR

SEQ ID NO: 8290 - protein, 327 aa, Homo sapiens; identical to SEQ ID NO: 8289
  Payload ID: 1713;
  Gene Symbol: BARHL1;
  Gene Name: BarH-like homeobox 1;
  Uniprot ID:  Q9BZE3;
  ENSP ID: ENSP00000444704

SEQ ID NO: 8291 - protein, 387 aa, Homo sapiens
  Payload ID: 1714;
  Gene Symbol: BARHL2;
  Gene Name: BarH-like homeobox 2;
  Uniprot ID:  Q9NY43;
  ENSP ID: ENSP00000359474
MTMEGASGSSFGIDTILSSASSGSPGMMNGDFRPLGEARTADFRSQATPSPCSEIDTVGTAPSSPISVTMEPPEPHLVADATQHHHHLHHSQQPPPPAAAPTQSLQPLPQQQQPLPPQQPPPPPPQQLGSAASAPRTSTSSFLIKDILGDSKPLAACAPYSTSVSSPHHTPKQESNAVHESFRPKLEQEDSKTKLDKREDSQSDIKCHGTKEEGDREITSSRESPPVRAKKPRKARTAFSDHQLNQLERSFERQKYLSVQDRMDLAAALNLTDTQVKTWYQNRRTKWKRQTAVGLELLAEAGNYSALQRMFPSPYFYHPSLLGSMDSTTAAAAAAAMYSSMYRTPPAPHPQLQRPLVPRVLIHGLGPGGQPALNPLSSPIPGTPHPR

SEQ ID NO: 8292 - protein, 89 aa, Homo sapiens
  Payload ID: 1715;
  Gene Symbol: BANF1;
  Gene Name: barrier to autointegration  factor 1;
  Uniprot ID:  O75531;
  ENSP ID: ENSP00000310275
MTTSQKHRDFVAEPMGEKPVGSLAGIGEVLGKKLEERGFDKAYVVLGQFLVLKKDEDLFREWLKDTCGANAKQSRDCFGCLREWCDAFL

SEQ ID NO: 8293 - protein, 89 aa, Homo sapiens; identical to SEQ ID NO: 8292
  Payload ID: 1715;
  Gene Symbol: BANF1;
  Gene Name: barrier to autointegration  factor 1;
  Uniprot ID:  O75531;
  ENSP ID: ENSP00000416128

SEQ ID NO: 8294 - protein, 28 aa, Homo sapiens
  Payload ID: 1715;
  Gene Symbol: BANF1;
  Gene Name: barrier to autointegration  factor 1;
  ENSP ID: ENSP00000431785
MTTSQKHRDFVAEPMGEKPVGSLAGIGE

SEQ ID NO: 8295 - protein, 89 aa, Homo sapiens; identical to SEQ ID NO: 8292
  Payload ID: 1715;
  Gene Symbol: BANF1;
  Gene Name: barrier to autointegration  factor 1;
  Uniprot ID:  O75531;
  ENSP ID: ENSP00000432867

SEQ ID NO: 8296 - protein, 89 aa, Homo sapiens; identical to SEQ ID NO: 8292
  Payload ID: 1715;
  Gene Symbol: BANF1;
  Gene Name: barrier to autointegration  factor 1;
  Uniprot ID:  O75531;
  ENSP ID: ENSP00000433760

SEQ ID NO: 8297 - protein, 90 aa, Homo sapiens
  Payload ID: 1716;
  Gene Symbol: BANF2;
  Gene Name: barrier to autointegration  factor 2;
  Uniprot ID:  Q9H503;
  ENSP ID: ENSP00000246090
MDNMSPRLRAFLSEPIGEKDVCWVDGISHELAINLVTKGINKAYILLGQFLLMHKNEAEFQRWLICCFGATECEAQQTSHCLKEWCACFL

SEQ ID NO: 8298 - protein, 90 aa, Homo sapiens; identical to SEQ ID NO: 8297
  Payload ID: 1716;
  Gene Symbol: BANF2;
  Gene Name: barrier to autointegration  factor 2;
  Uniprot ID:  Q9H503;
  ENSP ID: ENSP00000367036

SEQ ID NO: 8299 - protein, 42 aa, Homo sapiens
  Payload ID: 1716;
  Gene Symbol: BANF2;
  Gene Name: barrier to autointegration  factor 2;
  ENSP ID: ENSP00000398738
MDNMSPRLRAFLSEPIGEKDVCWVDGISHELAINLVTKGINK

SEQ ID NO: 8300 - protein, 97 aa, Homo sapiens
  Payload ID: 1716;
  Gene Symbol: BANF2;
  Gene Name: barrier to autointegration  factor 2;
  Uniprot ID:  Q9H503;
  ENSP ID: ENSP00000439128
MLRGTKEMDNMSPRLRAFLSEPIGEKDVCWVDGISHELAINLVTKGINKAYILLGQFLLMHKNEAEFQRWLICCFGATECEAQQTSHCLKEWCACFL

SEQ ID NO: 8301 - protein, 320 aa, Homo sapiens
  Payload ID: 1717;
  Gene Symbol: BSND;
  Gene Name: barttin CLCNK-type chloride channel accessory beta subunit;
  Uniprot ID:  Q8WZ55;
  ENSP ID: ENSP00000360312
MADEKTFRIGFIVLGLFLLALGTFLMSHDRPQVYGTFYAMGSVMVIGGIIWSMCQCYPKITFVPADSDFQGILSPKAMGLLENGLAAEMKSPSPQPPYVRLWEEAAYDQSLPDFSHIQMKVMSYSEDHRSLLAPEMGQPKLGTSDGGEGGPGDVQAWMEAAVVIHKGSDESEGERRLTQSWPGPLACPQGPAPLASFQDDLDMDSSEGSSPNASPHDREEACSPQQEPQGCRCPLDRFQDFALIDAPTLEDEPQEGQQWEIALPNNWQRYPRTKVEEKEASDTGGEEPEKEEEDLYYGLPDGAGDLLPDKELGFEPDTQG

SEQ ID NO: 8302 - protein, 254 aa, Homo sapiens
  Payload ID: 1718;
  Gene Symbol: BARX1;
  Gene Name: BARX homeobox 1;
  Uniprot ID:  Q9HBU1;
  ENSP ID: ENSP00000253968
MQRPGEPGAARFGPPEGCADHRPHRYRSFMIEEILTEPPGPKGAAPAAAAAAAGELLKFGVQALLAARPFHSHLAVLKAEQAAVFKFPLAPLGCSGLSSALLAAGPGLPGAAGAPHLPLELQLRGKLEAAGPGEPGTKAKKGRRSRTVFTELQLMGLEKRFEKQKYLSTPDRIDLAESLGLSQLQVKTWYQNRRMKWKKIVLQGGGLESPTKPKGRPKKNSIPTSEQLTEQERAKDAEKPAEVPGEPSDRSRED

SEQ ID NO: 8303 - protein, 100 aa, Homo sapiens
  Payload ID: 1718;
  Gene Symbol: BARX1;
  Gene Name: BARX homeobox 1;
  Uniprot ID:  Q9HBU1;
  ENSP ID: ENSP00000385613
MGLEKRFEKQKYLSTPDRIDLAESLGLSQLQVKTWYQNRRMKWKKIVLQGGGLESPTKPKGRPKKNSIPTSEQLTEQERAKDAEKPAEVPGEPSDRSRED

SEQ ID NO: 8304 - protein, 279 aa, Homo sapiens
  Payload ID: 1719;
  Gene Symbol: BARX2;
  Gene Name: BARX homeobox 2;
  Uniprot ID:  Q9UMQ3;
  ENSP ID: ENSP00000281437
MHCHAELRLSSPGQLKAARRRYKTFMIDEILSKETCDYFEKLSLYSVCPSLVVRPKPLHSCTGSPSLRAYPLLSVITRQPTVISHLVPATPGIAQALSCHQVTEAVSAEAPGGEALASSESETEQPTPRQKKPRRSRTIFTELQLMGLEKKFQKQKYLSTPDRLDLAQSLGLTQLQVKTWYQNRRMKWKKMVLKGGQEAPTKPKGRPKKNSIPTSEEIEAEEKMNSQAQGQEQLEPSQGQEELCEAQEPKARDVPLEMAEPPDPPQELPIPSSEPPPLS

SEQ ID NO: 8305 - protein, 529 aa, Homo sapiens
  Payload ID: 1720;
  Gene Symbol: BBOF1;
  Gene Name: basal body orientation  factor 1;
  Uniprot ID:  Q8ND07;
  ENSP ID: ENSP00000377577
MPSKGKDKKKGKSKGKDTKKLIKTDESVVDRAKANASLWEARLEVTELSRIKYRDTSRILAKSNEDLKKKQCKMEKDIMSVLSYLKKQDQEKDNMIEKLKQQLNETKEKAQEEKDKLEQKYTRQINELEGQFHQKAKEIGMIHTELKAVRQFQKRKIQVERELDDLKENLRNTERIHQETLRRLESRFFEEKHRLEQEAEKKIIMLAERAHHEAIVQLNDAGRNVFKENDYLQKALAYHLKETDALQKNSQKLQESHTLLLHQKEINDLLVKEKIMQLVQQRSQIQTLQKKVVNLETALSYMTKEFESEVLKLQQHAMIENQAGQVEIDKLQHLLQMKDREMNRVKKLAKNILDERTEVERFFLDALHQVKQQILISRKHYKQIAQAAFNLKMRAACTGRTEYPKIRTFDGREHSTNSVNQDLLEAEKWTHIEGNVDIGDLTWEQKEKVLRLLFAKMNGCPSRKYNQSSRPPVPDYVVSDSGETKEFGDESKLQDKIFITQQIAISDSSGEVVLPTIPKEPQESDTGTF

SEQ ID NO: 8306 - protein, 124 aa, Homo sapiens
  Payload ID: 1720;
  Gene Symbol: BBOF1;
  Gene Name: basal body orientation  factor 1;
  ENSP ID: ENSP00000451659
MIHTELKAVRQFQKRKIQVERELDDLKENLRNTERIHQETLRRLESRFFEEKHRLEQEAEKKIIMLAERAHHEAIVQLNDAGRNVFKENDYLQKALAYHLKETDALQKNSQKLQESHTLLLHQK

SEQ ID NO: 8307 - protein, 65 aa, Homo sapiens
  Payload ID: 1720;
  Gene Symbol: BBOF1;
  Gene Name: basal body orientation  factor 1;
  ENSP ID: ENSP00000480689
MIHTELKAVRQFQKRKIQVERELDDLKENLRNTERIHQETLRRLESRFFEEKVQIIRVNLKCFVY

SEQ ID NO: 8308 - protein, 628 aa, Homo sapiens
  Payload ID: 1721;
  Gene Symbol: BCAM;
  Gene Name: basal cell adhesion molecule (Lutheran blood group);
  Uniprot ID:  P50895;
  ENSP ID: ENSP00000270233
MEPPDAPAQARGAPRLLLLAVLLAAHPDAQAEVRLSVPPLVEVMRGKSVILDCTPTGTHDHYMLEWFLTDRSGARPRLASAEMQGSELQVTMHDTRGRSPPYQLDSQGRLVLAEAQVGDERDYVCVVRAGAAGTAEATARLNVFAKPEATEVSPNKGTLSVMEDSAQEIATCNSRNGNPAPKITWYRNGQRLEVPVEMNPEGYMTSRTVREASGLLSLTSTLYLRLRKDDRDASFHCAAHYSLPEGRHGRLDSPTFHLTLHYPTEHVQFWVGSPSTPAGWVREGDTVQLLCRGDGSPSPEYTLFRLQDEQEEVLNVNLEGNLTLEGVTRGQSGTYGCRVEDYDAADDVQLSKTLELRVAYLDPLELSEGKVLSLPLNSSAVVNCSVHGLPTPALRWTKDSTPLGDGPMLSLSSITFDSNGTYVCEASLPTVPVLSRTQNFTLLVQGSPELKTAEIEPKADGSWREGDEVTLICSARGHPDPKLSWSQLGGSPAEPIPGRQGWVSSSLTLKVTSALSRDGISCEASNPHGNKRHVFHFGTVSPQTSQAGVAVMAVAVSVGLLLLVVAVFYCVRRKGGPCCRQRREKGAPPPGEPGLSHSGSEQPEQTGLLMGGASGGARGGSGGFGDEC

SEQ ID NO: 8309 - protein, 291 aa, Homo sapiens
  Payload ID: 1721;
  Gene Symbol: BCAM;
  Gene Name: basal cell adhesion molecule (Lutheran blood group);
  ENSP ID: ENSP00000467100
MEPPDAPAQARGAPRLLLLAVLLAAHPDAQAEVRLSVPPLVEVMRGKSVILDCTPTGTHDHYMLEWFLVTMHDTRGRSPPYQLDSQGRLVLAEAQVGDERDYVCVVRAGAAGTAEATARLNVFAKPEATEVSPNKGTLSVMEDSAQEIATCNSRNGNPAPKITWYRNGQRLEVPVEMNPEGYMTSRTVREASGLLSLTSTLYLRLRKDDRDASFHCAAHYSLPEGRHGRLDSPTFHLTLHYPTEHVQFWVGSPSTPAGWVREGDTVQLLCRGDGSPSPEYTLFRLQVTHPR

SEQ ID NO: 8310 - protein, 61 aa, Homo sapiens
  Payload ID: 1721;
  Gene Symbol: BCAM;
  Gene Name: basal cell adhesion molecule (Lutheran blood group);
  ENSP ID: ENSP00000468189
  MOD_RES (1)..(1): Any amino acid
XGYMTSRTVREASGLLSLTSTLYLRLRKDDRDASFHCAAHYSLPEGRHGRLDSPTFHLTLH

SEQ ID NO: 8311 - protein, 588 aa, Homo sapiens
  Payload ID: 1721;
  Gene Symbol: BCAM;
  Gene Name: basal cell adhesion molecule (Lutheran blood group);
  ENSP ID: ENSP00000476710
MEPPDAPAQARGAPRLLLLAVLLAAHPDAQAEVRLSVPPLVEVMRGKSVILDCTPTGTHDHYMLEWFLTDRSGARPRLASAEMQGSELQVTMHDTRGRSPPYQLDSQGRLVLAEAQVGDERDYVCVVRAGAAGTAEATARLNVFAKPEATEVSPNKGTLSVMEDSAQEIATCNSRNGNPAPKITWYRNGQRLEVPVEMNPEGYMTSRTVREASGLLSLTSTLYLRLRKDDRDASFHCAAHYSLPEGRHGRLDSPTFHLTLHYPTEHVQFWVGSPSTPAGWVREGDTVQLLCRGDGSPSPEYTLFRLQDEQEEVLNVNLEGNLTLEGVTRGQSGTYGCRVEDYDAADDVQLSKTLELRVAYLDPLELSEGKVLSLPLNSSAVVNCSVHGLPTPALRWTKDSTPLGDGPMLSLSSITFDSNGTYVCEASLPTVPVLSRTQNFTLLVQGSPELKTAEIEPKADGSWREGDEVTLICSARGHPDPKLSWSQLGGSPAEPIPGRQGWVSSSLTLKVTSALSRDGISCEASNPHGNKRHVFHFGTVSPQTSQAGVAVMAVAVSVGLLLLVVAVFYCVRRKGGPCCRQRREKGAP

SEQ ID NO: 8312 - protein, 588 aa, Homo sapiens; identical to SEQ ID NO: 8311
  Payload ID: 1721;
  Gene Symbol: BCAM;
  Gene Name: basal cell adhesion molecule (Lutheran blood group);
  ENSP ID: ENSP00000481153

SEQ ID NO: 8313 - protein, 106 aa, Homo sapiens
  Payload ID: 1722;
  Gene Symbol: BPY2;
  Gene Name: basic charge, Y-linked, 2;
  Uniprot ID:  O14599;
  ENSP ID: ENSP00000329106
MMTLVPRARTRAGQDHYSHPCPRFSQVLLTEGIMTYCLTKNLSDVNILHRLLKNGNVRNTLLQSKVGLLTYYVKLYPGEVTLLTRPSIQMRLCCITGSVSRPRSQK

SEQ ID NO: 8314 - protein, 106 aa, Homo sapiens; identical to SEQ ID NO: 8313
  Payload ID: 1722;
  Gene Symbol: BPY2;
  Gene Name: basic charge, Y-linked, 2;
  Uniprot ID:  O14599;
  ENSP ID: ENSP00000372028

SEQ ID NO: 8315 - protein, 11 aa, Homo sapiens
  Payload ID: 1722;
  Gene Symbol: BPY2;
  Gene Name: basic charge, Y-linked, 2;
  ENSP ID: ENSP00000473270
MMTLVPRARTR

SEQ ID NO: 8316 - protein, 106 aa, Homo sapiens; identical to SEQ ID NO: 8313
  Payload ID: 1723;
  Gene Symbol: BPY2B;
  Gene Name: basic charge, Y-linked, 2B;
  Uniprot ID:  O14599;
  ENSP ID: ENSP00000371829

SEQ ID NO: 8317 - protein, 11 aa, Homo sapiens
  Payload ID: 1723;
  Gene Symbol: BPY2B;
  Gene Name: basic charge, Y-linked, 2B;
  ENSP ID: ENSP00000473491
MMTLVPRARTR

SEQ ID NO: 8318 - protein, 106 aa, Homo sapiens; identical to SEQ ID NO: 8313
  Payload ID: 1723;
  Gene Symbol: BPY2B;
  Gene Name: basic charge, Y-linked, 2B;
  Uniprot ID:  O14599;
  ENSP ID: ENSP00000480184

SEQ ID NO: 8319 - protein, 106 aa, Homo sapiens; identical to SEQ ID NO: 8313
  Payload ID: 1724;
  Gene Symbol: BPY2C;
  Gene Name: basic charge, Y-linked, 2C;
  Uniprot ID:  O14599;
  ENSP ID: ENSP00000371724

SEQ ID NO: 8320 - protein, 11 aa, Homo sapiens
  Payload ID: 1724;
  Gene Symbol: BPY2C;
  Gene Name: basic charge, Y-linked, 2C;
  ENSP ID: ENSP00000473549
MMTLVPRARTR

SEQ ID NO: 8321 - protein, 106 aa, Homo sapiens; identical to SEQ ID NO: 8313
  Payload ID: 1724;
  Gene Symbol: BPY2C;
  Gene Name: basic charge, Y-linked, 2C;
  Uniprot ID:  O14599;
  ENSP ID: ENSP00000480751

SEQ ID NO: 8322 - protein, 638 aa, Homo sapiens
  Payload ID: 1725;
  Gene Symbol: BHMG1;
  Gene Name: basic helix-loop-helix and HMG box domain containing 1;
  Uniprot ID:  C9JSJ3;
  ENSP ID: ENSP00000402674
MFGSSRYLGSSEQPRANSLGPSDRTLVLCSLVEGEDKVNPSEPHGLRMEEKWLLKGKLRNQRNQNKLLSPNKKQRKNHTSKLQELALLLPIALKTGTKKLTKKEILVHVLQYIQYLQRNIDAAKALFKCHITTGEGGLAGLGQKPAWGPARRRRHSTPSSSPSSQKSCLQGACQKPRKKKLTQASESQTRTPKPRRSLALNKPEKLVAPSPDQKGSGTGGTTTPPRCPDSCGHPRPASSSPPGDRKGGQSQLTLLDLAEDTIHCDISSCWCQGSVQDDAPFPALLAQEDVARIHFLNKTQPHPRQKLVFYDSSEDVDKGSLDADPWLPAWTPENSPQGSPLFLGPPQIDVWSGTGHPSEILGLSPSLFSSPGKLLPDEILEDDMEYLTQAAFFEEVCLDLESSPSAYTQEAPQEKDTASKAPKDPPESHSLHRSSVSLDHCYLSLSGNSKAPSSSSSSSSSSSSSEDSDSEPLWKQREDMQANPVGTPGSSEEDEDTTWTPTRLASPLLAAEKKATKGQVARAPVKPKEKKKGPCPPQMKKKCVNGFIMFCRMNRKQYIRSCPGTASTAATKELAQLWRVMTQQERRPYCTKARRFSRQHNRIVKQDGSSSEAEDWETPKPFYQLLAEKALPLPPHLQ

SEQ ID NO: 8323 - protein, 547 aa, Homo sapiens
  Payload ID: 1726;
  Gene Symbol: BHLHB9;
  Gene Name: basic helix-loop-helix domain containing, class B, 9;
  Uniprot ID:  Q6PI77;
  ENSP ID: ENSP00000354675
MAGTKNKTRAQAKTEKKAAIQAKAGAEREATGVVRPVAKTRAKAKAKTGSKTDAVAEMKAVSKNKVVAETKEGALSEPKTLGKAMGDFTPKAGNESTSSTCKNEAGTDAWFWAGEEATINSWFWNGEEAGNSFSTKNDKPEIGAQVCAEELEPAAGADCKPRSGAEEEEEENVIGNWFWEGDDTSFDPNPKPVSRIVKPQPVYEINEKNRPKDWSEVTIWPNAPAVTPAVLGFRSQAPSEASPPSYIVLASAEENACSLPVATACRPSRNTRSCSQPIPECRFDSDPCIQTIDEIRRQIRIREVNGIKPFACPCKMECYMDSEEFEKLVSLLKSTTDPLIHKIARIAMGVHNVHPFAQEFINEVGVVTLIESLLSFPSPEMRKKTVITLNPPSGDERQRKIELHVKHMCKETMSFPLNSPGQQSGLKILGQLTTDFVHHYIVANYFSELFHLLSSGNCKTRNLVLKLLLNMSENPTAARDMINMKALAALKLIFNQKEAKANLVSGVAIFINIKEHIRKGSIVVVDHLSYNTLMAIFREVKEIIETM

SEQ ID NO: 8324 - protein, 547 aa, Homo sapiens; identical to SEQ ID NO: 8323
  Payload ID: 1726;
  Gene Symbol: BHLHB9;
  Gene Name: basic helix-loop-helix domain containing, class B, 9;
  Uniprot ID:  Q6PI77;
  ENSP ID: ENSP00000361820

SEQ ID NO: 8325 - protein, 547 aa, Homo sapiens; identical to SEQ ID NO: 8323
  Payload ID: 1726;
  Gene Symbol: BHLHB9;
  Gene Name: basic helix-loop-helix domain containing, class B, 9;
  Uniprot ID:  Q6PI77;
  ENSP ID: ENSP00000391722

SEQ ID NO: 8326 - protein, 547 aa, Homo sapiens; identical to SEQ ID NO: 8323
  Payload ID: 1726;
  Gene Symbol: BHLHB9;
  Gene Name: basic helix-loop-helix domain containing, class B, 9;
  Uniprot ID:  Q6PI77;
  ENSP ID: ENSP00000403226

SEQ ID NO: 8327 - protein, 547 aa, Homo sapiens; identical to SEQ ID NO: 8323
  Payload ID: 1726;
  Gene Symbol: BHLHB9;
  Gene Name: basic helix-loop-helix domain containing, class B, 9;
  Uniprot ID:  Q6PI77;
  ENSP ID: ENSP00000405893

SEQ ID NO: 8328 - protein, 189 aa, Homo sapiens
  Payload ID: 1727;
  Gene Symbol: BHLHA15;
  Gene Name: basic helix-loop-helix family, member a15;
  Uniprot ID:  Q7RTS1;
  ENSP ID: ENSP00000326391
MKTKNRPPRRRAPVQDTEATPGEGTPDGSLPNPGPEPAKGLRSRPARAAARAPGEGRRRRPGPSGPGGRRDSSIQRRLESNERERQRMHKLNNAFQALREVIPHVRADKKLSKIETLTLAKNYIKSLTATILTMSSSRLPGLEGPGPKLYQHYQQQQQVAGGALGATEAQPQGHLQRYSTQIHSFREGT

SEQ ID NO: 8329 - protein, 189 aa, Homo sapiens; identical to SEQ ID NO: 8328
  Payload ID: 1727;
  Gene Symbol: BHLHA15;
  Gene Name: basic helix-loop-helix family, member a15;
  Uniprot ID:  Q7RTS1;
  ENSP ID: ENSP00000476312

SEQ ID NO: 8330 - protein, 235 aa, Homo sapiens
  Payload ID: 1728;
  Gene Symbol: BHLHA9;
  Gene Name: basic helix-loop-helix family, member a9;
  Uniprot ID:  Q7RTU4;
  ENSP ID: ENSP00000375248
MLRGAPGLGLTARKGAEDSAEDLGGPCPEPGGDSGVLGANGASCSRGEAEEPAGRRRARPVRSKARRMAANVRERKRILDYNEAFNALRRALRHDLGGKRLSKIATLRRAIHRIAALSLVLRASPAPRGPCGHLECHGPAARGDTGDTGASPPPPAGPSLARPDAARPSVPSAPRCASCPPHAPLARPSAVAEGPGLAQASGGSWRRCPGASSAGPPPWPRGYLRSAPGMGHPRS

SEQ ID NO: 8331 - protein, 381 aa, Homo sapiens
  Payload ID: 1729;
  Gene Symbol: BHLHE22;
  Gene Name: basic helix-loop-helix family, member e22;
  Uniprot ID:  Q8NFJ8;
  ENSP ID: ENSP00000318799
MERGMHLGAAAAGEDDLFLHKSLSASTSKRLEAAFRSTPPGMDLSLAPPPRERPASSSSSPLGCFEPADPEGAGLLLPPPGGGGGGSAGSGGGGGGGVGVPGLLVGSAGVGGDPSLSSLPAGAALCLKYGESASRGSVAESSGGEQSPDDDSDGRCELVLRAGVADPRASPGAGGGGAKAAEGCSNAHLHGGASVPPGGLGGGGGGGSSSGSSGGGGGSGSGSGGSSSSSSSSSKKSKEQKALRLNINARERRRMHDLNDALDELRAVIPYAHSPSVRKLSKIATLLLAKNYILMQAQALEEMRRLVAYLNQGQAISAASLPSSAAAAAAAAALHPALGAYEQAAGYPFSAGLPPAASCPEKCALFNSVSSSLCKQCTEKP

SEQ ID NO: 8332 - protein, 225 aa, Homo sapiens
  Payload ID: 1730;
  Gene Symbol: BHLHE23;
  Gene Name: basic helix-loop-helix family, member e23;
  Uniprot ID:  Q8NDY6;
  ENSP ID: ENSP00000359371
MAELKSLSGDAYLALSHGYAAAAAGLAYGAAREPEAARGYGTPGPGGDLPAAPAPRAPAQAAESSGEQSGDEDDAFEQRRRRRGPGSAADGRRRPREQRSLRLSINARERRRMHDLNDALDGLRAVIPYAHSPSVRKLSKIATLLLAKNYILMQAQALDEMRRLVAFLNQGQGLAAPVNAAPLTPFGQATVCPFSAGAALGPCPDKCAAFSGTPSALCKHCHEKP

SEQ ID NO: 8333 - protein, 241 aa, Homo sapiens
  Payload ID: 1730;
  Gene Symbol: BHLHE23;
  Gene Name: basic helix-loop-helix family, member e23;
  ENSP ID: ENSP00000480998
MSIRPPGEPPSPGGAAMAELKSLSGDAYLALSHGYAAAAAGLAYGAAREPEAARGYGTPGPGGDLPAAPAPRAPAQAAESSGEQSGDEDDAFEQRRRRRGPGSAADGRRRPREQRSLRLSINARERRRMHDLNDALDGLRAVIPYAHSPSVRKLSKIATLLLAKNYILMQAQALDEMRRLVAFLNQGQGLAAPVNAAPLTPFGQATVCPFSAGAALGPCPDKCAAFSGTPSALCKHCHEKP

SEQ ID NO: 8334 - protein, 412 aa, Homo sapiens
  Payload ID: 1731;
  Gene Symbol: BHLHE40;
  Gene Name: basic helix-loop-helix family, member e40;
  Uniprot ID:  O14503;
  ENSP ID: ENSP00000256495
MERIPSAQPPPACLPKAPGLEHGDLPGMYPAHMYQVYKSRRGIKRSEDSKETYKLPHRLIEKKRRDRINECIAQLKDLLPEHLKLTTLGHLEKAVVLELTLKHVKALTNLIDQQQQKIIALQSGLQAGELSGRNVETGQEMFCSGFQTCAREVLQYLAKHENTRDLKSSQLVTHLHRVVSELLQGGTSRKPSDPAPKVMDFKEKPSSPAKGSEGPGKNCVPVIQRTFAHSSGEQSGSDTDTDSGYGGESEKGDLRSEQPCFKSDHGRRFTMGERIGAIKQESEEPPTKKNRMQLSDDEGHFTSSDLISSPFLGPHPHQPPFCLPFYLIPPSATAYLPMLEKCWYPTSVPVLYPGLNASAAALSSFMNPDKISAPLLMPQRLPSPLPAHPSVDSSVLLQALKPIPPLNLETKD

SEQ ID NO: 8335 - protein, 482 aa, Homo sapiens
  Payload ID: 1732;
  Gene Symbol: BHLHE41;
  Gene Name: basic helix-loop-helix family, member e41;
  Uniprot ID:  Q9C0J9;
  ENSP ID: ENSP00000242728
MDEGIPHLQERQLLEHRDFIGLDYSSLYMCKPKRSMKRDDTKDTYKLPHRLIEKKRRDRINECIAQLKDLLPEHLKLTTLGHLEKAVVLELTLKHLKALTALTEQQHQKIIALQNGERSLKSPIQSDLDAFHSGFQTCAKEVLQYLSRFESWTPREPRCVQLINHLHAVATQFLPTPQLLTQQVPLSKGTGAPSAAGSAAAPCLERAGQKLEPLAYCVPVIQRTQPSAELAAENDTDTDSGYGGEAEARPDREKGKGAGASRVTIKQEPPGEDSPAPKRMKLDSRGGGSGGGPGGGAAAAAAALLGPDPAAAAALLRPDAALLSSLVAFGGGGGAPFPQPAAAAAPFCLPFCFLSPSAAAAYVQPFLDKSGLEKYLYPAAAAAPFPLLYPGIPAPAAAAAAAAAAAAAAAAFPCLSSVLSPPPEKAGAAAATLLPHEVAPLGAPHPQHPHGRTHLPFAGPREPGNPESSAQEDPSQPGKEAP

SEQ ID NO: 8336 - protein, 419 aa, Homo sapiens
  Payload ID: 1733;
  Gene Symbol: BZW1;
  Gene Name: basic leu zipper and W2 domains 1;
  Uniprot ID:  Q7L1Q6;
  ENSP ID: ENSP00000386474
MNNQKQQKPTLSGQRFKTRKRDEKERFDPTQFQDCIIQGLTETGTDLEAVAKFLDASGAKLDYRRYAETLFDILVAGGMLAPGGTLADDMMRTDVCVFAAQEDLETMQAFAQVFNKLIRRYKYLEKGFEDEVKKLLLFLKGFSESERNKLAMLTGVLLANGTLNASILNSLYNENLVKEGVSAAFAVKLFKSWINEKDINAVAASLRKVSMDNRLMELFPANKQSVEHFTKYFTEAGLKELSEYVRNQQTIGARKELQKELQEQMSRGDPFKDIILYVKEEMKKNNIPEPVVIGIVWSSVMSTVEWNKKEELVAEQAIKHLKQYSPLLAAFTTQGQSELTLLLKIQEYCYDNIHFMKAFQKIVVLFYKAEVLSEEPILKWYKDAHVAKGKSVFLEQMKKFVEWLKNAEEESESEAEEGD

SEQ ID NO: 8337 - protein, 423 aa, Homo sapiens
  Payload ID: 1733;
  Gene Symbol: BZW1;
  Gene Name: basic leu zipper and W2 domains 1;
  Uniprot ID:  Q7L1Q6;
  ENSP ID: ENSP00000386837
MVSFMNNQKQQKPTLSGQRFKTRKRDEKERFDPTQFQDCIIQGLTETGTDLEAVAKFLDASGAKLDYRRYAETLFDILVAGGMLAPGGTLADDMMRTDVCVFAAQEDLETMQAFAQVFNKLIRRYKYLEKGFEDEVKKLLLFLKGFSESERNKLAMLTGVLLANGTLNASILNSLYNENLVKEGVSAAFAVKLFKSWINEKDINAVAASLRKVSMDNRLMELFPANKQSVEHFTKYFTEAGLKELSEYVRNQQTIGARKELQKELQEQMSRGDPFKDIILYVKEEMKKNNIPEPVVIGIVWSSVMSTVEWNKKEELVAEQAIKHLKQYSPLLAAFTTQGQSELTLLLKIQEYCYDNIHFMKAFQKIVVLFYKAEVLSEEPILKWYKDAHVAKGKSVFLEQMKKFVEWLKNAEEESESEAEEGD

SEQ ID NO: 8338 - protein, 294 aa, Homo sapiens
  Payload ID: 1733;
  Gene Symbol: BZW1;
  Gene Name: basic leu zipper and W2 domains 1;
  ENSP ID: ENSP00000387086
MNNQKQQKPTLSGQRFKTRKRDEKERFDPTQFQDCIIQGLTETGTDLEAVAKFLDASGAKLDYRRYAETLFDILVAGGMLAPGGTLADDMMRTDVCVFAAQEDLETMQAFAQVFNKLIRRYKYLEKGFEDEVKKLLLFLKGFSESERNKLAMLTGVLLANGTLNASILNSLYNENLVKEGVSAAFAVKLFKSWINEKDINAVAASLRKVSMDNRLMELFPANKQSVEHFTKYFTEAGLKELSEYVRNQQTIGARKELQKELQEQMSRGDPFKDIILYVKEEMKKNNIPEPVVIG

SEQ ID NO: 8339 - protein, 216 aa, Homo sapiens
  Payload ID: 1733;
  Gene Symbol: BZW1;
  Gene Name: basic leu zipper and W2 domains 1;
  ENSP ID: ENSP00000390766
MNNQKQQKPTLSGQRFKTRKRDEKERFDPTQFQDCIIQGLTETGTDLEAVAKFLDASGAKLDYRRYAETLFDILVAGGMLAPGGTLADDMMRTDVCVFAAQEDLETMQAFAQVFNKLIRRYKYLEKGFEDEVKKLLLFLKGFSESERNKLAMLTGVLLANGTLNASILNSLYNENLVKEGVSAAFAVKLFKSWINEKDINAVAASLRKVSMDNRLM

SEQ ID NO: 8340 - protein, 116 aa, Homo sapiens
  Payload ID: 1733;
  Gene Symbol: BZW1;
  Gene Name: basic leu zipper and W2 domains 1;
  ENSP ID: ENSP00000393587
MVSFMNNQKQQKPTLSGQRFKTRKRDEKERFDPTQFQDCIIQGLTETGTDLEAVAKFLDASGAKLDYRRYAETLFDILVAGGMLAPGGTLADDMMRTDVCVFAAQEDLETMQAFAQ

SEQ ID NO: 8341 - protein, 451 aa, Homo sapiens
  Payload ID: 1733;
  Gene Symbol: BZW1;
  Gene Name: basic leu zipper and W2 domains 1;
  Uniprot ID:  Q7L1Q6;
  ENSP ID: ENSP00000394316
MYGAPGAPAQSASVTVVRSLRRPPPQATGVSFMNNQKQQKPTLSGQRFKTRKRDEKERFDPTQFQDCIIQGLTETGTDLEAVAKFLDASGAKLDYRRYAETLFDILVAGGMLAPGGTLADDMMRTDVCVFAAQEDLETMQAFAQVFNKLIRRYKYLEKGFEDEVKKLLLFLKGFSESERNKLAMLTGVLLANGTLNASILNSLYNENLVKEGVSAAFAVKLFKSWINEKDINAVAASLRKVSMDNRLMELFPANKQSVEHFTKYFTEAGLKELSEYVRNQQTIGARKELQKELQEQMSRGDPFKDIILYVKEEMKKNNIPEPVVIGIVWSSVMSTVEWNKKEELVAEQAIKHLKQYSPLLAAFTTQGQSELTLLLKIQEYCYDNIHFMKAFQKIVVLFYKAEVLSEEPILKWYKDAHVAKGKSVFLEQMKKFVEWLKNAEEESESEAEEGD

SEQ ID NO: 8342 - protein, 135 aa, Homo sapiens
  Payload ID: 1733;
  Gene Symbol: BZW1;
  Gene Name: basic leu zipper and W2 domains 1;
  ENSP ID: ENSP00000395673
  MOD_RES (1)..(1): Any amino acid
XGARKELQKELQEQMSRGDPFKDIILYVKEEMKKNNIPEPVVIGIVWSSVMSTVEWNKKEELVAEQAIKHLKQYSPLLAAFTTQAEVLSEEPILKWYKDAHVAKGKSVFLEQMKKFVEWLKNAEEESESEAEEGD

SEQ ID NO: 8343 - protein, 161 aa, Homo sapiens
  Payload ID: 1733;
  Gene Symbol: BZW1;
  Gene Name: basic leu zipper and W2 domains 1;
  ENSP ID: ENSP00000407268
MNNQKQQKPTLSGQRFKTRKRDEKERFDPTQFQDCIIQGLTETGTDLEAVAKFLDASGAKLDYRRYAETLFDILVAGGMLAPGGTLADDMMRTDVCVFAAQEDLETMQAFAQVFNKLIRRYKYLEKGFEDEVKKLLLFLKGFSESERNKLAMLTGVLLANG

SEQ ID NO: 8344 - protein, 154 aa, Homo sapiens
  Payload ID: 1733;
  Gene Symbol: BZW1;
  Gene Name: basic leu zipper and W2 domains 1;
  ENSP ID: ENSP00000412072
MNNQKQQKPTLSGQRFKTRKRDEKERFDPTQFQDCIIQGLTETGTDLEAVAKFLDASGAKLDYRRYAETLFDILVAGGMLAPGGTLADDMMRTDVCVFAAQEDLETMQAFAQVFNKLIRRYKYLEKGFEDEVKKLLLFLKGFSESERNKLAMLT

SEQ ID NO: 8345 - protein, 419 aa, Homo sapiens
  Payload ID: 1734;
  Gene Symbol: BZW2;
  Gene Name: basic leu zipper and W2 domains 2;
  Uniprot ID:  Q9Y6E2;
  ENSP ID: ENSP00000258761
MNKHQKPVLTGQRFKTRKRDEKEKFEPTVFRDTLVQGLNEAGDDLEAVAKFLDSTGSRLDYRRYADTLFDILVAGSMLAPGGTRIDDGDKTKMTNHCVFSANEDHETIRNYAQVFNKLIRRYKYLEKAFEDEMKKLLLFLKAFSETEQTKLAMLSGILLGNGTLPATILTSLFTDSLVKEGIAASFAVKLFKAWMAEKDANSVTSSLRKANLDKRLLELFPVNRQSVDHFAKYFTDAGLKELSDFLRVQQSLGTRKELQKELQERLSQECPIKEVVLYVKEEMKRNDLPETAVIGLLWTCIMNAVEWNKKEELVAEQALKHLKQYAPLLAVFSSQGQSELILLQKVQEYCYDNIHFMKAFQKIVVLFYKADVLSEEAILKWYKEAHVAKGKSVFLDQMKKFVEWLQNAEEESESEGEEN

SEQ ID NO: 8346 - protein, 225 aa, Homo sapiens
  Payload ID: 1734;
  Gene Symbol: BZW2;
  Gene Name: basic leu zipper and W2 domains 2;
  ENSP ID: ENSP00000384617
MAEKDANSVTSSLRKANLDKRLLELFPVNRQSVDHFAKYFTDAGLKELSDFLRVQQSLGTRKELQKELQERLSQECPIKEVVLYVKEEMKRNDLPETAVIGLLWTCIMNAVEWNKKEELVAEQALKHLKQYAPLLAVFSSQGQSELILLQKVQEYCYDNIHFMKAFQKIVVLFYKADVLSEEAILKWYKEAHVAKGKSVFLDQMKKFVEWLQNAEEESESEGEEN

SEQ ID NO: 8347 - protein, 343 aa, Homo sapiens
  Payload ID: 1734;
  Gene Symbol: BZW2;
  Gene Name: basic leu zipper and W2 domains 2;
  ENSP ID: ENSP00000385577
MLAPGGTRIDDGDKTKMTNHCVFSANEDHETIRNYAQVFNKLIRRYKYLEKAFEDEMKKLLLFLKAFSETEQTKLAMLSGILLGNGTLPATILTSLFTDSLVKEGIAASFAVKLFKAWMAEKDANSVTSSLRKANLDKRLLELFPVNRQSVDHFAKYFTDAGLKELSDFLRVQQSLGTRKELQKELQERLSQECPIKEVVLYVKEEMKRNDLPETAVIGLLWTCIMNAVEWNKKEELVAEQALKHLKQYAPLLAVFSSQGQSELILLQKVQEYCYDNIHFMKAFQKIVVLFYKADVLSEEAILKWYKEAHVAKGKSVFLDQMKKFVEWLQNAEEESESEGEEN

SEQ ID NO: 8348 - protein, 170 aa, Homo sapiens
  Payload ID: 1734;
  Gene Symbol: BZW2;
  Gene Name: basic leu zipper and W2 domains 2;
  ENSP ID: ENSP00000389183
MNKHQKPVLTGQRFKTRKRDEKEKFEPTVFRDTLVQGLNEAGDDLEAVAKFLDSTGSRLDYRRYADTLFDILVAGSMLAPGGTRIDDGDKTKMTNHCVFSANEDHETIRNYAQVFNKLIRRYKYLEKAFEDEMKKPFPKQSRQSWRCCRGFCWAMAPCPPPSSPVSSPTA

SEQ ID NO: 8349 - protein, 419 aa, Homo sapiens; identical to SEQ ID NO: 8345
  Payload ID: 1734;
  Gene Symbol: BZW2;
  Gene Name: basic leu zipper and W2 domains 2;
  Uniprot ID:  Q9Y6E2;
  ENSP ID: ENSP00000397249

SEQ ID NO: 8350 - protein, 408 aa, Homo sapiens
  Payload ID: 1734;
  Gene Symbol: BZW2;
  Gene Name: basic leu zipper and W2 domains 2;
  ENSP ID: ENSP00000403481
MNKHQKPVLTGQRFKTRKRDEKEKFEPTVFRDTLVQGLNEAGDDLEAVAKFLDSTGSRLDYRRYADTLFDILVAGSMLAPGGTRIDDGDKTKMTNHCVFSANEDHETIRNYAQVFNKLIRRYKYLEKAFEDEMKKLLLFLKAFSETEQTKLAMLSGILLGNGTLPATILTSLFTDSLVKEGIAASFAVKLFKAWMAEKDANSVTSSLRKANLDKRLLELFPVNRQSVDHFAKYFTDAGLKELSDFLRVQQSLGTRKELQKELQERLSQECPIKEVVLYVKEEMKRNDLPETAVIGLLWTCIMNAVEWNKKEELVAEQALKHLKQYAPLLAVFSSQGQSELILLQKVQEYCYDNIHFMKAFQKIVVLFYKADVLSEEAILKWYKEAHVAKGKSVFLDQMKKFVEWLQNA

SEQ ID NO: 8351 - protein, 161 aa, Homo sapiens
  Payload ID: 1734;
  Gene Symbol: BZW2;
  Gene Name: basic leu zipper and W2 domains 2;
  ENSP ID: ENSP00000406395
MNKHQKPVLTGQRFKTRKRDEKEKFEPTVFRDTLVQGLNEAGDDLEAVAKFLDSTGSRLDYRRYADTLFDILVAGSMLAPGGTRIDDGDKTKMTNHCVFSANEDHETIRNYAQVFNKLIRRYKYLEKAFEDEMKKALRPHLLSSFSKHGWQKKMPTLLPRL

SEQ ID NO: 8352 - protein, 189 aa, Homo sapiens
  Payload ID: 1734;
  Gene Symbol: BZW2;
  Gene Name: basic leu zipper and W2 domains 2;
  ENSP ID: ENSP00000411715
MLSGILLGNGTLPATILTSLFTDSLVKEGIAASFAVKLFKAWMAEKDANSVTSSLRKANLDKRLLELFPVNRQSVDHFAKYFTDAGLKELSDFLRVQQSLGTRKELQKELQERLSQECPIKEVVLYVKEEMKIVVLFYKADVLSEEAILKWYKEAHVAKGKSVFLDQMKKFVEWLQNAEEESESEGEEN

SEQ ID NO: 8353 - protein, 274 aa, Homo sapiens
  Payload ID: 1734;
  Gene Symbol: BZW2;
  Gene Name: basic leu zipper and W2 domains 2;
  ENSP ID: ENSP00000412750
MNKHQKPVLTGQRFKTRKRDEKEKFEPTVFRDTLVQGLNEAGDDLEAVAKFLDSTGSRLDYRRYADTLFDILVAGSMLAPGGTRIDDGDKTKMTNHCVFSANEDHETIRNYAQVFNKLIRRYKYLEKAFEDEMKKLLLFLKAFSETEQTKLAMLSGILLGNGTLPATILTSLFTDSLVKEGIAASFAVKLFKAWMAEKDANSVTSSLRKANLDKRLLELFPVNRQSVDHFAKYFTDAGLKELSDFLRVQQSLGTRKELQKELQERLSQECPIKE

SEQ ID NO: 8354 - protein, 208 aa, Homo sapiens
  Payload ID: 1734;
  Gene Symbol: BZW2;
  Gene Name: basic leu zipper and W2 domains 2;
  ENSP ID: ENSP00000415924
MNKHQKPVLTGQRFKTRKRDEKEKFEPTVFRDTLVQGLNEAGDDLEAVAKFLDSTGSRLDYRRYADTLFDILVAGSMLAPGGTRIDDGDKTKMTNHCVFSANEDHETIRNYAQVFNKLIRRYKYLEKAFEDEMKKLLLFLKAFSETEQTKLAMLSGILLGNGTLPATILTSLFTDSLVKEGIAASFAVKLFKAWMAEKDANSVTSSLR

SEQ ID NO: 8355 - protein, 162 aa, Homo sapiens
  Payload ID: 1734;
  Gene Symbol: BZW2;
  Gene Name: basic leu zipper and W2 domains 2;
  ENSP ID: ENSP00000416531
MNKHQKPVLTGQRFKTRKRDEKEKFEPTVFRDTLVQGLNEAGDDLEAVAKFLDSTGSRLDYRRYADTLFDILVAGSMLAPGGTRIDDGDKTKMTNHCVFSANEDHETIRNYAQVFNKLIRRYKYLEKAFEDEMKKLLLFLKAFSETEQTKLAMLSGILLGNG

SEQ ID NO: 8356 - protein, 161 aa, Homo sapiens; identical to SEQ ID NO: 8351
  Payload ID: 1734;
  Gene Symbol: BZW2;
  Gene Name: basic leu zipper and W2 domains 2;
  ENSP ID: ENSP00000486454

SEQ ID NO: 8357 - protein, 400 aa, Homo sapiens
  Payload ID: 1735;
  Gene Symbol: BLZF1;
  Gene Name: basic leu zipper nuclear  factor 1;
  Uniprot ID:  Q9H2G9;
  ENSP ID: ENSP00000327541
MTTKNLETKVTVTSSPIRGAGDGMETEEPPKSVEVTSGVQSRKHHSLQSPWKKAVPSESPGVLQLGKMLTEKAMEVKAVRILVPKAAITHDIPNKNTKVKSLGHHKGEFLGQSEGVIEPNKELSEVKNVLEKLKNSERRLLQDKEGLSNQLRVQTEVNRELKKLLVASVGDDLQYHFERLAREKNQLILENEALGRNTAQLSEQLERMSIQCDVWRSKFLASRVMADELTNSRAALQRQNRDAHGAIQDLLSEREQFRQEMIATQKLLEELLVSLQWGREQTYSPSVQPHSTAELALTNHKLAKAVNSHLLGNVGINNQKKIPSTVEFCSTPAEKMAETVLRILDPVTCKESSPDNPFFESSPTTLLATKKNIGRFHPYTRYENITFNCCNHCRGELIAL

SEQ ID NO: 8358 - protein, 174 aa, Homo sapiens
  Payload ID: 1735;
  Gene Symbol: BLZF1;
  Gene Name: basic leu zipper nuclear  factor 1;
  Uniprot ID:  Q9H2G9;
  ENSP ID: ENSP00000356781
MTTKNLETKVTVTSSPIRGAGDGMETEEPPKSVEVTSGVQSRKHHSLQSPWKKAVPSESPGVLQLGKMLTEKAMEVKAVRILVPKAAITHDIPNKNTKVKSLGHHKGEFLGQSEGVIEPNKELSEVKNVLEKLKNSERRLLQDKEGLSNQLRVQTEVRRALIDKMSTTLYVWTF

SEQ ID NO: 8359 - protein, 400 aa, Homo sapiens; identical to SEQ ID NO: 8357
  Payload ID: 1735;
  Gene Symbol: BLZF1;
  Gene Name: basic leu zipper nuclear  factor 1;
  Uniprot ID:  Q9H2G9;
  ENSP ID: ENSP00000356782

SEQ ID NO: 8360 - protein, 250 aa, Homo sapiens
  Payload ID: 1735;
  Gene Symbol: BLZF1;
  Gene Name: basic leu zipper nuclear  factor 1;
  ENSP ID: ENSP00000404408
MTTKNLETKVTVTSSPIRGAGDGMETEEPPKSVEVTSGVQSRKHHSLQSPWKKAVPSESPGVLQLGKMLTEKAMEVKAVRILVPKAAITHDIPNKNTKVKSLGHHKGEFLGQSEGVIEPNKELSEVKNVLEKLKNSERRLLQDKEGLSNQLRVQTEVNRELKKLLVASVGDDLQYHFERLAREKNQLILENEALGRNTAQLSEQLERMSIQCDVWRSKFLASRVMADELTNSRAALQRQNRDAHGAIQDL

SEQ ID NO: 8361 - protein, 127 aa, Homo sapiens
  Payload ID: 1735;
  Gene Symbol: BLZF1;
  Gene Name: basic leu zipper nuclear  factor 1;
  ENSP ID: ENSP00000414668
MTTKNLETKVTVTSSPIRGAGDGMETEEPPKSVEVTSGVQSRKHHSLQSPWKKAVPSESPGVLQLGKMLTEKAMEVKAVRILVPKAAITHDIPNKNTKVKSLGHHKGEFLGQSEGVIEPNKELSEVK

SEQ ID NO: 8362 - protein, 125 aa, Homo sapiens
  Payload ID: 1736;
  Gene Symbol: BATF;
  Gene Name: basic leu zipper transcription factor, ATF-like;
  Uniprot ID:  Q16520;
  ENSP ID: ENSP00000286639
MPHSSDSSDSSFSRSPPPGKQDSSDDVRRVQRREKNRIAAQKSRQRQTQKADTLHLESEDLEKQNAALRKEIKQLTEELKYFTSVLNSHEPLCSVLAASTPSPPEVVYSAHAFHQPHVSSPRFQP

SEQ ID NO: 8363 - protein, 73 aa, Homo sapiens
  Payload ID: 1736;
  Gene Symbol: BATF;
  Gene Name: basic leu zipper transcription factor, ATF-like;
  ENSP ID: ENSP00000450486
MPHSSDSSDSSFSRSPPPGKQDSSDDVRRVQRREKNRIAAQKSRQRQTQKSIKKDAQVPWHRARRAGNGYFSK

SEQ ID NO: 8364 - protein, 274 aa, Homo sapiens
  Payload ID: 1737;
  Gene Symbol: BATF2;
  Gene Name: basic leu zipper transcription factor, ATF-like 2;
  Uniprot ID:  Q8N1L9;
  ENSP ID: ENSP00000301887
MHLCGGNGLLTQTDPKEQQRQLKKQKNRAAAQRSRQKHTDKADALHQQHESLEKDNLALRKEIQSLQAELAWWSRTLHVHERLCPMDCASCSAPGLLGCWDQAEGLLGPGPQGQHGCREQLELFQTPGSCYPAQPLSPGPQPHDSPSLLQCPLPSLSLGPAVVAEPPVQLSPSPLLFASHTGSSLQGSSSKLSALQPSLTAQTAPPQPLELEHPTRGKLGSSPDNPSSALGLARLQSREHKPALSAATWQGLVVDPSPHPLLAFPLLSSAQVHF

SEQ ID NO: 8365 - protein, 189 aa, Homo sapiens
  Payload ID: 1737;
  Gene Symbol: BATF2;
  Gene Name: basic leu zipper transcription factor, ATF-like 2;
  Uniprot ID:  Q8N1L9;
  ENSP ID: ENSP00000398911
MDCASCSAPGLLGCWDQAEGLLGPGPQGQHGCREQLELFQTPGSCYPAQPLSPGPQPHDSPSLLQCPLPSLSLGPAVVAEPPVQLSPSPLLFASHTGSSLQGSSSKLSALQPSLTAQTAPPQPLELEHPTRGKLGSSPDNPSSALGLARLQSREHKPALSAATWQGLVVDPSPHPLLAFPLLSSAQVHF

SEQ ID NO: 8366 - protein, 250 aa, Homo sapiens
  Payload ID: 1737;
  Gene Symbol: BATF2;
  Gene Name: basic leu zipper transcription factor, ATF-like 2;
  ENSP ID: ENSP00000434915
MAPVGKRIGGLGDTRVGGPCISQQHESLEKDNLALRKEIQSLQAELAWWSRTLHVHERLCPMDCASCSAPGLLGCWDQAEGLLGPGPQGQHGCREQLELFQTPGSCYPAQPLSPGPQPHDSPSLLQCPLPSLSLGPAVVAEPPVQLSPSPLLFASHTGSSLQGSSSKLSALQPSLTAQTAPPQPLELEHPTRGKLGSSPDNPSSALGLARLQSREHKPALSAATWQGLVVDPSPHPLLAFPLLSSAQVHF

SEQ ID NO: 8367 - protein, 155 aa, Homo sapiens
  Payload ID: 1737;
  Gene Symbol: BATF2;
  Gene Name: basic leu zipper transcription factor, ATF-like 2;
  ENSP ID: ENSP00000435640
MHLCGGNGLLTQTDPKEQQRQLKKQKNRAAAQRSRQKHTDKADALHQHESLEKDNLALRKEIQSLQAELAWWSRTLHVHERLCPMDCASCSAPGLLGCWDQAEGLLGPGPQGQHGCREQLELFQTPGSCYPAQPLSPGPQPHDSPSLLQCPLPSL

SEQ ID NO: 8368 - protein, 127 aa, Homo sapiens
  Payload ID: 1738;
  Gene Symbol: BATF3;
  Gene Name: basic leu zipper transcription factor, ATF-like 3;
  Uniprot ID:  Q9NR55;
  ENSP ID: ENSP00000243440
MSQGLPAAGSVLQRSVAAPGNQPQPQPQQQSPEDDDRKVRRREKNRVAAQRSRKKQTQKADKLHEEYESLEQENTMLRREIGKLTEELKHLTEALKEHEKMCPLLLCPMNFVPVPPRPDPVAGCLPR

SEQ ID NO: 8369 - protein, 162 aa, Homo sapiens
  Payload ID: 1739;
  Gene Symbol: BTF3;
  Gene Name: basic transcription factor 3;
  Uniprot ID:  P20290;
  ENSP ID: ENSP00000338516
MKETIMNQEKLAKLQAQVRIGGKGTARRKKKVVHRTATADDKKLQFSLKKLGVNNISGIEEVNMFTNQGTVIHFNNPKVQASLAANTFTITGHAETKQLTEMLPSILNQLGADSLTSLRRLAEALPKQSVDGKAPLATGEDDDDEVPDLVENFDEASKNEAN

SEQ ID NO: 8370 - protein, 206 aa, Homo sapiens
  Payload ID: 1739;
  Gene Symbol: BTF3;
  Gene Name: basic transcription factor 3;
  Uniprot ID:  P20290;
  ENSP ID: ENSP00000369965
MRRTGAPAQADSRGRGRARGGCPGGEATLSQPPPRGGTRGQEPQMKETIMNQEKLAKLQAQVRIGGKGTARRKKKVVHRTATADDKKLQFSLKKLGVNNISGIEEVNMFTNQGTVIHFNNPKVQASLAANTFTITGHAETKQLTEMLPSILNQLGADSLTSLRRLAEALPKQSVDGKAPLATGEDDDDEVPDLVENFDEASKNEAN

SEQ ID NO: 8371 - protein, 109 aa, Homo sapiens
  Payload ID: 1739;
  Gene Symbol: BTF3;
  Gene Name: basic transcription factor 3;
  ENSP ID: ENSP00000420978
MKETIMNQEKLAKLQAQVRIGGKVNMFTNQGTVIHFNNPKVQASLAANTFTITGHAETKQLTEMLPSILNQLGADSLTSLRRLAEALPKQSVDGKAPLATGEDDDDEVP

SEQ ID NO: 8372 - protein, 86 aa, Homo sapiens
  Payload ID: 1739;
  Gene Symbol: BTF3;
  Gene Name: basic transcription factor 3;
  ENSP ID: ENSP00000425490
  MOD_RES (1)..(1): Any amino acid
XIEEVNMFTNQGTVIHFNNPKVQASLAANTFTITGHAETKQLTEMLPSILNQLGADSLTSLRRLAEALPKQYLVENFDEASKNEAN

SEQ ID NO: 8373 - protein, 158 aa, Homo sapiens
  Payload ID: 1740;
  Gene Symbol: BTF3L4;
  Gene Name: basic transcription factor 3-like 4;
  Uniprot ID:  Q96K17;
  ENSP ID: ENSP00000360664
MNQEKLAKLQAQVRIGGKGTARRKKKVVHRTATADDKKLQSSLKKLAVNNIAGIEEVNMIKDDGTVIHFNNPKVQASLSANTFAITGHAEAKPITEMLPGILSQLGADSLTSLRKLAEQFPRQVLDSKAPKPEDIDEEDDDVPDLVENFDEASKNEAN

SEQ ID NO: 8374 - protein, 145 aa, Homo sapiens
  Payload ID: 1740;
  Gene Symbol: BTF3L4;
  Gene Name: basic transcription factor 3-like 4;
  ENSP ID: ENSP00000433418
MNQEKLAKLQAQVRIGGKGTARRKKKVVHRTATADDKKLQSSLKKLAVNNIAGIEEVNMIKDDGTVIHFNNPKVQASLSANTFAITGHAEAKPITEMLPGILSQLGADSLTSLRKLAEQFPRQVLDSKAPKPEDIDEEDDDVPGK

SEQ ID NO: 8375 - protein, 54 aa, Homo sapiens
  Payload ID: 1740;
  Gene Symbol: BTF3L4;
  Gene Name: basic transcription factor 3-like 4;
  ENSP ID: ENSP00000434611
MNQEKLAKLQAQVRIGGKVFLTNSYLFFHVGEYEYQLSYSLYFLKPKEELVVSN

SEQ ID NO: 8376 - protein, 78 aa, Homo sapiens
  Payload ID: 1740;
  Gene Symbol: BTF3L4;
  Gene Name: basic transcription factor 3-like 4;
  Uniprot ID:  Q96K17;
  ENSP ID: ENSP00000434824
MNQEKLAKLQAQVRIGGKGTARRKKKVVHRTATADDKKLQSSLKKLAVNNIAGIEESWTVKHQNQKTLMRKMMMFQIL

SEQ ID NO: 8377 - protein, 100 aa, Homo sapiens
  Payload ID: 1740;
  Gene Symbol: BTF3L4;
  Gene Name: basic transcription factor 3-like 4;
  Uniprot ID:  Q96K17;
  ENSP ID: ENSP00000436712
MIKDDGTVIHFNNPKVQASLSANTFAITGHAEAKPITEMLPGILSQLGADSLTSLRKLAEQFPRQVLDSKAPKPEDIDEEDDDVPDLVENFDEASKNEAN

SEQ ID NO: 8378 - protein, 503 aa, Homo sapiens
  Payload ID: 1741;
  Gene Symbol: BIVM;
  Gene Name: basic, immunoglobulin-like variable motif containing;
  Uniprot ID:  Q86UB2;
  ENSP ID: ENSP00000257336
MPNVAETERSNDSGNGEHKSERKSPEENLQGAVKSFCTSASGAPLGPKGDGHYPWSCPVTHTREKIYAICSDYAFLNQATSIYKTPNPSRSPCLPDSTSLSAGNNSSRYIGIPTSTSEIIYNEENSLENLSNSLGKLPLAWEIDKSEFDGVTTNSKHKSGNAKKQVSKRKTSDKKGRYQKECPQHSPLEDIKQRKVLDLRRWYCISRPQYKTSCGISSLISCWNFLYSTMGAGNLPPITQEEALHILGFQPPFEDIRFGPFTGNTTLMRWFRQINDHFHVKGCSYVLYKPHGKNKTAGETASGALSKLTRGLKDESLAYIYHCQNHYFCPIGFEATPVKANKAFSRGPLSPQEVEYWILIGESSRKHPAIHCKKWADIVTDLNTQNPEYLDIRHLERGLQYRKTKKVGGNLHCIIAFQRLNWQRFGLWNFPFGTIRQESQPPTHAQGIAKSESEDNISKKQHGRLGRSFSASFHQDSAWKKMSSIHERRNSGYQGYSDYDGND

SEQ ID NO: 8379 - protein, 281 aa, Homo sapiens
  Payload ID: 1741;
  Gene Symbol: BIVM;
  Gene Name: basic, immunoglobulin-like variable motif containing;
  Uniprot ID:  Q86UB2;
  ENSP ID: ENSP00000412794
MGAGNLPPITQEEALHILGFQPPFEDIRFGPFTGNTTLMRWFRQINDHFHVKGCSYVLYKPHGKNKTAGETASGALSKLTRGLKDESLAYIYHCQNHYFCPIGFEATPVKANKAFSRGPLSPQEVEYWILIGESSRKHPAIHCKKWADIVTDLNTQNPEYLDIRHLERGLQYRKTKKPTFFSSQVGGNLHCIIAFQRLNWQRFGLWNFPFGTIRQESQPPTHAQGIAKSESEDNISKKQHGRLGRSFSASFHQDSAWKKMSSIHERRNSGYQGYSDYDGND

SEQ ID NO: 8380 - protein, 385 aa, Homo sapiens
  Payload ID: 1742;
  Gene Symbol: BSG;
  Gene Name: basigin (Ok blood group);
  Uniprot ID:  P35613;
  ENSP ID: ENSP00000333769
MAAALFVLLGFALLGTHGASGAAGFVQAPLSQQRWVGGSVELHCEAVGSPVPEIQWWFEGQGPNDTCSQLWDGARLDRVHIHATYHQHAASTISIDTLVEEDTGTYECRASNDPDRNHLTRAPRVKWVRAQAVVLVLEPGTVFTTVEDLGSKILLTCSLNDSATEVTGHRWLKGGVVLKEDALPGQKTEFKVDSDDQWGEYSCVFLPEPMGTANIQLHGPPRVKAVKSSEHINEGETAMLVCKSESVPPVTDWAWYKITDSEDKALMNGSESRFFVSSSQGRSELHIENLNMEADPGQYRCNGTSSKGSDQAIITLRVRSHLAALWPFLGIVAEVLVLVTIIFIYEKRRKPEDVLDDDDAGSAPLKSSGQHQNDKGKNVRQRNSS

SEQ ID NO: 8381 - protein, 269 aa, Homo sapiens
  Payload ID: 1742;
  Gene Symbol: BSG;
  Gene Name: basigin (Ok blood group);
  Uniprot ID:  P35613;
  ENSP ID: ENSP00000343809
MAAALFVLLGFALLGTHGASGAAGTVFTTVEDLGSKILLTCSLNDSATEVTGHRWLKGGVVLKEDALPGQKTEFKVDSDDQWGEYSCVFLPEPMGTANIQLHGPPRVKAVKSSEHINEGETAMLVCKSESVPPVTDWAWYKITDSEDKALMNGSESRFFVSSSQGRSELHIENLNMEADPGQYRCNGTSSKGSDQAIITLRVRSHLAALWPFLGIVAEVLVLVTIIFIYEKRRKPEDVLDDDDAGSAPLKSSGQHQNDKGKNVRQRNSS

SEQ ID NO: 8382 - protein, 205 aa, Homo sapiens
  Payload ID: 1742;
  Gene Symbol: BSG;
  Gene Name: basigin (Ok blood group);
  Uniprot ID:  P35613;
  ENSP ID: ENSP00000344707
MKQSDASPQERVDSDDQWGEYSCVFLPEPMGTANIQLHGPPRVKAVKSSEHINEGETAMLVCKSESVPPVTDWAWYKITDSEDKALMNGSESRFFVSSSQGRSELHIENLNMEADPGQYRCNGTSSKGSDQAIITLRVRSHLAALWPFLGIVAEVLVLVTIIFIYEKRRKPEDVLDDDDAGSAPLKSSGQHQNDKGKNVRQRNSS

SEQ ID NO: 8383 - protein, 160 aa, Homo sapiens
  Payload ID: 1742;
  Gene Symbol: BSG;
  Gene Name: basigin (Ok blood group);
  ENSP ID: ENSP00000458665
MAAALFVLLGFALLGTHGASGAEDLGSKILLTCSLNDSATEVTGHRWLKGGVVLKEDALPGQKTEFKVDSDDQWGEYSCVFLPEPMGTANIQLHGPPRVKAVKSSEHINEGETAMLVCKSESVPPVTDWAWYKITDSEDKALMNGSESRFFVSSSQGRSE

SEQ ID NO: 8384 - protein, 84 aa, Homo sapiens
  Payload ID: 1742;
  Gene Symbol: BSG;
  Gene Name: basigin (Ok blood group);
  ENSP ID: ENSP00000473393
MGTANIQLHGPPRVKAVKSSEHINEGETAMLVCKSESVPPVTDWAWYKITDSEDKALMNGSESRFFVSSSQGRSELHIENLNME

SEQ ID NO: 8385 - protein, 52 aa, Homo sapiens
  Payload ID: 1742;
  Gene Symbol: BSG;
  Gene Name: basigin (Ok blood group);
  ENSP ID: ENSP00000473528
MGTANIQLHGPPRVKAVKSSEHINEGETAMLVCKSESVPPVTDWAWYKITDS

SEQ ID NO: 8386 - protein, 176 aa, Homo sapiens
  Payload ID: 1742;
  Gene Symbol: BSG;
  Gene Name: basigin (Ok blood group);
  Uniprot ID:  P35613;
  ENSP ID: ENSP00000473664
MGTANIQLHGPPRVKAVKSSEHINEGETAMLVCKSESVPPVTDWAWYKITDSEDKALMNGSESRFFVSSSQGRSELHIENLNMEADPGQYRCNGTSSKGSDQAIITLRVRSHLAALWPFLGIVAEVLVLVTIIFIYEKRRKPEDVLDDDDAGSAPLKSSGQHQNDKGKNVRQRNSS

SEQ ID NO: 8387 - protein, 189 aa, Homo sapiens
  Payload ID: 1742;
  Gene Symbol: BSG;
  Gene Name: basigin (Ok blood group);
  ENSP ID: ENSP00000478958
MAAALFVLLGFALLGTHGASGAGPPRVKAVKSSEHINEGETAMLVCKSESVPPVTDWAWYKITDSEDKALMNGSESRFFVSSSQGRSELHIENLNMEADPGQYRCNGTSSKGSDQAIITLRVRSHLAALWPFLGIVAEVLVLVTIIFIYEKRRKPEDVLDDDDAGSAPLKSSGQHQNDKGKNVRQRNSS

SEQ ID NO: 8388 - protein, 55 aa, Homo sapiens
  Payload ID: 1742;
  Gene Symbol: BSG;
  Gene Name: basigin (Ok blood group);
  ENSP ID: ENSP00000484624
MAAALFVLLGFALLGTHGASGAAGTVFTTVEDLGSKILLTCSLNDSATEQRAAPE

SEQ ID NO: 8389 - protein, 221 aa, Homo sapiens
  Payload ID: 1742;
  Gene Symbol: BSG;
  Gene Name: basigin (Ok blood group);
  ENSP ID: ENSP00000484849
MAAALFVLLGFALLGTHGASGAVFTTVEDLGSKILLTCSLNDSATEVTGHRWLKGGVVLKEDALPGQKTEFKVDSDDQWGEYSCVFLPEPMGTANIQLHGPPRVKAVKSSEHINEGETAMLVCKSESVPPVTDWAWYKITDSEDKALMNGSESRFFVSSSQGRSELHIENLNMEADPGQYRCNGTSSKGSDQAIITLRVRSHLAALWPFLGIVAEVLVLVT

SEQ ID NO: 8390 - protein, 994 aa, Homo sapiens
  Payload ID: 1743;
  Gene Symbol: BNC1;
  Gene Name: basonuclin 1;
  Uniprot ID:  Q01954;
  ENSP ID: ENSP00000307041
MRRRPPSRGGRGAARARETRRQPRHRSGRRMAEAISCTLNCSCQSFKPGKINHRQCDQCKHGWVAHALSKLRIPPMYPTSQVEIVQSNVVFDISSLMLYGTQAIPVRLKILLDRLFSVLKQDEVLQILHALDWTLQDYIRGYVLQDASGKVLDHWSIMTSEEEVATLQQFLRFGETKSIVELMAIQEKEEQSIIIPPSTANVDIRAFIESCSHRSSSLPTPVDKGNPSSIHPFENLISNMTFMLPFQFFNPLPPALIGSLPEQYMLEQGHDQSQDPKQEVHGPFPDSSFLTSSSTPFQVEKDQCLNCPDAITKKEDSTHLSDSSSYNIVTKFERTQLSPEAKVKPERNSLGTKKGRVFCTACEKTFYDKGTLKIHYNAVHLKIKHKCTIEGCNMVFSSLRSRNRHSANPNPRLHMPMNRNNRDKDLRNSLNLASSENYKCPGFTVTSPDCRPPPSYPGSGEDSKGQPAFPNIGQNGVLFPNLKTVQPVLPFYRSPATPAEVANTPGILPSLPLLSSSIPEQLISNEMPFDALPKKKSRKSSMPIKIEKEAVEIANEKRHNLSSDEDMPLQVVSEDEQEACSPQSHRVSEEQHVQSGGLGKPFPEGERPCHRESVIESSGAISQTPEQATHNSERETEQTPALIMVPREVEDGGHEHYFTPGMEPQVPFSDYMELQQRLLAGGLFSALSNRGMAFPCLEDSKELEHVGQHALARQIEENRFQCDICKKTFKNACSVKIHHKNMHVKEMHTCTVEGCNATFPSRRSRDRHSSNLNLHQKALSQEALESSEDHFRAAYLLKDVAKEAYQDVAFTQQASQTSVIFKGTSRMGSLVYPITQVHSASLESYNSGPLSEGTILDLSTTSSMKSESSSHSSWDSDGVSEEGTVLMEDSDGNCEGSSLVPGEDEYPICVLMEKADQSLASLPSGLPITCHLCQKTYSNKGTFRAHYKTVHLRQLHKCKVPGCNTMFSSVRSRNRHSQNPNLHKSLASSPSHLQ

SEQ ID NO: 8391 - protein, 987 aa, Homo sapiens
  Payload ID: 1743;
  Gene Symbol: BNC1;
  Gene Name: basonuclin 1;
  ENSP ID: ENSP00000456727
MRCRNMFFSFKASLCGCGAATAPSLTAISCTLNCSCQSFKPGKINHRQCDQCKHGWVAHALSKLRIPPMYPTSQVEIVQSNVVFDISSLMLYGTQAIPVRLKILLDRLFSVLKQDEVLQILHALDWTLQDYIRGYVLQDASGKVLDHWSIMTSEEEVATLQQFLRFGETKSIVELMAIQEKEEQSIIIPPSTANVDIRAFIESCSHRSSSLPTPVDKGNPSSIHPFENLISNMTFMLPFQFFNPLPPALIGSLPEQYMLEQGHDQSQDPKQEVHGPFPDSSFLTSSSTPFQVEKDQCLNCPDAITKKEDSTHLSDSSSYNIVTKFERTQLSPEAKVKPERNSLGTKKGRVFCTACEKTFYDKGTLKIHYNAVHLKIKHKCTIEGCNMVFSSLRSRNRHSANPNPRLHMPMNRNNRDKDLRNSLNLASSENYKCPGFTVTSPDCRPPPSYPGSGEDSKGQPAFPNIGQNGVLFPNLKTVQPVLPFYRSPATPAEVANTPGILPSLPLLSSSIPEQLISNEMPFDALPKKKSRKSSMPIKIEKEAVEIANEKRHNLSSDEDMPLQVVSEDEQEACSPQSHRVSEEQHVQSGGLGKPFPEGERPCHRESVIESSGAISQTPEQATHNSERETEQTPALIMVPREVEDGGHEHYFTPGMEPQVPFSDYMELQQRLLAGGLFSALSNRGMAFPCLEDSKELEHVGQHALARQIEENRFQCDICKKTFKNACSVKIHHKNMHVKEMHTCTVEGCNATFPSRRSRDRHSSNLNLHQKALSQEALESSEDHFRAAYLLKDVAKEAYQDVAFTQQASQTSVIFKGTSRMGSLVYPITQVHSASLESYNSGPLSEGTILDLSTTSSMKSESSSHSSWDSDGVSEEGTVLMEDSDGNCEGSSLVPGEDEYPICVLMEKADQSLASLPSGLPITCHLCQKTYSNKGTFRAHYKTVHLRQLHKCKVPGCNTMFSSVRSRNRHSQNPNLHKSLASSPSHLQ

SEQ ID NO: 8392 - protein, 993 aa, Homo sapiens
  Payload ID: 1743;
  Gene Symbol: BNC1;
  Gene Name: basonuclin 1;
  ENSP ID: ENSP00000478817
MRRRPEPGRTRGGRARETRRQPRHRSGRRMAEAISCTLNCSCQSFKPGKINHRQCDQCKHGWVAHALSKLRIPPMYPTSQVEIVQSNVVFDISSLMLYGTQAIPVRLKILLDRLFSVLKQDEVLQILHALDWTLQDYIRGYVLQDASGKVLDHWSIMTSEEEVATLQQFLRFGETKSIVELMAIQEKEEQSIIIPPSTANVDIRAFIESCSHRSSSLPTPVDKGNPSSIHPFENLISNMTFMLPFQFFNPLPPALIGSLPEQYMLEQGHDQSQDPKQEVHGPFPDSSFLTSSSTPFQVEKDQCLNCPDAITKKEDSTHLSDSSSYNIVTKFERTQLSPEAKVKPERNSLGTKKGRVFCTACEKTFYDKGTLKIHYNAVHLKIKHKCTIEGCNMVFSSLRSRNRHSANPNPRLHMPMNRNNRDKDLRNSLNLASSENYKCPGFTVTSPDCRPPPSYPGSGEDSKGQPAFPNIGQNGVLFPNLKTVQPVLPFYRSPATPAEVANTPGILPSLPLLSSSIPEQLISNEMPFDALPKKKSRKSSMPIKIEKEAVEIANEKRHNLSSDEDMPLQVVSEDEQEACSPQSHRVSEEQHVQSGGLGKPFPEGERPCHRESVIESSGAISQTPEQATHNSERETEQTPALIMVPREVEDGGHEHYFTPGMEPQVPFSDYMELQQRLLAGGLFSALSNRGMAFPCLEDSKELEHVGQHALARQIEENRFQCDICKKTFKNACSVKIHHKNMHVKEMHTCTVEGCNATFPSRRSRDRHSSNLNLHQKALSQEALESSEDHFRAAYLLKDVAKEAYQDVAFTQQASQTSVIFKGTSRMGSLVYPITQVHSASLESYNSGPLSEGTILDLSTTSSMKSESSSHSSWDSDGVSEEGTVLMEDSDGNCEGSSLVPGEDEYPICVLMEKADQSLASLPSGLPITCHLCQKTYSNKGTFRAHYKTVHLRQLHKCKVPGCNTMFSSVRSRNRHSQNPNLHKSLASSPSHLQ

SEQ ID NO: 8393 - protein, 294 aa, Homo sapiens
  Payload ID: 1744;
  Gene Symbol: BNC2;
  Gene Name: basonuclin 2;
  ENSP ID: ENSP00000370041
MQFGTRTTTAEPGFMGTWQNADTNLLFRMSQQAIRCTLVNCTCECFQPGKINLRTCDQCKHGWVAHALDKLSTQHLYHPTQVEIVQSNVVFDISSLMLYGTQAVPVRLKILLDRLFSVLKQEEVLHILHGLGWTLRDYVRGYILQDAAGKVLDRWAIMSREEEIITLQQFLRFGETKSIVELMAIQEKEGQAVAVPSSKTDSDIRTFIESNNRTRSPSLLAHLENSNPSSIHHFENIPNSLAFLLPFQYINPVSAPLLGLPPNGLLLEQPGLRLREPSLSTQNEYNESSESEVS

SEQ ID NO: 8394 - protein, 1032 aa, Homo sapiens
  Payload ID: 1744;
  Gene Symbol: BNC2;
  Gene Name: basonuclin 2;
  ENSP ID: ENSP00000370042
MAHLGPTPPPHSLNYKSEDRLSEQDWPAYFKVPCCGVDTSQIEAIRCTLVNCTCECFQPGKINLRTCDQCKHGWVAHALDKLSTQHLYHPTQVEIVQSNVVFDISSLMLYGTQAVPVRLKILLDRLFSVLKQEEVLHILHGLGWTLRDYVRGYILQDAAGKVLDRWAIMSREEEIITLQQFLRFGETKSIVELMAIQEKEGQAVAVPSSKTDSDIRTFIESNNRTRSPSLLAHLENSNPSSIHHFENIPNSLAFLLPFQYINPVSAPLLGLPPNGLLLEQPGLRLREPSLSTQNEYNESSESEVSPTPYKNDQTPNRNALTSITNVEPKTEPACVSPIQNSAPVSDLTKTEHPKSSFRIHRMRRMGSASRKGRVFCNACGKTFYDKGTLKIHYNAVHLKIKHRCTIEGCNMVFSSLRSRNRHSANPNPRLHMPMLRNNRDKDLIRATSGAATPVIASTKSNLALTSPGRPPMGFTTPPLDPVLQNPLPSQLVFSGLKTVQPVPPFYRSLLTPGEMVSPPTSLPTSPIIPTSGTIEQHPPPPSEPVVPAVMMATHEPSADLAPKKKPRKSSMPVKIEKEIIDTADEFDDEDDDPNDGGAVVNDMSHDNHCHSQEEMSPGMSVKDFSKHNRTRCISRTEIRRADSMTSEDQEPERDYENESESSEPKLGEESMEGDEHIHSEVSEKVLMNSERPDENHSEPSHQDVIKVKEEFTDPTYDMFYMSQYGLYNGGGASMAALHESFTSSLNYGSPQKFSPEGDLCSSPDPKICYVCKKSFKSSYSVKLHYRNVHLKEMHVCTVAGCNAAFPSRRSRDRHSANINLHRKLLTKELDDMGLDSSQPSLSKDLRDEFLVKIYGAQHPMGLDVREDASSPAGTEDSHLNGYGRGMAEDYMVLDLSTTSSLQSSSSIHSSRESDAGSDEGILLDDIDGASDSGESAHKAEAPALPGSLGAEVSGSLMFSSLSGSNGGIMCNICHKMYSNKGTLRVHYKTVHLREMHKCKVPGCNMMFSSVRSRNRHSQNPNLHKNIPFTSVD

SEQ ID NO: 8395 - protein, 1099 aa, Homo sapiens
  Payload ID: 1744;
  Gene Symbol: BNC2;
  Gene Name: basonuclin 2;
  Uniprot ID:  Q6ZN30;
  ENSP ID: ENSP00000370047
MAHLGPTPPPHSLNYKSEDRLSEQDWPAYFKVPCCGVDTSQIESEEAEVDVRERETQRDREPKRARDLTLRDSCTDNSMQFGTRTTTAEPGFMGTWQNADTNLLFRMSQQAIRCTLVNCTCECFQPGKINLRTCDQCKHGWVAHALDKLSTQHLYHPTQVEIVQSNVVFDISSLMLYGTQAVPVRLKILLDRLFSVLKQEEVLHILHGLGWTLRDYVRGYILQDAAGKVLDRWAIMSREEEIITLQQFLRFGETKSIVELMAIQEKEGQAVAVPSSKTDSDIRTFIESNNRTRSPSLLAHLENSNPSSIHHFENIPNSLAFLLPFQYINPVSAPLLGLPPNGLLLEQPGLRLREPSLSTQNEYNESSESEVSPTPYKNDQTPNRNALTSITNVEPKTEPACVSPIQNSAPVSDLTKTEHPKSSFRIHRMRRMGSASRKGRVFCNACGKTFYDKGTLKIHYNAVHLKIKHRCTIEGCNMVFSSLRSRNRHSANPNPRLHMPMLRNNRDKDLIRATSGAATPVIASTKSNLALTSPGRPPMGFTTPPLDPVLQNPLPSQLVFSGLKTVQPVPPFYRSLLTPGEMVSPPTSLPTSPIIPTSGTIEQHPPPPSEPVVPAVMMATHEPSADLAPKKKPRKSSMPVKIEKEIIDTADEFDDEDDDPNDGGAVVNDMSHDNHCHSQEEMSPGMSVKDFSKHNRTRCISRTEIRRADSMTSEDQEPERDYENESESSEPKLGEESMEGDEHIHSEVSEKVLMNSERPDENHSEPSHQDVIKVKEEFTDPTYDMFYMSQYGLYNGGGASMAALHESFTSSLNYGSPQKFSPEGDLCSSPDPKICYVCKKSFKSSYSVKLHYRNVHLKEMHVCTVAGCNAAFPSRRSRDRHSANINLHRKLLTKELDDMGLDSSQPSLSKDLRDEFLVKIYGAQHPMGLDVREDASSPAGTEDSHLNGYGRGMAEDYMVLDLSTTSSLQSSSSIHSSRESDAGSDEGILLDDIDGASDSGESAHKAEAPALPGSLGAEVSGSLMFSSLSGSNGGIMCNICHKMYSNKGTLRVHYKTVHLREMHKCKVPGCNMMFSSVRSRNRHSQNPNLHKNIPFTSVD

SEQ ID NO: 8396 - protein, 327 aa, Homo sapiens
  Payload ID: 1744;
  Gene Symbol: BNC2;
  Gene Name: basonuclin 2;
  ENSP ID: ENSP00000392212
PSEPVVPAVMMATHEPSADLAPKKKPRKSSMPVKIEKEIIDTADEFDDEDDDPNDGGAVVNDMSHDNHCHSQEEMSPGMSVKDFSKHNRTRCISRTEIRRADSMTSEDQEPERDYENESESSEPKLGEESMEGDEHIHSEVSEKVLMNSERPDENHSEPSHQDVIKVKEEFTDPTYDMFYMSQYGLYNGGGASMAALHESFTSSLNYGSPQKFSPEGDLCSSPDPKICYVCKKSFKSSYSVKLHYRNVHLKEMHVCTVAGCNAAFPSRRSRDRNRNLRMERTIGPGHRDSLHLRRGNSNRPGTCCLHTGDSLEESVIVRISCKRLES

SEQ ID NO: 8397 - protein, 860 aa, Homo sapiens
  Payload ID: 1744;
  Gene Symbol: BNC2;
  Gene Name: basonuclin 2;
  ENSP ID: ENSP00000408370
SEEAEVDVRERETQRDREPKRARDLTLRDSCTDNSMQFGTRTTTAEPGFMGTWQNADTNLLFRMSQQAIRCTLVNCTCECFQPGKINLRTCDQCKHGWVAHALDKLSTQHLYHPTQVEIVQSNVVFDISSLMLYGTQAVPVRLKILLDRLFSVLKQEEVLHILHGLGWTLRDYVRGYILQDAAGKVLDRWAIMSREEEIITLQQFLRFGETKSIVELMAIQEKEGQAVAVPSSKTDSDIRTFIESNNRTRSPSLLAHLENSNPSSIHHFENIPNSLAFLLPFQYINPVSAPLLGLPPNGLLLEQPGLRLREPSLSTQNEYNESSESEVSPTPYKNDQTPNRNALTSITNVEPKTEPACVSPIQNSAPVSDLTKTEHPKSSFRIHRMRRMGSASRKGRVFCNACGKTFYDKGTLKIHYNAVHLKIKHRCTIEGCNMVFSSLRSRNRHSANPNPRLHMPMLRNNRDKDLIRATSGAATPVIASTKSNLALTSPGRPPMGFTTPPLDPVLQNPLPSQLVFSGLKTVQPVPPFYRSLLTPGEMVSPPTSLPTSPIIPTSGTIEQHPPPPSEPVVPAVMMATHEPSADLAPKKKPRKSSMPVKIEKEIIDTADEFDDEDDDPNDGGAVVNDMSHDNHCHSQEEMSPGMSVKDFSKHNRTRCISRTEIRRADSMTSEDQEPERDYENESESSEPKLGEESMEGDEHIHSEVSEKVLMNSERPDENHSEPSHQDVIKVKEEFTDPTYDMFYMSQYGLYNGGGASMAALHESFTSSLNYGSPQKFSPEGDLCSSPDPKICYVCKKSFKSSYSVKLHYRNVHLKEMHVCTVAGCNAAFPSRRSRDRNRNLRMERTIGPGHRDSLHLLPT

SEQ ID NO: 8398 - protein, 903 aa, Homo sapiens
  Payload ID: 1744;
  Gene Symbol: BNC2;
  Gene Name: basonuclin 2;
  Uniprot ID:  Q6ZN30;
  ENSP ID: ENSP00000431516
MAHLGPTPPPHSLNYKSEDRLSEQDWPAYFKVPCCGVDTSQIESEEAEVDVRERETQRDREPKRARDLTLRDSCTDNSMQFGTRTTTAEPGFMGTWQNADTNLLFRMSQQAIRCTLVNCTCECFQPGKINLRTCDQCKHGWVAHALDKLSTQHLYHPTQVEIVQSNVVFDISSLMLYGTQAVPVRLKILLDRLFSVLKQEEVLHILHGLGWTLRDYVRGYILQDAAGKVLDRWAIMSREEEIITLQQFLRFGETKSIVELMAIQEKEGQAVAVPSSKTDSDIRTFIESNNRTRSPSLLAHLENSNPSSIHHFENIPNSLAFLLPFQYINPVSAPLLGLPPNGLLLEQPGLRLREPSLSTQNEYNESSESEVSPTPYKNDQTPNRNALTSITNVEPKTEPACVSPIQNSAPVSDLTKTEHPKSSFRIHRMRRMGSASRKGRVFCNACGKTFYDKGTLKIHYNAVHLKIKHRCTIEGCNMVFSSLRSRNRHSANPNPRLHMPMLRNNRDKDLIRATSGAATPVIASTKSNLALTSPGRPPMGFTTPPLDPVLQNPLPSQLVFSGLKTVQPVPPFYRSLLTPGEMVSPPTSLPTSPIIPTSGTIEQHPPPPSEPVVPAVMMATHEPSADLAPKKKPRKSSMPVKIEKEIIDTADEFDDEDDDPNDGGAVVNDMSHDNHCHSQEEMSPGMSVKDFSKHNRTRCISRTEIRRADSMTSEDQEPERDYENESESSEPKLGEESMEGDEHIHSEVSEKVLMNSERPDENHSEPSHQDVIKVKEEFTDPTYDMFYMSQYGLYNGGGASMAALHESFTSSLNYGSPQKFSPEGDLCSSPDPKICYVCKKSFKSSYSVKLHYRNVHLKEMHVCTVAGCNAAFPSRRSRDRYWEKSNEQNGLLVSWGETLSSLK

SEQ ID NO: 8399 - protein, 729 aa, Homo sapiens
  Payload ID: 1744;
  Gene Symbol: BNC2;
  Gene Name: basonuclin 2;
  ENSP ID: ENSP00000444640
MLYGTQAVPVRLKILLDRLFSVLKQEEVLHILHGLGWTLRDYVRGYILQDAAGKVLDRWAIMSREEEIITLQQFLRFGETKSIVELMAIQEKEGQAVAVPSSKTDSDIRTFIESNNRTRSPSLLAHLENSNPSSIHHFENIPNSLAFLLPFQYINPVSAPLLGLPPNGLLLEQPGLRLREPSLSTQNEYNESSESEVSPTPYKNDQTPNRNALTSITNVEPKTEPACVSPIQNSAPVSDLTKTEHPKSSFRIHRMRRMGSASRKGRVFCNACGKTFYDKGTLKIHYNAVHLKIKHRCTIEGCNMVFSSLRSRNRHSANPNPRLHMPMLRNNRDKDLIRATSGAATPVIASTKSNLALTSPGRPPMGFTTPPLDPVLQNPLPSQLVFSGLKTVQPVPPFYRSLLTPGEMVSPPTSLPTSPIIPTSGTIEQHPPPPSEPVVPAVMMATHEPSADLAPKKKPRKSSMPVKIEKEIIDTADEFDDEDDDPNDGGAVVNDMSHDNHCHSQEEMSPGMSVKDFSKHNRTRCISRTEIRRADSMTSEDQEPERDYENESESSEPKLGEESMEGDEHIHSEVSEKVLMNSERPDENHSEPSHQDVIKVKEEFTDPTYDMFYMSQYGLYNGGGASMAALHESFTSSLNYGSPQKFSPEGDLCSSPDPKICYVCKKSFKSSYSVKLHYRNVHLKEMHVCTVAGCNAAFPSRRSRDRNRNLRMERTIGPGHRDSLHLLPT

SEQ ID NO: 8400 - protein, 121 aa, Homo sapiens
  Payload ID: 1744;
  Gene Symbol: BNC2;
  Gene Name: basonuclin 2;
  ENSP ID: ENSP00000473935
MQFGTRTTTAEPGFMGTWQNADTNLLFRMSQQAIRCTLVNCTCECFQPGKINLRTCDQCKHGWVAHALDKLSTQHLYHPTQVEIVQSNVVFDISSLMLYGTQAVPVRLKILLDRLFSVLKQ

SEQ ID NO: 8401 - protein, 245 aa, Homo sapiens
  Payload ID: 1744;
  Gene Symbol: BNC2;
  Gene Name: basonuclin 2;
  ENSP ID: ENSP00000474045
MQFGTRTTTAEPGFMGTWQNADTNLLFRMSQQAIRCTLVNCTCECFQPGKINLRTCDQCKHGWVAHALDKLSTQHLYHPTQVEIVQSNVVFDISSLMLYGTQAVPVRLKILLDRLFSVLKQEEVLHILHGLGWTLRDYVRGYILQDAAGKVLDRWAIMSREEEIITLQQFLRFGETKSIVELMAIQEKEGQAVAVPSSKTDSDIRTFIESNNRTRSPSLLAHLENSNPSSIHHFENIPNSLAFLL

SEQ ID NO: 8402 - protein, 109 aa, Homo sapiens
  Payload ID: 1744;
  Gene Symbol: BNC2;
  Gene Name: basonuclin 2;
  ENSP ID: ENSP00000474468
SEEAEVDVRERETQRDREPKRARDLTLRDSCTDNSMQFGTRTTTAEPGFMGTWQNADTNLLFRMSQQAIRCTLVNCTCECFQPGKINLRTCDQCKHGWVAHETLKSCLQ

SEQ ID NO: 8403 - protein, 164 aa, Homo sapiens
  Payload ID: 1744;
  Gene Symbol: BNC2;
  Gene Name: basonuclin 2;
  ENSP ID: ENSP00000474647
MSEEAEVDVRERETQRDREPKRARDLTLRDSCTDNSMQFGTRTTTAEPGFMGTWQNADTNLLFRMSQQAIRCTLVNCTCECFQPGKINLRTCDQCKHGWVAHALDKLSTQHLYHPTQVEIVQSNVVFDISSLMLYGTQAVPVRLKILLDRLFSVLKQEEVLHIL

SEQ ID NO: 8404 - protein, 43 aa, Homo sapiens
  Payload ID: 1744;
  Gene Symbol: BNC2;
  Gene Name: basonuclin 2;
  ENSP ID: ENSP00000474832
MAIRCTLVNCTCECFQPGKINLRTCDQCKHGWVAHETLKSCLQ

SEQ ID NO: 8405 - protein, 40 aa, Homo sapiens
  Payload ID: 1744;
  Gene Symbol: BNC2;
  Gene Name: basonuclin 2;
  ENSP ID: ENSP00000477717
MQFGTRTTTAEPGFMGTWQNADTNLLFRMSQQAIRCTLVN

SEQ ID NO: 8406 - protein, 40 aa, Homo sapiens; identical to SEQ ID NO: 8405
  Payload ID: 1744;
  Gene Symbol: BNC2;
  Gene Name: basonuclin 2;
  ENSP ID: ENSP00000482793

SEQ ID NO: 8407 - protein, 3926 aa, Homo sapiens
  Payload ID: 1745;
  Gene Symbol: BSN;
  Gene Name: bassoon presynaptic cytomatrix prt;
  Uniprot ID:  Q9UPA5;
  ENSP ID: ENSP00000296452
MGNEVSLEGGAGDGPLPPGGAGPGPGPGPGPGAGKPPSAPAGGGQLPAAGAARSTAVPPVPGPGPGPGPGPGPGSTSRRLDPKEPLGNQRAASPTPKQASATTPGHESPRETRAQGPAGQEADGPRRTLQVDSRTQRSGRSPSVSPDRGSTPTSPYSVPQIAPLPSSTLCPICKTSDLTSTPSQPNFNTCTQCHNKVCNQCGFNPNPHLTQVKEWLCLNCQMQRALGMDMTTAPRSKSQQQLHSPALSPAHSPAKQPLGKPDQERSRGPGGPQPGSRQAETARATSVPGPAQAAAPPEVGRVSPQPPQPTKPSTAEPRPPAGEAPAKSATAVPAGLGATEQTQEGLTGKLFGLGASLLTQASTLMSVQPEADTQGQPAPSKGTPKIVFNDASKEAGPKPLGSGPGPGPAPGAKTEPGARMGPGSGPGALPKTGGTTSPKHGRAEHQAASKAAAKPKTMPKERAICPLCQAELNVGSKSPANYNTCTTCRLQVCNLCGFNPTPHLVEKTEWLCLNCQTKRLLEGSLGEPTPLPPPTSQQPPVGAPHRASGTSPLKQKGPQGLGQPSGPLPAKASPLSTKASPLPSKASPQAKPLRASEPSKTPSSVQEKKTRVPTKAEPMPKPPPETTPTPATPKVKSGVRRAEPATPVVKAVPEAPKGGEAEDLVGKPYSQDASRSPQSLSDTGYSSDGISSSQSEITGVVQQEVEQLDSAGVTGPHPPSPSEIHKVGSSMRPLLQAQGLAPSERSKPLSSGTGEEQKQRPHSLSITPEAFDSDEELEDILEEDEDSAEWRRRREQQDTAESSDDFGSQLRHDYVEDSSEGGLSPLPPQPPARAAELTDEDFMRRQILEMSAEEDNLEEDDTATSGRGLAKHGTQKGGPRPRPEPSQEPAALPKRRLPHNATTGYEELLPEGGSAEATDGSGTLQGGLRRFKTIELNSTGSYGHELDLGQGPDPSLDREPELEMESLTGSPEDRSRGEHSSTLPASTPSYTSGTSPTSLSSLEEDSDSSPSRRQRLEEAKQQRKARHRSHGPLLPTIEDSSEEEELREEEELLREQEKMREVEQQRIRSTARKTRRDKEELRAQRRRERSKTPPSNLSPIEDASPTEELRQAAEMEELHRSSCSEYSPSPSLDSEAEALDGGPSRLYKSGSEYNLPTFMSLYSPTETPSGSSTTPSSGRPLKSAEEAYEEMMRKAELLQRQQGQAAGARGPHGGPSQPTGPRGLGSFEYQDTTDREYGQAAQPAAEGTPASLGAAVYEEILQTSQSIVRMRQASSRDLAFAEDKKKEKQFLNAESAYMDPMKQNGGPLTPGTSPTQLAAPVSFSTPTSSDSSGGRVIPDVRVTQHFAKETQDPLKLHSSPASPSSASKEIGMPFSQGPGTPATTAVAPCPAGLPRGYMTPASPAGSERSPSPSSTAHSYGHSPTTANYGSQTEDLPQAPSGLAAAGRAAREKPLSASDGEGGTPQPSRAYSYFASSSPPLSPSSPSESPTFSPGKMGPRATAEFSTQTPSPAPASDMPRSPGAPTPSPMVAQGTQTPHRPSTPRLVWQESSQEAPFMVITLASDASSQTRMVHASASTSPLCSPTETQPTTHGYSQTTPPSVSQLPPEPPGPPGFPRVPSAGADGPLALYGWGALPAENISLCRISSVPGTSRVEPGPRTPGTAVVDLRTAVKPTPIILTDQGMDLTSLAVEARKYGLALDPIPGRQSTAVQPLVINLNAQEHTFLATATTVSITMASSVFMAQQKQPVVYGDPYQSRLDFGQGGGSPVCLAQVKQVEQAVQTAPYRSGPRGRPREAKFARYNLPNQVAPLARRDVLITQMGTAQSIGLKPGPVPEPGAEPHRATPAELRSHALPGARKPHTVVVQMGEGTAGTVTTLLPEEPAGALDLTGMRPESQLACCDMVYKLPFGSSCTGTFHPAPSVPEKSMADAAPPGQSSSPFYGPRDPEPPEPPTYRAQGVVGPGPHEEQRPYPQGLPGRLYSSMSDTNLAEAGLNYHAQRIGQLFQGPGRDSAMDLSSLKHSYSLGFADGRYLGQGLQYGSVTDLRHPTDLLAHPLPMRRYSSVSNIYSDHRYGPRGDAVGFQEASLAQYSATTAREISRMCAALNSMDQYGGRHGSGGGGPDLVQYQPQHGPGLSAPQSLVPLRPGLLGNPTFPEGHPSPGNLAQYGPAAGQGTAVRQLLPSTATVRAADGMIYSTINTPIAATLPITTQPASVLRPMVRGGMYRPYASGGITAVPLTSLTRVPMIAPRVPLGPTGLYRYPAPSRFPIASSVPPAEGPVYLGKPAAAKAPGAGGPSRPEMPVGAAREEPLPTTTPAAIKEAAGAPAPAPLAGQKPPADAAPGGGSGALSRPGFEKEEASQEERQRKQQEQLLQLERERVELEKLRQLRLQEELERERVELQRHREEEQLLVQRELQELQTIKHHVLQQQQEERQAQFALQREQLAQQRLQLEQIQQLQQQLQQQLEEQKQRQKAPFPAACEAPGRGPPLAAAELAQNGQYWPPLTHAAFIAMAGPEGLGQPREPVLHRGLPSSASDMSLQTEEQWEASRSGIKKRHSMPRLRDACELESGTEPCVVRRIADSSVQTDDEDGESRYLLSRRRRARRSADCSVQTDDEDSAEWEQPVRRRRSRLPRHSDSGSDSKHDATASSSSAAATVRAMSSVGIQTISDCSVQTEPDQLPRVSPAIHITAATDPKVEIVRYISAPEKTGRGESLACQTEPDGQAQGVAGPQLVGPTAISPYLPGIQIVTPGPLGRFEKKKPDPLEIGYQAHLPPESLSQLVSRQPPKSPQVLYSPVSPLSPHRLLDTSFASSERLNKAHVSPQKHFTADSALRQQTLPRPMKTLQRSLSDPKPLSPTAEESAKERFSLYQHQGGLGSQVSALPPNSLVRKVKRTLPSPPPEEAHLPLAGQASPQLYAASLLQRGLTGPTTVPATKASLLRELDRDLRLVEHESTKLRKKQAELDEEEKEIDAKLKYLELGITQRKESLAKDRGGRDYPPLRGLGEHRDYLSDSELNQLRLQGCTTPAGQFVDFPATAAAPATPSGPTAFQQPRFQPPAPQYSAGSGGPTQNGFPAHQAPTYPGPSTYPAPAFPPGASYPAEPGLPNQQAFRPTGHYAGQTPMPTTQSTLFPVPADSRAPLQKPRQTSLADLEQKVPTNYEVIASPVVPMSSAPSETSYSGPAVSSGYEQGKVPEVPRAGDRGSVSQSPAPTYPSDSHYTSLEQNVPRNYVMIDDISELTKDSTSTAPDSQRLEPLGPGSSGRPGKEPGEPGVLDGPTLPCCYARGEEESEEDSYDPRGKGGHLRSMESNGRPASTHYYGDSDYRHGARVEKYGPGPMGPKHPSKSLAPAAISSKRSKHRKQGMEQKISKFSPIEEAKDVESDLASYPPPAVSSSLVSRGRKFQDEITYGLKKNVYEQQKYYGMSSRDAVEDDRIYGGSSRSRAPSAYSGEKLSSHDFSGWGKGYEREREAVERLQKAGPKPSSLSMAHSRVRPPMRSQASEEESPVSPLGRPRPAGGPLPPGGDTCPQFCSSHSMPDVQEHVKDGPRAHAYKREEGYILDDSHCVVSDSEAYHLGQEETDWFDKPRDARSDRFRHHGGHAVSSSSQKRGPARHSYHDYDEPPEEGLWPHDEGGPGRHASAKEHRHGDHGRHSGRHTGEEPGRRAAKPHARDLGRHEARPHSQPSSAPAMPKKGQPGYPSSAEYSQPSRASSAYHHASDSKKGSRQAHSGPAALQSKAEPQAQPQLQGRQAAPGPQQSQSPSSRQIPSGAASRQPQTQQQQQGLGLQPPQQALTQARLQQQSQPTTRGSAPAASQPAGKPQPGPSTATGPQPAGPPRAEQTNGSKGTAKAPQQGRAPQAQPAPGPGPAGVKAGARPGGTPGAPAGQPGADGESVFSKILPGGAAEQAGKLTEAVSAFGKKFSSFW

SEQ ID NO: 8408 - protein, 402 aa, Homo sapiens
  Payload ID: 1746;
  Gene Symbol: BSPRY;
  Gene Name: B-box and SPRY domain containing;
  Uniprot ID:  Q5W0U4;
  ENSP ID: ENSP00000363298
MSAEGAEPGPGSGSGPGPGPLCPEHGQALSWFCGSERRPVCAACAGLGGRCRGHRIRRAEERAEELRNKIVDQCERLQLQSAAITKYVADVLPGKNQRAVSMASAARELVIQRLSLVRSLCESEEQRLLEQVHGEEERAHQSILTQRVHWAEALQKLDTIRTGLVGMLTHLDDLQLIQKEQEIFERTEEAEGILDPQESEMLNFNEKCTRSPLLTQLWATAVLGSLSGTEDIRIDERTVSPFLQLSDDRKTLTFSTKKSKACADGPERFDHWPNALAATSFQNGLHAWMVNVQNSCAYKVGVASGHLPRKGSGSDCRLGHNAFSWVFSRYDQEFRFSHNGQHEPLGLLRGPAQLGVVLDLQVQELLFYEPASGTVLCAHHVSFPGPLFPVFAVADQTISIVR

SEQ ID NO: 8409 - protein, 70 aa, Homo sapiens
  Payload ID: 1747;
  Gene Symbol: BBIP1;
  Gene Name: BBSome interacting prt 1;
  Uniprot ID:  A8MTZ0;
  ENSP ID: ENSP00000431936
MAEVKSMFREVLPKQGPLFVEDIMTMVLCKPKLLPLKSLTLEKLEKMHQAAQNTIRQQEMAEKDQRQITH

SEQ ID NO: 8410 - protein, 67 aa, Homo sapiens
  Payload ID: 1747;
  Gene Symbol: BBIP1;
  Gene Name: BBSome interacting prt 1;
  Uniprot ID:  A8MTZ0;
  ENSP ID: ENSP00000432274
MLKAAAKRPELSGPLFVEDIMTMVLCKPKLLPLKSLTLEKLEKMHQAAQNTIRQQEMAEKDQRQITH

SEQ ID NO: 8411 - protein, 70 aa, Homo sapiens; identical to SEQ ID NO: 8409
  Payload ID: 1747;
  Gene Symbol: BBIP1;
  Gene Name: BBSome interacting prt 1;
  Uniprot ID:  A8MTZ0;
  ENSP ID: ENSP00000432849

SEQ ID NO: 8412 - protein, 103 aa, Homo sapiens
  Payload ID: 1747;
  Gene Symbol: BBIP1;
  Gene Name: BBSome interacting prt 1;
  Uniprot ID:  A8MTZ0;
  ENSP ID: ENSP00000433157
MLKAAAKRPELSGLLKFNNYGILSESPLTSQRTTWLLYQSPSFIPGFAYPSRCLKTIGGVYKQARKKHYIQQLRYGRSEVNVPGSSSKARATVCGRYNDNGAV

SEQ ID NO: 8413 - protein, 45 aa, Homo sapiens
  Payload ID: 1747;
  Gene Symbol: BBIP1;
  Gene Name: BBSome interacting prt 1;
  ENSP ID: ENSP00000435795
MLKAAAKRPELSGKNTISNNSDMAEVKSMFREVLPKQEKGSQCVA

SEQ ID NO: 8414 - protein, 92 aa, Homo sapiens
  Payload ID: 1747;
  Gene Symbol: BBIP1;
  Gene Name: BBSome interacting prt 1;
  Uniprot ID:  A8MTZ0;
  ENSP ID: ENSP00000436622
MLKAAAKRPELSGKNTISNNSDMAEVKSMFREVLPKQGPLFVEDIMTMVLCKPKLLPLKSLTLEKLEKMHQAAQNTIRQQEMAEKDQRQITH

SEQ ID NO: 8415 - protein, 92 aa, Homo sapiens; identical to SEQ ID NO: 8414
  Payload ID: 1747;
  Gene Symbol: BBIP1;
  Gene Name: BBSome interacting prt 1;
  Uniprot ID:  A8MTZ0;
  ENSP ID: ENSP00000474675

SEQ ID NO: 8416 - protein, 419 aa, Homo sapiens
  Payload ID: 1748;
  Gene Symbol: BCS1L;
  Gene Name: BC1 (ubiquinol-cytochrome c reductase) synthesis-like;
  Uniprot ID:  Q9Y276;
  ENSP ID: ENSP00000352219
MPLSDFILALKDNPYFGAGFGLVGVGTALALARKGVQLGLVAFRRHYMITLEVPARDRSYAWLLSWLTRHSTRTQHLSVETSYLQHESGRISTKFEFVPSPGNHFIWYRGKWIRVERSREMQMIDLQTGTPWESVTFTALGTDRKVFFNILEEARELALQQEEGKTVMYTAVGSEWRPFGYPRRRRPLNSVVLQQGLADRIVRDVQEFIDNPKWYTDRGIPYRRGYLLYGPPGCGKSSFITALAGELEHSICLLSLTDSSLSDDRLNHLLSVAPQQSLVLLEDVDAAFLSRDLAVENPVKYQGLGRLTFSGLLNALDGVASTEARIVFMTTNHVDRLDPALIRPGRVDLKEYVGYCSHWQLTQMFQRFYPGQAPSLAENFAEHVLRATNQISPAQVQGYFMLYKNDPVGAIHNAESLRR

SEQ ID NO: 8417 - protein, 419 aa, Homo sapiens; identical to SEQ ID NO: 8416
  Payload ID: 1748;
  Gene Symbol: BCS1L;
  Gene Name: BC1 (ubiquinol-cytochrome c reductase) synthesis-like;
  Uniprot ID:  Q9Y276;
  ENSP ID: ENSP00000375957

SEQ ID NO: 8418 - protein, 419 aa, Homo sapiens; identical to SEQ ID NO: 8416
  Payload ID: 1748;
  Gene Symbol: BCS1L;
  Gene Name: BC1 (ubiquinol-cytochrome c reductase) synthesis-like;
  Uniprot ID:  Q9Y276;
  ENSP ID: ENSP00000375958

SEQ ID NO: 8419 - protein, 419 aa, Homo sapiens; identical to SEQ ID NO: 8416
  Payload ID: 1748;
  Gene Symbol: BCS1L;
  Gene Name: BC1 (ubiquinol-cytochrome c reductase) synthesis-like;
  Uniprot ID:  Q9Y276;
  ENSP ID: ENSP00000375959

SEQ ID NO: 8420 - protein, 121 aa, Homo sapiens
  Payload ID: 1748;
  Gene Symbol: BCS1L;
  Gene Name: BC1 (ubiquinol-cytochrome c reductase) synthesis-like;
  ENSP ID: ENSP00000389402
  MOD_RES (1)..(1): Any amino acid
XIPYRRGYLLYGPPGCGKSSFITALAGELEHSICLLSLTDSSLSDDRLNHLLSVAPQQSLVLLEDVDAAFLSRDLAVENPVKYQGLGRLTFSGLLNALDGVASTEARIVFMTTNHVDRHLP

SEQ ID NO: 8421 - protein, 76 aa, Homo sapiens
  Payload ID: 1748;
  Gene Symbol: BCS1L;
  Gene Name: BC1 (ubiquinol-cytochrome c reductase) synthesis-like;
  ENSP ID: ENSP00000391007
MPLSDFILALKDNPYFGAGFGLVGVGTALALARKGVQLGLVAFRRHYMITLEVPARDRSYAWLLSWLTRHSTRTQH

SEQ ID NO: 8422 - protein, 206 aa, Homo sapiens
  Payload ID: 1748;
  Gene Symbol: BCS1L;
  Gene Name: BC1 (ubiquinol-cytochrome c reductase) synthesis-like;
  ENSP ID: ENSP00000395440
MPLSDFILALKDNPYFGAGFGLVGVGTALALARKGVQLGLVAFRRHYMITLEVPARDRSYAWLLSWLTRHSTRTQHLSVETSYLQHESGRISTKFEFVPSPGNHFIWYRGKWIRVERSREMQMIDLQTGTPWESVTFTALGTDRKVFFNILEEARELALQQEEGKTVMYTAVGSEWRPFGYPRRRRPLNSVVLQQGLADRIVRDVQ

SEQ ID NO: 8423 - protein, 110 aa, Homo sapiens
  Payload ID: 1748;
  Gene Symbol: BCS1L;
  Gene Name: BC1 (ubiquinol-cytochrome c reductase) synthesis-like;
  ENSP ID: ENSP00000397293
MPLSDFILALKDNPYFGAGFGLVGVGTALALARKGVQLGLVAFRRHYMITLEVPARDRSYAWLLSWLTRHSTRTQHLSVETSYLQHESGRISTKFEFVPSPGNHFIWYRG

SEQ ID NO: 8424 - protein, 206 aa, Homo sapiens; identical to SEQ ID NO: 8422
  Payload ID: 1748;
  Gene Symbol: BCS1L;
  Gene Name: BC1 (ubiquinol-cytochrome c reductase) synthesis-like;
  ENSP ID: ENSP00000398957

SEQ ID NO: 8425 - protein, 419 aa, Homo sapiens; identical to SEQ ID NO: 8416
  Payload ID: 1748;
  Gene Symbol: BCS1L;
  Gene Name: BC1 (ubiquinol-cytochrome c reductase) synthesis-like;
  Uniprot ID:  Q9Y276;
  ENSP ID: ENSP00000404999

SEQ ID NO: 8426 - protein, 419 aa, Homo sapiens; identical to SEQ ID NO: 8416
  Payload ID: 1748;
  Gene Symbol: BCS1L;
  Gene Name: BC1 (ubiquinol-cytochrome c reductase) synthesis-like;
  Uniprot ID:  Q9Y276;
  ENSP ID: ENSP00000406494

SEQ ID NO: 8427 - protein, 150 aa, Homo sapiens
  Payload ID: 1748;
  Gene Symbol: BCS1L;
  Gene Name: BC1 (ubiquinol-cytochrome c reductase) synthesis-like;
  ENSP ID: ENSP00000412729
MQMIDLQTGTPWESVTFTALGTDRKVFFNILEEARELALQQEEGKTVMYTAVGSEWRPFGYPRRRRPLNSVVLQQGLADRIVRDVQEFIDNPKWYTDRGIPYRRGYLLYGPPGCGKSSFITALAGELEHSICLLSLTDSSLSDDRLNHLL

SEQ ID NO: 8428 - protein, 419 aa, Homo sapiens; identical to SEQ ID NO: 8416
  Payload ID: 1748;
  Gene Symbol: BCS1L;
  Gene Name: BC1 (ubiquinol-cytochrome c reductase) synthesis-like;
  Uniprot ID:  Q9Y276;
  ENSP ID: ENSP00000413908

SEQ ID NO: 8429 - protein, 201 aa, Homo sapiens
  Payload ID: 1748;
  Gene Symbol: BCS1L;
  Gene Name: BC1 (ubiquinol-cytochrome c reductase) synthesis-like;
  ENSP ID: ENSP00000416169
  MOD_RES (1)..(1): Any amino acid
XEAFLTDVATCFMGPLVAERAVLSLAGELEHSICLLSLTDSSLSDDRLNHLLSVAPQQSLVLLEDVDAAFLSRDLAVENPVKYQGLGRLTFSGLLNALDGVASTEARIVFMTTNHVDRLDPALIRPGRVDLKEYVGYCSHWQLTQMFQRFYPGQAPSLAENFAEHVLRATNQISPAQVQGYFMLYKNDPVGAIHNAESLRR

SEQ ID NO: 8430 - protein, 292 aa, Homo sapiens
  Payload ID: 1749;
  Gene Symbol: BCDIN3D;
  Gene Name: BCDIN3 domain containing;
  Uniprot ID:  Q7Z5W3;
  ENSP ID: ENSP00000335201
MAVPTELDGGSVKETAAEEESRVLAPGAAPFGNFPHYSRFHPPEQRLRLLPPELLRQLFPESPENGPILGLDVGCNSGDLSVALYKHFLSLPDGETCSDASREFRLLCCDIDPVLVKRAEKECPFPDALTFITLDFMNQRTRKVLLSSFLSQFGRSVFDIGFCMSITMWIHLNHGDHGLWEFLAHLSSLCHYLLVEPQPWKCYRAAARRLRKLGLHDFDHFHSLAIRGDMPNQIVQILTQDHGMELICCFGNTSWDRSLLLFRAKQTIETHPIPESLIEKGKEKNRLSFQKQ

SEQ ID NO: 8431 - protein, 179 aa, Homo sapiens
  Payload ID: 1750;
  Gene Symbol: BLACE;
  Gene Name: B-cell acute lymphoblastic leukemia expressed;
  Uniprot ID:  A4D250;
  ENSP ID: ENSP00000367360
MMKDIIPASSWASEESTDLQNGSFPLSVAPRSEFPRRRALEDWLLSVFLADQAESEGQLVLERVRDTPPPVTSPRGDGICVSRGKAPSSPGGSTHAWLYLTRHFPWSPFPHGGWTDTSEPCVLETLGGSSLAALRGNSLWVQSSGACAFCVYESLIEQSLPNERFEELLLGPSPGEVMK

SEQ ID NO: 8432 - protein, 179 aa, Homo sapiens; identical to SEQ ID NO: 8431
  Payload ID: 1750;
  Gene Symbol: BLACE;
  Gene Name: B-cell acute lymphoblastic leukemia expressed;
  Uniprot ID:  A4D250;
  ENSP ID: ENSP00000484754

SEQ ID NO: 8433 - protein, 233 aa, Homo sapiens
  Payload ID: 1751;
  Gene Symbol: BCL10;
  Gene Name: B-cell CLL/lymphoma 10;
  Uniprot ID:  O95999;
  ENSP ID: ENSP00000359612
MEPTAPSLTEEDLTEVKKDALENLRVYLCEKIIAERHFDHLRAKKILSREDTEEISCRTSSRKRAGKLLDYLQENPKGLDTLVESIRREKTQNFLIQKITDEVLKLRNIKLEHLKGLKCSSCEPFPDGATNNLSRSNSDESNFSEKLRASTVMYHPEGESSTTPFFSTNSSLNLPVLEVGRTENTIFSSTTLPRPGDPGAPPLPPDLQLEEEGTCANSSEMFLPLRSRTVSRQ

SEQ ID NO: 8434 - protein, 156 aa, Homo sapiens
  Payload ID: 1751;
  Gene Symbol: BCL10;
  Gene Name: B-cell CLL/lymphoma 10;
  ENSP ID: ENSP00000480561
MEPTAPSLTEEDLTEVKKDALENLRVYLCEKIIAERHFDHLRAKKILSREDTEEISCRTSSRKRAGKLLDYLQENPKGLDTLVESIRREKTQNFLIQKITDEVLKLRNIKLEHLKDGATNNLSRSNSDESNFSEKLRASTVMYHPEGESSTTPFFY

SEQ ID NO: 8435 - protein, 835 aa, Homo sapiens
  Payload ID: 1752;
  Gene Symbol: BCL11A;
  Gene Name: B-cell CLL/lymphoma 11A (zinc finger prt);
  Uniprot ID:  Q9H165;
  ENSP ID: ENSP00000338774
MSRRKQGKPQHLSKREFSPEPLEAILTDDEPDHGPLGAPEGDHDLLTCGQCQMNFPLGDILIFIEHKRKQCNGSLCLEKAVDKPPSPSPIEMKKASNPVEVGIQVTPEDDDCLSTSSRGICPKQEHIADKLLHWRGLSSPRSAHGALIPTPGMSAEYAPQGICKDEPSSYTCTTCKQPFTSAWFLLQHAQNTHGLRIYLESEHGSPLTPRVGIPSGLGAECPSQPPLHGIHIADNNPFNLLRIPGSVSREASGLAEGRFPPTPPLFSPPPRHHLDPHRIERLGAEEMALATHHPSAFDRVLRLNPMAMEPPAMDFSRRLRELAGNTSSPPLSPGRPSPMQRLLQPFQPGSKPPFLATPPLPPLQSAPPPSQPPVKSKSCEFCGKTFKFQSNLVVHRRSHTGEKPYKCNLCDHACTQASKLKRHMKTHMHKSSPMTVKSDDGLSTASSPEPGTSDLVGSASSALKSVVAKFKSENDPNLIPENGDEEEEEDDEEEEEEEEEEEEELTESERVDYGFGLSLEAARHHENSSRGAVVGVGDESRALPDVMQGMVLSSMQHFSEAFHQVLGEKHKRGHLAEAEGHRDTCDEDSVAGESDRIDDGTVNGRGCSPGESASGGLSKKLLLGSPSSLSPFSKRIKLEKEFDLPPAAMPNTENVYSQWLAGYAASRQLKDPFLSFGDSRQSPFASSSEHSSENGSLRFSTPPGELDGGISGRSGTGSGGSTPHISGPGPGRPSSKEGRRSDTCEYCGKVFKNCSNLTVHRRSHTGERPYKCELCNYACAQSSKLTRHMKTHGQVGKDVYKCEICKMPFSVYSTLEKHMKKWHSDRVLNNDIKTE

SEQ ID NO: 8436 - protein, 773 aa, Homo sapiens
  Payload ID: 1752;
  Gene Symbol: BCL11A;
  Gene Name: B-cell CLL/lymphoma 11A (zinc finger prt);
  Uniprot ID:  Q9H165;
  ENSP ID: ENSP00000349300
MSRRKQGKPQHLSKREFSPEPLEAILTDDEPDHGPLGAPEGDHDLLTCGQCQMNFPLGDILIFIEHKRKQCNGSLCLEKAVDKPPSPSPIEMKKASNPVEVGIQVTPEDDDCLSTSSRGICPKQEHIADKLLHWRGLSSPRSAHGALIPTPGMSAEYAPQGICKDEPSSYTCTTCKQPFTSAWFLLQHAQNTHGLRIYLESEHGSPLTPRVGIPSGLGAECPSQPPLHGIHIADNNPFNLLRIPGSVSREASGLAEGRFPPTPPLFSPPPRHHLDPHRIERLGAEEMALATHHPSAFDRVLRLNPMAMEPPAMDFSRRLRELAGNTSSPPLSPGRPSPMQRLLQPFQPGSKPPFLATPPLPPLQSAPPPSQPPVKSKSCEFCGKTFKFQSNLVVHRRSHTGEKPYKCNLCDHACTQASKLKRHMKTHMHKSSPMTVKSDDGLSTASSPEPGTSDLVGSASSALKSVVAKFKSENDPNLIPENGDEEEEEDDEEEEEEEEEEEEELTESERVDYGFGLSLEAARHHENSSRGAVVGVGDESRALPDVMQGMVLSSMQHFSEAFHQVLGEKHKRGHLAEAEGHRDTCDEDSVAGESDRIDDGTVNGRGCSPGESASGGLSKKLLLGSPSSLSPFSKRIKLEKEFDLPPAAMPNTENVYSQWLAGYAASRQLKDPFLSFGDSRQSPFASSSEHSSENGSLRFSTPPGELDGGISGRSGTGSGGSTPHISGPGPGRPSSKEGRRSDTCSSHTPIRRSTQRAQDVWQFSDGSSRALKF

SEQ ID NO: 8437 - protein, 801 aa, Homo sapiens
  Payload ID: 1752;
  Gene Symbol: BCL11A;
  Gene Name: B-cell CLL/lymphoma 11A (zinc finger prt);
  Uniprot ID:  Q9H165;
  ENSP ID: ENSP00000351307
MSRRKQGKPQHLSKREFSPEPLEAILTDDEPDHGPLGAPEGDHDLLTCGQCQMNFPLGDILIFIEHKRKQCNGSLCLEKAVDKPPSPSPIEMKKASNPVEVGIQVTPEDDDCLSTSSRGICPKQEHIAGKDEPSSYTCTTCKQPFTSAWFLLQHAQNTHGLRIYLESEHGSPLTPRVGIPSGLGAECPSQPPLHGIHIADNNPFNLLRIPGSVSREASGLAEGRFPPTPPLFSPPPRHHLDPHRIERLGAEEMALATHHPSAFDRVLRLNPMAMEPPAMDFSRRLRELAGNTSSPPLSPGRPSPMQRLLQPFQPGSKPPFLATPPLPPLQSAPPPSQPPVKSKSCEFCGKTFKFQSNLVVHRRSHTGEKPYKCNLCDHACTQASKLKRHMKTHMHKSSPMTVKSDDGLSTASSPEPGTSDLVGSASSALKSVVAKFKSENDPNLIPENGDEEEEEDDEEEEEEEEEEEEELTESERVDYGFGLSLEAARHHENSSRGAVVGVGDESRALPDVMQGMVLSSMQHFSEAFHQVLGEKHKRGHLAEAEGHRDTCDEDSVAGESDRIDDGTVNGRGCSPGESASGGLSKKLLLGSPSSLSPFSKRIKLEKEFDLPPAAMPNTENVYSQWLAGYAASRQLKDPFLSFGDSRQSPFASSSEHSSENGSLRFSTPPGELDGGISGRSGTGSGGSTPHISGPGPGRPSSKEGRRSDTCEYCGKVFKNCSNLTVHRRSHTGERPYKCELCNYACAQSSKLTRHMKTHGQVGKDVYKCEICKMPFSVYSTLEKHMKKWHSDRVLNNDIKTE

SEQ ID NO: 8438 - protein, 243 aa, Homo sapiens
  Payload ID: 1752;
  Gene Symbol: BCL11A;
  Gene Name: B-cell CLL/lymphoma 11A (zinc finger prt);
  Uniprot ID:  Q9H165;
  ENSP ID: ENSP00000352648
MSRRKQGKPQHLSKREFSPEPLEAILTDDEPDHGPLGAPEGDHDLLTCGQCQMNFPLGDILIFIEHKRKQCNGSLCLEKAVDKPPSPSPIEMKKASNPVEVGIQVTPEDDDCLSTSSRGICPKQEHIADKLLHWRGLSSPRSAHGALIPTPGMSAEYAPQGICKDEPSSYTCTTCKQPFTSAWFLLQHAQNTHGLRIYLESEHGSPLTPRVLHTPPFGVVPRELKMCGSFRMEAREPLSSEKI

SEQ ID NO: 8439 - protein, 142 aa, Homo sapiens
  Payload ID: 1752;
  Gene Symbol: BCL11A;
  Gene Name: B-cell CLL/lymphoma 11A (zinc finger prt);
  ENSP ID: ENSP00000487844
MSRRKQGKPQHLSKREFSPEPLEAILTDDEPDHGPLGAPEGDHDLLTCGQCQMNFPLGDILIFIEHKRKQCNGSLCLEKAVDKPPSPSPIEMKKASNPVEVGIQVTPEDDDCLSTSSRGICPKQEHIAAQTELEDVFVYLMV

SEQ ID NO: 8440 - protein, 191 aa, Homo sapiens
  Payload ID: 1752;
  Gene Symbol: BCL11A;
  Gene Name: B-cell CLL/lymphoma 11A (zinc finger prt);
  ENSP ID: ENSP00000488390
MNFPLGDILIFIEHKRKQCNGSLCLEKAVDKPPSPSPIEMKKASNPVEVGIQVTPEDDDCLSTSSRGICPKQEHIADKLLHWRGLSSPRSAHGALIPTPGMSAEYAPQGICKDEPSSYTCTTCKQPFTSAWFLLQHAQNTHGLRIYLESEHGSPLTPRVLHTPPFGVVPRELKMCGSFRMEAREPLSSEKI

SEQ ID NO: 8441 - protein, 17 aa, Homo sapiens
  Payload ID: 1752;
  Gene Symbol: BCL11A;
  Gene Name: B-cell CLL/lymphoma 11A (zinc finger prt);
  ENSP ID: ENSP00000488636
  MOD_RES (1)..(1): Any amino acid
XKKWHSDRVLNNDIKTE

SEQ ID NO: 8442 - protein, 167 aa, Homo sapiens
  Payload ID: 1752;
  Gene Symbol: BCL11A;
  Gene Name: B-cell CLL/lymphoma 11A (zinc finger prt);
  ENSP ID: ENSP00000488886
MSRRKQGKPQHLSKREFSPEPLEAILTDDEPDHGPLGAPEGDHDLLTCGQCQMNFPLGDILIFIEHKRKQCNGSLCLEKAVDKPPSPSPIEMKKASNPVEVGIQVTPEDDDCLSTSSRGICPKQEHIAGNPRGSSEKSPGCQCKGPALSPRRPSGKCTGLQLFPRPL

SEQ ID NO: 8443 - protein, 823 aa, Homo sapiens
  Payload ID: 1753;
  Gene Symbol: BCL11B;
  Gene Name: B-cell CLL/lymphoma 11B (zinc finger prt);
  Uniprot ID:  Q9C0K0;
  ENSP ID: ENSP00000280435
MSRRKQGNPQHLSQRELITPEADHVEAAILEEDEGLEIEEPSGLGLMVGGPDPDLLTCGQCQMNFPLGDILVFIEHKRKQCGGSLGACYDKALDKDSPPPSSRSELRKVSEPVEIGIQVTPDEDDHLLSPTKGICPKQENIAGKDEPSSYICTTCKQPFNSAWFLLQHAQNTHGFRIYLEPGPASSSLTPRLTIPPPLGPEAVAQSPLMNFLGDSNPFNLLRMTGPILRDHPGFGEGRLPGTPPLFSPPPRHHLDPHRLSAEEMGLVAQHPSAFDRVMRLNPMAIDSPAMDFSRRLRELAGNSSTPPPVSPGRGNPMHRLLNPFQPSPKSPFLSTPPLPPMPPGGTPPPQPPAKSKSCEFCGKTFKFQSNLIVHRRSHTGEKPYKCQLCDHACSQASKLKRHMKTHMHKAGSLAGRSDDGLSAASSPEPGTSELAGEGLKAADGDFRHHESDPSLGHEPEEEDEEEEEEEEELLLENESRPESSFSMDSELSRNRENGGGGVPGVPGAGGGAAKALADEKALVLGKVMENVGLGALPQYGELLADKQKRGAFLKRAAGGGDAGDDDDAGGCGDAGAGGAVNGRGGGFAPGTEPFPGLFPRKPAPLPSPGLNSAAKRIKVEKDLELPPAALIPSENVYSQWLVGYAASRHFMKDPFLGFTDARQSPFATSSEHSSENGSLRFSTPPGDLLDGGLSGRSGTASGGSTPHLGGPGPGRPSSKEGRRSDTCEYCGKVFKNCSNLTVHRRSHTGERPYKCELCNYACAQSSKLTRHMKTHGQIGKEVYRCDICQMPFSVYSTLEKHMKKWHGEHLLTNDVKIEQAERS

SEQ ID NO: 8444 - protein, 894 aa, Homo sapiens
  Payload ID: 1753;
  Gene Symbol: BCL11B;
  Gene Name: B-cell CLL/lymphoma 11B (zinc finger prt);
  Uniprot ID:  Q9C0K0;
  ENSP ID: ENSP00000349723
MSRRKQGNPQHLSQRELITPEADHVEAAILEEDEGLEIEEPSGLGLMVGGPDPDLLTCGQCQMNFPLGDILVFIEHKRKQCGGSLGACYDKALDKDSPPPSSRSELRKVSEPVEIGIQVTPDEDDHLLSPTKGICPKQENIAGPCRPAQLPAVAPIAASSHPHSSVITSPLRALGALPPCLPLPCCSARPVSGDGTQGEGQTEAPFGCQCQLSGKDEPSSYICTTCKQPFNSAWFLLQHAQNTHGFRIYLEPGPASSSLTPRLTIPPPLGPEAVAQSPLMNFLGDSNPFNLLRMTGPILRDHPGFGEGRLPGTPPLFSPPPRHHLDPHRLSAEEMGLVAQHPSAFDRVMRLNPMAIDSPAMDFSRRLRELAGNSSTPPPVSPGRGNPMHRLLNPFQPSPKSPFLSTPPLPPMPPGGTPPPQPPAKSKSCEFCGKTFKFQSNLIVHRRSHTGEKPYKCQLCDHACSQASKLKRHMKTHMHKAGSLAGRSDDGLSAASSPEPGTSELAGEGLKAADGDFRHHESDPSLGHEPEEEDEEEEEEEEELLLENESRPESSFSMDSELSRNRENGGGGVPGVPGAGGGAAKALADEKALVLGKVMENVGLGALPQYGELLADKQKRGAFLKRAAGGGDAGDDDDAGGCGDAGAGGAVNGRGGGFAPGTEPFPGLFPRKPAPLPSPGLNSAAKRIKVEKDLELPPAALIPSENVYSQWLVGYAASRHFMKDPFLGFTDARQSPFATSSEHSSENGSLRFSTPPGDLLDGGLSGRSGTASGGSTPHLGGPGPGRPSSKEGRRSDTCEYCGKVFKNCSNLTVHRRSHTGERPYKCELCNYACAQSSKLTRHMKTHGQIGKEVYRCDICQMPFSVYSTLEKHMKKWHGEHLLTNDVKIEQAERS

SEQ ID NO: 8445 - protein, 700 aa, Homo sapiens
  Payload ID: 1753;
  Gene Symbol: BCL11B;
  Gene Name: B-cell CLL/lymphoma 11B (zinc finger prt);
  ENSP ID: ENSP00000387419
MSRRKQGNPQHLSQRELITRKDEPSSYICTTCKQPFNSAWFLLQHAQNTHGFRIYLEPGPASSSLTPRLTIPPPLGPEAVAQSPLMNFLGDSNPFNLLRMTGPILRDHPGFGEGRLPGTPPLFSPPPRHHLDPHRLSAEEMGLVAQHPSAFDRVMRLNPMAIDSPAMDFSRRLRELAGNSSTPPPVSPGRGNPMHRLLNPFQPSPKSPFLSTPPLPPMPPGGTPPPQPPAKSKSCEFCGKTFKFQSNLIVHRRSHTGEKPYKCQLCDHACSQASKLKRHMKTHMHKAGSLAGRSDDGLSAASSPEPGTSELAGEGLKAADGDFRHHESDPSLGHEPEEEDEEEEEEEEELLLENESRPESSFSMDSELSRNRENGGGGVPGVPGAGGGAAKALADEKALVLGKVMENVGLGALPQYGELLADKQKRGAFLKRAAGGGDAGDDDDAGGCGDAGAGGAVNGRGGGFAPGTEPFPGLFPRKPAPLPSPGLNSAAKRIKVEKDLELPPAALIPSENVYSQWLVGYAASRHFMKDPFLGFTDARQSPFATSSEHSSENGSLRFSTPPGDLLDGGLSGRSGTASGGSTPHLGGPGPGRPSSKEGRRSDTCEYCGKVFKNCSNLTVHRRSHTGERPYKCELCNYACAQSSKLTRHMKTHGQIGKEVYRCDICQMPFSVYSTLEKHMKKWHGEHLLTNDVKIEQAERS

SEQ ID NO: 8446 - protein, 239 aa, Homo sapiens
  Payload ID: 1754;
  Gene Symbol: BCL2;
  Gene Name: B-cell CLL/lymphoma 2;
  Uniprot ID:  P10415;
  ENSP ID: ENSP00000329623
MAHAGRTGYDNREIVMKYIHYKLSQRGYEWDAGDVGAAPPGAAPAPGIFSSQPGHTPHPAASRDPVARTSPLQTPAAPGAAAGPALSPVPPVVHLTLRQAGDDFSRRYRRDFAEMSSQLHLTPFTARGRFATVVEELFRDGVNWGRIVAFFEFGGVMCVESVNREMSPLVDNIALWMTEYLNRHLHTWIQDNGGWDAFVELYGPSMRPLFDFSWLSLKTLLSLALVGACITLGAYLGHK

SEQ ID NO: 8447 - protein, 239 aa, Homo sapiens; identical to SEQ ID NO: 8446
  Payload ID: 1754;
  Gene Symbol: BCL2;
  Gene Name: B-cell CLL/lymphoma 2;
  Uniprot ID:  P10415;
  ENSP ID: ENSP00000381185

SEQ ID NO: 8448 - protein, 205 aa, Homo sapiens
  Payload ID: 1754;
  Gene Symbol: BCL2;
  Gene Name: B-cell CLL/lymphoma 2;
  Uniprot ID:  P10415;
  ENSP ID: ENSP00000466417
MAHAGRTGYDNREIVMKYIHYKLSQRGYEWDAGDVGAAPPGAAPAPGIFSSQPGHTPHPAASRDPVARTSPLQTPAAPGAAAGPALSPVPPVVHLTLRQAGDDFSRRYRRDFAEMSSQLHLTPFTARGRFATVVEELFRDGVNWGRIVAFFEFGGVMCVESVNREMSPLVDNIALWMTEYLNRHLHTWIQDNGGWVGALGDVSLG

SEQ ID NO: 8449 - protein, 454 aa, Homo sapiens
  Payload ID: 1755;
  Gene Symbol: BCL3;
  Gene Name: B-cell CLL/lymphoma 3;
  Uniprot ID:  P20749;
  ENSP ID: ENSP00000164227
MPRCPAGAMDEGPVDLRTRPKAAGLPGAALPLRKRPLRAPSPEPAAPRGAAGLVVPLDPLRGGCDLPAVPGPPHGLARPEALYYPGALLPLYPTRAMGSPFPLVNLPTPLYPMMCPMEHPLSADIAMATRADEDGDTPLHIAVVQGNLPAVHRLVNLFQQGGRELDIYNNLRQTPLHLAVITTLPSVVRLLVTAGASPMALDRHGQTAAHLACEHRSPTCLRALLDSAAPGTLDLEARNYDGLTALHVAVNTECQETVQLLLERGADIDAVDIKSGRSPLIHAVENNSLSMVQLLLQHGANVNAQMYSGSSALHSASGRGLLPLVRTLVRSGADSSLKNCHNDTPLMVARSRRVIDILRGKATRPASTSQPDPSPDRSANTSPESSSRLSSNGLLSASPSSSPSQSPPRDPPGFPMAPPNFFLPSPSPPAFLPFAGVLRGPGRPVPPSPAPGGS

SEQ ID NO: 8450 - protein, 308 aa, Homo sapiens
  Payload ID: 1755;
  Gene Symbol: BCL3;
  Gene Name: B-cell CLL/lymphoma 3;
  ENSP ID: ENSP00000393731
  MOD_RES (1)..(1): Any amino acid
XEHPLSADIAMATRADEDGDTPLHIAVVQGNLPAVHRLVNLFQQGGRELDIYNNLRQTPLHLAVITTLPSVVRLLVTAGASPMALDRHGQTAAHLACEHRSPTCLRALLDSAAPGTLDLEARNYDGLTALHVAVNTECQETVQLLLERGADIDAVDIKSGRSPLIHAVENNSLSMVQLLLQHGANVNAQMYSGSSALHSASGRGLLPLVRTLVRSGADSSLKNCHNDTPLMVARSRRVSRGSCGHAPCTRVSAGWLQVIDILRGKATRPASTSQPDPSPDRSANTSPESSSRLSSNGLLSASPSSSPS

SEQ ID NO: 8451 - protein, 706 aa, Homo sapiens
  Payload ID: 1756;
  Gene Symbol: BCL6;
  Gene Name: B-cell CLL/lymphoma 6;
  Uniprot ID:  P41182;
  ENSP ID: ENSP00000232014
MASPADSCIQFTRHASDVLLNLNRLRSRDILTDVVIVVSREQFRAHKTVLMACSGLFYSIFTDQLKCNLSVINLDPEINPEGFCILLDFMYTSRLNLREGNIMAVMATAMYLQMEHVVDTCRKFIKASEAEMVSAIKPPREEFLNSRMLMPQDIMAYRGREVVENNLPLRSAPGCESRAFAPSLYSGLSTPPASYSMYSHLPVSSLLFSDEEFRDVRMPVANPFPKERALPCDSARPVPGEYSRPTLEVSPNVCHSNIYSPKETIPEEARSDMHYSVAEGLKPAAPSARNAPYFPCDKASKEEERPSSEDEIALHFEPPNAPLNRKGLVSPQSPQKSDCQPNSPTESCSSKNACILQASGSPPAKSPTDPKACNWKKYKFIVLNSLNQNAKPEGPEQAELGRLSPRAYTAPPACQPPMEPENLDLQSPTKLSASGEDSTIPQASRLNNIVNRSMTGSPRSSSESHSPLYMHPPKCTSCGSQSPQHAEMCLHTAGPTFPEEMGETQSEYSDSSCENGAFFCNECDCRFSEEASLKRHTLQTHSDKPYKCDRCQASFRYKGNLASHKTVHTGEKPYRCNICGAQFNRPANLKTHTRIHSGEKPYKCETCGARFVQVAHLRAHVLIHTGEKPYPCEICGTRFRHLQTLKSHLRIHTGEKPYHCEKCNLHFRHKSQLRLHLRQKHGAITNTKVQYRVSATDLPPELPKAC

SEQ ID NO: 8452 - protein, 706 aa, Homo sapiens; identical to SEQ ID NO: 8451
  Payload ID: 1756;
  Gene Symbol: BCL6;
  Gene Name: B-cell CLL/lymphoma 6;
  Uniprot ID:  P41182;
  ENSP ID: ENSP00000384371

SEQ ID NO: 8453 - protein, 55 aa, Homo sapiens
  Payload ID: 1756;
  Gene Symbol: BCL6;
  Gene Name: B-cell CLL/lymphoma 6;
  ENSP ID: ENSP00000398014
MASPADSCIQFTRHASDVLLNLNRLRSRDILTDVVIVVSREQFRAHKTVLMACRS

SEQ ID NO: 8454 - protein, 650 aa, Homo sapiens
  Payload ID: 1756;
  Gene Symbol: BCL6;
  Gene Name: B-cell CLL/lymphoma 6;
  Uniprot ID:  P41182;
  ENSP ID: ENSP00000413122
MASPADSCIQFTRHASDVLLNLNRLRSRDILTDVVIVVSREQFRAHKTVLMACSGLFYSIFTDQLKCNLSVINLDPEINPEGFCILLDFMYTSRLNLREGNIMAVMATAMYLQMEHVVDTCRKFIKASEAEMVSAIKPPREEFLNSRMLMPQDIMAYRGREVVENNLPLRSAPGCESRAFAPSLYSGLSTPPASYSMYSHLPVSSLLFSDEEFRDVRMPVANPFPKERALPCDSARPVPGEYSRPTLEVSPNVCHSNIYSPKETIPEEARSDMHYSVAEGLKPAAPSARNAPYFPCDKASKEEERPSSEDEIALHFEPPNAPLNRKGLVSPQSPQKSDCQPNSPTESCSSKNACILQASGSPPAKSPTDPKACNWKKYKFIVLNSLNQNAKPEGPEQAELGRLSPRAYTAPPACQPPMEPENLDLQSPTKLSASGEDSTIPQASRLNNIVNRSMTGSPRSSSESHSPLYMHPPKCTSCGSQSPQHAEMCLHTAGPTFPEEMGETQSEYSDSSCGEKPYRCNICGAQFNRPANLKTHTRIHSGEKPYKCETCGARFVQVAHLRAHVLIHTGEKPYPCEICGTRFRHLQTLKSHLRIHTGEKPYHCEKCNLHFRHKSQLRLHLRQKHGAITNTKVQYRVSATDLPPELPKAC

SEQ ID NO: 8455 - protein, 104 aa, Homo sapiens
  Payload ID: 1756;
  Gene Symbol: BCL6;
  Gene Name: B-cell CLL/lymphoma 6;
  ENSP ID: ENSP00000414455
MASPADSCIQFTRHASDVLLNLNRLRSRDILTDVVIVVSREQFRAHKTVLMACSGLFYSIFTDQLKCNLSVINLDPEINPEGFCILLDFMYTSRLNLREGNIMA

SEQ ID NO: 8456 - protein, 121 aa, Homo sapiens
  Payload ID: 1756;
  Gene Symbol: BCL6;
  Gene Name: B-cell CLL/lymphoma 6;
  ENSP ID: ENSP00000415574
MASPADSCIQFTRHASDVLLNLNRLRSRDILTDVVIVVSREQFRAHKTVLMACSGLFYSIFTDQLKCNLSVINLDPEINPEGFCILLDFMYTSRLNLREGNIMAVMATAMYLQMEHVVDTC

SEQ ID NO: 8457 - protein, 650 aa, Homo sapiens; identical to SEQ ID NO: 8454
  Payload ID: 1756;
  Gene Symbol: BCL6;
  Gene Name: B-cell CLL/lymphoma 6;
  Uniprot ID:  P41182;
  ENSP ID: ENSP00000479784

SEQ ID NO: 8458 - protein, 479 aa, Homo sapiens
  Payload ID: 1757;
  Gene Symbol: BCL6B;
  Gene Name: B-cell CLL/lymphoma 6, member B;
  Uniprot ID:  Q8N143;
  ENSP ID: ENSP00000293805
MGSPAAPEGALGYVREFTRHSSDVLGNLNELRLRGILTDVTLLVGGQPLRAHKAVLIACSGFFYSIFRGRAGVGVDVLSLPGGPEARGFAPLLDFMYTSRLRLSPATAPAVLAAATYLQMEHVVQACHRFIQASYEPLGISLRPLEAEPPTPPTAPPPGSPRRSEGHPDPPTESRSCSQGPPSPASPDPKACNWKKYKYIVLNSQASQAGSLVGERSSGQPCPQARLPSGDEASSSSSSSSSSSEEGPIPGPQSRLSPTAATVQFKCGAPASTPYLLTSQAQDTSGSPSERARPLPGSEFFSCQNCEAVAGCSSGLDSLVPGDEDKPYKCQLCRSSFRYKGNLASHRTVHTGEKPYHCSICGARFNRPANLKTHSRIHSGEKPYKCETCGSRFVQVAHLRAHVLIHTGEKPYPCPTCGTRFRHLQTLKSHVRIHTGEKPYHCDPCGLHFRHKSQLRLHLRQKHGAATNTKVHYHILGGP

SEQ ID NO: 8459 - protein, 135 aa, Homo sapiens
  Payload ID: 1757;
  Gene Symbol: BCL6B;
  Gene Name: B-cell CLL/lymphoma 6, member B;
  ENSP ID: ENSP00000445010
CSSGLDSLVPGDEDKPYKCQLCRSSFRYKGNLASHRTVHTGEKPYHCSICGARFNRPANLKTHSRIHSGEKPYKCETCGSRFVQVAHLRAHVLIHTGEKPYPCPTCGTRFRHLQTLKSHVRIHTGEKPYHEPVTS

SEQ ID NO: 8460 - protein, 133 aa, Homo sapiens
  Payload ID: 1757;
  Gene Symbol: BCL6B;
  Gene Name: B-cell CLL/lymphoma 6, member B;
  ENSP ID: ENSP00000460071
MGSPAAPEGALGYVREFTRHSSDVLGNLNELRLRGILTDVTLLVGGQPLRAHKAVLIACSGFFYSIFRGRAGVGVDVLSLPGGPEARGFAPLLDFMYTSRLRLSPATAPAVLAAATYLQMEHVVQACHRFIQA

SEQ ID NO: 8461 - protein, 111 aa, Homo sapiens
  Payload ID: 1757;
  Gene Symbol: BCL6B;
  Gene Name: B-cell CLL/lymphoma 6, member B;
  ENSP ID: ENSP00000460282
MGSPAAPEGALGYVREFTRHSSDVLGNLNELRLRGILTDVTLLVGGQPLRAHKAVLIACSGFFYSIFRGRAGVGVDVLSLPGGPEARGFAPLLDFMYTSRLRLSPATAPAV

SEQ ID NO: 8462 - protein, 210 aa, Homo sapiens
  Payload ID: 1758;
  Gene Symbol: BCL7A;
  Gene Name: B-cell CLL/lymphoma 7A;
  Uniprot ID:  Q4VC05;
  ENSP ID: ENSP00000261822
MSGRSVRAETRSRAKDDIKRVMAAIEKVRKWEKKWVTVGDTSLRIYKWVPVTEPKVDDKNKNKKKGKDEKCGSEVTTPENSSSPGMMDMHDDNSNQSSIADASPIKQENSSNSSPAPEPNSAVPSDGTEAKVDEAQADGKEHPGAEDASDEQNSQSSMEHSMNSSEKVDRQPSGDSGLAAETSAISQDLEGVPPSKKMKLEASQQNSEEM

SEQ ID NO: 8463 - protein, 231 aa, Homo sapiens
  Payload ID: 1758;
  Gene Symbol: BCL7A;
  Gene Name: B-cell CLL/lymphoma 7A;
  Uniprot ID:  Q4VC05;
  ENSP ID: ENSP00000445868
MSGRSVRAETRSRAKDDIKRVMAAIEKVRKWEKKWVTVGDTSLRIYKWVPVTEPKVDDKNKNKKKGKDEKCGSEVTTPENSSSPGMMDMHDDNSNQSSIADASPIKQENSSNSSPAPEPNSAVPSDGTEAKVDEAQADGKEHPGAEDASDEQNSQSSMEHSMNSSEKVDRQPSGDSGLAAETSAISQVPRSRSQRGSQIGREPIGLSGDLEGVPPSKKMKLEASQQNSEEM

SEQ ID NO: 8464 - protein, 231 aa, Homo sapiens; identical to SEQ ID NO: 8463
  Payload ID: 1758;
  Gene Symbol: BCL7A;
  Gene Name: B-cell CLL/lymphoma 7A;
  ENSP ID: ENSP00000489010

SEQ ID NO: 8465 - protein, 210 aa, Homo sapiens; identical to SEQ ID NO: 8462
  Payload ID: 1758;
  Gene Symbol: BCL7A;
  Gene Name: B-cell CLL/lymphoma 7A;
  ENSP ID: ENSP00000489305

SEQ ID NO: 8466 - protein, 202 aa, Homo sapiens
  Payload ID: 1759;
  Gene Symbol: BCL7B;
  Gene Name: B-cell CLL/lymphoma 7B;
  Uniprot ID:  Q9BQE9;
  ENSP ID: ENSP00000223368
MSGRSVRAETRSRAKDDIKKVMAAIEKVRKWEKKWVTVGDTSLRIFKWVPVTDSKEKEKSKSNSSAAREPNGFPSDASANSSLLLEFQDENSNQSSVSDVYQLKVDSSTNSSPSPQQSESLSPAHTSDFRTDDSQPPTLGQEILEEPSLPSSEVADEPPTLTKEEPVPLETQVVEEEEDSGAPPLKRFCVDQPTVPQTASES

SEQ ID NO: 8467 - protein, 145 aa, Homo sapiens
  Payload ID: 1759;
  Gene Symbol: BCL7B;
  Gene Name: B-cell CLL/lymphoma 7B;
  Uniprot ID:  Q9BQE9;
  ENSP ID: ENSP00000393230
MSGRSVRAETRSRAKDDIKKVMAAIEKVRKWEKKWVTVGDTSLRIFKWVPVTDSKEKEKSKSNSSAAREPNGFPSDASANSSLLLEFQEPSLPSSEVADEPPTLTKEEPVPLETQVVEEEEDSGAPPLKRFCVDQPTVPQTASES

SEQ ID NO: 8468 - protein, 213 aa, Homo sapiens
  Payload ID: 1759;
  Gene Symbol: BCL7B;
  Gene Name: B-cell CLL/lymphoma 7B;
  ENSP ID: ENSP00000411073
MTESRSVTQAGVHWRNLGSLQPLPLRFKQFSCLSLLSSWDYREKKWVTVGDTSLRIFKWVPVTDSKEKEKSKSNSSAAREPNGFPSDASANSSLLLEFQDENSNQSSVSDVYQLKVDSSTNSSPSPQQSESLSPAHTSDFRTDDSQPPTLGQEILEEPSLPSSEVADEPPTLTKEEPVPLETQVVEEEEDSGAPPLKRFCVDQPTVPQTASES

SEQ ID NO: 8469 - protein, 78 aa, Homo sapiens
  Payload ID: 1759;
  Gene Symbol: BCL7B;
  Gene Name: B-cell CLL/lymphoma 7B;
  ENSP ID: ENSP00000414231
MSGRSVRAETRSRAKDDIKKVMAAIEKVRKWEKKWVTVGDTSLRIFKWVPVTDSKERQSLAMLSRLVVNSWPQAVPQP

SEQ ID NO: 8470 - protein, 88 aa, Homo sapiens
  Payload ID: 1759;
  Gene Symbol: BCL7B;
  Gene Name: B-cell CLL/lymphoma 7B;
  ENSP ID: ENSP00000414473
MSGRSVRAETRSRAKDDIKKVMAAIEKVRKWEKKWVTVGDTSLRIFKWVPVTDSKETKTATRVPCLTSISLRWTAAPTQAPAPSRVSP

SEQ ID NO: 8471 - protein, 217 aa, Homo sapiens
  Payload ID: 1760;
  Gene Symbol: BCL7C;
  Gene Name: B-cell CLL/lymphoma 7C;
  Uniprot ID:  Q8WUZ0;
  ENSP ID: ENSP00000215115
MAGRTVRAETRSRAKDDIKKVMATIEKVRRWEKRWVTVGDTSLRIFKWVPVVDPQEEERRRAGGGAERSRGRERRGRGASPRGGGPLILLDLNDENSNQSFHSEGSLQKGTEPSPGGTPQPSRPVSPAGPPEGVPEEAQPPRLGQERDPGGITAGSTDEPPMLTKEEPVPELLEAEAPEAYPVFEPVPPVPEAAQGDTEDSEGAPPLKRICPNAPDP

SEQ ID NO: 8472 - protein, 242 aa, Homo sapiens
  Payload ID: 1760;
  Gene Symbol: BCL7C;
  Gene Name: B-cell CLL/lymphoma 7C;
  Uniprot ID:  Q8WUZ0;
  ENSP ID: ENSP00000369674
MAGRTVRAETRSRAKDDIKKVMATIEKVRRWEKRWVTVGDTSLRIFKWVPVVDPQEEERRRAGGGAERSRGRERRGRGASPRGGGPLILLDLNDENSNQSFHSEGSLQKGTEPSPGGTPQPSRPVSPAGPPEGVPEEAQPPRLGQERDPGGITAGSTDEPPMLTKEEPVPELLEAEDSGVRMTRRALHEKGLKTEPLRRLLPRRGLRTNVRPSSMAVPDTRAPGGGSKAPRAPRTIPQGKGR

SEQ ID NO: 8473 - protein, 293 aa, Homo sapiens
  Payload ID: 1760;
  Gene Symbol: BCL7C;
  Gene Name: B-cell CLL/lymphoma 7C;
  ENSP ID: ENSP00000459007
  MOD_RES (1)..(1): Any amino acid
XAGRTVRAETRSRAKDDIKKVMATIEKVRRWEKRWVTVGDTSLRIFKWVPVVDPQEEERRRAGGGAERSRGRERRGRGASPRGGGPLILLDLNDENSNQSFHSEGSLQKGTEPSPGGTPQPSRPVSPAGPPEGVPEEAQPPRLGQERDPGGITAGSTDEPPMLTKEEPVPELLEAETMEMMLDKKQIQAIFLFELKMGHKAVETLRNINNTLGPGTANEHIVQWWFKKFCKEDKSLEDEKHSVWPSEVDNDQLKALIEADPVKTTQEVAQELNHRPFYGRLAFEANWKGEKAQ

SEQ ID NO: 8474 - protein, 104 aa, Homo sapiens
  Payload ID: 1760;
  Gene Symbol: BCL7C;
  Gene Name: B-cell CLL/lymphoma 7C;
  ENSP ID: ENSP00000461177
MAGRTVRAETRSRAKDDIKKVMATIEKVRRWEKRWVTVGDTSLRIFKWVPVVDPQEEVPCKRAQSPVLGAPPSPAALCHLPDPQKGSLRRLSPHGWAKREIPGA

SEQ ID NO: 8475 - protein, 1426 aa, Homo sapiens
  Payload ID: 1761;
  Gene Symbol: BCL9;
  Gene Name: B-cell CLL/lymphoma 9;
  Uniprot ID:  O00512;
  ENSP ID: ENSP00000234739
MHSSNPKVRSSPSGNTQSSPKSKQEVMVRPPTVMSPSGNPQLDSKFSNQGKQGGSASQSQPSPCDSKSGGHTPKALPGPGGSMGLKNGAGNGAKGKGKRERSISADSFDQRDPGTPNDDSDIKECNSADHIKSQDSQHTPHSMTPSNATAPRSSTPSHGQTTATEPTPAQKTPAKVVYVFSTEMANKAAEAVLKGQVETIVSFHIQNISNNKTERSTAPLNTQISALRNDPKPLPQQPPAPANQDQNSSQNTRLQPTPPIPAPAPKPAAPPRPLDRESPGVENKLIPSVGSPASSTPLPPDGTGPNSTPNNRAVTPVSQGSNSSSADPKAPPPPPVSSGEPPTLGENPDGLSQEQLEHRERSLQTLRDIQRMLFPDEKEFTGAQSGGPQQNPGVLDGPQKKPEGPIQAMMAQSQSLGKGPGPRTDVGAPFGPQGHRDVPFSPDEMVPPSMNSQSGTIGPDHLDHMTPEQIAWLKLQQEFYEEKRRKQEQVVVQQCSLQDMMVHQHGPRGVVRGPPPPYQMTPSEGWAPGGTEPFSDGINMPHSLPPRGMAPHPNMPGSQMRLPGFAGMINSEMEGPNVPNPASRPGLSGVSWPDDVPKIPDGRNFPPGQGIFSGPGRGERFPNPQGLSEEMFQQQLAEKQLGLPPGMAMEGIRPSMEMNRMIPGSQRHMEPGNNPIFPRIPVEGPLSPSRGDFPKGIPPQMGPGRELEFGMVPSGMKGDVNLNVNMGSNSQMIPQKMREAGAGPEEMLKLRPGGSDMLPAQQKMVPLPFGEHPQQEYGMGPRPFLPMSQGPGSNSGLRNLREPIGPDQRTNSRLSHMPPLPLNPSSNPTSLNTAPPVQRGLGRKPLDISVAGSQVHSPGINPLKSPTMHQVQSPMLGSPSGNLKSPQTPSQLAGMLAGPAAAASIKSPPVLGSAAASPVHLKSPSLPAPSPGWTSSPKPPLQSPGIPPNHKAPLTMASPAMLGNVESGGPPPPTASQPASVNIPGSLPSSTPYTMPPEPTLSQNPLSIMMSRMSKFAMPSSTPLYHDAIKTVASSDDDSPPARSPNLPSMNNMPGMGINTQNPRISGPNPVVPMPTLSPMGMTQPLSHSNQMPSPNAVGPNIPPHGVPMGPGLMSHNPIMGHGSQEPPMVPQGRMGFPQGFPPVQSPPQQVPFPHNGPSGGQGSFPGGMGFPGEGPLGRPSNLPQSSADAALCKPGGPGGPDSFTVLGNSMPSVFTDPDLQEVIRPGATGIPEFDLSRIIPSEKPSQTLQYFPRGEVPGRKQPQGPGPGFSHMQGMMGEQAPRMGLALPGMGGPGPVGTPDIPLGTAPSMPGHNPMRPPAFLQQGMMGPHHRMMSPAQSTMPGQPTLMSNPAAAVGMIPGKDRGPAGLYTHPGPVGSPGMMMSMQGMMGPQQNIMIPPQMRPRGMAADVGMGGFSQGPGNPGNMMF

SEQ ID NO: 8476 - protein, 1394 aa, Homo sapiens
  Payload ID: 1761;
  Gene Symbol: BCL9;
  Gene Name: B-cell CLL/lymphoma 9;
  ENSP ID: ENSP00000479694
MHSSNPKVRSSPSGNTQSSPKSKQEVMVRPPTVMSPSGNPQLDSKFSNQGKQGGSASQSQPSPCDSKSGGHTPKALPGPGGSMGLKNGAGNGAKGKGKRERSISADSFDQRDPGTPNDDSDIKECNSADHIKSQDSQHTPHSMTPSNATAPRSSTPSHGQTTATEPTPAQKTPAKVVYVFSTEMANKAAEAVLKGQVETIVSFHIQNISNNKTERSTAPLNTQISALRNDPKPLPQQPPAPANQDQNSSQNTRLQPTPPIPAPAPKPAAPPRPLDRESPGVENKLIPSVGSPASSTPLPPDGTGPNSTPNNRAVTPVSQGSNSSSADPKAPPPPPVSSGEPPTLGENPDGLSQEQLEHRERSLQTLRDIQRMLFPDEKEFTGAQSGGPQQNPGVLDGPQKKPEGPIQAMMAQSQSLGKGPGPRTDVGAPFGPQGHRDVPFSPDEMVPPSMNSQSGTIGPDHLDHMTPEQIAWLKLQQEFYEEKRRKQEQVVVQQCSLQDMMVHQHGPRGVVRGPPPPYQMTPSEGWAPGGTEPFSDGINMPHSLPPRGMAPHPNMPGSQMRLPGFAGMINSEMEGPNVPNPASRPGLSGVSWPDDVPKIPDGRNFPPGQGIFSGPGRGERFPNPQGLSEEMFQQQLAEKQLGLPPGMAMEGIRPSMEMNRMIPGSQRHMEPGNNPIFPRIPVEGPLSPSRGDFPKGIPPQMGPGRELEFGMVPSGMKGDVNLNVNMGSNSQMIPQKMREAGAGPEEMLKLRPGGSDMLPAQQKMVPLPFGEHPQQEYGMGPRPFLPMSQGPGSNSGLRNLREPIGPDQRTNSRLSHMPPLPLNPSSNPTSLNTAPPVQRGLGRKPLDISVAGSQVHSPGINPLKSPTMHQVQSPMLGSPSGNLKSPQTPSQLAGMLAGPAAAASIKSPPVLGSAAASPVHLKSPSLPAPSPGWTSSPKPPLQSPGIPPNHKAPLTMASPAMLGNVESGGPPPPTASQPASVNIPGSLPSSTPYTMPPEPTLSQNPLSIMMSRMSKFAMPSSTPLYHDAIKTVASSDDDSPPARSPNLPSMNNMPGMGINTQNPRISGPNPVVPMPTLSPMGMTQPLSHSNQMPSPNAVGPNIPPHGVPMGPGLMSHNPIMGHGSQEPPMVPQGRMGFPQGFPPVQSPPQQVPFPHNGPSGGQGSFPGGMGFPGEGPLGRPSNLPQSSADAALCKPGGPGGPDSFTVLGNSMPSVFTDPDLQEVIRPGATGIPEFDLSRIIPSEKPSQTLQYFPRGEVPGRKQPQGPGPGFSHMQGMMGEQAPRMGLALPGMGGPGPVGTPDIPLGTAPSMPGHNPMRPPAFLQQGMMGPHHRMMSPAQSTMPGQPTLMSNPAAAVGMIPGKDRGPAGLYTHPGPVGSPGMMMSMQGMMGPNRTS

SEQ ID NO: 8477 - protein, 1499 aa, Homo sapiens
  Payload ID: 1762;
  Gene Symbol: BCL9L;
  Gene Name: B-cell CLL/lymphoma 9-like;
  Uniprot ID:  Q86UU0;
  ENSP ID: ENSP00000335320
MRILANKTRLPHPRRREAPGSPPLSPRGHCPPAPAKPMHPENKLTNHGKTGNGGAQSQHQNVNQGPTCNVGSKGVGAGNHGAKANQISPSNSSLKNPQAGVPPFSSLKGKVKRDRSVSVDSGEQREAGTPSLDSEAKEVAPRSKRRCVLERKQPYSGDEWCSGPDSEEDDKPIGATHNCNVADPAMAAPQLGPGQTTQLPLSESSVPGAPHGPPPGLRPDAPGGGGGGGGVPGKPPSQFVYVFTTHLANTAAEAVLQGRADSILAYHQQNVPRAKLDQAPKVPPTPEPLPLSTPSAGTPQSQPPPLPPPPPPAPGSAPPALPPEGPPEDSSQDLAPNSVGAASTGGGTGGTHPNTPTATTANNPLPPGGDPSSAPGPALLGEAAAPGNGQRSLVGSEGLSKEQLEHRERSLQTLRDIERLLLRSGETEPFLKGPPGGAGEGGPPAQAPPPPQQPPTAPPSGLKKYEEPLQSMISQTQSLGGPPLEHEVPGHPPGGDMGQQMNMMIQRLGQDSLTPEQVAWRKLQEEYYEEKRRKEEQIGLHGSRPLQDMMGMGGMMVRGPPPPYHSKPGDQWPPGMGAQLRGPMDVQDPMQLRGGPPFPGPRFPGNQIQRVPGFGGMQSMPMEVPMNAMQRPVRPGMGWTEDLPPMGGPSNFAQNTMPYPGGQGEAERFMTPRVREELLRHQLLEKRSMGMQRPLGMAGSGMGQSMEMERMMQAHRQMDPAMFPGQMAGGEGLAGTPMGMEFGGGRGLLSPPMGQSGLREVDPPMGPGNLNMNMNVNMNMNMNLNVQMTPQQQMLMSQKMRGPGDLMGPQGLSPEEMARVRAQNSSGVMGGPQKMLMPSQFPNQGQQGFSGGQGPYQAMSQDMGNTQDMFSPDQSSMPMSNVGTTRLSHMPLPPASNPPGTVHSAPNRGLGRRPSDLTISINQMGSPGMGHLKSPTLSQVHSPLVTSPSANLKSPQTPSQMVPLPSANPPGPLKSPQVLGSSLSVRSPTGSPSRLKSPSMAVPSPGWVASPKTAMPSPGVSQNKQPPLNMNSSTTLSNMEQGTLPPSGPRSSSSAPPANPPSGLMNPSLPFTSSPDPTPSQNPLSLMMTQMSKYAMPSSTPLYHNAIKTIATSDDELLPDRPLLPPPPPPQGSGPGISNSQPSQMHLNSAAAQSPMGMNLPGQQPLSHEPPPAMLPSPTPLGSNIPLHPNAQGTGGPPQNSMMMAPGGPDSLNAPCGPVPSSSQMMPFPPRLQQPHGAMAPTGGGGGGPGLQQHYPSGMALPPEDLPNQPPGPMPPQQHLMGKAMAGRMGDAYPPGVLPGVASVLNDPELSEVIRPTPTGIPEFDLSRIIPSEKPSSTLQYFPKSENQPPKAQPPNLHLMNLQNMMAEQTPSRPPNLPGQQGVQRGLNMSMCHPGQMSLLGRTGVPPQQGMVPHGLHQGVMSPPQGLMTQQNFMLMKQRGVGGEVYSQPPHMLSPQGSLMGPPPQQNLMVSHPLRQRSVSLDSQMGYLPAPGGMANLPF

SEQ ID NO: 8478 - protein, 88 aa, Homo sapiens
  Payload ID: 1762;
  Gene Symbol: BCL9L;
  Gene Name: B-cell CLL/lymphoma 9-like;
  ENSP ID: ENSP00000432804
MRILANKTRLPHPRRREAPGSPPLSPRGHCPPAPAKPMHPENKLTNHGKTGNGGAQSQHQNVNQGPTCNVGSKGVGAGNHGAKANQIS

SEQ ID NO: 8479 - protein, 1462 aa, Homo sapiens
  Payload ID: 1762;
  Gene Symbol: BCL9L;
  Gene Name: B-cell CLL/lymphoma 9-like;
  ENSP ID: ENSP00000482938
MHPENKLTNHGKTGNGGAQSQHQNVNQGPTCNVGSKGVGAGNHGAKANQISPSNSSLKNPQAGVPPFSSLKGKVKRDRSVSVDSGEQREAGTPSLDSEAKEVAPRSKRRCVLERKQPYSGDEWCSGPDSEEDDKPIGATHNCNVADPAMAAPQLGPGQTTQLPLSESSVPGAPHGPPPGLRPDAPGGGGGGGGVPGKPPSQFVYVFTTHLANTAAEAVLQGRADSILAYHQQNVPRAKLDQAPKVPPTPEPLPLSTPSAGTPQSQPPPLPPPPPPAPGSAPPALPPEGPPEDSSQDLAPNSVGAASTGGGTGGTHPNTPTATTANNPLPPGGDPSSAPGPALLGEAAAPGNGQRSLVGSEGLSKEQLEHRERSLQTLRDIERLLLRSGETEPFLKGPPGGAGEGGPPAQAPPPPQQPPTAPPSGLKKYEEPLQSMISQTQSLGGPPLEHEVPGHPPGGDMGQQMNMMIQRLGQDSLTPEQVAWRKLQEEYYEEKRRKEEQIGLHGSRPLQDMMGMGGMMVRGPPPPYHSKPGDQWPPGMGAQLRGPMDVQDPMQLRGGPPFPGPRFPGNQIQRVPGFGGMQSMPMEVPMNAMQRPVRPGMGWTEDLPPMGGPSNFAQNTMPYPGGQGEAERFMTPRVREELLRHQLLEKRSMGMQRPLGMAGSGMGQSMEMERMMQAHRQMDPAMFPGQMAGGEGLAGTPMGMEFGGGRGLLSPPMGQSGLREVDPPMGPGNLNMNMNVNMNMNMNLNVQMTPQQQMLMSQKMRGPGDLMGPQGLSPEEMARVRAQNSSGVMGGPQKMLMPSQFPNQGQQGFSGGQGPYQAMSQDMGNTQDMFSPDQSSMPMSNVGTTRLSHMPLPPASNPPGTVHSAPNRGLGRRPSDLTISINQMGSPGMGHLKSPTLSQVHSPLVTSPSANLKSPQTPSQMVPLPSANPPGPLKSPQVLGSSLSVRSPTGSPSRLKSPSMAVPSPGWVASPKTAMPSPGVSQNKQPPLNMNSSTTLSNMEQGTLPPSGPRSSSSAPPANPPSGLMNPSLPFTSSPDPTPSQNPLSLMMTQMSKYAMPSSTPLYHNAIKTIATSDDELLPDRPLLPPPPPPQGSGPGISNSQPSQMHLNSAAAQSPMGMNLPGQQPLSHEPPPAMLPSPTPLGSNIPLHPNAQGTGGPPQNSMMMAPGGPDSLNAPCGPVPSSSQMMPFPPRLQQPHGAMAPTGGGGGGPGLQQHYPSGMALPPEDLPNQPPGPMPPQQHLMGKAMAGRMGDAYPPGVLPGVASVLNDPELSEVIRPTPTGIPEFDLSRIIPSEKPSSTLQYFPKSENQPPKAQPPNLHLMNLQNMMAEQTPSRPPNLPGQQGVQRGLNMSMCHPGQMSLLGRTGVPPQQGMVPHGLHQGVMSPPQGLMTQQNFMLMKQRGVGGEVYSQPPHMLSPQGSLMGPPPQQNLMVSHPLRQRSVSLDSQMGYLPAPGGMANLPF

SEQ ID NO: 8480 - protein, 456 aa, Homo sapiens
  Payload ID: 1763;
  Gene Symbol: BLNK;
  Gene Name: B-cell linker;
  Uniprot ID:  Q8WV28;
  ENSP ID: ENSP00000224337
MDKLNKITVPASQKLRQLQKMVHDIKNNEGGIMNKIKKLKVKAPPSVPRRDYASESPADEEEQWSDDFDSDYENPDEHSDSEMYVMPAEENADDSYEPPPVEQETRPVHPALPFARGEYIDNRSSQRHSPPFSKTLPSKPSWPSEKARLTSTLPALTALQKPQVPPKPKGLLEDEADYVVPVEDNDENYIHPTESSSPPPEKAPMVNRSTKPNSSTPASPPGTASGRNSGAWETKSPPPAAPSPLPRAGKKPTTPLKTTPVASQQNASSVCEEKPIPAERHRGSSHRQEAVQSPVFPPAQKQIHQKPIPLPRFTEGGNPTVDGPLPSFSSNSTISEQEAGVLCKPWYAGACDRKSAEEALHRSNKDGSFLIRKSSGHDSKQPYTLVVFFNKRVYNIPVRFIEATKQYALGRKKNGEEYFGSVAEIIRNHQHSPLVLIDSQNNTKDSTRLKYAVKVS

SEQ ID NO: 8481 - protein, 433 aa, Homo sapiens
  Payload ID: 1763;
  Gene Symbol: BLNK;
  Gene Name: B-cell linker;
  Uniprot ID:  Q8WV28;
  ENSP ID: ENSP00000360218
MDKLNKITVPASQKLRQLQKMVHDIKNNEGGIMNKIKKLKVKAPPSVPRRDYASESPADEEEQWSDDFDSDYENPDEHSDSEMYVMPAEENADDSYEPPPVEQETRPVHPALPFARGEYIDNRSSQRHSPPFSKTLPSKPSWPSEKARLTSTLPALTALQKPQVPPKPKGLLEDEADYVVPVEDNDENYIHPTESSSPPPEKGRNSGAWETKSPPPAAPSPLPRAGKKPTTPLKTTPVASQQNASSVCEEKPIPAERHRGSSHRQEAVQSPVFPPAQKQIHQKPIPLPRFTEGGNPTVDGPLPSFSSNSTISEQEAGVLCKPWYAGACDRKSAEEALHRSNKDGSFLIRKSSGHDSKQPYTLVVFFNKRVYNIPVRFIEATKQYALGRKKNGEEYFGSVAEIIRNHQHSPLVLIDSQNNTKDSTRLKYAVKVS

SEQ ID NO: 8482 - protein, 299 aa, Homo sapiens
  Payload ID: 1763;
  Gene Symbol: BLNK;
  Gene Name: B-cell linker;
  ENSP ID: ENSP00000391924
MDKLNKITVPASQKLRQLQKMVHDIKNNEGGIMNKIKKLKVKAPPSVPRRDYASESPADEEEQWSDDFDSDYENPDEHSDSEMYVMPAEENADDSYEPPPVEQETRPVHPALPFARGTASGRNSGAWETKSPPPAAPSPLPRAGKKPTTPLKTTPVASQQNASSVCEEKPIPAERHRGSSHRQEAVQSPVFPPAQKQIHQKPIPLPRFTEGGNPTVDGPLPSFSSNSTISEQEAGVLCKPWYAGACDRKSAEEALHRSNKYFGSVAEIIRNHQHSPLVLIDSQNNTKDSTRLKYAVKVS

SEQ ID NO: 8483 - protein, 404 aa, Homo sapiens
  Payload ID: 1763;
  Gene Symbol: BLNK;
  Gene Name: B-cell linker;
  Uniprot ID:  Q8WV28;
  ENSP ID: ENSP00000397487
MDKLNKITVPASQKLRQLQKMVHDIKNNEGGIMNKIKKLKVKAPPSVPRRDYASESPADEEEQWSDDFDSDYENPDEHSDSEMYVMPAEENADDSYEPPPVEQETRPVHPALPFARGEYIDNRSSQRHSPPFSKTLPSKPSWPSEKARLTSTLPALTALQKPQVPPKPKGLLEDEADYVVPVEDNDENYIHPTESSSPPPEKAPMVNRSTKPNSSTPASPPGTASGRNSGAWETKSPPPAAPSPLPRAGKKPTTPLKTTPVASQQNASSVCEEKPIPAERHRGSSHRQEAVQSPVFPPAQKQIHQKPIPLPRFTEGGNPTVDGPLPSFSSNSTISEQEAGVLCKPWYAGACDRKSAEEALHRSNKYFGSVAEIIRNHQHSPLVLIDSQNNTKDSTRLKYAVKVS

SEQ ID NO: 8484 - protein, 65 aa, Homo sapiens
  Payload ID: 1763;
  Gene Symbol: BLNK;
  Gene Name: B-cell linker;
  ENSP ID: ENSP00000465741
MDKLNKITVPASQKLRQLQKMVHDIKNNEGGIMNKIKKLKVKAPPSVPRRDYASDTCSLSWNPSK

SEQ ID NO: 8485 - protein, 121 aa, Homo sapiens
  Payload ID: 1763;
  Gene Symbol: BLNK;
  Gene Name: B-cell linker;
  ENSP ID: ENSP00000466331
MDKLNKITVPASQKLRQLQKMVHDIKNNEGGIMNKIKKLKVKAPPSVPRRDYASESPADEEEQWSDDFDSDYENPDEHSDSEMYVMPAEENADDSYEPPPVEQETRPVHPALPFARGEYIG

SEQ ID NO: 8486 - protein, 241 aa, Homo sapiens
  Payload ID: 1764;
  Gene Symbol: BCAP29;
  Gene Name: B-cell receptor-associated prt 29;
  Uniprot ID:  Q9UHQ4;
  ENSP ID: ENSP00000005259
MTLQWAAVATFLYAEIGLILIFCLPFIPPQRWQKIFSFNVWGKIATFWNKAFLTIIILLIVLFLDAVREVRKYSSVHTIEKSSTSRPDAYEHTQMKLFRSQRNLYISGFSLFFWLVLRRLVTLITQLAKELSNKGVLKTQAENTNKAAKKFMEENEKLKRILKSHGKDEECVLEAENKKLVEDQEKLKTELRKTSDALSKAQNDVMEMKMQSERLSKEYDQLLKEHSELQDRLERGNKKRL

SEQ ID NO: 8487 - protein, 241 aa, Homo sapiens; identical to SEQ ID NO: 8486
  Payload ID: 1764;
  Gene Symbol: BCAP29;
  Gene Name: B-cell receptor-associated prt 29;
  Uniprot ID:  Q9UHQ4;
  ENSP ID: ENSP00000368412

SEQ ID NO: 8488 - protein, 348 aa, Homo sapiens
  Payload ID: 1764;
  Gene Symbol: BCAP29;
  Gene Name: B-cell receptor-associated prt 29;
  Uniprot ID:  Q9UHQ4;
  ENSP ID: ENSP00000368414
MTLQWAAVATFLYAEIGLILIFCLPFIPPQRWQKIFSFNVWGKIATFWNKAFLTIIILLIVLFLDAVREVRKYSSVHTIEKSSTSRPDAYEHTQMKLFRSQRNLYISGFSLFFWLVLRRLVTLITQLAKELSNKGVLKTQAENTNKAAKKFMEENEKLKRILKSHGKDEECVLEAENKKLVEDQEKLKTELRKTSDALSKAQNDVMEMKMQSERLSKEYDQLLKEHSELQHSSFGEFLSKRSHKNGSIGKQTGSRKGSFRKRQQEKTVNFIKDTCNILCQNDNFVMLASRKFKFRKMHYDRFVIFLMPHIGCIVMALSKYLMMFQIYCKVCIPALKKNISMLNTIFTY

SEQ ID NO: 8489 - protein, 171 aa, Homo sapiens
  Payload ID: 1764;
  Gene Symbol: BCAP29;
  Gene Name: B-cell receptor-associated prt 29;
  ENSP ID: ENSP00000390733
MTLQWAAVATFLYAEIGLILIFCLPFIPPQRWQKIFSFNVWGKIATFWNKAFLTIIILLIVLFLDAVREVRKYSSVHTIEKSSTSRPDAYEHTQMKLFRSQRNLYISGFSLFFWLVLRRLVTLITQLAKELSNKGVLKTQAENTNKAAKKFMEENEKLKRFLLAKVHCRKL

SEQ ID NO: 8490 - protein, 133 aa, Homo sapiens
  Payload ID: 1764;
  Gene Symbol: BCAP29;
  Gene Name: B-cell receptor-associated prt 29;
  ENSP ID: ENSP00000395828
MTLQWAAVATFLYAEIGLILIFCLPFIPPQRWQKIFSFNVWGKIATFWNKAFLTIIILLIVLFLDAVREVRKYSSVHTIEKSSTSRPDAYEHTQMKLFRSQRNLYISGFSLFFWLVLRRLVTLITQLAKELSN

SEQ ID NO: 8491 - protein, 348 aa, Homo sapiens; identical to SEQ ID NO: 8488
  Payload ID: 1764;
  Gene Symbol: BCAP29;
  Gene Name: B-cell receptor-associated prt 29;
  Uniprot ID:  Q9UHQ4;
  ENSP ID: ENSP00000400718

SEQ ID NO: 8492 - protein, 230 aa, Homo sapiens
  Payload ID: 1764;
  Gene Symbol: BCAP29;
  Gene Name: B-cell receptor-associated prt 29;
  ENSP ID: ENSP00000409350
MTLQWAAVATFLYAEIGLILIFCLPFIPPQRWQKIFSFNVWGKIATFWNKAFLTIIILLIVLFLDAVREVRKYSSVHTIEKSSTSRPDAYEHTQMKLFRSQRNLYISGFSLFFWLVLRRLVTLITQLAKELSNKGVLKTQAENTNKAAKKFMEENEKLKRILKSHGKDEECVLEAENKKLVEDQEKLKTELRKTSDALSKAQNDVMEMKMQSERLSKEYDQLLKEHSELQ

SEQ ID NO: 8493 - protein, 163 aa, Homo sapiens
  Payload ID: 1764;
  Gene Symbol: BCAP29;
  Gene Name: B-cell receptor-associated prt 29;
  ENSP ID: ENSP00000414164
  MOD_RES (1)..(1): Any amino acid
XDAYEHTQMKLFRSQRNLYISGFSLFFWLVLRRLVTLITQLAKELSNKGVLKTQAENTNKAAKKFMEENEKLKRILKSHGKDEECVLEAENKKLVEDQEKLKTELRKTSDALSKAQNDVMEMKMQSERLSKEYDQLLKEHSELQKSHSQPGAAAFLVKEVESF

SEQ ID NO: 8494 - protein, 196 aa, Homo sapiens
  Payload ID: 1764;
  Gene Symbol: BCAP29;
  Gene Name: B-cell receptor-associated prt 29;
  ENSP ID: ENSP00000418816
MTLQWAAVATFLYAEIGLILIFCLPFIPPQRWQKIFSFNVWGKIATFWNKAFLTIIILLIVLFLDAVREVRKYSSVHTIEKSSTSRPDAYEHTQMKLFRSQRNLYISGFSLFFWLVLRRLVTLITQLAKELSNKGVLKTQAENTNKAAKKFMEENEKLKRILKSHGKDEECVLEAENKKLVEDQEKLKTELRKTSD

SEQ ID NO: 8495 - protein, 147 aa, Homo sapiens
  Payload ID: 1764;
  Gene Symbol: BCAP29;
  Gene Name: B-cell receptor-associated prt 29;
  ENSP ID: ENSP00000418993
MKLFRSQRNLYISGFSLFFWLVLRRLVTLITQLAKELSNKGVLKTQAENTNKAAKKFMEENEKLKRILKSHGKDEECVLEAENKKLVEDQEKLKTELRKTSDALSKAQNDVMEMKMQSERLSKEYDQLLKEHSELQDRLERGNKKRL

SEQ ID NO: 8496 - protein, 294 aa, Homo sapiens
  Payload ID: 1764;
  Gene Symbol: BCAP29;
  Gene Name: B-cell receptor-associated prt 29;
  ENSP ID: ENSP00000419681
IATFWNKAFLTIIILLIVLFLDAVREVRKYSSVHTIEKSSTSRPDAYEHTQMKLFRSQRNLYISGFSLFFWLVLRRLVTLITQLAKELSNKGVLKTQAENTNKAAKKFMEENEKLKRILKSHGKDEECVLEAENKKLVEDQEKLKTELRKTSDALSKAQNDVMEMKMQSERLSKEYDQLLKEHSELQKQREILPHRRGESTVTTEAEIGVMEPQQRNADSHQKLEEAKNRFFPRASSSRSMALQIPIKLILDFLASRTMGINLLFQAIKFVIICYCCHSKLIQEHAGQICNGLN

SEQ ID NO: 8497 - protein, 64 aa, Homo sapiens
  Payload ID: 1764;
  Gene Symbol: BCAP29;
  Gene Name: B-cell receptor-associated prt 29;
  ENSP ID: ENSP00000420313
MTLQWAAVATFLYAEIGLILIFCLPFIPPQRWQKIFSFNVWGKIATFWNKAFLTIIILLIVLFL

SEQ ID NO: 8498 - protein, 66 aa, Homo sapiens
  Payload ID: 1764;
  Gene Symbol: BCAP29;
  Gene Name: B-cell receptor-associated prt 29;
  ENSP ID: ENSP00000420365
MTLQWAAVATFLYAEIGLILIFCLPFIPPQRWQKIFSFNVWGKIATFWNKAFLTIIILLIVLFLEF

SEQ ID NO: 8499 - protein, 246 aa, Homo sapiens
  Payload ID: 1765;
  Gene Symbol: BCAP31;
  Gene Name: B-cell receptor-associated prt 31;
  Uniprot ID:  P51572;
  ENSP ID: ENSP00000343458
MSLQWTAVATFLYAEVFVVLLLCIPFISPKRWQKIFKSRLVELLVSYGNTFFVVLIVILVLLVIDAVREIRKYDDVTEKVNLQNNPGAMEHFHMKLFRAQRNLYIAGFSLLLSFLLRRLVTLISQQATLLASNEAFKKQAESASEAAKKYMEENDQLKKGAAVDGGKLDVGNAEVKLEEENRSLKADLQKLKDELASTKQKLEKAENQVLAMRKQSEGLTKEYDRLLEEHAKLQAAVDGPMDKKEE

SEQ ID NO: 8500 - protein, 178 aa, Homo sapiens
  Payload ID: 1765;
  Gene Symbol: BCAP31;
  Gene Name: B-cell receptor-associated prt 31;
  ENSP ID: ENSP00000389740
MSLQWTAVATFLYAEVFVVLLLCIPFISPKRWQKIFKSRLVELLVSYGNTFFVVLIVILVLLVIDAVREIRKYDDVTEKVNLQNNPGAMEHFHMKLFRAQRNLYIAGFSLLLSFLLRRLVTLISQQATLLASNEAFKKQAESASEAAKKYMEENDQLKKGAAVDGGKLDVGNAEVKLE

SEQ ID NO: 8501 - protein, 313 aa, Homo sapiens
  Payload ID: 1765;
  Gene Symbol: BCAP31;
  Gene Name: B-cell receptor-associated prt 31;
  Uniprot ID:  P51572;
  ENSP ID: ENSP00000392330
MGAEASSSWCPGTALPEERLSVKRASEISGFLGQGSSGEAALDVLTHVLEGAGNKLTSSCGKPSSNRMSLQWTAVATFLYAEVFVVLLLCIPFISPKRWQKIFKSRLVELLVSYGNTFFVVLIVILVLLVIDAVREIRKYDDVTEKVNLQNNPGAMEHFHMKLFRAQRNLYIAGFSLLLSFLLRRLVTLISQQATLLASNEAFKKQAESASEAAKKYMEENDQLKKGAAVDGGKLDVGNAEVKLEEENRSLKADLQKLKDELASTKQKLEKAENQVLAMRKQSEGLTKEYDRLLEEHAKLQAAVDGPMDKKEE

SEQ ID NO: 8502 - protein, 182 aa, Homo sapiens
  Payload ID: 1765;
  Gene Symbol: BCAP31;
  Gene Name: B-cell receptor-associated prt 31;
  ENSP ID: ENSP00000394270
MSLQWTAVATFLYAEVFVVLLLCIPFISPKRWQKIFKSRLVELLVSYGNTFFVVLIVILVLLVIDAVREIRKYDDVTEKVNLQNNPGAMEHFHMKLFRAQRNLYIAGFSLLLSFLLRRLVTLISQQATLLASNEAFKKQAESASEAAKKYMEENDQLKKGAAVDGGKLDVGNAEVKLEEENR

SEQ ID NO: 8503 - protein, 188 aa, Homo sapiens
  Payload ID: 1765;
  Gene Symbol: BCAP31;
  Gene Name: B-cell receptor-associated prt 31;
  ENSP ID: ENSP00000400345
MSLQWTAVATFLYAEVFVVLLLCIPFISPKRWQKIFKSRLVELLVSYGNTFFVVLIVILVLLVIDAVREIRKYDDVTEKVNLQNNPGAMEHFHMKLFRAQRNLYIAGFSLLLSFLLRRLVTLISQQATLLASNEAFKKQAESASEAAKKYMEENDQLKKGAAVDGGKLDVGNAEVKLEEENRSLKADL

SEQ ID NO: 8504 - protein, 138 aa, Homo sapiens
  Payload ID: 1765;
  Gene Symbol: BCAP31;
  Gene Name: B-cell receptor-associated prt 31;
  ENSP ID: ENSP00000402342
MSLQWTAVATFLYAEVFVVLLLCIPFISPKRWQKIFKSRLVELLVSYGNTFFVVLIVILVLLVIDAVREIRKYDDVTEKVNLQNNPGAMEHFHMKLFRAQRNLYIAGFSLLLSFLLRRLVTLISQQATLLASNEAFKK

SEQ ID NO: 8505 - protein, 187 aa, Homo sapiens
  Payload ID: 1765;
  Gene Symbol: BCAP31;
  Gene Name: B-cell receptor-associated prt 31;
  ENSP ID: ENSP00000409888
MSLQWTAVATFLYAEVFVVLLLCIPFISPKRWQKIFKSRLVELLVSYGNTFFVVLIVILVLLVIDAVREIRKYDDVTEKVNLQNNPGAMEHFHMKLFRAQRNLYIAGFSLLLSFLLRRLVTLISQQATLLASNEAFKKQAESASEAAKKYMEENDQLKKGAAVDGGKLDVGNAEVKLEEENRSLKAD

SEQ ID NO: 8506 - protein, 785 aa, Homo sapiens
  Payload ID: 1766;
  Gene Symbol: BANK1;
  Gene Name: B-cell scaffold prt with ankyrin repeats 1;
  Uniprot ID:  Q8NDB2;
  ENSP ID: ENSP00000320509
MLPAAPGKGLGSPDPAPCGPAPPGNTKDIIMIYEEDAEEWALYLTEVFLHVVKREAILLYRLENFSFRHLELLNLTSYKCKLLILSNSLLRDLTPKKCQFLEKILHSPKSVVTLLCGVKSSDQLYELLNISQSRWEISTEQEPEDYISVIQSIIFKDSEDYFEVNIPTDLRAKHSGEISERKEIEELSEASRNTIPLAVVLPTEIPCENPGEIFIILRDEVIGDTVEVEFTSSNKRIRTRPALWNKKVWCMKALEFPAGSVHVNVYCDGIVKATTKIKYYPTAKAKECLFRMADSGESLCQNSIEELDGVLTSIFKHEIPYYEFQSLQTEICSQNKYTHFKELPTLLHCAAKFGLKNLAIHLLQCSGATWASKMKNMEGSDPAHIAERHGHKELKKIFEDFSIQEIDINNEQENDYEEDIASFSTYIPSTQNPAFHHESRKTYGQSADGAEANEMEGEGKQNGSGMETKHSPLEVGSESSEDQYDDLYVFIPGADPENNSQEPLMSSRPPLPPPRPVANAFQLERPHFTLPGTMVEGQMERSQNWGHPGVRQETGDEPKGEKEKKEEEKEQEEEEDPYTFAEIDDSEYDMILANLSIKKKTGSRSFIINRPPAPTPRPTSIPPKEETTPYIAQVFQQKTARRQSDDDKFCGLPKKQDRARIESPAFSTLRGCLTDGQEELILLQEKVKNGKMSMDEALEKFKHWQMGKSGLEMIQQEKLRQLRDCIIGKRPEEENVYNKLTIVHHPGGKETAHNENKFYNVHFSNKLPARPQVEKEFGFCCKKDH

SEQ ID NO: 8507 - protein, 755 aa, Homo sapiens
  Payload ID: 1766;
  Gene Symbol: BANK1;
  Gene Name: B-cell scaffold prt with ankyrin repeats 1;
  Uniprot ID:  Q8NDB2;
  ENSP ID: ENSP00000388817
MIYEEDAEEWALYLTEVFLHVVKREAILLYRLENFSFRHLELLNLTSYKCKLLILSNSLLRDLTPKKCQFLEKILHSPKSVVTLLCGVKSSDQLYELLNISQSRWEISTEQEPEDYISVIQSIIFKDSEDYFEVNIPTDLRAKHSGEISERKEIEELSEASRNTIPLAVVLPTEIPCENPGEIFIILRDEVIGDTVEVEFTSSNKRIRTRPALWNKKVWCMKALEFPAGSVHVNVYCDGIVKATTKIKYYPTAKAKECLFRMADSGESLCQNSIEELDGVLTSIFKHEIPYYEFQSLQTEICSQNKYTHFKELPTLLHCAAKFGLKNLAIHLLQCSGATWASKMKNMEGSDPAHIAERHGHKELKKIFEDFSIQEIDINNEQENDYEEDIASFSTYIPSTQNPAFHHESRKTYGQSADGAEANEMEGEGKQNGSGMETKHSPLEVGSESSEDQYDDLYVFIPGADPENNSQEPLMSSRPPLPPPRPVANAFQLERPHFTLPGTMVEGQMERSQNWGHPGVRQETGDEPKGEKEKKEEEKEQEEEEDPYTFAEIDDSEYDMILANLSIKKKTGSRSFIINRPPAPTPRPTSIPPKEETTPYIAQVFQQKTARRQSDDDKFCGLPKKQDRARIESPAFSTLRGCLTDGQEELILLQEKVKNGKMSMDEALEKFKHWQMGKSGLEMIQQEKLRQLRDCIIGKRPEEENVYNKLTIVHHPGGKETAHNENKFYNVHFSNKLPARPQVEKEFGFCCKKDH

SEQ ID NO: 8508 - protein, 652 aa, Homo sapiens
  Payload ID: 1766;
  Gene Symbol: BANK1;
  Gene Name: B-cell scaffold prt with ankyrin repeats 1;
  Uniprot ID:  Q8NDB2;
  ENSP ID: ENSP00000412748
MLPAAPGKGLGSPDPAPCGPAPPDSEDYFEVNIPTDLRAKHSGEISERKEIEELSEASRNTIPLAVVLPTEIPCENPGEIFIILRDEVIGDTVEVEFTSSNKRIRTRPALWNKKVWCMKALEFPAGSVHVNVYCDGIVKATTKIKYYPTAKAKECLFRMADSGESLCQNSIEELDGVLTSIFKHEIPYYEFQSLQTEICSQNKYTHFKELPTLLHCAAKFGLKNLAIHLLQCSGATWASKMKNMEGSDPAHIAERHGHKELKKIFEDFSIQEIDINNEQENDYEEDIASFSTYIPSTQNPAFHHESRKTYGQSADGAEANEMEGEGKQNGSGMETKHSPLEVGSESSEDQYDDLYVFIPGADPENNSQEPLMSSRPPLPPPRPVANAFQLERPHFTLPGTMVEGQMERSQNWGHPGVRQETGDEPKGEKEKKEEEKEQEEEEDPYTFAEIDDSEYDMILANLSIKKKTGSRSFIINRPPAPTPRPTSIPPKEETTPYIAQVFQQKTARRQSDDDKFCGLPKKQDRARIESPAFSTLRGCLTDGQEELILLQEKVKNGKMSMDEALEKFKHWQMGKSGLEMIQQEKLRQLRDCIIGKRPEEENVYNKLTIVHHPGGKETAHNENKFYNVHFSNKLPARPQVEKEFGFCCKKDH

SEQ ID NO: 8509 - protein, 770 aa, Homo sapiens
  Payload ID: 1766;
  Gene Symbol: BANK1;
  Gene Name: B-cell scaffold prt with ankyrin repeats 1;
  Uniprot ID:  Q8NDB2;
  ENSP ID: ENSP00000421443
MVNCHLKIGNTKDIIMIYEEDAEEWALYLTEVFLHVVKREAILLYRLENFSFRHLELLNLTSYKCKLLILSNSLLRDLTPKKCQFLEKILHSPKSVVTLLCGVKSSDQLYELLNISQSRWEISTEQEPEDYISVIQSIIFKDSEDYFEVNIPTDLRAKHSGEISERKEIEELSEASRNTIPLAVVLPTEIPCENPGEIFIILRDEVIGDTVEVEFTSSNKRIRTRPALWNKKVWCMKALEFPAGSVHVNVYCDGIVKATTKIKYYPTAKAKECLFRMADSGESLCQNSIEELDGVLTSIFKHEIPYYEFQSLQTEICSQNKYTHFKELPTLLHCAAKFGLKNLAIHLLQCSGATWASKMKNMEGSDPAHIAERHGHKELKKIFEDFSIQEIDINNEQENDYEEDIASFSTYIPSTQNPAFHHESRKTYGQSADGAEANEMEGEGKQNGSGMETKHSPLEVGSESSEDQYDDLYVFIPGADPENNSQEPLMSSRPPLPPPRPVANAFQLERPHFTLPGTMVEGQMERSQNWGHPGVRQETGDEPKGEKEKKEEEKEQEEEEDPYTFAEIDDSEYDMILANLSIKKKTGSRSFIINRPPAPTPRPTSIPPKEETTPYIAQVFQQKTARRQSDDDKFCGLPKKQDRARIESPAFSTLRGCLTDGQEELILLQEKVKNGKMSMDEALEKFKHWQMGKSGLEMIQQEKLRQLRDCIIGKRPEEENVYNKLTIVHHPGGKETAHNENKFYNVHFSNKLPARPQVEKEFGFCCKKDH

SEQ ID NO: 8510 - protein, 652 aa, Homo sapiens; identical to SEQ ID NO: 8508
  Payload ID: 1766;
  Gene Symbol: BANK1;
  Gene Name: B-cell scaffold prt with ankyrin repeats 1;
  Uniprot ID:  Q8NDB2;
  ENSP ID: ENSP00000422314

SEQ ID NO: 8511 - protein, 171 aa, Homo sapiens
  Payload ID: 1767;
  Gene Symbol: BTG1;
  Gene Name: B-cell translocation gene 1, anti-proliferative;
  Uniprot ID:  P62324;
  ENSP ID: ENSP00000256015
MHPFYTRAATMIGEIAAAVSFISKFLRTKGLTSERQLQTFSQSLQELLAEHYKHHWFPEKPCKGSGYRCIRINHKMDPLIGQAAQRIGLSSQELFRLLPSELTLWVDPYEVSYRIGEDGSICVLYEASPAGGSTQNSTNVQMVDSRISCKEELLLGRTSPSKNYNMMTVSG

SEQ ID NO: 8512 - protein, 84 aa, Homo sapiens
  Payload ID: 1767;
  Gene Symbol: BTG1;
  Gene Name: B-cell translocation gene 1, anti-proliferative;
  ENSP ID: ENSP00000447551
MDPLIGQAAQRIGLSSQELFRLLPSELTLWVDPYEVSYRIGEDGSICVLYEASPAGGSTQNSTNVQMVDSRISCKEELLLGRTS

SEQ ID NO: 8513 - protein, 223 aa, Homo sapiens
  Payload ID: 1768;
  Gene Symbol: BTG4;
  Gene Name: B-cell translocation gene 4;
  Uniprot ID:  Q9NY30;
  ENSP ID: ENSP00000348300
MRDEIATTVFFVTRLVKKHDKLSKQQIEDFAEKLMTILFETYRSHWHSDCPSKGQAFRCIRINNNQNKDPILERACVESNVDFSHLGLPKEMTIWVDPFEVCCRYGEKNHPFTVASFKGRWEEWELYQQISYAVSRASSDVSSGTSCDEESCSKEPRVIPKVSNPKSIYQVENLKQPFQSWLQIPRKKNVVDGRVGLLGNTYHGSQKHPKCYRPAMHRLDRIL

SEQ ID NO: 8514 - protein, 160 aa, Homo sapiens
  Payload ID: 1768;
  Gene Symbol: BTG4;
  Gene Name: B-cell translocation gene 4;
  ENSP ID: ENSP00000392358
MRDEIATTVFFVTRLVKKHDKLSKQQIEDFAEKLMTILFETYRSHWHSDCPSKGQAFRCIRINNNQNKDPILERACVESNVDFSHLGLPKEMTIWVDPFEVCCRYGEKNHPFTVASFKGRWEEWELYQQISYAVSRASSDVSSGTSCDEESCSKEPRVIP

SEQ ID NO: 8515 - protein, 206 aa, Homo sapiens
  Payload ID: 1768;
  Gene Symbol: BTG4;
  Gene Name: B-cell translocation gene 4;
  Uniprot ID:  Q9NY30;
  ENSP ID: ENSP00000432018
MRDEIATTVFFVTRLVKKHDKLSKQQIEDFAEKLMTILFETYRSHWHSDCPSKGQAFRCIRINNNQNKDPILERACVESNVDFSHLGLPKEMTIWVDPFEVCCRYGEKNHPFTVASFKGRWEEWELYQQISYAVSRASSDVSSGTSCDEESCSKEPRVIPKVSNPKSIYQVKSVPVLFYTFFLSNSKKNALIMKTKKQKNMERTKL

SEQ ID NO: 8516 - protein, 101 aa, Homo sapiens
  Payload ID: 1769;
  Gene Symbol: BBC3;
  Gene Name: BCL2 binding component 3;
  Uniprot ID:  Q96PG8;
  ENSP ID: ENSP00000300880
MKFGMGSAQACPCQVPRAASTTWVPCQICETRGAAAAPPLTLEGPVQSHHGTPALTQGPQSPRDGAQLGACTRPVDVRDSGGRPLPPPDTLASAGDFLCTM

SEQ ID NO: 8517 - protein, 131 aa, Homo sapiens
  Payload ID: 1769;
  Gene Symbol: BBC3;
  Gene Name: BCL2 binding component 3;
  Uniprot ID:  Q9BXH1;
  ENSP ID: ENSP00000341155
MKFGMGSAQACPCQVPRAASTTWVPCQICGPQPSLSLAEQHLESPVPSAPGALAGGPTQAAPGVRGEEEQWAREIGAQLRRMADDLNAQYERRRQEEQQRHRPSPWRVLYNLIMGLLPLPRGHRAPEMEPN

SEQ ID NO: 8518 - protein, 193 aa, Homo sapiens
  Payload ID: 1769;
  Gene Symbol: BBC3;
  Gene Name: BCL2 binding component 3;
  Uniprot ID:  Q9BXH1;
  ENSP ID: ENSP00000395862
MARARQEGSSPEPVEGLARDGPRPFPLGRLVPSAVSCGLCEPGLAAAPAAPTLLPAAYLCAPTAPPAVTAALGGSRWPGGPRSRPRGPRPDGPQPSLSLAEQHLESPVPSAPGALAGGPTQAAPGVRGEEEQWAREIGAQLRRMADDLNAQYERRRQEEQQRHRPSPWRVLYNLIMGLLPLPRGHRAPEMEPN

SEQ ID NO: 8519 - protein, 261 aa, Homo sapiens
  Payload ID: 1769;
  Gene Symbol: BBC3;
  Gene Name: BCL2 binding component 3;
  Uniprot ID:  Q96PG8;
  ENSP ID: ENSP00000404503
MKFGMGSAQACPCQVPRAASTTWVPCQICGPRERHGPRTPGGQLPGARRGPGPRRPAPLPARPPGALGSVLRPLRARPGCRPRRPHPAARCLPLRPHRPTRRHRRPGGFPLAWGSPQPAPRPAPGRSSALALAGGAAPGVARAQRPGGSGGRSHPGGPGSPRGGGTVGPGDRGPAAADGGRPQRTVRAAETRGAAAAPPLTLEGPVQSHHGTPALTQGPQSPRDGAQLGACTRPVDVRDSGGRPLPPPDTLASAGDFLCTM

SEQ ID NO: 8520 - protein, 184 aa, Homo sapiens
  Payload ID: 1770;
  Gene Symbol: BMF;
  Gene Name: Bcl2 modifying factor;
  Uniprot ID:  Q96LC9;
  ENSP ID: ENSP00000346697
MEPSQCVEELEDDVFQPEDGEPVTQPGSLLSADLFAQSLLDCPLSRLQLFPLTHCCGPGLRPTSQEDKATQTLSPASPSQGVMLPCGVTEEPQRLFYGNAGYRLPLPASFPAVLPIGEQPPEGQWQHQAEVQIARKLQCIADQFHRLHVQQHQQNQNRVWWQILLFLHNLALNGEENRNGAGPR

SEQ ID NO: 8521 - protein, 184 aa, Homo sapiens; identical to SEQ ID NO: 8520
  Payload ID: 1770;
  Gene Symbol: BMF;
  Gene Name: Bcl2 modifying factor;
  Uniprot ID:  Q96LC9;
  ENSP ID: ENSP00000380703

SEQ ID NO: 8522 - protein, 163 aa, Homo sapiens
  Payload ID: 1770;
  Gene Symbol: BMF;
  Gene Name: Bcl2 modifying factor;
  Uniprot ID:  Q96LC9;
  ENSP ID: ENSP00000396511
MEPSQCVEELEDDVFQPEDGEPVTQPGSLLSADLFAQSLLDCPLSRLQLFPLTHCCGPGLRPTSQEDKATQTLSPASPSQGVMLPCGVTEEPQRLFYGNAGYRLPLPASFPAVLPIGEQPPEGQWQHQAEHQQNQNRVWWQILLFLHNLALNGEENRNGAGPR

SEQ ID NO: 8523 - protein, 13 aa, Homo sapiens
  Payload ID: 1770;
  Gene Symbol: BMF;
  Gene Name: Bcl2 modifying factor;
  ENSP ID: ENSP00000452660
MEPSQCVEELEDD

SEQ ID NO: 8524 - protein, 184 aa, Homo sapiens; identical to SEQ ID NO: 8520
  Payload ID: 1770;
  Gene Symbol: BMF;
  Gene Name: Bcl2 modifying factor;
  Uniprot ID:  Q96LC9;
  ENSP ID: ENSP00000453522

SEQ ID NO: 8525 - protein, 184 aa, Homo sapiens; identical to SEQ ID NO: 8520
  Payload ID: 1770;
  Gene Symbol: BMF;
  Gene Name: Bcl2 modifying factor;
  Uniprot ID:  Q96LC9;
  ENSP ID: ENSP00000453892

SEQ ID NO: 8526 - protein, 129 aa, Homo sapiens
  Payload ID: 1770;
  Gene Symbol: BMF;
  Gene Name: Bcl2 modifying factor;
  Uniprot ID:  Q96LC9;
  ENSP ID: ENSP00000453913
MEPSQCVEELEDDVFQPEDGEPVTQPGSLLSADLFAQSLLDCPLSRLQLFPLTHCCGPGLRPTSQEDKATQTLSPASPSQGVMLPCGVTEEPQRLFYAPAEPKSCVVADPPLPAQPCFEWRREQERGRP

SEQ ID NO: 8527 - protein, 129 aa, Homo sapiens; identical to SEQ ID NO: 8526
  Payload ID: 1770;
  Gene Symbol: BMF;
  Gene Name: Bcl2 modifying factor;
  Uniprot ID:  Q96LC9;
  ENSP ID: ENSP00000453919

SEQ ID NO: 8528 - protein, 61 aa, Homo sapiens
  Payload ID: 1770;
  Gene Symbol: BMF;
  Gene Name: Bcl2 modifying factor;
  ENSP ID: ENSP00000454142
MEPSQCVEELEDDVFQPEDGEPVTQPGSLLSADLFAQSLLDCPLSRLQLFPLTHCCGPGLR

SEQ ID NO: 8529 - protein, 275 aa, Homo sapiens
  Payload ID: 1771;
  Gene Symbol: BNIPL;
  Gene Name: BCL2/adenovirus E1B 19kD interacting prt like;
  Uniprot ID:  Q7Z465;
  ENSP ID: ENSP00000295294
MRKRLSAPELRLSLTKGPGNDGASPTQSAPSSPDGSSDLEIDELETPSDSEQLDSGHEFEWEDELPRAEGLGTSETAERLGRGCMWDVTGEDGHHWRVFRMGPREQRVDMTVIEPYKKVLSHGGYHGDGLNAVILFASCYLPRSSIPNYTYVMEHLFRYMVGTLELLVAENYLLVHLSGGTSRAQVPPLSWIRQCYRTLDRRLRKNLRALVVVHATWYVKAFLALLRPFISSKFTRKIRFLDSLGELAQLISLDQVHIPEAVRQLDRDLHGSGGT

SEQ ID NO: 8530 - protein, 341 aa, Homo sapiens
  Payload ID: 1771;
  Gene Symbol: BNIPL;
  Gene Name: BCL2/adenovirus E1B 19kD interacting prt like;
  ENSP ID: ENSP00000355333
  MOD_RES (1)..(1): Any amino acid
XREIAEAPELGAALRHGELELKEEWQDEEFPRLLPEEAGTSEDPEDPKGDSQAGTPSTLALCGQRPMRKRLSAPELRLSLTKGPGNDGASPTQSAPSSPDGSSDLEIDELETPSDSEQLDSGHEFEWEDELPRAEGLGTSETAERLGRGCMWDVTGEDGHHWRVFRMGPREQRVDMTVIEPYKKVLSHGGYHGDGLNAVILFASCYLPRSSIPNYTYVMEHLFRYMVGTLELLVAENYLLVHLSGGTSRAQVPPLSWIRQCYRTLDRRLRKNLRALVVVHATWYVKAFLALLRPFISSKFTRKIRFLDSLGELAQLISLDQVHIPEAVRQLDRDLHGSGGT

SEQ ID NO: 8531 - protein, 357 aa, Homo sapiens
  Payload ID: 1771;
  Gene Symbol: BNIPL;
  Gene Name: BCL2/adenovirus E1B 19kD interacting prt like;
  Uniprot ID:  Q7Z465;
  ENSP ID: ENSP00000357927
MGTIQEAGKKTDVGVREIAEAPELGAALRHGELELKEEWQDEEFPRLLPEEAGTSEDPEDPKGDSQAAAGTPSTLALCGQRPMRKRLSAPELRLSLTKGPGNDGASPTQSAPSSPDGSSDLEIDELETPSDSEQLDSGHEFEWEDELPRAEGLGTSETAERLGRGCMWDVTGEDGHHWRVFRMGPREQRVDMTVIEPYKKVLSHGGYHGDGLNAVILFASCYLPRSSIPNYTYVMEHLFRYMVGTLELLVAENYLLVHLSGGTSRAQVPPLSWIRQCYRTLDRRLRKNLRALVVVHATWYVKAFLALLRPFISSKFTRKIRFLDSLGELAQLISLDQVHIPEAVRQLDRDLHGSGGT

SEQ ID NO: 8532 - protein, 100 aa, Homo sapiens
  Payload ID: 1771;
  Gene Symbol: BNIPL;
  Gene Name: BCL2/adenovirus E1B 19kD interacting prt like;
  ENSP ID: ENSP00000376550
MRKRLSAPELRLSLTKGPGNDGASPTQSAPSSPDGSSDLEIDELETPSDSEQLDSGHEFEWEDELPRAEGLGTSETAERLGRGCMWDVTGEDGHHWRVFR

SEQ ID NO: 8533 - protein, 204 aa, Homo sapiens
  Payload ID: 1771;
  Gene Symbol: BNIPL;
  Gene Name: BCL2/adenovirus E1B 19kD interacting prt like;
  Uniprot ID:  Q7Z465;
  ENSP ID: ENSP00000435072
MRKRLSAPELRLSLTKGPGNDGASPTQSAPSSPDGSSDLEIDELETPSDSEQLDSGHEFEWEDELPRAEGLGTSETAERLGRGCMWDVTGEDGHHWRVFRMGPREQRVDMTVIEPYKKVLSHGGYHGDGLNAVILFASCYLPRSSIPNYTYVMEHLFRYMVGTLELLVAENYLLVHLSGGTSRAQVPPLSWIRQCYRTLDRRVL

SEQ ID NO: 8534 - protein, 271 aa, Homo sapiens
  Payload ID: 1772;
  Gene Symbol: BNIP1;
  Gene Name: BCL2/adenovirus E1B 19kDa interacting prt 1;
  Uniprot ID:  Q12981;
  ENSP ID: ENSP00000231668
MAAPQDVHVRICNQEIVKFDLEVKALIQDIRDCSGPLSALTELNTKVKEKFQQLRHRIQPVLYQRAFIWTASTFFFKLTYSLTDFSSTQHDFNSPTTPVTFSDLEQLAKEQDKESEKQLLLQEVENHKKQMLSNQASWRKANLTCKIAIDNLEKAELLQGGDLLRQRKTTKESLAQTSSTITESLMGISRMMAQQVQQSEEAMQSLVTSSRTILDANEEFKSMSGTIQLGRKLITKYNRRELTDKLLIFLALALFLATVLYIVKKRLFPFL

SEQ ID NO: 8535 - protein, 237 aa, Homo sapiens
  Payload ID: 1772;
  Gene Symbol: BNIP1;
  Gene Name: BCL2/adenovirus E1B 19kDa interacting prt 1;
  Uniprot ID:  Q12981;
  ENSP ID: ENSP00000239214
MAAPQDVHVRICNQEIVKFDLEVKALIQDIRDCSGPLSALTELNTKVKEKFQQLRHRIQPVLYQRAFIWTASTFFFKLTYSLTDFSSTQHDFNSPTTPVTFSDLEQLAKEQDKESEKQLLLQEVENHKKQMLRKTTKESLAQTSSTITESLMGISRMMAQQVQQSEEAMQSLVTSSRTILDANEEFKSMSGTIQLGRKLITKYNRRELTDKLLIFLALALFLATVLYIVKKRLFPFL

SEQ ID NO: 8536 - protein, 228 aa, Homo sapiens
  Payload ID: 1772;
  Gene Symbol: BNIP1;
  Gene Name: BCL2/adenovirus E1B 19kDa interacting prt 1;
  Uniprot ID:  Q12981;
  ENSP ID: ENSP00000239215
MAAPQDVHVRICNQEIVKFDLEVKALIQDIRDCSGPLSALTELNTKVKEKFQQLRHRIQDLEQLAKEQDKESEKQLLLQEVENHKKQMLSNQASWRKANLTCKIAIDNLEKAELLQGGDLLRQRKTTKESLAQTSSTITESLMGISRMMAQQVQQSEEAMQSLVTSSRTILDANEEFKSMSGTIQLGRKLITKYNRRELTDKLLIFLALALFLATVLYIVKKRLFPFL

SEQ ID NO: 8537 - protein, 194 aa, Homo sapiens
  Payload ID: 1772;
  Gene Symbol: BNIP1;
  Gene Name: BCL2/adenovirus E1B 19kDa interacting prt 1;
  Uniprot ID:  Q12981;
  ENSP ID: ENSP00000377365
MAAPQDVHVRICNQEIVKFDLEVKALIQDIRDCSGPLSALTELNTKVKEKFQQLRHRIQDLEQLAKEQDKESEKQLLLQEVENHKKQMLRKTTKESLAQTSSTITESLMGISRMMAQQVQQSEEAMQSLVTSSRTILDANEEFKSMSGTIQLGRKLITKYNRRELTDKLLIFLALALFLATVLYIVKKRLFPFL

SEQ ID NO: 8538 - protein, 40 aa, Homo sapiens
  Payload ID: 1772;
  Gene Symbol: BNIP1;
  Gene Name: BCL2/adenovirus E1B 19kDa interacting prt 1;
  ENSP ID: ENSP00000429717
TESLMGISRMMAQQVQQSEEAMQSLVPFKRCESEATGETA

SEQ ID NO: 8539 - protein, 435 aa, Homo sapiens
  Payload ID: 1773;
  Gene Symbol: BNIP2;
  Gene Name: BCL2/adenovirus E1B 19kDa interacting prt 2;
  ENSP ID: ENSP00000267859
MLCGFQEDATPPPPPRPRRLHRRLPRPEEVGMLSLPPGLLTVSGSAAAADAVPLRPGDWAGVSTADRGERAPLGPAFCDLAVSPTSPAWRGEEDEGAKASSGDIGSLDYQEFVVDIESRLRMEGVELKEEWQDEDFPIPLPEDDSIEADILAITGPEDQPGSLEVNGNKVRKKLMAPDISLTLDPSDGSVLSDDLDESGEIDLDGLDTPSENSNEFEWEDDLPKPKTTEVIRKGSITEYTAAEEKEDGRRWRMFRIGEQDHRVDMKAIEPYKKVISHGGYYGDGLNAIVVFAVCFMPESSQPNYRYLMDNLFKYVIGTLELLVAENYMIVYLNGATTRRKMPSLGWLRKCYQQIDRRLRKNLKSLIIVHPSWFIRTLLAVTRPFISSKFSQKIRYVFNLAELAELVPMEYVGIPECIKQVDQELNGKQDEPKNEQ

SEQ ID NO: 8540 - protein, 204 aa, Homo sapiens
  Payload ID: 1773;
  Gene Symbol: BNIP2;
  Gene Name: BCL2/adenovirus E1B 19kDa interacting prt 2;
  ENSP ID: ENSP00000393644
EKEDGRRWRMFRIGEQDHRVDMKAIEPYKKVISHGGYYGDGLNAIVVFAVCFMPESSQPNYRYLMDNLFKYVIGTLELLVAENYMIVYLNGATTRRKMPSLGWLRKCYQQIDRRLRKNLKSLIIVHPSWFIRTLLAVTRPFISSKFSQKIRYVFNLAELAELVPMEYVGIPECIKQYEEEKFKKKQKRVDQELNGKQDEPKNEQ

SEQ ID NO: 8541 - protein, 87 aa, Homo sapiens
  Payload ID: 1773;
  Gene Symbol: BNIP2;
  Gene Name: BCL2/adenovirus E1B 19kDa interacting prt 2;
  ENSP ID: ENSP00000398364
  MOD_RES (1)..(1): Any amino acid
XDDSIEADILAITGPEDQPGSLEVNGNKVRKKLMAPDISLTLDPSDGSVLSDDLDESGEIDLDGLDTPSENSNEFEWEVISWKDIFR

SEQ ID NO: 8542 - protein, 376 aa, Homo sapiens
  Payload ID: 1773;
  Gene Symbol: BNIP2;
  Gene Name: BCL2/adenovirus E1B 19kDa interacting prt 2;
  Uniprot ID:  Q12982;
  ENSP ID: ENSP00000412767
MEPCPSSAPPPFYPGVGEVAGLRWFSIYDQRPSWYRTKKLGLLDIGSLDYQEFVVDIESRLRMEGVELKEEWQDEDFPIPLPEDDSIEADILAITGPEDQPGSLEVNGNKVRKKLMAPDISLTLDPSDGSVLSDDLDESGEIDLDGLDTPSENSNEFEWEDDLPKPKTTEVIRKGSITEYTAAEEKEDGRRWRMFRIGEQDHRVDMKAIEPYKKVISHGGYYGDGLNAIVVFAVCFMPESSQPNYRYLMDNLFKYVIGTLELLVAENYMIVYLNGATTRRKMPSLGWLRKCYQQIDRRLRKNLKSLIIVHPSWFIRTLLAVTRPFISSKFSQKIRYVFNLAELAELVPMEYVGIPECIKQVDQELNGKQDEPKNEQ

SEQ ID NO: 8543 - protein, 314 aa, Homo sapiens
  Payload ID: 1773;
  Gene Symbol: BNIP2;
  Gene Name: BCL2/adenovirus E1B 19kDa interacting prt 2;
  Uniprot ID:  Q12982;
  ENSP ID: ENSP00000475320
MEGVELKEEWQDEDFPIPLPEDDSIEADILAITGPEDQPGSLEVNGNKVRKKLMAPDISLTLDPSDGSVLSDDLDESGEIDLDGLDTPSENSNEFEWEDDLPKPKTTEVIRKGSITEYTAAEEKEDGRRWRMFRIGEQDHRVDMKAIEPYKKVISHGGYYGDGLNAIVVFAVCFMPESSQPNYRYLMDNLFKYVIGTLELLVAENYMIVYLNGATTRRKMPSLGWLRKCYQQIDRRLRKNLKSLIIVHPSWFIRTLLAVTRPFISSKFSQKIRYVFNLAELAELVPMEYVGIPECIKQVDQELNGKQDEPKNEQ

SEQ ID NO: 8544 - protein, 435 aa, Homo sapiens; identical to SEQ ID NO: 8539
  Payload ID: 1773;
  Gene Symbol: BNIP2;
  Gene Name: BCL2/adenovirus E1B 19kDa interacting prt 2;
  ENSP ID: ENSP00000479818

SEQ ID NO: 8545 - protein, 259 aa, Homo sapiens
  Payload ID: 1774;
  Gene Symbol: BNIP3;
  Gene Name: BCL2/adenovirus E1B 19kDa interacting prt 3;
  Uniprot ID:  Q12983;
  ENSP ID: ENSP00000357625
MGDAAADPPGPALPCEFLRPGCGAPLSPGAQLGRGAPTSAFPPPAAEAHPAARRGLRSPQLPSGAMSQNGAPGMQEESLQGSWVELHFSNNGNGGSVPASVSIYNGDMEKILLDAQHESGRSSSKSSHCDSPPRSQTPQDTNRASETDTHSIGEKNSSQSEEDDIERRKEVESILKKNSDWIWDWSSRPENIPPKEFLFKHPKRTATLSMRNTSVMKKGGIFSAEFLKVFLPSLLLSHLLAIGLGIYIGRRLTTSTSTF

SEQ ID NO: 8546 - protein, 219 aa, Homo sapiens
  Payload ID: 1774;
  Gene Symbol: BNIP3;
  Gene Name: BCL2/adenovirus E1B 19kDa interacting prt 3;
  ENSP ID: ENSP00000446145
SPGAQLGRGAPTSAFPPPAAEAHPAARRGLRSPQLPSGAMSQNGAPGMQEESLQGSWVELHFSNNGNGGSVPASVSIYNGDMEKILLDAQHESGRSSSKSSHCDSPPRSQTPQDTNRASETDTHSIGEKNSSQSEEDDIERRKEVESILKKNSDWIWDWSSRPENIPPKEFLFKHPKRTATLSMRNTSVMKKGGIFSAEFLKVFLPSLLLSHLLAIGLG

SEQ ID NO: 8547 - protein, 243 aa, Homo sapiens
  Payload ID: 1774;
  Gene Symbol: BNIP3;
  Gene Name: BCL2/adenovirus E1B 19kDa interacting prt 3;
  ENSP ID: ENSP00000487769
  MOD_RES (1)..(1): Any amino acid
XLPCEFLRPGCGAPLSPGAQLGRGAPTSAFPPPAAEAHPAARRGLRSPQLPSGAMSQNGAPGMQEESLQGSWVELHFSNNGNGGSVPASVSIYNGDMEKILLDAQHESGRSSSKSSHCDSPPRSQTPQDTNRASETDTHSIGEKNSSQSEEDDIERRKEVESILKKNSDWIWDWSSRPENIPPKEFLFKHPKRTATLSMRNTSVMKKGGIFSAEFLKVFLPSLLLSHLLAIGLGDGASPRCPG

SEQ ID NO: 8548 - protein, 219 aa, Homo sapiens
  Payload ID: 1775;
  Gene Symbol: BNIP3L;
  Gene Name: BCL2/adenovirus E1B 19kDa interacting prt 3-like;
  Uniprot ID:  O60238;
  ENSP ID: ENSP00000370003
MSSHLVEPPPPLHNNNNNCEENEQSLPPPAGLNSSWVELPMNSSNGNDNGNGKNGGLEHVPSSSSIHNGDMEKILLDAQHESGQSSSRGSSHCDSPSPQEDGQIMFDVEMHTSRDHSSQSEEEVVEGEKEVEALKKSADWVSDWSSRPENIPPKEFHFRHPKRSVSLSMRKSGAMKKGGIFSAEFLKVFIPSLFLSHVLALGLGIYIGKRLSTPSASTY

SEQ ID NO: 8549 - protein, 179 aa, Homo sapiens
  Payload ID: 1775;
  Gene Symbol: BNIP3L;
  Gene Name: BCL2/adenovirus E1B 19kDa interacting prt 3-like;
  Uniprot ID:  O60238;
  ENSP ID: ENSP00000428597
MNSSNGNDNGNGKNGGLEHVPSSSSIHNGDMEKILLDAQHESGQSSSRGSSHCDSPSPQEDGQIMFDVEMHTSRDHSSQSEEEVVEGEKEVEALKKSADWVSDWSSRPENIPPKEFHFRHPKRSVSLSMRKSGAMKKGGIFSAEFLKVFIPSLFLSHVLALGLGIYIGKRLSTPSASTY

SEQ ID NO: 8550 - protein, 60 aa, Homo sapiens
  Payload ID: 1775;
  Gene Symbol: BNIP3L;
  Gene Name: BCL2/adenovirus E1B 19kDa interacting prt 3-like;
  ENSP ID: ENSP00000428919
MSSHLVEPPPPLHNNNNNCEENEQSLPPPAGLNIRRRSCRRREGSRGFEEKCGLGIRLVQ

SEQ ID NO: 8551 - protein, 185 aa, Homo sapiens
  Payload ID: 1775;
  Gene Symbol: BNIP3L;
  Gene Name: BCL2/adenovirus E1B 19kDa interacting prt 3-like;
  ENSP ID: ENSP00000429171
EQSLPPPAGLNSSWVELPMNSSNGNDNGNGKNGGLEHVPSSSSIHNGDMEKILLDAQHESGQSSSRGSSHCDSPSPQEDGQIMFDVEMHTSRDHSSQSEEEVVEGEKEVEALKKSADWVSDWSSRPENIPPKEFHFRHPKRSVSLSMRKSGAMKKGGIFSAEFLKVFIPSLFLSHVLALGLGCGN

SEQ ID NO: 8552 - protein, 179 aa, Homo sapiens; identical to SEQ ID NO: 8549
  Payload ID: 1775;
  Gene Symbol: BNIP3L;
  Gene Name: BCL2/adenovirus E1B 19kDa interacting prt 3-like;
  Uniprot ID:  O60238;
  ENSP ID: ENSP00000429698

SEQ ID NO: 8553 - protein, 179 aa, Homo sapiens; identical to SEQ ID NO: 8549
  Payload ID: 1775;
  Gene Symbol: BNIP3L;
  Gene Name: BCL2/adenovirus E1B 19kDa interacting prt 3-like;
  Uniprot ID:  O60238;
  ENSP ID: ENSP00000429851

SEQ ID NO: 8554 - protein, 229 aa, Homo sapiens
  Payload ID: 1775;
  Gene Symbol: BNIP3L;
  Gene Name: BCL2/adenovirus E1B 19kDa interacting prt 3-like;
  ENSP ID: ENSP00000479522
MSSHLVEPPPPLHNNNNNCEENEQSLPPPAGLNSSWVELPMNSSNGNDNGNGKNGGLEHVPSSSSIHNGDMEKILLDAQHESGQSSSRGSSHCDSPSPQEDGQIMFDVEMHTSRDHSSQSEEEVVEGEKEVEALKKSADWVSDWSSRPENIPPKEFHFRHPKRSVSLSMRKSGAMKKGGIFSAEFLKVFIPSLFLSHVLALGLGIYIGKRLSTPCQHLLRERKSPWKCV

SEQ ID NO: 8555 - protein, 191 aa, Homo sapiens
  Payload ID: 1776;
  Gene Symbol: BAK1;
  Gene Name: BCL2-antagonist/killer 1;
  ENSP ID: ENSP00000353878
MASGQGPGPPRQECGEPALPSASEEQVAQDTEEVFRSYVFYRHQQQPSSTMGQVGRQLAIIGDDINRRYDSEFQTMLQHLQPTAENAYEYFTKIATSLFESGINWGRVVALLGFGYRLALHVYQHGLTGFLGQVTRFVVDFMLHHCIARWIAQRGGWVAALNLGNGPILNVLVVLGVVLLGQFVVRRFFKS

SEQ ID NO: 8556 - protein, 211 aa, Homo sapiens
  Payload ID: 1776;
  Gene Symbol: BAK1;
  Gene Name: BCL2-antagonist/killer 1;
  Uniprot ID:  Q16611;
  ENSP ID: ENSP00000363591
MASGQGPGPPRQECGEPALPSASEEQVAQDTEEVFRSYVFYRHQQEQEAEGVAAPADPEMVTLPLQPSSTMGQVGRQLAIIGDDINRRYDSEFQTMLQHLQPTAENAYEYFTKIATSLFESGINWGRVVALLGFGYRLALHVYQHGLTGFLGQVTRFVVDFMLHHCIARWIAQRGGWVAALNLGNGPILNVLVVLGVVLLGQFVVRRFFKS

SEQ ID NO: 8557 - protein, 153 aa, Homo sapiens
  Payload ID: 1776;
  Gene Symbol: BAK1;
  Gene Name: BCL2-antagonist/killer 1;
  Uniprot ID:  Q16611;
  ENSP ID: ENSP00000391258
MASGQGPGPPRQECGEPALPSASEEQVAQDTEEVFRSYVFYRHQQEQEAEGVAAPADPEMVTLPLQPSSTMGQVGRQLAIIGDDINRRYDSEFQTMLQHLQPTAENAYEYFTKIATRPAATPTACLRVASIGAVWWLFWASATVWPYTSTSMA

SEQ ID NO: 8558 - protein, 168 aa, Homo sapiens
  Payload ID: 1777;
  Gene Symbol: BAD;
  Gene Name: BCL2-associated agonist of cell death;
  Uniprot ID:  Q92934;
  ENSP ID: ENSP00000309103
MFQIPEFEPSEQEDSSSAERGLGPSPAGDGPSGSGKHHRQAPGLLWDASHQQEQPTSSSHHGGAGAVEIRSRHSSYPAGTEDDEGMGEEPSPFRGRSRSAPPNLWAAQRYGRELRRMSDEFVDSFKKGLPRPKSAGTATQMRQSSSWTRVFQSWWDRNLGRGSSAPSQ

SEQ ID NO: 8559 - protein, 163 aa, Homo sapiens
  Payload ID: 1777;
  Gene Symbol: BAD;
  Gene Name: BCL2-associated agonist of cell death;
  ENSP ID: ENSP00000378039
MFQIPEFEPSEQEDSSSAERGLGPSPAGDGPSGSGKHHRQAPGLLWDASHQQEQPTSSSHHGGRTSYSPSWESEDSENPSAGMLAEASAGMSAPAADSEAQHAENVKLEALGLWRSGVATAPTPRGRRTTKGWGRSPAPFGAARARRPPTSGQHSAMAASSGG

SEQ ID NO: 8560 - protein, 168 aa, Homo sapiens; identical to SEQ ID NO: 8558
  Payload ID: 1777;
  Gene Symbol: BAD;
  Gene Name: BCL2-associated agonist of cell death;
  Uniprot ID:  Q92934;
  ENSP ID: ENSP00000378040

SEQ ID NO: 8561 - protein, 64 aa, Homo sapiens
  Payload ID: 1777;
  Gene Symbol: BAD;
  Gene Name: BCL2-associated agonist of cell death;
  ENSP ID: ENSP00000438975
MGEEPSPFRGRSRSAPPNLWAAQRYGRELRRMSDEFVDSFKKGLPRPKSAGTATQMRQSSSWTR

SEQ ID NO: 8562 - protein, 51 aa, Homo sapiens
  Payload ID: 1777;
  Gene Symbol: BAD;
  Gene Name: BCL2-associated agonist of cell death;
  ENSP ID: ENSP00000439202
MGEEPSPFRGRSRSAPPNLWAAQRYGRELRRMSDEFVDSFKKGLPRPKSAG

SEQ ID NO: 8563 - protein, 157 aa, Homo sapiens
  Payload ID: 1777;
  Gene Symbol: BAD;
  Gene Name: BCL2-associated agonist of cell death;
  ENSP ID: ENSP00000440575
MFQIPEFEPSEQEDSSSAERGLGPSPAGDGPSGSGKHHRQAPGLLWDASHQQEQPTSSSHHGEGTSSPEERGHSNADAAKLQLDASLPVLVGSELGQGKLRPLPVTFAPHPETPPVPTALGSHLEYGRKYFPQAYAKRGSVLSPLEGGLTQIPFRCV

SEQ ID NO: 8564 - protein, 230 aa, Homo sapiens
  Payload ID: 1778;
  Gene Symbol: BAG1;
  Gene Name: BCL2-associated athanogene;
  Uniprot ID:  Q99933;
  ENSP ID: ENSP00000369026
MNRSQEVTRDEESTRSEEVTREEMAAAGLTVTVTHSNEKHDLHVTSQQGSSEPVVQDLAQVVEEVIGVPQSFQKLIFKGKSLKEMETPLSALGIQDGCRVMLIGKKNSPQEEVELKKLKHLEKSVEKIADQLEELNKELTGIQQGFLPKDLQAEALCKLDRRVKATIEQFMKILEEIDTLILPENFKDSRLKRKGLVKKVQAFLAECDTVEQNICQETERLQSTNFALAE

SEQ ID NO: 8565 - protein, 160 aa, Homo sapiens
  Payload ID: 1778;
  Gene Symbol: BAG1;
  Gene Name: BCL2-associated athanogene;
  ENSP ID: ENSP00000369029
MNRSQEVTRDEESTRSEEVTREEMAAAGLTVTVTHSNEKHDLHVTSQQGSSEPVVQDLAQVVEEVIGVPQSFQKLIFKVLQQIFIEDLLGIGHSQTPGQVSDLKSYDDGRNLTIFDEAHGQSSLARKISEGNGNTVVSTWNTRWLPGHVNWEKEQSTGRG

SEQ ID NO: 8566 - protein, 48 aa, Homo sapiens
  Payload ID: 1778;
  Gene Symbol: BAG1;
  Gene Name: BCL2-associated athanogene;
  ENSP ID: ENSP00000417576
MNRSQEVTRDEESTRSEEAMRSTTFMLPPSRAAVNQLSKTWPRLLKRS

SEQ ID NO: 8567 - protein, 150 aa, Homo sapiens
  Payload ID: 1778;
  Gene Symbol: BAG1;
  Gene Name: BCL2-associated athanogene;
  ENSP ID: ENSP00000419092
MNRSQEVTRDEESTRSEEVTREEMAAAGLTVTVTHSECRAPGNEKHDLHVTSQQGSSEPVVQDLAQVVEEVIGVPQSFQKLIFKGKSLKEMETPLSALGIQDGCRVMLIGKKNSPQEEVELKKLKHLEKSVEKIADQLEELNKELTGIQQ

SEQ ID NO: 8568 - protein, 345 aa, Homo sapiens
  Payload ID: 1778;
  Gene Symbol: BAG1;
  Gene Name: BCL2-associated athanogene;
  ENSP ID: ENSP00000420514
LAQRGGARRPRGDRERLGSRLRALRPGREPRQSEPPAQRGPPPSGRPPARSTASGHDRPTRGAAAGARRPRMKKKTRRRSTRSEELTRSEELTLSEEATWSEEATQSEEATQGEEMNRSQEVTRDEESTRSEEVTREEMAAAGLTVTVTHSNEKHDLHVTSQQGSSEPVVQDLAQVVEEVIGVPQSFQKLIFKGKSLKEMETPLSALGIQDGCRVMLIGKKNSPQEEVELKKLKHLEKSVEKIADQLEELNKELTGIQQGFLPKDLQAEALCKLDRRVKATIEQFMKILEEIDTLILPENFKDSRLKRKGLVKKVQAFLAECDTVEQNICQETERLQSTNFALAE

SEQ ID NO: 8569 - protein, 94 aa, Homo sapiens
  Payload ID: 1778;
  Gene Symbol: BAG1;
  Gene Name: BCL2-associated athanogene;
  ENSP ID: ENSP00000488937
MNRSQEVTRDEESTRSEEVTREEMAAAGLTVTVTHSECRAPGNEKHDLHVTSQQGSSEPVVQDLAQVVEEVIGVPQSFQKLIFKVLQQIFIEDL

SEQ ID NO: 8570 - protein, 345 aa, Homo sapiens; identical to SEQ ID NO: 8568
  Payload ID: 1778;
  Gene Symbol: BAG1;
  Gene Name: BCL2-associated athanogene;
  ENSP ID: ENSP00000489189

SEQ ID NO: 8571 - protein, 63 aa, Homo sapiens
  Payload ID: 1778;
  Gene Symbol: BAG1;
  Gene Name: BCL2-associated athanogene;
  ENSP ID: ENSP00000489401
DGCRVMLIGKKNSPQEEVELKKLKHLEKSVEKIADQLEELNKELTGIQQRWGFTMLARLVSNS

SEQ ID NO: 8572 - protein, 211 aa, Homo sapiens
  Payload ID: 1779;
  Gene Symbol: BAG2;
  Gene Name: BCL2-associated athanogene 2;
  Uniprot ID:  O95816;
  ENSP ID: ENSP00000359727
MAQAKINAKANEGRFCRSSSMADRSSRLLESLDQLELRVEALREAATAVEQEKEILLEMIHSIQNSQDMRQISDGEREELNLTANRLMGRTLTVEVSVETIRNPQQQESLKHATRIIDEVVNKFLDDLGNAKSHLMSLYSACSSEVPHGPVDQKFQSIVIGCALEDQKKIKRRLETLLRNIENSDKAIKLLEHSKGAGSKTLQQNAESRFN

SEQ ID NO: 8573 - protein, 575 aa, Homo sapiens
  Payload ID: 1780;
  Gene Symbol: BAG3;
  Gene Name: BCL2-associated athanogene 3;
  Uniprot ID:  O95817;
  ENSP ID: ENSP00000358081
MSAATHSPMMQVASGNGDRDPLPPGWEIKIDPQTGWPFFVDHNSRTTTWNDPRVPSEGPKETPSSANGPSREGSRLPPAREGHPVYPQLRPGYIPIPVLHEGAENRQVHPFHVYPQPGMQRFRTEAAAAAPQRSQSPLRGMPETTQPDKQCGQVAAAAAAQPPASHGPERSQSPAASDCSSSSSSASLPSSGRSSLGSHQLPRGYISIPVIHEQNVTRPAAQPSFHQAQKTHYPAQQGEYQTHQPVYHKIQGDDWEPRPLRAASPFRSSVQGASSREGSPARSSTPLHSPSPIRVHTVVDRPQQPMTHRETAPVSQPENKPESKPGPVGPELPPGHIPIQVIRKEVDSKPVSQKPPPPSEKVEVKVPPAPVPCPPPSPGPSAVPSSPKSVATEERAAPSTAPAEATPPKPGEAEAPPKHPGVLKVEAILEKVQGLEQAVDNFEGKKTDKKYLMIEEYLTKELLALDSVDPEGRADVRQARRDGVRKVQTILEKLEQKAIDVPGQVQVYELQPSNLEADQPLQAIMEMGAVAADKGKKNAGNAEDPHTETQQPEATAAATSNPSSMTDTPGNPAAP

SEQ ID NO: 8574 - protein, 325 aa, Homo sapiens
  Payload ID: 1780;
  Gene Symbol: BAG3;
  Gene Name: BCL2-associated athanogene 3;
  ENSP ID: ENSP00000410036
MQETPSSANGPSREGSRLPPAREGHPVYPQLRPGYIPIPVLHEGAENRQVHPFHVYPQPGMQRFRTEAAAAAPQRSQSPLRGMPETTQPDKQCGQVAAAAAAQPPASHGPERSQSPAASDCSSSSSSASLPSSGRSSLGSHQLPRGYISIPVIHEQNVTRPAAQPSFHQAQKTHYPAQQGEYQTHQPVYHKIQGDDWEPRPLRAASPFRSSVQGASSREGSPARSSTPLHSPSPIRVHTVVDRPQPMTHRETAPVSQPENKPESKPGPVGPELPPGHIPIQVIRKEVDSKPVSQKPPPPSEKVEVKVPPAPVPCPPPSPGPSAVP

SEQ ID NO: 8575 - protein, 457 aa, Homo sapiens
  Payload ID: 1781;
  Gene Symbol: BAG4;
  Gene Name: BCL2-associated athanogene 4;
  Uniprot ID:  O95429;
  ENSP ID: ENSP00000287322
MSALRRSGYGPSDGPSYGRYYGPGGGDVPVHPPPPLYPLRPEPPQPPISWRVRGGGPAETTWLGEGGGGDGYYPSGGAWPEPGRAGGSHQEQPPYPSYNSNYWNSTARSRAPYPSTYPVRPELQGQSLNSYTNGAYGPTYPPGPGANTASYSGAYYAPGYTQTSYSTEVPSTYRSSGNSPTPVSRWIYPQQDCQTEAPPLRGQVPGYPPSQNPGMTLPHYPYGDGNRSVPQSGPTVRPQEDAWASPGAYGMGGRYPWPSSAPSAPPGNLYMTESTSPWPSSGSPQSPPSPPVQQPKDSSYPYSQSDQSMNRHNFPCSVHQYESSGTVNNDDSDLLDSQVQYSAEPQLYGNATSDHPNNQDQSSSLPEECVPSDESTPPSIKKIIHVLEKVQYLEQEVEEFVGKKTDKAYWLLEEMLTKELLELDSVETGGQDSVRQARKEAVCKIQAILEKLEKKGL

SEQ ID NO: 8576 - protein, 421 aa, Homo sapiens
  Payload ID: 1781;
  Gene Symbol: BAG4;
  Gene Name: BCL2-associated athanogene 4;
  Uniprot ID:  O95429;
  ENSP ID: ENSP00000393298
MSALRRSGYGPSDGPSYGRYYGPGGGDVPVHPPPPLYPLRPEPPQPPISWRVRGGGPAETTWLGEGGGGDGYYPSGGAWPEPGRAGGSHQSLNSYTNGAYGPTYPPGPGANTASYSGAYYAPGYTQTSYSTEVPSTYRSSGNSPTPVSRWIYPQQDCQTEAPPLRGQVPGYPPSQNPGMTLPHYPYGDGNRSVPQSGPTVRPQEDAWASPGAYGMGGRYPWPSSAPSAPPGNLYMTESTSPWPSSGSPQSPPSPPVQQPKDSSYPYSQSDQSMNRHNFPCSVHQYESSGTVNNDDSDLLDSQVQYSAEPQLYGNATSDHPNNQDQSSSLPEECVPSDESTPPSIKKIIHVLEKVQYLEQEVEEFVGKKTDKAYWLLEEMLTKELLELDSVETGGQDSVRQARKEAVCKIQAILEKLEKKGL

SEQ ID NO: 8577 - protein, 155 aa, Homo sapiens
  Payload ID: 1781;
  Gene Symbol: BAG4;
  Gene Name: BCL2-associated athanogene 4;
  ENSP ID: ENSP00000430250
AYYAPGYTQTSYSTEVPSTYRSSGNSPTPVSRWIYPQQDCQTEAPPLRGQVPGYPPSQNPGMTLPHYPYGDGNRSVPQSGPTVRPQEDAWASPGAYGMGGRYPWPSSAPSAPPGNLYMTESTSPWPSSGSPQSPPSPPVQQPKVGDLNVVPLMCV

SEQ ID NO: 8578 - protein, 447 aa, Homo sapiens
  Payload ID: 1782;
  Gene Symbol: BAG5;
  Gene Name: BCL2-associated athanogene 5;
  Uniprot ID:  Q9UL15;
  ENSP ID: ENSP00000299204
MDMGNQHPSISRLQEIQKEVKSVEQQVIGFSGLSDDKNYKKLERILTKQLFEIDSVDTEGKGDIQQARKRAAQETERLLKELEQNANHPHRIEIQNIFEEAQSLVREKIVPFYNGGNCVTDEFEEGIQDIILRLTHVKTGGKISLRKARYHTLTKICAVQEIIEDCMKKQPSLPLSEDAHPSVAKINFVMCEVNKARGVLIALLMGVNNNETCRHLSCVLSGLIADLDALDVCGRTEIRNYRREVVEDINKLLKYLDLEEEADTTKAFDLRQNHSILKIEKVLKRMREIKNELLQAQNPSELYLSSKTELQGLIGQLDEVSLEKNPCIREARRRAVIEVQTLITYIDLKEALEKRKLFACEEHPSHKAVWNVLGNLSEIQGEVLSFDGNRTDKNYIRLEELLTKQLLALDAVDPQGEEKCKAARKQAVRLAQNILSYLDLKSDEWEY

SEQ ID NO: 8579 - protein, 488 aa, Homo sapiens
  Payload ID: 1782;
  Gene Symbol: BAG5;
  Gene Name: BCL2-associated athanogene 5;
  Uniprot ID:  Q9UL15;
  ENSP ID: ENSP00000338814
MRFHWLPTLSEPFDRNQELETCIRPLWTPSGSACETEHNKSMDMGNQHPSISRLQEIQKEVKSVEQQVIGFSGLSDDKNYKKLERILTKQLFEIDSVDTEGKGDIQQARKRAAQETERLLKELEQNANHPHRIEIQNIFEEAQSLVREKIVPFYNGGNCVTDEFEEGIQDIILRLTHVKTGGKISLRKARYHTLTKICAVQEIIEDCMKKQPSLPLSEDAHPSVAKINFVMCEVNKARGVLIALLMGVNNNETCRHLSCVLSGLIADLDALDVCGRTEIRNYRREVVEDINKLLKYLDLEEEADTTKAFDLRQNHSILKIEKVLKRMREIKNELLQAQNPSELYLSSKTELQGLIGQLDEVSLEKNPCIREARRRAVIEVQTLITYIDLKEALEKRKLFACEEHPSHKAVWNVLGNLSEIQGEVLSFDGNRTDKNYIRLEELLTKQLLALDAVDPQGEEKCKAARKQAVRLAQNILSYLDLKSDEWEY

SEQ ID NO: 8580 - protein, 447 aa, Homo sapiens; identical to SEQ ID NO: 8578
  Payload ID: 1782;
  Gene Symbol: BAG5;
  Gene Name: BCL2-associated athanogene 5;
  Uniprot ID:  Q9UL15;
  ENSP ID: ENSP00000391713

SEQ ID NO: 8581 - protein, 211 aa, Homo sapiens
  Payload ID: 1782;
  Gene Symbol: BAG5;
  Gene Name: BCL2-associated athanogene 5;
  ENSP ID: ENSP00000450497
MDMGNQHPSISRLQEIQKEVKSVEQQVIGFSGLSDDKNYKKLERILTKQLFEIDSVDTEGKGDIQQARKRAAQETERLLKELEQNANHPHRIEIQNIFEEAQSLVREKIVPFYNGGNCVTDEFEEGIQDIILRLTHVKTGGKISLRKARYHTLTKICAVQEIIEDCMKKQPSLPLSEDAHPSVAKINFVMCEVNKARGVLIALLMGVNNNE

SEQ ID NO: 8582 - protein, 1126 aa, Homo sapiens
  Payload ID: 1783;
  Gene Symbol: BAG6;
  Gene Name: BCL2-associated athanogene 6;
  Uniprot ID:  P46379;
  ENSP ID: ENSP00000211379
MEPNDSTSTAVEEPDSLEVLVKTLDSQTRTFIVGAQMNVKEFKEHIAASVSIPSEKQRLIYQGRVLQDDKKLQEYNVGGKVIHLVERAPPQTHLPSGASSGTGSASATHGGGSPPGTRGPGASVHDRNANSYVMVGTFNLPSDGSAVDVHINMEQAPIQSEPRVRLVMAQHMIRDIQTLLSRMECRGGPQPQHSQPPPQPPAVTPEPVALSSQTSEPVESEAPPREPMEAEEVEERAPAQNPELTPGPAPAGPTPAPETNAPNHPSPAEYVEVLQELQRLESRLQPFLQRYYEVLGAAATTDYNNNHEGREEDQRLINLVGESLRLLGNTFVALSDLRCNLACTPPRHLHVVRPMSHYTTPMVLQQAAIPIQINVGTTVTMTGNGTRPPPTPNAEAPPPGPGQASSVAPSSTNVESSAEGAPPPGPAPPPATSHPRVIRISHQSVEPVVMMHMNIQDSGTQPGGVPSAPTGPLGPPGHGQTLGQQVPGFPTAPTRVVIARPTPPQARPSHPGGPPVSGTLQGAGLGTNASLAQMVSGLVGQLLMQPVLVAQGTPGMAPPPAPATASASAGTTNTATTAGPAPGGPAQPPPTPQPSMADLQFSQLLGNLLGPAGPGAGGSGVASPTITVAMPGVPAFLQGMTDFLQATQTAPPPPPPPPPPPPAPEQQTMPPPGSPSGGAGSPGGLGLESLSPEFFTSVVQGVLSSLLGSLGARAGSSESIAAFIQRLSGSSNIFEPGADGALGFFGALLSLLCQNFSMVDVVMLLHGHFQPLQRLQPQLRSFFHQHYLGGQEPTPSNIRMATHTLITGLEEYVRESFSLVQVQPGVDIIRTNLEFLQEQFNSIAAHVLHCTDSGFGARLLELCNQGLFECLALNLHCLGGQQMELAAVINGRIRRMSRGVNPSLVSWLTTMMGLRLQVVLEHMPVGPDAILRYVRRVGDPPQPLPEEPMEVQGAERASPEPQRENASPAPGTTAEEAMSRGPPPAPEGGSRDEQDGASAETEPWAAAVPPEWVPIIQQDIQSQRKVKPQPPLSDAYLSGMPAKRRKTMQGEGPQLLLSEAVSRAAKAAGARPLTSPESLSRDLEAPEVQESYRQQLRSDIQKRLQEDPNYSPQRFPNAQRAFADDP

SEQ ID NO: 8583 - protein, 1132 aa, Homo sapiens
  Payload ID: 1783;
  Gene Symbol: BAG6;
  Gene Name: BCL2-associated athanogene 6;
  Uniprot ID:  P46379;
  ENSP ID: ENSP00000354368
MEPNDSTSTAVEEPDSLEVLVKTLDSQTRTFIVGAQMNVKEFKEHIAASVSIPSEKQRLIYQGRVLQDDKKLQEYNVGGKVIHLVERAPPQTHLPSGASSGTGSASATHGGGSPPGTRGPGASVHDRNANSYVMVGTFNLPSDGSAVDVHINMEQAPIQSEPRVRLVMAQHMIRDIQTLLSRMETLPYLQCRGGPQPQHSQPPPQPPAVTPEPVALSSQTSEPVESEAPPREPMEAEEVEERAPAQNPELTPGPAPAGPTPAPETNAPNHPSPAEYVEVLQELQRLESRLQPFLQRYYEVLGAAATTDYNNNHEGREEDQRLINLVGESLRLLGNTFVALSDLRCNLACTPPRHLHVVRPMSHYTTPMVLQQAAIPIQINVGTTVTMTGNGTRPPPTPNAEAPPPGPGQASSVAPSSTNVESSAEGAPPPGPAPPPATSHPRVIRISHQSVEPVVMMHMNIQDSGTQPGGVPSAPTGPLGPPGHGQTLGQQVPGFPTAPTRVVIARPTPPQARPSHPGGPPVSGTLQGAGLGTNASLAQMVSGLVGQLLMQPVLVAQGTPGMAPPPAPATASASAGTTNTATTAGPAPGGPAQPPPTPQPSMADLQFSQLLGNLLGPAGPGAGGSGVASPTITVAMPGVPAFLQGMTDFLQATQTAPPPPPPPPPPPPAPEQQTMPPPGSPSGGAGSPGGLGLESLSPEFFTSVVQGVLSSLLGSLGARAGSSESIAAFIQRLSGSSNIFEPGADGALGFFGALLSLLCQNFSMVDVVMLLHGHFQPLQRLQPQLRSFFHQHYLGGQEPTPSNIRMATHTLITGLEEYVRESFSLVQVQPGVDIIRTNLEFLQEQFNSIAAHVLHCTDSGFGARLLELCNQGLFECLALNLHCLGGQQMELAAVINGRIRRMSRGVNPSLVSWLTTMMGLRLQVVLEHMPVGPDAILRYVRRVGDPPQPLPEEPMEVQGAERASPEPQRENASPAPGTTAEEAMSRGPPPAPEGGSRDEQDGASAETEPWAAAVPPEWVPIIQQDIQSQRKVKPQPPLSDAYLSGMPAKRRKTMQGEGPQLLLSEAVSRAAKAAGARPLTSPESLSRDLEAPEVQESYRQQLRSDIQKRLQEDPNYSPQRFPNAQRAFADDP

SEQ ID NO: 8584 - protein, 1077 aa, Homo sapiens
  Payload ID: 1783;
  Gene Symbol: BAG6;
  Gene Name: BCL2-associated athanogene 6;
  Uniprot ID:  P46379;
  ENSP ID: ENSP00000354875
MEPNDSTSTAVEEPDSLEVLVKTLDSQTRTFIVGAQMNVKEFKEHIAASVSIPSEKQRLIYQGRVLQDDKKLQEYNVGGKVIHLVERAPPQTHLPSGASSGTGSASATHGGGSPPGTRGPGASVHDRNANSYVMVGTFNLPSDGSAVDVHINMEQAPIQSEPRVRLVMAQHMIRDIQTLLSRMECRGGPQPQHSQPPPQPPAVTPEPVALSSQTSEPVESEAPPREPMEAEEVEERAPAQNPELTPGPAPAGPTPAPETNAPNHPSPAEYVEVLQELQRLESRLQPFLQRYYEVLGAAATTDYNNNHEGREEDQRLINLVGESLRLLGNTFVALSDLRCNLACTPPRHLHVVRPMSHYTTPMVLQQAAIPIQINVGTTVTMTGNGTRPPPTPNAEAPPPGPGQASSVAPSSTNVESSAEGAPPPGPAPPPATSHPRVIRISHQSVEPVVMMHMNIQDSGTQPGGVPSAPTGPLGPPGHGQTLGQQVPGFPTAPTRVVIARPTPPQARPSHPGGPPVSGTLQGAGLGTNASLAQMVSGLVGQLLMQPVLVAQGTPGMAPPPAPATASASAGTTNTATTAGPAPGGPAQPPPTPQPSMADLQFSQLLGNLLGPAGPGAGGSGVASPTITVAMPGVPAFLQGMTDFLQATQTAPPPPPPPPPPPPAPEQQTMPPPGSPSGGAGSPGGLGLESLSPEFFTSVVQGVLSSLLGSLGARAGSSESIAAFIQRLSGSSNIFEPGADGALGFFGALLSLLCQNFSMVDVVMLLHGHFQPLQRLQPQLRSFFHQHYLGGQEPTPSNIRMATHTLITGLEEYVRESFSLVQVQPGVDIIRTNLEFLQEQFNSIAAHVLHCTDSGFGARLLELCNQGLFECLALNLHCLGGQQMELAAVINGRIRRMSRGVNPSLVSWLTTMMGLRLQVVLEHMPVGPDAILRYVRRVGDPPQPLPEEPMEVQGAERASPEPQRENASPAPGTTAEEAMSRGPPPAPEGGSRDEQDGASAETEPWAAAVPPEWVPIIQQDIQSQRKVKPQPPLSDAYLSGMPAKRRKLRSDIQKRLQEDPNYSPQRFPNAQRAFADDP

SEQ ID NO: 8585 - protein, 1132 aa, Homo sapiens; identical to SEQ ID NO: 8583
  Payload ID: 1783;
  Gene Symbol: BAG6;
  Gene Name: BCL2-associated athanogene 6;
  Uniprot ID:  P46379;
  ENSP ID: ENSP00000365131
